United States Patent Application Publication US 2013/0129668 A1 - sequence listing, part 2

SEQ ID NO: 15367 - DNA, 122 bp, Homo sapiens
aagctgcagaacctctgtgcattcaacagtcacttcctgcgtttttgtgccattgtcacacgttgtgcttcagagacgccagaagacctgggcaaagacgtgagaactgcagccatcagctg

SEQ ID NO: 15368 - DNA, 122 bp, Homo sapiens
gtgttcacctgtgggagagagttcacttttcagggagcgggaataaaggaaaacgattgtcgagtgcacgtgatttaaattaagtcctggcctccatcaaagtggtgttgggaaccatctgg

SEQ ID NO: 15369 - DNA, 122 bp, Homo sapiens
gtgccagaaaagtctggacctcagactactttccagattcatgttcttaaattcattccacgagaagaatcttgtgggatacagagttggcccttgaacaacaagggtttgaactgcttgga

SEQ ID NO: 15370 - DNA, 122 bp, Homo sapiens
attccatatggctccaggtgtgcattctgtagagtcgggctggcggcctagcagagaatgcgactggaaggagaaaacgggggaaaacgggggggaaagcagaggagtcatcccagcacgga

SEQ ID NO: 15371 - DNA, 122 bp, Homo sapiens
cgctgagccgccggccccccgagcgccacggccggagctgcggcggcggcatcatggccccgaccctgctccagaagctcttcaacaaaaggggcagcagcggcagctccgcggcggcgtct

SEQ ID NO: 15372 - DNA, 122 bp, Homo sapiens
tgcttcgtgtggcctgggagactcgggaccttctgtcccctcttcccgaggacccaggggcgatgcccagagctgtcaccacccggggtctcagtttctagcaggctgtgcagggtaccgcc

SEQ ID NO: 15373 - DNA, 122 bp, Homo sapiens
ggctcttgctgcgagggcggaactcatcactcatggcccgcatggcctccaggatggtctcgtgcatgttctgggccaccacagagtcatccacctgcatccagaactccccgggccccgtc

SEQ ID NO: 15374 - DNA, 122 bp, Homo sapiens
ttcaaatggtactttttgcagctaccatttaagaaactagcacttttcaagttgtagtatcgaggaagaatatccacagttatctgaaaaggctcttgggctcaatccatcctcctgcttca

SEQ ID NO: 15375 - DNA, 122 bp, Homo sapiens
ttctttgactcggaaagggaactccctgaccccttgcacttcccaagtgaggcaatgcctcgccctgcttcggctcgtgcacgatacgtgcacccactgacctgcgcccactgtctggcact

SEQ ID NO: 15376 - DNA, 122 bp, Homo sapiens
cccgctcagcccataggctgcctttttattcaccgagcgactgcgggcgcttgcgtgaggcgcggccagagccactgacatacccgccgaccaataacagatgccgcagtagcacgttcgct

SEQ ID NO: 15377 - DNA, 122 bp, Homo sapiens
gggtggcggacgggcagaggcggtcctcacttcccagatggggcggcggccgggcagaggcggtcctcacttcccagacggggtggcggccgggcagaggcactcctcacttcccagacggg

SEQ ID NO: 15378 - DNA, 122 bp, Homo sapiens
aagtcattgctaagtaatgattatttttatctgtgtagaaagatcatccatggccaggctcggtggctcccacctgtaatcccagcactttgcggggtcaaggtaggtagatcacctgaggt

SEQ ID NO: 15379 - DNA, 122 bp, Homo sapiens
aaagaggctggagtatggggtgatcttgggcttgtaaccgaatccaccagccgggcaggacgctgattggctgaggagtgcacttgccagggcccacgcccccattctgcctgccttctcag

SEQ ID NO: 15380 - DNA, 122 bp, Homo sapiens
ccaggcgcgcagccgaagcccagtgccaaggaggccggagactcgggtgcccgcgcatcccgaaaacagcctctgaggggtcctctgagcatccttccagcgtgtttgggaggcaaactcgt

SEQ ID NO: 15381 - DNA, 122 bp, Homo sapiens
aaaagcactccaaggagggcgagcaccaactccctcccaccccaatgggcgctgccagcccggcactgtggggctccaagctcagcaccaggtgaagaaccagtgtctgccggacgacggac

SEQ ID NO: 15382 - DNA, 122 bp, Homo sapiens
gggtcgcgccgactggcgtgtacgtggttgtgcggtgggtatggaggtgtgtgcacggcgcgggggaccctgctgtgcctgcagtcagtccttcccagcctgccaacctcgagcagccgcct

SEQ ID NO: 15383 - DNA, 122 bp, Homo sapiens
gaactccctgcagtaagcatcaaatctaaatcagtaaacaaatactagggttatagagatcgagaagtgggttttgattttcagccttttggatctagatctctggaatcgagcagaaaatt

SEQ ID NO: 15384 - DNA, 122 bp, Homo sapiens
ctgctaaaggctgaccattccaaatactgtcaatgcgatgctggcatcctgtgagatgagcgggaaaaataccttggaagcactggttacccacaacactttgaaatacttaattgggttta

SEQ ID NO: 15385 - DNA, 122 bp, Homo sapiens
tttatttgatcggtaaggcagggactgccatcattccccattttatagacagaggacagacggccccatggctccgtgtcgtgtccaagggatgggctggcacctcttggaccaggcttacc

SEQ ID NO: 15386 - DNA, 122 bp, Homo sapiens
catacaagaacgctaaaatttttgttttatgtcaaactgatggcaggctgtgtatattcccgccttagagaagtgagttgaaatataccttttaaaaacagcaacttggcctggcccggtgg

SEQ ID NO: 15387 - DNA, 122 bp, Homo sapiens
acctcatgatccgcctacctcggcctcccaaagtgctgggattacaggcgtgagccactgcgcccggctggtggggagttgatttctatgtaattcccgattattatctacggcttgtgtga

SEQ ID NO: 15388 - DNA, 122 bp, Homo sapiens
ggcactggcttttgataacagccatttttgttaagtacaaaaaactttgctgactggccccgccctaaatcattgccttgtaagaaaggagccctgtcagaacaaaaacaatcatgctgtac

SEQ ID NO: 15389 - DNA, 122 bp, Homo sapiens
aaaatcattgatttagttttaagttctacctattgcaacaggagttctccatccttgttacgtgttagtagtgtcagggaagacttaaaaattaccagtgcctgggtccctctccagacctt

SEQ ID NO: 15390 - DNA, 122 bp, Homo sapiens
ggtgcgcactgcgcgcaggtctagccaggaggccggcaaagacagccagaggtgtgccttcgaccgccaggcgctccgtgctggcagccgggaggccgcaggggcccgggcgggcgggcgac

SEQ ID NO: 15391 - DNA, 122 bp, Homo sapiens
cggcccagctcggagcacgtgcgtcgtccggcccagcctggcgggctattcccaggcccgcgtggtcctcgaaggccccagtcctcctgcgccatggagaccccggcctcgcgacctccccc

SEQ ID NO: 15392 - DNA, 122 bp, Homo sapiens
ggaccccaactgctcctgcgccgctggtaaggaacgccgggttccgtgcctggggatgctcgattcccagacaccatagagagtgttcctgggtttgagaaggtcgtattttgagatctcaa

SEQ ID NO: 15393 - DNA, 122 bp, Homo sapiens
ctcgctggcgtggtgatgagaccggggcttgtccttccagtgtagctttcagtccgactgcggagtggaggcactggctcccgggcttactctcctgggctattgggcagcttactcagcct

SEQ ID NO: 15394 - DNA, 122 bp, Homo sapiens
ccgcttcagtccacttcagtgaatgactttcactatccaccgaattgcctgcgtcagaaacgcggttttcctcactctgcacctggagtaaaacgcgatcccaggtcaagctctatggactc

SEQ ID NO: 15395 - DNA, 122 bp, Homo sapiens
gaataaatgaaatttctcaaataggcaaaaatgcatatcataaaacaaagccatgttggtcgatgttgacatcatgcatattagcatgccagtagtgtgataacaagaaaggatagagatgg

SEQ ID NO: 15396 - DNA, 122 bp, Homo sapiens
gcttagctctggaggcaggcatctgacctgggttcacagccaggctctgctgcctaagagcgttgtggtcttgggcgattcatctacctggcaggaaccttagtttcctggtctgcgtaatg

SEQ ID NO: 15397 - DNA, 122 bp, Homo sapiens
ctctcaggccctcccctacctggttgctgggtctcctgggcagggctggcccgggcttgacgtcacagggcacttaggtcagagttataattaaccgaggctcagcagagggggaggaaggc

SEQ ID NO: 15398 - DNA, 122 bp, Homo sapiens
gtaagaaaatcactccttgaaaactgtgagatcatagccttttcctatcataacaaattacgcttatgcatgcctactgcattagaacatcccaacacagctgttctgtctttggcatcctt

SEQ ID NO: 15399 - DNA, 122 bp, Homo sapiens
tgtagatagtggctagaggcagggttgggtggggtggactggaacctagttcagaaactacgaaaggacctgacttctatggggaacagacacagagagtttcagatggcatcaaacaggtt

SEQ ID NO: 15400 - DNA, 122 bp, Homo sapiens
ggcggacgcggaggagccccgagtctcacaaccaaggggtgggaaggaaaagggacagagcgagacagagcgcccccgagaaacacaggcgcacaaaaaaagacagaaggaaaaacggaact

SEQ ID NO: 15401 - DNA, 122 bp, Homo sapiens
cccggacctgcaccatctggtacaacagccatggccatgggaagcccagcaggtccaggccgagatggccacgcacgggacctacacacgggatcccgcagacaaagctcaaaaaatgtcaa

SEQ ID NO: 15402 - DNA, 122 bp, Homo sapiens
ctgcgccgtgccccgccccgcgcctcctgtcggcgcgtgcgcattgacttacccgtgccgcgcggacgcactactgtcatttgccgccaaaaccccgcactcaggagtcctggcgggtgcag

SEQ ID NO: 15403 - DNA, 122 bp, Homo sapiens
ggagggtcctgaccacttaactgctatgctgtattgtcacattagattttcttcccaatacgcccaaagtttttggtggaatcatttagagtttccacatttttatggctccgaaaataatt

SEQ ID NO: 15404 - DNA, 122 bp, Homo sapiens
ggcgaggagggaagggaaaggggacgagcagggacgaggagccgcaggcggcgaaagaaccgggaaggaagaaaatagatcagggagctggagaggagaaagaactgctctctggagacagg

SEQ ID NO: 15405 - DNA, 122 bp, Homo sapiens
gaatgggtgcatcggtgtcaaatggccctccaccagggttgtatctatccatcctcccaccggcggtgtgtgggaaaactggcttccccaccaatacggcgtttcaggcaatgttcttattt

SEQ ID NO: 15406 - DNA, 122 bp, Homo sapiens
cgggaggccagctcccatgctgggagtacactcatgccactcaagtatactgggaggaatcgaggcatcccgccaatcatagcacccatctgcatgccctgagagtgagccaccttggaagc

SEQ ID NO: 15407 - DNA, 122 bp, Homo sapiens
atcaggctcccaactgccagtcctctggtgttctcagctgtcctgtgttctgccttccctcgggcatacgtgagtcagaatgtcagcaccattaaaggaccagagcgccaagtttcttaata

SEQ ID NO: 15408 - DNA, 122 bp, Homo sapiens
gtggaaccgcgaaaagttcgcgccatttgcagtgggggaagagcctggcccctcctgttccgggatagtaacctggaattcaattggtgagatggacagcctgttagccaggactccatttc

SEQ ID NO: 15409 - DNA, 122 bp, Homo sapiens
tcctccttccctccatgcccctcagtttcttctgtcgactttcaaaagaagcctctaaaacggaagagccagctgagattttggaatacgcgtggtactgtctgcctgatgactaaaaagag

SEQ ID NO: 15410 - DNA, 122 bp, Homo sapiens
gccgctttcaaggtgtggattttggctccttgagcctgtctgagcgaggggtggcagcgccggcgccccagaatccgggacagaagggtcccaagagtcgcgcttggtgaggtgagagtccc

SEQ ID NO: 15411 - DNA, 122 bp, Homo sapiens
gaaccgtgaagtttgctggcagcatatacatatctctggccttatgagggctcaccctagcgtcacccatagcaccctgcttttattgtcagtgttcccttatatgttcacagtcactggaa

SEQ ID NO: 15412 - DNA, 122 bp, Homo sapiens
atctgtgaccaccctctctttcgggtgtcccgccatagccttggggctgctccgtgggtccggggctctctcggcgtcctcttaccactcgcttggctgcgggccttctgcagtctctaggc

SEQ ID NO: 15413 - DNA, 122 bp, Homo sapiens
gtgtggtcatcagggaatcatttacctaagtcttcttaatgctgcttagtgaatatttagcgtgctatagtaaatacaagctaaccactaaattggaggggaaggagggagaacaaagaggc

SEQ ID NO: 15414 - DNA, 122 bp, Homo sapiens
ttcccaccctgactcagctttccttccacgagctcctatttcttgccgggcagaagccgccgcggtacccgcttcaccgggcatgctcagtcctccggccaggctttgactgcgggacgcca

SEQ ID NO: 15415 - DNA, 122 bp, Homo sapiens
cagtgggcggagccgctccatggcaacgggggagggcccaggccccaggccccaggctcacgttccaaatctaaggtgggttagggttttccgaggtctgaacttcaacctgggcgttcaga

SEQ ID NO: 15416 - DNA, 122 bp, Homo sapiens
ggcgcttggagagtgggaaggatttgtccttgtgtggaacaagaatagaggatcctaatacgagggctcagcctgctttggcgtactccaagaaagccccttggaggtctgactgctccgct

SEQ ID NO: 15417 - DNA, 122 bp, Homo sapiens
ctgcttcctgttaagcctttatggaaaacctcggagcttccgggagatccgtcccctgtgcggctcttccctgcactctctctcatccagttcgaggcctctttatggcagcaagtggggac

SEQ ID NO: 15418 - DNA, 122 bp, Homo sapiens
ttggcggcccctatggcggagctaacctgcctcttgggcatcctggtggcggagagggcgcgtgccggctgtctgcgggccgcggctgccgagagccttggcgaagctgggctgcctggcgg

SEQ ID NO: 15419 - DNA, 122 bp, Homo sapiens
tgtcctgcctgggcctcagtttccccctgtgtgagcagacaccataggcataatggctttcgccacctcataggaagtgtgtgggaacccaaatgatgcacaaacagcacccgccctagaag

SEQ ID NO: 15420 - DNA, 122 bp, Homo sapiens
tcttgacaccaagggattgtcttcttatttcttaaagccttccttctcatcctccataaacgtctcttccctgttttaggtttttcatagtctcctcaaggctcacgcaatggaagctcgag

SEQ ID NO: 15421 - DNA, 122 bp, Homo sapiens
ccggctgcgcggggcagttgtgcgcacttgggttcttcacgcgggacacacgtggaacgccgacccctgcgcccctggccgctggcaactggcaaggccgggaacagaaagtgtagggacag

SEQ ID NO: 15422 - DNA, 122 bp, Homo sapiens
tctgacagcttaaaatttaaccagtacaaacattatgccttaaggctaggcccacgtttacgtgcaaatgccccacaaggggtaagacaaaatttctgcctctgtggaaataatttatcaac

SEQ ID NO: 15423 - DNA, 122 bp, Homo sapiens
caatttgcaacgtagaaacccacgaaagtaattacaaacttgttaaccgctgggcactgtcgccctggagcgctcctaacggactttgcaaggcccagtacacgggggctgccgcgagcggg

SEQ ID NO: 15424 - DNA, 122 bp, Homo sapiens
tccccagcacaccctcattacatgtgtctgtctggcctgatctgtgcatctgctcggagacgctcctgacaagtcgggaatttctctatttctccactggtgcaaagagcggatttctccct

SEQ ID NO: 15425 - DNA, 122 bp, Homo sapiens
gcgccttaggagaccgatattagattaatcttcctgcaagaggcaaaccgctctgaacagcggaatttatcatttagatccttgcccccttctcgtcctctcgcctctccttggggagcgcc

SEQ ID NO: 15426 - DNA, 122 bp, Homo sapiens
ttaagtggctgaggccaggatttagcccagagttgtgatttccaacctcctcctgcggcccgcagattgacaggcacactcagttccagagctgctggcctctggggcatctctgaggctga

SEQ ID NO: 15427 - DNA, 122 bp, Homo sapiens
ctccgacccctgaccccatccaggataccaagccctgacaactcattcatttccgggttgcggctccccccggaaatcgtctggggtggggatggggtcccgtaagaccccctggtctggcc

SEQ ID NO: 15428 - DNA, 122 bp, Homo sapiens
tttggaagaattgtttgtctctgctgctgacagtgcagcctgaatcctgttttgttatttcgccgtccgcgtgttctgtcaaagaccagtggccttctgccctcatctgctgcctgttttgt

SEQ ID NO: 15429 - DNA, 122 bp, Homo sapiens
ccgttcttatgatagcgagttctcacgagatctgatggttttataagtgccagttcctcccgcccgctctggtgaagaaggggttcgctccgccttctgctatgattgtaaatttcctgaga

SEQ ID NO: 15430 - DNA, 122 bp, Homo sapiens
agaagctagaaaaggcagggagccgattcatcccttaagcctccagaagggacatagccccgctggcaccttgattttagcccagtgagatcctcttaggaattttggcaaccagaactata

SEQ ID NO: 15431 - DNA, 122 bp, Homo sapiens
ataaaaggcttggcagccagtctcagcctgagttcaccgttgcaaaggaactccaggcatcgcagcacaacgaactcactaggacaagcggctccgcatggggctgggggctggacgcccgc

SEQ ID NO: 15432 - DNA, 122 bp, Homo sapiens
caagaagggaactctgtggaaggatagctatctcccaacacggagggaaggcccaggcgtcgcccagccactccttgctgtcacccctggacaaaacagatggagaggtgaaaacggagagg

SEQ ID NO: 15433 - DNA, 122 bp, Homo sapiens
agccagtcaaagtggaggctccggaatacatccccataggagatggccctaaaacccccgcgaagaaaaagatgaagtccaagaagaaggtaaagcagccagtcattgaggagccggctctg

SEQ ID NO: 15434 - DNA, 122 bp, Homo sapiens
accctgtaattttttttcttttctatttttttaaatgtggccagggagctcgtctctctccgtgtcacagtgggatccgcctggcagccgccgggagctgcagccaatgtgttaggacttca

SEQ ID NO: 15435 - DNA, 122 bp, Homo sapiens
actttatcacagatatacatgcaaaggaaaaaacagtatattagggtttggtactatttgcggttttaggccttcactgggggttttggatcccatcctacaggaataatggggtgctcctg

SEQ ID NO: 15436 - DNA, 122 bp, Homo sapiens
cccggtttccctctgactcaggctgaggcggctgcccctgtgctggtgccatgtctagtccgcaggccccacaccggtgacctgccctcatctcatctcctgtgagtccgcgagtccacggc

SEQ ID NO: 15437 - DNA, 122 bp, Homo sapiens
gggatgagaactcagctcttcaggccccattgaaattccaagctcccaggggagtgttgacgaaaatgtggctggggcacagtaaggagatccgatggggacagtggcctctttggttgctt

SEQ ID NO: 15438 - DNA, 122 bp, Homo sapiens
ccaaagcggcgcggaccccggcagggcaccgtcggaaacacgctccgcgggcgccgagcccgagacactgacagacccacggagaacgtttccaaacaggattatagcttttaaccgggcct

SEQ ID NO: 15439 - DNA, 122 bp, Homo sapiens
cgagccccgcagccgcctctccgccgctggtcgggctggcggcccctggtcggctctgcacgcacctgctagcggccgcggccggacaacttgcgaaatccccgctccagagacgtggactg

SEQ ID NO: 15440 - DNA, 122 bp, Homo sapiens
ttgtcagcactacccacaatgagggcctaatgctaagaagggcagggcagtgctaggccacgcagagaggctggcactgccgcagaacaccacagcgggaaacggactttttctaccactga

SEQ ID NO: 15441 - DNA, 122 bp, Homo sapiens
tcagctttctcgaatctccaaaacaaaagcacctctcatgtcaggttccacccgagcctccgtcccccaatgctgttgaagcttcattctgaaatggtgaggtctgtaaaagcaggtctcag

SEQ ID NO: 15442 - DNA, 122 bp, Homo sapiens
cacttgatcttgaagacattctcgtcacaggaaatgggctacctgccagctcgtccattccgttgctaacctccaggtgtctcttctctgcactcgtgcttccatctgctgagcagaaaggt

SEQ ID NO: 15443 - DNA, 122 bp, Homo sapiens
gaggagctggcgagcgccctgaggagggattccgggcaggcgttttccctggagcagctccggccgctactagccagctctctgccgctagccgcccgctacctgcagctggacgccgcacg

SEQ ID NO: 15444 - DNA, 122 bp, Homo sapiens
tttcattgccctgttgccttgtggaagaaaaaggtaccttccttggtttgaccttggattcgaactgacacccaatgagataggcaggaagtggtagagtttgagaacttggcctgcaacag

SEQ ID NO: 15445 - DNA, 122 bp, Homo sapiens
cgggcatggactacgcgcaatgccttcagcctgcggtgggctcaggaaccgaggcgctgccgctgctgctgcagtcactaaaggaaagagattggcgagtcagggaatcttccccaatgcca

SEQ ID NO: 15446 - DNA, 122 bp, Homo sapiens
ctgtgcctctgccatgcgcccactgggctgctcacagtgtgagacagctgggctggctggcgctgggggtgaacaacagcgccctgccctgtccagacgccggggctgaaaccccagcccca

SEQ ID NO: 15447 - DNA, 122 bp, Homo sapiens
tagcttaagtatcgaatgtttagtgcttgttaaatagacaacaaactactgaggaatgaacgggggaatagcacagctataaggccttcgtattgtataataatttttatcttgtactctat

SEQ ID NO: 15448 - DNA, 122 bp, Homo sapiens
tatgaatggtgtggttcctaccccagaggggctcacagtcttgtgagtctgattttgcctcgggtttagaaaggactgtggaacatctcagagcctctcagtaggagcagaaaagttactgg

SEQ ID NO: 15449 - DNA, 122 bp, Homo sapiens
ggaggaagagttcaggcacccggacagatcctaatggtctttctgatttttctttcccttcggtccgctttccccgcgacctcctccaccctcagtccgcctttcaaacgtcgtccgcgggg

SEQ ID NO: 15450 - DNA, 122 bp, Homo sapiens
agataccaaattatgaacaggacctaaggccattgcaggcaagggtgaagtcacacaccccgcatgcaaagaatcgactgtcctcactgccaccaggtttttcttcttctctagcagccgaa

SEQ ID NO: 15451 - DNA, 122 bp, Homo sapiens
gttgccactaaatcctgattaagcatgacttatgcccccagctgttaacactgatacactcgcagtgccaagaccaggcgccattccccgggcacttatacacccctgtctgctaatgcccg

SEQ ID NO: 15452 - DNA, 122 bp, Homo sapiens
ggaaggactcgtataccaggaagctgccctccagcggggtccgcaggaactcagggcttccggggtcggcatccatgtcctggtcctcgtccaggaatccttccagggcttggggatgggtt

SEQ ID NO: 15453 - DNA, 122 bp, Homo sapiens
atccacccgcctaggcctcccaaagtgctaggattacagacataagccaccacacttgggcgatacagagggtttttatggcaacagcagtgcccagagtgagagacctctgtgtttcattc

SEQ ID NO: 15454 - DNA, 122 bp, Homo sapiens
tgagttgcaaatatacgtttctttaaaaatgatgcaaaaccctttgtccccacttgctgccgggatgagaggtaagcacggacccgcccaccctctgacatcgttagccagtgaagaccccg

SEQ ID NO: 15455 - DNA, 122 bp, Homo sapiens
gaaaagctcagtggggctggcggcaactctaggtctaacatccctcggaagttcgtgcagcggcctcgctgaaaatggctttacagcccggcagaaccctccgactccgcagcaggacctgc

SEQ ID NO: 15456 - DNA, 122 bp, Homo sapiens
actaggggtggagcgggaccaccgctcccctccccctctccccctggcgcggagccccggcgcagctgggagtcttggaaacctgactcccgcccaatcagcagggaggggaggagcagcgg

SEQ ID NO: 15457 - DNA, 122 bp, Homo sapiens
gtgataactcctttgggtttgttttcttccatgcaatagtccaaagtgaacagcttatctcgatgtctgactcatgcacacaggatgcttctatcctgtggttctgcaatgccctggggcct

SEQ ID NO: 15458 - DNA, 122 bp, Homo sapiens
ctccccgcacgcgtcctggacctcattggctgctggagctgccaattctagagggtggggcgtaccaaaagacgctccaggcgccagccgctgggtgcttcgcggttgaggaggcgcaggga

SEQ ID NO: 15459 - DNA, 122 bp, Homo sapiens
ggcctacgccgagagctaccaccagcacttcgcggcccacctggccgccgtggcgcagttcgagctgtgcgagcgcgacacctacatgctgctgctctgggtgcagaacctctaccccaagt

SEQ ID NO: 15460 - DNA, 122 bp, Homo sapiens
gaaaaacctgtttggggtctcgtggacgccatccctaaagcttgcttttgacccagcagtcgcctaggtgtccccctgggcgcatctggaaaagaaggagacggagttaaccagagggttag

SEQ ID NO: 15461 - DNA, 122 bp, Homo sapiens
tttctccaatgaaaaccctaaaggacgcaagtgctgatgtgaaaatacgcaaggggctcacggagcctctgggcagacagtacacgtctggaacttgtttaattgtgattgagtctgtcggt

SEQ ID NO: 15462 - DNA, 122 bp, Homo sapiens
gagccgttggagactttgtgcgtgagagcgacgagacctgatttcattttcccaggatatcgccagctcccggttgagaatggaacccagtgtgccagaactgcagcagggaggccgattca

SEQ ID NO: 15463 - DNA, 122 bp, Homo sapiens
ggttcaaaatcaatttccaaacagtctcctacatttttcccactgccatggggtcctgggcgtccgggcccccaatattcacgcactcgcaccacgcactcatattccctcaccccaccatc

SEQ ID NO: 15464 - DNA, 122 bp, Homo sapiens
acatgcctttctacagctgagttacgttccattgtgtggacggactgcagtgtgtttatccggccacaccctgaggtcagggctgcttgctggagacagactgcaatgttattagtgttagg

SEQ ID NO: 15465 - DNA, 122 bp, Homo sapiens
gaaatttaaatgaaatctcaaagcatagctgtgtgtaaaggcattaacatcaggtctggacgagaattgaatgtagggcatgtttccttggaaactgcaaagttaagaaaatacagaatgtt

SEQ ID NO: 15466 - DNA, 122 bp, Homo sapiens
agatagaaagagaggggctgaaacagaggaaggagggtaagagatgagaagttgggaagacgctaaaagacaacctgggaagagagatgtgcagatagagaggaaatgaaaggggagccgtc

SEQ ID NO: 15467 - DNA, 122 bp, Homo sapiens
cagtcttgaaattgtctggaacgggaaacggcaaacagcgagatatccgagcgagagtcccgccctgcatcagtttgcggaaccgccttggtagaaggagagaaggggagtggaggaagcac

SEQ ID NO: 15468 - DNA, 122 bp, Homo sapiens
agagggtctgactgcaagttgtccaggttcttggcgttttgaacaaagaattggacaaaacgcccagcaaagcaaagaaagaatgaaggaacaaaagaaggaaagcagggatgtattgaaaa

SEQ ID NO: 15469 - DNA, 122 bp, Homo sapiens
atgtgccctgtgggcctggcctgggtacccttggcggccttgctgggagtcgaccgggtgcgagcatgcagcaccagctgtaccagccccaggcgagggctggagggcccaaaggagggggc

SEQ ID NO: 15470 - DNA, 122 bp, Homo sapiens
agagggttagcgttagccttaagtgtgcgaatccgaggagcagcgacagactcgagaccacgctccttcctcgggaaggaggcggcacctcgcgtttgaggcccgcctgcgtttgaggcccg

SEQ ID NO: 15471 - DNA, 122 bp, Homo sapiens
ctccaggggtgtttgaaacgtgagctgttgtcaggcccagggccaaggatgctaaatgtccgggaaaatgcgcgcggcagccggccacactcaggacgatggtccgtccccgagagccagca

SEQ ID NO: 15472 - DNA, 122 bp, Homo sapiens
ctgttcttcctcacggctgcctacctgatgaccggcagcctgctgctgctgcagcgggtccgcgtggctctcccacagggcccccgggcacccggccccctgcagaccttgccagtggccgc

SEQ ID NO: 15473 - DNA, 122 bp, Homo sapiens
caatagggactggagaggaggttggaaaggtagggactacgccagcgcggaggaacactgcgggacttgagttaaatcatgtgatctcaaagagggcggagcgtcacgtggcgggtgcgcga

SEQ ID NO: 15474 - DNA, 122 bp, Homo sapiens
cgtggatgccccaccagcgtcccagatcccaggtctcagcaatttgggagactcacacagcgagaacctgcctgggactcggagatactggataaaagaaacagattcggaatatgtgaagc

SEQ ID NO: 15475 - DNA, 122 bp, Homo sapiens
tggtaatttctctccaaaccagccaacggacatagcaatgctgttaacagcagattataccgcttagccaagagtagtatcattctgtattagttattctaagcagtccctatagttaagat

SEQ ID NO: 15476 - DNA, 122 bp, Homo sapiens
cacggccgaagagaacacggcagtggggtgtgtgtcagcagcagtggcaccaccaaaccccggcaggcttcacgcagaaggcggcatttggggagaagttaaaggctgagcaggagccagcg

SEQ ID NO: 15477 - DNA, 122 bp, Homo sapiens
aaatggcaaagcagctgccagtctggatctccaaatgagtttatgaaggtgagctacccccgaacctgcacacacacatacccaggaaagctgcacacccaggaaagctacttaagtaaaaa

SEQ ID NO: 15478 - DNA, 122 bp, Homo sapiens
ggcagcgtttaaaaatagaggctgtgcgagtgcagcgtgtctccaacagtggtctacactcgagacactcggcagcgtttaaaaatacaggctgtgcgagtgcagcgtctctccaacagtgg

SEQ ID NO: 15479 - DNA, 122 bp, Homo sapiens
tttgcattcgtgctgtgtgcaggcagaataagagaactgaagtccaacttcaaccaaatacgcctgtttatcccagggctggagcaacagccctagcccttgaaaatggcttcagtgaaata

SEQ ID NO: 15480 - DNA, 122 bp, Homo sapiens
cctcattgggccagctccacgcccatcaccgccgcccccagacccactggttggtttgcgcgcccatctccaagggaagacgttagcaacccgaacgaagctaccttcccgagtccggctcc

SEQ ID NO: 15481 - DNA, 122 bp, Homo sapiens
cccgcccctggcgctgcagggggctgtggctgccccgcttattaaaaggcagctgcactgcggggtcggcgcagcccctcggaggggagtgggcgcgcagctgctcccgcttccagcccagc

SEQ ID NO: 15482 - DNA, 122 bp, Homo sapiens
aagggggggccgccgtggctggtgggcatgggtaccgccttttcttcctcttctccagcccgggaggagccacggttagtgaggaatgttaacaaagaggagacagcactggctaaacagag

SEQ ID NO: 15483 - DNA, 122 bp, Homo sapiens
aagcacacagaggaacaattacaaaagaataaatcagagtaatgattcgtatacatttaacgttccatgtgtttgagtgtttgttgaagcttttagtcccttatggtgcatttttattaagt

SEQ ID NO: 15484 - DNA, 122 bp, Homo sapiens
gttatgacaaacaaggatggaatcagctaaagacctggctacttaatcaccggccactgccgcccagaggactgtggggctgcctcttgaccggctgctggctaggaatctagaggagagag

SEQ ID NO: 15485 - DNA, 122 bp, Homo sapiens
tggggtgggcggggcttgaggcctgagtggagcgtaaaccctgattggctgtacggaaggcggcgacgtggccgaaggatgcccgtttgtgtctaaacggaggctcggccacaacgccactg

SEQ ID NO: 15486 - DNA, 122 bp, Homo sapiens
acttgagccctgggctggtccaggcgccaaaggcttctggaaggcccacctctaaggagccgaggattcgtgctccccgcaggctgcaaagccactaggctcagagggacccgccgcgaacc

SEQ ID NO: 15487 - DNA, 122 bp, Homo sapiens
ccacctgtggtttgcaaagggcctcagtcgagtcaggggcaggcggggcagatccgagcccggcgggaggggcgaggcgcgggggcgggcaggggcgagggtaggggcgctcagctggcagg

SEQ ID NO: 15488 - DNA, 122 bp, Homo sapiens
tggggccagctgctggaccgtggcgccacggccctggagctcatggtcctcaacgtgccccggctgatgacccaggactgcctgcagcagtcacggaaggtgggagactccccaaatatcac

SEQ ID NO: 15489 - DNA, 122 bp, Homo sapiens
ccaggttaatgaactttgttgggtcgaagccagatgggacactgctgttcaaacaaaacacgggtaattgtgggtcctgacttgtgaagacatatggaataaaacatctataaaaaccttta

SEQ ID NO: 15490 - DNA, 122 bp, Homo sapiens
aacattttcataaaaaataaatcatttaaagctgtatacgcctacaaattctctttattccggtgcactgcactggataaccaagtaccttagagattttattttgctaggaatacatattg

SEQ ID NO: 15491 - DNA, 122 bp, Homo sapiens
tcagtcttttgtatctagaggtggttctgctaattcacacaacacgttaaactgaacagtcgtgattcccagcttcattaccttgcaggaatgggaatgagagctgaatgtagggacaattt

SEQ ID NO: 15492 - DNA, 122 bp, Homo sapiens
ggcagccacccagtgaccacacagtgtattccaacacgacttggtttatttggtgtgttgcgtcaagggagagcaaacaatagaggaaaataaacttgataggatagtgtcatagggagccc

SEQ ID NO: 15493 - DNA, 122 bp, Homo sapiens
gcctcctcctgctgtggcttccaaagagacgtcaccagaggcggggctggcgcagggccacgaggcaggcgactgggtctctttgaccgggggtggcctcgcggcggcacgagactcagcat

SEQ ID NO: 15494 - DNA, 122 bp, Homo sapiens
gaagacagggggttgccccagtggaattccccagccttgcctagcagagcccattccttccgcccccagatgaagcagggagaggaagctgagtcaaagaaggctgtcagggagggaaaaag

SEQ ID NO: 15495 - DNA, 122 bp, Homo sapiens
gatgggagtgcgtccaaaggtggacagcaggtccccatccctggtgggagtgagactggacggcatcccccggaaaggtggtttgggccttggacaaggctagaggcaggagtccatgatgc

SEQ ID NO: 15496 - DNA, 122 bp, Homo sapiens
cgtccctgagatctgatttgctcgctgctgcgtccctgagatctgatttgctcgctgctgcgtccctgagatctgatttgcttgctgctgcgtccctgagacccaaccaagggcccagcaca

SEQ ID NO: 15497 - DNA, 122 bp, Homo sapiens
gtgagggggtggaagaagtgaggctggagaccaagtgcaaacttgccatatccccctcttcggccatgccccgaagccctagagcgcgcactcccggttcctccctaccaaaaatgccggcc

SEQ ID NO: 15498 - DNA, 122 bp, Homo sapiens
cttccctttacccatgctctcagctccagtccacttccagcaccaccttctcagctcaatcgagctcagggcagtcctcagatgggcttgcagacttgcaaactactacctcaaccgtgggg

SEQ ID NO: 15499 - DNA, 122 bp, Homo sapiens
cgccaagctccatcccctcctcctgcggcaccttcccctaacttcactcgttgcaagccacgcagaagggaaatgctctgaagaagacacacactccagtttcctgctccatcaggtcacaa

SEQ ID NO: 15500 - DNA, 122 bp, Homo sapiens
gcccagagcggggagggcgaggctgcggagctgggggttgggggtgttgccggggctgcgcgggtagggagtggtgggaggagaaggaagaggaaaggtgggaagccagttggggtctgagg

SEQ ID NO: 15501 - DNA, 122 bp, Homo sapiens
aaccccaccaccaaagctttgcttgtaaacaccagtcacttagtaacaccctccatcagtcgcctttgggctattattcatcaccgactaaccttaaaccaacttcatcttcacagggctcc

SEQ ID NO: 15502 - DNA, 122 bp, Homo sapiens
accgtggtcaccgaggtgggcggtgccagaggatctggcggcggggcggggcggggcgcgcgtcctggcttcgcccttccccggggcggggcctccggggaccgcggggccgttggtttcgg

SEQ ID NO: 15503 - DNA, 122 bp, Homo sapiens
cacacgcccattggcccgtcaccacgcatccccattggctgtggcggccagggacagggccgcgattggtccccacccctgtaacgaggtgccaggtctgttttctgacccagacaggaacc

SEQ ID NO: 15504 - DNA, 122 bp, Homo sapiens
agcttctgttgccgggccctggcctgttagcgaagcacgtgtgcatcccagcacagcccacgtcagcacgctaatacacagtgtccaccccagaacacacgtcagcaccccaatacagtgtg

SEQ ID NO: 15505 - DNA, 122 bp, Homo sapiens
taaagccctgtggtagtctgtaagcctggctgtctcctcggctttggtcaggatgtagcccggcagcactgacaataaatcagcttgcctgaacttgggtctattggcctcattcctttctc

SEQ ID NO: 15506 - DNA, 122 bp, Homo sapiens
attaaataatttgttcaaggtcacacagctaacaaatcatagagccaggcagtattcaaacgcgtgcattctggctccatccagagtttgcactattagccattaaacacaactttatattt

SEQ ID NO: 15507 - DNA, 122 bp, Homo sapiens
tccccgaggccagcatgaggctgccagctgacaacagcaccagggaaaggaggggggcaccgagacccagcccaagggatcccgcgagagaagagtcactggtcagagccacaggtgctcct

SEQ ID NO: 15508 - DNA, 122 bp, Homo sapiens
ttctttatggcttcttattctgtgagctgggaagacaaagtgcctctgtagacttgtgcacggcccaagtgtgggctgggagcagtgggtgtgggacccccatgagtaaagtggattggatt

SEQ ID NO: 15509 - DNA, 122 bp, Homo sapiens
atgcactcccccaacccgctgggcaggcttcagtatgaggaggctctggtactcagtaaacgtctgtgagctaacacacctccagctgagaaaggagtccataggaagtagccctcatgggt

SEQ ID NO: 15510 - DNA, 122 bp, Homo sapiens
tgacgatgggctgtggagggtcagcgggtcctgggcaccagccctctgtgcacagaatcacgtgcacctgctggggttgcccactccactgaccgcatccacccacagcactgtgagctcag

SEQ ID NO: 15511 - DNA, 122 bp, Homo sapiens
tctccctcccacacacattcccgaagcctccaggtgctgtcccagaccatggtgtccacgcgctcagctctgggagaacttttggggtctcactgccatgcgccctactggaacatgttctc

SEQ ID NO: 15512 - DNA, 122 bp, Homo sapiens
atttcccggctgtgcggtgtcccgggtcctcccaactcccgtagtcagggtaggtcccagcgcgacaaaagccaccacagatgtcccagggcgtctctcagtgacagaatacggaacagagg

SEQ ID NO: 15513 - DNA, 122 bp, Homo sapiens
gccaacgaggccctggtgaaggccctggagtaggcggtgcgtacccggtgtcccgaggcccggccaggggctgggcagggatgccaggtgggcccagccagctcctggggtcccggccacct

SEQ ID NO: 15514 - DNA, 122 bp, Homo sapiens
ctggctaatttttctgtttttagtagagacggggtttcactgtgttagccaggatggtctcgatctcctgacctcgtgatccacccacctcggccacccaaaatgctgggattacaggcgtg

SEQ ID NO: 15515 - DNA, 122 bp, Homo sapiens
tctgagatcagcaggtgattggtggaaggaaaggggaggtctgggaagcactcaggcatgcgcagttatctctgcatgctctctcatggctcacatatgcaaatttgggaggagtcagtctg

SEQ ID NO: 15516 - DNA, 122 bp, Homo sapiens
caattaagcttgcggtcttttttgaaacagctcgaaaggactgcgtggctatcatcgtggcgctaagactgagatggcaataacaccgatggcagaactgtaccagtattaattgtcatcac

SEQ ID NO: 15517 - DNA, 122 bp, Homo sapiens
gctgtgtgtccgctgtagttgtgcaggttaattctgcgcgagcgaaaacaccgagaaagacgttcaggcactggatatccacgcaggccttaaggaacccctgtgcagccttgtgccacgag

SEQ ID NO: 15518 - DNA, 122 bp, Homo sapiens
ggcgcgggaaccccgcttccttcccctcagctggagccagacctcaaacaaaaccccaatcgatgcacacagaaaactcctctgggccacgcttcccgcctcgccgaggtctccccagtctg

SEQ ID NO: 15519 - DNA, 122 bp, Homo sapiens
ttgagtagacaagtgaggtcccgccccctaggaggagctaacaccgcggaccgaatcaggcggatggtcgttaacaaatgaacccttaatcttttcagaggaggaaacatacacaaaggccc

SEQ ID NO: 15520 - DNA, 122 bp, Homo sapiens
agaagcagtggggcaggtcaaactaattaagtgttcctaaaagcagagctcaccaaataccgtagctgcagaataacaacaccaagagtcagccagcagcttagagtggtgcaccaagggga

SEQ ID NO: 15521 - DNA, 122 bp, Homo sapiens
ttcgttccagggaagagggagcagaacgaagatcagcagtggccctccagcggggctcgccgcccctaccccgttctcggttcctggactcatcagagcaaactgtccgggacacagggaga

SEQ ID NO: 15522 - DNA, 122 bp, Homo sapiens
tagtcagaggtggtgattgcttaaggctcagctaaaggagctcattttgctcctttgctgcgtctttcagtcattccatcagcatgagccactgcactttgtgccagtgtactctgtgcctc

SEQ ID NO: 15523 - DNA, 122 bp, Homo sapiens
gaaggcctggcagagcccatcgatgtccctggcagagtaggcagagcccccatggcccagcgccagcaggatctgccgctgcaacaccacgtccaggtacctgcggatgggcgaggtggccc

SEQ ID NO: 15524 - DNA, 122 bp, Homo sapiens
agaccacgtccaacaacgttttccccttcaagatcatccatatcagcaagaagcaccgcacgtggttcttctcggcctcctccgaggaggagcgcaaggtgactgggggtccgaggacgagt

SEQ ID NO: 15525 - DNA, 122 bp, Homo sapiens
gtgagagggtgagagaaatgaggctgagccccagctcagagctgggaagacccctgggatcgcccggcacagtgtggtcagggtcatttaaggccagcgacattttagtgatgggcagaggg

SEQ ID NO: 15526 - DNA, 122 bp, Homo sapiens
gcattcctcagcccttgagtggtcgatgcgactgggcgccttggagcagcgggtggtgctcgttggggaggctcgggccgcacaggagcccatggagtgggtgggagtctcaggcatggcgg

SEQ ID NO: 15527 - DNA, 122 bp, Homo sapiens
cttgttcttatacttttttagatagcggggagacaccaaacattcaggagttatatcagtcgtgatctgctctggtattaactgaggatctgggtttaaatgctgcatcttcagaaaggaaa

SEQ ID NO: 15528 - DNA, 122 bp, Homo sapiens
agagagagagagagagaagctgcttttgctcctcctccacccaccctctgagatgggtggcggctgacctcgcaggggacagtggttcgggcaggaaggagctgagtggcgtgggcgtggga

SEQ ID NO: 15529 - DNA, 122 bp, Homo sapiens
ccagagggggcagcggagaagaacttgcccaacttggcggcgcgggctggggcggctctgcgcctccgcgcccgcctccccggcctccgccttctcccctcccgcgagcctcctcccctccc

SEQ ID NO: 15530 - DNA, 122 bp, Homo sapiens
accaaggggtccagaccctgtccacactgctgcctggccgggccgcaggtggagctccggcgccctcgtgtggcccgtgtgtgcaggacctcagccgtgctgccccatgggaggatccaggg

SEQ ID NO: 15531 - DNA, 122 bp, Homo sapiens
gctcctgggatactgacaaccaaactacagttacttctatttagcccactgtgttctagacgggaatattctcaagaatctgactactcttatttcctttgtcacatgatccacacactaag

SEQ ID NO: 15532 - DNA, 122 bp, Homo sapiens
tctgcatttagacgaaaaaaaaaaaaggcaaacggaaacaacagaagcagtggcccgagacgtgagccacactgcttcaaagggatttaagagagttgtcccaaggcaggcggtcaactgcg

SEQ ID NO: 15533 - DNA, 122 bp, Homo sapiens
tcgtcccatggggcaggggcacaggtgcggggtgggcgcgcggggagctgagagacagggcggagggcaccccccggtatagagagaagaccctggccccggccctcccacccatcgacaag

SEQ ID NO: 15534 - DNA, 122 bp, Homo sapiens
gggacccgacatttttcagctctttgctattgaaataataaaccaccctgttctgtggcccgtgtctgagtctgcccattgctgcctcagctccagtagcactgccaggaacttaacttact

SEQ ID NO: 15535 - DNA, 122 bp, Homo sapiens
atgcagcaagaaggccggcacacagccccgcatcgtcttctgagcctgcctgctgcatcgcgcttgggtcaatccctggcccagctaagcatctgcagccaggggaggatgagactaggaaa

SEQ ID NO: 15536 - DNA, 122 bp, Homo sapiens
tcaatcatcctgcccatctctggtacccctatatcactcctttttttcaagaatacaatacgttgttgttaactatagtcaccatgctgtacaagatccctgaacttatgcctcctaactga

SEQ ID NO: 15537 - DNA, 122 bp, Homo sapiens
gtgccgctgccgtcggcctcgcgcagctcgcaccccgccgctgccacctgacgccccgtgcgaaccggggttcgaggggagaccctgatccatgccatctgagtacagattagtcgggactg

SEQ ID NO: 15538 - DNA, 122 bp, Homo sapiens
tgtcctgttttgctcccttgctattgccccgcgacatttcttacctggccttgctgcagccgtctccgctccggtctgctcccacgccgccccaggccgtcctccagcgacagcgagctgga

SEQ ID NO: 15539 - DNA, 122 bp, Homo sapiens
cgcgcagaggcgtccccacctcctgtgaacacttgtcagagacagcctcgaggcctgtgtcgctggggcacgcaagcttgccaatccctctgcccaatggcgcctgcgcagcgcgactcaga

SEQ ID NO: 15540 - DNA, 122 bp, Homo sapiens
cgatgcggcggctcagcaggttggcttcctcctccaccagcttcaggtgcaccttcagctcggtctcccgcgagtggggggcatcggccagctcctcggctgacagcgcgctgtccaggtcc

SEQ ID NO: 15541 - DNA, 122 bp, Homo sapiens
caggcggtaatcgcccaccaggacagctatgtggagacgcagcgggctgccatccaggagcgggagaagcagttccggctgcagtcgacgcgtgggaacctgctgctggagcaggagcggca

SEQ ID NO: 15542 - DNA, 122 bp, Homo sapiens
gggcctcgggttctctctctgtgaagtggccaaacaatcctgcctcccagggagcgagcacgcggcttgtccggggagaaaagagcaacaaatatttataaatccatcactgaggtggcgct

SEQ ID NO: 15543 - DNA, 122 bp, Homo sapiens
tgcatcttccactctgtctaagaatgtctgtggaacaatagagagtaggaggtcgagcaccggagcggcatttgatgtggccttctgctgctaattactggcatggggagccctgctctccc

SEQ ID NO: 15544 - DNA, 122 bp, Homo sapiens
cataagattttgaaatgtaacgaaacggaactgcttcggtccttctaagattatcctcaacgatcgaggcgaactctcaaaacggagttcctattttgatgggtcctgctctcggaaggagc

SEQ ID NO: 15545 - DNA, 122 bp, Homo sapiens
acatgcgtgctttcaatttaaaatttctaatgttttctcaagtgcattttacaactactgcggtttttgtttttccaaggaaggaagaggcatatgcaaattctcactggcaatctctagga

SEQ ID NO: 15546 - DNA, 122 bp, Homo sapiens
cggggagcttagcaacggttgctacggcccggagcgggcgccgccccgccccaccgcgcgcggtctgacgtcacttccgcccgcgacccccttccagacccgctcccgaaaccttgtcgaag

SEQ ID NO: 15547 - DNA, 122 bp, Homo sapiens
gcgtgggcgggaaccggggctgcccacggtgcttgcgggccagcgcgagttctgggtgggcgtgggctcggcggccctgcactcggagcggccggctggccccaccaccccgggcagtaagg

SEQ ID NO: 15548 - DNA, 122 bp, Homo sapiens
tgagcagcttcacgtagagcaggggatggctgagcgccgtcacgcccgcgcccagtgccacgaaaagagcctcagtggtcggggcgttgtccccagaccccaggccccctgacccgccatcc

SEQ ID NO: 15549 - DNA, 122 bp, Homo sapiens
tctctctgctgctgccaaaggatcccgcctggatgctcatcccgccaccgtcgcccaccccgcagctgcagaatggcagcaactgccacacacctaagcaacttggctggctattcgccctg

SEQ ID NO: 15550 - DNA, 122 bp, Homo sapiens
aaagtcccacttattttgatgcagtttttaacattatctccattcttctgctccacctgacgtgtatcccagaacttggcttaatgggagcaattagtcatcgtatgtggtcagaagacagg

SEQ ID NO: 15551 - DNA, 122 bp, Homo sapiens
acagcattcaaactaaggcagtctcttgaatgcaccaaaaaaagcaaaagtactatctcccgaaatcacttgccagaggtagtttttgaaacaagttgaactgtagatcacattttatcttt

SEQ ID NO: 15552 - DNA, 122 bp, Homo sapiens
gcctcgcgtccctcgggcccccagctccgcttgcagctcgtgggagaatcaagttaaactcggacgggactcctgccgcggccgccgctcctctttgttgttctcagtagtttcacggtcgc

SEQ ID NO: 15553 - DNA, 122 bp, Homo sapiens
agacagacacatcttgtccaggggccactcgttcttcctggccatggactgcatgatggccgtgaggaacgactgggggttgaagaagccggccagccacacggtggtgggcagggcaaagt

SEQ ID NO: 15554 - DNA, 122 bp, Homo sapiens
ggtggccggggcgtgggggggttcccggagacaaatgcgctgcttcctgcgcctcggaggcggtggcagagcggaaaccagccctccccttcccggggggggcgccgagggcggacacctcc

SEQ ID NO: 15555 - DNA, 122 bp, Homo sapiens
ccggatgggccgttgccttgggttacgaccacgctgggggcgggaccgcggcggaagtgacgtagcccaacaaagcctagcactggcgaggcggttcgtggcatctcctatccgctccgggc

SEQ ID NO: 15556 - DNA, 122 bp, Homo sapiens
aggagggtcgcgggagccgtgggcgctctcagcccggtgtccgcggtgtaggggttggggcgcgccgggcggcgccgtgagaaacggcgggtctccaggtgcggccgcgggcacctgtttct

SEQ ID NO: 15557 - DNA, 122 bp, Homo sapiens
ccatgtgtgacatgctgtctgttagggaggctcgttagagacccttcccagggctttactcggggctggtctcataggctgcctcgcttggtgccaccaagattccagccttcagaggaaag

SEQ ID NO: 15558 - DNA, 122 bp, Homo sapiens
aaaaattaaacaatcagtcaaattctctaatctgtgtttctggttcaaaatcctcttccccgtctttctaggtaaacttcagctattcaatccagaaaacgtagtatgttaatgattgaaca

SEQ ID NO: 15559 - DNA, 122 bp, Homo sapiens
ggaaggtttactcaaccataggcccgtgcctagtttttattggctagtgtatccgagtggcggtgcagcaggccagtcgcgtgcggcgcgagtgctttgggcgcagcccccggggccggggc

SEQ ID NO: 15560 - DNA, 122 bp, Homo sapiens
cacaacagttttctttcatgggtactggtgtttcttctagctctgtaccatggtaaccaccgaccttctattctgaggtgccacaacaaatttgaaatgtgtaagtattttttttcagaatt

SEQ ID NO: 15561 - DNA, 122 bp, Homo sapiens
ttgcaaaccttaattctcaaaacccttctgtaacaacatagacaggaagaccacttctagcgcttttccatttatttttatattcataattttattcgtttgttgggaaatttaaggcatat

SEQ ID NO: 15562 - DNA, 122 bp, Homo sapiens
agcccttccccctgctctgggaagcagagttgttttctgttggccctgaacaccgggccccgccacctgcccttagggccagccaggtggggcgtgattcaggaagtaaacaaggaggttgg

SEQ ID NO: 15563 - DNA, 122 bp, Homo sapiens
cccgcccgccgctgccaccgccgccgccgccaagcgccaggctgctgtggctgctgccggcgcctagcgagcactgcccgtgcctccgccactccggctccggctccggctccgacgcggac

SEQ ID NO: 15564 - DNA, 122 bp, Homo sapiens
ctacctgactggaccgaagctccaggagggacgaccccgcagccgctccgcccgaccccgcgaccccccaagacccagcctccttcagggctcccatgggcgggtggcgaggggagtccagc

SEQ ID NO: 15565 - DNA, 122 bp, Homo sapiens
gaccggtatgcggcgcaggatgagcctcagggcttctgttaagagtctgtctgagaaagccggtctgcgctgttcctcggtggcgaccttaattatgagatgagctaatgctttactgactt

SEQ ID NO: 15566 - DNA, 122 bp, Homo sapiens
agaaaagaaaaagaaaaaaaagacattacgttgcacctacaattttaacaaaaattaaaacgtggtcaataagtgtttgcgatgatgtagattaatacaagtggggggccaggcacggtggt

SEQ ID NO: 15567 - DNA, 122 bp, Homo sapiens
tcccgacagccagggccgaggcccagggcctgtggccgcgatctgctcccggaggcgccccgccccccgccacgcccagataaagccacgagccaggtgagggggacccctggggcacacct

SEQ ID NO: 15568 - DNA, 122 bp, Homo sapiens
ccagccttagctttggatcctattttgcataaaggggtactttgggtcttcgggttagcacgacttgccagttgggtaaatgtctgagaatgtttcctctgatgaattttataaacagccag

SEQ ID NO: 15569 - DNA, 122 bp, Homo sapiens
accaaatattcaccatctctccaacacccacgtcgccagaccatgcacttctgaacttcacgtggcctgggctcaggacttccatttagatgtcattttccatgagtctctggtccagatgg

SEQ ID NO: 15570 - DNA, 122 bp, Homo sapiens
gctagagcaaatttggggccggaccaggcagcactcggcttttaacctgggcagtgaaggcgggggaaagagcaaaaggaaggggtggtgtgcggagtaggggtgggtggggggaattggaa

SEQ ID NO: 15571 - DNA, 122 bp, Homo sapiens
cgatatgtaaagcagctggcagcgctgggcggggcctgggcgcgatgcaaatgaggagggcggggctggcccggggctccgcctccctcccccgcagctggggccagcggtgccaagcgcag

SEQ ID NO: 15572 - DNA, 122 bp, Homo sapiens
gctgatcaggctggtgaaatgtcatcggaggtgcagagtcacaggggacatgtgggtaggcgtgcacaaaggattcttttagcataatctggtgttttggggataggtgtggggagagaaat

SEQ ID NO: 15573 - DNA, 122 bp, Homo sapiens
caaacactgctctcttgatgctgaaatgccaaaccgaaggatttctgaggacctaaatcacggagcatcaatcttacaaagtgttggtccagagtcccatctcttccccaaccctggatacc

SEQ ID NO: 15574 - DNA, 122 bp, Homo sapiens
tcagcggagctccctctccgcagcgtgtgaggagggcgaaactatctccaagcttcttagcgtgtccgctggaaaccaatccccagcgtctccgacttggatgtcaacggcgggaatggacg

SEQ ID NO: 15575 - DNA, 122 bp, Homo sapiens
actaacgtcgctgctgcgttttgcaatcgcgccccgcgcatgcttcttggccccgtgtcccgctcctttaccctgcgggttcgagctccttgggctgagctttttggtttccttgggcttcc

SEQ ID NO: 15576 - DNA, 122 bp, Homo sapiens
ttttctcaggatgttcgagctcctagccgcctccgatgcccgaattaacggccccttctgcgcccccagggtcctacttgcacctctgctgggggcatttgtcaccgtctctaaaattgtgt

SEQ ID NO: 15577 - DNA, 122 bp, Homo sapiens
tggaaccaaggctaaccctgcctcaagcctatgaggacactgaagttttgatgaagaggacgttttcagatcaagaaaaaaatgtcccctgttcaatcttgctataactgcctgaggtttat

SEQ ID NO: 15578 - DNA, 122 bp, Homo sapiens
cgggattacagtgggaacaagatctaaagattctcttgcaattcggcgaggccgagggaacggggttttgcaaaagagaaaaggagctctgtgagggaggcgataactaaatcgggttttag

SEQ ID NO: 15579 - DNA, 122 bp, Homo sapiens
tttgtaactggagaagggtgcgggtcccggagggacatctccagctggcacctaactcctcggatcccggactgggagcccgagctcggatattgcaacggctgccccgtgggcaaaccgac

SEQ ID NO: 15580 - DNA, 122 bp, Homo sapiens
cctgtgctgggggtgagccgcccaagcctccatgaagggacgctcgtacaaagtgaagtccgggtacaaatggccagacgggaaacgcgccgcgctcgctccgcggcactcacagcgggggc

SEQ ID NO: 15581 - DNA, 122 bp, Homo sapiens
agtgttaagtgcaggaaggtgtctccagaagactcttgaggcccaggctcgccaatgtctcgagacaatagatttcaaaggtgatggctatgagccactcccatgcatgagagctctggtgg

SEQ ID NO: 15582 - DNA, 122 bp, Homo sapiens
tgggtaacaggtggcaagaaccttcaaagcgttttcagtatctctctcctgggaacttatcgaaaggacatagttcaaatgacagaaaatgctaaaggcaacacggtggtgtttgtgataat

SEQ ID NO: 15583 - DNA, 122 bp, Homo sapiens
cagagtggccactttggcagctttgtatgaagctaaatgtgcacacactgtaagaaccagcgatgcccaatcctagcgatccacccaaaataaaattacgctcacatgaaaccctgtatgtg

SEQ ID NO: 15584 - DNA, 122 bp, Homo sapiens
caaccaacgccgtttttttggttagctccttcttgccgaccaaccatgagctcccagattcgtcagaattattccaccgcggtggaggcagccgtcaaccgcctggtcagtttgcacctgcg

SEQ ID NO: 15585 - DNA, 122 bp, Homo sapiens
agtcctctgagcgtggcttgcccgtgctgtctcccctctgcaggaggaaaactccctcttcgtcatgaccaacgtgatcctcaccatgaaccagacacagggcctgtgccccgaggtaggag

SEQ ID NO: 15586 - DNA, 122 bp, Homo sapiens
ctggcttgaggcctcatagcccagcaccattccacgtggttcagctggccagctgcctgccgggacctggatgcggactgttcccaggtaggcaacagcaggaaatagtctaaggactcccc

SEQ ID NO: 15587 - DNA, 122 bp, Homo sapiens
ccggcccaactccagggcctgggctggcaggctgctgagatcaagcccccagaccctggtcggccacctcccacctccccggccccagcagtgtgccccttccccgggcgtctcgcctctgc

SEQ ID NO: 15588 - DNA, 122 bp, Homo sapiens
ctgtcagtgcactagtcactttggcttctcatatctctctgtcccaaactttgggttgcacgaattatgcacgtttcactcttgaatttgtaaatgcagctactaccaactattccttaatt

SEQ ID NO: 15589 - DNA, 122 bp, Homo sapiens
acacataaggcatcccttaggcggggtggatgggacttccacccagggaaggtgctggaccggtaggtggaagaggagctggtaaactttttcttatgagatgagtacttttaataggataa

SEQ ID NO: 15590 - DNA, 122 bp, Homo sapiens
agccaagattatctgctcctcaacctgaagtaacatatagattctgcctaattttagaaccggtgttagccaggtgtggtggctcacacctataatcccagcattttaggaggccaaggctg

SEQ ID NO: 15591 - DNA, 122 bp, Homo sapiens
cgacaagtcggctggggtccgggagcacgttccttcctcgagcctggtcctgagggagggcgcaggctgccgaggcggcaactctccctctcgcccaactccggagagcgtgaggccggccg

SEQ ID NO: 15592 - DNA, 122 bp, Homo sapiens
catgtgtgtttaatgaagtggaagccagcatgactgtggagtcttgctatcggcagctcacgtgtgcttcaagagcaatcacacaaaactccagtgtcaaaaagaaacctaggaaaaccagg

SEQ ID NO: 15593 - DNA, 122 bp, Homo sapiens
cagtgctgacacctgccttaccccttcccacaagccacagcccccgccagcagcgatgcccgggcactcaccacagccaccgcctgggactgcaggagttcggtggcagtcatcacggtgaa

SEQ ID NO: 15594 - DNA, 122 bp, Homo sapiens
actggtccgcgcatctctcccctcccccctcccgccaattatcctagcgtgtttgcaaggcgaccagattggaaagagtgtggtcagagtgaccccaagccacgctttaaaagttcagggta

SEQ ID NO: 15595 - DNA, 122 bp, Homo sapiens
gcagaagagtattaagaaagatgctcaagtcccatggcacagagcaaggcgggcagggaacggttatttttctaaataaatgctttaaaagaaaccagtctgacaaggcagtttctctcttt

SEQ ID NO: 15596 - DNA, 122 bp, Homo sapiens
gtcgcacagccagtgttttggggagctggaatttaccctggggcttgtctaactcgagtccgacttttaacagcaaaacagtaggagtccgatacacgcacacagtgggtacacagtagcga

SEQ ID NO: 15597 - DNA, 122 bp, Homo sapiens
taaaaaaataaaaatacagatacaccactgtgaaagaggtgttccaacattaattactgacgaggtagacagtggaaaacttggagaacactccatgaagagcacccacctgctacactatt

SEQ ID NO: 15598 - DNA, 122 bp, Homo sapiens
ggtgatccacttgccttggcctcccaaagtgctgggattacaggtgtgagccactacgcccggcccagatgctatatttctaaatagataaaaaacctagccaggcgcgttggctcatgcct

SEQ ID NO: 15599 - DNA, 122 bp, Homo sapiens
tagcaacatctggggacatgaagggaagaagggctgccttccaggtggagggaccgcatgcgcagggcgcccgccatctgcatcagagagcccgtgcgcctgtcaggaaagtgttggcggag

SEQ ID NO: 15600 - DNA, 122 bp, Homo sapiens
tgggcgaagcggcagggcagcctcgcggggctgggagtggatctgaggtcccgacccaggcggctcggagtgctccaggagccacctgggtctgcgggcgcagcgcggcggggcgggagcgg

SEQ ID NO: 15601 - DNA, 122 bp, Homo sapiens
cctgcactctctgagaccgcccttggttctcagaaagtgcggggccgggggccccatcaccgggaggggtgctgccctgaaatgctctttgcagaaagtttcagccgtaacaaatgagcacg

SEQ ID NO: 15602 - DNA, 122 bp, Homo sapiens
tggttttagaagctgagtgggtaaaacaaaccttccatgcaggaaaatctggagaccttacgtggaattcacttacagtaaagagggtggaaggatgcgtctctcttcctctttctctttct

SEQ ID NO: 15603 - DNA, 122 bp, Homo sapiens
ccggtgcagcgggggccggaagccccgggggaccctgggatggggaactgcggtggtttccgctgaggtttccgcagtggcatgcgggccggggtcgcggccgtggatctggccgtggaccg

SEQ ID NO: 15604 - DNA, 122 bp, Homo sapiens
gggtgtgaagtggccgcggggtgtcggcagagacaggcggaagtggcgtcccgatgaggacgaggtgcccgggcagccggggacgggggtgcgaggggcgtgtgcttctcctgttcctgcgt

SEQ ID NO: 15605 - DNA, 122 bp, Homo sapiens
tgcggctcgtcacatgcaacacgaggtggccaatacagggatgtggcagcaaatgagcagcgatttgcagagggcaacacttagggtggttttagccgattgtaacgtggagagctatttaa

SEQ ID NO: 15606 - DNA, 122 bp, Homo sapiens
gagggagagggaatgaatgggagagccaagagggaagagcgagccggggggaaaggagcgcgcagtgtttcctgctgcggttaggacctcacgccttgccagtacagagctcggtggcaaga

SEQ ID NO: 15607 - DNA, 122 bp, Homo sapiens
gttacagacctacagctcaggaagaaacactggacataaagtgggcagggcaaggacaaacgagtctgtggtgatggttgattttatgtatcaacttggctgtgctacactacccagttatt

SEQ ID NO: 15608 - DNA, 122 bp, Homo sapiens
tgtgagccaccacacccagcccaaagtatactcttaacccagggtgggcacacactgctacgatcaatgatggtgtgaggtaatagtgagtggtggggactgtggagggaatatggccaccg

SEQ ID NO: 15609 - DNA, 122 bp, Homo sapiens
ccaaaaacccagtcactaactaataaagctaagaaaagccccttgcaaacttttccaaaccggaagagaaggccctctccccaacctggggggctctagggggaaggggctggagttagcag

SEQ ID NO: 15610 - DNA, 122 bp, Homo sapiens
agaaaggaaagaactcccctggggtcttgcccagtttctgctcaccagaaggaccatagccgaggtcctcctcccagggcccggggctggggagcggaagccatcagtgggctcggaggaca

SEQ ID NO: 15611 - DNA, 122 bp, Homo sapiens
taatttaggcattggaggagctgtggttgtaacactctacaagatgggttttccggaagccgccaggtgagtgacattcagagttttgtgtgtcagttaatccttctgacttttcacagttg

SEQ ID NO: 15612 - DNA, 122 bp, Homo sapiens
ctgtctggcactccctagtgagatgaacccggtacctcagatggaaatgcagaaatcacccgtcttctgcgtagctcacgcagggacctgtagaccggagctgttcctattcggtcatcttg

SEQ ID NO: 15613 - DNA, 122 bp, Homo sapiens
tgggctttctgcggagggcgtggcggtggtggcagcggttctgggagagggaaaccccagcgccacttgtctatgggccgggacggcgtgcatctcactttgccggctctgcgctcttcctt

SEQ ID NO: 15614 - DNA, 122 bp, Homo sapiens
taagtcccatggaaagtggcagtggttgggctggactgtggctggaggatcaccgggcctcggttctcaagcaccatctgtctggctgcagctgggcccttcagctgggggccagtgttgct

SEQ ID NO: 15615 - DNA, 122 bp, Homo sapiens
agtaacgatacttgattcactggcatgcaacaataattaatttttgtaaagctccccaaacggtatttagcacatagtcgacagtcaattaataaaaaagtatgattaaatctacatcccct

SEQ ID NO: 15616 - DNA, 122 bp, Homo sapiens
cgcggccgcgccatttgcatttcaatgcgacccgcttgttgactcagtgcccggcgcttccgcagctcccaccagaatctgcctttgttggttttagctccggtcaagtccacttcttgcat

SEQ ID NO: 15617 - DNA, 122 bp, Homo sapiens
atttctgtgcctgtctctcctctggggccgcccacccggctcacatcctccgtgggacttcgcccatccgcacaggccagtcacctagtcacctattaggaggcccaaggagcaatttcaga

SEQ ID NO: 15618 - DNA, 122 bp, Homo sapiens
ggtgatccgctggccttggtctcccaaagtgctgggattatgggtgtgagccaccactcccgggccaggggctgccctgttttaagagccctctggatgccccacctctgctgccctctcat

SEQ ID NO: 15619 - DNA, 122 bp, Homo sapiens
ctctgccacctctccactctcagttcctgagtaagtgcagggatctggggagcagtcccccgacagctggaaggctctctagtgacacctatgttgtgggttttgtgccggggcctgcaaac

SEQ ID NO: 15620 - DNA, 122 bp, Homo sapiens
ttcccgcactgcccggtctgcgtgagcacaagctccctcgtggccaaggcaggattagggcggcaggagaagcgcgagaaggaggagcagacgcacagcgacccagcccggcctccgccaac

SEQ ID NO: 15621 - DNA, 122 bp, Homo sapiens
gtaacaagtggcagagttcaagtgtcacttgagatgaaacagcaaagcacttcaagtttacgtcccaccatctttcatcctaagcgaatcccgaatttgctcggtttcatttcagcagtaat

SEQ ID NO: 15622 - DNA, 122 bp, Homo sapiens
ccaggggcacgtgacagagcttaatcttgattgctggcactcaagaggaataaaagatggcgcagcagaagctggccaggcagctggatgattctggaacttggaaggcataatgagtgagg

SEQ ID NO: 15623 - DNA, 122 bp, Homo sapiens
ccccagggacagtgggggtagggtggggggagtggcaccttgcagccatcgacgtggggacgtcacgctctggtcccagtctcctgggaattcagccacgaggtcactggcattattcatca

SEQ ID NO: 15624 - DNA, 122 bp, Homo sapiens
ctgggaagtgctgctcagatctgggaagtcatttagcttggctgtgtgttctcaccactgcggaacagtatttaagcacaagatttctggcccaggtcattgaatgattgtggtgcactctg

SEQ ID NO: 15625 - DNA, 122 bp, Homo sapiens
gaaaaatgactatatttaaaaagaggcagactggataaagaaaatgtggtaaatatacaccgtggaatactacacaaccataaaaaataatgagatgatgtcctttgcagcaacatggatgg

SEQ ID NO: 15626 - DNA, 122 bp, Homo sapiens
agaaatacgctgttctcctttatctaagtgtgattaactacaatgcttgctctgcaaggtcgggatcacttttcatgaattctttctccgagtgcgtcttgcagggtcaggccctcccctcc

SEQ ID NO: 15627 - DNA, 122 bp, Homo sapiens
tctctacggacttcctcggtgatacccactcgtccatcttcgatgctaaggccggcattgcgctcaatgacaatttcgtgaagctcatttcatggtaagggggaaggagctggagacttaga

SEQ ID NO: 15628 - DNA, 122 bp, Homo sapiens
ccgaggggcatcgccatgttccacaccagcaggcaggagtctggcaatacttggtccatgcgcacaaacacccgctccaggttctcccggtagctctccattgagcagcgaccatatctgtt

SEQ ID NO: 15629 - DNA, 122 bp, Homo sapiens
catagtagagagtcccttaaattccccttataggccaggtgtggtggctcacacctgcaacgtgagcttcctttaggaacccgaggcaggattgcttgagctcaggagtctaagaccagcct

SEQ ID NO: 15630 - DNA, 122 bp, Homo sapiens
tgtggaaatacagagattggtatgatgacttggggtaaaggtgtggaagaatgctgggggcggccccacagataaatatcttattctggagccaggacaagagagggtttcagaacggggac

SEQ ID NO: 15631 - DNA, 122 bp, Homo sapiens
gggctggggcggagttagctcatttattagattggaattccaagaaggaagcttagaagccgtctagagcactcctgtgggcatgcagagcgcctagtgcgtgccaggtccccagtgcttga

SEQ ID NO: 15632 - DNA, 122 bp, Homo sapiens
tgtgggacacgtcatgggcagcgccctgacctgagccttcagatgggggagctcggagcccgtccagcctgctgcccagcagacccccacacgcgctgccccccagcccctgcagatggggt

SEQ ID NO: 15633 - DNA, 122 bp, Homo sapiens
gtctctcccatggggggcaccccgaagcggcaagaaggcccccgggggaagggaaaaggacgcaaggcttgaaaggggacgttgaggcagtcggataaaacttcccaccgaatacagtgcct

SEQ ID NO: 15634 - DNA, 122 bp, Homo sapiens
cctggtgtggctggagaggggtctgatccggcggggctgagctcggagctgggtctcctccgggcccggggttgcggcggggggcggtcactccccctccctgcctcagccccgcaccctcc

SEQ ID NO: 15635 - DNA, 122 bp, Homo sapiens
tctgctctcagagagctgtgatctagctgacagaacagacacactgcctcctgaggcgcacggggcacccaaaagacagccacgtgcagatctctgccagggggtcaaagcagctcataatg

SEQ ID NO: 15636 - DNA, 122 bp, Homo sapiens
catcgaaatcatcttgaggatgcctgaggtccacgtgaccaactaggatcttctggcattcgagaaggcagttgaaaggcccctgacgctccactgcatcaggagtccaaaggccagccaaa

SEQ ID NO: 15637 - DNA, 122 bp, Homo sapiens
tgcctggaggaggagaccgaggtccaagctaggaggttgagactggcttagagctcctcgcgcttggctcccgagccagcgcgcttttgccctaggccttcctggaggggcgaggagggcag

SEQ ID NO: 15638 - DNA, 122 bp, Homo sapiens
ggactgctttcccctggggcttcctgaggcgggtgtgtagggtccgtacttggagacttgcgtgtctctccgggtcttcgttctgccctcagccttgcttgtcggtttggctgcgtataggg

SEQ ID NO: 15639 - DNA, 122 bp, Homo sapiens
tgtccttgtaagtctgcaggtagcggtcaaccaggagggcgtggatgcggacccggatggcgtgctggcggatgaaggcaatcttgttctccagtctgttctcgatcacctgattcaggtct

SEQ ID NO: 15640 - DNA, 122 bp, Homo sapiens
cctcctccccaaagagaaaaggcgcaccggtgctcccaggcgggggccgtggagggcaggcggactaggagccagctttggggaccccgggggactctcttccaccaactggctagggactc

SEQ ID NO: 15641 - DNA, 122 bp, Homo sapiens
ccgtcccaccggcggaagcgagatctgcctagctactagacctgctgcctagctgtcattcggacaaaaaggggcggggctgtataattgtccaatcaggggcggcgccggaaaggagggta

SEQ ID NO: 15642 - DNA, 122 bp, Homo sapiens
tcagctgcgcccccccgcccccgcccccaccctacaatgtgaggattcggtgcaagaaagcgcagggagctggcggcttcccagcccgagagattgcatttgtatgccagagctgttcatga

SEQ ID NO: 15643 - DNA, 122 bp, Homo sapiens
tttcatgcttataccaaagaattaaatctgatctttaatatctgatattttcctggtactcgtactgataagggattattggaagtcagtcacagaatttggaaataaattctagtctctcc

SEQ ID NO: 15644 - DNA, 122 bp, Homo sapiens
tagcagaagtcttggaccgtagtatgatgtattgaagcaaactggtctttgaatgcagcccgatcagggccctaatcctgattccaaccctgtgtgattctgggcacatcacctaaacttta

SEQ ID NO: 15645 - DNA, 122 bp, Homo sapiens
agttcctagcctgggcctaggactggctgaccccgtgtgtggggccagggctcccgaacacgggtccaccggctgcacgagagtttccggggggccctacccttccgattcggcaggtttag

SEQ ID NO: 15646 - DNA, 122 bp, Homo sapiens
gcaggcgggtggctggggcgcctccacctcctcttcctaaagcggcgaggcgcagaggagcggcatcactcgagcccaggtcccagccaccaccactcacagcgctcggcgttcaggaagag

SEQ ID NO: 15647 - DNA, 122 bp, Homo sapiens
agagccgggtgcagtggcacgcacctgtagtccctgctacttgggaggttcagctgagcccggaagttcaagtgcagcctaggcaacagagcaagacctgcctctgaaaaaaaaaataagaa

SEQ ID NO: 15648 - DNA, 122 bp, Homo sapiens
atccaagctatttaaagacgcccgactggcctggaggggcggggccaccatgagagaggccgtcctgattgggctgagaaaggggcggagagaaacaaaacagatcgcacgccctcacctaa

SEQ ID NO: 15649 - DNA, 122 bp, Homo sapiens
acctttcgatcttttgtcagacatcttggcccttaatagctaaatttatttggtttaaagcggccacgggagaagcagggagggaaaatctttcgtcggtcattgggtggcctagataacag

SEQ ID NO: 15650 - DNA, 122 bp, Homo sapiens
ctgagaaaggtgcgttggagagtgggtcaggccaggtcatgagggccttcagacaaagctcgggatcttggttttatcatcagagcaatgagaattcattgaactacagataatgtgaattg

SEQ ID NO: 15651 - DNA, 122 bp, Homo sapiens
gggtaggaaaaccccaagtcgcgaagccttaacattcaactcacgtttggatctctcagacgagagtttttcaaaacaggtgcatttccttgggtagatcataaccactttttaaaaagtga

SEQ ID NO: 15652 - DNA, 122 bp, Homo sapiens
gcatcgaagccaccttcaggcgagtccagattgccggacacactctggcgccccacctcccgctcgaaggcttgtgcgtcccccgtcagggacagcacatggtgaaagctgaatggtgactg

SEQ ID NO: 15653 - DNA, 122 bp, Homo sapiens
acgcggggtccgagaccagcctagctgaggcctgcacagcgccgggaaagacgcagagtccgagaccagcctagctgagtcctgcatacctaactccgccgaggacttacattctgatttca

SEQ ID NO: 15654 - DNA, 122 bp, Homo sapiens
caacacttgggggtggcagggagaagaggggatgaaggcactgtttcccacagcaagaaccgtttaatgtagcctggggcactccgaaagccattccctgcagccctcgttcttgctgtgtg

SEQ ID NO: 15655 - DNA, 122 bp, Homo sapiens
ccacttggtaggggagtgcatgtttccctgcatcttcaccagcactgggtgttatggtcgcgttggatttctgctgtggtgcccggtgtgtaatggggcctacacctgcttgcccacctgct

SEQ ID NO: 15656 - DNA, 122 bp, Homo sapiens
cgggccctgtcccgctgggcgcgggcgatgccattcgtcacgctctattattgtaggcagcgcaccccggggctcggttcccacactgcgcctgaggcctggggcctgagcgtgggccgcac

SEQ ID NO: 15657 - DNA, 122 bp, Homo sapiens
ggtctgaagcgaaaggcaagaaaagctctgcccttaggaacggggtgtcactgcgcggctcgcaggcacctctctttgacctatttataatctgcgccttattctccgcccccaaaggctgc

SEQ ID NO: 15658 - DNA, 122 bp, Homo sapiens
aggggcgccaggtgtgcgggcggtggcggctgcggagggcgcggctttgtgcgctggggccggccggggtgcgcgcgtgcgcggcaggactgctgcgagggaccccgccgccccggaggagg

SEQ ID NO: 15659 - DNA, 122 bp, Homo sapiens
ccaggaaaggcaaacccctcgaagttggaacaagcttggcttaatgaaataatcaaaaggcgagaaaggttggtgtgtggggaaaacagttggaagctggggaggcaggtaggggtcagatc

SEQ ID NO: 15660 - DNA, 122 bp, Homo sapiens
gaggcgcgagcgggaaccggggctgcacgcggctgcaggccagcgcgagttccaggtaggcgcgcgctcggcaggcccggcgcttggcgggcgctgccggccccaggcagtgaggggcttag

SEQ ID NO: 15661 - DNA, 122 bp, Homo sapiens
gagaaggagctgaagaaaagtgagccccaactgcgtccagcaacccagctccatccttgccgcggctggtgcccgagcgtctactggggagggagaggagggacccagggaggccgggggca

SEQ ID NO: 15662 - DNA, 122 bp, Homo sapiens
gactctacatttttcaatcaagcccctggaaataagggcgggacttcatttagatcaggacggggcttaggaaacggaggcggcccctaaggcgaggtcagaactaaggggcgcacggattg

SEQ ID NO: 15663 - DNA, 122 bp, Homo sapiens
gaatgctaaggacgaaaaaccggtgaccagaaggcaaccaggaaaggctttgctgacctccggagtggtggagttggaggttctgggaaggcgactagggagccaggcaggggcggggtggg

SEQ ID NO: 15664 - DNA, 122 bp, Homo sapiens
ccggccagcgtagactggcagaaacgctgcctgaccctggaaactcagcttttccggttccgcctacaggccagcaagataagggagctgctggctgacaaggtgagtccctcagagcaggg

SEQ ID NO: 15665 - DNA, 122 bp, Homo sapiens
aaaccagtgctgaaggtccatcctcatgtaaaatgctctgtccactggcccaagggtgcccggccaggtgctctggggcaccgggtgctcctgccacggtcgtgacgtgttaccgcccacca

SEQ ID NO: 15666 - DNA, 122 bp, Homo sapiens
aaaccgccgctttcaaatcgccaatcaaattcttccttggcttcgagtctctcagccggccgcgctctccgatgcccagccctcctggaaccacctcgcctgtgacgtaggtggagcgcgca

SEQ ID NO: 15667 - DNA, 122 bp, Homo sapiens
caggttctccctgctgtttcatttcttcaagctccctacctggaggggtcttctgcatagcggtacaacctcctgccttgtgtttccctgaaggggctcggtgatggagtcagggatggagc

SEQ ID NO: 15668 - DNA, 122 bp, Homo sapiens
ttttatatatagacgaggacgctggctctgggaggagtaaagccgtgcagcagtaactcccgtgcagcagtaactcccgtgcagcagtaactgcagccgtgcagagtaaactcccagcacag

SEQ ID NO: 15669 - DNA, 122 bp, Homo sapiens
atcaaacaagataaaattaggtagccattggatctccccaaattaagaagtccgataggccgggcgctgtggcttctgcctgtaatcccagcactttgggaggccgaggtgggtggatcacg

SEQ ID NO: 15670 - DNA, 122 bp, Homo sapiens
accaccctggtctaagcctcctctgggctctccacagcctcctaacaggtgtccacatgtcgtgagctgctcaaggtcagacagaaccaggtccacccacctttgtgtctgtccacaagatc

SEQ ID NO: 15671 - DNA, 122 bp, Homo sapiens
tccggactcgcccgcgggccgggcggagccagctacctccaggcgaccctacccaccccgcgattctattcctggagactgagtcctcgccagtgttcagcaaggttcgctggcctaggagg

SEQ ID NO: 15672 - DNA, 122 bp, Homo sapiens
ctgcttcagccactgggctccagtcccaccccttttgggggcctgaagttaggaagcatccggcagctgccttctatttaagcaactggcctccttagaggccactccttggccatgccagg

SEQ ID NO: 15673 - DNA, 122 bp, Homo sapiens
agaaatcaccgtcttctgcatcgctcacgctgggagctgtagaccggagctgttcctattcggccatcttggctcctccgcagctggagatctcagtacgggcagactgcctcctcaagtgg

SEQ ID NO: 15674 - DNA, 122 bp, Homo sapiens
gtcgttctcgccgcggcgcggccggggagggggagggatgcgcagagcccgggcggaccccgcgctgccttcgggagcctccgtttcactcattgctgagaatgttaattaaatgtttacgg

SEQ ID NO: 15675 - DNA, 122 bp, Homo sapiens
gcctctgccgtctgtctgtctcccgctccagtggccctctcacccttcactgtaacacgccgtataggtcacccctatcagaaccggacgccccccaagaagaagaagccgcgcacgtcctt

SEQ ID NO: 15676 - DNA, 122 bp, Homo sapiens
cacacgacacagattttggggcaaagcctttccaactggacagcaccatgtccaccaaagcggagcagtgtaagtagcagccggcccggcattccggcccggcctcggctgggagctattgc

SEQ ID NO: 15677 - DNA, 122 bp, Homo sapiens
gcttccacctaaagtgacttggggtaggggttggcgaaggcgagacccctggcattctcccgggaatctgaagtctggtctctcaggaacctggaagggcatgattctccttggacacagaa

SEQ ID NO: 15678 - DNA, 122 bp, Homo sapiens
tgaggaaactgcccctgatggagaactcccgctttagggtcggcacttaggaggctggtgcgatgctgcccctgaccttgtaggcatggtacctggcctggagctggtcaggatgggccttc

SEQ ID NO: 15679 - DNA, 122 bp, Homo sapiens
ccattcccggcccgagcggcccgagcccctttaggtccgcgccgggggtacaggagccgccgctccacggcccggtacactgcttccgactgcgcctgccccactgcgcaggcgcgggccgc

SEQ ID NO: 15680 - DNA, 122 bp, Homo sapiens
ccattggcctggtgtcaagccctttggaagtgttccactggcctgtagccccacaagtttcgtggaaatcctgcagctcaaggaagggcatttggattcattttgggaaggaaaaagtaaca

SEQ ID NO: 15681 - DNA, 122 bp, Homo sapiens
gcctccatgcttccctatttcaaggagcagcgacgtttgctatttatctcccgctggccacgacggggcaccagagaaaaacacaggctccctacgcgctgaaggaggcttggcccttgcga

SEQ ID NO: 15682 - DNA, 122 bp, Homo sapiens
cagactaaatcgggaagattaaattttccagcctcacgaatgctcagccattgactcactcgttcatacaatgaacactcattgagcttatactacatgccaggtgctggaggaggcatggg

SEQ ID NO: 15683 - DNA, 122 bp, Homo sapiens
gtggggcaccggaagagacataacagaaaacgcaggcctccactcagcaaaaacaagccacgcgcgaagtcgaggtacaaggcaagggaaggccagaaacgaggcaacccgtgcacagaccg

SEQ ID NO: 15684 - DNA, 122 bp, Homo sapiens
gggttcgggataggggctctgctggccgggggtggggggcgcgccctcccatcaaggatgcgatctgggacggggcaccggggacccgggcgtaacccaatttggtgtcgcccagggcaacg

SEQ ID NO: 15685 - DNA, 122 bp, Homo sapiens
gacccagcgatcagctgcccgtagcaaatgtctgtgcagttgcaaaagataatttttggccgtgagaaggttgccgccagagagcgtccgataacgctgacaaaggcgtggcgttgccagtg

SEQ ID NO: 15686 - DNA, 122 bp, Homo sapiens
tccctcagccgccgccgctcctcctcctggcaggccggccgcggagtcagctgacgccggcgctccagcctcgcctccccgcgccgcgctctgcgctccccgaaagtggctgcaagccggcc

SEQ ID NO: 15687 - DNA, 122 bp, Homo sapiens
gctcaagttgcaagggggcgggccgggccggaggtggagtctcccgccaattgaagcctccgctataaattgaactccctgcactgctgaagcccagatgcctcgccaggccacgtcgcggt

SEQ ID NO: 15688 - DNA, 122 bp, Homo sapiens
gcctcgctgattctccgcgcagccgctcattctggtgcagctgccgcgccgccctccaggcgctgggtaactccgggctgcagtgcttctgcacattaacaccatttgttccgtggaacgtg

SEQ ID NO: 15689 - DNA, 122 bp, Homo sapiens
gcgtgcctttccggcgagcgagcgcgcctccggggcggccagaccagagggctctagggccggccgggtgctctccccaaactccgatgtggggctcaggtgacccttgccgcccccaaccc

SEQ ID NO: 15690 - DNA, 122 bp, Homo sapiens
catgtcctgtgccagattctcgctggtgcccgagacactccccgatggagggttagggctcggagccctttaactccttcggcacagtggagaaaggtttaggaaatagcagaacaaacgca

SEQ ID NO: 15691 - DNA, 122 bp, Homo sapiens
ccgcctggaatccacccagctgaggtgggcagttctcagaccaaccttctccccagtgggcgcctcggtgaagctgctgatgggtgcgggatgtactgtctgccacagaacatcccagcgcg

SEQ ID NO: 15692 - DNA, 122 bp, Homo sapiens
ctcgaggtttgatggtttcacttttggcaacagggaagggattcatatatgctttctgcacgggaagaaagggctaatgcagagaagctgatcatacagaagggaaagcagacacccaatta

SEQ ID NO: 15693 - DNA, 122 bp, Homo sapiens
aaaagaagtagaaatcgtggcccacctccctcttggggtcgtcgccctcgagatgattatcgtaggaggagtcctccacctcgtcgcaggtacttgagagaaagcttgttaagaggtattgg

SEQ ID NO: 15694 - DNA, 122 bp, Homo sapiens
ggacagagttaagtaacattgcatacttgcattgcatttcatttccttcttgaagattctcgattctcctcagctaattaaaagttcttagaagttcacctataaagagaatatttagcatt

SEQ ID NO: 15695 - DNA, 122 bp, Homo sapiens
gcagaatctagagccccagggatttgaggatggatgcggacacccgggcctgaggcagctcgcggccttgaccgaattccacgcgagctgaagcccagggatatcccagaatcttcctcagg

SEQ ID NO: 15696 - DNA, 122 bp, Homo sapiens
ctgcctagctcttccagatgctgcacccggcatgcaatggtcactacagtcagcactctccgcctctcagaggagggaggggctgtcaggtgttttgggagcccaaaaccatgcctaatgag

SEQ ID NO: 15697 - DNA, 122 bp, Homo sapiens
tataatatatctactttaatcagcttatttgtttaacatttgttagacaacttattgaaacgggtttattgctttgactaaattcctcatatggtttggctttgagtccaaatctcatgtca

SEQ ID NO: 15698 - DNA, 122 bp, Homo sapiens
tagcgattgggagcgcgccctgcgccgggccgctggtccaaggccccgccagctggccgccgagccatcgagcgcccactctggcaggcgtgactgcttcaccgtcgaaagagcgatggaga

SEQ ID NO: 15699 - DNA, 122 bp, Homo sapiens
gagcttttgtgtttaatgaccttcagctaccgggaggcaaagccgggctcttaaaggagccgcgctccaattgtcattcccgagcgcagctccggaggggcagcggcgcgcaggggatggag

SEQ ID NO: 15700 - DNA, 122 bp, Homo sapiens
catcttaaagcaacgtaggcttatatcctgacactactctattgatgggatctactgcagcgaacatctctgtgtatgtcactcagcaggagaaatatataaagaggcgttttcagatttta

SEQ ID NO: 15701 - DNA, 122 bp, Homo sapiens
gggcctgactcgcgctgggtaatgacagactcacagagcgccctggatggcgcgaattaacgcggggggcgggtgggggcgagggcgtgtgcttgggaggctggaaggggcgggatggggga

SEQ ID NO: 15702 - DNA, 122 bp, Homo sapiens
aagattcttgatcttacttgaagtatacatgagggaaagagccccctcagcaggtgttcccgttgcttacagaagcaaactaaaggacctaaaactggaggcaagccaggatgccaaaaagg

SEQ ID NO: 15703 - DNA, 122 bp, Homo sapiens
gtcccaggtgtgcagcccaatctccttgtgggtcgactgcctgcatgtgccaggacagaccggcctcaggcccacagacgtggcagaaggaaggggccacagccctgcctgattctcttgcc

SEQ ID NO: 15704 - DNA, 122 bp, Homo sapiens
gaatttgaaaagacaaggagtcttcagttaacaatagaccttaagaaaagagaataaagacgcagtgtgagtttttctgtttgggaattccatggtttgctgacacctttattcaggagcca

SEQ ID NO: 15705 - DNA, 122 bp, Homo sapiens
ctgggagcccagctgggttgggtggggcggggtgggggtgcaaagagaagagctcagacccgcacagctcagacccacagtgctgccctcatgccacagttgcacaagctgtgactgatccc

SEQ ID NO: 15706 - DNA, 122 bp, Homo sapiens
cagggcggcggtcaggggcggggactgtcctcagggtaggttagaacctagggagggcagcgggcaggctgggctgagccctcttccgtcacacaggaagctgcagggctttcctgcggcat

SEQ ID NO: 15707 - DNA, 122 bp, Homo sapiens
cctcacagccaccagaatgatctacttaaaactccagtctgaccagatcatctccagccccgccttgctcctgggcacacagaacatcttcacctccaacttcatactgcttttttctgaac

SEQ ID NO: 15708 - DNA, 122 bp, Homo sapiens
ctgcttggctacgtgattacatacatgttatctgataaagtgtccacccaaaatcatgtccggtgtcactgtttagtgcttgacacaaagtaagctttcagtaaagaacagctgtcgatgtc

SEQ ID NO: 15709 - DNA, 122 bp, Homo sapiens
gcacagagtcttattggctacggaaattcaccttctttgggggcctgttgctaaggcggtcgacgtcatttgatcccctccaccttttcgcagggggtccaatttagtcccaattgacctga

SEQ ID NO: 15710 - DNA, 122 bp, Homo sapiens
aaccacaaatatttaaggtggtcaggcaggaatggccttctgaagccctgagcagcagaacgttgcttatcaaggttttgaaaatggtgcattctctttttacggagctgttttcaggagcc

SEQ ID NO: 15711 - DNA, 122 bp, Homo sapiens
tggagggggtggtgttcgtttgtttaaattccagttgttatttggcagcatatcgccttccgagtcagtaagaattgcccacgacgtaaagagcgacttgcaggaaggggccgaagccgtcg

SEQ ID NO: 15712 - DNA, 122 bp, Homo sapiens
ggagggcggtgacggatggcgcaggcgcgggagccgcctaggctgctgggagtggtggtccggccgcggaatgggtaggtctcccgcgcactctgcggccgcagctcaaaggacaccgagag

SEQ ID NO: 15713 - DNA, 122 bp, Homo sapiens
cccagccctcccctcgtcctggtgggaaactcagcccagaagggggcttcgggggctcctcgcgggctggggaaccgtcggatgccggcccaaggggcggggccaggaccccgggggggtca

SEQ ID NO: 15714 - DNA, 122 bp, Homo sapiens
cccgtcgtgtccccaaagcatccacatttcccaagctcccttccggtccttgaggcccctcgggtctcagcagccactaaaatccgcttgtctggggcggcagcctcaggtcttagctcatt

SEQ ID NO: 15715 - DNA, 122 bp, Homo sapiens
gaattactaaatgatcaaatagtggaaagcaatagtgttctcttgcaggaacagaagacacgcaatatgtgagatgagttatttaggtttagaggagagaattttcatttcagcaggctgtc

SEQ ID NO: 15716 - DNA, 122 bp, Homo sapiens
agagcttgtagacctccaggactcctagagagcttccggaagtgcctttggggcaagatgcgtgctggccggtgttgtgcctccgcagatttagaagttagtggccggaggggcctggtccg

SEQ ID NO: 15717 - DNA, 122 bp, Homo sapiens
caagggctgagacagcatctcccctttagattcagggatcctggggaacacactgcttcccgcttagactaggcctcttgagggctgagataacgctccgctaaatcgtggagttttctaga

SEQ ID NO: 15718 - DNA, 122 bp, Homo sapiens
ggtgactgggacagagccaccattttatgagggtgcaggtttgggagaggagaacacactcgcacaggtagaagaaaatcaccagcctggctccgtcagggcactaccataccccacagcat

SEQ ID NO: 15719 - DNA, 122 bp, Homo sapiens
cgccctactcccgtgtggggacccctttctcaagtggagcggcggcactacatcccgcgccgtgggcagagacctttggttcaggtccctgcttaggaacttctggagttttcgtgacgggc

SEQ ID NO: 15720 - DNA, 122 bp, Homo sapiens
tactgttttcagtatccattctctttgcaatgtgactttgcagttcttctcaccaaaagacggactattttccccctaattcctgagtcagtgctatggcagcacatcgtggtagaagaaaa

SEQ ID NO: 15721 - DNA, 122 bp, Homo sapiens
caggatgcccccctctgaggtttgatctgccaaaccggttgaagaggccagaggagggcacgcgcagaccctcactctcatctgccccaaggaaaataaagaaaaagtgaattcccagtaca

SEQ ID NO: 15722 - DNA, 122 bp, Homo sapiens
gggtaacaggatccctagggccttctgccccgccctcctgccatgaatcagcagctcagccgctcaagggtggtagtagctttacacctgggcttgggccgtgctccacggcattcaccagc

SEQ ID NO: 15723 - DNA, 122 bp, Homo sapiens
tcaattcaggcaaaaataccttgaggcccaccacactggtcttggtactgggctctggggcgaacccctgacgaggacacctgtgccccctgctctggggagcggggttggggagcaaaagt

SEQ ID NO: 15724 - DNA, 122 bp, Homo sapiens
gcctccctcccgccacctgggcgtctcatggggtgctggggtgtgggcgggcctcaccctcggggcctctgcaccccctaactctagcttcccctcaggtgctgagctacagccagttgtgt

SEQ ID NO: 15725 - DNA, 122 bp, Homo sapiens
ctccaggtcggggaaatgtcccggagattgaagggaagccccagggagagggccgctgctcgccaggctccgcaggcccgacctatctcagtgggttacctcacactgctacgcggactcta

SEQ ID NO: 15726 - DNA, 122 bp, Homo sapiens
ctgtccagtacctagagacatcaggccagcttggcaagggacagagaaccaggagaagggcgcagtgtgggtgggcccctgcccttggtagtgggcttcccaagtacctgtctggggctagg

SEQ ID NO: 15727 - DNA, 122 bp, Homo sapiens
ccttgtgggcacacacacacctgctgatagaggcgctcccagcagtcctgcgtcatcaggcggaagagtgcaagaaaggcccaggcaaaggaatcgaagctggtgtagccgtggtcggggtt

SEQ ID NO: 15728 - DNA, 122 bp, Homo sapiens
agtacactctgtaatgtttgcacaaggataaaatcgcctacggacgaattcctggggatgcgtcatcaagcgaggcatagctgtggtttcttacctgctttctctgtggcttccaccttcca

SEQ ID NO: 15729 - DNA, 122 bp, Homo sapiens
gagtgggctgggatgtgcatcctgcttcccaactcctctatccaagactgtgcccacatccgaagcacaaggacctcaagtcaccagcataagaacatcaacaggaatgccgccctctctac

SEQ ID NO: 15730 - DNA, 122 bp, Homo sapiens
aggcgcggggtgcaggactccaattatcaattcagccgagcccagcgctggtaaagggggcgtttagctcgcccgtttcctccctcctcaatccccacacagtcagtttctcggtccaagtt

SEQ ID NO: 15731 - DNA, 122 bp, Homo sapiens
tccagctttcccagagatgtcagcatctctgccatccctcatccctcgctccaccccacacgcccgccgtacggaccgtctgcgacagctgctaggcctctggactagatccaggctgtcag

SEQ ID NO: 15732 - DNA, 122 bp, Homo sapiens
accaggcccgagatgagcacacagggcacgatgatgttaatgacgtagaagagcggcttccggcggatgatgagcgagtagatgacgtcagtctcccctgggccgtcggtggcgccaccgtg

SEQ ID NO: 15733 - DNA, 122 bp, Homo sapiens
acagcatgtggaataaattttgcctgatgacaggctttcagctattttgccaccactgggcgcggacgctgcgcttagcagagcctgtttgccagcggcgggctccctgagaccccggcaac

SEQ ID NO: 15734 - DNA, 122 bp, Homo sapiens
accacagcagcctgctggcatctttgcccccgccgtgccacgtcatctgggctcactgtgcgttttctggctcaggcctgaggcagccacgtccctgggagctctgcttcctgctttctgcc

SEQ ID NO: 15735 - DNA, 122 bp, Homo sapiens
ttctccaagtaattttcatgtgcagccagaattgcaactcaccaggctaaactgcagttgcgcaattctggtcttcttgatacctgatttctttgccccttctcttttctggttcaatgcat

SEQ ID NO: 15736 - DNA, 122 bp, Homo sapiens
gaagtgaaagaggaaggatccctgcgaaaggacccaaactgttttctgccatggggaggtcgggggggggatgccacgtctggcatctgtgggcggaggctgagcaggactcctctgcaggg

SEQ ID NO: 15737 - DNA, 122 bp, Homo sapiens
cttggtgccggagtcgctgcacgactcttcccggtgcaccgacttcggccgcggcttcttcggctttgacttgggcttgccgagcccctgctcctctaggatctgctgctgcttcctccgca

SEQ ID NO: 15738 - DNA, 122 bp, Homo sapiens
ataaccaggtaggcacacgaaggggcccgtatgttcatacctcctaaggacaaggctccccgaaaggcacatgtaccctaatctccttgtccacatgtactgtgtgctatttcctagctcgc

SEQ ID NO: 15739 - DNA, 122 bp, Homo sapiens
accacgtaacatctcgtgggcgaatcaaggcacagcaacgcagtggagcctgaggggagccgggcactggtgcaggggaccatgcacagggcaccctcggagctccgttcctggccacagga

SEQ ID NO: 15740 - DNA, 122 bp, Homo sapiens
agaaacaggttctcggcccagagttgtgaagaagattttggtcgcactagcgccacccagcggttttagagaaggagcacacttctccccaaatagggcttttgaagaacaagttttacaaa

SEQ ID NO: 15741 - DNA, 122 bp, Homo sapiens
ctgcctgccacgcctgggagctctgggggtcctgatctgcccaccatgcctgggagctctcgggtcctgatctgcccgccacacctgggagctctcggggctctgatgttacccaccataca

SEQ ID NO: 15742 - DNA, 122 bp, Homo sapiens
gtgaggggcacaggtgcaacagaaagaaagactgatttgcaattgacttgtaggtgtaatcggttttagtccctatttgaccaccagaggtctgcagctctatccttggtgagttctgaagg

SEQ ID NO: 15743 - DNA, 122 bp, Homo sapiens
cgcgggttggggtcttcacccttcctgtggtcggtgggtgggagggtctggccccgagcccgggaagggagagcagagctggccccgggacccagcgcgcggtcgccctctgtcttgacccc

SEQ ID NO: 15744 - DNA, 122 bp, Homo sapiens
cgggggtgagggtcagcccgcaggccagcctgtgcaccacgcaggagggaaggtgggatgcgggctgggctatgttgcccaccgcccgcccacacccgactgccatcctggtacaggggtgg

SEQ ID NO: 15745 - DNA, 122 bp, Homo sapiens
cggacagcagggccacacggaacaaagcttacttctggtggagacagaacctagccaatgcgcagctgcaggggcgcagagcaccctctatccaagctgacaaccatcagcacattgtcaag

SEQ ID NO: 15746 - DNA, 122 bp, Homo sapiens
gacttcccagcctgcggcgtagggcgcagcaagggcctgacgctgagcgagtaggcgctgcgcaccaagcggctgtggcccggagggcactgtcgggcagaagctcctcagtggccaccaca

SEQ ID NO: 15747 - DNA, 122 bp, Homo sapiens
ctcccttctccacttcctttcggagcactgggcccgccggtcacctcccttctccacttccgaaatccactgtctttcggagcactggggccccgccggtcacctcccttctccacttcctt

SEQ ID NO: 15748 - DNA, 122 bp, Homo sapiens
tcttttaaagatgaaaaatctctctttctatttgtagaagctgtgcacgggacgccaccccgccggctcctggaacccgaccgtccagagcgcctcattggactgcgctgagcccagtccac

SEQ ID NO: 15749 - DNA, 122 bp, Homo sapiens
tctgccgcctgcgctagaggatccccgttcaaccatgccacttcccacttaactggtgcacgatgccccttcgccattcgttggcaggagcagaagccctcactccagttggacacgccagg

SEQ ID NO: 15750 - DNA, 122 bp, Homo sapiens
taccctttggtgagcatggtcgtatatgggaagattaagtctaggtgtgtatgatctggtcgaatctttgtaacagtgaggtttgttcatcatgatcatcctcattttgaagatgagcagat

SEQ ID NO: 15751 - DNA, 122 bp, Homo sapiens
gcagcggcgggaggcgccggcagggagctcccgctggggcagcaaagccgtgggtggaggcgaaataaataatccacgaaaaaggaaaacagacgtgagccgagccagagcctctcccgcct

SEQ ID NO: 15752 - DNA, 122 bp, Homo sapiens
gcgctaggtttgtgccttatggggatccgtcgtctcgcgagataacggttccgctgctggcggggcgtttgcagtggcccttgtgaactatgtttctgccgttaccagtgttggacccgcct

SEQ ID NO: 15753 - DNA, 122 bp, Homo sapiens
gaaagtaaggtgtgacactcagaaatggccacaatggactcagatggggtctttgagtcacgacagcctttctcattttcccctgatgtttgaaaaggagccttaaaatttaaagggttgta

SEQ ID NO: 15754 - DNA, 122 bp, Homo sapiens
ggtaccctctttgatcagctgtcacacctggcgataatggcatcagagagagataccctgcgaggatgccgtgagatgcgccaggtaaagcacctggggtcagaaagccaccccctcctcct

SEQ ID NO: 15755 - DNA, 122 bp, Homo sapiens
gatgtgatttctgcaggcagagcaatgtctggttcctgctgtttcttctgatgggcgcggcggtgactgagggtgtcctgcgagccgtcggtgagcgctcagctgtcctggtctgcaagttc

SEQ ID NO: 15756 - DNA, 122 bp, Homo sapiens
cccagaaagtctccaggcagcagctctgtgagatccttaagcaaggtaaggaaactcacccgctgcgctgcggcttcgtggccagcagggctgggacatactcgcctcacgcttcagcaccg

SEQ ID NO: 15757 - DNA, 122 bp, Homo sapiens
ggggagcctcccaacctcgcccccggcccctgaagcgcagcgccgcagccccagtcccggcgggggaggccgcgtcctgtactgggtcctgggacccttgagaccccacacttctaataatt

SEQ ID NO: 15758 - DNA, 122 bp, Homo sapiens
ggtggggcccctgaggcgtgcagagggtcacgcacctgggagcctgttgctggcacggtccgggcggaggttctgcggcgggaggcagcctgtcggttgcagggctgaaaaagcagttctac

SEQ ID NO: 15759 - DNA, 122 bp, Homo sapiens
ctccctcccagccctccagtgtcagtggaggtgatggctcccagaggaagggaccaaggacggcactaaagttccccaggtggcatctctgcgcggccctcgcctcacacttcaaagtcgac

SEQ ID NO: 15760 - DNA, 122 bp, Homo sapiens
tttttttaatgtggctatccaattcaattaaaaatcttgtctttttcattgctactctgccgcgttacctctgttatatataaataggcaaccacggccgggcgtggtggctcacacctgta

SEQ ID NO: 15761 - DNA, 122 bp, Homo sapiens
ctaccccgtgtactttctacaggcagtgtgttgcttgttttggatagttgggagcagcttcgctcaccttaaggaactgtgggtagatggtttgcaggaccacatacacacacaaaatagcc

SEQ ID NO: 15762 - DNA, 122 bp, Homo sapiens
cctccgcgtctctttcccgggaaagcctccctcggttcctgcgcggccgcacagcctggacgcagcgcacgcgggcaccggcctgactctcccaccccgaagcctgctcccaacctaagtcc

SEQ ID NO: 15763 - DNA, 122 bp, Homo sapiens
tattttgctttgtcagtgggctctgcgctcgcgttaacaattcgaatgggcacgtttctgcgtttcagaacgctgttcgcttcctcacacttagattgaggtggaactcacgtcacataaac

SEQ ID NO: 15764 - DNA, 122 bp, Homo sapiens
aggcagcctgcttaggggagcctccagcctgaggactgaaaatagcaaagcagctttaaccgccagtcctactccagagaagggggaggtgacgtcactcagcaggacgccaagctcaacta

SEQ ID NO: 15765 - DNA, 122 bp, Homo sapiens
ggcacccagcagccaagccaccgggctgcggtaagggcaggtgcaacactgaggtccccacgcagtagagccagccttggaccctgggccctggagtccctgaccctgagatcccagagctg

SEQ ID NO: 15766 - DNA, 122 bp, Homo sapiens
cctgcgcgttgtcaggcgtgtaattggggaaactcctccccgccgggaccgcctcggaggcgctgccaggggacagccgcccagctgcccccacctcccagcacagcgcacacagccccggc

SEQ ID NO: 15767 - DNA, 122 bp, Homo sapiens
gacagagagcccgagagtgcccggatgcagcgggctcagatggccgcactggcagccatgcgggctgcagctgcgggcctgggacacccagccagccccggcggctctgaggatgggccccc

SEQ ID NO: 15768 - DNA, 122 bp, Homo sapiens
ccttgtctgcttttgcttagcctttggacgaacaatccaaaaaagctctcagctttaaaacgttagaccttagcttcaggttggcttttcatagccaaatgtcctaaaatgtatcagtgatt

SEQ ID NO: 15769 - DNA, 122 bp, Homo sapiens
gtaaggcttccgtcggaaaagctcgataattacccagcctaaccatttctcaggtgcttgcgaggtgatcagaaggcaaagatgtcggagcgaaaagtattaaacgtaagtgttgggcgact

SEQ ID NO: 15770 - DNA, 122 bp, Homo sapiens
ccccacatcacactcacacaggaccaacaccgtgatcaccatgaccagtctctgcttgcacggttccagtgatgggcagctcaccacttcacagccagtctgctaatctctagacatcactc

SEQ ID NO: 15771 - DNA, 122 bp, Homo sapiens
cggcgccggcggcttggctgccgggtgcaggccctggactcctacccggtggtgagggctcgctagggcctcggcgtgggggacgagcaggcctggcgtgcccgcctcgcggggtcatcgac

SEQ ID NO: 15772 - DNA, 122 bp, Homo sapiens
agggactagccacaaatttacaaggagatcctggatattggaaactgagctctttatctgcgttcacatgatacttttgtttaaaagcgtgtggcacttccccaatcccccaacattgtctc

SEQ ID NO: 15773 - DNA, 122 bp, Homo sapiens
ggggggaaggcgcgccgccggcttgcgcaggcacggaacccgaccgggtctctaagtgggcgagcaaagaaagggttaatccgggcccttgccgacgctttcgttggagactacggggccgc

SEQ ID NO: 15774 - DNA, 122 bp, Homo sapiens
tctccagcaccagttccccctcctcctgcgcaacctaacctgatgctcctgcccgccccgcgccatcattggctgaagcgcactgccactcaccaaaggcgaaaagacgcaaaacagcgcaa

SEQ ID NO: 15775 - DNA, 122 bp, Homo sapiens
ttcgcgcagttggagctacgggtacagcagtggtccgaaactagtggaagaccactagaacgcggagaatcagaaaattaccgggcatggttcaataatttttttctgtctcattattggca

SEQ ID NO: 15776 - DNA, 122 bp, Homo sapiens
agggaaggcctctgtgttcactaagcaggaagagaaagaacggatctgcgcaggcatacacgcagagcagggctgctgcagccaaactaagggagatgaagagctatcctcagccagctcac

SEQ ID NO: 15777 - DNA, 122 bp, Homo sapiens
ttaccttgaggtgttacttttctcccttcccacatccagcctagcaaggcttgctgattccgccctgaatacaaatcccagaccataccccatcttccttcactgccttccagcgctcagtc

SEQ ID NO: 15778 - DNA, 122 bp, Homo sapiens
ctgggaggagcgtctccacggaaggagctcactttgtcagctgtaatgtgctgtgactatcgtgtgagttcccgggtcactgtaacaagtcccacagcctgggggcttcaacagagagagcc

SEQ ID NO: 15779 - DNA, 122 bp, Homo sapiens
aatggcatttggaaacctatgtctgaatgttaggtgtgcttggtagtgttagtgtgtgggcgctcctcggctttcagtggacagagccagagaatatgtgcatgtcctgagcctcctgttcg

SEQ ID NO: 15780 - DNA, 122 bp, Homo sapiens
ttccatctcgccttttatttacctaatttctcagcaaggttcccaggcccttaagaaggccgagctggaaagtttagttgggctcttttttgttgttgtttaattccactattaggaaatga

SEQ ID NO: 15781 - DNA, 122 bp, Homo sapiens
gtgcctacccgccaaggggaccgtcgccggcagatgaaagccagctttgaggaggccatgcgatgggagatgctggcccggaggaggtgggctgtgcgccaatgatgctgcccagatattcc

SEQ ID NO: 15782 - DNA, 122 bp, Homo sapiens
ctacaatctgctctccagtcagttggtcagccatgctgaaagcgctaccggtttccgagacgcgactgcacgaccactcggctcgctcgctccactcggactcccttctactttaaagatca

SEQ ID NO: 15783 - DNA, 122 bp, Homo sapiens
cgcacagcctttccggcagtacctgcggcccctctccgccgggcctgcgcttcccgccaccgccgaccattctgcagctgcagcgccagcagaattccccgatccgcggccgcttccgagcg

SEQ ID NO: 15784 - DNA, 122 bp, Homo sapiens
ggtccgcggggaccgggagggccggggctgagcgtggaggacccgagcccgagggacgagcgcagagtcaggggtgtgtctttctgcgccgcgcggtgcgaggaaagaagcgtgcctggttg

SEQ ID NO: 15785 - DNA, 122 bp, Homo sapiens
ggagatgggtcttccctatcagtggagacagaccttggcctcgtgacaccctggagtccccggctttgaccccgtagcccgtgccacattctcctgaggcttctcgtctgctctgggtgaac

SEQ ID NO: 15786 - DNA, 122 bp, Homo sapiens
tcacaaattagtagatagctctggatctagaacaaacgtatctgaggtcaggtcccagcccgccacctaccagccgcatgacctcaagccacttgcttttcctctctcagccctgttttctc

SEQ ID NO: 15787 - DNA, 122 bp, Homo sapiens
ctgcagttcctggcggaggtggtgcctggtggctgtcaggtccttatataggatgactggcgtttgttctaaaccagcaaccccatcccagaggtggcctagcttccgtggggctgatgtac

SEQ ID NO: 15788 - DNA, 122 bp, Homo sapiens
ggggtcgccaggttcccgtctgctttcggaggcggatcgagcgggtgacttttgtgcattcgttttaatttttggaaatctctcttttttcctccctcgctcgctgccgggcatgtcctgat

SEQ ID NO: 15789 - DNA, 122 bp, Homo sapiens
tggtcacaaatgttgcttttttttccctccaggcagagctagtctctgttttgcctacctcgccccctcctgggcccagttagaaacctcatcacataatttcatttctttccaaacttgaa

SEQ ID NO: 15790 - DNA, 122 bp, Homo sapiens
gttatgcaacccaagcccgcagggggttagggggcggcgggccgcgctgctcacccgggccggccagtgtgggtagcccttcatcttggcgaacaccaggtccccgcatttgtactccttct

SEQ ID NO: 15791 - DNA, 122 bp, Homo sapiens
ttagccctgcccctcgctcctggctaacatggccgaaaggtcgtattctccgggggaggacgggggcccggagaggagggggtggagtgcctggttttccagtcaggcggccggagggcagc

SEQ ID NO: 15792 - DNA, 122 bp, Homo sapiens
gcttccaacatggccaggaaatagtttggtttatcaaatcctcggtacccagtgaatccccggaaactgtaagcaaacttgtgatggtttcaaggcttcgctcaactcctaaaaggctaaaa

SEQ ID NO: 15793 - DNA, 122 bp, Homo sapiens
taaccatagtactcctccccacctcaagtagacacctctctcaggagcttctgagtcagacgcctctggagcgagccctatgtcaggcactccacctggggggcccttccccagcatacctg

SEQ ID NO: 15794 - DNA, 122 bp, Homo sapiens
gaaggggggctgggatgccggcgagcccccggacccctccgccgccgcgtgttcctgtcccgggcactgttgtttttccggtctgctgaggggcaacaggtcccgaagcagggggagagtta

SEQ ID NO: 15795 - DNA, 122 bp, Homo sapiens
atggtaaggagaatatggaagattttattccctcagaaggtgttccccataacagatacacggtaaactcccaaaaacatagtatcctaaatgaaaatcatgaaataaagacagcgtaacac

SEQ ID NO: 15796 - DNA, 122 bp, Homo sapiens
ttcaacttaataatgagatagtgacaattcgaaagggtttcacttcgtatactatcagttcgctgagaactaataaaaaagtgtggttttttgggtcatcccaaaaatcaagtacactttgg

SEQ ID NO: 15797 - DNA, 122 bp, Homo sapiens
cgccgccgtccagaggcgagaggcaaagtgagcgggttcggaggcggcgaagagccggctcgcggcggcgggggcggggcctctgtgcagtcctcctcctcgcccgccggctccgcgcgcgc

SEQ ID NO: 15798 - DNA, 122 bp, Homo sapiens
cagagaaggggagttggaaaacaagacagcgcagcgtcagtttggcagccatggcatccccgctcctacacggggcaaagaaaagattgaggacgtattcttcacagaagccagctctcctt

SEQ ID NO: 15799 - DNA, 122 bp, Homo sapiens
tgctccgcagagttcttgaacctttgctcctcctcataggctctgttcctcaccaccattcgctctggataccttggggtgtagcccagttgaggtgagccttccccttcccactctccact

SEQ ID NO: 15800 - DNA, 122 bp, Homo sapiens
gcagatcgagcgcgcggcccggaccggggcgccggccccggcgcagcccttccgcccccgcgtccctccagccccgctcacctgggtctctggccccgagtcacccacctcataacgccccg

SEQ ID NO: 15801 - DNA, 122 bp, Homo sapiens
cgggctgtgtctcccacctggggcggcggagctcctagtctctttttttctaagctccagcgctgacttttcacggtggagaaaagggcagacggctcctagaacttgggcggcgggtgggc

SEQ ID NO: 15802 - DNA, 122 bp, Homo sapiens
ttgcctgcaattgaggtataattttctttaaagggagtgttgtttcagataaggtagctgcgacctaagaaaggaataattctatattgattttaaggtctttagggaatggaagcactgtc

SEQ ID NO: 15803 - DNA, 122 bp, Homo sapiens
gcagaaataactcagccatttccacaagaccagcttttaatatgactgtgatttgaagcacgaataaataaatgccaaagaaaatggaaaaaccaaagcaaacctcagaacatcaaaactaa

SEQ ID NO: 15804 - DNA, 122 bp, Homo sapiens
ttatgtagaagatgcatcttgctttcagttgataacagcttattttggatttatcccatccgaggaacagttcatctattatacttcacagagcattaagttataaggaaatatttactaat

SEQ ID NO: 15805 - DNA, 122 bp, Homo sapiens
gccgacatggcgagcgagtttctggccttcacttagaacactgcgtgggtggaagccgcgcgacttcacacagaacaaccgctggacctgtcccgctttgggcgacgccctttgatctcggg

SEQ ID NO: 15806 - DNA, 122 bp, Homo sapiens
gtcctcatgcctggggctgggcacactccctatcccacccagcgcgtgggtgctgagatgcgtggggaaatggaggagcgagggaggggaccccacaatctctcctcgtggcctggaaatcc

SEQ ID NO: 15807 - DNA, 122 bp, Homo sapiens
ttaggtctgaggggagaacagagagagaaggctggaggggaggccgggatccaggagtgccggctgcacccatgcctcggaacttccactccatttgtcagggaaccaaggccagtgtgagg

SEQ ID NO: 15808 - DNA, 122 bp, Homo sapiens
ggcctgcggggcgcctgggctccgggctgagccacagcttttgttctgatggcgaccaggcgtagagggccggggctccgggccccagcgggctccgggagcggcggcctggccgcgggctg

SEQ ID NO: 15809 - DNA, 122 bp, Homo sapiens
cccggcgcccgctggggctatgggcgaggggcgcagctggacgactcagtcctgggtccccggccaggcgggcggggatggacgcggcggctcccggcactggcagccggctagtcggtcag

SEQ ID NO: 15810 - DNA, 122 bp, Homo sapiens
cttgggctacccgggggaccagtggtcctcgggcttctcctacagctggtggaaaaacagcgtcggcagcgagagcaagcacggtgagggcgccttagaccagccccagcacgatgtccgcc

SEQ ID NO: 15811 - DNA, 122 bp, Homo sapiens
gctccacactggcacgtagtgggcggatcgcgccggcgctgagtaggaaggagcttcagccgccagcccggaacgcagtgagtacagccactcaaaggaaagccaagtcgctttgcagggga

SEQ ID NO: 15812 - DNA, 122 bp, Homo sapiens
gccgtccctgggcatcccgcatgtggttgctgaggaactcgaacattccaaacctggaggcgggaggcgggtgagaggggctgccgcggccgagcccccctcccgcagcagccaccggccgg

SEQ ID NO: 15813 - DNA, 122 bp, Homo sapiens
tacgtcctccatcgcgggcgcgcaatgcacctcggggatggtagtgttctggtggcccaacggttttaacagcccgggaatcaaccaccggaagtgccggccctgagaggtggagtcggggt

SEQ ID NO: 15814 - DNA, 122 bp, Homo sapiens
cagtatcctaaccccctaacccagctggccgtctagcaaatattcacagcatacaagtttcgaaagtcagaatggctcggtgggagcctatggtgtcaccatacggaacacagtttgaaatg

SEQ ID NO: 15815 - DNA, 122 bp, Homo sapiens
gcacgtccttcctttctgaggctgagcaatgttcccctgtacggatggatcacgttttgtcgtctgttcataggtacgtggggtgcttcccccttttcgctggtccttctgttttcatctgt

SEQ ID NO: 15816 - DNA, 122 bp, Homo sapiens
cagcgcggtgctgggcactcgagctctccgcagccgtggcacgctggccggccggccccgcgtaggctgcaactccttgtcgacctgttttgcactggccctgcccgctagatagggtcccc

SEQ ID NO: 15817 - DNA, 122 bp, Homo sapiens
ctgtctaccccccttctcatccccaattcacttgttcagcgaaacttgagcccaatcaggcgctgctggctgctgggccggatgctggggatgccagcgggaggagccggagcccacactca

SEQ ID NO: 15818 - DNA, 122 bp, Homo sapiens
aaatggacactttctttcacaggaaagctcaacatataaacactttccctttgacctgtccgttctccaggcttcatgactttctacattcaccaagcagccctgtatctcaccataacctt

SEQ ID NO: 15819 - DNA, 122 bp, Homo sapiens
tgccagcgggttccgccatgatgatgtgatcaggttcatcaacaatgaagtcctcaggaacggcggcagcccagccttttacacggccttccgctcgcggccgtggaacgaggtagaggacc

SEQ ID NO: 15820 - DNA, 122 bp, Homo sapiens
gcaagcgacggtgggtagggacaggcaggcgccccttcctcccgctcagcatccagccttcgggctccctggctgctttcccgagggcagccttggctgggaaatgtcaccctccccggggg

SEQ ID NO: 15821 - DNA, 122 bp, Homo sapiens
ccactatgttgtcaccagccaagtggtcaacactgccaatgaagccagggaagtggccttcgacctggaaatccccaagacagcattcatcagtgactttgccgtgtgcgtgcctgcccaac

SEQ ID NO: 15822 - DNA, 122 bp, Homo sapiens
ctgggaaatggaatcggtttctgagtccagccaacagcagaagagaaagccagttatccacggactggaagatcaaaagagggtaagtggcagaactttgttggttgattggattatggtgc

SEQ ID NO: 15823 - DNA, 122 bp, Homo sapiens
gatgctggaagactcagagtccccagagttcagaggtcttggggtcaagtctggcttccacgccttggggctggggagagagagtttgtttcagaggccttggcctgcagttagggagtgag

SEQ ID NO: 15824 - DNA, 122 bp, Homo sapiens
cgagcgtaggcctggccaccctgtcccgccgggggcccactccattgcgccgcgcgggtgcgcgtagacctgacctcccctcgggcataaaaagcgccctgcgggagatccaggccgggagg

SEQ ID NO: 15825 - DNA, 122 bp, Homo sapiens
aaggcctaaactggaccaagggttctgcgtgggaaataagttttccacacttttacatcccgaaacctagggaaaaacaaagcaacactgagtgtgtggggccagagatgaacctcacctta

SEQ ID NO: 15826 - DNA, 122 bp, Homo sapiens
tgcactgtgattcaagcgaagagtaattattgggaaaaagtgtcccaccgcatcagcagtcgttccgggttcctgcctccttccatccgtccctctgcctactctcactcagggaagcaaag

SEQ ID NO: 15827 - DNA, 122 bp, Homo sapiens
accatccagacgggctatttgggggctgatctttaccctggaatcttcctggaaggtgaacggcctatgtcatgcagttgttatgcaagaggtatcatgggacctttccttctgggcgctca

SEQ ID NO: 15828 - DNA, 122 bp, Homo sapiens
tgcctaaatgtcaaatagccaggtgttgttttgttttgttttttacaggtactcttgtatcgtagaacattttcaaattttggattgtggtccactagtgtctcatgaaatgaatttagtga

SEQ ID NO: 15829 - DNA, 122 bp, Homo sapiens
gcccggtgccctcagggatggcctcgatcgccggtggggcccgcatttccggggggctggcgcctcgacccggaggggtgatggtggctcttttgccataaccgagagcagaagcggtagcg

SEQ ID NO: 15830 - DNA, 122 bp, Homo sapiens
ccggtgcgccgggctctacctcaaggagctcagggccatcgtgctgaaccaacagaggctcgtccgcacccagcgccagagcatcgacgagctggagcggcggctgaacgagctgagcgcct

SEQ ID NO: 15831 - DNA, 122 bp, Homo sapiens
gtgcgctccacggtttttgttgccggcggctctcgaagacttacacaggctttgcctggccgtaaatatcaaagtgcaaagcagttgtggttttttatttttgccagggaaggatcactgca

SEQ ID NO: 15832 - DNA, 122 bp, Homo sapiens
gtaccttccggggtgaggatgcaccccaggcatcggtcggcctgcaatccagcacttattcgtggtcctgccacgtcggtcactgacgtgccaccacagctacttatgctttgtccacacac

SEQ ID NO: 15833 - DNA, 122 bp, Homo sapiens
ggagagctcagtagaggaagttcttgggcgtccacacttcccttccagctgtgtagtcctcggagattccacccagtgcacaaatgcaactgacttctgagcaacccccatctgcaggtggg

SEQ ID NO: 15834 - DNA, 122 bp, Homo sapiens
tcgcgccacctgcggggtcccaagtccggcatatttttgtttgcaagaccaaaagccatgcggagggtggcataaggacaataaagaacccaaactctttcattttcagagcagcaacttga

SEQ ID NO: 15835 - DNA, 122 bp, Homo sapiens
caagcaggaagtacggccacagggagaatggtggcagcccagggcacatgaaggaaaagtcgggtacttaaagacaggcaccccaggacataagctatacacccaaaggtaaagtggccaac

SEQ ID NO: 15836 - DNA, 122 bp, Homo sapiens
ctacaagctcagctccagtgagtttttcttcctagatatacaggcaaatgatgaactaagcgaatctttgtctctcgtgctggggaaatcgctggacagagaggaaactgctgaggttaatt

SEQ ID NO: 15837 - DNA, 122 bp, Homo sapiens
tgcagagctctgaccccagggtttctgattcagtaggtctgaggtggggccaggaatctgcgtttctaagaacttgctaaatagtactgattgctgctggttcaggaaccgcactttggcaa

SEQ ID NO: 15838 - DNA, 122 bp, Homo sapiens
gcttcagcttgctccccccacccctactggctctcccaccccgcagagtcatcttcctcccggcggctccaacctttagcgccagcaaacctagtttacggaccggacccctttcccctggc

SEQ ID NO: 15839 - DNA, 122 bp, Homo sapiens
gctgaacgttggagccttcctgagattgttgggattccacaccaattatccaaacctcagcgtcagaaacagactttgccagatgattatttgagtatggacacactgtatcccggcagcct

SEQ ID NO: 15840 - DNA, 122 bp, Homo sapiens
ggttgtcataggccctgccgggtggtggggtggtcctcctaatggcctttccaccctgtccgtgcatctcctcagctgcgcagtgagccccaaacggtgcgcgcccgttccctcccccgccg

SEQ ID NO: 15841 - DNA, 122 bp, Homo sapiens
ctgacatggctctaagtgactattcagggtacagccccacaccctgcccgtcagagtttacggctgcttggggaggaactgctctgcagagccatcaggaggataacagcgattatcatgaa

SEQ ID NO: 15842 - DNA, 122 bp, Homo sapiens
ggcctgagaatcatgaagcagatcctgccctccctggagcccacgggacaggcacagtcccgcccagccaatctcccaccccctccagccaccggggactccctgcgtcagcccatgcctgt

SEQ ID NO: 15843 - DNA, 122 bp, Homo sapiens
tgcccaaagaaatgtacagacttaattctgtttctgccaaactaccaaaaacattcttaacgggactaaaaataactattttaaaataaatgtggaactaaaagagagcctaaatacccaag

SEQ ID NO: 15844 - DNA, 122 bp, Homo sapiens
ggggtgatgggcaagcatatcaacaaataattatagaagttaatttcaggttgtgataagcgcaaataaaaataaaccagggtaagagcacagtgggtggagataggtaatcaataagaatg

SEQ ID NO: 15845 - DNA, 122 bp, Homo sapiens
gtggcagcatgggacactcggagccgggcgtggcgttgtttctgctcagtgtccgcctcccgaagcctgtgcagatcagacagtgcagatcagacaaggcctttagacaccaaggagctctg

SEQ ID NO: 15846 - DNA, 122 bp, Homo sapiens
gaaatgaaccattattgctacttactgtcactgctttcttctgaggccaacgtttgggcacgcctagaagtttgaaggatttgcctcagctgtgaacaaatggtggctacaggtgctgagaa

SEQ ID NO: 15847 - DNA, 122 bp, Homo sapiens
ggactggtcacatgctcttttctaagccagtgcctgggcaagggaaggggttggtcataacggatttagactacttaggatttacttctgggccaaggagagggagggggtgagggaggggg

SEQ ID NO: 15848 - DNA, 122 bp, Homo sapiens
tgcttatctgctgtacggggcggggaccggccccctcatcctagagctgtcattggactgcggaaacccagaccttccaccccagccaatccacagcttagccttccctttcctgaggatga

SEQ ID NO: 15849 - DNA, 122 bp, Homo sapiens
gttgcctaaatgtcaactgcttgccttggttcccatggagaatcctgtagccccagggaacgtccaccgctgtgcattgagcagtcgggcctctgtggccttggagccctgctggcattcca

SEQ ID NO: 15850 - DNA, 122 bp, Homo sapiens
cttttgagcttctctgttgtccttgtagctcaccttcaacttcttcctggatgttgttcccgaaagctgttgtttccattctgcagttctgaggaatggtggaggcaccttttccatatagc

SEQ ID NO: 15851 - DNA, 122 bp, Homo sapiens
catagcggcccggtagggagcacgtgccctgcagggtggccaccctgatacatagcggcccggtggggagcacgtgccccgcagggtggccatcctaacacatagcggcccggggggagcac

SEQ ID NO: 15852 - DNA, 122 bp, Homo sapiens
tgagggtccttcaggctggtctcagaaacaggaacactttctggtggcttattgaaataccggaagtagttcctgggccggcctcagccaaatcggtaggactgcaggactcccaggcagga

SEQ ID NO: 15853 - DNA, 122 bp, Homo sapiens
gagaaaggacctcccctggggtggcagaagcgctcgcctgttcacagccaacggagggtacggtataaaagtcaagccaggtttcaaataaattcaattatgtcataataatatcatacaag

SEQ ID NO: 15854 - DNA, 122 bp, Homo sapiens
tcaccaacagtgaggtgggggagtgttcttacaacttcatcgttcactcacatgggagaccgtgagtattctcttcagaggagaggaattgtttctccttagagaggcgtgagatgaatgag

SEQ ID NO: 15855 - DNA, 122 bp, Homo sapiens
agttctgggggaagagttatctttgaccaaaaaatactatcctgatatcctttgtaaaggcgcttctgattgagagatggtaaattaaggaaccagtccagagaagaccttgggactagggg

SEQ ID NO: 15856 - DNA, 122 bp, Homo sapiens
cgagcccgtggcgcctaccgctgtccccggcccgccgccgcccgccgctgcggccatcgtcgcagcccgtcgtccccacagcctggcccaccccggccctcgcggtgtttcccggtcgttcc

SEQ ID NO: 15857 - DNA, 122 bp, Homo sapiens
ctcattaaaggtacttctcccagcctccccagaacttggttagggtactagagtgggttgcgacttgtaggaagaatgagatgaggttgtgtgggtgcatgacagggattgagtgtaggtta

SEQ ID NO: 15858 - DNA, 122 bp, Homo sapiens
taaggtacctctgcattattataaaaagctgtgctatttttttcttgtacatcttctcctcgtgctgtaaagaaagttagtgggtagaaatctttgtgtgctggctgcttcccactggccat

SEQ ID NO: 15859 - DNA, 122 bp, Homo sapiens
tgccacaggtgtccctccccgcaatacacacagcgctgggatccaccaatgtccgcttcgcggcctgaaacagctcccattgctcccgcgagtcactcaccttgttttgcgaggaggccgca

SEQ ID NO: 15860 - DNA, 122 bp, Homo sapiens
gcccgccggctctgcctctgtccatggtcaaagcacccggggtaatccgcctttctcttccgcccgccgggccccattcatattctaatcacagcgcggccgacccgcgaacggccacttta

SEQ ID NO: 15861 - DNA, 122 bp, Homo sapiens
acgacacagctatgaaagcactgcaaaccacactgttgaaatggaacaggagttccctttcgaagggcttctcccttttgaagtaaggttttaaagaagtaactagataaaatgaaaaatca

SEQ ID NO: 15862 - DNA, 122 bp, Homo sapiens
actgagtacctgagtatcatgagcactatataaaagttgatgtatacacatgcacacacgcgtacacacacacacacacacactcatacatgtatacatacatatttgtataatttttttaa

SEQ ID NO: 15863 - DNA, 122 bp, Homo sapiens
ggacctgacagtaaacggtgagtgtaagtgatagcaacgatgttaccctaaatctagaggcgggcaggtccttggcaatcactattgccaaagaaggtgaaggctatcctccaattaggccc

SEQ ID NO: 15864 - DNA, 122 bp, Homo sapiens
ctgcagagcggagattgggagcgcaggggcagcggctccgagagcgcccacaaaacccaacgagccctggacgactgcaagatggtgggtgaaaactgcgcctctttttttttttttttaat

SEQ ID NO: 15865 - DNA, 122 bp, Homo sapiens
gaccactagcctccatgaggttctgaaagggcaagtaggaggttctagcttacttggagacgctaaagagaagcatcgcaaatgcagaaaacagaattgtcacagtgggcagcccaaggtga

SEQ ID NO: 15866 - DNA, 122 bp, Homo sapiens
gtggatggtgggaaacttacaggggatgggaccatggaggtgggcagggccaggctatgacgaaggtttgaggttccagtctaggtgtcgggatacctctgggatattcatgtttcggaaag

SEQ ID NO: 15867 - DNA, 122 bp, Homo sapiens
gcatggttcttttcagcactcatcagatttatgaagcctctgcatgtgctgcatcctcctcgctgtgtgaaagagaccgtagattttagaaactggggctaagtctgtttctccctgctaag

SEQ ID NO: 15868 - DNA, 122 bp, Homo sapiens
ctctcctccctaggctgcccaccgccgcccctcccctttctcgcagacgccccctcccctcggagttgacccccgggagtctcccattggggccgcctccgcttttccagggagttcctccg

SEQ ID NO: 15869 - DNA, 122 bp, Homo sapiens
gccctccctaatgtgggtgggcttcattgaatcaactgaagtcctacatggaacatatctcggcccctgcggagcgcgacccaccccccagaagcggttccactgcccacttccggtcctgt

SEQ ID NO: 15870 - DNA, 122 bp, Homo sapiens
caaaaatttctgatttcattttaaccagtacaagatgcaggaagggaagctgcccagtgacgttcttgctattcagtcatggcctcaaggcagcattattcataaccatgagtagcgtggcc

SEQ ID NO: 15871 - DNA, 122 bp, Homo sapiens
ccttgaaggccccacaggacagtccctgcctccaggaagactctgttccatccatccaaccgggagccgggagccagtactcacagcccacgtaagagcattttccaacattgaactacctt

SEQ ID NO: 15872 - DNA, 122 bp, Homo sapiens
ccataaattaaaagcccaattaaagaacatagccttttaactgggacttagactgtcccccgaggccacgatataaaggaagagccctttcaaagtcaatggctgcctatcctggatattat

SEQ ID NO: 15873 - DNA, 122 bp, Homo sapiens
tttgtgctgattttttttaaagctttgcagtatttgtagaagaaccagagaagaaagcaccgaccccagctcagccactaaataatctatgtgtggcatgctcaagaatagcatggctctgc

SEQ ID NO: 15874 - DNA, 122 bp, Homo sapiens
gcctaggaaaaaagaggaatagccgtggcaaacacagaaacatctagacccagagtcaaccgcaccgccttcccctaccctgcccatccacacacgacccactggtacccgggcatccctgc

SEQ ID NO: 15875 - DNA, 122 bp, Homo sapiens
gctgccgctcctttccgtgctgggccctccttcttccttcttctaaaacgtagactgatgcgcctcgtatcacggggcctgagctccacttggggttctggggtcccgtccgtgggtccgac

SEQ ID NO: 15876 - DNA, 122 bp, Homo sapiens
agccttcgggggccaggccatgggagctgggtcttcctgtgcctggagccttgtcccctgcggacctgcagtgtggccagatgatgagtcttgcactgagcagaactccttgggccttaggg

SEQ ID NO: 15877 - DNA, 122 bp, Homo sapiens
tacttttttctgcccaattttccattaaaacacttaagagtataaagagctcagccgaaacggtgaactctggctcagtggcccaaggacaatctccactgacctgtcccgtcgccaaaggg

SEQ ID NO: 15878 - DNA, 122 bp, Homo sapiens
ccacgccacccggcggcggttatcaaatcacaggctgaaaacctggagaaaggtccgcgacgccggggacacacgccgcagaggcgacgcccgcccggcccaacgtccagtctcgtctgttt

SEQ ID NO: 15879 - DNA, 122 bp, Homo sapiens
ggggcacggacgcgggcagtgctgggcacggcagggtgtagctcgggggtgggggcccggcgggcgagctcacgacagcgccctgggcagctcgcgctgccgctcggctccagtccgacgcc

SEQ ID NO: 15880 - DNA, 122 bp, Homo sapiens
cctgccccagaaggcccagggcagcctgtgcaggtggtcagtgggagaaggcagtctccccgctgcaccccatggctgtgtcccccaaacttcctctatggctcctcgcctgaccctgaggg

SEQ ID NO: 15881 - DNA, 122 bp, Homo sapiens
agtcaaggtgacagggcccgggaaggggtgggtacgatgccgtcggggagggtatgttcgcgtccttgagaaaactgtctggagtctctggaggctggggctcctgaccctttatggaggat

SEQ ID NO: 15882 - DNA, 122 bp, Homo sapiens
tcacagagcttaattcagtgtggcaattgttccttactgcatttgttaagttgcccataccgcctggggaaacccgcacacgttttcagatccctccaggtgaactcctccaccctgtcccc

SEQ ID NO: 15883 - DNA, 122 bp, Homo sapiens
gaagaacattctaggcagaaggaagaaagcaagtgcaaagacttcacctcgagggaggagcgtttgaatgattttgcagaaaaacagagaggccggtatgactggacagtctgagtaaagag

SEQ ID NO: 15884 - DNA, 122 bp, Homo sapiens
taagccctagagccgggatttgaaccaaggccgttagctgtggagcccgctctggttgcccgtctgctctgccggatgagacaagctcagctggaggaaacggtttgaagagatgaatgtgc

SEQ ID NO: 15885 - DNA, 122 bp, Homo sapiens
gggctgccgcccctgctggtacctgcacagcggctgtttgcagccccccaccccaggctccggctgagtccacaaggcgggtagcgtgcttcaccctcaggtgaaccccgggggcctcgtgc

SEQ ID NO: 15886 - DNA, 122 bp, Homo sapiens
tccaaagtgtatctattttctgtctattatattggtaaagatggcatgcaaagacaagaacgtgtattcagaaggcattacggatctataagaagtgaaactcaatgcatctgagaactttt

SEQ ID NO: 15887 - DNA, 122 bp, Homo sapiens
ggggggtgtcggcgttggagttgtgaattcgctgcgtttccatgaaatcctgcggagtgtcgctcgctaccgccgccgctgccgccgccgctttcggtgatgaggaaaagaaaatggcggcg

SEQ ID NO: 15888 - DNA, 122 bp, Homo sapiens
cgcttgccggccagctagagttctgggtgggcgtgggcttggtgggccccacactcccagcggcccgggcagtgagggacttagcacccaggccagcagctgcggagggcgaaccgggtccc

SEQ ID NO: 15889 - DNA, 122 bp, Homo sapiens
aaagaggggagcccagatgcccttgcctccgagtcacagctctgactctacagatagcttcggtcttgtatcggggatatatgggacagagaccagcctgggggtggcaaggcagagattgg

SEQ ID NO: 15890 - DNA, 122 bp, Homo sapiens
gcatcttcagtttttccatagggcagagaatctttgaggaaaggaggtaaagggagtacccggcacgcagaatacctgccaagtaagcattacacgaatctgttttcttgggtagtgttttc

SEQ ID NO: 15891 - DNA, 122 bp, Homo sapiens
acctgagacaaaggcttcccggcccctgtctccaagtcgtccatccctggggcgtaggcacgttttagtgagccctgtccggcgaaacccgaaactgcggccaccttggcagcggtgggccc

SEQ ID NO: 15892 - DNA, 122 bp, Homo sapiens
gggagcgttcgccgtagtctttggaagctttggctttagatttaccaagccccgcctccccgctgccagtgccctgctctcccgttcgcctctttctgtttctgtgtgaactttcccggtaa

SEQ ID NO: 15893 - DNA, 122 bp, Homo sapiens
tgtctaatgtattttattgtaacagacattgttttgccaacattgcctatttcagtggcacgtcatctagttttaaaaaaataaaacattttaaatggacagagaaaaataactgtcttgtc

SEQ ID NO: 15894 - DNA, 122 bp, Homo sapiens
caggctgaggcaggagaatggcgtgaaccgtgaaccccggagacggaacttgcagtgagccgagatcgcgccattgcactccagcctgggcgacagagcaagacttcgtcaaaaaacaaaca

SEQ ID NO: 15895 - DNA, 122 bp, Homo sapiens
gggcggtgcaggagagcgcccggagccagagccagggcgcgctgggcgcaagctggggcgcgcccagggccaatgagcttctgattggctctttgctgtgaatagactaggccgaggctaat

SEQ ID NO: 15896 - DNA, 122 bp, Homo sapiens
gctgctgtgaccagcctttttatggcatcaccacctctggctgtgatgtcaacttccagacgtgatgtggggtctgctccactggggtacttggatagatggttggcaagcagcatgcatcc

SEQ ID NO: 15897 - DNA, 122 bp, Homo sapiens
cctcgcctcctgcaccaactacccttctaggccggagacgcgcggaggcgaaccctggaccggcctcacagccctgcagcccctgggcctgacccggctaagcttctccagaggagcctggc

SEQ ID NO: 15898 - DNA, 122 bp, Homo sapiens
cagcctgtgttccgtgaaggcagagcatgactgggcagcaggcagcgggggttctaatgccgagatttcccttccccccaactcctgcccaccccggcgccttccctcctgcgtacctttct

SEQ ID NO: 15899 - DNA, 122 bp, Homo sapiens
ttaaaactgttacaacagaatcatggactgacacaggtaatggctgagccataagcaaatcgagaagtacagaaatgtcccaccccaaacagctgcggagtacacatcacacagggcctctg

SEQ ID NO: 15900 - DNA, 122 bp, Homo sapiens
caagatagctggagttttgcttgggaaactcagagggatctcgcccggccggcacaatggcgtttctgaacccatgcccagcccactgggggcagtccttgctgcttgcagaggccagacgc

SEQ ID NO: 15901 - DNA, 122 bp, Homo sapiens
cattttgcaggggagaccattggagaggatgctagaggtcttaaatatggttctcacccacggtttgcttgcttttattagactgagctaaagggtgggggaattcacatgccatgagagaa

SEQ ID NO: 15902 - DNA, 122 bp, Homo sapiens
tcgtgccatccgttccgtcgtttctgcttccccgggcgcctgcccggctccctccctgagcgtccatactgcaagcctgaggggccctccaagctcagcccaggcttgcaggtctcagaacc

SEQ ID NO: 15903 - DNA, 122 bp, Homo sapiens
accccagctgtggggagccggaggtgcggagtttccaggttctctcttgtcacatgtgagcgtctgtaccatctctggccctttcaagtgtgtcccctgggacacacacgtacagagagtgg

SEQ ID NO: 15904 - DNA, 122 bp, Homo sapiens
aacccgccctccgccagactctggcggtgggagcggctccccctgcaggatctgcagagacgcctcctgggctttctgttctggcctcgcgtttcccgggcgcctcggtgtgaaggcagctt

SEQ ID NO: 15905 - DNA, 122 bp, Homo sapiens
tgagctggtaggaggaccagacggggaggttcggtatgtctgaccaggacttatgttcctcgaaagggcggccaggaggatgctcttcctctcttttctttctcgcctttttctccgcatga

SEQ ID NO: 15906 - DNA, 122 bp, Homo sapiens
cccttgtttctccttcccctgggggcagccgccgccatgatcctgctggaggtgaacaaccgcatcatcgaggagacgctcgcgctcaagttcgagaacgcggccgccgggtgagcgcgcgc

SEQ ID NO: 15907 - DNA, 122 bp, Homo sapiens
tcgagctgcaccttctgggatctctgcatctttcacttctttggcttctttgcattctttcgtggctcctctgtcaacacaaaaataaagtctgaatcttcccccagacttcccttttccac

SEQ ID NO: 15908 - DNA, 122 bp, Homo sapiens
taaaataaggcttagaacaatgcccagcacacagtaagcacctagtgctgtaactgtcatcgttgctgttatgtacctattaaatgttcgtagagttatataaactaacatgaaaccacttt

SEQ ID NO: 15909 - DNA, 122 bp, Homo sapiens
gagcctcaactgtggagtattgacgtcattggaaagagaacctcaactgtggggtattgacgtcatttgaaagagaacctcaactgtggggtattgacgtcgttggaaagagaacctccact

SEQ ID NO: 15910 - DNA, 122 bp, Homo sapiens
ggatgtttggggctgtctggaggatgccaaggctggcttgcccctggtctggtggaacttcgcagcgctgctttgaatgtttgcagtgggtattttgttctgtgacatgtttatgtggtctc

SEQ ID NO: 15911 - DNA, 122 bp, Homo sapiens
ggggcttaggggccagaggcgagtggggaagccgacgagggctaggcgattctgccgccccgctacccttttgggaggccccaggaacgagctgtcctgctaggttcccagttcccagaacc

SEQ ID NO: 15912 - DNA, 122 bp, Homo sapiens
tcaatgtgccttgactgtaagcagaggcctgctaattggaaacactgaattctatagcctcggttctagccctgatttgctatgatgtcaggcaaattatttaatctctctattctcccttt

SEQ ID NO: 15913 - DNA, 122 bp, Homo sapiens
gataaaatccatttatcccttgtgttgcctcactgaggcccggttatccagggcctttggcgacagactggaacaaacagagatgaagatattttttcgttttccatacctgctcctccctt

SEQ ID NO: 15914 - DNA, 122 bp, Homo sapiens
cgaggcagttctgagtggatgatgtacagatgggattcctcagctcatttgcgtggttgacgttatggctgctggttttactgccacaactcccaggcccaacctggcttaatgtctaagtt

SEQ ID NO: 15915 - DNA, 122 bp, Homo sapiens
caagaggagagattgcagatggataaagaagtttctcacagtcgaggaataagaagcacacgggcaggcttccccagagaggccggtgccccaacctagaggacacgaagccgaggccagga

SEQ ID NO: 15916 - DNA, 122 bp, Homo sapiens
acaaacatcaatgtatacatctgcgtgcatatgtatgcacaaacatgcctacaggttcctcggggagtaacacgtgcgtatgtgtaaacacgtgcgtgtgtgcacgtaaacatgtctacatg

SEQ ID NO: 15917 - DNA, 122 bp, Homo sapiens
gaaaaagtctcgtattaaggtccacaaagcaactgtgcattcactaattaaatatcaactcgtaagaaaaaagtggaggagggaggaatacttctattaatatggaagttaaatctaaatca

SEQ ID NO: 15918 - DNA, 122 bp, Homo sapiens
ataggtcatggcatttgtggatgcacctgtgggacacagtcacctatattctcctgtgggcgcccccaagggatgggcttagttgagatctgttgtccctgtgcaggaaccagctctgagct

SEQ ID NO: 15919 - DNA, 122 bp, Homo sapiens
tgcaaatgcaacaagtctctccgctgagccgcagctgctaccctctgccttctgctcctccgccagggcacggccccccctgcgccccaaactgagcggcaaagtcagggcccgcggccgga

SEQ ID NO: 15920 - DNA, 122 bp, Homo sapiens
tcaggcgtacgggattctgaggcagcagactgatttaaaatggagccactgaaaatgacacgcttgtaactgcctgtttgtacacatgcacaaaagtaccctcgtttgcactcaacatgtga

SEQ ID NO: 15921 - DNA, 122 bp, Homo sapiens
tgctgtggtaggaattcacatggcatctcaaggctgaaagctttttgtgcattcaagaaccgaaggtgatggaatgtgcatttttgtctgaatatggaggaatatttatttgctgtatgtgg

SEQ ID NO: 15922 - DNA, 122 bp, Homo sapiens
caggagcacacatggctgacggggtcagtgcaaggacaggcacatttcccttctgcatcacgtggggactgcgcctccctatgtcatgaagccagggaatatgtgtggccggccgcttgggg

SEQ ID NO: 15923 - DNA, 122 bp, Homo sapiens
cagacaccagcctggggaggggtctccatgctcagttccttcccgtcttgttcagagagacgtggcctgcccacgtgcagtcagcggcatccgcaaccctgccaggggccccgtgacacgcc

SEQ ID NO: 15924 - DNA, 122 bp, Homo sapiens
tgtgcaaagggccagaggtgggaagagagagttggaagaaaggaacggaaagaagttcagcgttgctggaaaagagtaggaagagagaagaggaagaagtgtctgtaatgacaggcagaggc

SEQ ID NO: 15925 - DNA, 122 bp, Homo sapiens
gccgcgggttccgcgtagctctccggactccggcggcctcaggggcccaccacgcgccagcgctagcactggcttcccgcggtctagagccccgccgcagcgccccagtcgccgctcctgcc

SEQ ID NO: 15926 - DNA, 122 bp, Homo sapiens
gccctgaacaggccctggtcagatggaggcttgatggtgggcagatgtgggtattgccttcgcaagcctcagagcagagctgggaggagcagctatactcacccccatgtccaattacatga

SEQ ID NO: 15927 - DNA, 122 bp, Homo sapiens
gaatggaagttacctcagtacggtcccgactgctaggctgtgggcagcggacagagctggcggtcccgggcggccgagcagatccggcgcggcgcggcgcggcggcggcggcggctaccgca

SEQ ID NO: 15928 - DNA, 122 bp, Homo sapiens
cgcctgtgaccgtccgccgtccgccgcccgctagggtcggccccgctgcaccctcgcccacgcccggctccctgggcttgtaccagcccctgccccgccttctgggtttgagcgcgcctccg

SEQ ID NO: 15929 - DNA, 122 bp, Homo sapiens
aatgagcatccagtatcctggtctgggtaaccctgagggttagtctctggtttggctgaacgtgtccctttcccaaaaaccagggatgggctccaggaaagctgggatggagagcagactgc

SEQ ID NO: 15930 - DNA, 122 bp, Homo sapiens
tgcataccctacatcatttagtcactcaacagatatttattaagcacccactctgtgccccgctctgggctaggtactaggaatacaaaaactaatatttcctaccctcttggagcttgaaa

SEQ ID NO: 15931 - DNA, 122 bp, Homo sapiens
ctggagtgctggggttaccacggcgtgttgaggcaccactcaattctccacttcccctagcgtaccgcaagaagtattcaaaacagtcggtccatgccccaagaacttggacataaaaccac

SEQ ID NO: 15932 - DNA, 122 bp, Homo sapiens
cagccatctctggagggttgaccccaataaacttcacatgaaaacaaatcatccaaaagacgcaggtgaaagtatataccacttatactgaagtctttttaaagtaaatcaccatatagtca

SEQ ID NO: 15933 - DNA, 122 bp, Homo sapiens
gcgcacctgctgcctgtggacatgaacactgggcatttggtgagtcacacagtggccacccgcttctccagtgggagcttcatggcacccccactgtgctgagttgtcacgggggacctcct

SEQ ID NO: 15934 - DNA, 122 bp, Homo sapiens
gggacttggcacccagagcttcggaggataatgggtttcttcaaactcggtaaggatggacgacggacgattcgcttagagctgatggtggcggtggtcttgcatgccatccctgacctgtt

SEQ ID NO: 15935 - DNA, 122 bp, Homo sapiens
aacttgtgaaagatcagacaattagcagtggcataactagaacttgaaggttcttgccgccgtacaatgtaactccgtttcagtaaaagttccctttttttaattttttttttcttttttga

SEQ ID NO: 15936 - DNA, 122 bp, Homo sapiens
tgtgcgaccttggacatgctgcttggcctgtaagcttccgtttctataaaatagggataacgcttccttccagggaggttttgaaagtgggatgagggatctaagatgcctaggacacatga

SEQ ID NO: 15937 - DNA, 122 bp, Homo sapiens
gcctgctccctggactcgcaggcctcgcctgtggcgccttcccagggccagcctgggtcacgagatgctgtcactcagccagatcagtattgacccaccaggggaggtggggtttggtgaga

SEQ ID NO: 15938 - DNA, 122 bp, Homo sapiens
ggaccatgaggtccttggaggagatttgagcgagcaagggccagcacgagctctccacgccgccgaggccgaagttgagggggcagagcgggagatgccaggaacactgggaggtgcagctg

SEQ ID NO: 15939 - DNA, 122 bp, Homo sapiens
gtcgcgccaggtcaggagtccagagtcggctgaagcgagttgccgcgttctctctggcggcgcgacaccggcccgtggaccgcccggccgccctccaggacccggtctgcaggagcggagag

SEQ ID NO: 15940 - DNA, 122 bp, Homo sapiens
ctactccaagaaaattaaggaacgggacataaggtgaggtgggagcgaaagtttaataagcgaaagaagaaagctctccacagtgagctgagtatgcaagtggattgccctgttacagctga

SEQ ID NO: 15941 - DNA, 122 bp, Homo sapiens
tggagcactccatctcccacccccaaaagaggttttagaaatcatttctttagctgcaggcgggcataaaaccatctaccatcaatgggccccctcatccccttgcttttaacgtattacat

SEQ ID NO: 15942 - DNA, 122 bp, Homo sapiens
tttgtcacactgtgtttaattgaaatgtattgcttggatccagtgtcctggacatagcctcgttcctgtcctagcacattcttaccctccttttccctcttccttcctgtagctatttttct

SEQ ID NO: 15943 - DNA, 122 bp, Homo sapiens
gatgcctgcagtgccactaaaatgtgggtgaaggtgacatcaggattatgtgccccaggccgggctcagtggctcacacctgtaatcccagcactttgggaggccaaggtgggcggatcacc

SEQ ID NO: 15944 - DNA, 122 bp, Homo sapiens
ggggaagggagagaggaactgattataagcctgccctcccatatgaagtgggactgcctgcgtctgaggacccagactcttatttgtaggtgaagtatgtttcttgtaagcaacaaaacatt

SEQ ID NO: 15945 - DNA, 122 bp, Homo sapiens
cccaccgcagcctccaaaggcgcgtgggcgggactggagaatggggccctgcgcactaggcgcggaagtcaagaagcagccccaccacccgtgccgcgagaaaagcagccctggggaggcgg

SEQ ID NO: 15946 - DNA, 122 bp, Homo sapiens
atgcttatcagcccaattgttctatttccttcaaaagttcttctaagaactccagcgactcgccaagttgcccactgagaactctgggccaggaaacacacaagagtttttgtgcaatttgt

SEQ ID NO: 15947 - DNA, 122 bp, Homo sapiens
ccggtgccctaacacttcctgtcatcacagtagttgttattgaaagcaccaagtgccaggcgtggtgtggtggctcacgtctgtaatcccagcactttgggaggtcgaggcgggcagatcac

SEQ ID NO: 15948 - DNA, 122 bp, Homo sapiens
gggtccgcagggaaaaggcactatcccggaaagcttcctggaggaggggagcgcgaaggacgaaactgggcctccctctaggcggagcttagtgtttaaagctggccggcctttctcctttt

SEQ ID NO: 15949 - DNA, 122 bp, Homo sapiens
actctggcgtctctttttctcccttccacagtgggcgggggtgtcctggctccgtttcctcgggggctgggtgaatgaagtcctcgcacgccccccggagtggtctgtctctcactggcatc

SEQ ID NO: 15950 - DNA, 122 bp, Homo sapiens
gccttgcagctaaactattagttccgatgcacgcttttcaacaccctctggacttcccggcgatctgatttatcagtatgaatgtccatcaaaagaaactgaaccctcaaaggcagccgggc

SEQ ID NO: 15951 - DNA, 122 bp, Homo sapiens
ataaacattcaagtggagacacaatgtagaccattagaaatggagctcaagggccgggcgcggtggctcacacctgtaatcccagcactttgggaggccgaggcaggcggatcaccgggtca

SEQ ID NO: 15952 - DNA, 122 bp, Homo sapiens
cctgtgtggcaacccagaggaagcctccccttcgtttgagatttaaccccagaccttaggcgatggctgcccagcctgtcccttccgcctgtgtggctgcccacgcgggcgttgctcatggg

SEQ ID NO: 15953 - DNA, 122 bp, Homo sapiens
aaagaagggtggatctcagcactctgggtgaaagcaatctcagccagtaaaacatcagaacgctttcacgcacgcgcagtaagcacacgaccggtggcaagagcccggataaaggcggagct

SEQ ID NO: 15954 - DNA, 122 bp, Homo sapiens
ctcccctaccccccaattgacggaagccattgtcgttagtgtgattcttaatatctctaccgagtcaaaactctaatacacatagcataacgataagtatgtcttttcctgggtcttggcgt

SEQ ID NO: 15955 - DNA, 122 bp, Homo sapiens
caccacaaactgagtcatggtcacaccctgcctgatggaaaattaccaggaggagggaaacggaaggttaaactccaggggtttgtaatttctcaacctaaaaatcagataaatgtttgagg

SEQ ID NO: 15956 - DNA, 122 bp, Homo sapiens
gggtgccgcgctgtcgcccaggtatctggggtctctggtgtctgagtgtctcattgtcggcgcgaacacaattgctccagccacaggcgaggcctggccaaggtgtgggcgcatctggggca

SEQ ID NO: 15957 - DNA, 122 bp, Homo sapiens
accccctcccgcatacaccaggcgggcaaggtggagcgcccctcctcggaaattgccccccgcccaagatgcgtcagtgacagctgtgcctcctcagcccgcacccagccggtttccttttc

SEQ ID NO: 15958 - DNA, 122 bp, Homo sapiens
agcttccgcaacggaaagtgtgaggtcagtagtagtttttgtggtacgtgcagtggtggccgcttcaaggactattttcgtcgctgcttgcgttttaagtctccaatcctgggacgaggccc

SEQ ID NO: 15959 - DNA, 122 bp, Homo sapiens
tatagttgttccagtcctcgatgctccgccccagctcggtcaccgcctggaactccccaacgtcgctgtcgaagcgcccgtactcctcgcggttatagatgtatctggccacaccgcgcacg

SEQ ID NO: 15960 - DNA, 122 bp, Homo sapiens
tttgctttctttccttctttcattgaatcacctttcttttatgtctaagattgttgggcgcgtgttttcgggtttataggcctcttttattttattttaaatagtatttaatttaaaaattc

SEQ ID NO: 15961 - DNA, 122 bp, Homo sapiens
gggcatacattgcttgatgctgtctaaatctcagcagatttctctgcatccacctgttctcgatctgctctgtcgcatggaacacactgtgcagtcaccgtcttcccaagtgacattcaaag

SEQ ID NO: 15962 - DNA, 122 bp, Homo sapiens
ggtgactgtgatgcatgctaaagtttgcaaaccgctgccctgggagaaagcttgtcttctcgttatgctctaggtccctaaggttgagtctacactcccactcaggaactagctccaaagac

SEQ ID NO: 15963 - DNA, 122 bp, Homo sapiens
ggaaagccgggtcacttggggctagggacggcccccgagcgagcggggctgcaggtgccgcgaggaaagtcagatcttatctgcgctcctagttatctccgcagctctttctccaggaaaat

SEQ ID NO: 15964 - DNA, 122 bp, Homo sapiens
cgctggaagggtgcaaggtgtgcgggccgggggagagtgcgtgtctgggtccagggctgccgtctgcgtgtgagggtgcgagggtgtggtcgtgcgggggactgtgtagtgccctggcgtgt

SEQ ID NO: 15965 - DNA, 122 bp, Homo sapiens
ggtccttcctgggcattgtgggatatttagtagcatccctgacctctgtctgctagatgtcgggagtacatttctccccaggttgtggcaaccaaaaaaagtctccagatgttggcagatat

SEQ ID NO: 15966 - DNA, 122 bp, Homo sapiens
tctggggcagggagagccagcctttccgggggctcagttttcttaagaattccacccccgcgaggccggctggacgacaggccctgctgcgggccacctgcccggcccgctcccagggcggg

SEQ ID NO: 15967 - DNA, 122 bp, Homo sapiens
tctctccgttgtgcattcgtatgtgctgggccaactcagaggcaatgcggaaggccctgccgcactcggcacagaggaatcccttctccccggagtggatctgttggtgccgcttcagggtc

SEQ ID NO: 15968 - DNA, 122 bp, Homo sapiens
ctgtcataaaaacgcaggtgagagaggaggctaggcttggaggtgggtcctccaaagagccgcatccagggtgtatgggggagccccgactccagccagctgttccagcctcagaggttggc

SEQ ID NO: 15969 - DNA, 122 bp, Homo sapiens
cagctggctctgggatcacagaggggttggcagcccacatctgaacccaggccagcctgccgcgtgggggcctaagaaatgcaggtttccatggaaccttctgagcgaaatggggagggccc

SEQ ID NO: 15970 - DNA, 122 bp, Homo sapiens
ttgcagccaggctccactggccctcttccccctgccgatgacaagctggaagagctcatccggcagtttgaggctgaatttggagatagctttgggcttcccggccccccttctgtgcccat

SEQ ID NO: 15971 - DNA, 122 bp, Homo sapiens
tggtgcagatcaacctgccagaagtcagaagtaaacttgttttggtttgtaaattagacacgtgaatgatagacaatgatgacccattggaaaaggaaaacttcattatccttgcagatgaa

SEQ ID NO: 15972 - DNA, 122 bp, Homo sapiens
gtctgacctcagatttaccacagcaggattttttccccatcctaataagcctgagggtaccgcaggagaccagggtgtatttcagtccttatctcaactgcgtaagacagacactcccagag

SEQ ID NO: 15973 - DNA, 122 bp, Homo sapiens
ggggtctcgtagatacctcgggacttcattccaatgaagcagttctccacgatgtcaatacggcccacgcagtgctttcccgtgacttcattcaggtacatgaagagcgccaaggaggtctg

SEQ ID NO: 15974 - DNA, 122 bp, Homo sapiens
ttcaggcctgagctgttttaacagtcctccaacacaaagaagcccaaagctgccaacgttcgttttttaaaagggggatttgcatgtggggcttcttaggcagggcctgttgatgagatttg

SEQ ID NO: 15975 - DNA, 122 bp, Homo sapiens
cccgcctggtcccgcctcctcctgaaaagagctcagttgtcaaggaactatttttcttgccgtcgtcccagagatgcctttggaaaagcggaagggcacggagggttctggagttcgttgct

SEQ ID NO: 15976 - DNA, 122 bp, Homo sapiens
ctttccttctcctctttcccgctttttgcatttctgcctcagtttggggagctcccctggcgaaatggtcaagaacttgagttgtccctctctctgcttcatcctgccccgcagcgggggca

SEQ ID NO: 15977 - DNA, 122 bp, Homo sapiens
gtcatacaaacctcttcctgcatctgggactctttccagctgctacatgtgggagcttcccgtttttgttctaattgagtgatgtttactggaaatggagtctgctaataagatctcagttc

SEQ ID NO: 15978 - DNA, 122 bp, Homo sapiens
ctctgcgcggtccccagccctctacccggcgggcagaggctcgggcccagcgccgccttccgctgggatctgttcccaggcccagggacgccggccccaccccagttgcctaggtgacgagg

SEQ ID NO: 15979 - DNA, 122 bp, Homo sapiens
aacgccttccgcggggccttaacctccagctgcttggtcttttttcccttccccctttctcgcccgcccctcccgctccgtctctaatgaacccccagtgacccaagaagaccgggtgcttg

SEQ ID NO: 15980 - DNA, 122 bp, Homo sapiens
gggcgcaggatgaaacgtgtctggtctgggcaagttgtggcgaggcgggtcgactggcgccgctctagggccttccagactccggaccacggacgactcaggataccccacccccctcccgc

SEQ ID NO: 15981 - DNA, 122 bp, Homo sapiens
cccagagcctgggctctgctgctgtttctctgtgacttgaggcaagatatcctacgctgccgagatagcagcccctctgcctggggaggtgagtgtgaggaacccggtgtactctgtcgatg

SEQ ID NO: 15982 - DNA, 122 bp, Homo sapiens
ttgggcaaggtgactctcagccaaggcaattcctgaagatctaccagcccaaaatgttttcggcagccagggaaatggagtccttctgttctggaaggggatctgggaggtggagcccaaca

SEQ ID NO: 15983 - DNA, 122 bp, Homo sapiens
cgccccaactcaaggacgggatgcaagtgggaaaacggacaccagggtcctaggtctccgcgcccacaccgcgtgctcgcttcatttcgctgcccgcgcccgtccctcaggtctgggagtca

SEQ ID NO: 15984 - DNA, 122 bp, Homo sapiens
taaggaattactcacctacagggcgcagttgggctgttgggagaacttagaatgggctcccggcttctgctgatgcttttcccaccaggccccttctggaggtgggagggaaggaatggaca

SEQ ID NO: 15985 - DNA, 122 bp, Homo sapiens
ttgtgataactgcgtaggtgagtagtgcctgggcggagcctggcgggagcccgggtcctccgggtgggtttgcgcctctccaaccctgcgccacggaacactcagtaatggttaatatttca

SEQ ID NO: 15986 - DNA, 122 bp, Homo sapiens
gtgcgagtgggaacccgggctgtgcgcggcgcttgtgggccagctggagttccgggtgggcgtgggcttggtgggccccgcactcggagcagccggccggccctgccagccccgggcaatga

SEQ ID NO: 15987 - DNA, 122 bp, Homo sapiens
ctcactgctctgagaataaactccaggctcttccatcgcaaccaacaggatctggtgattcgaccccagcccctctttccaggccctcatcaccttgatcctcccttaacctatcctgctct

SEQ ID NO: 15988 - DNA, 122 bp, Homo sapiens
cacacagcaggaggtgagtggtgggtgagtgagcattattaccacctgagctcggtctcccgtcagatcagcagtggcattagactgtcatggaagcatgaaccctattgtggactgcatgt

SEQ ID NO: 15989 - DNA, 122 bp, Homo sapiens
ttggcgaggacaaaatcattctcggataagtcctaggctggagacattgaatctgcagcccgggtccccgcaatgcatagaacggcccgggtttgcaggcgtatgagcttagaacacacaaa

SEQ ID NO: 15990 - DNA, 122 bp, Homo sapiens
agggcatcccgcgaggggctgatgagctggtataagtcacatgtgatcttgtccttggctcgggccccaggacctgggctgccagggtaggcacaaccaggcctgcccccgcccccactggg

SEQ ID NO: 15991 - DNA, 122 bp, Homo sapiens
cctgcagtcccatgggccatctctcttttgggtttctgtcccttcccatctcctgcagcccggtgggctgtccatcctttaggtttccggcccttcattttcctttccgtggtgtgtatcgg

SEQ ID NO: 15992 - DNA, 122 bp, Homo sapiens
ctcaggtgatccacccacctctgtctcccaaagtgctgggattacaggagtgtgccactgcgcctgaccagctttataaagtttatagggacagtgtcaccactttacagaagagggactga

SEQ ID NO: 15993 - DNA, 122 bp, Homo sapiens
caacagggagtccaggatgatctggaaggagtctatgctgaattcaaactggcgtctcaccgagtccacaaacttgagctccacgttcttgccgctcttgttggacagtgagatgaggctcc

SEQ ID NO: 15994 - DNA, 122 bp, Homo sapiens
aataccccacaggtctggctggggggaggtgtatgcaaagccacccggtgtttttgatgtcgacaatccacttgggtctggtgggaaaggtgcacatgcataacgggaaaaataacccacac

SEQ ID NO: 15995 - DNA, 122 bp, Homo sapiens
tccctttcaacaccagcttcttgtttctctataccttctagggaaatgaatacagctgggcgtggtggcagatgcctgtaatcccaaccactcaggaggctgaggcaggagaattgcttgaa

SEQ ID NO: 15996 - DNA, 122 bp, Homo sapiens
cagccctggggaggcggggcggggcctcacttggaaaagagacggtcactcatccagaggcgggactcagagcccctccacaagtctcattggtccatttgaagacggacaactctccctga

SEQ ID NO: 15997 - DNA, 122 bp, Homo sapiens
gcaccgctgctcagtagtgtgcttttagaacctgccagaggagctccagcattgggaccacgtgcccctttcatcggaatcagggtcctatattcactgagttttccatctcaggacagctg

SEQ ID NO: 15998 - DNA, 122 bp, Homo sapiens
ggcaccaggccaggccaggatgaaaggggcaaggcccttgtgggtagaaaggaacccaagcgtcccacaccccagctagccttggtacctcctgggggccttgacaagttcccggatctcct

SEQ ID NO: 15999 - DNA, 122 bp, Homo sapiens
gccgttgcctgagaaccctaggatcacagcgttgggccggagtgggacagggccgggtagcgtcccccgacagagctgggtcagggccttgttgtggccgggggcaggcccggcagctgaaa

SEQ ID NO: 16000 - DNA, 122 bp, Homo sapiens
gagacagttcttctaattccaagtccatatcctttttttttttttaaccctgcctcaaagcgtgatgttctgagctgaaaattacatatagtgtaaagatccttagcaacatcaaagggcat

SEQ ID NO: 16001 - DNA, 122 bp, Homo sapiens
ccccagcctgccagcacctattccacctcccagcccagcatggcacccctgctgcccatccggaccttgcccttgatcctgattctgctggctctgctgtccccaggggctgcaggtctctt

SEQ ID NO: 16002 - DNA, 122 bp, Homo sapiens
gggggcgatcttttcccatcactcacatctttgttcattgttcactgagtggaaggcaggcgacttaaagagacgaaagagaggaaaaaggggtgagagacggagagaggaaaaagaggggg

SEQ ID NO: 16003 - DNA, 122 bp, Homo sapiens
gcgcggtggggacgcgctgtgttctcgcagctcagaggcgggtctgaggctcggtggcggcgcccagggtggcccgggccctttcctcggtcgttgtctcaccgccacaggctccgatggcg

SEQ ID NO: 16004 - DNA, 122 bp, Homo sapiens
tgaatgcagctgagagatcacatgaaatgagaacagagaaatgatggctgggtttggtaacgtgaaagtcctgctgaccttaaagagggtggtttcagtggcatagttagaacaggaaggca

SEQ ID NO: 16005 - DNA, 122 bp, Homo sapiens
caccctgctgccgtcaccctagtctttctctagctggttggatattaacccgcagccaggcgcgaggaggctggcggagatttattccttcctgggcccccacccccattagccggtcccgg

SEQ ID NO: 16006 - DNA, 122 bp, Homo sapiens
ttccctctagcccaggccagcaacaaccccttgaggctccaaagctccttgtcccatgcacgctggtaagcgagccagtcattctctcagcctggccacagatggcctgctcagtgcctgga

SEQ ID NO: 16007 - DNA, 122 bp, Homo sapiens
ctggggtccgcgcccagccccggccggcgcgccgctggaccaccgccacttccgacccctcggctctgccctgggctcccgaagctgctgggcctaaggcttggtgctctgggctacctggc

SEQ ID NO: 16008 - DNA, 122 bp, Homo sapiens
acgagaactgcttcaaggtgagaggaggcctggggctgggaacacgccgggaggcccggccgctcactccgctctggactcagtcctgggtggaccctggttcagcggctgggacaccggcc

SEQ ID NO: 16009 - DNA, 122 bp, Homo sapiens
ctcttttacctctgagcccgcggggagtgggtggagggggaggatgggctgcggcttcggcgccccctcctcagcagccgcccgcctccaggctgtcgtgaccctgggtgccgcggcggggg

SEQ ID NO: 16010 - DNA, 122 bp, Homo sapiens
cccacctttcttttgcttctttgcctttttctccctagttttcatttctttcttttagggcgtcagccccccacctctgtggttgggagggactattgcacgtctacactctcgtggggatg

SEQ ID NO: 16011 - DNA, 122 bp, Homo sapiens
accatgggctgctggggcatgtgtatctacgccttcagtgctgccttctactcaggtacccgctgccagccaggctggcacggcagtgagagctttggttgggtccatggagcatgcgaaat

SEQ ID NO: 16012 - DNA, 122 bp, Homo sapiens
atgtaaacaaaggaataggctggggctcattgagtggccttttcactacacctgcataagcggatagtgactgacatcagttacagcagcttgattctgaaggatgagcgagagaattttgc

SEQ ID NO: 16013 - DNA, 122 bp, Homo sapiens
acgcactcgcgccggccctaagcctcctaaccgccctcggccagtggctggccaggctgtcggtcacccagcccggctggttcgccgccccccttgccgcaggtcccactgaaacccccgag

SEQ ID NO: 16014 - DNA, 122 bp, Homo sapiens
gagaggaagtcttaggagctcttaaggggctgtgaggggacctggggttcagtgggcgagcgtgtgggcgggtgtcccagaagcggtgtgaggagcgttttacccggtggtggggtgggagg

SEQ ID NO: 16015 - DNA, 122 bp, Homo sapiens
gaggggaaggaggagggaagtaggacttcaacatggcggctgcggcactggcggtggctacggtgacggcctggcccggagcgggcagagttggaggtggtggcgttcgctctccctagggg

SEQ ID NO: 16016 - DNA, 122 bp, Homo sapiens
catgttcataacacaaatcttgtgtccctattagttctcattcacaaggttagagttcttcgtttatgaggcatacagatggcatgtagcaggaatggcccagtattacatctctctgacac

SEQ ID NO: 16017 - DNA, 122 bp, Homo sapiens
acgatggcaaggattacatcgtcctgaacgaggacctgtgctccttgacagccgcagacacggcggctcagatcacccagctcaagtgggaggcggcccggggggcggaggttcatcctcac

SEQ ID NO: 16018 - DNA, 122 bp, Homo sapiens
ggcttttggtaggtctctacccctaggggggcctctgtgtctgcaattataaggtgggcacgtgtccctgttggatgccatatagaaaagaaggtgacaatgagcacagaagcgttttgtaa

SEQ ID NO: 16019 - DNA, 122 bp, Homo sapiens
tgtaggggcctccgggcaaaggaagtgcttgttgaaaaacaacattgtgatcacttccagcggcgaagggtgtgcttgggaacggtttggggaggggacagaagagagaggggtgggatgga

SEQ ID NO: 16020 - DNA, 122 bp, Homo sapiens
caaacccgagaactgcaggagagacaggaggcagtaggtgacgcggggaggcggcccgaccggacagcgccgtgtcctcagaccgtcatgccatccccttggtttcctcgcctgcacggggg

SEQ ID NO: 16021 - DNA, 122 bp, Homo sapiens
tagaacctggagaggatttttcaaagtaaatgaatctcgaaagctggattgcagagcaaacgagtgcagtcaattcagccaggggcttgcaagagggagaaagagaaaaagactgtggaatg

SEQ ID NO: 16022 - DNA, 122 bp, Homo sapiens
aagggaaaatgtcatgtgaatctccagaggctttctgagaaaggtgaagattgagtcaagcgttagaggagaggagaaaaagaaagaaggtatgagaatgaagcagcacaatacattgccca

SEQ ID NO: 16023 - DNA, 122 bp, Homo sapiens
cggcgggaatggaagcttccactcccggacgggggcgcgcggccgggggcgggggggccgcggcaccaactgaaaagggttagcgcatttgtcccaagccttcggtccagcccggcggccca

SEQ ID NO: 16024 - DNA, 122 bp, Homo sapiens
ttgaggcccttggcccaacccatgctgtgcttaacaaacataattccatgctaactaaaccggaagttctgaactacagatagggtgtcaaggagattgtgtgtgcgcgtgcattgtgtgtg

SEQ ID NO: 16025 - DNA, 122 bp, Homo sapiens
caccgcacgctgaacctgctgctgagcctcgggctggccacgctgctgggcctgggtgcccggcgcctccaccgccacgtctgccgcctctacgagctgcacagcagccagcgctactgtgg

SEQ ID NO: 16026 - DNA, 122 bp, Homo sapiens
gggctgagcgggagggaggcaggctggcgggggggtgccccccgaggctgctggtctgaacgggtagctgggctggggggacggaagagggaccctaggtgcgctccgctccggggagggga

SEQ ID NO: 16027 - DNA, 122 bp, Homo sapiens
aactgcatgagagtgactgctgttggaaaggagaaactcggtgactgagtgctggggaggcgtccaaatacacagactaactttttgtatggttttgggtggagttcccagctctcctatta

SEQ ID NO: 16028 - DNA, 122 bp, Homo sapiens
aggtgctacctgggcgtggcgggtgggcaggcggcccgggcgaggggctcgcagcctgggcgtcagcgtggtcatggccgtcgtggcttccgccgcgggcctcggcgcagagatcctagggc

SEQ ID NO: 16029 - DNA, 122 bp, Homo sapiens
cccacatgccccggacaaagcgcacacgcctcgtcattttccagccatgcttcgtgcccacggccctccctgcagcgggaatctctcgctctggtgacggggctaatgtgggcgccgaatct

SEQ ID NO: 16030 - DNA, 122 bp, Homo sapiens
agtcctcgatacgcactatagcaccgagaatgacgtggagaccatccgggccagcgtctgcgccccctgccacgcctcatgtgccacatgccaggggccggccctgacagactgcctcagct

SEQ ID NO: 16031 - DNA, 122 bp, Homo sapiens
gaaaggccaactctcagcccctgtccccagtcagccttgaaaccacctttgcaaacattacgacaatgagaaaaatctgacatgggaaaattatgacagtgaaagaaatctgacttaactaa

SEQ ID NO: 16032 - DNA, 122 bp, Homo sapiens
cccaccacctcctcacctggcagacgaaaggaaactggttcctcccaatgtggtaaccatcgagccccagggggaagacagcagctaaagccagtgagcagcccacagcagtcaggttgttc

SEQ ID NO: 16033 - DNA, 122 bp, Homo sapiens
aggctgtgtgcccagtgtgcgtgccgggtctgtgcgtgcaggggctgccgtcccagtgggcggccgtctagcttgtttggatggctgcgccagtgtgatgggaaggacaggcggcctcttcc

SEQ ID NO: 16034 - DNA, 122 bp, Homo sapiens
gccttcttgagtgtgcatgaccaagactctggaaagaatggtcaagttgtctgttacacacgtgataatttaccttttaaattagaaaagtcaataggtaattattatagattagtgacaag

SEQ ID NO: 16035 - DNA, 122 bp, Homo sapiens
taaggcagggcccagaccccacagtgtgggcctctggagctgtgtctttactcttgctgccgatcaatcccatgctctgaaatgcgcacactctggctccttagtagatgccataggtgggc

SEQ ID NO: 16036 - DNA, 122 bp, Homo sapiens
tggtatcccggagcttgttctttcctggggcgctttgtttcagtccacaagccaacgctccgtagcgcggcccccaccctcctgccgtgtggggcaaactattcaaagtcccctggccgtca

SEQ ID NO: 16037 - DNA, 122 bp, Homo sapiens
agaccccagacgaggggagcagaagctgctggtgcctctctgttctttgccggatgctaccgttgtctgtggccacacttgcttcttcaggtgtggaaatagaagctcagagaagttaaaca

SEQ ID NO: 16038 - DNA, 122 bp, Homo sapiens
tgtgccgagctctccctctgggaccatggggccctggccaaccgccagctggggggcacacgcctcagcctgggcaccggtaagtgggacagcaccctgagacaggccctgggacaggccct

SEQ ID NO: 16039 - DNA, 122 bp, Homo sapiens
gctggcaggaggagtggagctgggcgcaaaggtggactcagggcggctagagcgacgcggcggcaggggtggggagagtgcggagcccgagcgcggaggcttcggttccggtggcggcgatg

SEQ ID NO: 16040 - DNA, 122 bp, Homo sapiens
aaataggtatttgccagtagcaatgagcattgtgtactacaatgacggtgctgcttaactcgatactgttcccacacctcagttagtcgggcccagtgcgtgggtaaatcatgaagtcactg

SEQ ID NO: 16041 - DNA, 122 bp, Homo sapiens
ttgcagaagcatcttaaagacaagagggacagggcttagagaattttttttttaaggcaccgttcttgcaaaagagtgatgtaagaggtaaggaagctaagagacaaaactgaacaaatgag

SEQ ID NO: 16042 - DNA, 122 bp, Homo sapiens
gggatgaagagggtgaaacgatggatgccggagcgcagggactggcgagggagagggtgacgcaggctaaggagagggcgagaagcttcccagatgttaaagcgcccagactccgttttcaa

SEQ ID NO: 16043 - DNA, 122 bp, Homo sapiens
acacccccatccgctcactccctgggaagccggaagcctgggttcctctttcttggtttccggctcccagcccctcccaaaggggccccgagagtctggggctaccaactggtgcgtgcggg

SEQ ID NO: 16044 - DNA, 122 bp, Homo sapiens
tcatggttttgatatttaggagaatttgctttgtgacattactttgataatttgcaatcacgtatgtcctattgttaataacattgttgaaatgggtgtatacttacttgatttgaaatata

SEQ ID NO: 16045 - DNA, 122 bp, Homo sapiens
ggccgcgcccgccgccggccccacccatccgggtcgaggaggccgaggccatggctgagacggaggagcggagcctggacaacttctttgccaagagggacaagaagaagaagaaggagcgg

SEQ ID NO: 16046 - DNA, 122 bp, Homo sapiens
tcaaggtcatcgccaaggtctaatttttcaaaaaagaaacttctaacctctggcataaaccgatgaccattaaaggaacacaatttccaatgttcatttagatcttctaattaaatattcat

SEQ ID NO: 16047 - DNA, 122 bp, Homo sapiens
aggggcgacggggcgctgagatgggccaggggctgagtgggtgacggggcgctgagtaggcgatggaggtctggggtctgagggggagacggggcgctgagaggcgctctgagtgggtgctg

SEQ ID NO: 16048 - DNA, 122 bp, Homo sapiens
attaatattcaaggccacagcgctggtgagttcggcgccctctgttgtatttttgcatcccgggaaggctggcccggctctttggcccggcgtgttttgcttccgcgggggaggtaaagctc

SEQ ID NO: 16049 - DNA, 122 bp, Homo sapiens
cctgccgtcccgccagcctccggagctctcgtccagatacttgtactgcagccctctctgcgccgcctccccggaccctctaagagctggcagcttgtagaccacgaacctggaggtcggag

SEQ ID NO: 16050 - DNA, 122 bp, Homo sapiens
gttaaaatgtaggcctccagttcattttcagttattttctgagtgtgcagacagctatttcgcactgtattaaatgtaacttatttaatgaaatcagaagcagtagacagatgttggtgcaa

SEQ ID NO: 16051 - DNA, 122 bp, Homo sapiens
cctactgtccccaccatgcagggctgggtaccgctgccatcgcccgtcccaggtcattggcgtgtggccagagcccgtccccatcgcacccaggactcgcctcgggcacgcgtcttctgcac

SEQ ID NO: 16052 - DNA, 122 bp, Homo sapiens
gaagtcccacgtctgctctgcccctaggtcatgcccgtgctgacgccacatcgccagggccgcactccatgagcagcctctgccgtcccaccagcaacctaaaccacaggcagagcgaggct

SEQ ID NO: 16053 - DNA, 122 bp, Homo sapiens
agtcggggcgacgtgggtgcctcacagaagagggaaaaagccaggagggcggcacgtgggcgcaaagttctcagcttcgttagtcatcaagaaaatgcaaactaaaaccaaggtaagtgtga

SEQ ID NO: 16054 - DNA, 122 bp, Homo sapiens
cccacttggtcttcgtagaccgcggccgcaggaatcagcagcgtagcccaaagccagaaacgagaagcccactcagccgccatgatgcgagcgcatgcaccacccaccgccgtcccggcatg

SEQ ID NO: 16055 - DNA, 122 bp, Homo sapiens
tgagtttaaacgtacattaaaagccatgaacaatactccatggggaagcttagaattcttcgttgaaatttctcaactctaactcttcatgtcatgccccatatgcggttagactgactaaa

SEQ ID NO: 16056 - DNA, 122 bp, Homo sapiens
gtctgcttcgttacgaggaaaaacgggcccctccgtggggacatttcccctcctcctccccgtgcagctctggccatttgagcaggggctcctttcgcagttgtgaagagaggccttggctg

SEQ ID NO: 16057 - DNA, 122 bp, Homo sapiens
ttgaacctattctcaacagagcaaccaaaaggacccctataaaaggtaagtcagatcaaacgccttcagtgcttctgactcagtaagtaaaaatccagactcttaaaaagtggcctacaagg

SEQ ID NO: 16058 - DNA, 122 bp, Homo sapiens
ctgagcgcaagccaagcctcccaaggcttctctgtttgggccctgcaatcccttccacctcgtttcccaccttggggggtgatgtgcttggacttaaaccgggcagaagctacaaagcagcc

SEQ ID NO: 16059 - DNA, 122 bp, Homo sapiens
atagccaaacatcccaattccactgttaggtatgccaactccacttaggaagtacagacccggtgagtcatcacatccctgcgtgttcttgggaaggcaccaggtgggaagcaggccgaatg

SEQ ID NO: 16060 - DNA, 122 bp, Homo sapiens
cagccgcagccgcagcaagagcggcagccgagagctagcgagagagcgaaccaacgagagcgcgcgcgcacgcggcgcccccgccctcgcgtcgcgcgtttgaaggagggcggttgcggcac

SEQ ID NO: 16061 - DNA, 122 bp, Homo sapiens
gaaagaaaagaagaagaagaaaaaagtatcagcgaagtgccggggggaagaagaggaagccgtgaattccactgcatggcggagtggttacttgcacagcatctgacctgggccgctggaga

SEQ ID NO: 16062 - DNA, 122 bp, Homo sapiens
gagacagggtgacagacggcttttgtgggaacatcagcatgtgtggctctaacaggcaatcgtaagttctgcgagaaagctggaaggagtagaagcagccaggtggcaggaggtggaggtat

SEQ ID NO: 16063 - DNA, 122 bp, Homo sapiens
actgctccgccttcgctgtatctccgaagtctgtgcagaggagaactcagctcgccctcacgatgcaatctgggtctgtgctgaggagagcgcagctccgccctcgcaaaggcgcacagcgc

SEQ ID NO: 16064 - DNA, 122 bp, Homo sapiens
gcgcgccaacctctggagataccggctgtccccaaccgcgctgaggaaagctgggacccacggactccctgccctgcgcgtccccactcccaccacacgctcgcgccggatcagggaaacgg

SEQ ID NO: 16065 - DNA, 122 bp, Homo sapiens
cgcactcgcgctccggggcgcctcccccacgacgtgtggaaagccgctctccccgcgctccggaaccgttagccgcacccgcccgacgcctcccaggaaccaaaccggaccgggccgcgggg

SEQ ID NO: 16066 - DNA, 122 bp, Homo sapiens
gacgggggagggctgggatgagatggccctgtacctgtgagccccctaggaattcggctgcgccaagaccctgtacatctcagatgcagacaagaggaagcactttcggctggtgctgcggc

SEQ ID NO: 16067 - DNA, 122 bp, Homo sapiens
atttttgaacattcactgtgtgctaagtgccgtacaaacatatctcattgaatcccggagcgaagcttctgagaaaggtattactatagccatgttacaggatgggtaagtgagatataagc

SEQ ID NO: 16068 - DNA, 122 bp, Homo sapiens
ttgtgggtgtaggtgatgctctgaattccacctcctatttgcttgaccttggagtccaggcgatacggctggatgacggggacgcccaggggtgtgacccactccaccacggagcccgtgtg

SEQ ID NO: 16069 - DNA, 122 bp, Homo sapiens
gggccccagggccgcgctccatggctcccgaccgcccgcccgtgcatccgtcggtccctccgcgccccggcccggcctcctgcaccgccaccgccgcagctcccccacgaacggaagcaaaa

SEQ ID NO: 16070 - DNA, 122 bp, Homo sapiens
cgtgggggtggctaagcccatcatccagatgtgatgaactggggtctgggaaacccacaccggcctcatctggcttttccagcctgtcctcccttccacacatcaggctgacagcaccaaac

SEQ ID NO: 16071 - DNA, 122 bp, Homo sapiens
tttgctcagtctgggccggggccctgtgccgctgaagacatggagtttgtgtctggataccgggatgagttccttgatttcactgcccttctcttcggctggttccgaaagtttgtggcaga

SEQ ID NO: 16072 - DNA, 122 bp, Homo sapiens
aatgctggcaagcctcattcctctcttcatctcttctgaagcagataaattgaagtagaacgtcattctgtggtaagcaggatctgggaaatgctttcaatgtttacagaaatcggatgcaa

SEQ ID NO: 16073 - DNA, 122 bp, Homo sapiens
catgccccagccccctcccccccaccaccgtgggttccctcacggcctgagcctccccgacgggtgctgccccctgctccagggctcccggtcccatcgaccgcccaagggctgaggagtgc

SEQ ID NO: 16074 - DNA, 122 bp, Homo sapiens
gggccgggaggctgcaggcgatggagccggtatggggagacgccctgctggagaagtggccgggtcccggccgtgcgtgggccggccctgcgccacctgggtgacctcagacacctgggcct

SEQ ID NO: 16075 - DNA, 122 bp, Homo sapiens
gcctaggaactgttcctttttgaactttgctgactctccgaggaaacagcattttgaggccgcttcttttactcttcattcaactgtttcctgtattcagcactgaggcttctgagaggctc

SEQ ID NO: 16076 - DNA, 122 bp, Homo sapiens
acgtccagcacggcgatggacacgcgcaccgtggcaacctcaggctcggcgcctccatcgcgggcctccaccaccaactggtgccaggcctgtgcctcgcggtccagaggtctccacactcg

SEQ ID NO: 16077 - DNA, 122 bp, Homo sapiens
ctgccttggagggcctcacctttcctgctgggtcagctcttgcctgtggctctggcctcacgggactctcaacaatgctgtgcaggccccactcttgtctgtggcccccaggggctttgtgg

SEQ ID NO: 16078 - DNA, 122 bp, Homo sapiens
agttaagtactaatattgaggacctctgacttttttgcttaagacataatcatcttttgtcgtgggaagaagcaccacattcctgtggtcttggttgactgctgaaatgctttcacaggttt

SEQ ID NO: 16079 - DNA, 122 bp, Homo sapiens
cctgcattgtagtgactgccccagaaatgtaggttctcacctgggttctgcagggaaatacgaaggaatccctaggtacagtctccgcctacttcattaaaatttcttttgttgcgagtata

SEQ ID NO: 16080 - DNA, 122 bp, Homo sapiens
ttgaaaactttgaagtcactttggccattttggatttcagatttgcaggtttttctttcccgcgtgtgtatgtgtgttgagaggtggggggagataagcagctcacacacacccatcttctc

SEQ ID NO: 16081 - DNA, 122 bp, Homo sapiens
agcacacagtatgacctgtccaaggccagggctgccctcctcctggctgtgatccaaggccggcctggggcccagcatgacgtggaggcgctggggggcctgtgctgggccctgggctttga

SEQ ID NO: 16082 - DNA, 122 bp, Homo sapiens
ctgtctcacgcagcctcagttcaggaattgttcttgaggaaagcagccggggaggctctgcggctcacttaaggccctgcagcgggtccttgctacacagagacctgtcccggcctgcttgg

SEQ ID NO: 16083 - DNA, 122 bp, Homo sapiens
gggccatccttagagtggaaatgctcctgaggctccagcgaatcaagaccctcagacccccgggctgtccccaccccatgaccacatgttccgcaggcaccctcagcgctgtgccctgcgtg

SEQ ID NO: 16084 - DNA, 122 bp, Homo sapiens
tctcagagttttagagccaggcaagagcatggagtctaaccccctttttttcacagaggacgaagctaagacccagaaaggatgtgacttacccaaggctacacacagcaaattaggggcaa

SEQ ID NO: 16085 - DNA, 122 bp, Homo sapiens
gctctccctgcagggccggcagccacgaggggcagacagaggcgccagtgccctcactctcgggtgaagacgcccttgacccccagcccattcgacccggccacaagcctcgggccaccctg

SEQ ID NO: 16086 - DNA, 122 bp, Homo sapiens
tctggcatcaattttgtgcctctgatctatgaagacccaatgccattgaatttgagaccccgctccaccaccaccacgtggtgctgtgccctttcctggcccttaacaggcacaggctaaga

SEQ ID NO: 16087 - DNA, 122 bp, Homo sapiens
acctcatgatccgctcgcctcggcctcccaaagtgctgggatttcaggcatgagccaccacgcccggcctaaaaagtgaatcttgacccctgcgattcatcaagaatttactctaaattata

SEQ ID NO: 16088 - DNA, 122 bp, Homo sapiens
gagttctcacgagatctgatggttttatagaggctttcccctccttccctctgcacttctcgctgctgccacgtcgcaaaggaagtgttttcttctccttccgccatgattataaatttcct

SEQ ID NO: 16089 - DNA, 122 bp, Homo sapiens
cccattgcctcgtttcacctccgctgggaacgtgcgcgtctggctgctcagactttatgccgctttgcgcacctccgtgaaagacgagcactgattgtggagacacaaatacatttcagaga

SEQ ID NO: 16090 - DNA, 122 bp, Homo sapiens
gggccgtggaactagtcctggcctgcagcaggactgacatcgcctggggccagcatggaacgcagcgtgaggtgggcaggggcagatccgagggctgcctctcccagggaccctgacaggtg

SEQ ID NO: 16091 - DNA, 122 bp, Homo sapiens
gtggagagacggcccgagagttccagggtgagtgcgcagaggagcttatctgcctgcctgcgggtcggtgtgtcctgccggctgctgggcgctggcctgcgtcgcctgcttgtctcgctccc

SEQ ID NO: 16092 - DNA, 122 bp, Homo sapiens
acgacgtggagtttgaccggagctgttggagaagagtccaggagaaaaccatctcccttccggctcccccagcaataaaaccttgcacgcattctccaagaccacgtgtgatccgaatcttc

SEQ ID NO: 16093 - DNA, 122 bp, Homo sapiens
cgaggggcgggcgctgcagtgcacgccgggggatgtagtttggctcggacgagagcgtctcgtcccggggtcgcgcgttgctccgggtgccaggttcagcccgcgcggcgacagcgggcttc

SEQ ID NO: 16094 - DNA, 122 bp, Homo sapiens
ggccccccaaacagcatcccggtgactctgaatgtgtgggggtggttgcatccctcagagcgggatgctgaatcctgggacccaaagaaatactcaagtgccagagcaattagccatgcacc

SEQ ID NO: 16095 - DNA, 122 bp, Homo sapiens
cgggaggccagggaatgttccctcaggctggtgcgtcagaatggcccaggcagcctccagcgtgggcccccgctggtcccgggaggcgccgccagaggctcggggagggtggacgatgtggc

SEQ ID NO: 16096 - DNA, 122 bp, Homo sapiens
gctgcctttattttgcccgatcatattttaataaatactcgctttgaacttgtaaggcttcggctgttcaggtcactcaccgcttcgctgtttgaggagcagcagtgtccccgcgcgcccct

SEQ ID NO: 16097 - DNA, 122 bp, Homo sapiens
ccttgtgaaaatcaaatgagatcacgggatgtggctgtgttctgaacggcagagcccgtgcgctgtccagggcagcgacacagggcgggcgttaaggaccggcctttggcatcaacggctca

SEQ ID NO: 16098 - DNA, 122 bp, Homo sapiens
cactggctcttggccgttttaaaagcatagcctctgctttgcaaccaaggtgtacagcaacgtgcgcatcacattaaaaagatgccttcgtggcattgtcctgctggggtcaggctcttcac

SEQ ID NO: 16099 - DNA, 122 bp, Homo sapiens
gtatgcagctaaagaaaatagtttaaaaagaaagacaaaggctaactttcacctggctgtcgaactggagctggatgaaagttatttcagggcgtattatgaaggcacactctatgaagtgt

SEQ ID NO: 16100 - DNA, 122 bp, Homo sapiens
ttggtccctccgtcagcagttcgggcccagccgaagcttggggcctagagggcagacgtccggctctgatcagagtacagcgggctgggcctggcagcctgcaggcaacctggaccttgcaa

SEQ ID NO: 16101 - DNA, 122 bp, Homo sapiens
tggtgctggtgtcgggaccgggagataggagtgtctcaggagagacctggccgaaaaccgcgagaaagaaaagtgaagcctagtgaaactgcctttgcagtgactcaagaaaaactcatcac

SEQ ID NO: 16102 - DNA, 122 bp, Homo sapiens
gtctctgagctgcgcacttggttggaacgctatgatgagcaactgcacggcgctcggccccggagggtgtaaacatccaacggacaattgactgaacttggtgggctgggccttcgagcctt

SEQ ID NO: 16103 - DNA, 122 bp, Homo sapiens
gagaggtgcaatcgtctcaagtgactcggcgggcggggcccacaaccggaagcgggtgggcgaccttcacccacgtgcgctgcggcttcgttcgccagcatccaagatggcggcagggcggg

SEQ ID NO: 16104 - DNA, 122 bp, Homo sapiens
attgcagcccaggagaggaggctggaagttgcagttttgcttcaatcaaaaatttcagctcggagcagagcattagcagaaaggtttagaagtgaaataatattttctggtccttgaacaaa

SEQ ID NO: 16105 - DNA, 122 bp, Homo sapiens
agacgtggtgcaccggcagcaagtgactggacactccagaccaggcccgccccgcagtagcgtggatcctgaggccagacccccaggcagcaaaatcaggcaaccggccccgccagcagccg

SEQ ID NO: 16106 - DNA, 122 bp, Homo sapiens
tgttgcaggagaagcggtggcagcgttgtccctcctccacgatcagcccgttcccgcagccggggcagaacagcagcatggtctcgaactccgcaggctccaactcccggcagctcccactg

SEQ ID NO: 16107 - DNA, 122 bp, Homo sapiens
gtcattacgtacttgtatcgcgtaaggggcctgcgtattgcgtcatgagtgcgcgacgcacgtaaggctaaagcagccaatcgtggagcagcttggctgcttgtcataaatggagcgacgta

SEQ ID NO: 16108 - DNA, 122 bp, Homo sapiens
gtattttcttcacttatagcacatctcaattccatgcaacattcaagtgctcaatagtcacgtgtggctagtgattacagcattggaaaaagacagatacggttgaggaaacttaaaaaaat

SEQ ID NO: 16109 - DNA, 122 bp, Homo sapiens
gggtgctaaaaggaaactaattccctcataagtaacagcaaaggaaagccctggttaacacgaaggcaatggacatgagaggaaggggagagaagataaaaacatcacaaggggaaagaaga

SEQ ID NO: 16110 - DNA, 122 bp, Homo sapiens
ggggatcgagagcagtgaaatgaaagacagggctgtgcgtgggtctggcccgggcagtcccgacagggctgaaagctgacactgtcacagtttgctccttagccacccccttgtaatcgcga

SEQ ID NO: 16111 - DNA, 122 bp, Homo sapiens
gagtctcctccgggtaaaatgttccgaacgcgctcaaccgcctcttgagaggaagtagcacgtgtagtgaaggcttggtctccaagaatcactggtgcccccactcactgcggcccagcctc

SEQ ID NO: 16112 - DNA, 122 bp, Homo sapiens
caggaaacttacaatcatggtggaaggtgaacggggagcagacacgtcacatggccagagcgaaaggaagagagagtgaaaggggaagagctatacacttttaaataatcatatctcaagag

SEQ ID NO: 16113 - DNA, 122 bp, Homo sapiens
agctggggtctggttttgagtctcggctttgtcttaacctgtgttgggcgttgcaccgggcgacctcagtttcttcctgtacaaggaaaagtactgaccaaaatgagttctacatacatttc

SEQ ID NO: 16114 - DNA, 122 bp, Homo sapiens
tgcaagcagggatggtagcccatgaccagcagaggccaaacagactttaaggcagcattccgttctccacacccatgccggaagctttcctgccacgcaagctttccgagcatgctaactcg

SEQ ID NO: 16115 - DNA, 122 bp, Homo sapiens
aaaagcagaagtctgaacttctgttttattgccacaggaaactcattgccacagcacaggcggaaagccggatcccggcgggtcctgagtccccagctcccaccctcggggcaagctgcgag

SEQ ID NO: 16116 - DNA, 122 bp, Homo sapiens
gtatcctggtattgttcctaagtcactcccttgctaggtccttgataaattagactggcacgtttaaaaaattcttaaacctcctttcacttgagatcccaaagccaatatttcctttcacc

SEQ ID NO: 16117 - DNA, 122 bp, Homo sapiens
ggctgtgacacagggcgggcgtcgtgggcgcggctgtggactcctgcctggggttggtcacggaccaggagccagagccacccaaatttaccaggttgtggaatgagagcctgggaaggtgg

SEQ ID NO: 16118 - DNA, 122 bp, Homo sapiens
ttctatttaagagaaaatcctatgtagtcgtaatggaatttattttcctgagtgcctgggcgtgctccaaacagatagctgtgattgtgtcatctcttcttactaagcatctgaccactcac

SEQ ID NO: 16119 - DNA, 122 bp, Homo sapiens
gaaagcggggcccagcgaaggggcccggccacaggaatctcggttccaccccgctactcccggctgtgactccagtttcgtccccagccgccgggaccgccccctcgccccgcccccagcgg

SEQ ID NO: 16120 - DNA, 122 bp, Homo sapiens
tcttccgtaaaaagcagcttgagttcaaatctttcagaacacagtgccagcctggggctgcggctccttcccgctcctttggctgggctctgtcagcttcccacagctcctcaggctctgct

SEQ ID NO: 16121 - DNA, 122 bp, Homo sapiens
cacatgtcgctcctgctgtcagggtgggaaggctccgacatggaggtcggctttggaactcgggctctgggctcctgggctggacaccggcaccgtctaggttggggaggctctgggaaaga

SEQ ID NO: 16122 - DNA, 122 bp, Homo sapiens
ttctggaccggtctgtcttgctcccacctagaccccagtcctggccctgcgaggggattacgcatgttgccgggtaagcgaagggggtttccgtcttcctggactggcggacgtgaagtctt

SEQ ID NO: 16123 - DNA, 122 bp, Homo sapiens
ctttcccctcttgcttccgccccaggctttctgctgtgcgctccccacggaggcgggaggcgcctgcaccgtcctcggggactccgatcgccgttggaccgaaatcacctcggtggggagga

SEQ ID NO: 16124 - DNA, 122 bp, Homo sapiens
tcccgctcccgctccccacggtctccctctccctctctttccacggtctccctctgatgccgagctgaagctggactgtactggggccatctcggctcactgcaacctccctgcctgattct

SEQ ID NO: 16125 - DNA, 122 bp, Homo sapiens
agcccgtggtcaaggagagacacctgaaggtgaagggacaaagcgagcagggtaagagctcgagcccgacccctctcaaaaaatatagacccggaacgcgcgcctgcgcagaacgaatcctc

SEQ ID NO: 16126 - DNA, 122 bp, Homo sapiens
cttgatccacctgccttggcctcccaaagtgctgggattacaggcgttagccaccacgcccggccctgtattttcaatctcatgaattactgccctgagacgagtctatgtaacaaaatatc

SEQ ID NO: 16127 - DNA, 122 bp, Homo sapiens
tgaaaagtgcatatttataatcaaacagactggagttcaaatcctaggtctgctacttaccgtgtgaacttgggcaggttatttaacatctctaaccctcattctttgatgataataaccac

SEQ ID NO: 16128 - DNA, 122 bp, Homo sapiens
ctgcaacctccctgcctgattctcctgcctcagcctgccgagtgcctgggattgcaggcgcgtgccgccaggcttgactggtttgtgtattttttggtggagatggggtttcgccgtgttgg

SEQ ID NO: 16129 - DNA, 122 bp, Homo sapiens
tagaaagccattctctaaatcccaaatatcaatactcagagccttaattggaaaatttcccgaagaacattgagtttagaatatacctttgcaaaaagagaaaataaacactcgatatgttt

SEQ ID NO: 16130 - DNA, 122 bp, Homo sapiens
actgccagtggacagcaacgtctcactagggctatagagtacgatgcctctatcagagaccgagggccttgctcattcaattcagcattttgtgggcatctctggggtacaattaagccaat

SEQ ID NO: 16131 - DNA, 122 bp, Homo sapiens
tctccggcagtgggaggccgagaggggctgttggctagagccctccaccacctgctgtctcgccctcgcccctttctctcggattcattacccagaaggcgcaggtccgggcacattcagcg

SEQ ID NO: 16132 - DNA, 122 bp, Homo sapiens
acccctggctctggggttagcctccctcatctgtaacacagcaagctgacaaaaatggaacgtcagcacatttgcatgtagacagattttagtcccagcagataagcacacccaacatgtca

SEQ ID NO: 16133 - DNA, 122 bp, Homo sapiens
cttgagcacctaaccacttttcaaaggagctacgcacaaaaataccctagcaacatgccacggtgtcagaaaggctcaggttcccaacaccatgcgggtcagccattaggaactcaggaagt

SEQ ID NO: 16134 - DNA, 122 bp, Homo sapiens
ctccttccggccgtgcagggtgggtgcctctggcgcccgggacttcgcccggtgctagggcgtcagtctcccattcggaaggactgggccggggcactctattcaatcgcctttagtgaaca

SEQ ID NO: 16135 - DNA, 122 bp, Homo sapiens
taatagaaaatggtgtttctatgtcttggtggctttctctagttctgaggtagcatatcacgggtacagcagagatttgagccttagtataaactaggaaatcccaaacactttgccttttt

SEQ ID NO: 16136 - DNA, 122 bp, Homo sapiens
ccagccagtgggctggcagctcccgggggcaagagcggccggctcagccgccgccaaccacgatgtcgcaactggctgcgttcgcccccgccagagctttgattggacgaatctcgacccgg

SEQ ID NO: 16137 - DNA, 122 bp, Homo sapiens
agagagatgtggcctgaggatctggctcccaaactgttaagtttcaaagcccttactgagcgcttctgtgtgcccagaatcctggcagggctcagtggagaacagatcgcaggagatccaac

SEQ ID NO: 16138 - DNA, 122 bp, Homo sapiens
tcaggaggcttagcagagccactggtagtttggccagaggagggcttggaaaagcataaacgcaaactttggccacagtagaaccagaccccatgcggcagctgaggctggggagcctccag

SEQ ID NO: 16139 - DNA, 122 bp, Homo sapiens
atacaatattatccatcaataccttgaaggcaaaaaacatcatttagaaatacactcatacggctgggcgcggtggctcacatctgtaataccagcactttgggaggccaaagcaggcagat

SEQ ID NO: 16140 - DNA, 122 bp, Homo sapiens
aggatctttcagaagaggctgcggttgtggtagacactctaaagcttcaccatatggaggcgttatagccaggaggcacctttgctggcctgtccagacaactgaattggtcattttgacta

SEQ ID NO: 16141 - DNA, 122 bp, Homo sapiens
tcacccactggtctacacagggaaagcaatctccagccttgtcggagagttttgcccttgcgctgtgtgtgtgtgtgtgtgcgcgggcgggcgcgcgcgcgcgcacacatttttgggttttg

SEQ ID NO: 16142 - DNA, 122 bp, Homo sapiens
cgcagagcacgcgcagagctgccggagcagcgcagcctgcgcgcccgacaccagcctgcgcgcttccatcaagaaggagaccaaggttctcaagaccctgtcggtgatcatgggggtcttcg

SEQ ID NO: 16143 - DNA, 122 bp, Homo sapiens
acgggcagagtccttaggccttggtgctttgctaaaatcagaggctttgtaggctgggtgcggtggctcacgcctgtaatcccagcacctttggaggctgaggcgggcggaccacttgaggt

SEQ ID NO: 16144 - DNA, 122 bp, Homo sapiens
gtggccttatggagatcctttttttacatttccaggacccactgccaagaccagcttggtcgtggagaccctaacccagcagcgctagacgaattaaagacacacacacagaaatatagagt

SEQ ID NO: 16145 - DNA, 122 bp, Homo sapiens
ccggagctgggaaggaagctttagctgcagcccctggaggctgctgggttggtgtatgcccgagtggctggcgagggagaaaggtcttgcctcttaattaacacgcttattggaagtgactc

SEQ ID NO: 16146 - DNA, 122 bp, Homo sapiens
acgccagtccaggagacagttccagctttagggcaaaggtgaccccactgggtcccgtggcgaaagagagagccgccggtcctcgccttttttctgatgcatccagggatttgtagttccct

SEQ ID NO: 16147 - DNA, 122 bp, Homo sapiens
tcctggagcccctggagcctctggctcaagcagcgcagtcggtctgtgcagtgtccctgacgtcatccagcgtatgcataagccctgctattgtcttactgctacagcagggctggggattg

SEQ ID NO: 16148 - DNA, 122 bp, Homo sapiens
cgctggacagatggggctggtatctctggcaggtcacagctggtctccggcagttctccacgaaccaagggaaagtggcagaaatgtgggaacttgagcattgtctcagttatgtggtgaat

SEQ ID NO: 16149 - DNA, 122 bp, Homo sapiens
tcatgcccttgtggggctgcagggctgacgcgggctggcactgtgtctacgacagcctcccgggcccccgggtgcgtggctgcggatgctctctggcggccaccacagttcccacgcgcggc

SEQ ID NO: 16150 - DNA, 122 bp, Homo sapiens
gcggggaaggggtcgttgctgtgtgcctgccgtgggtcagagcagggagctgccggctgccgccattacaatccctcctccatctgcccgtctcactcactcactttaggggaagggggggc

SEQ ID NO: 16151 - DNA, 122 bp, Homo sapiens
atatgcaaaaaaaggcagaatgatactgattgcaaaaatgttagcaatttttcatccctccgctatccatgcccattgccaggtgcatttacagctgtttccattgagatccagttctgttt

SEQ ID NO: 16152 - DNA, 122 bp, Homo sapiens
cgtcgcccccaagggtgcggagtgtggaggttgcccgggggagggccggctacggattcacgctttcgggacaggcaccctgtgtgctcagctgcgtcatgagagggagccctgcggatttc

SEQ ID NO: 16153 - DNA, 122 bp, Homo sapiens
gagggagagggggggaccgagcccgggcccgggctgaggggtgggggagaggccgccctgcgctgctcgcgcccccacacccgctaccggcaacgactactgtgaggtgacagagaggggac

SEQ ID NO: 16154 - DNA, 122 bp, Homo sapiens
ggcgcagggatcctgatcttgaaagattgggagagggcaggaggccagtctctatgggggcggttcccgtaggatcaccaggtgggttcgcgtgcccagattgactgcttgtgggtggcatg

SEQ ID NO: 16155 - DNA, 122 bp, Homo sapiens
ggggtggtgatggggtgctgagctacgccggccgagtgcgtgtggcccacccccctctgccgtggtggtcagactgtgctgtgtgttgatcaccacactgggttctcgtgtagcctttagtg

SEQ ID NO: 16156 - DNA, 122 bp, Homo sapiens
aagctgcagggatgatatgttctcctggatcgacatgctttcagtgtgggcctggggctgcgggaccatggaatgagagggagaggatgacaaaactgctggtcttatctaagggagacaga

SEQ ID NO: 16157 - DNA, 122 bp, Homo sapiens
tgaccctccttctttgggttttccgcacctaatgaggggagaggtgacatttgtcaggtgcggctcaggcatgaagctaagcaggacagctcagagcgtccagatcatgtacctgagagcat

SEQ ID NO: 16158 - DNA, 122 bp, Homo sapiens
ccccattagtggctggcacccacctggagcgtgtgggctgtccctctctgtcattggtgtcgtggtatcgtcctttcctctctcactcagcggcgcctctctcctgcccctctctgtctccc

SEQ ID NO: 16159 - DNA, 122 bp, Homo sapiens
gtggcacactgcatgcgtccagtgagtcaatgtggcaccgcctacatgcgtgtcactggccggtgggacattcaaatcattcatacggggtctaaacgagacagagcgtggccgagacagga

SEQ ID NO: 16160 - DNA, 122 bp, Homo sapiens
cttgaactcctgacctcgtgatccacctgcctcggcctcccaaagtgctgtgattacaggcgtgagccaccgcgcccgtccagaaatgcccacatttgtaaagttggttgctgctagggtcc

SEQ ID NO: 16161 - DNA, 122 bp, Homo sapiens
ccaaacactagttcccacctaacatcctcaaagataaagatgatattcactatttcaaaacgcttgactgaggagtaggcaggctaaataaacattacataggcttcctttgtagtcaaagt

SEQ ID NO: 16162 - DNA, 122 bp, Homo sapiens
ctcacgtgtgtgactcagatgtctctggcgtgtgggtaggtgacggcagcgtagcctctccggcagaagggaactgcctgggctcccttgtgcgtgggtgaagccgctgctgggttttcctc

SEQ ID NO: 16163 - DNA, 122 bp, Homo sapiens
gtagtccaccctccagggccaaggggcctggagtgctctaaagactttcctgcaggccctcgtggctctgtgttaatgctgtcagtcttcctgaagtcctgtcctctcacctcctgcctaga

SEQ ID NO: 16164 - DNA, 122 bp, Homo sapiens
gtgggtgttccaacagtagaggggatcattgacgcaaattcgtccttttatgttcccacacggctcaagttggggaatataagtcctaaaaacaggcgcaccctaatcctacctacttccca

SEQ ID NO: 16165 - DNA, 122 bp, Homo sapiens
ttaaatactagtttttcttatttctttgtatactgtatcataaattctgaagaaagatatcgtagtggagataacatgaatattagtttcctaaaatttatgtaatatttttaatgttctaa

SEQ ID NO: 16166 - DNA, 122 bp, Homo sapiens
ttgtattttctctgggacacggggtttcagatagatcagttaaatgaagcttgattatatcgtatttcacgtcgcatgccatgtgtcttgtctgttggactgtcaggtctcaagagacgggc

SEQ ID NO: 16167 - DNA, 122 bp, Homo sapiens
ttcccgggcccgctcgctctcgacgccaccgacgctgccgctgctccgggctcacgggcgcgctcccgacctccccgacccttcccgtgtccccgcgccccgccgggtcctaaagcccggcg

SEQ ID NO: 16168 - DNA, 122 bp, Homo sapiens
ccttgcagtccgggcggtaggaactgaaatcgatcacagctcgttagagtacgtcactgtcgtcacgagtagggaaaaaaaaaccggaaaacaaaaacaaaaaacaaaaaaccctttgagct

SEQ ID NO: 16169 - DNA, 122 bp, Homo sapiens
gccccgcgcctcgcgggtggacccgggctggtgggcggggcctgcagcggggtgggagcccggtcgcccggcccctccccaccccgccccgcccatctccgctggttcccggaagccgccgc

SEQ ID NO: 16170 - DNA, 122 bp, Homo sapiens
agagactgagggtggggtgctggggtcaggggaatggaaaagtgaccccctagacatgcacgcatcccaaaagagaggtacggaaggacaaatcaatggatgaaaggctcttgggacctgtt

SEQ ID NO: 16171 - DNA, 122 bp, Homo sapiens
tttttagtggagacggggtttcaatatgttggccaggctggtctcgagtgatctgcccgccgcggcctcccatatggggttattttttggagtgatgaaaacattttgaaattagataggtg

SEQ ID NO: 16172 - DNA, 122 bp, Homo sapiens
tccagcagccaatgtgcttcggagccactctctgcagagccagagggcaggccggcttctcggtgtgtgcctaagaggatggatcggaggtcccgggctcagcagtggcgccgagctcgcca

SEQ ID NO: 16173 - DNA, 122 bp, Homo sapiens
tccctcggtcccctcctcctcaaggtttctagagtccagagggcctcattgacatgtaaacgagggtccctataaaggcggcgctgcctcgcactggtgcatggactgcaacatgggcacgg

SEQ ID NO: 16174 - DNA, 122 bp, Homo sapiens
attagaagcagacacaatagagggagtgctcccttttgctttaatcacttcaggctcctacgtgttgacaggaagttttgttagtatccaagtttaaggaaaggagcattcaggggtggcat

SEQ ID NO: 16175 - DNA, 122 bp, Homo sapiens
cctctcccaggagagttcgagcctgtggcggcctgagaaagtggtggcatgtgggttctgcggctgcggccgagggctccccctgcttcccgaatctatttttggcagacagaggctcagga

SEQ ID NO: 16176 - DNA, 122 bp, Homo sapiens
tgagtacaggagtggttggcgttgatgttgcgttttctcaacggcggcatccgaggagttcgtcctcaccactgcgcgccgacggtgggctggcgggaccaggacaggaacaatgggattcc

SEQ ID NO: 16177 - DNA, 122 bp, Homo sapiens
ctgccgccgcgcgccccaagtcgccctcgacaccactgggcgcccgccctcctcagcactcggggccggctgtctgtccttctagccccagatcctgcaccttggtcccctccccgtcttcc

SEQ ID NO: 16178 - DNA, 122 bp, Homo sapiens
gaatcacgacagagaagggaaagaagcccgcccgccacttccggtgttcactgagcaggtcggtggccagcgctgccttcgcatcagaaccccattttaaaacacatccaagcgcgtggcgt

SEQ ID NO: 16179 - DNA, 122 bp, Homo sapiens
gtgacgggtaccacggagggtgctgctgaggcgatgatagcagaggggcccaaggaagtccgaggctgtcctctggggcatgacgagggcggaggggaccaggagcccgtcccttccctgag

SEQ ID NO: 16180 - DNA, 122 bp, Homo sapiens
ccctgctctctcctccccaccttcccccaggcaatggcgctccccacggtccccgctccccgcatcccagcctctccgctgggggatgtcaccgggaagccaacttcggcttggaacacgga

SEQ ID NO: 16181 - DNA, 122 bp, Homo sapiens
ccccggggacggagccacccactctcccaacaggtgtccagctggccaccggcctctcgtcgtcatcaaaacctcaggcccaggggaggtcctccagcccgggggcacctgaggctcttcgc

SEQ ID NO: 16182 - DNA, 122 bp, Homo sapiens
tgacctctagagcggagctaagctcccacaagccagacttgggaggaaaagcaaaaagcacgccaaagcctgagcgctgctgtagtccaagccaatgtattcagtaatacccttcacccctc

SEQ ID NO: 16183 - DNA, 122 bp, Homo sapiens
gacgccaagctcagagctggaaaactggaactaacaaataaataatagcagggccgggtgcgtaggccagtctgtcaagagcagtttgcatacttttaaaaataactattagctttttctgg

SEQ ID NO: 16184 - DNA, 122 bp, Homo sapiens
cacctgccgtccctggactttttaggttatcactttttaatacccactagttggaaagcacgtgccacagaggaaagggagtttccaaagatggggggatggttgagattttaaatggagtg

SEQ ID NO: 16185 - DNA, 122 bp, Homo sapiens
caagcacttttccacacgaaggagctgggaggaggcagagacccagtgccggatgtacggcgcgcatctggccagcatcagcacacccgaggaacaggacttcatcaacagtgggctgggag

SEQ ID NO: 16186 - DNA, 122 bp, Homo sapiens
cctacacgggggaacttctcattgacatacagtcaacaggtgaggggcatagcagcaggtcgattcttatgtatgtgagtactctcttgcaccaagatacaggtctaaacgaaaaaaattta

SEQ ID NO: 16187 - DNA, 122 bp, Homo sapiens
gtctttctctggctcacagactccatcttccatggcagcaactggcttgatgctctctttcggtgtcatcttcgcttggtaaccatgggtgggaggaaaggaggaatggccactgctccctt

SEQ ID NO: 16188 - DNA, 122 bp, Homo sapiens
atcactgtgttcagggtgacttctgtgctagttagctaagaataacaatgcagtcccatgcgaccacctggcaaatttacatttgacatttaacatagagagggtttagtaaaagcagccct

SEQ ID NO: 16189 - DNA, 122 bp, Homo sapiens
ggacaagtaagagagggcgcctgcacgctctctccaggcccgggactggcccccaaggcacggctggagcagagcgtggtggaagtggtaaaggcttcaactcgactccctctctcttagga

SEQ ID NO: 16190 - DNA, 122 bp, Homo sapiens
gggatggattggaatccagacttgtgatatcttgacacactataccaccaaaggaagtgacgggctgggagaagttggggcttatccgaggttccagggaggactccaaggagccgggactg

SEQ ID NO: 16191 - DNA, 122 bp, Homo sapiens
gggtggctggctgctgcttttgagggattgcagtggaccgggcagggagctggctggccacgtgcttccaggttctgggagccccagtggccggaagggacaaagggagacaagcagggtgc

SEQ ID NO: 16192 - DNA, 122 bp, Homo sapiens
atggccccagtgtgcagaactttagcaaccctcacgaaccctggaaccggctgcaccgaacgcctccgtcgttcccgacccctccgccctggctgaagccaggggagctggagcgcagcgcg

SEQ ID NO: 16193 - DNA, 122 bp, Homo sapiens
agtcgcacccttgccgcagtccgcacagtaaagacgctcaccaggtcctccgcagccaaccgcagggtagtgtcacccaggtagctctcagtgccggcttcagcagcaccaggcaatccgca

SEQ ID NO: 16194 - DNA, 122 bp, Homo sapiens
aactccgagcctcggggcccggcttacctcggtcaggaagcccccttcacctacacgcagcggagaagcgcccaagcaacaacgtctgcacccaaacccagtcctcagaaccgcagacgtgg

SEQ ID NO: 16195 - DNA, 122 bp, Homo sapiens
agggccagggtcctgggtcccgggtcccgggaagctcttgcttcaacctaagcacacccacgcttgtgcacggctcacctcccgtggcccctggagctcccgggacccccgtattgcagggt

SEQ ID NO: 16196 - DNA, 122 bp, Homo sapiens
ccctgccttaagcagcccatgagagcactggaggcgcacacacaatcaggtgacgagaagcggctgcagcagccgcagggaacacggcaacacaggagccgaacccggcacagcgggagccc

SEQ ID NO: 16197 - DNA, 122 bp, Homo sapiens
aggcagctgcagtaccggcggccatgctgtaagagccttcttcaaactccgcccccgacacgcacaaagccggggaccctcggccagttccggccccgcccattaaaggagacgcacagtcc

SEQ ID NO: 16198 - DNA, 122 bp, Homo sapiens
tgagcccgggagaatgtgagttgttccctctctaattacctgtctgtccctccgagggtacgctctgtgtggcgctaggatgcctgtaacaccctgggaacaaatccgaacgttccttctaa

SEQ ID NO: 16199 - DNA, 122 bp, Homo sapiens
agcggggctggcggggtaaaagctcctggccagggctgcctggagctgccccttccactccgcccccagggagctcccgggtcatcctctcatccgggctgccccgcggcccccaaggagcc

SEQ ID NO: 16200 - DNA, 122 bp, Homo sapiens
gccccgagcgcggcaatgattggtctcgggggaggggtggggggttgcaaacccgaggagcggtggcatccgttgcatgatgcaaaaaaggattgatttcaaaagttgcgagttgcattggc

SEQ ID NO: 16201 - DNA, 122 bp, Homo sapiens
cctagtcggggcgtggggctgagccctcgtgtcctcagggcccaaccagacataaggcagcgtggtgcggcggaaaggggtcccaaggaaagtcctcggatccaacttcgaattaccggcct

SEQ ID NO: 16202 - DNA, 122 bp, Homo sapiens
cctttgcaagctttgtctcatctgtgtcttctaacttagcaaaagaatctgaactccttgcggtgagggtcttatctcctggcttcactgtaaacaattcaggattcctgcagtagctgcca

SEQ ID NO: 16203 - DNA, 122 bp, Homo sapiens
gagagcccctttcctcagctgccgccaaggtgctcggtccttccgaggaagctaaggctgcgttggggtgaggccctcacttcatccggcgactagcaccgcgtccggcagcgccagcccta

SEQ ID NO: 16204 - DNA, 122 bp, Homo sapiens
cagggcagagctcggggcgggcacgcaccttgtggcaggctgggcaagtgggcagcgcgccgcccggcccgggcgcgcccttgccgccgtggcccccgccgccgttcaggctgctctggatc

SEQ ID NO: 16205 - DNA, 122 bp, Homo sapiens
ctgcgcggtggggtgcagaggatctcagaggctcctggttccccacagatgtagagggtccgcgccccaggggagagcgcgggggtgatggggcgtctgcgcggcggggaccagcgtggagt

SEQ ID NO: 16206 - DNA, 122 bp, Homo sapiens
cgaccctgtccgggatcctcaccaagtctatgagggtcagctgctcggccacctcgtccacgctgaagtccaggagctggggaccttgaggcatgagcccttcctcttcctccgcgcaggcc

SEQ ID NO: 16207 - DNA, 122 bp, Homo sapiens
agagacacacctggaaggagtgagccccgttcagagagacacacccggaaggaggcagcccggttcagagaggctcacccagaaggagacagccctgttcagaggctcacccggaaggaggg

SEQ ID NO: 16208 - DNA, 122 bp, Homo sapiens
gctcagacacgtcctcttttccccacccggattttcagttcccctgaggaaccacctctccgtctccgagtgcccagtctggttcactgagccatttgtgcccagaaggacctgtagtgctg

SEQ ID NO: 16209 - DNA, 122 bp, Homo sapiens
gcgggggaaatattcatctgcagaaggattagatgtgcacgttaatgagtctggggcattcgcaacagaaccacccagccacaagaaagcccacgtgcacaacacgacagcaaacatacccc

SEQ ID NO: 16210 - DNA, 122 bp, Homo sapiens
ccacatgacagaagtgagatcatagtcttaacctcttcttgacgtggactggtcttcactcgggcaccgataaataacagatttggagtatctcctggtgcttattttagatgatgaagtca

SEQ ID NO: 16211 - DNA, 122 bp, Homo sapiens
attgtttcaaaacttgtcatacatttctcatgaacttctagtctcattcattgtttcaaacgttttgatgacattttaaacctacccggcttattcctgtaagccaaccagcaatctctgcc

SEQ ID NO: 16212 - DNA, 122 bp, Homo sapiens
acctctcttgtagctctctgacctcctccttcatggcaggcatcgccattcttgctgaaccgtttgtgattgccatttgagctctggaagcctctattgccatgagagttctgtcacggtca

SEQ ID NO: 16213 - DNA, 122 bp, Homo sapiens
agtgatccacctgccttggcctcgcaaagtgctgggattacaggcgtaagtcaccgcgcccggcctaaaccactttagatttgagaattctggttttggtctccttggttctgcccctcttt

SEQ ID NO: 16214 - DNA, 122 bp, Homo sapiens
agcaggctgggtgtcgtggctcacgcttgtcatcctagcactttgggaggccaaggggggcggacggctttagcccaggagttcaaaaccacctgggcaacaaagaaagttctgtctctaca

SEQ ID NO: 16215 - DNA, 122 bp, Homo sapiens
agtctggaaattgggccatttgttccccggggaggcagtgctttccttccagtaccccgtcggttgttatttggaacacctggcatttcacatggtctttggccatatgcccctggcttgag

SEQ ID NO: 16216 - DNA, 122 bp, Homo sapiens
gggcggctgcctgaccaggcagggagagccagtgtccatgcggcctccgggtagtgaggacgcgagctgcactgtgagatcctctctgccttgttgtgtgtttgaaatgttcgtgctgaagt

SEQ ID NO: 16217 - DNA, 122 bp, Homo sapiens
cagcagtgctttagacacaggttaagtgtctgcccctccctccagggttacgcaccaccccgatgcatactgggattgtagttctgaagctacctacccatgggctgagagcagtaaagaga

SEQ ID NO: 16218 - DNA, 122 bp, Homo sapiens
agaaccgaatttgtgtggtatccgtatagtcacagattcgattctaggggaatatatggtcgatgcaaaaacttcacgtttcttcggaatagccagagaccaaagtgcgacatggagactag

SEQ ID NO: 16219 - DNA, 122 bp, Homo sapiens
cttgggggaggcggaggcggatgcggatgcggatgcggatgcgaatgcgaaggtggcggccgaggtggcggccgaggtggcggctgcggcggccgccgcggatgcagatgcggatgagaccc

SEQ ID NO: 16220 - DNA, 122 bp, Homo sapiens
caggcgagcaagataacgtgggtcttggtggtctcggtcatggtgcagatgggtccttcgcggtggtctaggggttgcctctctttttgtgtctcgttgtgtctgcagagggagaaaggaag

SEQ ID NO: 16221 - DNA, 122 bp, Homo sapiens
tcctccccatttttcgccttcttctcgcggaggctgagagactaaccttacacaacatggcggcctggtgtgtctggtgtcctagagcggacgaaagcaggtgactctctagtcaacttccg

SEQ ID NO: 16222 - DNA, 122 bp, Homo sapiens
tgagattaaggatgattgtgaaacatcgacacgctggttgacaggatgattgtgaaacctcgacacggtggttgacattaaggatgattgtgaaacgtcgacacgctggttgacattaagga

SEQ ID NO: 16223 - DNA, 122 bp, Homo sapiens
gtctgtgtatctgcggtctggtcatttttgccacacttgatttttttctgctaaaccctacgtcttgcagtatatgggtcactcatccagatttacttgatgctgttttagttaggcagcag

SEQ ID NO: 16224 - DNA, 122 bp, Homo sapiens
cacccaggccgcaagagctgccgggacggtccccatcttcttggagcgctttaggctggccggcggcgctgggaggtggagtcgttgctgttgctgtttgtgagcctgtggcgcggcttctg

SEQ ID NO: 16225 - DNA, 122 bp, Homo sapiens
ccttcttggcgttgacacctgatatcttgccattgatgggcgacagagtgtagaagagctcgtcgtagacgggcttgtctttggccacgacccactcctcctcgtcggcgccctccttggca

SEQ ID NO: 16226 - DNA, 122 bp, Homo sapiens
atagcatgttagatgtttttaactggaaaatgtgaatggccactttttttttctcttacgcgaagtaaatgctatgtaaattgatttttaatgcttttattgtcccacaggaagataaaaac

SEQ ID NO: 16227 - DNA, 122 bp, Homo sapiens
gcctgggctttgcctgcagcgcacttaggttacacggagcgggatcagaagcaagcgattcggcacacaggcgtttggccacagcaattaggaaatacatattctgcggcagggacacgatc

SEQ ID NO: 16228 - DNA, 122 bp, Homo sapiens
agcctgaatattcaacaccattcagcttttaatgagaggagctacccagggccaggaccccgtctgtgttgtgaggacaccaggtgtggccgagaaacttaccgatggcagagccgttaagg

SEQ ID NO: 16229 - DNA, 122 bp, Homo sapiens
cagatgtctctttgtctctctgtgtctctgatcctctctgcctctgcctatctgatctgtcgatgtctctttttgtctcttttttctctgtctgtgtaagtgtatgcctgtatgtctgtgtc

SEQ ID NO: 16230 - DNA, 122 bp, Homo sapiens
aggtagtaacttacatttaggaccctcaaactcattcgcctcatctacctttacaaagcacgtgtttatgctgtgtgaacaatgccagaataccacaactggactgcgtttatgtagcgagt

SEQ ID NO: 16231 - DNA, 122 bp, Homo sapiens
aggagggacttgggataattaatgaatagttagggatgtgatggtgaattataatttaaacgttttgaaggaaggcaaaagaaaatcagagatgcttttatccttagaactaaaaatgcaaa

SEQ ID NO: 16232 - DNA, 122 bp, Homo sapiens
agaaagcattggcccttactggtggtgaatgatgctggctgggcatccaggtggagccctcgctcgcctggtcagggagtgcgtgtcaggggtgggagaagccatggatcccgggcagcagc

SEQ ID NO: 16233 - DNA, 122 bp, Homo sapiens
ctgaggcgcccaaaactcttgagtgcggcttggggtggaacgtgccgccccccacagccccggtggcccagggcagggctctgcatccccccagacctcaccactgagcctcagtgtgcctg

SEQ ID NO: 16234 - DNA, 122 bp, Homo sapiens
gccgcagacttctcaggcctgtgccttcctggccactgcctcctcctgggctctgggcaccgggcctgagttataaccacccactgctccctggggcacattcccgggcaatgaggtgccta

SEQ ID NO: 16235 - DNA, 122 bp, Homo sapiens
aagcctctcccaacctcttcagctccttaaaaggagtctgtaaaggctagactgggggggcggcgggggtcctgcttcctcttccctcagtttcttccacctgccttgctgctggtggggat

SEQ ID NO: 16236 - DNA, 122 bp, Homo sapiens
gagaagagatcgtgtaccacacatgatgcttacggagcataacacggcagggggcggtaacgggaagagcgtccgcaggcccagccctgggataccattctggcaggagaaacaggcaatac

SEQ ID NO: 16237 - DNA, 122 bp, Homo sapiens
ttcccagtgtgcctttagttcgctcctcatttgctggtccaccttaattgacaaactgtacgcccaacgaacggccaaacgccactactcctggctccgcccaccttcccagacgccgctcg

SEQ ID NO: 16238 - DNA, 122 bp, Homo sapiens
gagtgtgagggggtcaggagaggacaaagcccctgcttttttccagtctgcagcacaaaccgcatcatcgtacatgtaacctcacttgccttatcaaggcatagctccgaggtccccgctgt

SEQ ID NO: 16239 - DNA, 122 bp, Homo sapiens
tttcccccctatttatcgtcacgcagcttgccctgctgagagagaacgaagttacctgggcgcagccattggattgcaaatgcgtatgtctgagtcctctccaccaccagctgtatattaac

SEQ ID NO: 16240 - DNA, 122 bp, Homo sapiens
caggacacaggtggacagcgtccacgtcaggatctgaagctggaagctggctccagggcccgtcctcgccgtaacctgaagcaggtaggtagcaaggggggatttggctcttcctaaacatc

SEQ ID NO: 16241 - DNA, 122 bp, Homo sapiens
atccccttgaagcaagttctcttgaaaggaaatctaaacagtgcacccccatggctgccacggagtataaggagggagagaaaggagctgaaagtctaggtttggccagctaggtagactga

SEQ ID NO: 16242 - DNA, 122 bp, Homo sapiens
gacttcggcctcaatttccaggaaacaggctccttctcttctcccatctgctaccagagccgggagagctgctcggagacgcctccggggtgcgggctggacatgagcagcggctgccggtc

SEQ ID NO: 16243 - DNA, 122 bp, Homo sapiens
ctgacgcgctctctcctgggtccgggtatcccagggcatccggagctggggagggttgtgcggactacccaaggcacgcgcagataccgggcagggaagaagggctccgtgttccaaggatg

SEQ ID NO: 16244 - DNA, 122 bp, Homo sapiens
aactgctgttcacctgggacccatgttcaactgctgttcacatggaacccttctccacttcggccttcaaagttctcatttgaaaatttgctactaccaccaagatctgcacctgtggccta

SEQ ID NO: 16245 - DNA, 122 bp, Homo sapiens
tcaacaaagtccaaggctgtggaagtggtccagggctggcatactggctccagaggtcttcggtgacccaggcatctttccttttttttagagacagggtctcactctgttgcccaggctgg

SEQ ID NO: 16246 - DNA, 122 bp, Homo sapiens
gctcaacctacgctcttcatttctctccagggaaaatagatgcagcagcagcccccagtccgcgctccctttccgggaagaccgccgggagctcagtctcctgctgcttgcctctgagaaac

SEQ ID NO: 16247 - DNA, 122 bp, Homo sapiens
gcgaccagcccggggccgctgagtgtgacggacgcaactgggggcgccgggggctccgcacggaccatgtattttctgagcggctggcccaagaggctgctgtgccctctggggagcccggc

SEQ ID NO: 16248 - DNA, 122 bp, Homo sapiens
gtgctgcagcaggcgtgacgccaccaccgcggccccggaccccgcgtgcccgtcaaacagcgaccaatagtggcaggaaacaccctcggattcctgtgggagaggacgacagggaggagtga

SEQ ID NO: 16249 - DNA, 122 bp, Homo sapiens
cttctggaaggcggcaaaggccatgcacactcctgccaaggccctcacccacacctgtcccggatggggctggctgctgggatgtgtctccagcagcacccagagtctaaagcgaaaggggc

SEQ ID NO: 16250 - DNA, 122 bp, Homo sapiens
ctaccttccccgtaccgcctcccaagtctcccggggtacggattgcctttgcagcagttccgccccacctgactcactccagggtcagccccgggtgggtttcaatgcggctctggggaggg

SEQ ID NO: 16251 - DNA, 122 bp, Homo sapiens
tggcgccctctgctggcctctcccgcgcagcgcggacacgccgggcccgggcctgcgccgcgctcacctgtcctggcccaggaggtcgctgtcccttgcccgtggccaggcccgctctggcc

SEQ ID NO: 16252 - DNA, 122 bp, Homo sapiens
cgcacccgcagactttgatggtgagggtgttggtgctactcatgggcgggatgccgccatcgctgatcactatgggcagaaggtacaagtcctgcttctgccgactgaaccctccacgccgg

SEQ ID NO: 16253 - DNA, 122 bp, Homo sapiens
ctcctccactgggtccgccgtagtctgaatcatagattggggtgcgggccctggatctctcgaagtgtggcctggagctcttcccagaatgtcagtggtctcctgccaccaccacctgtgcg

SEQ ID NO: 16254 - DNA, 122 bp, Homo sapiens
ccttagcataactgggctgacaatcagtgaatcaaatatctaactcttatcctactccaacgttaagaaagagacatgcgactgggtgcggtggctcatgcctggaaccccagcactttggg

SEQ ID NO: 16255 - DNA, 122 bp, Homo sapiens
agatgtgcaggcagctggtgcccaaacactagacctcaagatgtcacattgccttggaggcgcgcggccttttagattaaaggaccgttggttcttagacgtccttcttgcccttcttgctt

SEQ ID NO: 16256 - DNA, 122 bp, Homo sapiens
agagatctgcacctcccggacttcaggcctgcctttccagcgagaattcttcatcctccacggttcactagctcctacctgaagaggaaagggggccatttgacctgacatgtcaggaaagc

SEQ ID NO: 16257 - DNA, 122 bp, Homo sapiens
gcgcttatgttacaagttgttgtcacagttgagacttaatttctcctaatttcttctgcccgaagggtaagtggtgcgtccagcttacacaatcataattcaaaggttggtgggcaatgtaa

SEQ ID NO: 16258 - DNA, 122 bp, Homo sapiens
tccgcaagcagcgcgaggcgtggcagggatgttgacctcgccagggcctacgggaggacgcgtcagccggaacgcagcgttcctcgggcagggagtgactcagatccggcctccgagtgtgg

SEQ ID NO: 16259 - DNA, 122 bp, Homo sapiens
gttgggagggaaaggggcttcgctgggggagcctcggcttcttctgggagaaaattcccacggctacctagtgagcctgcaaactggtaggcgccggcgtaggcgcgcgggcggggccgggg

SEQ ID NO: 16260 - DNA, 122 bp, Homo sapiens
cgggcccggatcgcggaccggggcgtttccggggatttctgaagcggacgaggggcagggcgggcgaaggccattcggctctccttctggctccagaatctcccaacccgcaggtgtgcagt

SEQ ID NO: 16261 - DNA, 122 bp, Homo sapiens
ttggggcgcagagaacttaggagagaagcacggaggagcccccggcagagcacccgcccccgggccccagccttccacctgtgctagcagcctggggcctccactctggccggaggaaggac

SEQ ID NO: 16262 - DNA, 122 bp, Homo sapiens
tcgagtttcgctgggctacggagcacaaaggtccgggcgggccattcgggatgtcgtaggcggccctgggatgtgaggggcctgcgggatctgtccctgaggcctgcgactttttctggtag

SEQ ID NO: 16263 - DNA, 122 bp, Homo sapiens
aggccataaagaaaaacgcacactgtgcctctccaccgggcctctggagacgaggctcctcggggatacaaacagtggggagaacatgagggacatcccgaccgtactctgcgtcctccttt

SEQ ID NO: 16264 - DNA, 122 bp, Homo sapiens
aagtttaattcggtggaaattttaagtcagtatattatgactacatatggtatgaagacacggggaaaggaaatagtctacattatttcctgatcctctagtgtaaatcagacactctgaat

SEQ ID NO: 16265 - DNA, 122 bp, Homo sapiens
gtgaaggcaactccatcttggatgctgatcgccacgttgacttatcattaaccctagttccgggaaggcctctgagattttatttttttgagatagagtctcactctgtcatcccagctgga

SEQ ID NO: 16266 - DNA, 122 bp, Homo sapiens
cggaaaagaggccgtggggggcctcccagcgctggcagacaccgtgaggctggcagccgccggcacgcacacctagtccgcagtcccgaggaacatgtccgcagccagggcgcggagcagag

SEQ ID NO: 16267 - DNA, 122 bp, Homo sapiens
tggaggctacagtggcagcacctggacggggcgggcagggcgggacccgtggctcctccccgccctggacctgcgcctccctgccccaaagtggaagggcttaagtgtccctagagcgggcc

SEQ ID NO: 16268 - DNA, 122 bp, Homo sapiens
ggcagattccgtaactcaaccggaaacgcgaaggactgaaacaaatcaacacacaaaaaacgaagccagcgagaaagatccaacccgggccccctgcctgaaatgggacacggggatgacgg

SEQ ID NO: 16269 - DNA, 122 bp, Homo sapiens
aaacacagaaccaggggcgctgcacacacacacacacacacacacacacacacacacacacgtgtactcgctcagcaagaatgaagtgcaacctgctttaaaaatccctctgctggagtttc

SEQ ID NO: 16270 - DNA, 122 bp, Homo sapiens
acaaaatattgttttctgggagtgctcccttcctacctccctgttctctctggccagtgccgtctcctgcatcatgagtttctccctgtctatgattccaccagtcaatggtcaaacagctt

SEQ ID NO: 16271 - DNA, 122 bp, Homo sapiens
cctcagaattttggatgtctattaagttggcgggtcagtaatgcaagagaacccttccaccggtaatctggatttctttccactcggccagttttttcttctctctctttccgctggagcct

SEQ ID NO: 16272 - DNA, 122 bp, Homo sapiens
gaaggcggcgcacctcctgcacgtcgccccgggccgccgccccactcagccggtcgccggcgcgaacctcctccagcagcatgtcgacactggcggcctgcaaagccccccgccccgcccca

SEQ ID NO: 16273 - DNA, 122 bp, Homo sapiens
tgtaattcaatacttcataactgctgaaaattggagtccacataatttattttctttggtcgggcacatttgcctcatgcttggccggggctgacttcagagagacacacctaaaactctca

SEQ ID NO: 16274 - DNA, 122 bp, Homo sapiens
cgttttagtatggctaaaaagacacggcaatgccagccaagtaaaatacttagcggaactcgggtgtggacaggagaatgtaggcttgcacacgggaggtggtggagtgagccttccacctt

SEQ ID NO: 16275 - DNA, 122 bp, Homo sapiens
taagaagcaggaatccatttggggagagcaagtgagatgaaagggtgataaaatagaccccgggctgggcatgctggccacatgcctataatcccagaggctcagactcaggagtccgaggg

SEQ ID NO: 16276 - DNA, 122 bp, Homo sapiens
gcctagggattccacatgggtctccccctcttttcagtctaaggacagctggcaagcagacggacctttgactgccccctctctagtacctgcagctcacaaagtttatccatgtccatctc

SEQ ID NO: 16277 - DNA, 122 bp, Homo sapiens
tgggcacacaccaagactcaatgcatattaagtgtgatgtgggccaggtgaagtggctcacgcatgtaatcccagcaccgtgggcggccaaggtgggcagatcacttgaggtcaggagtttg

SEQ ID NO: 16278 - DNA, 122 bp, Homo sapiens
gaattctcctgggagccagaccaaagcaccttcctggactgcaaagtgtggaagccgccgcgggccgggcgcggggaggtgtcatgcgccggaacctgcgcttggggccaagctctggagct

SEQ ID NO: 16279 - DNA, 122 bp, Homo sapiens
tcaccaccgcgccatcagaggtgggacacagactctgtcgaccgccctggcccgaaggcacgtgtctactaccatcagtaacatggcctcctggccacaccacacacaccacctgccgggag

SEQ ID NO: 16280 - DNA, 122 bp, Homo sapiens
cacccacccctgctccaccgcacgccggggggcagcctccacgtggaatcagcacgcctgcggaccagccagccggccaggacagggaatgaggcgatactccagtgacagatcccatgagc

SEQ ID NO: 16281 - DNA, 122 bp, Homo sapiens
cagggactgggccacatcccctcttccagctttaagatctgggatttgagactgcatcaccggcctcaacactaagacttctttgcaggcctaagctctggaatgccacagaagcccccagg

SEQ ID NO: 16282 - DNA, 122 bp, Homo sapiens
agaaaaagcctgtcaagccctgctctgtgagagaattcagagccgatggcctctgccggccgctgtgtgtgtgagctacactctgtcctatgcttccaggatgcgccatctacagagcaacc

SEQ ID NO: 16283 - DNA, 122 bp, Homo sapiens
tggtcacgttacccagagtcaaagaaatgctaagcccttctcggcgagtgctggccggctcgcgcgtttcaaaaggcgatacggggtgaaaaatgttaaacttgcaggtgaggcgagctctg

SEQ ID NO: 16284 - DNA, 122 bp, Homo sapiens
cgcggcgggcgaggcccaggcaaaaacaaagtcttcccgctcagtaccggccccgcgaggcgctccagaggaccaagccttagctcgcgtcaccccacccccgcgcaggcgcgtttaactcc

SEQ ID NO: 16285 - DNA, 122 bp, Homo sapiens
tctgttgggccccggcgctctggcccgcgccggtcttgggccccagggtagcggccactgcgggcggagcagagggaaacaccagagtctgtgactccagacaggacccactgtgtcctctt

SEQ ID NO: 16286 - DNA, 122 bp, Homo sapiens
cgatggccggcgtggcgccggagcagcagcccacctgctcctgggggacgccgctccccgcgaggtctgaataggcctggggctcaggcagagagatttgcggactcagagaagagaaaccc

SEQ ID NO: 16287 - DNA, 122 bp, Homo sapiens
taacagcgagagaaaacttgaagccgcggggaacccggatcccgatcccgatcccgatcccgatcccaaccccaaccccagccccggcccgcgccccgcgattccggcccctggcccggact

SEQ ID NO: 16288 - DNA, 122 bp, Homo sapiens
gtcggcggcagggcggaggtgagccgcatctgagtaaccgagtgatcggggaggctggggcgcggtcctccggggcccgattgctgcatggcgtgaagataggtgggtggacggctgtgggg

SEQ ID NO: 16289 - DNA, 122 bp, Homo sapiens
cggtcataccaagagaggagagcccaggctgtctggaggccgcgacttggtatctcacgtcgtgttttgtgtcttggttacaaatcgtttatgaaggccctgctgtgcttaggcgccctcgt

SEQ ID NO: 16290 - DNA, 122 bp, Homo sapiens
accatttatttattaagcaagtatctaagttgtctgtcccagttacccagaaaagttctgcgaaacaatacgaaagatgggaacctgtatgagtgcagtagcatgatcatggttcactgcag

SEQ ID NO: 16291 - DNA, 122 bp, Homo sapiens
ccgcacccgccagtgcccacccccgggaaacgaaccccgccgcctattggccggtgcgcccgccgctcgtgccgcacctcgacgtcccgcccccagctgccttttcggcacccacacccgga

SEQ ID NO: 16292 - DNA, 122 bp, Homo sapiens
aaagttcccacatcctcaacagatgagaatgattgcattatttgggatccttgatcaatacgaaccacatactgtcccttctcaaagactaagttccttatttttcacccaaatcctatata

SEQ ID NO: 16293 - DNA, 122 bp, Homo sapiens
ataaggtttatttaaatgttttcaaagagctcgtgaatagtctactggccagagctgaaacgggctggggtaggctgatcacccaattcctctcaactcgcattcccataattttcttcttt

SEQ ID NO: 16294 - DNA, 122 bp, Homo sapiens
ccctctctccccctaatgggagctggaagtccttcttgccatcacccttggtgtcctcctcgcgacctcagtttccggttaagttgcggttctttcccggtcaccaggcaagaagggtctcc

SEQ ID NO: 16295 - DNA, 122 bp, Homo sapiens
gggcaaatgtcatgatacataaactagatctcaatgaagctgttaaaaacattcaaatatcggccaggtgcagtggctcccgcctgtaatctcagcactttgggaggctgagccaggcggat

SEQ ID NO: 16296 - DNA, 122 bp, Homo sapiens
gcgggctgtgtccctgatccttctgcccagaggcccgctggtaccagccacgcaagtgctcggcaactaaggccttgtggatgtttttggtgatgtgctccgattttgcagcagccttcctt

SEQ ID NO: 16297 - DNA, 122 bp, Homo sapiens
acgggtggatgacttccttccagacgcagatgaggaacgggtggatgacttccttcgggacgccgatgaggaacgggtggatgattccttcaggacgcagatgaggaacgggcggatgactt

SEQ ID NO: 16298 - DNA, 122 bp, Homo sapiens
ttcaactccctgacctgcatatagtcatgacagtgtttataatttgtatttgtggattcacgtatttgtggattcgctgtgtttcaaaggatccacctaatcattgttttcagcaaaaccaa

SEQ ID NO: 16299 - DNA, 122 bp, Homo sapiens
tgtgtgtgtgtgtgtgtgagcttgagattccaagtatgtgggggagggagggggcggtgtcggagatcaatccctgggccatgtgtttatagtgtgtgtgtctgcccagaagagagtgggtt

SEQ ID NO: 16300 - DNA, 122 bp, Homo sapiens
caccgggtagtaatcggccacgttcttgacctgttcatagtcgtcagcccgagccagctgcgccaggccctcagggtagagccgcccacagtgtggaaagagcttggcacggtcctctttgg

SEQ ID NO: 16301 - DNA, 122 bp, Homo sapiens
gcctccgccactgtgcgggagtttccgcttctctgagcatccgatgtcccatctgccatgcgggccaggctgtgaggatgggacttctcagggtcgcactcgctccctgcatcctcccctcc

SEQ ID NO: 16302 - DNA, 122 bp, Homo sapiens
catgatcctcctacctcagcctcccaaagtgctgggattacaagcatgagccatcgcgcccggctgagcttgaggtttttatggtcttttctgggtgactttgcagtggtcatattattact

SEQ ID NO: 16303 - DNA, 122 bp, Homo sapiens
cgcctctaaaggcgcttgccagtgcaatctgggcgatcgcttcctggtcctcgcctcctccgctgtctccctggagttcttgcaagtcggccaggatgtctcaggtacagcgcgtgcacagc

SEQ ID NO: 16304 - DNA, 122 bp, Homo sapiens
atgaataattacgtctgtggttttctatggaggttccatgtcagataaagatccttccgacgcctgccccacaccaccacctccccccgccttgcccggggttgtgggcaccttgctgctgc

SEQ ID NO: 16305 - DNA, 122 bp, Homo sapiens
aagcagctagaagactccagacaggccttgctgagcccttcagcctatgacatcagagcacgccctttgccctccgatcacacttctgcacaactgtccataaaaacaggcttccctgtttc

SEQ ID NO: 16306 - DNA, 122 bp, Homo sapiens
ttggcctgtgttgctcaggggactctacggaagaaattggattaacatgagctctatttccgtcagccgaggcgtggccagggctgctgcctcctggaggctgcaggggtccactccccgcc

SEQ ID NO: 16307 - DNA, 122 bp, Homo sapiens
cgcgcggcactgtttcctgagggcctgatggtggacgtttgcaagacaaatccacatgcgcgttgtgtagacctgtaatcgtcacagcagtcatggatggattgtgtacactttcagatgag

SEQ ID NO: 16308 - DNA, 122 bp, Homo sapiens
gcgaccagggggtgctgcccctaacccgttgatcagcagaaggcagaagagggcggaagccgacaatctgagggctttcatgaccaagaggctgccggagactgaaaaatagaagggaccaa

SEQ ID NO: 16309 - DNA, 122 bp, Homo sapiens
gtaactctaaactttctgaaaatacgatcattatatttgcaacaatactgttttggctgccgtattgaaaggaaccgtttaggggaaatgtatgtttaccctcagctagcgtgttggctagg

SEQ ID NO: 16310 - DNA, 122 bp, Homo sapiens
gtccttctaaggacctatgggtacacggagcccaagggcaaactcaggaaagctgaatcccgagctgaaacctaagagcacgtccaggcattaaatggctgcttaaaggcaggaatctgaag

SEQ ID NO: 16311 - DNA, 122 bp, Homo sapiens
aactgcagtgtcctgaggagccctgcatggccatggagtttgctggatgagggatatggacgggctcctgcagcgagaacagagacagagagggagagggagagacaaagaggagacagaga

SEQ ID NO: 16312 - DNA, 122 bp, Homo sapiens
gccaccatatccatcttacagaacacgaaactgaagcacagtgaggttaagccacctggccgggctcacacagttagcagatggcagaggccagattggactccaaactgctcagcatctgt

SEQ ID NO: 16313 - DNA, 122 bp, Homo sapiens
ccagtgatccgagatggggatttgcttgtatttaaactctcctgcgttctcaaagagattcggcaaattgggggtgacgttcaagatgtacttgatgccgaattcctccaacacgtccaagt

SEQ ID NO: 16314 - DNA, 122 bp, Homo sapiens
agctgaagatgtaagtcaatcgggtgggggtcagtcctgtccaacccatggcccgtgggccgcatgccacccaagatggctttgaatgcagcccgacacaaattcataaactttctgaaaac

SEQ ID NO: 16315 - DNA, 122 bp, Homo sapiens
gggtttaaaggatagttcttagaattagaacattatgtgtgccgttactccaacaagtctcgaacgcacagatatttctattccagtttcttccagtactcattagaagaaaaattggtggg

SEQ ID NO: 16316 - DNA, 122 bp, Homo sapiens
acttcgggtttgcactccccggagccagaactccgtggcggctccgggcctccgtggatccgagcagagactggctgcccgcctgccactcgcaggctgggaaaacgccagccggtgcctcg

SEQ ID NO: 16317 - DNA, 122 bp, Homo sapiens
attggcggggacaggtgctgggcgtgcggccaggatcctggcatgaactcagggtggggacgagctcaatgagcaggaacagacactgaaaccagctctgatggacccctggggctgccgcc

SEQ ID NO: 16318 - DNA, 122 bp, Homo sapiens
atggcgccgtgtctagttacctctcacatggtgctgtgtctagttctctctcacacatagcgtcatgtctagttgtttctcacacagagcatcgtgtctagttctctcacatggcgccgtgt

SEQ ID NO: 16319 - DNA, 122 bp, Homo sapiens
gacatacgtgtggggagccgagaaatgggctgcaagggaagggtcgcagcccgctccggacgggccctaccttagggtaggtgtgcaaggggtaggtcaactgacaggcccggtggcaagac

SEQ ID NO: 16320 - DNA, 122 bp, Homo sapiens
ttcagcgcacctccgccatcgactactggaagaccaggcgcacacgtcactacttccgcgcgcccccattggctggtcttcacgagggcccgccctcgccgtcccagctggcctttcgggct

SEQ ID NO: 16321 - DNA, 122 bp, Homo sapiens
ggaggctgcggacaggtcgcatcaggtacctgagacgatccgcgccatctttgctgagggcgagtgccaggcctagaggggcgggatgggcctggcgctgcccagtggggcctgtggctgga

SEQ ID NO: 16322 - DNA, 122 bp, Homo sapiens
agtcgcttgttgccattttgattattccacatgcattgtgatcatatggaactggtgacacgtgttcttatttccctttcaattacaaaatgagctccatgttcttagccatcaaatctcac

SEQ ID NO: 16323 - DNA, 122 bp, Homo sapiens
gctgtatttatcgctgacataaggatgaggcctggaattgcattcactgcagagtcccaccgggaggaccgaccgttatccccgccgactccccccaggtcgccctggcagtttcggccgct

SEQ ID NO: 16324 - DNA, 122 bp, Homo sapiens
tgctgtggcaacctgccctccagtgaattattatatgcattgtcatttcatgcatgtccgcgtgtatctgtaggacagattcctaaacgtgagattgctacatcagcaggtatgtgcatttg

SEQ ID NO: 16325 - DNA, 122 bp, Homo sapiens
tatgcggctagcagggagaggggcggagaggcagcgaacctctcaatgtgcagcaggccgcgagggctatataaagctcgggtctcggacctactggaactggtcaagattgcccgcgagct

SEQ ID NO: 16326 - DNA, 122 bp, Homo sapiens
ctgcctctcttgccaagatgccgtttgacttggaggtgtatagcaagttcttaactcctccgggcctcagtttccccatctgcaaatcattctttttatagacgaaggcaggagagaatagg

SEQ ID NO: 16327 - DNA, 122 bp, Homo sapiens
gttggcattgtaaagagttttatttccttttctgattttatggcattgtgcagactcacccgttacaatggtgacagtggacatccttgtcttctccctgatgagaaaccgaaaaatttcaa

SEQ ID NO: 16328 - DNA, 122 bp, Homo sapiens
tccccaaactggcgcccacactgccgctgacccacaagccagaggcaaattcccgcacctcgcccttctcacagcttgtgcagtccgcctaaagcagaagctccccaggcgtcccagcttta

SEQ ID NO: 16329 - DNA, 122 bp, Homo sapiens
gaggagcgcgaggggacctggagggtgtttgcccggtctggaattttcggcagcctgcaccgactcttttcccttccatttgatgcgacggccacggcaaaattgaggctattctgcaggta

SEQ ID NO: 16330 - DNA, 122 bp, Homo sapiens
caggagatgcatgggccccgccctgggtgcagcgtgggcggctgcggggaggggctgggccgacgaaggctcagcgctgaggaccctctgcagcgcccccgtccaccccgccccagtcccac

SEQ ID NO: 16331 - DNA, 122 bp, Homo sapiens
atggctggtaagtgtcacggggctgccatccttaatggtttggtgatggctgcctgggtgcgggagttgaagaaccctgggggcctcccgggctgagcagggaggacactgtgattgttcag

SEQ ID NO: 16332 - DNA, 122 bp, Homo sapiens
gaggggcctgcgggctaggctggggtaagacagaggacctccatttaacctcatgtaatccggggagctcctgagcttctggtccaacctgcggcctaagcagtaacattcacagccacccc

SEQ ID NO: 16333 - DNA, 122 bp, Homo sapiens
agggccccagagggtccctgcacccctctgtagcccagactgctcaaaggtacctgagtccgggagggccagaggcaggcagctttgaacttcctttgaagctgttcatcactggtccctct

SEQ ID NO: 16334 - DNA, 122 bp, Homo sapiens
tctggtggcttctccaccatctgttcttcctctttgcagaagcatttcttatggtgttggcggaactgattggcagcttggaacacacatctctttgggcccacatctcctgtcattcactg

SEQ ID NO: 16335 - DNA, 122 bp, Homo sapiens
tgtgctgggagcacaccaggcggatggcgccgtggatggtggtgttgttgcagaagaactcgaagagctctcggtaggagcggtggaactcgatcagggcctcctcctccgccgtgggctgc

SEQ ID NO: 16336 - DNA, 122 bp, Homo sapiens
cgcgggggaggggaggaggcgcggttcccggggcgtgggggtggtgaaccggggaaatatcggtggaggggggccatctccctaaagggcagagggtgaggtgcggtgaatagccgtatccg

SEQ ID NO: 16337 - DNA, 122 bp, Homo sapiens
gggggaggatggcggcagcaggtactcacccgggtgaggaaagcccagcccgggtcctcgcgtccccgctgcaagcggtcccccaggtgctcccgcgcctcgcagcttccccgtgggcggcc

SEQ ID NO: 16338 - DNA, 122 bp, Homo sapiens
caccagcacccactgccctgacaccgccctccccgctctgtcccagcaggagcacgcagacgcggctgtcagacctggtgtgttttcagagaggcatcccttgtgccatttcttgcggcatg

SEQ ID NO: 16339 - DNA, 122 bp, Homo sapiens
gaggaagacaaaggaaggcttcatcccaaatgtggaggggcagggggcctggaagcctggcggggaagcagacagtagggcccgctccccacaggaccctccaatcgtcagagccctcgacg

SEQ ID NO: 16340 - DNA, 122 bp, Homo sapiens
gggacgcagccgggcggccgcagaagcgcccaggcccgcgcgccacccctctggcgccaccgtggttgagcccgtgacgtttacactcattcataaaacgcttgttataaaagcagtggctg

SEQ ID NO: 16341 - DNA, 122 bp, Homo sapiens
aaagcatttccttctcctgagcctgtttccctgggctgggagggcgcaaggtggcggcgccggctgcctccagacacagttgtcgaggcgtcgccaatgcgattacgggcgccgcggcccca

SEQ ID NO: 16342 - DNA, 122 bp, Homo sapiens
cccatcatcctaaactgtggtctttcattagtcttccaaaggcaaattcagtccttggagcgtagtcagtttggggagggattcttatcatgcttggttcaaagttaaattattaactaaat

SEQ ID NO: 16343 - DNA, 122 bp, Homo sapiens
aatactcaaacacctaaggatgctcctatgctgaaatggtgttatgctacataatttcaacgccatgacaatcaagatagcacaacaaagtctcacctacagccaggagaaagaacaacccg

SEQ ID NO: 16344 - DNA, 122 bp, Homo sapiens
gcagctctgcgccgccgggtgaggtaatggaatcctggctggacctgctgcggctccctccggactggctagtgacgtagcggcttccccggccccaccccgcccagcccggccgcccccgg

SEQ ID NO: 16345 - DNA, 122 bp, Homo sapiens
tccctgacaagagtaattatgcctcgaggtcagaagagtaagctccgtgcccgtgagaaacgccaccaggctcgttgtgagaatcaggatctgggagctacgcaggccactgtggcagaagg

SEQ ID NO: 16346 - DNA, 122 bp, Homo sapiens
ggggacactagcaggcagtcccctcgactggcgacccccgcttctcccggccctccagcacgccacgccgctcccgctccatcgccccggcccgctccgacctcaccgttcttggagccctc

SEQ ID NO: 16347 - DNA, 122 bp, Homo sapiens
tttttgttggaagtctgtacctttcctccgtggtagtcccagaccaagggtgatacttggcggtgcccagggtgtcacctgtcttctcaagtggaagaggagaatgaagagcactccagtac

SEQ ID NO: 16348 - DNA, 122 bp, Homo sapiens
cggacggcggtgcggacagggagctgtattgacctgcgttctgcgtttcagagcccggaccgccctgggacccctgtggccctcaagttcccaagtgacctcgtccggggaggggacgtctc

SEQ ID NO: 16349 - DNA, 122 bp, Homo sapiens
gccaaaattctcacgcctccacagagcaaatggactccatttcccaagataccagcgaaacgcctgcgggagtctaattgcccggtcgatgcgcaggaaatttggctcccgcaggcgtttcg

SEQ ID NO: 16350 - DNA, 122 bp, Homo sapiens
aataataacaaggtatgaagttctttttatagaaaaaaaggagagaattgaaactaaatgcggcagttagacaaccattttgataagaggataattgaggcgacactggtgtataattagag

SEQ ID NO: 16351 - DNA, 122 bp, Homo sapiens
gaggggcagaggtggccggggcaggcgcagagctctgctctcacagcacccagaactcaccgtgtgctggtgtctaagcatttaccaagcttcagatcctctaggatcaatgtcattttttt

SEQ ID NO: 16352 - DNA, 122 bp, Homo sapiens
ggacatacaccggccagccaaggctgatacgcgcacgcgccagcaacagcgggcataaagcgcatgcgcgcctgcctgcagccgcgattgaccttcccagtcaagccggtgacgtcttgcgt

SEQ ID NO: 16353 - DNA, 122 bp, Homo sapiens
gaaatcatgaggaccgaaacgctccttgtgcgctgtagctctgaggtggctgtcatggcccggacggcgggggaggcgaggatggttgtggggaggcgaggatggttgtggggaggagaggg

SEQ ID NO: 16354 - DNA, 122 bp, Homo sapiens
gtcgaagggaggagaaggagattatatagctgaaacgtctaagagaatttgtgatctgagcgtttctactggggcaagtgcttctgaaaggcagaggcggctgagatctggaaacaggtctg

SEQ ID NO: 16355 - DNA, 122 bp, Homo sapiens
actgggtcctttaaagggggtgtgggctctgggtgaacaccagttatcctcctacaaaggcgtgtctgtggttccctgtctttggacacgtaagaattggaggaaaataaatgtggatttgg

SEQ ID NO: 16356 - DNA, 122 bp, Homo sapiens
gctcgttgtacacccagtctgccactgcgctctgcgttttgtcgaagaccacgaaggcatcgtagggcagggcatcctcatctcgcccactttgccgcccccgccagggaagccaggccagg

SEQ ID NO: 16357 - DNA, 122 bp, Homo sapiens
aggttcaccctcaacgagcacggccgcatccacagcggggagcggccctaccggtgcctgcggtgtgggcagcgcttcatccgagggtcctcgctcctgaagcaccaccggctgcacgcgca

SEQ ID NO: 16358 - DNA, 122 bp, Homo sapiens
cttacaccttttatgacatagaactcttttgttctgtttttgctttgcgacactgtgaaccgtgcttctgcctcggaacctccctagttatattacttgtgccacatggatttctttaggat

SEQ ID NO: 16359 - DNA, 122 bp, Homo sapiens
aggcggtgcagggcaaattggtatgcagcgtccgccccgtgggcccgggagagcctgccccgcagggaccagagcccaaggacgggctcaacactcagtcaaggtggggttgacgacggcca

SEQ ID NO: 16360 - DNA, 122 bp, Homo sapiens
ctttgcggtgagtgttacagctcttaaggccggcacacgtctggagttgttcgttcctcccggtgggttcgtggtctccctggcttcaggagtgaagctgcagacctttgcggtgtgtgtta

SEQ ID NO: 16361 - DNA, 122 bp, Homo sapiens
ccgggaggacgttggggcccagggggatgctgtgctgcagctccaggagggcgatgtccccgctaaagttatgggactcattctgacggtagtcggggtgcacaacgacacggtggacaggg

SEQ ID NO: 16362 - DNA, 122 bp, Homo sapiens
actgttagttttctggtattcccttctctccacatttttccttctcagatcactgaggatcgtccaatcttccctgcccatccctcccctaccccaacctccattatttgtactctcttagc

SEQ ID NO: 16363 - DNA, 122 bp, Homo sapiens
tacagccgagaggcccccaaccccatccacctcactgtggacacaagtctccagaacggccgcatgagcatcaaagcctatgtcagcactttaatgggtgtccctgggaggaccatgggagt

SEQ ID NO: 16364 - DNA, 122 bp, Homo sapiens
gttcactgccatgttccgccggaaggccttcctccactggtacacaggcgagggcatggacgagatggagttcaccgaggctgagagcaacatgaacgacctcgtctctgagtatcagcagt

SEQ ID NO: 16365 - DNA, 122 bp, Homo sapiens
ctcgccctgcccttcctcggcagggcactcatgcgtggggccctcgctgcccccagcacccgcacctcatggccgctctcctcagcaggcctcggtttacgggtcgcctcctcagaagactt

SEQ ID NO: 16366 - DNA, 122 bp, Homo sapiens
ccacacactgccaagtacaaactccccgaaaaacaggtggattcggaaaccaacagcgcccgggtcagaactctgggccagtccaaaacctgacaacatctgcgttccttgcaggtattttc

SEQ ID NO: 16367 - DNA, 122 bp, Homo sapiens
gaagggctcctggagcacggccagagcagacaacaaggccgaggaggcacctagagcgagcgagggctgctagcacgttgtcacgtcacactattattatttctcttataaagaagaacaat

SEQ ID NO: 16368 - DNA, 122 bp, Homo sapiens
tggcttgcagacacggtgccctcgaggcctctggctttatcttcacgtggctccttcctgcgtgtgtgtctgtgtccacatgtcccctttgggtaaagatattagtcatattggattcggac

SEQ ID NO: 16369 - DNA, 122 bp, Homo sapiens
aggtgtcctgggcaaggggagctggcagcccaggccacaacagggcttcccactggcggacgtccttccccgtggagggggcgttgaaggacagagaggagaggggaggccctgcggccttc

SEQ ID NO: 16370 - DNA, 122 bp, Homo sapiens
cgccggccggcggcagaaggcaggcggaggcgggcggcggcaggcgggcagcggtggcggcggcggcggcggggcctgggtgctcgctcgcagctctccctcggttagcggcggcggcagcg

SEQ ID NO: 16371 - DNA, 122 bp, Homo sapiens
agaagagggttggcccttcaccctccccaccttctggcccccagactggtagcttgcccccggggcctcctctgggctagggtctgcccaccaatgcttgctcctgtgacaggcaacagcaa

SEQ ID NO: 16372 - DNA, 122 bp, Homo sapiens
gcccaatggagctgtcggcagtttgacccagcttggtccgtcgcgtcctgttctaggaatcgattattcaaagaaggaatttagagggactgcagaaaatgttacaggtcttaacaccattt

SEQ ID NO: 16373 - DNA, 122 bp, Homo sapiens
tggttgaagctgctttatttccctttcgttaattctctagagtttctggccagaaggggacggaagctggaataatgtcacttgactcacctcattgcactcagacacattctcagtctctt

SEQ ID NO: 16374 - DNA, 122 bp, Homo sapiens
caccctagggctttattaaggcctgagccctcttggcagcactctgaggcccctcagggacgcaggccctgtgcctgtctgtactctgtgcatttgccattgcaccctggctgttccaccct

SEQ ID NO: 16375 - DNA, 122 bp, Homo sapiens
ccctcgggtgatgggaacggacggcctttcggagaagcctagggccccagggcttgggaccgctctcctccacgccctacggatgccccactttccccctcttcttcccagtccctcccctc

SEQ ID NO: 16376 - DNA, 122 bp, Homo sapiens
agtcgtcacccagcgcaaagcctctagcgtctcgccgctccgccctcctggccggagtagcgcgcagtcttccgtggaaactctgacaacactggcgaccggccatttccggaaatcaaagg

SEQ ID NO: 16377 - DNA, 122 bp, Homo sapiens
caacccattggactcacagattgataagctaatgtttagagaatttagatcggagagagtcggtacggcgcagactcaacatcaacctcttgcaagcaactaaaatggcctcgtccttgctg

SEQ ID NO: 16378 - DNA, 122 bp, Homo sapiens
agacttcaaacattccagaacttactgttaaagtcagatttaccctccttgtgagacagacgcccagagcttggacttattcgtttgctttatagaaactccctaacttatttcacttctca

SEQ ID NO: 16379 - DNA, 122 bp, Homo sapiens
ggtggttggaaccggctgaaagtggctgcagcaggacccatacttcctcgcagtcagctccggagtctgaggacccaaatcctccttggcccagttcggctgttagccccctccagccctaa

SEQ ID NO: 16380 - DNA, 122 bp, Homo sapiens
aggaagaggacgctccagcccaactgagcgtctctgattggccgccagctcagcttggaacgctggggtgcgtggcgtcatatccgccgggcccgccatcttgttcccaggggcagttggcg

SEQ ID NO: 16381 - DNA, 122 bp, Homo sapiens
ccccagccctacttgagccgtccttctcattgtccccatatcctcactgctcacctctcccgagagacaggatgggggccttagcttaaaagattgcatgtatcctttcttcgggggatgtg

SEQ ID NO: 16382 - DNA, 122 bp, Homo sapiens
ctgcctcccaggttcaagctattcctgtgcctcagcttcacaagtagctggaaatacaggcgcgtgccaccacgcctggctgatttttttgtatttttagtaaagacagggtttcaccatgt

SEQ ID NO: 16383 - DNA, 122 bp, Homo sapiens
aatctggcgaaaagcaagctgttccttgtgcctgaggagatggtgaccctttatttcatccgtatttaaacttctctattccctgccataacatcttttgccccgtatagctggaataaagt

SEQ ID NO: 16384 - DNA, 122 bp, Homo sapiens
cctgtgagctacacattctgttctgggttccaaaacagtcacaggaacttgcgacgcacgcgtttaatgcagctgtggtttctgcactcatcttctccccagaagccagtattgaagggacc

SEQ ID NO: 16385 - DNA, 122 bp, Homo sapiens
aaaaaatgggaaagtattctgaaagtattccaaaagcccaaaacacctatcggagactcacggaagcctgcggagacggtcaccagataccaagggttcgaggcgtttctcagagcctgtgc

SEQ ID NO: 16386 - DNA, 122 bp, Homo sapiens
ttaaagagcaactttttaatgcctaagcattgatttagagttggagctgggctggtaccacgtggaccgctcttactctaaaaggaaaattgagaccaccatgaaagtgttttgattttact

SEQ ID NO: 16387 - DNA, 122 bp, Homo sapiens
gctatggccaggctggagcttcgggagcagacgcaggagggtgggcctggcatggggcgccggctgggggctgggacatacagcccagggcggggtccggcgtcgggcttgcctgtcagctg

SEQ ID NO: 16388 - DNA, 122 bp, Homo sapiens
ggctgtctcatcatcaaccacagactgtgctggaaacaatgctctgtggcctctgagactcggtcgcaaatggccacgcagctcacaccctgcctgctggaacaggggctccctgagggccc

SEQ ID NO: 16389 - DNA, 122 bp, Homo sapiens
ttgttattctaggccacaaagaaaaccatctttatgcataacagaagagggttgactatacgttcacgccttgggcctggatagtgaaagtgtgacccactcacatttggcaggatggttgc

SEQ ID NO: 16390 - DNA, 122 bp, Homo sapiens
aaaaaattaaatagccaccaggaaaattaaagttaggtataaaataggttaagaaaaaggcgctctcgaaggacagattgacagtgtgtcaaaacagaaagaacatacctatataagcattt

SEQ ID NO: 16391 - DNA, 122 bp, Homo sapiens
catggggctggtgtatggatccaccgtcggattccgtctgcagaggaggacgtagggggccgtcacacccaccaggcctccctgctgtgctttaacacaggcagaagaggttcatggcaata

SEQ ID NO: 16392 - DNA, 122 bp, Homo sapiens
ccatctcccccaagcagggctgggggctcgacaaggccaggcccggttgcccacactggccgggggcctggaatgtgctgggacacagccaggctggcaggatgggggtgggtcacagagcc

SEQ ID NO: 16393 - DNA, 122 bp, Homo sapiens
cccaagtcactgtgcaccctagcagcccaggaaagaagcgtggctgtcaaggggcaagcgcgtaccaagtctgagggagggggccagatacgccaaatcggaaaggggggtggtccggaaaa

SEQ ID NO: 16394 - DNA, 122 bp, Homo sapiens
tccctccgcgggtcgccggctgctttgtctccaaaggctcttttcagggccacttaaccccgttagtgaaataagctgttttcccactgcttactgtgagttctacttaggggttttccctc

SEQ ID NO: 16395 - DNA, 122 bp, Homo sapiens
ccacacagcgtctgggacacggatgctcacaggcgggacaggcgggacaggcaggacaggcgggacagggcacacatgggtcctggaagacacagagggatgctctcaccacaaacaggacg

SEQ ID NO: 16396 - DNA, 122 bp, Homo sapiens
cgctgcacctgcgccagaaaccacagagcagccccgcccagcagaggccggggcctccctcgcacccacactcaccagtgtggtggcttggccgcctcacactctgctgggccgcaaaacat

SEQ ID NO: 16397 - DNA, 122 bp, Homo sapiens
gccgtcgggagggcctggtgtggccgtcgggggcaggagggaccgaggttccccggggttcgtcacagcctcaccacgtgtccccaaccccaaggccccgggacggggtgaggctgggggcg

SEQ ID NO: 16398 - DNA, 122 bp, Homo sapiens
ctttaaacagggcagattttaaacacactttttgtggaatttgcaagtggagattacagacgctttgtggtcaatggtagaaaaggaaataccttcgtataaaaacaagacagaaactcctt

SEQ ID NO: 16399 - DNA, 122 bp, Homo sapiens
agaccagcctggcccacatggtgaaaccctttctctaccaaaaatacaaaaattagtgggcgtggtggcatgtgcctgtagtcccagctactcgggaggctgagacacgagaatcccttgaa

SEQ ID NO: 16400 - DNA, 122 bp, Homo sapiens
cccccactcggccccgcccccagtgccctggcaggccccgcccccaacgccgggcgctcccgtcggctcggcggcctcagttccgtaaacacttctcaccccgcccccggcagcccggaccg

SEQ ID NO: 16401 - DNA, 122 bp, Homo sapiens
ttttaatgaaagatggaaggttggggcgggtttagaatgaaaagatgctctacgtggctccgcgttcctcctgagagagatacccgggcaaccttgattaactctggactgcagggaagtga

SEQ ID NO: 16402 - DNA, 122 bp, Homo sapiens
ctcctgacttaggcctctcggccccgactcagcatcccctgctcttctatcacagacgtccggacaaccacagccctggagatgcctgaccgggagaacacgtttgtggttaaggtaggaat

SEQ ID NO: 16403 - DNA, 122 bp, Homo sapiens
agccaagccatatgttttgaatgctatgaatctgaccaataaatatgtacctatttccagcgttcagtaggctaattaacaaaggccggtggtggtggtgttaactgggataaagagttgat

SEQ ID NO: 16404 - DNA, 122 bp, Homo sapiens
aaactgatgactatgtgttttgcagatggtcatcttgtatagtatctcacaggggttgtccgaatttcctgaatttgcatgttaacctttttaatgaggtagaggaagtttttgtggaccat

SEQ ID NO: 16405 - DNA, 122 bp, Homo sapiens
ctgatgatgtgtggtgttggcaagcggattgcgtgagagcgggcaggggtcgcgggagcgcgatcgccgccgcggcggccggcagccaatggccaggccgagcggacccctgcgtcaggagt

SEQ ID NO: 16406 - DNA, 122 bp, Homo sapiens
accgttaaaaaaaggaaactaggctgagctagggcacctcagatcccggcagtctggggccggggcgaagttgccggcgtcgcgcggccgggggcgcgggcagggccgggcgcgactctccc

SEQ ID NO: 16407 - DNA, 122 bp, Homo sapiens
gaggcgcggcgccgcgggcgggggcgcggcctcgggggcccgggcccgagctggggccggcgcgggggccagggccgctgccgcctcacccgcccctccatcgccatcttgggcgagcggcc

SEQ ID NO: 16408 - DNA, 122 bp, Homo sapiens
cgaactcctgacctcatgtgatccgcctgcctcagcctcccaaagtgctgggattataggcgtaagccactgtgcctggccccaaatttcaaatgcattctcctggagaagggttgctgacc

SEQ ID NO: 16409 - DNA, 122 bp, Homo sapiens
agccttcctggctgccctaagcaaccttcatcaaaaggctacgggggaaagtccctgtctcggtctctggagactgttctgcttttatatggcagtcccatgaaaacagctccacgcaggaa

SEQ ID NO: 16410 - DNA, 122 bp, Homo sapiens
tgagtaagcctccgttcttgtggacagtcgagtggctgggcagggacctagctttgtcaccggcgttgccctaagggtcacaggcaggacagctccctctgtgaagtccagggcgtgtgtgc

SEQ ID NO: 16411 - DNA, 122 bp, Homo sapiens
tcgtgggtggcgcggagaagtggggtggccggcgactctcagctcccgggcgcgggatcccgcagcggcagcaggtgggcttacccccgcccctgcggccccccactccctggagtcgcagt

SEQ ID NO: 16412 - DNA, 122 bp, Homo sapiens
acgtgggccagcctcctgacactgctcagcgctctctttatttatcttggactccaaagtcgctctcctttgctccctccccacctccctgccacctctccgcgcctccctcccggcgttcc

SEQ ID NO: 16413 - DNA, 122 bp, Homo sapiens
gggccgggaagccgggcgttggtggagggaggcgttgggcttctgtcgccgcgaagctggcggaaaaggcagtggccagcgagccgcctcgccagttcccacgactcccagggaggtggcga

SEQ ID NO: 16414 - DNA, 122 bp, Homo sapiens
attactatattatgtatcctacacttggaccagtgtctgtttcctgaacccagtcatggccgtagctcactgctgttactataatgacctcgttcctcctttctaactgtaaaattctattc

SEQ ID NO: 16415 - DNA, 122 bp, Homo sapiens
gctggtgcatcccgccccaggccgacgtaccccgtgccttctggtagtggagagagaagccgatgatctgctcgctgtgcatctcgggccgctcccaggccaccaacacagcggagctgctc

SEQ ID NO: 16416 - DNA, 122 bp, Homo sapiens
tgctttttctctctattgattcctttatagaatattgctgtcatataagtccagcttttccgtgaatttaacagttttatcctgttatcgatgtgtttttattttcttgaaaataagcagat

SEQ ID NO: 16417 - DNA, 122 bp, Homo sapiens
tggcaaagatgcaggttgagaggacagaaatgggcacttgcccccaggcatcaccttcagcgcacactctgggaccgacccgggtggcccaggggtgggatgtggcggggacatgtggaccc

SEQ ID NO: 16418 - DNA, 122 bp, Homo sapiens
gaggctgtttgtctcctaactgggcttaatctgaaacacatgtattggcttgagttgatccgcctcacgtggaggcaagatcacaaaagcttctgtgtttcttgatgtgggcaattgtcaga

SEQ ID NO: 16419 - DNA, 122 bp, Homo sapiens
gcgcgatgcgcagcgcgttggcacgctccagccgggtgcggcccttcccagcgcgcccagcgggtgccagctcccgcagctcaatgagctcaggctcccccgacatggcccggttgggcccg

SEQ ID NO: 16420 - DNA, 122 bp, Homo sapiens
ctagtggagagggccttctgatggcattccctgggcatccgccaaccctgagctcacactcggcatccctcgggaaatggtgtaagggccactggctggttccctggcaccccctccccaca

SEQ ID NO: 16421 - DNA, 122 bp, Homo sapiens
ggcgctgcacgaactcctcggcagaggtgcagcgctgtgcggtaccgatcagaaactgggcgacgtgccgctcgctcagccccaacaccgagtgcagctcgtcctgaacccagcgctccaga

SEQ ID NO: 16422 - DNA, 122 bp, Homo sapiens
cttctccttacccccatctctggctcctccttctggggggcaatgttgaaactctggccccggcccccccaccacatttctctggctccatccggggacacagcagttaagggtgggaaacc

SEQ ID NO: 16423 - DNA, 122 bp, Homo sapiens
cgaaatcctcacctgatcttggcagtgccggtggataaaatcccggacggtgcaccgacccgaggcacaccgcaccgccttgcacccgaagccagggccgcgaatccacaccagcgccgcgg

SEQ ID NO: 16424 - DNA, 122 bp, Homo sapiens
ctagaatcctccttgccttttcaagcttctggcagctgctgtcaatccttggcttgaaaccgcagctccaatgtctgccacagccccatggccttctccccatctgtctgtgtttttcctcc

SEQ ID NO: 16425 - DNA, 122 bp, Homo sapiens
agacgcgggtgctgcagagtgacattggtgcagatagcacaaagctggcaggactgtccgcgtggccgtggaaaagctggaactgccagctagtactgagatagtcacggagaggcagtgag

SEQ ID NO: 16426 - DNA, 122 bp, Homo sapiens
cttggtcatgggggtgggtcctgcatggcttggtgctctcctcaccatagtgagttctcacgagatctggtcatttaaaagtatgtggcacctctccccccatgctctctcttgctcctcct

SEQ ID NO: 16427 - DNA, 122 bp, Homo sapiens
cacatgtaacacccttagaatagtgccctgaacacaccgtgagctcttcaaagtgtaaaccgattggtctctaagataaggggaactggtatgtcaccaccattttgcagtccaggaaacaa

SEQ ID NO: 16428 - DNA, 122 bp, Homo sapiens
gttaagacatcagacctcaggcgcagtgcagccggcccctggggagtcaaggaccttgatcgccgataacaagttgccgttggcgggcgccgagggtgacccgcgagcgcggcacccgcctc

SEQ ID NO: 16429 - DNA, 122 bp, Homo sapiens
gaagccgttgactccccagatgacgttcccgtgaaacgcttggcagttgcaagaggaactcgggtcctcagtgccgtttaccaaggccgacaaagtccagcggcattatcgtgtcatcgtga

SEQ ID NO: 16430 - DNA, 122 bp, Homo sapiens
cctgtgccgatgaagatccggcacaggaataagccggtagaggacctgctaggcgactggcgcggcagctccggctctagcctttaggctctggctgtgccacgtcacgcggcggccgcggc

SEQ ID NO: 16431 - DNA, 122 bp, Homo sapiens
agggctctcacatgggcttctgtgctggggtctctgcaccctgtggcactgagctgcattcgcctgatatgtctccgcagggagaggatcaagaggaaaaaggacattaggcacacacaaaa

SEQ ID NO: 16432 - DNA, 122 bp, Homo sapiens
ttcaacctgggtagaagacacgagggaactctgtcactaaatcacggcagagttcaaggccgcttgtagactatttcgtgttatagaaggtggcctttagctactaggcaaaggcctctgtt

SEQ ID NO: 16433 - DNA, 122 bp, Homo sapiens
ccctggagcgcaggcgagaggaagagccgccgccgcccgccgccgctgccaccgccgccgcggtgactactgctggtggggacgctcaagggagctgcctcttgtcctcctcctcctcctcc

SEQ ID NO: 16434 - DNA, 122 bp, Homo sapiens
acctgggcagagaggtcttggctcacaggcaccgggagagctggaaggctgcggggaagccgaggaaggccaacacaccgcacaacacggcaggtgcctggccctcctctgacagtggccct

SEQ ID NO: 16435 - DNA, 122 bp, Homo sapiens
aaagttggagtttgcgaagacaaacgaagaagatgtcaactgtttttgagaatgcttcggcgtgcacaaagccttttaatgaagaaaatcactttgttttttggtttggttgtctttgtgct

SEQ ID NO: 16436 - DNA, 122 bp, Homo sapiens
tcccccagaatccatgggggaccctaacccccaaggtgtcagtgtcaggcgtggggccctcggaaggctctgccctgatgacaggaccagcgccctttctgtcatttgaggacacgagagaa

SEQ ID NO: 16437 - DNA, 122 bp, Homo sapiens
ctgcggcgttggccttggcggcggcggtggagaagatgctgcagtccctggccggcagctcgtgcgtgcgcctggtggagcggcaccgctcggcctggtgcttcggcttcctggtgctgggc

SEQ ID NO: 16438 - DNA, 122 bp, Homo sapiens
cccaccaccgccaccccaacttgactttcaagaacacatttcaagctctggccagagtcccgttcctcaaattcatgtgttctctcctttctaccagagggatagagcccatgcctcaacct

SEQ ID NO: 16439 - DNA, 122 bp, Homo sapiens
ctctttacttttccactctaggccacgatgccgcagtaccagacctgggaggagttcagccgcgctgccgagaagctttacctcgctgaccctatgaaggtaaatcgctggcggggccgctg

SEQ ID NO: 16440 - DNA, 122 bp, Homo sapiens
gttcggtaattaaacgtccccacctaaaccatatgccacttgttgggtcatattctcccacgaaacaattaagatgtctgttaaaggtcatggaatttgagccaagacttcataaaaatccg

SEQ ID NO: 16441 - DNA, 122 bp, Homo sapiens
cgcctccctgcatccctaggggcttccctactgccccgacctgcattccccggggtaaagcgagctctggagatcgcatagagaaactgtagtgtcctgggtccgagcgacgcccgcttccc

SEQ ID NO: 16442 - DNA, 122 bp, Homo sapiens
cggggaactgtttttgatgggtggggtccccggctgtggttggtagtgtgggggcgtggccgagggtgtggcctgagggagtgagctaaccgggggcgtggcctgatatggggcggggggaa

SEQ ID NO: 16443 - DNA, 122 bp, Homo sapiens
aacttacataacatcttggtgccatctgtgaaactggaatgatgataatagatcctacctcgagaggactagtgtgagtattgatgagttactataacatgctacataagtatttgctagta

SEQ ID NO: 16444 - DNA, 122 bp, Homo sapiens
ggcgccaccgctcgccctccaggtaggtgtcctagctgcaaagggattgcttggggcgggcgccaaggtgcccgcatcgcggcccgggggcattgtgcgcctccggcgggccgaggaccccg

SEQ ID NO: 16445 - DNA, 122 bp, Homo sapiens
agagggtgaccgctaatcctaattctaaccccaacctgaatttatgaggtcctgctggtacgcagagggaggactggagggaccagtcaggttggccagctggcccagtggtatagggagcc

SEQ ID NO: 16446 - DNA, 122 bp, Homo sapiens
aattctgggaggggcagcgagcaaatccacgccccgcccagttctgggcttggtgaaaggcgggatttctttgttcggcccagtagtccctgaatccagtgtagaaagtctccggttttccc

SEQ ID NO: 16447 - DNA, 122 bp, Homo sapiens
cggctgccaggcagggcgagcacgcgccgggaggccttggaggcgtagggggcgggggtacggctcgcctgctcgcaagatggcggacgaggacggggaagggattcatccctcagcccctc

SEQ ID NO: 16448 - DNA, 122 bp, Homo sapiens
cgggggtgggcgggcagacaatcagacactgttttatcccaggcatcggctccagcctcccgcttggcgcccgcaacgcggggccgccggggaaatgagtctctcgggactccctgggagcg

SEQ ID NO: 16449 - DNA, 122 bp, Homo sapiens
tgaaattaagaaaagactatacctgtgtaaaaaaggatagaggaaagtgctactgatttgcgcttttagaatctcccaaaagcatgagcactatctttgctagggctaggctggaacctgga

SEQ ID NO: 16450 - DNA, 122 bp, Homo sapiens
tgatggatggcaggggccgcgctggggctggggctggggcggcagggaggcagtggtggccggcgtgcaggggctcacgtagctggcagagccagggctgtacttcctgctgactcagcaga

SEQ ID NO: 16451 - DNA, 122 bp, Homo sapiens
ggtcccgtcaccctgggcggcgcgctcgcctgtcccctccccaccccggccgccgggcagcgggaacagattccagcgcgcacttacccgcagctccttcaagcgctccgggagcaaagacg

SEQ ID NO: 16452 - DNA, 122 bp, Homo sapiens
agaaatccccaaatcaggattctagctctaggattaaaatgtacagggcaactttggacacggtacttgaattttctgtgcttgtgatattctgctatcacaaggctgtcataggataaagt

SEQ ID NO: 16453 - DNA, 122 bp, Homo sapiens
tcggccccgccccttctcgttgtgtaaacaggaagtgagcctgcgcgtgacggtcgcttccggcccggcgaggggcgggagcgattgtgaacggcggcggggcagagccaatcgcggaaaac

SEQ ID NO: 16454 - DNA, 122 bp, Homo sapiens
ttcccagtgagtttgttaaaatgcagattcctcgggtctgcgtagacagactgtgccccacgcttttctaagtcagttgtttctcgggctaccctttaagagacactgctggatggcctggt

SEQ ID NO: 16455 - DNA, 122 bp, Homo sapiens
cagtagtcacaccatggttggcatccttggtggcattgctattgggcacatgtgccacctcgacctgctttggcaactgtgtcatctgtgaattctcgctgttttctcaggaagggtcattc

SEQ ID NO: 16456 - DNA, 122 bp, Homo sapiens
ccaagccttcaggttggcccacaggcctgatgcactcacctgcagaaagcagtgtccaaccggggcatgctctgcaatggtggcattgtacacctgcctccagaagatgggctcattgtcat

SEQ ID NO: 16457 - DNA, 122 bp, Homo sapiens
ggagctccatgcacctcctttcctgcctgggcctctgtgggggattcttctgagccccctcgtcgctggcctggatttgccttggattctccgggggcgggtctgcctcctccctgcctgtg

SEQ ID NO: 16458 - DNA, 122 bp, Homo sapiens
gggggccctggtgctcgacttccttgtatttgggaaagtgtggtggtgggtgcgcgctcgcggcggagggtaaacattcgacagtccccgctctgagagggagggacagagagcgaactgtc

SEQ ID NO: 16459 - DNA, 122 bp, Homo sapiens
ctggactggggggacggccgaggggcgaggggtttccttccggatgaaattgccccagaacgacatgcagggcgtggggaggtggctgcaagatactgcggccccgctggatgccacagcac

SEQ ID NO: 16460 - DNA, 122 bp, Homo sapiens
gccggctgctgccctcgctgcagcgcggctcgggagggaacaccgctggcaaggagcgcccgatgccaggtttcggctctccagtgcctcctctgtgcaggtaacggccgcgtgcgctttag

SEQ ID NO: 16461 - DNA, 122 bp, Homo sapiens
caaattcgcgcacctgatgtctgcttaagctacctgctagactgagactttctgcgaagccggcgtgtctgcgagcagcactcgctaaggctctgcgtttaacagacactacctttgggaag

SEQ ID NO: 16462 - DNA, 122 bp, Homo sapiens
gcctgggtgtgcccctcagtgggtccctcggccggcctgctgtgcttttatgtcggtctccgattgtcctggagggtctgtgcctgtctgtgctcatctgcctccttagccccgagtgcctg

SEQ ID NO: 16463 - DNA, 122 bp, Homo sapiens
tccaaatccaagacagaggaacacaaagggctgccacagtgaggcctcagagaacccttccgagttagccagctccaaactgggaaaactgaggtaggcagcttttgttgggtgcctcacac

SEQ ID NO: 16464 - DNA, 122 bp, Homo sapiens
aaggactcccaacagcgggtcaacccggaaagtctgacaatgctgccccccacagcacagcgctcggcacagcgttagggacagaagtcatcggagttttagcacagggcagcggtcccagg

SEQ ID NO: 16465 - DNA, 122 bp, Homo sapiens
ctgaggtttcttccagctctgcatcctgtaggattccaagaatgtaaaactgcatgtaaccgtggaacatctagagataagtcttagtttatgtaacattaaaactgtctagtgaggatgtt

SEQ ID NO: 16466 - DNA, 122 bp, Homo sapiens
tgcggctccccaggggcctcttgaagatgttcctggacacgtactccagggcattgcccacgttgatctgccgccctcccttgggcctcagccgctgcaccgcgttctgcacttcatccttg

SEQ ID NO: 16467 - DNA, 122 bp, Homo sapiens
tttatcctcataaggcgaacccaacctagatccctcgcatgtgcagctcacaatagggttcgggctcctatgacagactaatgcctctgctgatctgacaggaagcatatctctggcgataa

SEQ ID NO: 16468 - DNA, 122 bp, Homo sapiens
gattcaattctcactacctgcatatatacatcaggaaggctctgaggcaccaggagggtgcgcgctagtatttatactgcaaggaaatccctttatacatgttaatagtcttttcccaggag

SEQ ID NO: 16469 - DNA, 122 bp, Homo sapiens
ccaccccgccgcttcacgcggttctcatgcctcagcctcctgtgtacttgggattacaggcgtctgctaccgcgcccagctagtttttgtatttttatgcgagacggggtttcaccatttta

SEQ ID NO: 16470 - DNA, 122 bp, Homo sapiens
ggaggagcacgctcggctgccccacacgacaagataaatgagtttgccggagtttggcagcgtcggaaccatttccagtgcacggccgtgcgcgccagcctccccatgggacctgtgggctg

SEQ ID NO: 16471 - DNA, 122 bp, Homo sapiens
ttggcccccccaagtccgaacgcggccgcaaaaagatcaaggcggagaacccggggggtccgcctgtccttgtagtcccctatcccatcctggcctcgggcgagactgccaaggagggcaag

SEQ ID NO: 16472 - DNA, 122 bp, Homo sapiens
tccatctgaactttcccgcatttcacctgatggtaactccatcctttgaatcactcaggtcgaaagtcttggagtcatccttgactctttcatgtcctcccttcagttccatcagtaacttt

SEQ ID NO: 16473 - DNA, 122 bp, Homo sapiens
tcagccgggcacatgcgggtggcacaggtagggccggtgtagcctgggtcgcacaggcagcgcccttcctcacagcggcccctcccgtggcagttggaggggcaggtgcggatgctgcagtc

SEQ ID NO: 16474 - DNA, 122 bp, Homo sapiens
gggccccacgggtgttagtggcgggggcggcagagtccgggtgggttgtcgcgacggagccgggcctcttcgccgtcttgagacggggctggcgagaagggcccctcacggagttgccatgg

SEQ ID NO: 16475 - DNA, 122 bp, Homo sapiens
gagtcttggctattattgatgattttgcattgtcatatacattttcaagccaaatccaatcggttagtccagttccactataaaccctgttgggattacattgattctatagagcagtactg

SEQ ID NO: 16476 - DNA, 122 bp, Homo sapiens
ctcggggtgtgcgtggccctggggagtatgtgcagcatgtgtgagcaccgccagttcccacgccacacagcgcatgttggggcctccgcaggtgcggccgggatgaggaggagcacgtgcat

SEQ ID NO: 16477 - DNA, 122 bp, Homo sapiens
tgccaagttgcactgccgggaaccccaaggagaaagtaggagttagtcagtgcgggaagacgcaagcacttgtgtctcaacacgcgcagggcgcggctgcagatggaaaaaccgggaagctc

SEQ ID NO: 16478 - DNA, 122 bp, Homo sapiens
tccacaggcttctttcgttcacctccagcttccttagatcttgacggctttttctgatctcgtaacaataatttgccatttatccataggaggagatgttctgtacctacaagtggaaagtc

SEQ ID NO: 16479 - DNA, 122 bp, Homo sapiens
acgcagcatatccatagagtgatcaccattactcagcagcaacatgaccagcatgtgttacggacctgtggggaaggtaccgagatatcgcaagaaccaggatgttacatacaggaggcatg

SEQ ID NO: 16480 - DNA, 122 bp, Homo sapiens
taaatgctttgcaatgttggccaaatacgagggtagttttaagcctatccacttcatttccgagttcagagtgagtctgcagttgtaattatgtgattaatcaattcaaggcagagttttgt

SEQ ID NO: 16481 - DNA, 122 bp, Homo sapiens
aggtctgtcatgtacccatttggcagattggccataaagttgctgtccgacaggcggcgccgcaggtagttcatggctgcgacttggggcagggggtcctaggggtggtctggccaggagcc

SEQ ID NO: 16482 - DNA, 122 bp, Homo sapiens
caacctgttcaagatcatccagaaagctctgcaaaaaggctctctccttggctgctccatcgacgtaagtccaggctgccttccctagcctcaccccatctgctcttgctgaagggaggctc

SEQ ID NO: 16483 - DNA, 122 bp, Homo sapiens
aaaattctaattttgtttttattggcattgttccaggatttacaaaatgagtgggagactcgtccctcataagggatcttgggacaacaaagtgccagaatcagcttagaaaaggagctgtg

SEQ ID NO: 16484 - DNA, 122 bp, Homo sapiens
ttcattttttctttcagcttgtatccttaaatcttaatcccgggcttcttagcaaaaatgcgtgtgcattcgtttctccttgtttatggagaggtttccggtgaatgttagacagcaactaa

SEQ ID NO: 16485 - DNA, 122 bp, Homo sapiens
ggttggtgccccaggacccctccagccccaaagggtggggagagtaatgaaagggtcctgcgcaccacatgtcagtaagccttgttgggtgccccacaagtcccccttcatctctccaacgt

SEQ ID NO: 16486 - DNA, 122 bp, Homo sapiens
tctggccgaggaagagcagcctcgaaggctcctccgggagtgtgtgcgcttgtgtccgtccgggacccccgcggcccgcccgcacgcacctcgcgccggcccggaccgccgactcggacccg

SEQ ID NO: 16487 - DNA, 122 bp, Homo sapiens
ccacaggaacggggcaggtgagaacacccatattttcttcatttgctctccagtcagtgccggcgttggttaccttggctcagtgcagccttctggcaggaggacagtggaaggttgcagag

SEQ ID NO: 16488 - DNA, 122 bp, Homo sapiens
actgcgcccttcctttttccttccttcctcccttccttccttccttcctttgttttctttcgtcagctatctttagtgatcctgtattttaggtgtggcccaagacaattcttcttccaacg

SEQ ID NO: 16489 - DNA, 122 bp, Homo sapiens
agccgcagtgcccagcctcctccttgtttttaaaatagcaagtgttatacttgctgttcccgttgcctggagcactctttcagtaaatcttccaaaggctgatccaactcatgtttcaggtc

SEQ ID NO: 16490 - DNA, 122 bp, Homo sapiens
tttgttttttttctgattaactttccttttcctctgtcttaaacaccttcccccgcccctcgccacctccatgctgtgtttctgtggctggagcttttctgcactggaaaggaggagttctc

SEQ ID NO: 16491 - DNA, 122 bp, Homo sapiens
gtgaggttacggacttggtcactcgctgtgcactatcagaggtgtgtgaggttagggacccggtcacccgctgtgtccaatcagaggcgtgcgaggttagggactgtgtgcgcggtgacgga

SEQ ID NO: 16492 - DNA, 122 bp, Homo sapiens
gcgctcccactcgcgcacacttgcacgccggccctggccgggcggggctggaggcgagaacgaccccacgggctttcccagggccgtccgcccgcggaccctcccagctccccagagcccag

SEQ ID NO: 16493 - DNA, 122 bp, Homo sapiens
agtgccattttccatccagcatggcccttgtggacttctgcagggcttccatgcttttagcgggttccctagggattggggcagagggttgggaaggaaaagggtagttcctcgctcctgac

SEQ ID NO: 16494 - DNA, 122 bp, Homo sapiens
aggcccacgccaacctgtactccaggtacctctcctgcctgcagagtggcttcatgaccccggacaaagccggcctgagcgagcccagccagctctatggcaagggcgagctgcccatgaag

SEQ ID NO: 16495 - DNA, 122 bp, Homo sapiens
ttcagcaagttggggaagaagtgggggtgaaggtctggaaactgactataaggtgatggtcgtatgctgtgagcttacaagaaatggaaaaatccaaagattaatcccttcttcctcatctg

SEQ ID NO: 16496 - DNA, 122 bp, Homo sapiens
cgacgccggcctccgaggccggaagtcagaaggcggaagtgaactgcagcctatcagcgccgccggcttccgcgcggcattgtggggcttgtagttcttgtgccgcagggctttaaaggaaa

SEQ ID NO: 16497 - DNA, 122 bp, Homo sapiens
ggcccaagaaattaagagatctggcactcactcacttgcccagcaaacttctgaccagcacggagcttatggattaggccacatctacctacccttcagcccaggtgactctggaaccacag

SEQ ID NO: 16498 - DNA, 122 bp, Homo sapiens
acggtgttttgagggttaaatatgtgagctatctgtgcaaaaagcctgacacatcagaggcgcgaagtaagatggaaagctggacaagccccaggtggaccgaccggtgcatccaattctta

SEQ ID NO: 16499 - DNA, 122 bp, Homo sapiens
catgatccacctgcctcggcctcccaaagtgctgggattacaggcatgagccaccgcgcccggcctaagatttcttattgtggtattctgcagtggagaatgggagttggaaagaaatgttt

SEQ ID NO: 16500 - DNA, 122 bp, Homo sapiens
cggccttcgcgctacttagcttgtgttaaacaggaacacaacgcctgacgcttatttctccggcaggaacgacggcgacatgttacttcctgtttccctgccatccggctataagaataaca

SEQ ID NO: 16501 - DNA, 122 bp, Homo sapiens
gctgtggctccctggatttatttgtccagcttcctgtctctggcagtgtgctaatggtttcgatagccacatggcacttggcagagcttcttaaactggtgtggcccgagactctgcattct

SEQ ID NO: 16502 - DNA, 122 bp, Homo sapiens
agttctgtgttctgaactggggctgagcaagatgcgatggtctcagcccgctgggccgcccgtagcgacggcaggagtaggggagagggagggacgcttggagtgtgagcgcaccagtctgt

SEQ ID NO: 16503 - DNA, 122 bp, Homo sapiens
atggaaactttgcctttgaaataataaacattgaatgaaaataggcatacttgcttgcctcgtaacatctttcagtaagccaatattttatgtacttctcacaagcattttctcattttatc

SEQ ID NO: 16504 - DNA, 122 bp, Homo sapiens
gtggcgagaaggccttcaaaggagaatgggttttagggtggcaagagtggaaacaaaaaccgtgtaggacaatatttcactagcccgggtgtgcagtagtggtggcaggagagatggggaga

SEQ ID NO: 16505 - DNA, 122 bp, Homo sapiens
gcctagaaagaaatgcaaggtgtgtgtagattcgttgaccttttgctgtttgcccagctgcggggtgactcccttttcatttcccagctgctcagctgcttcctactgctattttattttgc

SEQ ID NO: 16506 - DNA, 122 bp, Homo sapiens
atcacataagtgctgtcagtataaagttgtggggataaaggaaactggatatttttagcacgatgtgcatgataatttatatgcttggtggctgtgctgctgattaagccgtaattaaaatt

SEQ ID NO: 16507 - DNA, 122 bp, Homo sapiens
ccaccgtttcactgcccacgctcaggacccagagggtctcttgaaataaggttcatgaggcggcctctggatttgattacaaggaaatctgttccccatctcaacccctcaactctctctgc

SEQ ID NO: 16508 - DNA, 122 bp, Homo sapiens
gccacatttattacacttgtaagatctctcttcattatggattctccaatgatttgtaatcgttgtagcattactgaagactttgtgacaatcattacattagtcaagtttccctacaccat

SEQ ID NO: 16509 - DNA, 122 bp, Homo sapiens
gtgccagggcgcttccgtgcaggcctgggcactgcaggaactagccgtcctcgcccgctccggagtgcaaccaccagtggttactttgctctttacacggcattctcaaaactaatgataat

SEQ ID NO: 16510 - DNA, 122 bp, Homo sapiens
aggatccgcttccgatcgggtggggctctggtcccgaggggccgagtcgggccttgttgccgggccgcagcgtaggcccctcgcccgggacctgagggaaggccctggacggctgcggcacg

SEQ ID NO: 16511 - DNA, 122 bp, Homo sapiens
gcaccacctcgttgctgcctgccccggcccggtctccccctgcaccccggagtccggcttcgtcaccccgtcttggggggcctgccctccggcctcgagaatcctccccctgcagcccaaca

SEQ ID NO: 16512 - DNA, 122 bp, Homo sapiens
cacatcaatggcagctcacagttgttgagtgttggctatgagccagggcctgggcttagacgagggcttttactcacgtggactcattcagtcctcacagcaaccctaagacatccatgccg

SEQ ID NO: 16513 - DNA, 122 bp, Homo sapiens
gagattcagagagcttaaaacctacccccacaaccaccatgctgacaagttagcatgagccgtaattcaaattcagtttgccagacagccccaagacccatacccttttccctatacctaac

SEQ ID NO: 16514 - DNA, 122 bp, Homo sapiens
gtgcgggggcggggcgtcctgggtagggctgcaggtgacgtcactccgggccttgggactcggagagcgtctggaggcggggcctggacttcacgcccggcgcgctcctcccctttaaggcg

SEQ ID NO: 16515 - DNA, 122 bp, Homo sapiens
tcggcaggttcacacgcttcagacgtgagtgtgagcaccctgcataatagggctttgtcccggctcctgggagccagcgtctgcagagccctggcggcggagggcggtggagggcggcggcc

SEQ ID NO: 16516 - DNA, 122 bp, Homo sapiens
cgaactcctgacctcaagttatctgcctgcctcagcctcccaaagtgctgggattacagacgtgagccacttcgcctggccatgatcccgcacagttctgaaggccagaagccaagatcagg

SEQ ID NO: 16517 - DNA, 122 bp, Homo sapiens
ttggcagccctgagcaaggctggaggtctcgacactgctggtgtccctaggtgccgcatgcggcaggctcctgagccaagacgcagcagacaccgctactgtcacccaagaggcaaagcgag

SEQ ID NO: 16518 - DNA, 122 bp, Homo sapiens
cgcccctcgccgtctccccacttccctcggtggctgctctcacgccctggcccctctcaccggtaaagccgcttagtgtggaggacttttgcttcgggctcgctgctctcccctgtgggggg

SEQ ID NO: 16519 - DNA, 122 bp, Homo sapiens
aactctttcctgtaactttccaagcaggggtaacaaactcaaatgccctcaggaagcagacgggtagaagaaagcttctacttcactaagctgggttgggtcccgcataccacccctgaacc

SEQ ID NO: 16520 - DNA, 122 bp, Homo sapiens
gcaggcgcacttggcggagctctacggccgcgcagaagacccaatattcctcgaggcgaacgtatttgtgtcgcttttctgaagatttcgattgtcaagttgcagctgactctcttcattgt

SEQ ID NO: 16521 - DNA, 122 bp, Homo sapiens
ctccccgcactcagactttttttgccacttgggctggaaggcacctaggggttccctggccgcaggctgccgccagcctgcgacgcgcggaggtcagcgcagggcaccggcgcgccaagggt

SEQ ID NO: 16522 - DNA, 122 bp, Homo sapiens
catgggctggatcaaataccaaggtgtctcccactttgaatggacccagctccttgggcccgtcctgctgtcagttggggtgacattcatcctgattgctgtgtgcaagttcaaaatgctct

SEQ ID NO: 16523 - DNA, 122 bp, Homo sapiens
ggacccaccctgccctgcaggtgtggcgggcgccaggtccctccagggactcggacagcacgcgatttttccaggatttccgactaccaaatgtgacaagacagtctcgccgccgagagttt

SEQ ID NO: 16524 - DNA, 122 bp, Homo sapiens
cctgttattgtcgttacttacccttgcccgctgacgtgcactttttcacccagtatctaccgtggaagaatttattttctcactgtcagcctaatctggcaaagtttggctcctcaagagca

SEQ ID NO: 16525 - DNA, 122 bp, Homo sapiens
gagtgcccccagatggcggaggtctgcaggaggctaggttctggtggcgcagatcccggacgcctggatccgggaggcggggacccgggctgcctgggtcttggacactgagggctgggatg

SEQ ID NO: 16526 - DNA, 122 bp, Homo sapiens
agaggggccagcctctttctgtctgagtgttctcaccccataaaatccggagcgcgctggcgctcagcccagggggtcgtggagggttcccacacgactcttgtaagatcctctgctaatga

SEQ ID NO: 16527 - DNA, 122 bp, Homo sapiens
gcacgcccctccccaggcatttggccgagagagttcccaacgtggcagaggtgatggggtcgggaggaagccggaatataaatttgttccgaacactccctcagtccgagggccagttcggg

SEQ ID NO: 16528 - DNA, 122 bp, Homo sapiens
ccaaaatacaatctcttatctgagacccaaaaatagagtgaatatatcgtcctgtcctaacgaaaaaaagaaaaatgcattagaaagtgtctcaactgcttctgatgatgatatatatgcat

SEQ ID NO: 16529 - DNA, 122 bp, Homo sapiens
ctgccccagagcatgaactccatcttttgggaaatgcatctttctctgaccatatggttccgatggggctgccatctccctgtacgtcccacttccttattcacagtattggttagagaatg

SEQ ID NO: 16530 - DNA, 122 bp, Homo sapiens
ctttggtgggtacaggtgaaacagagattatgacacactgagtcttgctcaggattaggacggatttggcctggtcagcagttgatccatgtggagtagatataaaactcaagattgaaact

SEQ ID NO: 16531 - DNA, 122 bp, Homo sapiens
tcagcaaggctgtgctgagtggaagaagccctgcccagacgggcacccccggtgcaattccgtgtctgtcacgtcccagcaccggcagatccacccagtggtggcaagagcccagacgaacg

SEQ ID NO: 16532 - DNA, 122 bp, Homo sapiens
ggagaaatttatggtcaaactgtgtactcatcatcaaaagcaattcattcgtgttctgaacgacctgtacactgaatctcaaccaggcactgaggacctgcagccttctgattcgggagcaa

SEQ ID NO: 16533 - DNA, 122 bp, Homo sapiens
cagatgaggaaatggagaatcagaccgggtcacgcagatagtatcaggcggggttggcaccggagcctggctggagccacagaggacacctccggagctgaggcgcagggcagttccctcag

SEQ ID NO: 16534 - DNA, 122 bp, Homo sapiens
ccagacgtgcgcataaataacccctgcgtgctgcaccacctggggagagggggaggaccacggtaaataccagtaaaggaatcactgcctacacggtgtcacccagacacgcacagacatca

SEQ ID NO: 16535 - DNA, 122 bp, Homo sapiens
cacggcaaataacacattcttcctgcgccccagtctcaccagacgcctgaaggttattaacgcacactctccagcaaggctttgtttctgtgcagtcagtttctcttctgctggctgcccgt

SEQ ID NO: 16536 - DNA, 122 bp, Homo sapiens
cagtgctgggccaggttacatggagcctagaagttgagaacctattccttcaggcagctgcgattgtagggaatagttaaccctgccagggcctctatctggaaatcagccaaggttgtgat

SEQ ID NO: 16537 - DNA, 122 bp, Homo sapiens
atcggcctccgtcgagatccgacgtgggttcagtttttccgccgggatgctctgccatggcgttacagctttcatcgggaggcatgtactctgttcacccctctgtctgtgtctctttgtgg

SEQ ID NO: 16538 - DNA, 122 bp, Homo sapiens
ttgactatgagatgcacaagatgacccgggacccgctgaacctggcgctgcgccgctacgcgggcatgaccctcaccaacctcacctttggggacgttgccaacaaggtgcccgggggcagt

SEQ ID NO: 16539 - DNA, 122 bp, Homo sapiens
ccccactgatttgcctgctttgtgacttttctatttcataattatttttaaaacgcaaaacgacatgaggtagcctagtcatgtctctacaacttcctggtagcgccgttcttactgcagat

SEQ ID NO: 16540 - DNA, 122 bp, Homo sapiens
agacgactcctaaaccacctttgccagacgcaggtccagcaacccatcaagagcacagctcgggcaagcagcgaccgcacgcaccgtgccctcctcaccacacaaccacaggtgatgagccc

SEQ ID NO: 16541 - DNA, 122 bp, Homo sapiens
ggggaggtgtaattctgcagatgagcctcctgaggttaaggtttgacaattttctgccttcgagatgagcaggaagttgaggcattttgcaaattgcttggcttctgttaattgctctgtgc

SEQ ID NO: 16542 - DNA, 122 bp, Homo sapiens
tgcctccagggctagaatgtgagatcgcggagggttgagtggcttttgccccacatcctgcggccagcagccggccatggctaggagaggcgcccgacgcctggcgctccccgtccgggtct

SEQ ID NO: 16543 - DNA, 122 bp, Homo sapiens
gaatgtttactctctccttaaagagggccttcgtgttgctcttttttctttgaaatggaacgtctgtctctgtattcttcacacagaatcctagaaagtcaggcatgatggttaaaattaaa

SEQ ID NO: 16544 - DNA, 122 bp, Homo sapiens
tcattcatggacacacgtgggactgcacaccgtgaggctagaggcagcacccctgtctctcgaagcttccagacctgccaccttggtccttaggtggagatagcatcagaagggtgtgatgc

SEQ ID NO: 16545 - DNA, 122 bp, Homo sapiens
tttagttggtttttgtttttcttttttctatttaagcaccagcccagggtgaggtggaggcgtccgaaaccctaaagggacttctcaatggggttcaaggtttcagtgagggacgcagggag

SEQ ID NO: 16546 - DNA, 122 bp, Homo sapiens
tggcggagactctgttgagataatataataaaacatttggcacataggaggcacttactacgtatttgggttattgttagctctccgaaaaatgaggtgaagatgttatcgattgcataggg

SEQ ID NO: 16547 - DNA, 122 bp, Homo sapiens
cattcccgcccctccggggtccccactgcgagggctctgacagctagccctggggtggcccggaggcccagtgacccacctgagctgccccatggctgctcctggcaagggctggccacagt

SEQ ID NO: 16548 - DNA, 122 bp, Homo sapiens
gcctcagagagaggaccaggggtaggtgtattggttttgccagctgcctgcagatgcgtgcggtgctcctactgctcacaccaatatactcagaggggcccagaagcctcattctctaatgc

SEQ ID NO: 16549 - DNA, 122 bp, Homo sapiens
agggaatctgggcacaatcttaataacaccagggccaaaaataacaacgttcctgggaaccgaggtgagtcaccgcaaacagcggctaggagggcgtgggatggcgcgggcaggggggcgcc

SEQ ID NO: 16550 - DNA, 122 bp, Homo sapiens
gtaaatggcgctaaaaaactcgataatcaagacaaataatattttaatgcaatattaaaacgtatcaaaattaatgcaaaaacaacccatggtgagcaaattgccaaaattttaaataaagg

SEQ ID NO: 16551 - DNA, 122 bp, Homo sapiens
taggttatttcttggacacagctgaacgtatactgtgcgcctgcaactttccggtggtttcggaccggacttcagtgaagccagtgaagtcggtcgacttgcagaacttcctttcagagggg

SEQ ID NO: 16552 - DNA, 122 bp, Homo sapiens
caggggaccaccgactcagacaacttgaggtctgccccacgccagccccatctctccaggcgggcagacacatgttgctgtaggtgcttaccctcacacccaagcaaatcgaaggaccctcc

SEQ ID NO: 16553 - DNA, 122 bp, Homo sapiens
catggtttttttgtttgtttttttgagactcactccctcaccctggctggactgcagtggcgttatctcggctcactgcaacctctgcctcctgggttcaagtgattctcctgcctcagcct

SEQ ID NO: 16554 - DNA, 122 bp, Homo sapiens
ggggcctaggctgggctctgggtgctcgcatcagccacccgccctcagctgtagccttcgcgtcagccagctgccctctgctgtagccttgggtgagtgtctcaagtctcccaaccagtggt

SEQ ID NO: 16555 - DNA, 122 bp, Homo sapiens
ggccaggggatggttggagcagggaaggtcaagaggacttatggagtgtcagcaagagcccggcagctcacttcctagctggctgggcacagccgctcacaggcctacccagagtggagcat

SEQ ID NO: 16556 - DNA, 122 bp, Homo sapiens
ctgaaaccttcctggggagctgcaggggcacagaacggtttggggtgctgcatggggcagcggggggcccggtccagacaggccaggagggcggcagtgggagtgcaagtggcccaaccgga

SEQ ID NO: 16557 - DNA, 122 bp, Homo sapiens
ccctctttccaatcgggccccaccctgttttcctggccttcaagctcccgcctggcgccccgcagcggcaagcgtgatttataggccgtctgagccgtgacctataaaccctgttcttcagg

SEQ ID NO: 16558 - DNA, 122 bp, Homo sapiens
atgcgccacagcggcccacacagcagcacggggcaagcggcccgcctcacctttcacagccgcaggccccacgttcaggccacctggggacaacagcctgaccagaccccagggcagccaag

SEQ ID NO: 16559 - DNA, 122 bp, Homo sapiens
tcaaggtatcccagaggatgtgctgtgactggagagcagacccacacaatgaggttcatgcgttttgtgtttcctaggtagtctgccattagatttattttagctcttatgatgtggcagca

SEQ ID NO: 16560 - DNA, 122 bp, Homo sapiens
gaggaagtgcggctgctacgttgtagcagaagggcggggccctgcggggcggggccggggcgccgtgggcgcgcggggacaatgcggcgttgcccgccggcaggggcgcgctaccttgggcc

SEQ ID NO: 16561 - DNA, 122 bp, Homo sapiens
agaagaatgaatggatgattggagggcttacaaaacctctgtgtttggcttccctggagacgctgtaaagttctggctttttcctggagttgtttaactttccctgcatgcagtctccaaag

SEQ ID NO: 16562 - DNA, 122 bp, Homo sapiens
ggttgctctgcgttgggcactggcagggtgcgggcaggggcgacttgcgggacttgccggcgcgtggcggcggtagcgggcaccaggcccgggtaacggcaggcctcccctccctgtcagtc

SEQ ID NO: 16563 - DNA, 122 bp, Homo sapiens
aaagcctaatcaacacttctgtgaggaagttagcagccttccttctgacctgactgcttccgcttctggtggtggcagcgctgtcaagcctcattactggaaagttcatcttgttaaatttc

SEQ ID NO: 16564 - DNA, 122 bp, Homo sapiens
tcgccgcagacacccgagtcccataggactgagggtctgaccaggcaggctgtcaggagccgaggacctggctctcagaggggcagtgtcagtggggagttcctggggaagaggaactatcc

SEQ ID NO: 16565 - DNA, 122 bp, Homo sapiens
aacgataagagctttctggtcaaatttgggggctgccccagataaagatcagatggggagcgagtttgggatgcaggagacaatttgttaaggttcacccccttcatataatatggcaaatt

SEQ ID NO: 16566 - DNA, 122 bp, Homo sapiens
ccgcaacctgcagcccacgctcacctactggagcgtcttcttcagcttcggcctgtgcatcgccttcctggggcccacgctgctggacctgcgctgtcagacgcacagctcgctgccccaga

SEQ ID NO: 16567 - DNA, 122 bp, Homo sapiens
ctccgtccctcaggccccgccgcgaccccgcccctctcggcctcccggcccctccgtcctcgggtcccgcccactgggcccccaccagaacctccggccctgaatcctctggcccccacccc

SEQ ID NO: 16568 - DNA, 122 bp, Homo sapiens
gaccccagcactgacccggaggttctgccgacccccgaaggcccggagtctgagacgagccggggccccagagcctccccaaccaaggctctgctgtccaccccggtgagaaatggcgagag

SEQ ID NO: 16569 - DNA, 122 bp, Homo sapiens
ttgggttctctcctggatgttgcacatgttcaactagaccccagttccacaataatgactcggaacagttcctgacaacgcaatggtcgttaagtggaaagatggcttcctggcacttccta

SEQ ID NO: 16570 - DNA, 122 bp, Homo sapiens
ccggagaaaaagaaactgcaagaacagctgatgggtaagtggctcgcggccctgtggcagcggcaggggatgagagtgggtccgctgctgggttggctcatgccccttggccgggcccgggc

SEQ ID NO: 16571 - DNA, 122 bp, Homo sapiens
gcatgagcatatatccaaacactgtagggacacatcgctatgacaacagtgttctgcatccgagcagcttggaaatgagttaattctgcactattctttcccctataaagaaccccagctgt

SEQ ID NO: 16572 - DNA, 122 bp, Homo sapiens
cagcacttcctgggggaggcgatgagaggtttgggttactcacgatctcaaacttcttgtcgggatagaggcaggtctctcctcccgccgtgaagttgcaaaaaaccctgaacgagtcccgc

SEQ ID NO: 16573 - DNA, 122 bp, Homo sapiens
tcatcattgctaatctgtgcgtttaaccaatttcaacatgaacagtcatctgtgtgctgccgccacagaatcccgttctctgtagcgtctctctgggtgacatcctcggggtcctcatgtct

SEQ ID NO: 16574 - DNA, 122 bp, Homo sapiens
atccagtgttcttgcgggccaaataacaccccactgaaaaggtgttctgcttgtggacatcggatcccaattccttccatgtgaatgtgtgcagaaagagagacggagagcgagggagaaga

SEQ ID NO: 16575 - DNA, 122 bp, Homo sapiens
gagttcactgttttaaaatgttctttgtattagtgataccactctgcggctatttaacttcgaacccctagcggtccgtggacaggcttcagcaggtccaccacacacacctccacctccca

SEQ ID NO: 16576 - DNA, 122 bp, Homo sapiens
ctcaggtgatccgcccgcctcagcctcccaaagtgttgggattacggacgtgagccaccgcgccgagctgacaggttcctcttaaagccctgagtcccagggaagggacctgcaggcccggc

SEQ ID NO: 16577 - DNA, 122 bp, Homo sapiens
ggggaggagctgcaatcgtgtctggggccccagcccaggctggccggagctcctgtttcccgctgctctgctgcctgcccggggtaccaacatggcccagaagcgtcctgcctgcaccctga

SEQ ID NO: 16578 - DNA, 122 bp, Homo sapiens
tccttacatccctagatattccgagctacacaacccggctctccaaacatctaccacacacggccagaaatgtggcacaatagcagcgattcatgactacaaacccgtgttcacggcacccg

SEQ ID NO: 16579 - DNA, 122 bp, Homo sapiens
cgtgaggggcatacgggccgcaggactggggctgaggctcgatcaccctcccccgcccctcgagatgccgcccagcccccagtcccgcggtgtccccggcgcctcctaccgtcagcagggtg

SEQ ID NO: 16580 - DNA, 122 bp, Homo sapiens
gcccggcatggaggaggagtgccgggtgctctccatacagagccacgtcatccgcggctacgtgggcaaccgggcggccacgttcccgctgcaggtacgcatccgcccgcagcccgggctta

SEQ ID NO: 16581 - DNA, 122 bp, Homo sapiens
gcacggcccctgccgaggccaggaccggcagcccggcgcttctggaacagccgcagctggcggaaaagagccagagccgagtgcaaatagctagattgaatggggccggaggagcgtggagg

SEQ ID NO: 16582 - DNA, 122 bp, Homo sapiens
gtctcaaaaaaaaaaaaattccccagcttctactcccaaggagtttccattctggtggtgcgggaagatgtctttattacagaaagtggaggaaggatggtagcagaggggagggcagagtt

SEQ ID NO: 16583 - DNA, 122 bp, Homo sapiens
gccaggataagcgtcgttggggcaggtcctgggtagagtccaggttggcgggtcctggggcggagtcaggatagggcgatcctggaagctgggcttcagaagcgtccaggttggtggcgtcc

SEQ ID NO: 16584 - DNA, 122 bp, Homo sapiens
tggtatttaggggatgcgtactctctggggcccgctggggcctgcagggagagctctcaccggtctcaactccatgccttctgccttgtgcttctggcccaagaggtcggggtcactgacca

SEQ ID NO: 16585 - DNA, 122 bp, Homo sapiens
ccgggtagggttttgggaagaggactcccccagtgggaacctgttgctgaatcacctgggcgttcgtgggggtaaaatgcagattcttagccagcaggtctggggtgcagggcctggaactc

SEQ ID NO: 16586 - DNA, 122 bp, Homo sapiens
gtaccagttcccctccatggagcagctggctgccatgctccccagcgtggtgcagcatttcgggtgagtccccgcacagcccctgcgctagggcccaggggtgcctaccccaactgcagagc

SEQ ID NO: 16587 - DNA, 122 bp, Homo sapiens
cccagacttcttgacagttacagttcaggagttaatggtactctgtgtgacctaaacctacggttagatagctttggacatctgggaggcaagtaaaaacgcctcatcaagacaacctttct

SEQ ID NO: 16588 - DNA, 122 bp, Homo sapiens
ctccccgccgaggggaggacgcgtgtgcaggggcccgggcaggagcggcagacaccgagccgcggccacagggccagccgcacagtcggaggaagggccggagcgaggcggggcccggggct

SEQ ID NO: 16589 - DNA, 122 bp, Homo sapiens
gcacgccatggggcccccagcctctgcatcaagcccatgttgggttcctcctccatcgcccgatttctctgtgcagcacccaagagaggctgtccatcgctgcctctgcttggacagttcac

SEQ ID NO: 16590 - DNA, 122 bp, Homo sapiens
actttctgtgggaccctggatgtctaacctccccgggcctccatctcctcatctgtagaacggagaaaatcataccctcctcacagggctgctgggaagacaaccagagagacaggctatgg

SEQ ID NO: 16591 - DNA, 122 bp, Homo sapiens
agaccgtttaaagcacttaattaattcacttcagcttcgctggagaggtctcagggttcccgagactccattacataatatctttcacaaagtctattcccagctcgaatggaagatggatt

SEQ ID NO: 16592 - DNA, 122 bp, Homo sapiens
ctctcaaggcaagatgtgcaactagatgcaagtgggctggacttccctactgattaccatcgtcttttgctcatcatcctttgctccaaccctcaaggcagccatcgcctttgagggaagac

SEQ ID NO: 16593 - DNA, 122 bp, Homo sapiens
ggggcgcccggcgcgcagcccggggtgggtggtcctggcgagtggggctgcgaggcagaccggccccaccccggggccgccgaggggcgcgggctggggcgcgtggcgggcggggctgggcg

SEQ ID NO: 16594 - DNA, 122 bp, Homo sapiens
ttgctgtcctgcgttgaagacctttctgtgtagacacacaattctcccacagagcagagtcgcagaggacccagccttttattcaaagcctatcgtaagtcaagaacaattatttctaacat

SEQ ID NO: 16595 - DNA, 122 bp, Homo sapiens
aggtgacacatagtcatcttactcatcaatcattccatgaatccaaaatgtaaaaatatgcgaccagcacaccgctgaagtctagggagaacaggttaacaaaaatgcaaacatctacttct

SEQ ID NO: 16596 - DNA, 122 bp, Homo sapiens
agtgtgagaccggaagccccgagtgttgccccttctcctcctgcgcacccgcttcgccctcgccactgggaaactccagtctgccctacgttgcctgctagagctgctctgggacacagtgt

SEQ ID NO: 16597 - DNA, 122 bp, Homo sapiens
gcgacgggacgggcgggacgagggggcggggcggcaggcacagcgcgcgaagacggggtgcgcgatcctcgcaccccaggcagcccgcgacggaccggacccagctgtcacccagccgcgag

SEQ ID NO: 16598 - DNA, 122 bp, Homo sapiens
gccgcaggccgcgttgtcaatggtatccagctgctgcaggagggccatgccactgggcagcgagaagttgtcctgtctcagggccggcggcagctcatccagtgacaggttcagtgcctcgg

SEQ ID NO: 16599 - DNA, 122 bp, Homo sapiens
gagcctccacgggaagccgggacctcccctggcaggagaaacggcgaagcacctccctctcgctccacttcaggggccggcaacgctcctagctcctccaaaacagggacctccctccccct

SEQ ID NO: 16600 - DNA, 122 bp, Homo sapiens
actccagacccacccaccagcaaactgaaaaactcaggaagccacgtttgaaagctctttcggtttcaaggagaaataagactttcagcgaggattctgatagatttcttacttttctgtcc

SEQ ID NO: 16601 - DNA, 122 bp, Homo sapiens
ccgtggcccctgccacagggcattggaatggacagcaggcggccccggatgcagggttcccggtgatgtgctgtgaagacgtcttcctctcggaccctctgctgccccggggggcagcgtgt

SEQ ID NO: 16602 - DNA, 122 bp, Homo sapiens
ttggcagtagtgggcgtgcttgcgggtccaggagggcccctctcccgcgaccgccgaccacgatgagagcgtgaagaccctctcgaaaggaagggctctgctctacacactggtgtctcctg

SEQ ID NO: 16603 - DNA, 122 bp, Homo sapiens
agaaaataaaagggataaggtggatagttctcagacgctgggaagtctattgtgtgggcgcgggaatgaacttcttttgtgttggcaatttgggctgggctcaggtgggccgatctgcgggc

SEQ ID NO: 16604 - DNA, 122 bp, Homo sapiens
aaacaatgtcaggcagtttgcgagccatttcctcccacccttgtactggctcgtgttcatcgtgggtgccttgggcaacagtcttgttatccttgtctactggtactgcacaagagtgaaga

SEQ ID NO: 16605 - DNA, 122 bp, Homo sapiens
gaagattcaggtagtgagaaatacctcaacagacaagaaagctacttcaaggacttccttcggcaaggcctttcaaacaagttttaacattgaaaacacccatccttcaaagagcttgaagc

SEQ ID NO: 16606 - DNA, 122 bp, Homo sapiens
tgtgaacatttgtgtgagcatcctggatgcattcccctacctttcactgaatatttgccacgtgatatatttacagagatgagtcaggcctggcctgtgctctaagaagcctttaattcaat

SEQ ID NO: 16607 - DNA, 122 bp, Homo sapiens
cacagtggacaccgtgttctcagagctccacaaggaaggcacctccatagcgccctacagcgccgggcacgcgcctccatagcgccttacagcgccgggcacgcgcctccatagcgccctac

SEQ ID NO: 16608 - DNA, 122 bp, Homo sapiens
aacgccccgactttcgagtccctaggactgagtccccaggactccaacccagcagagaggcgccggggccttagctctgagggctgtggtctagaaagggaagcagcaggcctggggctggg

SEQ ID NO: 16609 - DNA, 122 bp, Homo sapiens
ttctgtaactagcccacttctgaggtaatggccttaattcactcatgagagcagaaccctcgtgatccaatcatctctttttaggccccactttccaagactcttgcacttgtattaagttt

SEQ ID NO: 16610 - DNA, 122 bp, Homo sapiens
ccaacgcgcctggcagtttgcatttttaaggagttctcaggtgatgctgattctgctgatcgcgggactccgctttgagatcagctctcctagggtatctaagtgacggggcagacccgcaa

SEQ ID NO: 16611 - DNA, 122 bp, Homo sapiens
cagaattagcgctggccttgttggccctccaagccctggaccaaaggccctggggcctgccgcttgcccctctcccggagctggcctcagctttggtggggaggccggggctccagtgagcc

SEQ ID NO: 16612 - DNA, 122 bp, Homo sapiens
cactcctacagttgcaaagtttgagtctgactcagcttcgcctgtattcatttccacaagcggtccaactatgaatgagagacttaaggaagcagcaagggatgattttgtagttagatctg

SEQ ID NO: 16613 - DNA, 122 bp, Homo sapiens
ttttgtttttataagcacagctccatcaatgatttgttggtacaaatcagtgagtcataccggccttgtaaagttcttacacttggaacttgtgcagcttgttagttatatattgtaactgg

SEQ ID NO: 16614 - DNA, 122 bp, Homo sapiens
aggcccgaaatattaaatatttctgctcatagttgaagacaaaaccttatccagccttggcggctcctttccccctccccctttatcagggacttagttcatgattaggactgcggcatgga

SEQ ID NO: 16615 - DNA, 122 bp, Homo sapiens
tttgcaccacgcgggacccggcacgcttcctgccacccacccctgagagggctgcgcggccgaccccagtactagaaaacactcgtcacctcaatcaagacgggtacgaaggccaacggacg

SEQ ID NO: 16616 - DNA, 122 bp, Homo sapiens
gtgagaactgctcgagggttttggctctcagaaaagccaagctccattcttcttgacttacgccaaaggccccagtccccacccataggtaaatcaaagccttaaatcatctatttaagaga

SEQ ID NO: 16617 - DNA, 122 bp, Homo sapiens
gggagggggttccttcaagtttcctctcctgactttgggatgatcagggtccctccaccccgcccctcgcccccgggagccgggccgcgccccccatccacggcgcgggccgatcctagggc

SEQ ID NO: 16618 - DNA, 122 bp, Homo sapiens
tggaagcatcttctccttctactccctgaactccttgaaaggtcaaatatgaagagcaaacgtagggagtgaaagggcagggagggttacaagcaacaatggcagaaggtgcagacattggc

SEQ ID NO: 16619 - DNA, 122 bp, Homo sapiens
gcccgaggactccctggtgaccagggaccatctgtggcatccccctccaggactgtgccccggggagaaccgctcactggggatcagcaggctgcactgttgccccctggaggatgcagaag

SEQ ID NO: 16620 - DNA, 122 bp, Homo sapiens
cggacgggtacgccaagtcctggggaccctctcccaagctctgtcagggcggcggggtggcgcgcgctcctccctcgggcgctagctctggaaatcgcgctaggcagaggtgggcttgtgtc

SEQ ID NO: 16621 - DNA, 122 bp, Homo sapiens
gaatagagtcacgagaacaacagcagctgcttgtgtggcctttgtgtgttcctggcccggcgagtgctctactcacgcccgcacgacagcctgtgaggcaggggctgcccagactgctgggg

SEQ ID NO: 16622 - DNA, 122 bp, Homo sapiens
ttgggagatctacaggttgtttagggtgacgggtagtgtagggcacaagggtagaagtaacgggcagtgaagctaggctccagaaaccagcttgactggagtgctcatgtctctcttccaag

SEQ ID NO: 16623 - DNA, 122 bp, Homo sapiens
ccgtcctgtccgaggctgagagcggcgtccagctgagcggctccaagtgcaccgtggatgcgtcggagcgcagcctgcggggactctggggccagcggaccccgtccccaccgcggtgctac

SEQ ID NO: 16624 - DNA, 122 bp, Homo sapiens
tcccacctaatgtgaccgtacattcccactgctccttcccacgcagcttctccctattcacgaagccgtctctgtgatgccagggtcagaccatcctgggggtcccctcccagccctcttgc

SEQ ID NO: 16625 - DNA, 122 bp, Homo sapiens
cacccctgaaccgcctagacccttgatcaatctctctctctgcatctgtttatgaggccccggcgaccacaagaccagatagccaccccgagtgctgggtgacccgccgcttcctccttccg

SEQ ID NO: 16626 - DNA, 122 bp, Homo sapiens
ccagagtctcagccccacttgcctcagttctccctgagtggcgatggttttttatttcagcgctttcggcagagcccgcagcacctgcccagcctccctccggggctggccgggcagtggca

SEQ ID NO: 16627 - DNA, 122 bp, Homo sapiens
tattgggccccatccactccgaaggggaactcttggccccgctagtccaggtgcacaaaccgccttggcgattgatctgtcctcagcaagttgtctgtccgttccgccaagagtccccgcta

SEQ ID NO: 16628 - DNA, 122 bp, Homo sapiens
tgacacacgggcaaaacataagctcgcaggtgcaagagacgggaggggggcacggccactcgacttacttagtacggacatcctggcccaaggacatgtgcacgtatatcctgaggctcccc

SEQ ID NO: 16629 - DNA, 122 bp, Homo sapiens
tgtatcactttgggcaggcttatttctgctctgtatgtgatcaaacctctgctgcaagcccgggcaggtttggtgtttcctcacctggaatctggcatctctatctgacacctgctttaacc

SEQ ID NO: 16630 - DNA, 122 bp, Homo sapiens
gaaaactacatacagatccttagcccattgccttcatctcccttccttttggtcagagctcgtgaactgattttgaggtcagggatggacaaaagtcttgcagcaggaaaaagggaagcagc

SEQ ID NO: 16631 - DNA, 122 bp, Homo sapiens
aggcgctcctgtgcctgccacggccaggccaggcagcatccacgccctcccgcggaagatcgcagggaacaggtgggcactatcctctgtgccctcatttttcggaggagccgagggaggct

SEQ ID NO: 16632 - DNA, 122 bp, Homo sapiens
tccacttggcaagaaacttagtaagccccaaaggttcattccaaatcctgtctgggagggcgaggactgtggaaacttccagatgcctcaggctccatctttagctgttgagcgggtggttg

SEQ ID NO: 16633 - DNA, 122 bp, Homo sapiens
gtcttaggggagcgtgctgatgtaactctcttcctttgctctgtttcaggccggggcccccgggacctgtgaggctctgggaacaccttcttgccttcctgtaaggttagcctgactagtga

SEQ ID NO: 16634 - DNA, 122 bp, Homo sapiens
gctggagtaccagaggccgaagcgtcagacctcctgtgacgacatcgaggtgctgtccaccgggacacccctgcagcaggagagccccgagctgtaccgcaagggcaccactccctccgacc

SEQ ID NO: 16635 - DNA, 122 bp, Homo sapiens
tggagtgctgtgctgggcagttttcttgtgctttctgcaaagtagaggacaatgcatctgcgttatggctgaagcccagaggccacagccctcggaaactctgcagagcaaccctgtgttaa

SEQ ID NO: 16636 - DNA, 122 bp, Homo sapiens
cgtttttggcgccggctgtgaggggagcgcgggggtggtggaatcgggcggtctccggttcgccaatgtggctgggtccgtaggcttgggcagccttggagttcctcagagaccccgcgctc

SEQ ID NO: 16637 - DNA, 122 bp, Homo sapiens
tttgaaattacttgtattgctcaagttctgtatgcttttgttggttgagtttgctcataacgtttagtaagaccgagtccctacttcctgcagccccattcagctgcaggtgtgatttccac

SEQ ID NO: 16638 - DNA, 122 bp, Homo sapiens
agcacactcgtttctgggctgtgctgaaactgctgctgctgctgctttgtgcagcgggggcgctggttgcttgtcaggtgacacagctacagcagctgcccctttgtgtccggaataatggg

SEQ ID NO: 16639 - DNA, 122 bp, Homo sapiens
gggggggttactttccacctgttctgaaccccgagagagcccgagttcggttcccactttcgacagaagaactggctcttttttgcaagttagaatgttagaactgtggaacccaaaggaac

SEQ ID NO: 16640 - DNA, 122 bp, Homo sapiens
tccccgccggctgcaccccgcgtctgtccccagggcccgttcgggcgggttaggttagaacgcgggaagcgttcgcgaacgtgacccgagaacttcaccaacctggatttatctaaaagacc

SEQ ID NO: 16641 - DNA, 122 bp, Homo sapiens
tattacagtgggtctccatcccctgagctgtactgacctcacacccagaggagtttgcctcgaaacctgctgccctgtaggggcagcaaatactacagaggtggagctgcctccttcttgtc

SEQ ID NO: 16642 - DNA, 122 bp, Homo sapiens
gtcttgcacctctaggactggatgaatccattgtaagcattcgcagcaccccactccccacgctgttcagtggtcctgcagaagttattaagctccttctgcaggctcttgcccggcagggt

SEQ ID NO: 16643 - DNA, 122 bp, Homo sapiens
ctacaggaacctggtggggcagcctcacctcagcacccttggtaagggcaacaggctgcccgccacccctcctcgctcttcacctgcgcaactctgcagctcacgctcctgctgagaactgc

SEQ ID NO: 16644 - DNA, 122 bp, Homo sapiens
agggctgggcctccggcgcgaggagaggcgcagcaggttccccatcctcccctggcaaagcgcgttcacagcccgcctctccatgggctgaacgaaggaggaagacagctgttttctgatca

SEQ ID NO: 16645 - DNA, 122 bp, Homo sapiens
agtagtcggcgagagaacaccagagcttgcccagctggtcggtgaagcgggtgaggcccccgcggatgatggcgtccacattgagggactgtaccttgtccggattctgggagatgaggtcg

SEQ ID NO: 16646 - DNA, 122 bp, Homo sapiens
tgcctcagtttcctcacgagtgaaacgagggtgaacacaggccctggcctggcggggttgcgagggttgcatgggagaaggctgggaatcgcctggcagtgccgctgcccccagggttgtcc

SEQ ID NO: 16647 - DNA, 122 bp, Homo sapiens
ctcctagaaacatctctgtccctaaaggagactgagcataggttgtgcctcttttcctcccgcaatcagtgatttttccacccagctgttcggccttgtgatctgcagggtatgatgctgaa

SEQ ID NO: 16648 - DNA, 122 bp, Homo sapiens
gtagacaaagcggtagtcatccacatccagtgcatcccagaactcattcagccagtcggacgagaagtacacaggcagggtgaaaacgtcctccaccggaaagtccctgtgaggagggcgca

SEQ ID NO: 16649 - DNA, 122 bp, Homo sapiens
ggggcgggcacaccctcattaaatgcagccccagcactcccacctgggtcagcctccgggcgactccgggctgctgcagcgccaccggcgcgctttctgcccactgctgcccactgccttcc

SEQ ID NO: 16650 - DNA, 122 bp, Homo sapiens
gagctcctctccccagcagcccaggaaaagcagctcggtcaataggggagcatgctggcgcggtcgaaaacaaaaaggttcctcctgctcgctgcgttcacgtggggggctctgcacgcggg

SEQ ID NO: 16651 - DNA, 122 bp, Homo sapiens
ccaggttcttgtaagggggaaagaaagagccaagcggtctccatccacggggaacttgcccgagcccacccccagaattatcatcaggatgatgtctcacaaaaagacttcaaagtgagacc

SEQ ID NO: 16652 - DNA, 122 bp, Homo sapiens
ggattaacttctcagaataaagattccccactagtgaaactgtgcagactgcgctactaacgcggacactccttgcacacctgctttgatcccactctggctcacagtgactggctcaacca

SEQ ID NO: 16653 - DNA, 122 bp, Homo sapiens
gggctgaggagggtggtgggaggaccgccggccgccccccgcgcggagccccagggaacccggactccagccgcaaagcggagaggcgccagcagcaatcagccacctcaggggcggcggag

SEQ ID NO: 16654 - DNA, 122 bp, Homo sapiens
attccatatttatcatcaaagtcaagcagaacccaaaactgatccttgcggttccgaaagcggccttctgtggcatggagttgctgagcggagtctagttctgcgtgtgtatcctgctgggt

SEQ ID NO: 16655 - DNA, 122 bp, Homo sapiens
tgggagctggccccgctcccgcgttccccaccctgccgcaccccgttgctgcggcagacgcgaccccgccccccgcaacggactaagcacccccacttcgccccgcctcggcccagtgcgct

SEQ ID NO: 16656 - DNA, 122 bp, Homo sapiens
ctcaagtgattctcccacctccgcctccgaaaatgctggggttacaggcgggagccaccgcgggccacatggatgcacttgagacaattgaacccatccccaaggacataggagtgcctgga

SEQ ID NO: 16657 - DNA, 122 bp, Homo sapiens
ccaggtcgtctctcagctacagaacccagagccgagcgcaggtgggtggagcagacgccgcgggctttttcaaccacacacacttctctgggcagtgcctgattgacagttcccacgaaccc

SEQ ID NO: 16658 - DNA, 122 bp, Homo sapiens
gggcggcggggagtgaccccggccacgggcccgagtgaggcggggagacctggggctgggcggggacggggaggagacgaggtggcggcggcggtggcagcagtggcccccaggccggggcc

SEQ ID NO: 16659 - DNA, 122 bp, Homo sapiens
aatctaaataaatgaaaggaggggaacaagtttttagaaatctgtgtttactctggcacgcgactggcctccactgcttttgacatattagggaaaattttggcggggacccactagaagca

SEQ ID NO: 16660 - DNA, 122 bp, Homo sapiens
atagtaagtttcatgagagccaaggctagatagccctaggatctagcacagaaaccagcacgtaataaacatgcctcatatattccatggatgaaaaatacaggcacccagcctagttaaag

SEQ ID NO: 16661 - DNA, 122 bp, Homo sapiens
ggtaggggcggggtttgttgagtttcgcgcttctgagtgtgacgcgccctagtgggcatgcgcgttagtcagggtggcgggaacaggaaaaggtgaacccggaaatgctgagtcagggtacc

SEQ ID NO: 16662 - DNA, 122 bp, Homo sapiens
tccgagagcggaggcagcagctacaagccatgaccgacaaggtggccgtgcgctcagtaccggcctccgctccatgagcatgggccccaggcttcattaacccccggcagctcggggcaggc

SEQ ID NO: 16663 - DNA, 122 bp, Homo sapiens
aagattggcatagaaaagccagttggagaggcttcaccaatccttcagaaagcagtgctgcgggctaagaggcagaaaggatggagagaagtggacgaatttgaagaaattttaagaaatta

SEQ ID NO: 16664 - DNA, 122 bp, Homo sapiens
ggtaggcacccggtcctgccaatccaccactggaacagctggggggacagcagacaggcacggtcggacagacttgacagatcaggcatcaggccctctgcgctggtcccgggctctttaag

SEQ ID NO: 16665 - DNA, 122 bp, Homo sapiens
cctcccctgcctacctcccaccggccctttgtcgaagatcacttcctccaggaagtcttccggacaccctgaccctcctacgcagctgggtcaagcctgtcttctggcccacagccctgagt

SEQ ID NO: 16666 - DNA, 122 bp, Homo sapiens
catttacaccagagtacctcgcattatccagactgctattcacattcctgaccaagttcacggtcaacctcctgcactggcagccaagagggcctgcctggagagagcttctcttctccatg

SEQ ID NO: 16667 - DNA, 122 bp, Homo sapiens
ccggccccgcgcgcattgttcggcctctgcggccccgaggctgccgggctgtcaccacagcgcgccccccgccccagcccggccggccgaccccggcccccgaccctacctggccccgccgc

SEQ ID NO: 16668 - DNA, 122 bp, Homo sapiens
ccttcgctgctgttatttttttcttttgttttgctaccttttcattgtgaatggcattgccggcatgaataaaatatcaagagggaaatgactgtgctttcgattacgtgtttgcctgaaaa

SEQ ID NO: 16669 - DNA, 122 bp, Homo sapiens
ctccagcacaaaatgcctaagccctcggaggtgctccgtattgtgagggccaccaggccccgccaggcggtgggggtgagccgtgaaaggaggagagggcccagcctctcaaaacctgttta

SEQ ID NO: 16670 - DNA, 122 bp, Homo sapiens
tggcgggatctcggctcactgcaagctccgcctcccgaagcccggggattttgaagtcagcgcgtcaactgaaatattcaggttctcacattgggactgactaggcaaacaacttgacccgg

SEQ ID NO: 16671 - DNA, 122 bp, Homo sapiens
atggatgggaatggaagagcggtcagctcctgccctattggggatggcagagggaatcaccgcaggaagtcagggcaggcaggcagaacccaacagactccctgagttgaagaggcagaggt

SEQ ID NO: 16672 - DNA, 122 bp, Homo sapiens
aaggctgaagaatgagctccaggggggctgggccacgcagcaccatctgtgcacccggctcgtgtagcagggacctgggttgcttattatctgaagtacagggtggtaacagtctccgccac

SEQ ID NO: 16673 - DNA, 122 bp, Homo sapiens
gagcaaatagaaaccagctaacagtagcaagtgaaaagcacatggccaacccccacccaccgcatttacaaacaacaggaaaatttctacaaatcagtttctatggtttcactcagttcgcg

SEQ ID NO: 16674 - DNA, 122 bp, Homo sapiens
tttccttgccgagcatgcgccttagttctctcttctggggctgtgaacgtggggtcgaagcgcgcgtgcgcggcggctctggcggcggcggtggggcggggcctgggctgtcagccggccta

SEQ ID NO: 16675 - DNA, 122 bp, Homo sapiens
caagtggaagggaagctggtagacaccaatcataagtatgagatttaaatgcagcagagtcgctgatgaatctctatgtgtaaacttgaggttgatcacaaaatatgatctagtctatttgt

SEQ ID NO: 16676 - DNA, 122 bp, Homo sapiens
gctagcaccgagtcacagtggctcaagcttccttccccgcttccacatgcaggcatctctcgggacaactggcacaagcgccgcaaaaccgggggcaagagaaagccctaccacaagaagcg

SEQ ID NO: 16677 - DNA, 122 bp, Homo sapiens
ggtcttcagaggagctaagccaggatcaacgcaactgtgcttcccggcgctggggtcaatcggatccccagatgggttctaagcactgcgcaacatgggacctgggagcaggacaccgcaaa

SEQ ID NO: 16678 - DNA, 122 bp, Homo sapiens
tcattgaacttatgaagaaaccaaggccaagagtggtgtgctttgtccaaaaaagactcacgggtacttagttgtcagtgactggcctgggtttctcagtttctgtcctccacacctctgca

SEQ ID NO: 16679 - DNA, 122 bp, Homo sapiens
tcagatcagtgagacgaggagggggcgggcatgctaagagcatcctccggcgctggcctgcgtccccccaggtaaggcagcacccatctccaaagtggtcctgtcaccaccttcctcttccc

SEQ ID NO: 16680 - DNA, 122 bp, Homo sapiens
tgcacgtgcgggagcctctaggtctgcaaggcagcgtacaattgtgtgcacgcaggatatcgacggccaacctggcggctggtctccggtgtgcctagggcataggacgagaggcactttgg

SEQ ID NO: 16681 - DNA, 122 bp, Homo sapiens
tcaattggtcactaaaccagtatcatgaaaaggcagggagccacgctgtaagcgctcccccgttttctgccgaatgttcaggaaaagagtgtcaggttcaagccagcatttaaaataaaata

SEQ ID NO: 16682 - DNA, 122 bp, Homo sapiens
cctctggattgttattccagacccctgagggacagagtgggaggttggccaccctgggcacgcggctgtccccttcctggggagcatccggcggacgcagtggggagaggccagggcctggc

SEQ ID NO: 16683 - DNA, 122 bp, Homo sapiens
ctctcgaatatgttccacacgtacgcaccaatcaaacttgcccacttggtcttcgtagaccgcggccgcaggaatcagcagcgtagcccaaagccagaaacgagaagcccactcagccgcca

SEQ ID NO: 16684 - DNA, 122 bp, Homo sapiens
tgtgtcaatatgtttgtacagtcattttgaaattggaggataatactcaccaaaatgttacgtggtttcctataggtgatgggctgatgggtaattttcatactcatctgtttactcttact

SEQ ID NO: 16685 - DNA, 122 bp, Homo sapiens
gattttttggaccacttcaggtgtagatggatactgcaatggataacaacagcaacaactcgcatttattgggaacttactccagcaaggggcactgtgcttatagtactttacagcttatg

SEQ ID NO: 16686 - DNA, 122 bp, Homo sapiens
gcttgcaagccttatctacacaaaatcaaaatctttcatccaattggaacttattttgtgcgcaatatgaagtaaagacatgattttaatattttatttcccaagtatataaacctttaggt

SEQ ID NO: 16687 - DNA, 122 bp, Homo sapiens
aagtgcactggttaattccctgcaacagtgtacaaaagtgcctttcccccaccacacttgcgtaacatgcaggatttcataaaggctctattagttttaactcactggggttacaattaaca

SEQ ID NO: 16688 - DNA, 122 bp, Homo sapiens
tgcccggctcctcgggaacctgcctcccgcatggcagctgctgcccttcggaggccgacccgacccatccctgggtgctgtctaggtcactgtccttgtgtgtttttgttttactttagaac

SEQ ID NO: 16689 - DNA, 122 bp, Homo sapiens
gtgtgtgaatgtaagcccctggagttgagttccctttcttggctgggccccagtctgccacgtcagtgctgaaaatggacattgctgctgcctcggtgacatacaaataggggaaatgtctc

SEQ ID NO: 16690 - DNA, 122 bp, Homo sapiens
gttgggcggttccgcggggcgttgtccggagagctgcgaggccggggttcccagggttcacgccacactctaggaagtgcctgagctagtgagctggccaacgagctccgcgggctgggacc

SEQ ID NO: 16691 - DNA, 122 bp, Homo sapiens
aaggctgccgggggctcacggggaggacatcaaaacgccaggttcgtgatcatgagcttccggtccggatgtgatgatacaggattggtgaatgcccgggttaaacccgtggtccttcgcag

SEQ ID NO: 16692 - DNA, 122 bp, Homo sapiens
atcatacagataacaaaattggaattaggttgacttttccatggtcacacagctgggaaacgtcagagactggctttgaaccaagtctgactctggaattcagagttaatcatgtagtctta

SEQ ID NO: 16693 - DNA, 122 bp, Homo sapiens
tctcaatttccccacctggctgggctggctctgtgccatctgcccaatgccctgtctggccgctggcagcctctccctccctggggctgtagggaatgctcccctcactggccagccagggg

SEQ ID NO: 16694 - DNA, 122 bp, Homo sapiens
ggcaccttggacacaggagggggtcagacggcatcagcctttgagggtgctgcagttacacggctccagcagtctgagccttatcaagacctttccagatatgagggaagtccatgcccagt

SEQ ID NO: 16695 - DNA, 122 bp, Homo sapiens
ctggagcctcctctgctaagtggaaattgttatcttccttgaacaggtggcagccagctccgccaggctgtgactgatgcaaggccacccagctagtgagtggttttgtcagtcttgaactc

SEQ ID NO: 16696 - DNA, 122 bp, Homo sapiens
ctagcgggtggccttgggcgggtccgttaccttcagcttcggtttataaagttaggactgcgctaaaagattctttcatctcccatcttccgtggctgtgatagcagaagcgctggagactc

SEQ ID NO: 16697 - DNA, 122 bp, Homo sapiens
attcatcttttgagtcctcatccatggagtgctgtgtttggggggctgcatctgctgaagcgagaaccccattctgccaccccaccaggatgcccattctccaggacttctccaacttacta

SEQ ID NO: 16698 - DNA, 122 bp, Homo sapiens
acccctgccagcaagagggactgtgtcaagggcagtgctacccccagtgggcaggagagccgcacagcccccggagaagcccgcaaggcggccacactgccagagatgagcgcaggtgagga

SEQ ID NO: 16699 - DNA, 122 bp, Homo sapiens
aaggaaagaaactggcactttaatagtacctaccatgtaccagggactgcgtagtccccacggcagccctctgaagtcatgtgattggcccattgtgtagatgtagagcttaagactcagag

SEQ ID NO: 16700 - DNA, 122 bp, Homo sapiens
gggtttttgagtttttccctctgggccttattatacagggaaagggaaggggcgaagatccgggctcgagttctcccagggaagtgaacccagaggcgatcccaaactcagtagttgccgcc

SEQ ID NO: 16701 - DNA, 122 bp, Homo sapiens
agggaggtggaacttccggaaaggaccgactagctggggcggggatgcggcggtggtccccgtaagtggacaggtgcgccagtggtagccctgtcggctgctttcgacctaccgcccccagc

SEQ ID NO: 16702 - DNA, 122 bp, Homo sapiens
agaagggggtcttcaggcttggagaggagaatttgcaaacaagtgagggagtccaaatggcgtggccctttccaggaatggtcagttgcttgcaggagaggtcacagctgcgcaggcgctca

SEQ ID NO: 16703 - DNA, 122 bp, Homo sapiens
aaccctggagaggaggcgactggcctacgggggctatgagggatccccccagggctacgccgaggcctcgatggagaagaggcgcctctgccgatcgctgtcagaggggctatacccctacc

SEQ ID NO: 16704 - DNA, 122 bp, Homo sapiens
ggtggaggctcctgtttacagccctctcttctttgtacagttgtattccaacactccactcgctaagaggccctgatcccagctcattcaggggagaacacgtcgtggggttcctgtcacga

SEQ ID NO: 16705 - DNA, 122 bp, Homo sapiens
tatgtcagaagcaacaaaaaaggtccagatgtcccaagcagacaatgctgagaaaagaatcgtggtcacttaaacagcaggttatttgttgaagggtcctgaaggcccaagtagtttccaca

SEQ ID NO: 16706 - DNA, 122 bp, Homo sapiens
aaggctggtctcagtcctctgagcctctgtcttcccagagttggaggcacatttcaagaccgtctgtccccagcccaagacagagggtagtgagatgcccccagatgggagtatgggctgga

SEQ ID NO: 16707 - DNA, 122 bp, Homo sapiens
gtatgtaatattaccaatgttaaaatttgcagggcttgctttatggccaattttcaaaaacgttccatgtttgaagagtgtattctgaactggctgcagtggctcaggcctataatcccacc

SEQ ID NO: 16708 - DNA, 122 bp, Homo sapiens
cccggcggggcaaagtggcaggaacctcttaaagggcgagagcggcgcggagccagaacgcggtcggcccggtccccgccgcacccagcccaggtgagcctggaccacctggggggcgaccc

SEQ ID NO: 16709 - DNA, 122 bp, Homo sapiens
gtttccttctttttccacaggtcctgacatgggctaagcagcaccagcagcgtcttgaaacggccttgtcagaactggtggctaatgctgagctcctggaagaacttctggcatggatccag

SEQ ID NO: 16710 - DNA, 122 bp, Homo sapiens
ctaatttccatggagatttctttaatttagcgaagactgcttcccgggctccgcctggcccgcgccggcccgcgtcctcggtggtctgggcgccccggctgagccgctagcgggtcactcgg

SEQ ID NO: 16711 - DNA, 122 bp, Homo sapiens
cacacttatttcaatgtttaatattagaagtgttttggtctttatttcgaagtttaggggcgattttgtgaccacagatatgttgtaggaacttcactcatatcaattagcctgtggtcaaa

SEQ ID NO: 16712 - DNA, 122 bp, Homo sapiens
actcatacacagtgaaactagcgttccagtgagacagcaaaataaaggtgtcttcaccgccggttaacatccacatttaccacacacgcagtctgtaaaagtactagaagaaataccttaac

SEQ ID NO: 16713 - DNA, 122 bp, Homo sapiens
tccggacgctgagctaaagacgaaaattggcaggaagagcggcactggccccttaggctccgctataacttcctccatcccccattcccccatctcccagcacccttctcgctacacagacc

SEQ ID NO: 16714 - DNA, 122 bp, Homo sapiens
gaggcggccatgacatgcatcacgtgactcaccgactgagcatgcgccgcgccagggaggcgagggaaagcccataatcaatggaacataagcgcagatgtttgcttagggcctgcggtgac

SEQ ID NO: 16715 - DNA, 122 bp, Homo sapiens
taataataaataaagaataacaattactactactactaccaccacccagccaagcgcagacgacagcagcacagtaaaaggatatccaatgcaggctttgcaaggagagaaatcacagaaaa

SEQ ID NO: 16716 - DNA, 122 bp, Homo sapiens
gctattgggatcaaatggcttggcttcaaattctagctcttccacctcctgtttgtttagcgttgaccacattatctattttttcgagcttcagccttctcatttttaatgcaaaaataatg

SEQ ID NO: 16717 - DNA, 122 bp, Homo sapiens
caacttcaaagccgcgtctggcaccgggactggtttgaattaaggttcccttttctcctacgagtctccgggcctgaggagaaagtgccggctgcttctggatttcattaggggcaattttc

SEQ ID NO: 16718 - DNA, 122 bp, Homo sapiens
tgaagatgcctaccttcccactgaagtggctttctttttagaataagacctttgtttatccgagcaggatccctccagactttctcatctaggagagcaagctgatctcctaaactatctca

SEQ ID NO: 16719 - DNA, 122 bp, Homo sapiens
cgttcacaccttaccacctacctctgcctctgaattccgcgctttcccggaaggtctgtgcgggtccaccagttgtcagggtaacagacttcagctgccgggttctggagtcacatgacccg

SEQ ID NO: 16720 - DNA, 122 bp, Homo sapiens
cgtgtccagaattggcgggttcttgatctcaccgacttcaagaatgaagccgcggaccctcgcggtgagtgttacagctcttaaggcggcgcatctggagtctgtcccttctgatgttcaga

SEQ ID NO: 16721 - DNA, 122 bp, Homo sapiens
ggttgaaatagcagccgagagacataattaagaaggtgaatctgctgccaaaacatgcaccgtgcttcaaagtcaacaacgtgtggtttgggggacagcctgtttctgggataagttggccc

SEQ ID NO: 16722 - DNA, 122 bp, Homo sapiens
actgatttctcccccaagagaaaatccctcacatctcctcggcagggagcacagaataaacgctccgcctgcctagctgcgaggcggcttggcagcagcgagagggggagcctggaggaagc

SEQ ID NO: 16723 - DNA, 122 bp, Homo sapiens
gagaaagcctcctctgtgcatggaccccagtcaccaagaaagacccaccaccttctagaccgtctccattcaccaagataacattacaggctctataaatggagacagtgctcagctgaagt

SEQ ID NO: 16724 - DNA, 122 bp, Homo sapiens
tactcctaagccaacctaggcagggcccttccagtttctgccgcagcatttccagcccctcgagcccctgcagctcctgagggtagctcagcagccagcccagcgcaccctcttccggggct

SEQ ID NO: 16725 - DNA, 122 bp, Homo sapiens
aagctaggacgggaggtgttcacacctggagtttgtttctaagacaatgtgatgagggcccgagggtaagtcacaaacatttcttgcatcataactggcttacctgggggctattgtgaggt

SEQ ID NO: 16726 - DNA, 122 bp, Homo sapiens
ggcgctggaaagcttgttctataattacttcttgatccgcttctaggcgtgctgtgcatgcgtccgaccatgtgtgtttgcgttagcttgcgccgtcgacaagagccagagaacgtgggtct

SEQ ID NO: 16727 - DNA, 122 bp, Homo sapiens
gcaactcattccccagttctgttctccagcatttcattgtcagccacggccagggtaccccgccgcctctcacttccatcacacagccagccccaggcagactgtttttaaaaacataagcc

SEQ ID NO: 16728 - DNA, 122 bp, Homo sapiens
tgcaacccaagaagctgggttaggctgggggcctcctgtgctgccagctggcctgggcagcggggacctgcgtctctgctcagaaactggggtggtgagatgggattagcaggcacgagcca

SEQ ID NO: 16729 - DNA, 122 bp, Homo sapiens
aaaacctgaacgttggatgtgagtattatgctacacttataaattcagatgaaagcccagcgaaatgggaaatgaatactctttgagaccttatttattctctaactccttctgttctgaaa

SEQ ID NO: 16730 - DNA, 122 bp, Homo sapiens
cggctggttcagaaacgagggtgctgggaactctgggccggggcaggacctgcagtcctccggcttcgcgctgtttccactgccggactaggagcccctcggcttcctaggcaagatgcagg

SEQ ID NO: 16731 - DNA, 122 bp, Homo sapiens
tttgcaggtaatcttcagcaagtactgcaactccagcgacatcatggacctgttctgcatcgccaccggcctgcctcggtgagtgcgcgctgcgggctctgcccggtgacgccacgcggcct

SEQ ID NO: 16732 - DNA, 122 bp, Homo sapiens
cacctgattcccagccctgtttgctcttttaggcaaaatggaacagactcaggtctaacacgtggtgattccctgtggtcagcaaaggagtcattatggcatgaggtgggagagtggccgct

SEQ ID NO: 16733 - DNA, 122 bp, Homo sapiens
agtggtacggggagatgaggcagggccgtctgctggggtcacctggcttgcacttgaactcgtagtcctcccacatggcatcgggggcgctggcgttggagctggctgtgccctgcaggatc

SEQ ID NO: 16734 - DNA, 122 bp, Homo sapiens
gtgcggtgacagccaggatttagtcgcctcgattgctttctgacatgttcatagctcttccgggcgttacctctgcagccgttgaagccgcaggaggcaagaagcagaaattgcattttcca

SEQ ID NO: 16735 - DNA, 122 bp, Homo sapiens
tgagaagtttctggaacaaacccagactgccgtggttctggcaggtcagtgctgggggcccggggctgagaaagggaatgtctactgtgagccacgtggaagagggtaaaccaaggcactga

SEQ ID NO: 16736 - DNA, 122 bp, Homo sapiens
cgggctcaaaagagaagaacccaaggcggtaggaaaggagagcagagtccccactgcgcccgcctgcactgaaccagtcagtcccagggctcccgctgtccttggctagttctctaccctcc

SEQ ID NO: 16737 - DNA, 122 bp, Homo sapiens
atggaaccttttattctcaggtggagaggattaagctttgcggtgttagcagaaaatgatcgagctccagaaaatgatttggaggtcagattcgattttaaagtagtactaacaggccgggc

SEQ ID NO: 16738 - DNA, 122 bp, Homo sapiens
gttttacgatgctagctccattcatccatatggtttgacagactgtgaaacaccagtaaccggaccaataagaaaaacaaattacaaaaacactacaacacctcatctctccccagtcactc

SEQ ID NO: 16739 - DNA, 122 bp, Homo sapiens
accatgctagccttcggcagacagatggcattgtacttcttacagatcacagtacacatacggctgttggtgcatgtcaccacattaacaactctgggaagagcgatacacagctaattgga

SEQ ID NO: 16740 - DNA, 122 bp, Homo sapiens
cttctgcgtgaggtgccagcctgggcgaggtgctgccgcgtgcaggcctgtgtgcgcatgcgcgtgtccccatgttcccccaaacccagcggtgttgagatgtgcgcatgcgcgtgccccca

SEQ ID NO: 16741 - DNA, 122 bp, Homo sapiens
agggtgacagggcctcccgacacacgcagcatccaagcagactgagcagagcctgcagagcgggcagcaggatgggacctctcccgagagtctggaagccccagctggctccggccctctct

SEQ ID NO: 16742 - DNA, 122 bp, Homo sapiens
ttacagtcaaactggtgttctttgaaagtccattttgagaaatgctggtataaattaaagcggtatttatatagccacaagtgctaagagtgctagtcagtaatcctaagaagccaaggatg

SEQ ID NO: 16743 - DNA, 122 bp, Homo sapiens
aaagtccttgcgccccaggtctgaaagccaaggggagcctgtgtttgctcccagcggggtcgccggccgtctccacaacccttgcttcctacaggcagaattgaatgcaggagctggctgtc

SEQ ID NO: 16744 - DNA, 122 bp, Homo sapiens
ggtgcattccttggagccagggttgctattggtggcgagctggccgcggcgaaagaaccccggccgcttgggctagtgcggcggcggccaggcggagccggaggtgagagtgcgagcagcgt

SEQ ID NO: 16745 - DNA, 122 bp, Homo sapiens
ggagaaggcctgtccaaaggcggagtgagacaactcctcggacaaattagagtcttcctgcgatggggcttccagagcgctgtcaagctccattcctgactgcagcaccagaaggctggtct

SEQ ID NO: 16746 - DNA, 122 bp, Homo sapiens
atggtgtccggacttgcccaaggttgtgcagggggcaggtggcaggtggcagagtcagaacgggaatcttggtccaacaagtgccaaagctcccacaatagtcctggaattgccctcgttga

SEQ ID NO: 16747 - DNA, 122 bp, Homo sapiens
ccccagctacctgttgccatggtgatgagaacaggctcctgctgaggctctggctgtggtcgcaagaggctggagaggctgaggactgggctggatatgctgaccatcagccaagccccatc

SEQ ID NO: 16748 - DNA, 122 bp, Homo sapiens
cagggtgggtttttggtgtgtgtggcgtttttgtggggtgaccacttttaaagacctttccgctcctgtagaaaaagctgacaaagagaatgtggttgtcagtcgtgtttcagagatcaatg

SEQ ID NO: 16749 - DNA, 122 bp, Homo sapiens
gggtaatccctctttttagtttctgctgtctgtgacccgaaagaataaacctgggacttccggaagccctctgggcacccccccccccaggagggttgcagagccccttggtgtacccagca

SEQ ID NO: 16750 - DNA, 122 bp, Homo sapiens
gggcgggttaacaccggtttggcagggcgcagacctccgcccacccgggagaattgaccccggaggcagatctgcagacccagaggaccccagggctgacccagggcctcccctccgccact

SEQ ID NO: 16751 - DNA, 122 bp, Homo sapiens
gccactgccgccgctgggcggtgaaacaaagtctggcggggccgcctcccggtgcaggagcgcaccggtgcctagcggctggactccgctgccgggcgtcccgctttcccccggggagccct

SEQ ID NO: 16752 - DNA, 122 bp, Homo sapiens
ccaggtgtgagaagggactcccgggggccgcccgacggggccccctgaccgccggcttggcgcccttacctcccgatcatagtggagtgctgctgcaccgcggcttctagcagcctctccaa

SEQ ID NO: 16753 - DNA, 122 bp, Homo sapiens
tcaaccctgtcttccccagctggtctcccagcacgtggcctggagcccagcctcccgccccgctcggtcacgtgagcctggctctcacccgcgccggcttccacaccccgcgggactgagaa

SEQ ID NO: 16754 - DNA, 122 bp, Homo sapiens
ctcctcttcctcctcctcgggctcctcgtcctccgacgacgagttcgaagacgacctgctcgacctgaaccccagctcaaactttgagagcatgtccctgggcagcttcagttcgtcgtcgg

SEQ ID NO: 16755 - DNA, 122 bp, Homo sapiens
catgcctctctcccctccccacaccgagctaccctgccggcagcacagagtgaacagcgccgtgcacccatctgggcctgacctgcctacattgttagcctaaaatacttgtgagtatatat

SEQ ID NO: 16756 - DNA, 122 bp, Homo sapiens
gcggactccaaagggacggtccgcggtgtgcagcgagctgcgctcaggggaccttgcgcccggcccttctgctgcacacagcccacccaggacctcccgcagcgctgacaggcggggcgggt

SEQ ID NO: 16757 - DNA, 122 bp, Homo sapiens
aagcgttcccaaggcagcttgcttggtgtaagcagtaaccatgtatcttgggggtgacttcgtccttcctacagcttccccctctttgcttctctttccactctttccagctcaatgactgt

SEQ ID NO: 16758 - DNA, 122 bp, Homo sapiens
ccaagatcacccctggaaacttccagtggggctgaccctctgggtgtgtgtctggggagacggaggtgtgtgaagcagaagtccaggctgcttctgcttcagaaggccatgaatagagtcaa

SEQ ID NO: 16759 - DNA, 122 bp, Homo sapiens
aagaaaagaaccgagaatccagggtttccccaattgggccccagtgcaagcctggttctacggagaggatgtgcatgccccgggccgcctctgagaagcccgagaccagtgcactcctcttt

SEQ ID NO: 16760 - DNA, 122 bp, Homo sapiens
aattaaacctacactatttgtttcacttttcttcagaaagagcctatgaaatatgagtttcgggggcaaagtttttatcatcagagctgttcctttccagcagacctttcagttctcagcag

SEQ ID NO: 16761 - DNA, 122 bp, Homo sapiens
aatactaattcattactttttaaatttggaaaacataaaaagggaggtacaagaagcattcgtgtttatatgctttgactcagcaattccacatctagggattggatatgcacagatttagc

SEQ ID NO: 16762 - DNA, 122 bp, Homo sapiens
agtcgcgctaaccttggcctgagacctgcaaacttgcccaggctggggcgtgtgaaccggcgagcgcgcagcggaaacggggcggggcacctgaggctgggaatgcagaggagccttccggg

SEQ ID NO: 16763 - DNA, 122 bp, Homo sapiens
gcaggcaggactgggagaggctcatgggtagcagggcagcaggctcacccttgcagaggtcggggaagcaggaggagaaggtggcgaagccccccgtgatgatggccatgctgtggaagcag

SEQ ID NO: 16764 - DNA, 122 bp, Homo sapiens
catataagcaaatgaacaaataaagaactctcattcaaagtaatgaatacattttgatatcggaaagcttctcaatctgtgtctttaaagaagttaactacaacaaaagcttctcaatctgt

SEQ ID NO: 16765 - DNA, 122 bp, Homo sapiens
gagggcagggaaatgggccgagtcctgcatcatccaccgagtgggggctgtggataggtgcggcgctgcttccctggagggaaacgctccatcttgcgggccgaagcgcgagtgctgctctg

SEQ ID NO: 16766 - DNA, 122 bp, Homo sapiens
gtggttgaagcctgcagtgtgaagaatcagccaggctaggagcggggtgtccacccaagccgagagagaaacacgtagaatactgacttgttgaaaaggagggagggaggtttggcaagaaa

SEQ ID NO: 16767 - DNA, 122 bp, Homo sapiens
tcacgccacaggctggtacgctcacctgctcccccgccaggccagcgaagaccctacaaacgccaggatggtctgagggggagctgtgcctggccttggctcccgcacccccccgcagctac

SEQ ID NO: 16768 - DNA, 122 bp, Homo sapiens
tttgtcagtgcgggaatggcaggcgggggaggaaggcagatcgtcccgaggcgtgcatctcgaagccacctacagtgctcatcaacagggagcagcagctctgagcagcccaggagtgggtg

SEQ ID NO: 16769 - DNA, 122 bp, Homo sapiens
catccaacgccggtgaggctcagcactcattgtctcactggcagcacagacaaagccttgcgggctccacgggataatcaacagcgagaacgcccccagggacctccggaaagagacaccat

SEQ ID NO: 16770 - DNA, 122 bp, Homo sapiens
gggcgtgaggcggctggcacaagacaggcggcctttcccagcgcgtccccgcccccactacgaaaggtcatggcgccctggccctgcagctgggtccctccagggctgccctctcgcgctgc

SEQ ID NO: 16771 - DNA, 122 bp, Homo sapiens
tgaggcagcaaatgctgatggagaagctgcagcaagttatccccaagatctaggtaagatcgttgatgaaggtggccactgaacagcaagtagtcaatgtagacaaaacagccttctattgg

SEQ ID NO: 16772 - DNA, 122 bp, Homo sapiens
caggtttgagggaattagctcaacccagcatcccttcactctgttcgtggcgttaatttccgattccattaagcagcccatcggctcgcagcctcccctcctcccctccccgggcctgattc

SEQ ID NO: 16773 - DNA, 122 bp, Homo sapiens
agaggcgggctggtgtctctggccggggactggaatttcatctgaatgactgcccctgcgcgcacgcagcgccccggagtcggcccgcccgcgccccgcagcccgcgcccggccagccagcc

SEQ ID NO: 16774 - DNA, 122 bp, Homo sapiens
tcccgcccggccgcccgcaggcctgggtcctcgcttgagcgggaggagcgccccctctctcgctcacccctgcacccgtcccgaggcgggtcagaaaggctctgcttctccccattcccact

SEQ ID NO: 16775 - DNA, 122 bp, Homo sapiens
gtaggttcccattttacaaagatggaaatacgtaagtccaaagggtgttagtgatttttccgggcgccggcatttagaaggtaatcggtccagtccaaggcacttttaaaggctctccactg

SEQ ID NO: 16776 - DNA, 122 bp, Homo sapiens
tgaaaacacccaacctggtcatttctgtgaccgggggcgccaagaacttcgccctgaagccgcgcatgcgcaagatcttcagccggctcatctacatcgcgcagtccaaaggtgagggtggg

SEQ ID NO: 16777 - DNA, 122 bp, Homo sapiens
ggaacaaaggaaaggaacaaggtggctctgctattatccaaattggcctctggcatccaccggaggaagtgactgaggccggctgctctttctcaggtatccccggggaatatacacgtgtg

SEQ ID NO: 16778 - DNA, 122 bp, Homo sapiens
cactggtgtagggaatgtctcctcccggctctgagagacttcctccaatccacaacctaccgcaggtatgtgttcttattaaaaggggcagggacaaaagctctgcctgtccctcttgtact

SEQ ID NO: 16779 - DNA, 122 bp, Homo sapiens
tggcagcactgctgcacacaaacacacccagcatcaaccaggagctctgccggctcaacacgatggacttactgctggtaagtgggcccctcagccagccctgcatgtctgtgagtgtgccg

SEQ ID NO: 16780 - DNA, 122 bp, Homo sapiens
tgctttcatacagttatttttatattttgcctagagtatatacccaatgttaggaggatccgacacaagtttctgtcttgtcacgccaaaaactagaggtttatctggttgtcactgattat

SEQ ID NO: 16781 - DNA, 122 bp, Homo sapiens
gcagcgccgccacctttcctgccaggccggcgctcgccaccaggcaggctgtttagcttgcgctccacctccccacccaggagcaggcagctccccaggcccgccagcctctgcctgcggca

SEQ ID NO: 16782 - DNA, 122 bp, Homo sapiens
actgtatccaaaaagtagtgaaaatttcaacccaacactaacactgtgttacagacctaacgtgcattccctacttcagtctctaaccatcccacaaggccagtatacttgtgttcttaatt

SEQ ID NO: 16783 - DNA, 122 bp, Homo sapiens
cgccgagccccgctgacgccaaggcgcccccgaccgcctgctacgcgggggccgcgccggcgccctcgcaggtcaagagcaaggccaagaagaccgtggacaagcacagcgacgagtacaag

SEQ ID NO: 16784 - DNA, 122 bp, Homo sapiens
ttatcttaagtggaagcccttctaatacttacacaaagattaaggcaaataatgtggctgcgcaacgtgactctcactcgtaattccagcatggtgggaagatcacttgaggcctgcggttc

SEQ ID NO: 16785 - DNA, 122 bp, Homo sapiens
ttaggtgatttcgtcactgagcgcacctcacacacaggtacactgcacacacgcccgggccgcacagcctcctccacgccctggctcgatgggcaagcccattgcttccggtttcacagctg

SEQ ID NO: 16786 - DNA, 122 bp, Homo sapiens
gtcgcccccgcaggagccagccggcccgtggacgccccagcgcgctcctcctcggtgctgcgggtcgccctgcaattccgagaagaaagtcagagacgccgtggcccaaagaggcgcttagt

SEQ ID NO: 16787 - DNA, 122 bp, Homo sapiens
agtttaccacacggcggccatctcacgttcatcagggtcggggttcatcagtttaccacacggcggccatctcacgttcatcagggtcggggttcatcagtttacgacacggcggtcatctc

SEQ ID NO: 16788 - DNA, 122 bp, Homo sapiens
ggagagatgagattaaggaaaagaagcgacccctctctcccaccctctacaccccggctccgggaaaccgggaaggcatcgaatttgctgcgatgtctgtgcagctcacatctgtgatcggt

SEQ ID NO: 16789 - DNA, 122 bp, Homo sapiens
catttgttctcaccctggagagaaactgcgaatctaaaaggaatatgacaaagccttcagcgtggtctcaaattcatggttcatacaagaactcacactgcagagactccttacggaaataa

SEQ ID NO: 16790 - DNA, 122 bp, Homo sapiens
taatgccgggcttctaagtacccccaacccgcacagcccccggggaggccgcgcagataccggggcccctcacagctcaccaccttggtgcctgaagccactttggagcccctaccgcaggg

SEQ ID NO: 16791 - DNA, 122 bp, Homo sapiens
cttacagcaatattgccttcacagttataaactgtattcaaatagtaaaggccaccctctcgcttccctggctggccccagggctaccactggtattcctgagcctctcccagctccacttc

SEQ ID NO: 16792 - DNA, 122 bp, Homo sapiens
cagcgggctcggcgctatttttaccttttccatctgccaggcgctgcggctgcaggagcgcgcgcggccagcagagggcgcccgcgccacacctcgcggaggcctccccagaggggctggag

SEQ ID NO: 16793 - DNA, 122 bp, Homo sapiens
ggagtcccaacggcacagaggcaagagctttcagggcttggcacccgagccctcagacggcggcaggaggcatcgcaagcctccctggaggtcttttaggagagcggcgccagcggcccgcg

SEQ ID NO: 16794 - DNA, 122 bp, Homo sapiens
ctcaacaagcttttacccagcacctgtccagtgaaacaacttgataatcgtttcgaggggcgtccgccgggttaggaagccactgcctggcagcttgtggaagcctcatttgcaaagccacc

SEQ ID NO: 16795 - DNA, 122 bp, Homo sapiens
ctggcggctgcgcctgtcggtccgtgcggcagggacatttccgcattgaaggggctgctccgaatggagggggaggggaggtgtttaggagaaagtaggggctgtgggtgtcgggagccggc

SEQ ID NO: 16796 - DNA, 122 bp, Homo sapiens
ctacgtccagctccaacggcactggtgccccattccatcggcactaacgccccgctccaccggcaccagtgcctcgctccattggcaccaacgcccagctccaccggtactggctccctgct

SEQ ID NO: 16797 - DNA, 122 bp, Homo sapiens
agaccctggccagtgaccctttttcagatgtggaatcaaagcccactctaggctgagaggcgtctgctgctaagaggcagaagacagagatggtgatgaattcttatgtggtttctgggcct

SEQ ID NO: 16798 - DNA, 122 bp, Homo sapiens
tcattcagctggtggatggcctgctggcgtctgccggtgccggtcggtgtgcccttccaccggtatgttcctctcgacgtccagccgcttgtgtgttcctctggtgtgtttcactcaatgtc

SEQ ID NO: 16799 - DNA, 122 bp, Homo sapiens
agatcctgagtgtctgcagcttcacggggaggctgggtgctaaacagcacacggggtgaacggagtcgccgctttttaaacagcctggggtccacagtaatgttgcgggtctgccccgccac

SEQ ID NO: 16800 - DNA, 122 bp, Homo sapiens
tcctcggtggcaacccaggtggtccccagtttcctagccagcagctgtggccaacctctgcgcgaagcaacgggccacgctgcaggaccacgaagccaggcagccgcgtcgactcctgcagg

SEQ ID NO: 16801 - DNA, 122 bp, Homo sapiens
gccgcccctccccgcgctccgccgccgccgccgtcgccgccgcgcctttgatccatggcccgaggccgcctgacagtggaaaatgcggggagacaaaaccactcagtcaaagtgattcccaa

SEQ ID NO: 16802 - DNA, 122 bp, Homo sapiens
ttattgaatacttacataatatgagggagagcaaatattaggcattaatatgacaggaagcgctagtcgatcattgcactcattcttctgagcctggattgagcctccctgtctctcaagct

SEQ ID NO: 16803 - DNA, 122 bp, Homo sapiens
ggcctttgggtgggacaactcctgcaagacacacgttagggcgtgtttattttcagaaggcggcaggagactttgccaacaccagtgccccttgttttgacggcattttcccaagtaactga

SEQ ID NO: 16804 - DNA, 122 bp, Homo sapiens
agaccgatctggggacgtctgcccgcgcgattgaaggaagggtgtctgagaagagggcggcgcctggcccccagtgggcgctcagtaaatgcggggggttctgaactaactgatgcggcagc

SEQ ID NO: 16805 - DNA, 122 bp, Homo sapiens
tgccggagcggagacttgtaggttctccgcaactctgccaggaacccctgatagttgttgcgcaaggggctgtcaggttgcatgtgggggatagcccacttctccgcctccccagtcagtcg

SEQ ID NO: 16806 - DNA, 122 bp, Homo sapiens
aggaggaactgtacgctgcgcgggggtctgtgtgcatctgcgcgtgtgcatgggcatttgcgggtctgtgaatatccatgagcggtgcatctgagcctctgtgtggtctgagtacgtgtgac

SEQ ID NO: 16807 - DNA, 122 bp, Homo sapiens
aagatggtgggcaagagtgttgtaaattgtgtaaattccactcgcgggaacccccagatacgtagggagagcacccctttctcgccgaaggcatcccctccgtttctctcagcctttgggtt

SEQ ID NO: 16808 - DNA, 122 bp, Homo sapiens
acttggtttcttggcttgaacacctagatccagccatacctgaaattacctaattactgccggacttcagttccaagagccaattaattctctcctgcctaaaccaatttaaatgagagttt

SEQ ID NO: 16809 - DNA, 122 bp, Homo sapiens
tcttgcttgctgacttactgctagagtgtgggatccattgcttccatttagagaagcagccggccctggaatgtggccgcagggctgccaggctgactctgtgagctgagctggcgaggaat

SEQ ID NO: 16810 - DNA, 122 bp, Homo sapiens
aggggtcagggagttccctttctgagtcaaagaaaggggtgacggacgcacctggaaaatcgggtcactcccactcaaatattgcgcttttcagaccggcttaacaaacggcgcaccacgag

SEQ ID NO: 16811 - DNA, 122 bp, Homo sapiens
cctttttctggtcatcacttttaaaaacaaatagtagcaacccaaacccaaattttgcagcggggctgggctcctcaaggtggggccactggggcatcccgagtcgggtcagtgggacccag

SEQ ID NO: 16812 - DNA, 122 bp, Homo sapiens
actgggtaggcagacgtaagatctctcatctctacttcagtttcaacattttccaaatggcgctagtcacagaattatatgttccttgcaaagtcctgtgttgtaaagagaaagctagagaa

SEQ ID NO: 16813 - DNA, 122 bp, Homo sapiens
aagtccctttgccagaagcagctcctcatcctgctgtccaaggtgcgactgtgcggggggcggcccgcgcggccggaccgcggcccgggtgagtgcggctggggcggggtctcccggccaga

SEQ ID NO: 16814 - DNA, 122 bp, Homo sapiens
ctttcctcccgctcctttctcccctgtggtctctgctcagcacccctttctctccagccccgactgcccatcttcgcccctaccctcgcgcgtcggggccgtgtctacacccaccccaggac

SEQ ID NO: 16815 - DNA, 122 bp, Homo sapiens
tgatatagagttccagactgagtgaggtggctgcctccaggcacagcactagggtgtcaccggggtccccagccggggagtgggagcctggtggtgcaggggcaccctggtgggtcacaggg

SEQ ID NO: 16816 - DNA, 122 bp, Homo sapiens
gacctctgcggttcttgctcaactgttcaaatcctcctccttcattcccatggcccagatcgcctttctcctcccaagcctacctctttttcctcgtttaatccagctgactgctgtccacc

SEQ ID NO: 16817 - DNA, 122 bp, Homo sapiens
gaaagatgtatatggagaaagattatatgtagcatagtgtcctcatgaacaccaagtccacggaagtctaaggtcacagatatcggtgaagagccatattacagtccccctaagagactgct

SEQ ID NO: 16818 - DNA, 122 bp, Homo sapiens
gcccttgggaacttagagcggccccttggccgctggttccgcgcctcccgcggttgggggcgtgcccgaagtctctctacggaagctggtagggctgtgggtgcttcactatggcgacggtg

SEQ ID NO: 16819 - DNA, 122 bp, Homo sapiens
tcagaattgaaataccaggaattccaaaacaaaccactcctccctgtgtcatccttgtcccgctgcttctgatcttggccctcaaacctagtcaacggccttatcagaactgatcaagctga

SEQ ID NO: 16820 - DNA, 122 bp, Homo sapiens
cacccgcccccccgtcaatcagaagctgtcaccctcccccccggccaaccccctgtcgtccgtcaatcagcctctgattgagggaatgaacacgtggcctctatgctgcctaatcttgccta

SEQ ID NO: 16821 - DNA, 122 bp, Homo sapiens
accacaacccacattacttgagggctcgggcgtgcgcaaagctccgggttcagtttcccgcgctggaactttttcaatagtaaacgagcaaagctccgcgcgcccaggtggcgcgagcacta

SEQ ID NO: 16822 - DNA, 122 bp, Homo sapiens
agagagaaaaaaacacacacatacacagaccggaagactgacagaacagactctttgtggcgatgatacaaattgtcaacaggacctatggccatcccaggcaagaaacccagctaggccag

SEQ ID NO: 16823 - DNA, 122 bp, Homo sapiens
attttattacagcgaatggaaaacaggagaaatgaaactgctgatattagtgatgagatgcgtcaggctcatcagcttaaaataaccgaagcgaggctagaaaccgcctgacagctggcgcg

SEQ ID NO: 16824 - DNA, 122 bp, Homo sapiens
aagaccggctcattaactggctgtttattttccagtcctgagtacctcaactcataaaaacgccccactcctgccaactgctgtttatccagagggtaaaaatacatcttcgaaaagacctg

SEQ ID NO: 16825 - DNA, 122 bp, Homo sapiens
gtatctgttctgatgaaataaattgcctgtagcaagcactttttgtccatcctgccatcacgctgctgccaacccctaatgtgtactctactttttagttcaggtgagaggataatatgttt

SEQ ID NO: 16826 - DNA, 122 bp, Homo sapiens
acctggaaaatcaggtcactcccacccgaatattgcgcttttcggaccggcttaaaaaaacggcgcaccacgagattatatccggcacctggctgggagggtcctaccctcacggagtctcg

SEQ ID NO: 16827 - DNA, 122 bp, Homo sapiens
gccccgggccgggggcggaaatcgcccacccccaagagtcctgatggagtagggtttgagcggctcgttccccattttactgtgtacatagcacctttcactctgatgatgttctggatagc

SEQ ID NO: 16828 - DNA, 122 bp, Homo sapiens
gccgtgaggctgcctccccgggccccctgcctccgccatgttccgcagggcacgccttagcgtgaagccgaatgtcaggcctggtgtaggcgccaggggctccacagcttccaatccccagc

SEQ ID NO: 16829 - DNA, 122 bp, Homo sapiens
ggattatagctcttggcaacacacggacggcagcaggcactttcggagtctctggaaaaccgtaattcaaactgaacctggtgctcttggcattttgtcacctggccgtccccctggacgct

SEQ ID NO: 16830 - DNA, 122 bp, Homo sapiens
gccataagcgggacagctggatcattggtaattctttgccaaaagcgtagattttggccacgcgtggcagctcacacctataatcccagcactttggaaagccaaggtgggaggatcagttg

SEQ ID NO: 16831 - DNA, 122 bp, Homo sapiens
caacagttagactgtatttatgctggctggattttgtttattcacctattatcgtctacccgtgtcagcaaccaagaaacctgcagcctgtctcaaaggaaaccaagaaagaagttttggac

SEQ ID NO: 16832 - DNA, 122 bp, Homo sapiens
gactcaagcagaagcgaaagcggtgacaccgcagacccgacctatgcgcaggcgcgcacccgcacttcctgcccgccataccggccggggcgcccttcgctccgcccacacccggcagtcaa

SEQ ID NO: 16833 - DNA, 122 bp, Homo sapiens
tacaataaagtggcatgatagaagtggaggtaggatcagtgggtccacaaaaggaggaaacggtctattcaggactgcatgaaggaggttgtcagaaaatggtgtctctaagaaatggtaag

SEQ ID NO: 16834 - DNA, 122 bp, Homo sapiens
aactgagcggcgggatctgcggccgcccggggccctcggccaacatcccagcatcctctgcgccgcgccggccccggactccatttcccagcggcccctgcggcctgccctagggctgcggc

SEQ ID NO: 16835 - DNA, 122 bp, Homo sapiens
cccgagctgggctttgcaggctgagccgcgagccacttgtttgtggggagaatttacacccgcgacgagttcgagcttgaaggctcccgctgggcttgggctgcatggagcggggtccagcg

SEQ ID NO: 16836 - DNA, 122 bp, Homo sapiens
tgcattatctaggggaagaatatttccagcacagggaacagcaccttctaaaccctgaggcgcgtgtggctggcactttggaggaacagaaaagaagtcaatgtggctggaaagagtgaaag

SEQ ID NO: 16837 - DNA, 122 bp, Homo sapiens
cggggtcgcctgggggcggggcctggggtggggcctgcggaccgagggggcggagccggccgccccggggtcctcagtccgctccgggagagttagggctccgagccgagcgcgcggagcag

SEQ ID NO: 16838 - DNA, 122 bp, Homo sapiens
cccaaacctagtcccccccaccatattcttcctggacccctacactaggcttcttttcagcgcactagctgaggctgagccactaagccaaagggccctgacatagaagatacatggctctc

SEQ ID NO: 16839 - DNA, 122 bp, Homo sapiens
gttatagtcgagagtcccccacctcctgaggaagcaagacctggcaaacccaagacgatgcgctcttacttgtgttgtttgaaggggccctgctgccgcgcagttgtcattaatgccaccct

SEQ ID NO: 16840 - DNA, 122 bp, Homo sapiens
ccaggtgcttctttgtagaccggctggtgatccgctaagacagttctgcacggtttggcccgttttctctgaccctgggctatccctgtttgaatattctaatgttgtgtttccctttggct

SEQ ID NO: 16841 - DNA, 122 bp, Homo sapiens
agaagacaaagtacatctgggtcatgcaacatacaaaggagacaatgtggtccctgaccacgaggtggatcaacatctgtgggatggtagtggtgatgaagcagacatccaggagagacaga

SEQ ID NO: 16842 - DNA, 122 bp, Homo sapiens
tgagcactcacattgaaaacttaagttcttcaccaaatgcagagactctgaaggccacgccgctgcgggctgcctccacaattcgaccgtctcggcgggccacgagatcctggccacggatg

SEQ ID NO: 16843 - DNA, 122 bp, Homo sapiens
ccacggcccgaagccgacgagctgcaagtgaggatgggtgcagagggaggccgacggtcacgccttggagaggctgatggtcctcttgaccgccctccaccgccactgcgaacccaaaagcc

SEQ ID NO: 16844 - DNA, 122 bp, Homo sapiens
aattccctagcggcttgcaatctatctccacgggacagcactggcctgggacacaggctccgcacacgtgtctaacgagtgactcgttaggagcttttggctcgaacgtgcttgatggcggc

SEQ ID NO: 16845 - DNA, 122 bp, Homo sapiens
ttgagggcggagctgtgaacccttccaaagctctccctccctgtcataaagaccagaagtcggaagccacccctccccctagaccaggcagggactgaggtctccccagcccactctccacc

SEQ ID NO: 16846 - DNA, 122 bp, Homo sapiens
tgctgcaatggaactaggcagccttgccagccatccggcggcagtgccggcccatgctggcggccacctccccgaggctctgactcttggaagggtagccccggagacctggccgtgtcgaa

SEQ ID NO: 16847 - DNA, 122 bp, Homo sapiens
ggaatcttaaaaactgtaagttagcaaatccaaaggactgtttctttcttgcaaagcacacgacagtttgtgctgccttatcactcggctcgttattttaccaatccatagtaatagtttcg

SEQ ID NO: 16848 - DNA, 122 bp, Homo sapiens
ggcagaggaaataggaagagaaagagtatctgtgacaaacaagaaaaaaggaacaagagacgtaatagcagcactcacggaggaagggacctgggcccggccagccgccatgatgcgccgga

SEQ ID NO: 16849 - DNA, 122 bp, Homo sapiens
tgactctcccgagagacaggaaaatctgtcccattgtttgtgcgcccctctgctcctctgcgagggatatctggcttctttacggctcctctaaatagaccatgtttaatcatcactgtcag

SEQ ID NO: 16850 - DNA, 122 bp, Homo sapiens
cttgaaataaagttgcatgtaagccctgtttttttaatgatagcttttctcagctgctcacgaattggtaattgctagtgagaggaccgggcaaggaagttttctgcttgcttaaagtcgct

SEQ ID NO: 16851 - DNA, 122 bp, Homo sapiens
agtcgtagaggtgttgtccttcaggatccccttgaggggccgttgcgaggccgtggaggccgccattgccgggtgctccgcctgtcggctcagggtcgctgcttggcgtggggtccgcgaac

SEQ ID NO: 16852 - DNA, 122 bp, Homo sapiens
tacttaaggtaaattattgaacatttccccatgacatcagtaatgaaacaaggatgtacacgctcttaccacttattttcagcatggctttagatgctctagccaatgcaataaaggagaaa

SEQ ID NO: 16853 - DNA, 122 bp, Homo sapiens
gggcagcgtctgtcccagacagttctgccttggcatgggaaccccctccttttctgcaatcggaacaaagggaggagggaggctccccaccctccaaatgccctggggtgagagcctcctcc

SEQ ID NO: 16854 - DNA, 122 bp, Homo sapiens
ctttgtctatttctggttcatcctacatgaacaagaaatgcacatgtagctaacagaccccgatattgttcctgtgtttttctgggtatcagccactccttatggggtggcaatgctgcatt

SEQ ID NO: 16855 - DNA, 122 bp, Homo sapiens
ccaaagtcctccaggctgcaggcagccagggcgtaagtgggtagaggaggggttcggggtcggtgtgagccccataggttttctggcactgcaggggccctagagaccccggccccgcaagc

SEQ ID NO: 16856 - DNA, 122 bp, Homo sapiens
tatttttgtgatgatatgagtctccccactctgctgtaagttctctgagagcagggactacgtctgttctgctcaagggtgtatgcctggagccagtacttgctggcactagtggccgcttt

SEQ ID NO: 16857 - DNA, 122 bp, Homo sapiens
taattttgctattttttaaaatactggccgccatcatcaagcagcgagcagcagcagaagcgttgaagggagaggaggcatcgggacaggcccctcttaggagaggatttatatctaggtaa

SEQ ID NO: 16858 - DNA, 122 bp, Homo sapiens
aagagggaggtgctgagagcagagcagggaggaacagtgtgactgtcagtgtgtgtgtggcgggggggtcgctgatgctgagagcacagacacatgtgactcagcccagccgagagccccta

SEQ ID NO: 16859 - DNA, 122 bp, Homo sapiens
cgagagtgaggagaacacagttgcctttgtgcgttgtggagccgggtcctgttttggttgcggccgtgcatcctgcatccaggtcggggcagaggtggttccacgtcctcccagaggtcagc

SEQ ID NO: 16860 - DNA, 122 bp, Homo sapiens
agattacctggccccagtggggaacacatggcaaggcgatttctgcagtcggcttgattccgacaaatgctgggtacggaaagagcttggatctggcctgagttcactcaagcgccatgtgt

SEQ ID NO: 16861 - DNA, 122 bp, Homo sapiens
ccggaagaggggagcgcccgattgcctgtagggacgggaggcgcggcacgtgatctctgacgcacgcaggccgcggggcggggcggggctgggcggggcggggcggggcggggctgggcggg

SEQ ID NO: 16862 - DNA, 122 bp, Homo sapiens
acgcacactggtgaatttctctctacagtcagtctggagtaatcccaaagtggtgtctttcgtaaataaggagaacccgggtgaagaaaatgactcccacccgaacaaggcatgaacaatgt

SEQ ID NO: 16863 - DNA, 122 bp, Homo sapiens
caagctggctccatgtccctcatgagaccagggcagagactgatatccccaagcttctcacgttattctgcggaccccttaccactttgttgagttccgggctgtctgggctgttgtcctgg

SEQ ID NO: 16864 - DNA, 122 bp, Homo sapiens
ctccgcggaggggcgcgcaccgcggccgctgagctcccctgaggacctgcgtcccgccggcgccgtgcagacaatgaactcctggcggaggctccctgcccggtgggcctcggtggaggagg

SEQ ID NO: 16865 - DNA, 122 bp, Homo sapiens
gactgcctttctgggaaggcgtgctgcgtcttcgccgcgggggccccggtcccctcgtcgcgtgtcctgtccccagcccaggagggacgtcctggcctgtcctgcccggcccggagcggtgg

SEQ ID NO: 16866 - DNA, 122 bp, Homo sapiens
ggggcgccgcccccggaagtacttccccttaaaggctggggcctgccggaaatggcgcagcggcagggaggggctcttcacccagtccggcagttgaagctcggcgctcgggttacccctgc

SEQ ID NO: 16867 - DNA, 122 bp, Homo sapiens
ccagcacccacccctgggccccctcacaccggtgcaacagagaaggccacgaagctgccccgtgagcctgcctggcaggagacacagggtcttcacgaagaacccccgcccccacccacact

SEQ ID NO: 16868 - DNA, 122 bp, Homo sapiens
ggagggcgggacagaggggctgggcccaggcaaagcttctgtcgctgctgctgcggaggccgaggacaggacgtgggctgggccgggcagtgccggactcggaggagcaggaggcgaggtcc

SEQ ID NO: 16869 - DNA, 122 bp, Homo sapiens
tgtgtctcttttttcctttagaactgctctcatgctggcctgtgagattggcagctctaacgctgtggaagccttaattaaaaagggtgcagacctaaaccttgtagattctcttggataca

SEQ ID NO: 16870 - DNA, 122 bp, Homo sapiens
gtaaaaagataagttacaccttcttctgacggcaaatgttttccattatgttccttctcccgagccccacccccatcccagacagtcagatgatctttgatgttttttggtcactatatttt

SEQ ID NO: 16871 - DNA, 122 bp, Homo sapiens
gggccagaagggcggtggggcgagagggcactggggggggtggtgcggccttcacacctccggccaccccccaggtccagttccagaaggagtgcgggcctgacaacaagtgtgagagcaac

SEQ ID NO: 16872 - DNA, 122 bp, Homo sapiens
caggatcccaaaggaacacttcagcaagtctggagaatttggtgatattctcagcattgtcgtgtttactgaaatactgctactgctcaggcatttcagtggacaggaaaagatctcaaatg

SEQ ID NO: 16873 - DNA, 122 bp, Homo sapiens
acaagtgtttgtggaatgagaattatcttgcccgcttcaggtgctcaggatgcagacagacgtgaaactggcgggtcctttaggagactgtcccgactgcgtgtcctgaggtgactcgcccc

SEQ ID NO: 16874 - DNA, 122 bp, Homo sapiens
catgttttggaagaaagaggctttgtttttagaaaggcattgttagaggcctgagtatttcgggaaatgaataaataaattcttgaccttgtaggaggtacctacagttcaacttactgtgc

SEQ ID NO: 16875 - DNA, 122 bp, Homo sapiens
gagatagggtcttgccctgctgcccaggctggagtgcagtagtacaatcatagttcgttgcggcctccaactcctgagctaaagggagcctctcatctcagcctccggagtagctgggacca

SEQ ID NO: 16876 - DNA, 122 bp, Homo sapiens
cgcctccagagccacctctgtagcccccactgctgcttccggagccgtagctgccatggccgccgccgccacctccagagccatagctgccacctccggagccgtagctgctacctccggag

SEQ ID NO: 16877 - DNA, 122 bp, Homo sapiens
tccacccgcgccccgctcccggggactgggagaacaggatagcagcaggagtcggggggccgccgaagatggggaacactacctcgtgctgcgtgtcgtccagtcccaagctccggaggaat

SEQ ID NO: 16878 - DNA, 122 bp, Homo sapiens
ctctaggtgccccagccaggccctgaatccagatcatgtccattgtacagataggccactcggtgccttgctgggcgctgcgggctgtgggctgttgtgtgtgcaatggggaggccaagacc

SEQ ID NO: 16879 - DNA, 122 bp, Homo sapiens
tttcttgttcttgccgcccatgttgcagctgtggcagaagatccttcgcggcccaggccccgacggtaccactgcacagccgagagctcttcacattccccggctccggggctgccaccctg

SEQ ID NO: 16880 - DNA, 122 bp, Homo sapiens
ggatggagagccctgcctgctgtctccgggaacggagcgctccacagcctggggacattgcgagactgcccttgcctgcttctgcttctaaggtggctgcattcccaggaaccagagcctgc

SEQ ID NO: 16881 - DNA, 122 bp, Homo sapiens
ctgcccctcccaccgggtcggccctgtccttgtcttgctcagctcgggggaagcacctctcgccagccatctggggcttggctgggcctcagcctcctggctgccacgtctcactgggagct

SEQ ID NO: 16882 - DNA, 122 bp, Homo sapiens
gcagaggagtggggcaggcccaagtgtggagttgaagacctctgagtgggagagtgtcagcgtctgacatacagtgtacaggatctctcagctgttatattgtgcagagactgtggggacca

SEQ ID NO: 16883 - DNA, 122 bp, Homo sapiens
ctgcgctccccgcgccacgcggctccacacaacacgccggcccacgcagaaccctcagaacgaaattcaccgtctcaatacaggctcaagggaaacctggagtctgaaaaaaggaagggacc

SEQ ID NO: 16884 - DNA, 122 bp, Homo sapiens
ctgcgaaatcagcaacgggcgggaaccaggttgcctccctgagtcccttctctccccggccggctgccaaccacagccaaggccagagaaacaggcccttctgccgcggccacctgggcgcc

SEQ ID NO: 16885 - DNA, 122 bp, Homo sapiens
acgtaacgcgtcacttccggtgctggggcgcgctgcttgcggagggagtttgcccgtatacggttttatttaggcaggtgatgagccagccggactttcaggcagaactggactggaacagg

SEQ ID NO: 16886 - DNA, 122 bp, Homo sapiens
cctggtgaagagagggagaccctgtcttaagaaaaaaaaaaaagccttgtcacaagatagcgcggaaagcgaagaaggaagttcccgtccctcctaaagccgaagccaaagcgaagtcttta

SEQ ID NO: 16887 - DNA, 122 bp, Homo sapiens
ttttccttatgttatagggtgatcgcacaacctgcatctttagtgctttcttgtcagtggcgttgggagggggagaaaaggaaaagaaaaaaaaaagaagaagaagaagaaaagagaagaag

SEQ ID NO: 16888 - DNA, 122 bp, Homo sapiens
cacctgaaccaagccttataaacattgttctgtctattcagtggactgtaaagctccttgcggaggctttatttcactagctcttatgccctcaatgaacaatgctgccttcttttaatgag

SEQ ID NO: 16889 - DNA, 122 bp, Homo sapiens
tgctgggaaggggccggcaggcagggtcagcacggcacgagtttccccctccccgacgcccgcacctgccctgtccccccaagggtccccgagtccgaggagaacctcatgcagggcctggg

SEQ ID NO: 16890 - DNA, 122 bp, Homo sapiens
ctccgtctgcgtgaggggcccctcgtggcatcttccgagtgctatggaacaccttgctcccgctccacccgccccgccctccagtgccttcgtatttctctcatgtgcttttgtcttttttc

SEQ ID NO: 16891 - DNA, 122 bp, Homo sapiens
tcaatttttaatgatagttgggttttcctaatgagagagataacccaaaccctgcaggggcggcaggggctggggtcgccagaggcgggggcggtgcgggagggccgcgcaggtcatgtccc

SEQ ID NO: 16892 - DNA, 122 bp, Homo sapiens
aaggtggaagctggtggccccctgcctcccgcctgcagaacccctgtggggctcacaggccggcgccagctgggacgtgagtctgagccttaggtcagccaggctcctctctgaaaaatccc

SEQ ID NO: 16893 - DNA, 122 bp, Homo sapiens
caccacccccgcccccatctccactctcagtagcccgagccctcccattctccactccttcgacccaattccactaagtcaagaaccgtggtcggtctcagccactcactcagcgccactct

SEQ ID NO: 16894 - DNA, 122 bp, Homo sapiens
gagggggccgaaagcaagctgggtgcgaggagccagccgaccctgccacactcaagatggcggcgcggccgcggcgaggtccctcagaggcggtaccagcgcatgcgcagcgcggagtcccg

SEQ ID NO: 16895 - DNA, 122 bp, Homo sapiens
ctgcccctttggcctcaaaagtttcctcaccagaaattcaatgaagatgcaatttcctttcgcccctccatagcaggcaggcaaaatcctgccaggaaccctttccactgccttcagtccca

SEQ ID NO: 16896 - DNA, 122 bp, Homo sapiens
acctcgccatctgcccacctctgcctcccaaagtgctgggattacaggcgtgagccaccgcgcccagccagtaataaggtttgtctgacggtgattgacagcattttagagctgatgcatgg

SEQ ID NO: 16897 - DNA, 122 bp, Homo sapiens
aggcccaagggattgggctccaagtcctggaagtggtttcccaagtcactagatttgcagcgcacaaaaccggaaaggtcccggtaaacctgtccactggcacctgggcagcgaagcgcttt

SEQ ID NO: 16898 - DNA, 122 bp, Homo sapiens
gaacctcaaatttttcactatagggagcagtgggtagctcttcattggagtgtggccaagcgtctcattcagagatgccagctgcttctttcccatcccatgccttggatagacactaactg

SEQ ID NO: 16899 - DNA, 122 bp, Homo sapiens
gggcaatctgtatgtctctggggaggagtagtgatgatggggactgatgcggtgtgaaaacgagacagtgagatttgacagcggaaagcaaaatgcacagggacaacgggcaagactgacaa

SEQ ID NO: 16900 - DNA, 122 bp, Homo sapiens
acccacacaggcttggacttaggggcccccacccctccccaggcacccaccgttctcagacgcgctgggaccttcgcagtccgagattaactgttggggtttccgctgctttcgccgagaca

SEQ ID NO: 16901 - DNA, 122 bp, Homo sapiens
tccaggacagagagtggaacccgccacctgctggaaaggccggagccggcgcagagctagcgcggggcaatgtggcgccctctgcggggagcccctgctgcctcgcgccggcactcaaacct

SEQ ID NO: 16902 - DNA, 122 bp, Homo sapiens
ataaaacgatcatggcaaaccttcagctcacttgccagggcctaagtgctttacagggatcgctgtacttagtccaggaaccatcctaggcataggtattttgtatcactattggtaccgat

SEQ ID NO: 16903 - DNA, 122 bp, Homo sapiens
ggggaggtggccctggaggaggaagaggagggggaggcggaggagtgtccaggcgtgccacgagaacgcagagcgcagcaatggatataaatacaaatacagcagcaccagcctgtcttctt

SEQ ID NO: 16904 - DNA, 122 bp, Homo sapiens
cgggtggcgcaggtagaggccgggcgggggtggcagccaccccggggctcaggttccagccgccaggcttggccctcagcgggcgctgtcagagggcgggcccgcgggagcggggcggcggc

SEQ ID NO: 16905 - DNA, 122 bp, Homo sapiens
gggtcgtttccgctttgggaccaatgggtcggggagggacttccggtatcacttcagtggcggtcatttttgcagcgcttgggtgcatccagaccgtcagagctttgggagcgctttgtttg

SEQ ID NO: 16906 - DNA, 122 bp, Homo sapiens
aggcgctggggaaagtgattcggaggccgccgctgaccgagaagctgctgagcaagcccccgttccgctacctgcacgacatcatcacggaggtgggcgccggggaccgggcccggccaggt

SEQ ID NO: 16907 - DNA, 122 bp, Homo sapiens
caacctccacccctgccagaggcgcctgcaccgggttcctcctgcagatctgcaaactcacgcccgcccagctcaggctctgcagcccagttctcatcgtttcacgggctgaggccggctcc

SEQ ID NO: 16908 - DNA, 122 bp, Homo sapiens
tataacactcactgggtttttacaacactgtggcacgttactcacagctcctcccagccacgcccctccgagggagccggttcctgcagggaaagtgctggatgtaatccagtgaaaagggg

SEQ ID NO: 16909 - DNA, 122 bp, Homo sapiens
gcagccttaatgttaatacagagatcacaagactgacagaacagactctttgtggcaatacgataacaaattataaacaggatctaaggccatgccaggaagggttaagtcacgcaccctta

SEQ ID NO: 16910 - DNA, 122 bp, Homo sapiens
gacgctgtccccgattgcagctggcggggcgaggcctggcagggcgaggcctggcgggggcggggcctggcgggggcggggccggcggcacctgggtgaggtcgctcggccccgccccctcg

SEQ ID NO: 16911 - DNA, 122 bp, Homo sapiens
tccagggctcaaagtcatatctcctcgttcagaaacctcagtgcctgtccaccactcttccggaaaagtcggaatccttagtgtgatggtcaaagaccgctcttggtccagtccacctgtcc

SEQ ID NO: 16912 - DNA, 122 bp, Homo sapiens
tttacacgctgtcatcacaaaaaactaaaatcactatctgacatgatggatgtattatctcgatttaatcattccacaacgtaaatgcctatgaaaatattacactgtatcccataaacaca

SEQ ID NO: 16913 - DNA, 122 bp, Homo sapiens
atctccccagagaggagtggacaacccctgacttagggccagaagactgcagagtctagacggctgggttatggagtgctggagtcagggcagtgcgcacaagtgttgggctgggtgactcc

SEQ ID NO: 16914 - DNA, 122 bp, Homo sapiens
gctcgggggagctgggcagtgagcgcgcccgccgcaggatgatgggccgcaggcgggggtcgcagcccgacggcgctggcgttggcggcggcgcgcggcccgggctcccagggggcctacag

SEQ ID NO: 16915 - DNA, 122 bp, Homo sapiens
gcgcgcagggccggcgggtggtgttggttacgtcaggcggcaccaaggtcccactggaagcgcggccggtgcgcttcctggacaacttcagcagcgggcggcgcggtgcaacctcggccgag

SEQ ID NO: 16916 - DNA, 122 bp, Homo sapiens
ctatcagatgcaattcatacccaatgttctccaagtatcctggtataggtattttaaaagcgttattacagtgctccatggcacagctttaaaggattgtctaacatgccattaggtgacca

SEQ ID NO: 16917 - DNA, 122 bp, Homo sapiens
ggaggagcaggcggacacagacgctgggccggggaaaagggccatggagcacaccgatgccgtgtctgggacttaccacctttcccgctgctggaagtagctgacaaactggggcagctcag

SEQ ID NO: 16918 - DNA, 122 bp, Homo sapiens
cttccagagcccagcagaggaggccaacgtgcaaaagccgaacctccgcgcacctccacacgccttgcagcaccacggcccacctcttggcgcacggagaactgatccaggctcaccacgat

SEQ ID NO: 16919 - DNA, 122 bp, Homo sapiens
gcattgtcccctatccctgtaccctcaactagagctgaaaatacctaattttcatctgtacgtaatccccattctttacggacctctggccccaattagtattctttagtagataatggtag

SEQ ID NO: 16920 - DNA, 122 bp, Homo sapiens
ttgggggaggtcgggtgtcttcttgcccacagtcctgaccctgggcatggctgaggaggtcgcagggagtgtggagggtgaggcagggtgagctgggtgcgagggtgtagcagtgtgtctcg

SEQ ID NO: 16921 - DNA, 122 bp, Homo sapiens
atcgtgaattctccaactgtgttcttcgccggaagtccacggaacaccaaccacgaccttcggaatttccctccggaagatgaaggcactgtagttatgcgggtggaccctatcagatctcg

SEQ ID NO: 16922 - DNA, 122 bp, Homo sapiens
gaaatgccaggagctggatgtggtggcgtgtgggaggccaaggggagtgccattaaggagcggaaggagggagtgaataattcatcacagacatgcaccacggagtgggcacaggcagacaa

SEQ ID NO: 16923 - DNA, 122 bp, Homo sapiens
caggcttcagtgcagtggctgcattggggctcattgaagcctggaattcctgggcccaagcgatcctcctgccttggcctcccaaagtgttgggataacaggagtgagctattgcatggcca

SEQ ID NO: 16924 - DNA, 122 bp, Homo sapiens
cgcccacgccggccggctgatgtcaaactgcagctcggctggtgtagctcttaaagggcccgcgggcgccgggggccgaggccgcccgcggggcgaggagggagaggctgcttccttgcccg

SEQ ID NO: 16925 - DNA, 122 bp, Homo sapiens
agagagtttcaaggccccccacttcccagccttcctgcttcgcctaggggagctcccaaacgcctgaaaatatctttaaattaggaaaagagctaagccgccagagtcctttggtctattaa

SEQ ID NO: 16926 - DNA, 122 bp, Homo sapiens
ctttacgggaaccatctcatttaatcctccctgactctaggaggttctcccaggagagaccgctccagacgacatcaggcctacaagccaagaaatgcagcaggcctctagaaactgagaaa

SEQ ID NO: 16927 - DNA, 122 bp, Homo sapiens
tccgtgcggggggctgggcggagcctgcaaaacccgcctctcaggttccgcccagcacgccggtcccgccttcggtcccacaatttccgccctactgaattcttcagaggaactcagttaag

SEQ ID NO: 16928 - DNA, 122 bp, Homo sapiens
tctgtgctctggggcagtttcctaatctgggcctctggctcctcagatatcaaacgatgacgtcgatgcatacctcagacagtagtggaagaatgcatgagaatgtttgtaacttagctcat

SEQ ID NO: 16929 - DNA, 122 bp, Homo sapiens
gtgggcggcctgcgggaggggctgaggcgcagttccctactcacccaggtccgaatccaccgcggtgctgtttccagcgagtcagattccagatcgcgctccagcctggactcggaattcct

SEQ ID NO: 16930 - DNA, 122 bp, Homo sapiens
ctgtagctcggcaggtgcagtaggcgctccgaggaggaggccccttagcttcaagaaacccgcgtgggcggggtgaggagcgcagtcctcctactggcgccgtgaaggagatcgcgatgcgc

SEQ ID NO: 16931 - DNA, 122 bp, Homo sapiens
actgcctgcagccgacatgcgacagcgttccctcccccgcgtgcctagccggtgccggtccgggcacagacccccccagcccccgccctgccccagggaagcctgggcttcccgggaacaag

SEQ ID NO: 16932 - DNA, 122 bp, Homo sapiens
aatccgttgaaagttacagctaaggtgatacctggggtccaaaagctaaatatggacctacgctatcaccagtcccttccagttctaaaactaagtccaagccttttgcagcacgaaagaga

SEQ ID NO: 16933 - DNA, 122 bp, Homo sapiens
ttgatgataaccttgaaaagtttagattagccctattttcctttaataccctgtctggatcgatcatctaagaaattatcttacgattttctgtatctgtattttctaatgacacttgcatt

SEQ ID NO: 16934 - DNA, 122 bp, Homo sapiens
cgagcccctcctctcgagggccggccggtttggcggcggctgcggagggtatctgaggctcggctgccaagccgaacgggctctggctcctcccagtggccggccggggcggaagcaggagg

SEQ ID NO: 16935 - DNA, 122 bp, Homo sapiens
ggccgcataggcttcaggcgtccagcttccgggttgttagatgccgaggttcaaaagaaacgatcacttcagtggcgtgcaggacagcgggcgggtggggtcggggaggggggaccttaaag

SEQ ID NO: 16936 - DNA, 122 bp, Homo sapiens
ctggggtttgtcagcgggggtgagaggggcctatagggacctggactttccagcctgtgtcggccccatgggtttgggccgcctggagagcccctgggcccttgagatccctgccctcccct

SEQ ID NO: 16937 - DNA, 122 bp, Homo sapiens
ggggccgcccatccctgtccttgtactgcacggtgaaagagtcgaagctgccctgggggacggtccagaagaggctcagcgaatcaggggaggatcctgtcactgtcagctcccccaggagc

SEQ ID NO: 16938 - DNA, 122 bp, Homo sapiens
ggcgcgtgcttctgatttcctaagcatgccgagtgaatccatcccgagtgcctctgtctgcgtcaggagagtcgtgtggggtgggcttgtcatcccggaagtgctacggttgcatcgtgtgg

SEQ ID NO: 16939 - DNA, 122 bp, Homo sapiens
ggctggtcaggagaacaacagtggacttcatgggagctgaactcattggcaaagtgcccccggagagtgctggccaccccacaaacacacacaccccatgcacaccctcactatgcaccctc

SEQ ID NO: 16940 - DNA, 122 bp, Homo sapiens
taactttttatggatacataatattttacatatgtatgggatatctgtgatattttgttacgtgcataggatgtgtaatgattaagtcagagcattagtggtatccatcactttgggaattt

SEQ ID NO: 16941 - DNA, 122 bp, Homo sapiens
acacagatacacacacacagtcctcattctgacccagcgcctgtggcagggaagtctcctcgggagggagtgttaacacagccatggtcacaacagtacccactgagtgatatgccaaaatt

SEQ ID NO: 16942 - DNA, 122 bp, Homo sapiens
gttaatggcaagggctgttgcagggaaatgggagggagagagtagaggcagagatgaaaacgccttaccctgttaaccagaacagccattgcatattccgttctgggttaattccaccccaa

SEQ ID NO: 16943 - DNA, 122 bp, Homo sapiens
cagggcagcatgtaggcgcagggcgggagggtgtatagggcgcgctcgcgctggcggggccggctccacgtgggcgtaaaggggtaggggcgggagcggctcgtgcggtgtgttccaggcct

SEQ ID NO: 16944 - DNA, 122 bp, Homo sapiens
agctgttaacagcagtagaggaaaccagcacctttggacttgagtgaggacatggaacctcgcctgacattttcctggccagtgacatcacccttcctgggatgatccccttttccctttcc

SEQ ID NO: 16945 - DNA, 122 bp, Homo sapiens
tcgttccccgattgcaatcatacgttggatacagatgcaagagctccatgaaaatcggagcgagcattctgtgagaacccgtgggctataggaaattgaaaatagagcaccgtgtgtgctgt

SEQ ID NO: 16946 - DNA, 122 bp, Homo sapiens
tgctggtggcagttccgtgaccctggttgctgaagtcaacgtctcacaaactgtggatgccgatcggttagacctggaggagctgagcaaagatgaggccagtgagatggagaaggctgtgg

SEQ ID NO: 16947 - DNA, 122 bp, Homo sapiens
cttgagcgtctccagctgcttggccttgatggtggtgcgggggccgcgccgcttggtgcccgagttctgctcctcgttctcgttgttggccgtctccttgtccgacgaggtcgagttgtccg

SEQ ID NO: 16948 - DNA, 122 bp, Homo sapiens
ggcgggggttcggctatgtctgaggccaaggtcgcctcggtcacggacagagcttagaggcgcccagggccacagtctcatcagagactcgggcacacacgaggctgtgatcacaggaagag

SEQ ID NO: 16949 - DNA, 122 bp, Homo sapiens
cggaaacggcagggctcacgaagggttttgtgactcgtttgtaagaagtcatacggaagtcgcttcctgggcttctcagcctcctagagtggatcaccatccggaaggacggagcgcgtgcg

SEQ ID NO: 16950 - DNA, 122 bp, Homo sapiens
cgagaagcattcccaaccctggcaggtgcttgtggcctctcgtggcagggcagtctgcggcggtgttctggtgcacccccagtgggtcctcacagctgcccactgcatcaggaagtgagtag

SEQ ID NO: 16951 - DNA, 122 bp, Homo sapiens
actgtcagctggaggcccaacatacctggattgtgagctgtctggccagaagagccccgacggtgtcacacagactggtcaggaggcagcacgcagcacacagtgccgactggtcctgtctg

SEQ ID NO: 16952 - DNA, 122 bp, Homo sapiens
ttgtccgcgcgtgctgtggtctacccagtgtctgtctccggccacagttcgtttctcggtcggtttagtgtccgtgtagccacccaaccgtgtggccgaccattcgcgctttcatttgtcct

SEQ ID NO: 16953 - DNA, 122 bp, Homo sapiens
gaggagggcgagccccctcgccggcccgtccgggatccttcctaccggcctggggctgtgcgatctccaagcactgaggggcagaaactcccggatcgggcgctgccagcctccagtcccct

SEQ ID NO: 16954 - DNA, 122 bp, Homo sapiens
tgagcttcaccctggagcggctgtccagccgattgcagcgcagtggcagcagcgaggactcggggggcgcgtcgggccgcagcacgccgctgttcggacggcttcgcagggccacgtccgag

SEQ ID NO: 16955 - DNA, 122 bp, Homo sapiens
cccattactggagcagcagccatcagcgtagacgacgacgaagtctcccatgtaggaaaacgtgtctctgctaactggaggcgccggcttcaccctcggcttcatgtgcttgcatatggctc

SEQ ID NO: 16956 - DNA, 122 bp, Homo sapiens
cttatatgtagagggggtgtgatttcaatgcatttcaacctggggaggtgggggcagcgccgtaatcataacaactgctaacgtcgattagccctgtgccagccactgtcattcattcattc

SEQ ID NO: 16957 - DNA, 122 bp, Homo sapiens
ggctccgggagcgcgcgggccgggagtccaaagggcggcggggcccgggactgggcgccccggatatgagctccagggtggcaggcaggccctccacactgtgcggcccccggatccccgcc

SEQ ID NO: 16958 - DNA, 122 bp, Homo sapiens
aagccaaagctttttattctagagccaaggtcacggaagcccagagggcatcttgtggctcgggagtagctctctgctgtcttctcagctctgctgacaatacttgagattttcagatgtca

SEQ ID NO: 16959 - DNA, 122 bp, Homo sapiens
ctctaggacaggcccacaggttggaaattcaggcaggagttgatgttaccgtctcgagtccgaaatctgcaaagcaggccaagccctccggaaactcactcagagtttctgtgctgcaggct

SEQ ID NO: 16960 - DNA, 122 bp, Homo sapiens
ggggctggggggctttgagaaaactaaccacatttgaatccggtccacacagcttgaaggcggaggtacggggcaaagcgcggcggggaagaaacaccagcaactcggcggcccccgcctcg

SEQ ID NO: 16961 - DNA, 122 bp, Homo sapiens
acgtctcctcttaagcatccttgccgtctgtctcctggcatttggatgggcctctctgaacgcgttttgagtcctctgcagccccgcttcctcccgccgcggcatctggagtgctgtggccc

SEQ ID NO: 16962 - DNA, 122 bp, Homo sapiens
caccctcccgggacagctccgaaatcccagccctacgccggagctgcggtttgcaaagcgcggctgggccttaggtcttgcccccagtttcctatgccctaggacgtccccttgggggccag

SEQ ID NO: 16963 - DNA, 122 bp, Homo sapiens
actgaggcgttgagaaggccccggctgcgtggcccgcgggtcctgccggccgagggtcgccggatcgccagcagctgcgacgcactaacagccgctcacagtccggaatcccacgctcccta

SEQ ID NO: 16964 - DNA, 122 bp, Homo sapiens
ccaggtaactaccacataacccctagatcaggaaatcagcattgttcctccatgataattcggtccacaaactcacttcacttttacctcatgccacacttgggagtataatgtgtattttt

SEQ ID NO: 16965 - DNA, 122 bp, Homo sapiens
tcctgttgctcagaatccagcttctgggtcctctggctacaagtgctaagattcactctccgtttcgccttctaaccctgctatcctacctttcatgcatcatctcatgcccacggggaaaa

SEQ ID NO: 16966 - DNA, 122 bp, Homo sapiens
cccacctgcgcagggctagtaccactttaaggagtcaggcgccgccggggtaggcgtggtcgccgcgagcgggggggggggcgctggtgtaggacggacctgattggccggaggcccgggcg

SEQ ID NO: 16967 - DNA, 122 bp, Homo sapiens
cacccctggacatggccagccagatgtccctcaagcacctccatctcaacaggtacaaaccgagctcatcatttctccctctaagcccacttctctgtttcctgcctcagaatcagcaacct

SEQ ID NO: 16968 - DNA, 122 bp, Homo sapiens
gagacgcatgcgttctagacgagacaagtgatctagcggcgtggtcttttcaacgcctggcgtactgacggcgtctgaggtggaaggggttgtttaggattccgaacacgcatgcgttctga

SEQ ID NO: 16969 - DNA, 122 bp, Homo sapiens
gtatagtgaaaactatttgtagcatgatggagatagaaacattccaaaagagagacatcccgccaggtggtggaatacatattagaggctgttgaaaaattaaatactgatcaagcacttaa

SEQ ID NO: 16970 - DNA, 122 bp, Homo sapiens
tgacctcaacctgtcatctccatggcgctgtctctgccaagcccttccctttctggcccacgagccctctgtctggccgccagcctgggctttctccagctgatttgtaggtatggtgaata

SEQ ID NO: 16971 - DNA, 122 bp, Homo sapiens
aggttgagccaggccagggccacgggaggctgggaacggacgaggcttggccctgctggccggggatggcctgtcctgcccacacactcacctgcctgtccaggatggcctgccctgcccat

SEQ ID NO: 16972 - DNA, 122 bp, Homo sapiens
cggagaggggctagtgggaggtggagaaccggctgcttcggcccgccctggtccctgccacggcggcccccactcacatggcccagcccgcccggcgcagcttgtacagtacacgcctccaa

SEQ ID NO: 16973 - DNA, 122 bp, Homo sapiens
agacacgctgcattccccggagtcccacgccagggagaacggccccgcctgaaaagacgtcgtttaacacagagaaacacacccagggccaggagaaaccattgtcctccccgagtcccaca

SEQ ID NO: 16974 - DNA, 122 bp, Homo sapiens
cctgcaggctcagcctggcagcaaactctctaggaagctcacagccttcctccctagagtcgggacgccaggagggaagtcagggctcagggataaccctggtttccctgagggaatgtggc

SEQ ID NO: 16975 - DNA, 122 bp, Homo sapiens
gcggctctgccctggtcccctgacctccaggagctgccccttgctcctcctgccccccaccggcccttttcacctgaggctgctctgccccggtcgcctgagctccaggaggtgccccctgc

SEQ ID NO: 16976 - DNA, 122 bp, Homo sapiens
cccgcccgcgcggccggaccgggcagccaggtgcgggtgggcaggggatgccgcgggagccgcgggcgggagccgggggtgcgggcgggacccccggccaccccatcccttgccccggccgc

SEQ ID NO: 16977 - DNA, 122 bp, Homo sapiens
gtttggagaatgcaacactaatatgcacaacgtgaagttgtggtgagccctcactctctccgtgagattgcaacacttcctcaaactgagggagtctccttggacctgaaggctcgctctct

SEQ ID NO: 16978 - DNA, 122 bp, Homo sapiens
tggagagaaacgcacgtgcacacacacccccctaaacccacacaaatgaaaccccctctgcggagaagccggctacaggaaattgacttaggcacaggaacttgctaatctcttttgtcaca

SEQ ID NO: 16979 - DNA, 122 bp, Homo sapiens
ggatgtcaagtcagcccagacttcctggcagagctgggcttccgggggacaaggttctgtcgacctagcaggtgtcaaaacaagtgcataaggccgggcgcggtggctcacacctgtaatcc

SEQ ID NO: 16980 - DNA, 122 bp, Homo sapiens
aatgcccgtctcctcccggcccccagcacaggcctcctgcacctcggacctcgcgcgtagcggaggcaactctgcctcgaggacccagggtgacaggtggagagaaatgcacacaaaacttt

SEQ ID NO: 16981 - DNA, 122 bp, Homo sapiens
ggcatctcgaaggagaggtcccagaactctggctaccgtgcctctccccggggctcaaagcgcctgcataggaggatgatgcagcctggatgtcaggatgctcccctatgaccttcactgcc

SEQ ID NO: 16982 - DNA, 122 bp, Homo sapiens
ccaccccggaaaccgggaggctcctgtgcagagaaagcgcccttgcctcccgcccgctcccggggctgccccacccagccagctcccctacctggtgcctggggcgccccacgatggagggg

SEQ ID NO: 16983 - DNA, 122 bp, Homo sapiens
ttttgtggcatgctctagccttgatggtctagtgtaatgcttctcacctaatcgtggtatcggaccagttaacgtttcccccagtctgtcacagaccgatgcttttgtaaaatacaaaaaaa

SEQ ID NO: 16984 - DNA, 122 bp, Homo sapiens
actacacagcccacaccaggccactgaatccaaaacgttccagtgtcctgagactccacacgtttaacaagctcccgaggtgattctcatgcaagtaaaattttgtcttaaatgtttatata

SEQ ID NO: 16985 - DNA, 122 bp, Homo sapiens
ggcataacagacacatgatataagacaattaatgtgatttctcaaggaagatactccagccgtgaatcattattatctaagtaaatgggaatttaatgacttttcggacaaggaactcgaaa

SEQ ID NO: 16986 - DNA, 122 bp, Homo sapiens
aatgacttagaaaaatgaaacccattgaatcattttgtttactttcccttcatccttaatcggagcccttcaggctagctagaaaataataataataataattccaatgtttccccaaaaac

SEQ ID NO: 16987 - DNA, 122 bp, Homo sapiens
cacgaggggcagcggccgcaggcgcatggtgccggctggcgcggcttttcacgagctgcgcgccctcgcctgcctctcgcgcatctccacttcgcggggcaggactgaggacgccagggaca

SEQ ID NO: 16988 - DNA, 122 bp, Homo sapiens
cggcttcagttgttactccaacagggccgcgtctccagcctccgagccacactggagacacgtgcactgtagaatacacctgagccagtcccagtgcctcccaagggtgtccccatccacag

SEQ ID NO: 16989 - DNA, 122 bp, Homo sapiens
agatgcccaagacttatttaatgtgtaaatcttcaccactacaataaccacatggttaaacgatcaccacttccattagcaagctcaagcctaataagtgatctcctgggacttcagcacag

SEQ ID NO: 16990 - DNA, 122 bp, Homo sapiens
tcattctccactcagtcgcaccgagactcactggcagcaggcggggagcacactagtgggcgaagggtacacagacccctaaaacattagagccccgtgtgctgccatggcagaaacaccgc

SEQ ID NO: 16991 - DNA, 122 bp, Homo sapiens
ccagtgcagagcctctgggggcggggccgtgccctgcaggtgagcgaggagctgctcgtgcggagcaggcagggctgtgtggcagccgcgcttgttcctgaggatgattgagcatctccatc

SEQ ID NO: 16992 - DNA, 122 bp, Homo sapiens
gaaggggtgtgtggggagggctgggaagggggtgtggagagggcagggcaggtacctccccgatttagggagctgggtacacccctgggcctggacatcaggtgcagatgctagggtggccc

SEQ ID NO: 16993 - DNA, 122 bp, Homo sapiens
tttctgagcaatcatcaatatcagcatcaagtggtgcagtggctccacaatgagtcgtggcggcagagtgagcccagcatgcaaacattttggctaatttaaaatccttgtgcagccgaatc

SEQ ID NO: 16994 - DNA, 122 bp, Homo sapiens
acttcactgccgacagcctgaaacctcaggggcggatgacaacagccagtgtgaacgaagcgccaccctccgggtcagccgagcatttccgcttcccacagccccctgggaacgtgaagtca

SEQ ID NO: 16995 - DNA, 122 bp, Homo sapiens
aaggaggcatgggatgtctgggcttaattagacctattcagtgcatcctccttcaagatccggctctcctccctatctgatccttagctacttaaaattgcaggaattcaggtatcctgatt

SEQ ID NO: 16996 - DNA, 122 bp, Homo sapiens
cactgactatgactcattgacagcctgaactgtgggccaactgacaagcagggctcactccgcaaacacgcgctgggctctccagctgtgccgccccccacagggcctgcagcccgggacaa

SEQ ID NO: 16997 - DNA, 122 bp, Homo sapiens
acaaaatgagaggcaatctctaaaaaaaaatcaaaacaattaggtgggcatggtgatacccgcctgtggtcccagctacagtcagaaagctgacacaggaggatggcttgatcccaggaggc

SEQ ID NO: 16998 - DNA, 122 bp, Homo sapiens
cgtacggtggctggcgaggctcagtacggtgtgtggagctggagcaccgtgaggaagaagcgaggttctttttaagagttcagctgcgaggtctgtagctccgaataggggatggcgacatc

SEQ ID NO: 16999 - DNA, 122 bp, Homo sapiens
ccctcctggagtgggaacagtggtggtggcaggaaaggcagctcagatgaccacacagggcgctgctgacagatcacatggggggggggggcctcagggcctccctggggagaggcagggca

SEQ ID NO: 17000 - DNA, 122 bp, Homo sapiens
gagaaagatggggagttggattggtactggcggcggagggggaagggaaaggaagccctgcgctaagggtcagcaaagtaaccccccaaaataaagttatttcagttcaagcatctgctctt

SEQ ID NO: 17001 - DNA, 122 bp, Homo sapiens
ggatgcagagagagacccttcccctgggatcctgcagctccaggcccctttgggtggggtcggggctgggaacctatgaacattctgcaggggccaccgtcttctccacggtgctcccttcg

SEQ ID NO: 17002 - DNA, 122 bp, Homo sapiens
gtggcacacgcctgtaatcccagctactcaggaggctgaggcaggagaattgcttgaacccgggaggtggagtgagccaagatctaaccactgcactgcagcctgggcaacagagcaagact

SEQ ID NO: 17003 - DNA, 122 bp, Homo sapiens
gccgggcacagtgccaggctctggggagatgtggtgaacagaaagagggagctcactgctcggtagctcacagtagggtgggctgggagactagaaaacaaatcagcaaataaaagaatcac

SEQ ID NO: 17004 - DNA, 122 bp, Homo sapiens
ggcaccccaatgtgagtagcagctgctgcctctgctccccggagctggggcactgtcccgcggacatgcgggctctggccctgttcctgtccccgtagctccgggctgttcctcccgcctcg

SEQ ID NO: 17005 - DNA, 122 bp, Homo sapiens
tcagcctcgtccgcggtgacctccctcctcttgggtttgaatggctgtgctgcccttggccggagctggcacagagcccaggagcagccaggtggcctggggctcagcggagcggtcagggt

SEQ ID NO: 17006 - DNA, 122 bp, Homo sapiens
caggcagagcaccactgtgatttgttctcctggtggagagagctggaaggaaggagccagcgtgcaaataatgaaggagcacgggggcaccttcagtagcaccggaatcagcggtggtagcg

SEQ ID NO: 17007 - DNA, 122 bp, Homo sapiens
ccgcctaatggcaggcttgtgggcgaagcgcacgtcgcagtaggagcagcggtagggccgcgctcccgagtgcaggttgaggtggtcgtgaagggtggacttctgtgtgaagcacttgccgc

SEQ ID NO: 17008 - DNA, 122 bp, Homo sapiens
ggctggtgccccgcgctcctgcgctgcagctgcactaacgctccgcggggagcgtgtgtgcgcactaacccgccgctctgtgtgttctcccgcggctgccgacttctcccagctgggacggc

SEQ ID NO: 17009 - DNA, 122 bp, Homo sapiens
cagttatctattcactggaagagatgtgtaacaaacaaccctaaactcactgaagtaaaacgacaatcattaccctcatgaattcttcaggtcaggacttaggacaaggcagagcaggcatt

SEQ ID NO: 17010 - DNA, 122 bp, Homo sapiens
gctggtgctggtggatgggcttggagccccacctgttgccagcagagggcagtggtgccacgcagccggggctccccagggtaggtttctctgcatctgggctgcttagttcctgtttaagt

SEQ ID NO: 17011 - DNA, 122 bp, Homo sapiens
ctagaagaaaacaccaaaacgcggtaaaattctgtatgtgggtccacttcccgtgtctggcgattaaaataagaatatattcttgcgatgttggattctgtcatcattggcgttaatatttt

SEQ ID NO: 17012 - DNA, 122 bp, Homo sapiens
agtcccgccacagcctcttcccaccggttccaaccagccccttctcctctctagggatgtcggactcggcactctcaccatttctaggcttccaaggggtcctggcatcttagctgtggatt

SEQ ID NO: 17013 - DNA, 122 bp, Homo sapiens
cagagaggcaagatggtgaccctgatctggagcagtcaaacattctcccagagacaaaaccggcctggctctgccctgccccgctgcttcattaccttggcccaggttccctaatgtctgtg

SEQ ID NO: 17014 - DNA, 122 bp, Homo sapiens
tcaggtcccacccggagcctcgacgctcttccttctgcgtcggagcattgtacccgcctccgctgctaccacgcagtccccagggcccaaaaccctcctcgcagctcgtcccccgccccggt

SEQ ID NO: 17015 - DNA, 122 bp, Homo sapiens
gtcccttgttctcaacatagctggggagagggtcttcgagcacagccgtggtcgacagagcgtaaccatgtccgccggtctggagggttagattccaggagagccacgtggctgcagcagaa

SEQ ID NO: 17016 - DNA, 122 bp, Homo sapiens
agctagaggtgtcacttcccccagggtggtctggaggcttcatggaagagttgtttctgccgttgatgggagagcttcttgctctgttgctcgtgttgcttgttctgagaggggagaatagt

SEQ ID NO: 17017 - DNA, 122 bp, Homo sapiens
ctccacctttccccagacgaggagtctggaactgagtctaaacagagttccgtcatgggccggtgcacggctgcagagcgtgcacgcagtcctccccaccgggaccgggggtcaaggaggct

SEQ ID NO: 17018 - DNA, 122 bp, Homo sapiens
ggctcagggggtcccctgggcaggcccccagagggttctgggggtgtcggtgggtggcgccgggagcggagctgctgccgagactggagttgatggcgcagttcagagacacgctcctcttt

SEQ ID NO: 17019 - DNA, 122 bp, Homo sapiens
gggaaggggatgggcagcagtggggcagtcagtgtaggaaggagtgggccggatgcatagcggttcaagacctagtaaggaaggcagcaacaggctggtcatgccaagtagggcagggacac

SEQ ID NO: 17020 - DNA, 122 bp, Homo sapiens
atgtcaacagctttataagccaagttattgccagtttggtgcctattacctaccctaatccggctttaaattgacttggaaaaacaaagacaacaaacttgcagccttgactgcaaagtgaa

SEQ ID NO: 17021 - DNA, 122 bp, Homo sapiens
tcggccaccacaataagtaatttacaggaagacggttcctgggttcgtcggctgccaatacggttctaggagcacaccaatggccccggaggccactcacatcactctgcctactcccactg

SEQ ID NO: 17022 - DNA, 122 bp, Homo sapiens
tgctgctgtcctcagaacatctgagccccaatgaaatcttacttttttgtttgtttagggcgggggttgtctgtttgttttagagacggcctcttgctccgttgcccaggctgcaatgcagt

SEQ ID NO: 17023 - DNA, 122 bp, Homo sapiens
ccgatgggcttcggcggccaagcccagctgtgcccagctccattccagagctcccgtggccgactcagcagggtgtcctgcctccatcagtggggctcccagaagcctgatgtttgaaagcc

SEQ ID NO: 17024 - DNA, 122 bp, Homo sapiens
atttctgctttttaaaaatgtaggccaaactaaacccatccctgggccaggtaggaaccgcgggtggtcaacctctactgtagtgttgattgctagagttgcaacttcctgagaagcctttc

SEQ ID NO: 17025 - DNA, 122 bp, Homo sapiens
tgcgcggtgcaggctgccgagagcccggccgggcaagcctttccgccgtggtcagtgactcgtttgcacaaggactttttagggaagagagaagccaggccttcgctgtgggcctagcccct

SEQ ID NO: 17026 - DNA, 122 bp, Homo sapiens
cttcgcctgggtgtaccggcacgagctgaagcacaaggccgtgatgctgcgctgccacgccgtgctggtgtccaagcccgaaaaggcgcaggccatggccctgctgctctaccagacgtcgg

SEQ ID NO: 17027 - DNA, 122 bp, Homo sapiens
gggagaagagactggaaaagttcaaaggtggagaggcggcagcgatctggagcacttttccgcacgctgtaacccctgagaagaaacaaagaggaaacgaggctgtttagataatcccgggc

SEQ ID NO: 17028 - DNA, 122 bp, Homo sapiens
gtgagggggctttcggggggtcggggcctccggtcgcggcggcgaagacagatcggggctcggtagggaggtcattccgagcccagagatcctaggcaccccccacacacaggctcccactc

SEQ ID NO: 17029 - DNA, 122 bp, Homo sapiens
gccagccagaacacaaggacagcaccctaccaggctccagggagagcattcctatagaagcggcagatttcccccctcacccctagctttaaaacaactgtgtatctttgggagaactttct

SEQ ID NO: 17030 - DNA, 122 bp, Homo sapiens
caatgcattttcattcttgccgaaatagtagcagctttgaggacagcagctgacagcattcggcgtatacctaaggagagttttttccccgaactgacagcaacgattccaaccacggcaag

SEQ ID NO: 17031 - DNA, 122 bp, Homo sapiens
ctttacttgcctcttactagtgctctcatgtttttcccttatttaagacaggctatgacacggttggggtgtgttatttctttgctagatttactgatatttctataggaaagtttgttttt

SEQ ID NO: 17032 - DNA, 122 bp, Homo sapiens
acatgatctggtaacttattttacaaaagcatttacatgaagtttcagtacatgttcactcgcccccttttctaagcagatcgctactcctgagtccctacagcatgaagatttaggtactc

SEQ ID NO: 17033 - DNA, 122 bp, Homo sapiens
aggtgaaggagttcactttgacagagcagagaaacagaatgagtcagcagcaggtccacacgctccttgttctacaacagaaaagctgctctgagtaactcatgcacagagtgagagaaaga

SEQ ID NO: 17034 - DNA, 122 bp, Homo sapiens
tccacctcagaccagggcagaagggttgggagcgggcatggtgtgggcccagccagctgccgttcatccagggacagagctgccatctgccaagctgatggtccttgctggccctccccgtg

SEQ ID NO: 17035 - DNA, 122 bp, Homo sapiens
ccggagggagctaggcggtccccacctgcctctcagagagccccagcgtggcggctagctcggctttcctccggatggtgatgtagcgactgtagtgaaactccttctccagctccagccgc

SEQ ID NO: 17036 - DNA, 122 bp, Homo sapiens
tgagatagtgactgacagccccactgggtactgggggacacttttccaatttgctgggcacgtaatggtttcttagggctgccacaacaaatcccaacttacttggtggctaaaagcaacag

SEQ ID NO: 17037 - DNA, 122 bp, Homo sapiens
aagaaagaaagcatcacattacacacagacgccccatttctccaacagttcatgaaaagacgggaagctggattccaagaggagggagtgagattaatgaagcaaccagagagatccatatc

SEQ ID NO: 17038 - DNA, 122 bp, Homo sapiens
caacggcgcacacagaaacttagcatcctcggggtgtgaaacgcacttgtgcgggaggcccgctttctcaacccacagcttccaccggccgactgcaggacatgagtatgtgtggattttgg

SEQ ID NO: 17039 - DNA, 122 bp, Homo sapiens
ttgtatgtggataattttatagttgaggaagtggagagacgggatttacttaaggtcatccgtgaggggaagggtaagttcaagcccatggatggcacagtctttctaccacgctgctggcc

SEQ ID NO: 17040 - DNA, 122 bp, Homo sapiens
ataagggataagtgtggtgctcaacacgtattacttgaacaaacattgaatatatacatccgcatttcagttcaagcaggttaatctctggtgacatttgttggggttaaaggacctcaccg

SEQ ID NO: 17041 - DNA, 122 bp, Homo sapiens
gtcccggctcactgcatcctctgcctcctaggttcaaggaattctcttgcctcagcctcccgagtagctgagattgcaggcaccaagcaccccatccggctaatttttgtattttagtagag

SEQ ID NO: 17042 - DNA, 122 bp, Homo sapiens
cagagaggactcatcaagttcagtcaggagcttacccaatccagggaagcgtgtcaccgtcgtggaaagcacgctcccagcccgaacgcaaagtgtccccggagcccagcagctacctgctc

SEQ ID NO: 17043 - DNA, 122 bp, Homo sapiens
tactagtccactcaggtagagccgagactcctgcaggtggaatcactgcataccaaaaagcgtgccttccgattagtggaagtttaatcaattgcgagtgctgtcacagcttaatcatccag

SEQ ID NO: 17044 - DNA, 122 bp, Homo sapiens
agtgagtagaacacagggccaggcagggccgaaatcgtggttcatgaggctcggggaggtcgaggaaagcaagcgaaacccagagaactagggcagcactgccaggacagtgctaacatcac

SEQ ID NO: 17045 - DNA, 122 bp, Homo sapiens
ttttagtgggaggtgtgaggtggtgacctctccccacagatgtctgccctggtgcagctgcgtcctgtggcaggccctgtcctccccggatgccccccccagacaccctggccctcaccgtg

SEQ ID NO: 17046 - DNA, 122 bp, Homo sapiens
aaacaaagaatgcttctacaggtaaagaaggacgctttataatgataacggatggaattacgatgctaagagctggatccatcgggaagagtgacagttgctagcacatgtgcaccggaagt

SEQ ID NO: 17047 - DNA, 122 bp, Homo sapiens
tcagttagttgactttttgtactttataagcgtgatgattgggtgttcccgtgtgagatgcgccaccctcgaaccttgttacgacgtcggcacattgcgcgtctgacatgaagaaaaaaaaa

SEQ ID NO: 17048 - DNA, 122 bp, Homo sapiens
cagtgtgttctgagcatctctctccgcatcatgtatttcatagcctgcttcatttcatgtcgtgacatgtggtgatcaattgctcatgtgacttcaccttctaccttgctggctcaccaggt

SEQ ID NO: 17049 - DNA, 122 bp, Homo sapiens
gcagcagtaagagccacttctcgcctcccaggcagtgccaactctgaaatcttagttacacgcagtgagacagaatctcctccgactgtttccagcaagcgtgcttggccggctcccacgtt

SEQ ID NO: 17050 - DNA, 122 bp, Homo sapiens
gactcgcacccgcatccgagagcgcggaggtcgcgcagcccgggagaagggagcctccggcggctgcttcctagagtccacagtgcgctgtctcctttggctgaggagagtgtcctggcccc

SEQ ID NO: 17051 - DNA, 122 bp, Homo sapiens
gaatattccgcggggccgccgcgtgccagggaagccgcctttggggtggtctgtcagaggcggtttgtgcattctgaggaacacaggagtttcattgcagcaaaacagatgttcatcttgtt

SEQ ID NO: 17052 - DNA, 122 bp, Homo sapiens
tctccttgatcaacctcacctgggtactgtgcgtgtctgcaaaagatcctgaaagtgctgcgactttattggtaaccttttgaggttaccaatacattttagtgaataggcaaattctcaga

SEQ ID NO: 17053 - DNA, 122 bp, Homo sapiens
aatgggacggtgatatacacacttgggacattgtctacacatagaaaaattccctacacgcgggaaaatgggacggtgatgtccacgctcgggacattgtctacacacagaaaaattctcta

SEQ ID NO: 17054 - DNA, 122 bp, Homo sapiens
gctccaaaacgcggaggtctttagcgtcccggaccaacgagtgccaggggacaatgtgggcgccaacttcgccaccagccgggtccagcagccccagccagcccacctggaagtcctccttg

SEQ ID NO: 17055 - DNA, 122 bp, Homo sapiens
tagaaaattcactcagagccctggcagaccaaatgcagagctaagctttccaaagtttatcgtgaatataactcacctggggcaggctctaatttagtggggctggggttcacctgagattc

SEQ ID NO: 17056 - DNA, 122 bp, Homo sapiens
agcggggcctctccccagcgagtggggcctgaggagtggcccgtggggaggcaacgcgctcgcctctaatgccgtgagcccccgccaggaaaaatcccagggcggatgcacactcgcaacac

SEQ ID NO: 17057 - DNA, 122 bp, Homo sapiens
aaaaggcagaaagtattgaatgtgtgccctgtgccaggcagtgtgctcagtgctttaactcggtaggctaatcttcactggataaatcaggaaaccaagctctgaaacatttcagtactgtt

SEQ ID NO: 17058 - DNA, 122 bp, Homo sapiens
gagagctctgccatgactcctaaccgggtggacaggggggccgggcagccgcggcgcacacgctgggcgtcgtccctagcagcagaggagaccagaaggtgagagtccccatgccgcagccg

SEQ ID NO: 17059 - DNA, 122 bp, Homo sapiens
agcacctctgatgaattatctcacttaaccctcaaactaacactggaaggcagttattatcgttccatacgataggtgaggacatctgcactctgaatagttaatcgcttatctgcatctat

SEQ ID NO: 17060 - DNA, 122 bp, Homo sapiens
tggaaccccacgcacctccaggccctgagcgaagcctggaagctgcggggcgaagcggagcgcgagagaggttgcgctctgcgggtcgggcagccggggctcgctgcaggcccatggcgccc

SEQ ID NO: 17061 - DNA, 122 bp, Homo sapiens
acgggcgcgggccggcagggggcggggcgcaagtgcgtgggggcgtgcccagggggcgggcgagggggcggggcgaagcgagggtgcgcgccgctgttcgccgcgggctgctcgcgcgcacc

SEQ ID NO: 17062 - DNA, 122 bp, Homo sapiens
ttggctggggcctccctcccgctgcatgacgtccacaaggctcagcaaatgggctttctccgggaccacgttccatggcacgtcaatggtggtgatgcttccatactgcagcactgacacct

SEQ ID NO: 17063 - DNA, 122 bp, Homo sapiens
tcatcacagcgcaacaaagtgaacaacttgagggcaagagaccctcggtcgggctgtgttcgctttagggatttccaagggcataacttgggggaatggtagagacttcttgcttgccagcc

SEQ ID NO: 17064 - DNA, 122 bp, Homo sapiens
aagggggctgctccatcagccaatcccaaagcctgaattgggggttgaggagaaatgaagcgtcagctcacacaccttcctggccggttctggctgtggcccagcttctctgtagcgtccct

SEQ ID NO: 17065 - DNA, 122 bp, Homo sapiens
ttgctgtgcgtgacggaggacagccgccgctctctgcgccgctacgcttcacctagtcttcgcagacagcctgcaggaggcactgccagacttcagtgacagtcctgtgccctctgattccc

SEQ ID NO: 17066 - DNA, 122 bp, Homo sapiens
gggggtggctctggctggcctgggaggagacaggtgtctttgggcctcccagaggcggggcgcctggagcctgtgatttgtcagggaaatctcagccacctgctcccctcatgcaaatgacc

SEQ ID NO: 17067 - DNA, 122 bp, Homo sapiens
tggagggggcggggcccgaagcggaggcggagcttgggaaagcctggcgtgagggcggggcggggccagaggtgggctgaggccggatcaggcggtgggggcggtccccgtagccccgtgag

SEQ ID NO: 17068 - DNA, 122 bp, Homo sapiens
agcctgcctccccgcctcactggcaaccacagcctgtggtggaagtccggagttagtacacgtcattgacaaattgcccaggaagcagccgggcccctgatggaaaactgcccatctcagca

SEQ ID NO: 17069 - DNA, 122 bp, Homo sapiens
tgggagctatcattcccattttacaaattaagaaagagtccaggcatggtggctcacgtccgtaatcccaaccctttgagaggctgaggccagaggatcaccggaggccaggagtttgagac

SEQ ID NO: 17070 - DNA, 122 bp, Homo sapiens
aatccacagcctgccacagcagatttgctaaaaagcaaaggcaataataaccctggggtccgtccaactcatgccctgtacccaggccctaggagggcgagggcttagtaggtatcttcagg

SEQ ID NO: 17071 - DNA, 122 bp, Homo sapiens
cctcccactggccagtacatctctccagcctggttctggccaagatggagctagaaggcacgtctcccctatcctccctaccatccctggactcagaccaggtgtttggcaacgtctttgag

SEQ ID NO: 17072 - DNA, 122 bp, Homo sapiens
ttctggagcttttatatcttcttgcctcaggaattaataatctttactttagtcacaaagcgataatattatttgagaaaaacaatccatccataaaagtcttatctacagtgaaaaaaatg

SEQ ID NO: 17073 - DNA, 122 bp, Homo sapiens
ttaaaatacacgtattcacgacaagcaaatcaaggttgttctttgaagtcacaaatgcatcgacattcaatttttcagcaattcgcttttgaatactggggcattatttgcatattttgaaa

SEQ ID NO: 17074 - DNA, 122 bp, Homo sapiens
ctgaattcggtttaatggcaatctagcctggcaaacagattctgcttatgtcagctggagcgggcagcttggaggggaacccccagaggtgctgtgcctagcagtagggatgggtgagagtg

SEQ ID NO: 17075 - DNA, 122 bp, Homo sapiens
agtattaaaaaaggaatgtgaacacaagtttaagaggattgaggaaggctgggaagtttgcgggaagaagaaggaaaatagctgactaaatacagactttcatcccaccctgcttggtgccc

SEQ ID NO: 17076 - DNA, 122 bp, Homo sapiens
aaactagtcaattaagtcatcctgcccacattgaacattacttttttcaagcatccctgacgcattatcttgtgtagaaccatattacaaagaatttatagtgcgaatagagctcacacctg

SEQ ID NO: 17077 - DNA, 122 bp, Homo sapiens
gtctggattcacacccgtgtgtggctccagcctgcctgctttactgctctgctggtctgccgccccatctctattgacatggaaagatgcttatggggtaccactaagcacattcaaaaaca

SEQ ID NO: 17078 - DNA, 122 bp, Homo sapiens
agtcgcagctgtttgcagttctagatacaggagttacagctggaggctgagctctctcaacggaggaagcagcggcatgagggcctttgcagaaggagctgacggggcactggggtggcaag

SEQ ID NO: 17079 - DNA, 122 bp, Homo sapiens
ctctggagaaaaacaaattttccagatatttaagtgaagaattatcctagcaaaggaaatcgcacaatagcatgaacagaggtttgaggacatgagaaagaatgtcctgtctggggaactct

SEQ ID NO: 17080 - DNA, 122 bp, Homo sapiens
ggcgtggagaccccgcccggcgcagaacgcgctggccagtgggcagcttgacagggtccccgtgtgcctagcgaccctcttcagcgctgcatccatgagaggttataaatgaggcggaaaga

SEQ ID NO: 17081 - DNA, 122 bp, Homo sapiens
gggcgccgccgctcctcgcttaagggccactgtgccgcggtgactggtggagctatggggcgtggcatctgccaaaaccaatgggaggagaggacgaggccggcgagccaaagggactacaa

SEQ ID NO: 17082 - DNA, 122 bp, Homo sapiens
tccttttgctgccatatgcacttgtgccttctctaactacagttcagcacaaacctcaggcgggcgatttggcaggcaaacggtgcccaggcagccgggtaacctactgggtcccagtgggt

SEQ ID NO: 17083 - DNA, 122 bp, Homo sapiens
tgagcacgcggtccgcttcgcccgcagggggcaggcgcggaggtccttgggggacctgcccggaggcctggagggcagcagcgctgtcgcccaccttctgaacagcatcacggaacccgcgc

SEQ ID NO: 17084 - DNA, 122 bp, Homo sapiens
ggggcctggcttccacacggccctgcccctgattgagcacaggaggccgccgtgctctctcgcatcagctttcagaaaggctctcagttccggagggagagggtcagagggctgaccgctgc

SEQ ID NO: 17085 - DNA, 122 bp, Homo sapiens
caaatccatctcatttcatcctcacagtactataggagggctgccttacaggctgtcattcggaagggttggggggactggtcctgccagacaatttgcgaaggtcggggcatcaaaacttt

SEQ ID NO: 17086 - DNA, 122 bp, Homo sapiens
cctgctcattgcctgggtctccaggctcagtgccacccaaagctgcagagctatccccaacgccctcccagctgcagggtgtccccattcccaaagttactcttcccacccccactgctttt

SEQ ID NO: 17087 - DNA, 122 bp, Homo sapiens
gaaagctgggtagatatctttagatttttttccctgcccactaaaggcctcagcgtgaagcggcctttccccaggaacatccccaggtctcccccacgcgaggctcaggcccggctgtcagc

SEQ ID NO: 17088 - DNA, 122 bp, Homo sapiens
gggtcccgccctcagaatcagcttcccaggacaggagctgtgtgtctctgcctcccttcgcgtggggcaaggggctgcgggaccagcggcctctcttctggcaggagggggggttccccgga

SEQ ID NO: 17089 - DNA, 122 bp, Homo sapiens
ctccccagctcaggcctacccagggacgaagctggggttgcacaccggctccgggaatggcgaaataccgcagatggggtggtgggggtgggaatatcgcgaccaccagaggctgggttccc

SEQ ID NO: 17090 - DNA, 122 bp, Homo sapiens
gtacttctgaacatttactgaaggtggagggccctggacacctgatgttatcttatgtggcgttatctgggtcagatttcattgcatttcctgaagaggtaacttggcagtcctgggagagg

SEQ ID NO: 17091 - DNA, 122 bp, Homo sapiens
tcttcagaccagacctcaaataacaattttattctttttaataaataagacctcagtaggcggacctgataacagtgacaatgaaaggaaaatagtggcaaaatgtgagtttccagcatgat

SEQ ID NO: 17092 - DNA, 122 bp, Homo sapiens
tacagcccacttctattaccatcagaattcctcctaaaagttgcctgcattctctgtgtacgctcacttcccatcctcttctcttcaaatggctctgatggagctttcctccccacccagcc

SEQ ID NO: 17093 - DNA, 122 bp, Homo sapiens
gtgccagacagtgggcgcaggtcagtgggtgcagcgcaccaagcgccagccgaagcagggcgaggcattgcctcactcgggaagcgcaaggggtcagggagttccctttcctagtcaaagaa

SEQ ID NO: 17094 - DNA, 122 bp, Homo sapiens
ttcatggggttgttgggatgggactatgccccaggacccagcctagcccgggcacagggtcggagctagagacaaacactgttgtgggtgctcaatgggctaagaaggagcatctcgcctgc

SEQ ID NO: 17095 - DNA, 122 bp, Homo sapiens
gtgggcaggagctgggacttctaaccaatggaacatgggaaaggtgatgacacttgactccggtgatgaggttacctttcacaagacctggccaactgagaccggatctccttacaggcttg

SEQ ID NO: 17096 - DNA, 122 bp, Homo sapiens
cagccccggctgtcccaaggctctccctccgccgcccaagctcgtcgcgcggggaggcagcgcctggcccgagcctctgggtcctgacggactgttcctgtcccttgtacgagcgcccggga

SEQ ID NO: 17097 - DNA, 122 bp, Homo sapiens
gaagaaaactcactgcagcaacaggccctgacagcagcactttcattacacgaacagtcacgataccttttcaattttgctcatctcttagtctctagccaaatggaacttattacttatag

SEQ ID NO: 17098 - DNA, 122 bp, Homo sapiens
tgtttggggggttccccagatccttcttcaccgcctaccaccggaagatccccaaggctccgggcttcgaccagcggctgctgctctaccagctgtttaactacctgaaccactggaaccac

SEQ ID NO: 17099 - DNA, 122 bp, Homo sapiens
acgaagggcttttctgagaaggggctgccatcaccaggtccaagttctgaatactttttccgggaaaaacgggagggggaggcacaacataattattccttattcatcgaacacctattgtg

SEQ ID NO: 17100 - DNA, 122 bp, Homo sapiens
cttctcaccaactgccggttccagcgcacctgcttgggccgaaggagtgtaggctgcggccgggaggggctgtaagattttcagtagcgaaaaggtgtcaggaaagacttttcagttaaact

SEQ ID NO: 17101 - DNA, 122 bp, Homo sapiens
cagcgaggcccaaaacagccagttcacgagggtccagggccgccgggggggcaccatgggcgtctctgggaaggtgcccgtcctgtagtactcctcctgaaaggcatcctgggggacaggaa

SEQ ID NO: 17102 - DNA, 122 bp, Homo sapiens
aggtagtttgaataaaaatatctttaacagcttggagctattgagacaggaacacttccacgcacatgcacagttaaacaacttgagtgcaacacacaacattggcactaaacgagattgaa

SEQ ID NO: 17103 - DNA, 122 bp, Homo sapiens
atatataagtatacacacatatgtgtgtctcttttaaaaattctctttttccccctacttcgcagccaaggggtcctgtccctggacagaaaataaaggcttagccccctgctgcccctccc

SEQ ID NO: 17104 - DNA, 122 bp, Homo sapiens
agaagcctcagccctcggggacagaccgaaggccagggctgtacctggctcagaaccaggcgccaagcggcacgggactctccttctgcactcgcagcgcgtgagtgcaattggagatcctg

SEQ ID NO: 17105 - DNA, 122 bp, Homo sapiens
gagggcaccacagtcgcagaatcggaactcctgtgctttgtctcgggctctgggtcccagcggggccgcccggcggagccagagacgtcacggggtcgctgtctccggagcagcccctgggt

SEQ ID NO: 17106 - DNA, 122 bp, Homo sapiens
gggccgcggaggggcgaggggccgggccgggccggggtcccgggggggtggggtccggggcgggggctccgaggcggtgtgggtgggaggtggagcggtgggccgggggcgttcgccctgag

SEQ ID NO: 17107 - DNA, 122 bp, Homo sapiens
aaactgcggggagtcggaatcctcttcgggaaacgtttgccaagctgaggacggtggggacgctggcggtgtccctggtggagaatcccctggtgagtagtcctgaaacacaagcggaaggg

SEQ ID NO: 17108 - DNA, 122 bp, Homo sapiens
cactgcagcctcaactttctcggctcaaacgatcctcccacttcttttttttatttgagacggagttttgctcttgtctcccaggctggagtgcaatggtgccatcttggctcaccacaacc

SEQ ID NO: 17109 - DNA, 122 bp, Homo sapiens
gggcctctgcagggctgagggccttgcaccaggagggtaaatgaagacgaacttcaccagcgcccactcctagggctgaccctagagctggagacaagatcagtccagctgggggccgtgat

SEQ ID NO: 17110 - DNA, 122 bp, Homo sapiens
ccccctcggccgcaggagctgcccagggcttcggcggcgggggtggcgcctctccgggtccgaggggcccctggcttcacggcctctgccctcgaccccctagccccggcccgccccacctc

SEQ ID NO: 17111 - DNA, 122 bp, Homo sapiens
gcgcttaactcaggttgggtgacattttcgctcgccagttcctggcatcagtgagtgctccgtcaatgtttgacaaacggttgactccactgccccgcgctgtgggcgcactagacttcggg

SEQ ID NO: 17112 - DNA, 122 bp, Homo sapiens
ggtgcatggctgatggccgccgcaggacacaagagggtttcgggggcgtgcctgggctgacgtgtctgtggacacctctgctgggtcatttctgagtctctgtagcatgagcttggtgggcc

SEQ ID NO: 17113 - DNA, 122 bp, Homo sapiens
ttcctcaagcctcagctttactattttcttgaatggctaaaactcacaaaacacatctagcgtcaaaaactttgcgaccccggaagtaaaaggttaaggaagggggtcacaggagaaggcta

SEQ ID NO: 17114 - DNA, 122 bp, Homo sapiens
tcctaaaagctcaatgtatgaatagccccgggatttccaaattccgtcggatcgggaggccggggacacggcccgatcggcctacccaccatccctacagagcttcatcggcccattcctgt

SEQ ID NO: 17115 - DNA, 122 bp, Homo sapiens
ccgattcacggtttcgtggtactacaggatgaaccggcgcagcgacaatgtggtgaccagcgagctgcttgcagtcatggacggggactggacgctaaaatatggagagaggagcaagcagc

SEQ ID NO: 17116 - DNA, 122 bp, Homo sapiens
ctctttgatatggacttgtactaatgaactacaattcccagcatgcgtcagaattagggccgtagagttttttaaaatatggactacaactcccggcatgccacaccaggattcgaggacca

SEQ ID NO: 17117 - DNA, 122 bp, Homo sapiens
cgtggaaacacgtacaacacatcacgaacaggagtaacacgtcgacctcggggcttctgacgtcatcccctcccgggatgttcaccagggaggttttcagatgagcaaaaagcagaacacag

SEQ ID NO: 17118 - DNA, 122 bp, Homo sapiens
agtccgcgaagtctgaactgcctgacaaagggggacccggtggcagcgctcgactggagtcggttgaggtcctgaggtcccccggttctggaaggctggccggggagacaagagaggagcct

SEQ ID NO: 17119 - DNA, 122 bp, Homo sapiens
tcctagcctttgactagagcctgcgcagcatcccagtcccaggctagggcccaccggtgccgcgcagcctcctggaagctgtggggagtagcgttcctccgctccagaactacaactcccag

SEQ ID NO: 17120 - DNA, 122 bp, Homo sapiens
tagatgtcaaaggctgaagctgctccctttgccacattataactagtaggggatcctcaccgaccatggccacagctgcctcgaatccctacagcattctcagttccacctccctagtccat

SEQ ID NO: 17121 - DNA, 122 bp, Homo sapiens
gccaggtgggctgcgtccacgcgggccacaagtacgccgctggccacactgttcacctgccgccctgccgggcctgccactgccctgacgccggtggagagctcatctgctaccagctcccc

SEQ ID NO: 17122 - DNA, 122 bp, Homo sapiens
ctaggccccggccgcactgtcctctttggcgtgcagcccaaattcaccaacgtggacatccgcctgacgctggacgtgaccttcggggccgtggacctctatgtctccacctcctatgacac

SEQ ID NO: 17123 - DNA, 122 bp, Homo sapiens
accctggcatagtagagctccgtgaggttgcccgtctccaccgtcaggttgcaggacttccgggtgatccgctgacagcccttctttgccacccagtccctctctccgtacctgcaggtcag

SEQ ID NO: 17124 - DNA, 122 bp, Homo sapiens
ttcacggagctaaagatccagtaaggacttcacccagcgagaggcaactacgccgggcttcgatacccaatacctctgcagaaaggtggagtggcaggaatctcctgaagcctccaacgtcc

SEQ ID NO: 17125 - DNA, 122 bp, Homo sapiens
acagccaactccgcctcagaggagtcttttagggctctgagcgagtggcgaatgctcccccggtgatgcactatcgctcccacccacgccctggtacgcgcagcccgggaaaaagaaaaaaa

SEQ ID NO: 17126 - DNA, 122 bp, Homo sapiens
gcttggcaaggccaaaaaggtctggaaccaaaagaattcataagaacatcaggcctgggccggtgggcacctctccctctgtctgctcagggactccccagtcacttcctactgttggattc

SEQ ID NO: 17127 - DNA, 122 bp, Homo sapiens
agcaggaaccaggaccaggggcagagacgatcttgaagataagtcagaaaagtcatttcacgctaaaggtcctgtgggtggtgtcagagcagatgaggcctcgcttaggagagcgaaacaca

SEQ ID NO: 17128 - DNA, 122 bp, Homo sapiens
ttcgggcagggaggttgagcctggggaggatcggacgatacgatatgtccgatatgaatccgagctacaaatgcccgatatcatgagactgatcaccaaagatctgtccgaaccctactcca

SEQ ID NO: 17129 - DNA, 122 bp, Homo sapiens
agcggacctgcccgggaggcggacgatagcagccgggctgcccatcgcggggaggggttccgcccgggacccgattgccggcattggtagcgccgtgccctgtgacctccaggcgaggccct

SEQ ID NO: 17130 - DNA, 122 bp, Homo sapiens
tcggggcagctccagggggccgcgtacctcccgcttcacggctacgcgtgggggcggctccgtcctggcctcaccagcctccccggagcccctgccggtccccagcctgggggctcaggggt

SEQ ID NO: 17131 - DNA, 122 bp, Homo sapiens
cctcctcccaccggccaccccaaggatctcctacgctgctccgggcagcgagaaccgcaacgcccgctcacctgaccaggccgtaacccgccgcactgccaccccgtcagccccgcagcgac

SEQ ID NO: 17132 - DNA, 122 bp, Homo sapiens
actgaggatttcacaaaggcttctccggctgagactgatgcaaggacaactgcgtgtccacgtgggaaatgaaggtcacccgactcacaccacaccccagccggctcagacactgaggaccc

SEQ ID NO: 17133 - DNA, 122 bp, Homo sapiens
ctgcgccgtcacgatgttgtggtccaggaaggcggtcacctgccacatgggcagcccgcacgccaggatcagacccccccagcccaccaggcacagcaccaggcccaggatctccaacgctg

SEQ ID NO: 17134 - DNA, 122 bp, Homo sapiens
ttcaaaactaagacccaagagggaagtctgacgaaggctggcggagacaccggccctccacgtgggtctcagagcaggagacagacagagacactccaacctgtggctggacgtcaatccat

SEQ ID NO: 17135 - DNA, 122 bp, Homo sapiens
atgtagctgtgtacctttttcactgttagcacctctgtaacagttacattccagcaacatcgagtcccagctgccgatggctggcggcgcaaacactccctgccctagctatgtaagttccc

SEQ ID NO: 17136 - DNA, 122 bp, Homo sapiens
ggtcaggagagacctgggaaccagtaggccattcttagaactccaaaagttggccgggcacgtggtgactcacgcctataatcccagcactttgggaggccgaggcaggtggatcacctgag

SEQ ID NO: 17137 - DNA, 122 bp, Homo sapiens
acctggacgaaggcttgtcctacacgagcatcttctatccggttgaagtttttgagagttcgctttcagatcctgggcccggaaagcaagatgacagcggccaggatgtccccctgagggtc

SEQ ID NO: 17138 - DNA, 122 bp, Homo sapiens
tagtcattgaatgatctgttgaatgggtataactctgatgggagcagagagttctagaatcgggtagtaagagacaaaggagggtaacagtactgcatttcacaaaatgaaacccattgtta

SEQ ID NO: 17139 - DNA, 122 bp, Homo sapiens
aagctcaagagtatttataggaatgcaaaaacatccagtacccaacaaggtaaaattcgacgtctgggatccaatcaagcccctggccaagggaaggaagcagaaatgaagagggagaaaca

SEQ ID NO: 17140 - DNA, 122 bp, Homo sapiens
gccatccgcacccagccggccgacgtgctgcggtggtccgcggggtaagcgcccttggcccggggagctgtccggtctacatgcccaagccagacgagcccagagagccctcctcccggacc

SEQ ID NO: 17141 - DNA, 122 bp, Homo sapiens
tttatgggcagaagggcggcccctgccctcatgtgacctcccttccctctctgtgcccagcgtggggtcgtgtgggaggaggtgcttatcatgctacctgaccacgtttctatcatccttct

SEQ ID NO: 17142 - DNA, 122 bp, Homo sapiens
gaaaaactcccccatcccacccttagacctccagtctcccagccaagccctagctccgggcgagatgcgttctcttcagaaaaacgctgagaattctcagcttccagagacagcgagtccct

SEQ ID NO: 17143 - DNA, 122 bp, Homo sapiens
aggagcgctcctcctgtgggtggacgcattcacgcactcccaggttgcacctgctgctggcggtgagcagggggttcagcagcttgaccgatgccccccgagggggctctccccagcttaaa

SEQ ID NO: 17144 - DNA, 122 bp, Homo sapiens
tggatgagtggacctacaaagttcaaaccggtgttgttcaagggtcacctgtacaaaaaacggaggtgatatgaacatgattgagattaggaatgaaggagaatctgggcatggtggcacac

SEQ ID NO: 17145 - DNA, 122 bp, Homo sapiens
tcctccatcagcgcgcggagaaagcggtgtgaaggctccgctgtcgccctgggcccagcccgcgcgcctcgcacgttgtgcgtctaccccacagccaatcagtggctgcacaggcctcttta

SEQ ID NO: 17146 - DNA, 122 bp, Homo sapiens
catcccctcggtcgctggcgcagattgatcctggagctagttacgggtgttaaactggtacgcgggtggggcaattcattaggcaagaaatggattagttgtttattatctataaacattcc

SEQ ID NO: 17147 - DNA, 122 bp, Homo sapiens
tctacatcttggttaatgatttacttatccacctagaaatcccagccagaaacctgccatcgctgttgattcttcctcttgttcagcatttatacccaatgaatctctcctgaccatcagtt

SEQ ID NO: 17148 - DNA, 122 bp, Homo sapiens
aaagatcgaatactcctggagcatccagcatgggcagtgtggacgggcaggtggtgtggacgggcaggtggtgtggacaggcaggcggtgtggatgggcgggcggtgtggacgggcgggagg

SEQ ID NO: 17149 - DNA, 122 bp, Homo sapiens
acagccaccccctctcccgggggtgtgcaggccagggactggccaggcagccatggctgacgagaagaccttccggatcggcttcattgtgctggggcttttcctgctggccctcggtacgt

SEQ ID NO: 17150 - DNA, 122 bp, Homo sapiens
ggtcccatgcagtgcctcacatttcataaggttttgttgtattaacatttcagggtgtatcgaaccttaagaattgatgcaagtaatactatttcaaagctctacacatagggtccagttat

SEQ ID NO: 17151 - DNA, 122 bp, Homo sapiens
ctctggtgtcagctcgcggcggccgggtaaaagcagtggcgctgggggtagagttctactcgccaccctgttcgcaaactgaaagatccccgagtttagaaagtgtcttgccgctctgcgga

SEQ ID NO: 17152 - DNA, 122 bp, Homo sapiens
ttaatgaatcctacttcgtgaatgaaagtgcgcccggtaagtcctaaagcaacacgccttcgagttcttatgatgctaagagaggctgattgcagttagtctggaagtagctgcggggcgca

SEQ ID NO: 17153 - DNA, 122 bp, Homo sapiens
ggcccgccgcccagcgccaagaaagcgggtggccacatcgaagtttctcaacgggaggagcggattcgtctggagacgccgccttctccccgcgcctcttcttccagcactgccacacgggt

SEQ ID NO: 17154 - DNA, 122 bp, Homo sapiens
tgaacctgggcgaggcgcggagaggcggcgggaaagagcttcggctgggccgcgggctggcgcacactctcggctgcaacctcaggcaccgactccagctgcgcgcaagatggcggccgtcc

SEQ ID NO: 17155 - DNA, 122 bp, Homo sapiens
attaggcacaagtgcaagccctcagaaaactatgtacacctagagagagagagagacacacgtctgtatgacagagaggcagggtttgggaatgttctgatttcatgttttgaattggtgtg

SEQ ID NO: 17156 - DNA, 122 bp, Homo sapiens
tgggctactcaaaagagaggtttctgagtttgcactggataaagggggcagagggtcatacgtggagggaaaagagccttagagactcccctttgacacagggaatgaaagaacacgttctc

SEQ ID NO: 17157 - DNA, 122 bp, Homo sapiens
tttgacccagcaattccactgccaatagaaataaaaacatacatccatgcaggcggggcgcggtggctcatgcctgtaatcccagcactttgggaggccaaagcgggcggatcatgaggtca

SEQ ID NO: 17158 - DNA, 122 bp, Homo sapiens
caactgcttcaggaatgggcctgagatcccatgcaggtccctgagaagtgagtaaaagtccgcagaggtggggatggaagatctctccttagatagaacctgtcttcctccctggcattgtg

SEQ ID NO: 17159 - DNA, 122 bp, Homo sapiens
gggtctgggcctgtggaatgaagcagaagacgtcatcgtgaaggaatcagtttcaggtctcgcgagagttggcacatgccacgcgagggccactgccctattggcttctgagtcacggactg

SEQ ID NO: 17160 - DNA, 122 bp, Homo sapiens
tcccattacctttgctcaggcactgggcagcataacacagacagcaacacccagttgcatcgagacccagagctgctatagcatttttttttctctatggcttctttgtttgctggaatggg

SEQ ID NO: 17161 - DNA, 122 bp, Homo sapiens
agggttaggatctggaagaagtaggacaggaagcagcagctctctctgtttccctgaccccgagaacagggctagacttcctgctggggtacagaggctgctgtctgcagccttctaggtgc

SEQ ID NO: 17162 - DNA, 122 bp, Homo sapiens
acgcctcaggggtgtcttcccatcccaggagcccatggaggccttcaggacagggctgtgcgagaggaggtcgtgcccacgagttcctgcccggtgggaatgagcagggggcgggcgggggg

SEQ ID NO: 17163 - DNA, 122 bp, Homo sapiens
gtagttttccggcctggctcagggctggctagatgtgccgtcatttcaaatgtaaggaagcgccgggcagatctgttgtcggcggggggcctcgcacgcacgcgcccgcaggcggaggacag

SEQ ID NO: 17164 - DNA, 122 bp, Homo sapiens
ggagccctgagccggtacagcaggctccggtgggggaagtgggcagaagagtgatggagccggatgatcagggaagagcttccaattctcagctccaggctgtcccctcttgtcccagttca

SEQ ID NO: 17165 - DNA, 122 bp, Homo sapiens
gtgcctggccgaggcccccgggagcgagtcgcccttacgtgctccagcttgtctttcctccgaagccagacgctggcgctgtagtcctgctgcttgacgctgctgtagaagttcgcgcccac

SEQ ID NO: 17166 - DNA, 122 bp, Homo sapiens
aaaggggtgacggaggcacccggaaaatcgggtcactcccacccgaatactgcgcttttccgaccagcttaaaaaacggcccaccacgagattatatcccccacctggctcggagggtccta

SEQ ID NO: 17167 - DNA, 122 bp, Homo sapiens
cctcttcctcccctagctgtggctggaacctcacaacccttactgggttcagcttacagtcgtggcccacctctcaaaacagacagaagaccctcaatactcctcaccacttcccccctccc

SEQ ID NO: 17168 - DNA, 122 bp, Homo sapiens
agcccccgagggggcggggaggagcggtctcgccacgagcagggcaacctagtgagaccccgcagcatcgcgggcagccggggaggacccggcacttacctgcgcgcggcgactggacgggg

SEQ ID NO: 17169 - DNA, 122 bp, Homo sapiens
ggatacacagaaggtacatcttcaagaggctctgggcctgactcttctcagagagcatgtcggctttttcttcttacctgtattttacaactacaagataatttctagataacattttagca

SEQ ID NO: 17170 - DNA, 122 bp, Homo sapiens
aggttaagaaaaactcgtaaggctgtgtcaattcagacaaaggcattcttcccattcaaacggttcaccggtgcatgaatcttgaatttgaccatctggggaaggggcgtggcctctcctga

SEQ ID NO: 17171 - DNA, 122 bp, Homo sapiens
ggtcaagatctacagtgttatgttctaggctaaggaggatggactataccccatggaaaacgctgaactcttacagacttttaagctcttagggcatgtgaaagatggcatgagcaaggggc

SEQ ID NO: 17172 - DNA, 122 bp, Homo sapiens
gaagagtaggtggtgtcccgccaaagggtgggaggggagattccggagacacgtgtaccccggttacacccccggaatctgggcttgggcggcaccccctgggctgcctccgggccctgggc

SEQ ID NO: 17173 - DNA, 122 bp, Homo sapiens
ctatgacaccggaagccggaagcgtggtagggaagggcgaccgcgaaactgggactttctcggagcgccggggccctaccagcgttcacagtccgccgctcccacccttctcacgtctgacg

SEQ ID NO: 17174 - DNA, 122 bp, Homo sapiens
tcaaccccgcccaaagcacgtgtcggctctcctggttcccagatgctctggctctggctgcgaggcccagctttcctgcctcccttgccaaggagggacaagtgaggggaagctgccagtcc

SEQ ID NO: 17175 - DNA, 122 bp, Homo sapiens
ccgccagcctccctcgcgctcctgtcttctttgtggtcgctggctctcctcctcccgatccggctgctggggctgcactgcagagacacataataaagccaggcttggctggaaatgtagcc

SEQ ID NO: 17176 - DNA, 122 bp, Homo sapiens
gtcctgcctctggatccctcctttcatgccactgtaagcttgcttcaagctagcccaccccgttttgtgaagtgtgtatgaaagtcaggtgctgtctttgttctgggcccagccttttggac

SEQ ID NO: 17177 - DNA, 122 bp, Homo sapiens
ctttagccaggacaaaagaaccaatttcaacatttggtttcagatacccagggtttattacgtgcttaaagtatgtctggattcttctttttgcagatggaaattcaaagatccaggtcatg

SEQ ID NO: 17178 - DNA, 122 bp, Homo sapiens
atattaagaacttgcattgatattctgggttctgtttcattttttagggtctcaagagcacgctcaagtcattcacatgtttccatcaaatacagacacagatcagggaagattaaacccta

SEQ ID NO: 17179 - DNA, 122 bp, Homo sapiens
tgtccatcaagcacgcgatggcctggaagagctcatgaccggtcagcgccaaggagcgggcgggacgaagcggggctgggggtggggagcgcaggccggggtcggggcagcgcaagcgggga

SEQ ID NO: 17180 - DNA, 122 bp, Homo sapiens
tttccttagtgtttctccttctccactaaatataagctccaccagtagctatttgtatctcgttcacccactgcatgcccagagtctagaatagtgcctggcacatacattcctttatgtac

SEQ ID NO: 17181 - DNA, 122 bp, Homo sapiens
catgaagcggtgcacctgggagtggaccgagattgtgtgacccagagaaccggctctccgcgctcagctggagcaagcgcaccggcctacggatgtgtgactctcctcacagcccgagcggc

SEQ ID NO: 17182 - DNA, 122 bp, Homo sapiens
gccgcagcggctaggggccgtcttaaccccttccgggccggagcctattcaacgcgcagccgcagtgttgctgctttccggcgggaggccaagggccaagagtctaattaactccttccctc

SEQ ID NO: 17183 - DNA, 122 bp, Homo sapiens
gcatccgcgggaatgaaaaataacagaggagaccatattttggggtggttttgtctgatccggaattagaccctccgtgtttttgcaaagcagaagaccttaaaaaagagccagcctgaggt

SEQ ID NO: 17184 - DNA, 122 bp, Homo sapiens
agaaagaatgctgtatatgctatggtgacctcttaagaggtagcagaggcaaggactttacgtgggaacctctgcacagaaggcagagcaaatcacccttataagagcctgcagttgtccca

SEQ ID NO: 17185 - DNA, 122 bp, Homo sapiens
aacaaaagcttaccccagtgttcatttctaacagtgcttgacagtctataaagtgatttccggaccttagaataatcccatctgtcagaccaaaccggaatcatctccattttaccagccac

SEQ ID NO: 17186 - DNA, 122 bp, Homo sapiens
attggtaatcaggtacacctgccagggcaaggaactacaagatcatgagaagacaacagacggtctggctgtggagggctgggagcagcagggcacctcctctcctccccaagcccaagact

SEQ ID NO: 17187 - DNA, 122 bp, Homo sapiens
ctcctgggctgctttgcgttgggcgcttgcctcttcctgtctctgctgtgagtgcggcagcggcagtgagtgggtgtcgacgcggcggaatgcccgtcgctgctgctgctgctgcccgacgg

SEQ ID NO: 17188 - DNA, 122 bp, Homo sapiens
ctccagcctgtgagaccgggggagcataccccaggcagagggcacttaggaaaaatagcacggggtgctagcgctgccagggacctcagtacacatggaagaaggcaaggtccagagatccg

SEQ ID NO: 17189 - DNA, 122 bp, Homo sapiens
gcccagctaatttttgtgtgtgttttttttttttttggttggttggttgctctgtagagccggggtctcactatgttacccaggcgatttcatcccactgtgtgagaaggttctgcgttcct

SEQ ID NO: 17190 - DNA, 122 bp, Homo sapiens
caccaaatgcaagcgtctgttctcagccctcgtcttccttggccatcagcagcattaccccggctccttgagtgactttcttgcctcggcttccaggctgcccgttcgcccaccttttcggt

SEQ ID NO: 17191 - DNA, 122 bp, Homo sapiens
atcagagcaggtgaatatgtcccagataaggtgggacccaggagacagcggacctgataacggtggcggggaaaacgctggctgctgcggtgctgggatgggattgagagtctgaaatgggg

SEQ ID NO: 17192 - DNA, 122 bp, Homo sapiens
accaaaagaagcctccagacagccctgagatcacctaaaaagctgctaccaagacagccacgaagatcctaccaaaatgaagcgcttcctcttcctcctactcaccatcagcctcctggtta

SEQ ID NO: 17193 - DNA, 122 bp, Homo sapiens
tactgaatactgagtctccttacctgctaacttcaaggtccacagtttactgtccttttgcgtttgttctcagaagcaagctccaagtcttcagtaaattcgatctaccagtccttgcaatt

SEQ ID NO: 17194 - DNA, 122 bp, Homo sapiens
cgcttaccggccagtcccgcgagccagcccggggctccttccccggcaggcgtgagtacgcgcctcagtcctttgcaaaaacgcgttcccggttccttggaggtaacacgaaccagccatta

SEQ ID NO: 17195 - DNA, 122 bp, Homo sapiens
cctcggcctcccaaagtgctgggattacaggcgtgagccactgcacctggcctataccaacgttcttgaaaagagcctggaacaaaaggtcagttggtccctctgctcacagcatgatcctg

SEQ ID NO: 17196 - DNA, 122 bp, Homo sapiens
agcagaccaccaatcatgcagcataggagagaaggaacctgcagtgtacccatgaaataacggtaggcaggtccccaacaagtggtgggggctcctcatgcatacacgttataggagaacaa

SEQ ID NO: 17197 - DNA, 122 bp, Homo sapiens
gttgttagagcctgggatggggaaactgaggtcacagggttgcaggaggtggggggtgagcgtgggaagaggtaaaccatgtctgcagcagagtctgacccctcgacttctctccctttttc

SEQ ID NO: 17198 - DNA, 122 bp, Homo sapiens
gaagtagtgacagcagctttcctttttcccttcaacagtttggaatcaagctgtttgagccgaggctgggtctcaggaggtgtggacagcacttccatctcggtaaatcagattcgcctgcc

SEQ ID NO: 17199 - DNA, 122 bp, Homo sapiens
tgtgaggtcttagctgacagattggattgtggcatatcacctaggtgatatgacactattcgcctgccttggcactacctacttggggctttgtgacatatgtctgtgctcataactaagat

SEQ ID NO: 17200 - DNA, 122 bp, Homo sapiens
tttgtaaacatcagtagtggccagatacttctgagtcttaaaagcataataggccgggcgcggtggctcacgcctgtaatcccagcactttgggaggccgaggtgggtggatcacaaggtca

SEQ ID NO: 17201 - DNA, 122 bp, Homo sapiens
gagcgacggcggaacccgtgggcctgtggactgcagcctcggcggtcagcaggtgaggcccgcgcagggcgggcgtgggtcgtgagggagtgcgggctgcgggcgggccagcggtgcggcgg

SEQ ID NO: 17202 - DNA, 122 bp, Homo sapiens
ccgtacctgggcgccacgccggccctccctaacgtgcgcaggtgaaggggggaggatgcccggtggattgttcaccaaactctttccagcagcctgttgcaatcatctaggtagaagtataa

SEQ ID NO: 17203 - DNA, 122 bp, Homo sapiens
gggttggaggtggatcagctttcagtcttcccctgttcattttctataattgttgatggccgcatgtttgagccataattcccagtacaggacatgaataaagatgcctgctcctcagaggt

SEQ ID NO: 17204 - DNA, 122 bp, Homo sapiens
gaaatgtaagcttcacaaggaagggattctgtcttagaacggtgcctggaatacaacagacgctcaataagtgggtgtcgaataaataaatgtcccacgctgaggcttaggtacgttatgat

SEQ ID NO: 17205 - DNA, 122 bp, Homo sapiens
ggtggcgaatcttcaagggaagtataaaatgagattctgggattagcaagcatctgtgcgcgtgagggggcccgaagcttaagcttcattagcttcacgtctcaaactgcctctgcaatgtt

SEQ ID NO: 17206 - DNA, 122 bp, Homo sapiens
caatctgttgagccataggaaaagatcttctcaatagaacaaactagcaaagtgcatggacgataggataggatacagtggaaaaataactgtttcgtttacatgggaaggtgcacgtgtaa

SEQ ID NO: 17207 - DNA, 122 bp, Homo sapiens
ccctcccgggccatttcctagaaagctgcatcggtgtggccacgctcagcgcagacacctcgggcggcttgtcagcagatgcaggggcgaggaagcgggtttttcctgcgtggccgctggcc

SEQ ID NO: 17208 - DNA, 122 bp, Homo sapiens
gacttgccatctgccttgcaggatggcatccagcccatgtgggaggacagcaggaataaacggggtggccgctggctggtcagcctggccaagcagcagcgccacattgagctggaccggct

SEQ ID NO: 17209 - DNA, 122 bp, Homo sapiens
ggcttgcagttctttctcctttggaccccctcgaggcttccgtggcccacagtgactgatcggccacttggaaagatgattggatagggtgagtgtgtttcacctccagcagcgcggatgga

SEQ ID NO: 17210 - DNA, 122 bp, Homo sapiens
ggtggcacagtgaccagccgtccgggccctggctaatcactagaaacacctggaggaactcgttgaaggaaacaagtaagaaaatccctccgattagtattgcaggcttctggtggtcctgg

SEQ ID NO: 17211 - DNA, 122 bp, Homo sapiens
cggcgatcagaggctgtcccgtcctctccgggggccgcggctcatcctgccaggcatctccgaggaaagtttgctctccggaaaagaagaaacccgcgcctcctccgaggagcctaggagcg

SEQ ID NO: 17212 - DNA, 122 bp, Homo sapiens
gtagctgctaatccctgtaaatgcgggactgtctgacaaacagcccaggggcaccatgaccgagcctgggaagctcagatgccgaagctgttagctgtggcacgcaagccttgttgcacctc

SEQ ID NO: 17213 - DNA, 122 bp, Homo sapiens
gctgggctgaagaccgcaggtttcagatttccagagaaactgccaaagcaccatcgagaccggcacggccgtttctatcccacatgaagggccaggcccaggctccctcagcacggctggtg

SEQ ID NO: 17214 - DNA, 122 bp, Homo sapiens
gttggcgcgggtgggagggggaacggagtgggaaaaggagggatgtgggaactagctccacgctgacaaaactagatgcctgctatctctctggagctgtaagcttcagtttacaggggaaa

SEQ ID NO: 17215 - DNA, 122 bp, Homo sapiens
gagccgggtcagggtcctggccccacccaccggttgccgtgtcccccactgagcgggcagcggcccagagagcagccaggacagaggtgccttggatgcaggactgttccacgccggccgca

SEQ ID NO: 17216 - DNA, 122 bp, Homo sapiens
gaatggaggggaaaggggcggggctgtctgctgtcaatcatcccccctaccttgggcagccggtagtctttctcactttcaggcacctttccacacaacagccctaagtatctccacagctt

SEQ ID NO: 17217 - DNA, 122 bp, Homo sapiens
tgccccacagtagaggagccagaatccaaacccaggcagcctgccttgccaccagagccacgcttttcaccctcaagctgcagttaagaagtatcacgccgtggctaggcccacggcctctg

SEQ ID NO: 17218 - DNA, 122 bp, Homo sapiens
tgtgtgggcgggggtcaggaggtgcggggcggaggcggagcgtgggccgcggagatccggcgttcgcaggaggcttggtgcgcggcggggctgcacggggccacttccggagtagtactgcg

SEQ ID NO: 17219 - DNA, 122 bp, Homo sapiens
tgtcacgggatggcagcgagcgaggccaggccaggagaagcaaccgcagcctcctatggtcgccccttcccgacccaccccaggcgtcaggagttccgcgcccgggtaagggaaggagggcg

SEQ ID NO: 17220 - DNA, 122 bp, Homo sapiens
ccaggcagagttcctgcgggtaggcaggggccttgcccacaaagccaggccctgccaactcgcgtcctgccgcatgcttgcctgtcaggccaggggctggcgtcccactagcctcgctgcac

SEQ ID NO: 17221 - DNA, 122 bp, Homo sapiens
cagcagggagtggtgggacctgcggaggactggagagtgcctgtctagcctaaaggaattcggattagaaaagttaagacattggaccaacctcagatttgctgacctaaactctgtaggtt

SEQ ID NO: 17222 - DNA, 122 bp, Homo sapiens
ggagagctggtcagccaagattccaagacaggtgtccacctcctccaacgaagcggaacacgtgacaccaccctatccacttccggcttggagggcatgccctcccgtcaccagcatgcact

SEQ ID NO: 17223 - DNA, 122 bp, Homo sapiens
tctgacaatttcctaggcaagtgacataagggcctactgtgttcacttgtatatccccagcgaccagtgaagcatttgacacacagtaggtgccaaatgaagagaagaaaaattgaaacaag

SEQ ID NO: 17224 - DNA, 122 bp, Homo sapiens
agtatttcctgcttttacctcctgagtattggaatattcgagtaaaccctggagtttcagcgccagcgcacgcctcttcatcagggcagcgcgtcgcgagcgcgctggttccccggggcctc

SEQ ID NO: 17225 - DNA, 122 bp, Homo sapiens
cgatgccatcgtggtaggctgggcatgggcaccaagacattcctgacactgcagagggggcgcccagggtgggggacaggtgcggccccaggcctcgccaaccctgccttccccttcctttc

SEQ ID NO: 17226 - DNA, 122 bp, Homo sapiens
tcggcagcaaggcagggtgtacaatccctcctattctcatatccgcttctccacctccagcgagggatcctaccagagccccttgaggctgcaaacccaggggaggctcctccaggcccctc

SEQ ID NO: 17227 - DNA, 122 bp, Homo sapiens
ccgccgtactgcaaatgactttaatcattaaatagcttctatgccacactctgattaagccgactgaggtccctgggatctgggtcactggaccgagctgctcgctcggtggctccactgcc

SEQ ID NO: 17228 - DNA, 122 bp, Homo sapiens
aggggacccctccctgcctgggggctttaaatgccacgcgctgaggccagcccttcctgacgtgtcagccactgccccccagtgtctgtgggaccctgagggcccctcggccttccgctccg

SEQ ID NO: 17229 - DNA, 122 bp, Homo sapiens
gggacgtggccgacaggacgggcgcgaacgggcctgagcgggatgctaccgacaacatggcgacagccgctccaaccgccaagccggtcacagggacgaccttccaaccacggcgcaggcgc

SEQ ID NO: 17230 - DNA, 122 bp, Homo sapiens
catctccctgcaacactgcaggtagcggagtctagagacaacacagacagcggctgccgacggctgggactgggagaggatggctatggggcacgtttccttccagggtgataaaggcattc

SEQ ID NO: 17231 - DNA, 122 bp, Homo sapiens
actgaggtccttgctgtatgcagatgtctttgcctctcccctacagctccttttctgccccgccatggatcccacatggtgtcagtcaccgtgtctccctggactcctcttggtttcggcag

SEQ ID NO: 17232 - DNA, 122 bp, Homo sapiens
ccaaatcagccctacctacggagcacgcccagtcacattgtcctggtcactccggagctgcgaaatgcaggctccactgtgccaggttttaagagtggccaacaggtaaacagagggttgga

SEQ ID NO: 17233 - DNA, 122 bp, Homo sapiens
ctataaccccagctcctagacagtgcctgcatagttggcactcaataaatagttactaaacgcataaattgggtgtttgagatgttgctgcatgaaaaataaaaaaaaagcatttaattact

SEQ ID NO: 17234 - DNA, 122 bp, Homo sapiens
ccacggggccctgcggagcctgaagccggagagcaggcggctcttctggaacgcagggcccgggccctccagccccgcccggcccaggtatcctccctgagcctcagtctccccagatgtca

SEQ ID NO: 17235 - DNA, 122 bp, Homo sapiens
gaccctcccccatccacacatcaggttctgaaacctgaccctgccaggcaactaaagccgcgaaccccacagtgccctgagctggcctcaccctacccacgatcccaagagggtactagccg

SEQ ID NO: 17236 - DNA, 122 bp, Homo sapiens
agcagcaccccatctgacacccttgcgtccggcaccccagcactgcggtaccccggcattcgtgaagcagagcaccctggcgccgcatgccctgagcctgggctgccccttcgcgcaggaac

SEQ ID NO: 17237 - DNA, 122 bp, Homo sapiens
tccgagcgtgcgcggcggtgggcaggggcgcttctcgctgggtgggctgcggctggggcccgggcgctacataaggggtcccggggcctctggctcccccaggcagcgccccacgcgcaact

SEQ ID NO: 17238 - DNA, 122 bp, Homo sapiens
attatggtaaccgaggtaacggggtcggggactctttctccttcgctgcatgctgggtggcggggagagaccgctctgaggaggtttggtctgtcggccacgccgtaggccgcggtgcattc

SEQ ID NO: 17239 - DNA, 122 bp, Homo sapiens
ctgactgagaggctcgggtaagctcgcggggtggcgggcgcggggatgagcgcggcagaccgcaaaaaagccgaagtcagaggacgacccagaacttggcttccccgagccgcgggtcgcct

SEQ ID NO: 17240 - DNA, 122 bp, Homo sapiens
cccccagagccggagcccttggaccccggcacggcctgcaaaggctgaggggccccaccacggcagcatcctgatgcgtggtccatagccaccatccccacacctgccggacaagggctggg

SEQ ID NO: 17241 - DNA, 122 bp, Homo sapiens
ctctctttattggggctcaggggacactctcagggtagctgggggccacgtgaaggggggcgttgcggagcggcacagctggaactccgggatgatgttcaggcttgggggcggggacctcc

SEQ ID NO: 17242 - DNA, 122 bp, Homo sapiens
ctcttcccaaggtcgtaaaatgagtcggcttctgggtggcaggacttttgcagggaccctcgtttgcagttcttgctggggctggagcggtgtggggcccgtgactgggcttggcgtgaaac

SEQ ID NO: 17243 - DNA, 122 bp, Homo sapiens
actttactgaagctacgactgccccagcatcaccgccatttctgatgtgaagacaccctccgcagtatgtaggtgctgtttcagtcttacctctgctgaccctgaaagccagtcacccctct

SEQ ID NO: 17244 - DNA, 122 bp, Homo sapiens
agagtcatagccacttacgcccagactggaggcctagttcctagctctgtccttgggaatcgcagggagcaggagcggttcccttgccaggagctggggaattggaccatcagggtcgtctt

SEQ ID NO: 17245 - DNA, 122 bp, Homo sapiens
acaggttcccaagcagcggaaactcttagatcggcctccgcgtctgagaacagagcgcagcggaactgccgcgtggccagcacctgggcctcccccggagctgctcaggagtgcagagttca

SEQ ID NO: 17246 - DNA, 122 bp, Homo sapiens
tcttggcctagctggatcattgagaaaacaagcccggagcgcgcgcaggtagtccccggacggactccgagcgaaccgccgagccgtgggcgctcgggaaactcggagctgtcaaaacgccc

SEQ ID NO: 17247 - DNA, 122 bp, Homo sapiens
aggcagaatcccaactaacccctggggctggagccctggtctgaaccaggatcctctctccgtctagcgccgcagcgcacctcaggacaagtaatgtgcgtcgaagggctttggaaactgca

SEQ ID NO: 17248 - DNA, 122 bp, Homo sapiens
tgcgggctggagctctagtccacggattgtccgaggcctctttattgccgcttcgaggcgcgtgtggtcgggggtttacatattcattaagcagccagctcggagccgcacttcaacaggtc

SEQ ID NO: 17249 - DNA, 122 bp, Homo sapiens
tcctttgccccttgcccaccagggaggggtgggagacgagagagggtgaactttcccctgcgagattctggtgaaaggggaaatatgcttcgagtcagtaaagctgcgcaagtgcacagtca

SEQ ID NO: 17250 - DNA, 122 bp, Homo sapiens
tgggtcttctccttccttttagtgattgcttcagggaaccgtgtaatcagaatgcccagacgaatgcagcttcgtttgatgtaagtaggagaattcacttctgtccgtgaggcagatttgct

SEQ ID NO: 17251 - DNA, 122 bp, Homo sapiens
ggcgactgccactcggtgcagccgggaggcggccgatcctccctgtggaccgcagggaagcgggtatgacttcagtggcctattcggccctccccaaaactgaggacctgagttcacagggg

SEQ ID NO: 17252 - DNA, 122 bp, Homo sapiens
gctgcttctcaggcaccagatcatccacaccggcgccaagcccttccagtgcacagagtgcgggaaggccttcaagcaaagctccatcctgctgcggcaccagctgatccacactgaggaga

SEQ ID NO: 17253 - DNA, 122 bp, Homo sapiens
agagctctaaacctggcttcaaggagttctttcattcttcattagataccacccaccatacgtcattttataaagccggaaactacatttcccaaaaggcctttatttttcctcgcgggaaa

SEQ ID NO: 17254 - DNA, 122 bp, Homo sapiens
gccctgtgaggtgccagcacgggccacctgcgggtgtggcgcagcccagggctcacactgcgtgggagggactgggtcactattgtggtttttactataactttgtaaattaacttaatttt

SEQ ID NO: 17255 - DNA, 122 bp, Homo sapiens
cagattatccctgtggagcttctgtgagttatagtcctaaatcccttttactgatcgtcccgtacagcttttatctagtattcctgaatgtgtagttgactcatggctcaacagtcaattaa

SEQ ID NO: 17256 - DNA, 122 bp, Homo sapiens
agcgctggggtcacagcctccgacagctgcgtaagacttgtcctccccgggccctttcagcggccttccagagttcagcatcagcgctcctggcgcagaccccactgctgactcctttcact

SEQ ID NO: 17257 - DNA, 122 bp, Homo sapiens
atgggcacgtagtcacggttgggcgaggaggtggctgtgtgctgatagcgcaccccagcacggaggaaagcctcacagtctacgcccttgcccctggggagaggggcccccaccgcgtccac

SEQ ID NO: 17258 - DNA, 122 bp, Homo sapiens
tggtttctcagggccgctgatgcgaaaggtctcctgggagctgaagtccccgtggtgccccgggcctgacagtttggttcctgggctgggcgggggggctgtacctcaccctgggacttggt

SEQ ID NO: 17259 - DNA, 122 bp, Homo sapiens
caagtgaaggggatatatatacccagagcctacagaccccctcacttctagaccacgctccgagatgtcagactccagaacattctgcctagacagctctgaactcttatcttacttccaag

SEQ ID NO: 17260 - DNA, 122 bp, Homo sapiens
gtggtgccagaccccctgcagcaggcccaggtggggatgaggacgaggacgaggaggacacggccccagagtccgcactggacacatccctggacaagtccttctccgaggatgcggtgacc

SEQ ID NO: 17261 - DNA, 122 bp, Homo sapiens
tgctttacagatgtggcagataagacacgagagggagctctggtccccgaggggctgtcccgggagggagcgaggtggggagggggagcaggccctgccccgagcaccccgcggactgagcg

SEQ ID NO: 17262 - DNA, 122 bp, Homo sapiens
acttgtgaaaaatcctcccagcctgaaccgagggaactaaattgctttcccagcaaactgcggttttccacactgctcacgcccacaaactgtgtgttacgagttcacaactttttcttcgt

SEQ ID NO: 17263 - DNA, 122 bp, Homo sapiens
ccccaggaggagacaccggtgctgccttcagcagggaaacctgggcttggataggtgcagcggctcctccaaggtggccaagctgcctggccctcgctcatgaattctgagtagcccctcct

SEQ ID NO: 17264 - DNA, 122 bp, Homo sapiens
accttcttccccggcccgctgggtgcctcgactccccgcgttccccgctgctgcgaaggccgtggccctcgcctgcacaccgcgcccaggctcggtggctcttaactccgcgccccatgcac

SEQ ID NO: 17265 - DNA, 122 bp, Homo sapiens
cacaaggggtctttaactcatccctcggagccatcgtggtgcagggaaaagcccacagggcgtgtggcttccatgctgttccctgactggctgtgacctaggacaaggaacaagtttccctc

SEQ ID NO: 17266 - DNA, 122 bp, Homo sapiens
atcctgtttttaaattaactttaaaaaggaggtaatgcttacaatgaaatgcaggtcgtacgtgtgcagtgcgacgttgtgatgtacgccccatgtaaccacaacccctataaggaaggcct

SEQ ID NO: 17267 - DNA, 122 bp, Homo sapiens
caaaggaacagcacccaggaccaagaacatcaagataaacttgactcagctataagatgtcggtgtctcctactagtaaacacacagataatatcctaactccaggcaaaagaaaactgaaa

SEQ ID NO: 17268 - DNA, 122 bp, Homo sapiens
ctactttcattcccattacaagtctcaaactcattccttttccattgtgtttttcttgttcgcccagccaactgaatgctgcctgtttattatttgaaactcaacactgaatcacccgctca

SEQ ID NO: 17269 - DNA, 122 bp, Homo sapiens
gccactcccaggtttggtatagctaccactttgctcaaacttacaaagtaaaaaccagcccggtgttgttgtttttaacatgcactttcttcccggctacaagaaagccacttgacaaatac

SEQ ID NO: 17270 - DNA, 122 bp, Homo sapiens
tggctgaaggaagtcttacgccagggggccagacattcctggcctttgatctgagccccccgtacccacagctccaacctgctgccccttctggtcggcgagccctctccgcacgcggctgc

SEQ ID NO: 17271 - DNA, 122 bp, Homo sapiens
gggtggggatgctcctagtgccccgcctgcgtggcgccccccaggggccacccgccacggcgctcgtggtgtctgacccgcaagggcgcccctagtgacagccctcccttatacctcccggg

SEQ ID NO: 17272 - DNA, 122 bp, Homo sapiens
tcatgtcatgccatatttctaaatttattttttgctagcattaaatttttcctatttaaacgatgctgtatagaatatgagctaatctgccaattactatgatattgcttgcttataatatt

SEQ ID NO: 17273 - DNA, 122 bp, Homo sapiens
ctttaattctttccgcggatggccacggcttttgccgcctgtacccttcctggagcaacccgtgcttttgaaaaatgaccatgccgaaggggaactaacactcccagcctggtgcgggtctt

SEQ ID NO: 17274 - DNA, 122 bp, Homo sapiens
aaggaataaaaagccgtgccttgaaggccggtggctggagtcagacgttttctccctaggcgcgatcacgtgagccagggacagggggcggagcacgctgcgcggtcacgtgacggccggcg

SEQ ID NO: 17275 - DNA, 122 bp, Homo sapiens
gaaaaacaggagatgcatctaatatggacagggagtaggagaagtggcttgctgcaaccacggaaataatgccatggactgtcattcagatgttatagcaacattatgaaaacgctgtgagt

SEQ ID NO: 17276 - DNA, 122 bp, Homo sapiens
cccccacgcaggacgtctccaagtgaggcctgaggccttggctggcagggagtgcccagccgggagggaggacgggaggacacagtcttgcaggctcagggccggctgtgtttatccggaag

SEQ ID NO: 17277 - DNA, 122 bp, Homo sapiens
ggtgagcaggctgcgggggccgtggggctcagggtttccgggcgtgtgtgtcggggagggcggagggaggtgcctgaagggacgcgccgctcggtgagcgcgccgggggagaggcgagcaga

SEQ ID NO: 17278 - DNA, 122 bp, Homo sapiens
tgacccactcctctccaaggccctaggatggaagccaagtctgtggccctgatcacaggccgctctcttcccaggcagacactgcacctgaacggcagagtgagctctgcattaaccggcaa

SEQ ID NO: 17279 - DNA, 122 bp, Homo sapiens
gggcgggcgagcgcgggggcggctgcccgggggtggtgggaacaccataccttggcgcctcgtccgggacccacgaatcctgccctctgcgttagtgagaagcagtggtcagggaggacccg

SEQ ID NO: 17280 - DNA, 122 bp, Homo sapiens
tcataccacaacctcagccacagcctcagtgcatagcaacagctgacagctgaaaccacccgggcaggagagagagaggcagtggggaggagggaaccgaggaagaaacagagaagaggatg

SEQ ID NO: 17281 - DNA, 122 bp, Homo sapiens
tggacacacccccattcggaacggtggcttactggaaggcagctgtctcctcagggtgaccgtcagctcctgaaagaatcggtccatggcatagcttctcatgcccaaagtctcagcctcag

SEQ ID NO: 17282 - DNA, 122 bp, Homo sapiens
caatctcgttctctctgcactccgggaacccaggtggggggctgaatggctgcaccacagcggagcctccaatcagggtgttccggggtgtcccctcgccttcgtggggggcctgcggtggt

SEQ ID NO: 17283 - DNA, 122 bp, Homo sapiens
gccatggtccggaggggatagcggccgcagcgtggagggcttcgaaaacgggggtgggggcgcccaagagctcagtgcccagccccgggatcgcctcctcccctcaggacccgcgagccctc

SEQ ID NO: 17284 - DNA, 122 bp, Homo sapiens
tagtattattatgaaatggttttgaccttgcagaccccctgagagggtcttgggaacccccggcaagccaggtccccatagcatactaggaactgctactttatggaaatgcctccaattta

SEQ ID NO: 17285 - DNA, 122 bp, Homo sapiens
ttccgggtgtaactggttgtgctgtctgtgtacttccggcagcctccagacagtttcttccgcttcctgtaccacccggctcaagtagcggacacggaacagggaactatcagcccgtcggc

SEQ ID NO: 17286 - DNA, 122 bp, Homo sapiens
cgggaagcccgggccctggggacggtgtggaggaagtcacctgcacgttggcaaagtccacgcggttgaggtcgctgagcatctggttgatctgggacgtgttctgcagcaccgcccgggcc

SEQ ID NO: 17287 - DNA, 122 bp, Homo sapiens
cgaacccacgggctcatcaccgcacggtgcggccagacgccctttctcctacgttgggagcgaatctcctcggctcacacaacccagccaccggctcccaccgcgctggaacccctctggca

SEQ ID NO: 17288 - DNA, 122 bp, Homo sapiens
cccttttttttcctgggacccagcgtttccgcctccggggcgcagactcctccccctcaccgtcccaattgtattccctggaagagcagccggaaaagcctccgcctgctcataccaggata

SEQ ID NO: 17289 - DNA, 122 bp, Homo sapiens
gtttgtctcccttttatttccctccttcctttgggcccccagtctgcggccctaggacaacgccttcccaagctcggacccagccaccgtccgccttcattacccctctgaagaacagggtg

SEQ ID NO: 17290 - DNA, 122 bp, Homo sapiens
acattcccgcacttttgtggagctctgctgcatgggcagaactagctgggctgggataaccggagccggggccgcgcaggccgctgggacttgtagttcgggggcctggccgaccggtttgt

SEQ ID NO: 17291 - DNA, 122 bp, Homo sapiens
ttaggctaagtgagaagaggccacgtagcttctgcctggcactctttggaatgtttgctccgggaaaagccagctaccatgtatgaagtttgtccacactgaggctgccatactagagagtt

SEQ ID NO: 17292 - DNA, 122 bp, Homo sapiens
cagcatgaccacatggcatattctgggaaatcgtttttttgcaccccaacaatagactagcggagaaaactccttttgtgtttctcaaatgcacaaatagaaaaaataatcagtggaagtag

SEQ ID NO: 17293 - DNA, 122 bp, Homo sapiens
gtttaagggagtaagtcccagagtccaaactggatttcaccgactgactgttgaagctttcgggtctcagctgttggcccaacgaaccttcccaagaccttgaagaccggcagcctacccgc

SEQ ID NO: 17294 - DNA, 122 bp, Homo sapiens
tttgctgaaatgtgcactatctggaaagagacacaggaaactagcaacattgctggcctccgtgaggaaactgggcggccagggactgggatgagaaagagattttcaaaatgcttaccctt

SEQ ID NO: 17295 - DNA, 122 bp, Homo sapiens
gcaggctagcgcacctgagtaacaactgggcgggcagccggcctctgcgcccgtttatatcgctcctcacaaaatggcgcccgcgccacccggaaatgaaaccttctgattggcccaccgcg

SEQ ID NO: 17296 - DNA, 122 bp, Homo sapiens
gcctcagtctcccaaagtgctgggattacaggcacgagccacggtgtctggccagagacacggtctttaaagagataatggagggaaaatgaggtcactagggtgggctctgatccaatctg

SEQ ID NO: 17297 - DNA, 122 bp, Homo sapiens
aggttgggcaagagaggaaactgggcacgcaggagcacttccatccaagcgaggggctgacgggctaccctgtggacttgtggcctctgaccagtaccaaggcatcagactagggtggaaac

SEQ ID NO: 17298 - DNA, 122 bp, Homo sapiens
ggcgtgcgcgcgccggccgggctgccgggcgggcggcgcgaggacactcactgcggctcgcgctcccctagctcccgctcgcgcgcccccccagccggtgacgtcatcccttccgccagcgc

SEQ ID NO: 17299 - DNA, 122 bp, Homo sapiens
aatctttcgggggagagctcagctctaggctttcatggtcaaaatactaaaggtcagctccgcgtgtgtgccccaactgtcctggaagcttcaattggaaaactccaaactttaagttttgc

SEQ ID NO: 17300 - DNA, 122 bp, Homo sapiens
ctgggaaaactggttgctgcatgggtggagcatttacagttcagttgcttcaccctcactcgcttgttccatgatagagaccccagagaggaggtgtggctttgtcatttatctttcagccc

SEQ ID NO: 17301 - DNA, 122 bp, Homo sapiens
agcagaggctacctagccccctgcagtggctgaataatggttcccagatggtgccagtgacgcagtggggaggctgacagcttctgggtgcgaatggccccacaatgcggccggggaccacc

SEQ ID NO: 17302 - DNA, 122 bp, Homo sapiens
tcagaggggtgatttcctagagactcctatcatgatcatctcatccttaccatcataatgcgaggctcacacactggggcccagaggttaagcagcttgcccaaaagtacatgagtaggtga

SEQ ID NO: 17303 - DNA, 122 bp, Homo sapiens
tgttggactaagaaaacagcatccggtgcgtcccgggaccacaaggtggccgtgcaccgtcgaggttactaaacactgtctccttggcaaaagaaataatagcaatcatttaatgggagggg

SEQ ID NO: 17304 - DNA, 122 bp, Homo sapiens
cgcctgcagcacgagccccgccccctggctctaaaccgggtggcgggaaaagggactcagcgtttcccgagaatgcccccatagcttcgaaaggatccccgtgtccgcttagcgccctctcg

SEQ ID NO: 17305 - DNA, 122 bp, Homo sapiens
ccccgggcccctggggattaacgtggactcctcctccagcacccgatccttaggatcctccgcctggaccgccttctggtccctcgaagccggcccacggaaccagcggatcctcaatctag

SEQ ID NO: 17306 - DNA, 122 bp, Homo sapiens
cgaggccaggaactgagtgaggcccctggtcctgggtctcaggatgggtcctgggggcctcgtgttcatcaagacacccctctgcccagctcaccacatcttcatcaccagcaaacgccagg

SEQ ID NO: 17307 - DNA, 122 bp, Homo sapiens
cctggggggcggggacaccatcggaggggcggggcctgtctgtgagggaggccttaaccccgtttactgcccggagcaggcaccgccttccagctgcatagccaggtggacgtgggcgtggt

SEQ ID NO: 17308 - DNA, 122 bp, Homo sapiens
agccctagaaggagggtagggcttacagaacattccaggcaggggaaagtgggtaggtaacgaacagaaaagccattggtgttccatggatatggaatagataaatttgctcagagtaagat

SEQ ID NO: 17309 - DNA, 122 bp, Homo sapiens
ggtgaataagtgggattctttcccaagatcaatgccacagtaagggagagaggatcagcgcgtggaggaaggagcagtccctggaagctgcagtcatcctgggaaagagctgccctacacag

SEQ ID NO: 17310 - DNA, 122 bp, Homo sapiens
tgaccccatggcagtgtctgggggtgaatgtttacagctcttgaaaccccagtgggagtgcgttaccgggtggtcttttagtctagcggtctgtaggtggctggtgagagtgagctcaatta

SEQ ID NO: 17311 - DNA, 122 bp, Homo sapiens
ggggtggctgcggctgtacttggggcactggacccaggtcccacctcatctgcaacccctcggccaagggctgctttgcaggtgagggtccctaccctggaacccccaattcagtgctgggg

SEQ ID NO: 17312 - DNA, 122 bp, Homo sapiens
cgggcccctttgtgacgtcacaatcagctgtttgaacgttccaatttgtgccgtgagccccgccgcagcggccgcacagactcaaagccccgcgggcgagctcagcagcccggagcgaccgc

SEQ ID NO: 17313 - DNA, 122 bp, Homo sapiens
tttgcttctgggagtaacttctggtgtgcaggcctcatccatagacccacagggacttggcgcaccttgaacaaattgctagaggatacgaggggcagtcctgccatcaagaggaaaagagg

SEQ ID NO: 17314 - DNA, 122 bp, Homo sapiens
ccacgctgctatcactcagtatgcacacatacacgcacgtatgtatgtgacatgcacgcacgtagttatcttgtattaccttcgtagcgactctgtggggcactgtcatgatccccagttta

SEQ ID NO: 17315 - DNA, 122 bp, Homo sapiens
aacgctgagcagagggaggctccgaaaaacaaccgggtggggggcggaggctcctcgccgcggcccggcacatgcaaacagggctggaggcagcagaaaccccgactctgaaatccacgccg

SEQ ID NO: 17316 - DNA, 122 bp, Homo sapiens
aggcatgctcctcttgcttttgaacacgatttaaattgaagtttaaaaatatctcacatccgtatgtctcaactgttaagggaatatatatgtttggattcagaagcaggaatattcaattg

SEQ ID NO: 17317 - DNA, 122 bp, Homo sapiens
catagtcagccagttcaggaagctgaggttcccgctgacgatgaggacggcctgtggagacgccgcagctgagtctcgtgcaggggctcgtgtggggcccctgggcagctggcgcctctctt

SEQ ID NO: 17318 - DNA, 122 bp, Homo sapiens
cggcccggcccctgctcccaactggcccgggccctgcaggggcggggttggcagggacggcgctggcgggtggcggagacccggggggcgcagggatcggcttcccccgaggcctcggcccc

SEQ ID NO: 17319 - DNA, 122 bp, Homo sapiens
gaccagcaagactgtttcgatgagcacagaatctgaagggggagctgcaggcagctttttcggagcacagtcggccccggctttcattcattttggccatttgctttggtggcacagtctgg

SEQ ID NO: 17320 - DNA, 122 bp, Homo sapiens
gtcccatgaagtttgttgtaacgagcgacagcccagacatcaatgctgggcgagcacagccgccgagagtgcgggaaagctgtgcccacagatggccaagcatgtggaggagagcacaatat

SEQ ID NO: 17321 - DNA, 122 bp, Homo sapiens
tcgacgatggcggcgcagagatgtctgctgcgtacccacaatgccttgtgcctcgcaccgcgggaggaagtggctgctctgtaggccccagaacggaaccacttgaaaggcgggaaacacgt

SEQ ID NO: 17322 - DNA, 122 bp, Homo sapiens
tttgagggctcggcgcggggtttcctgttcctccttctgcgcggctgcagctcgggacttcggcctgacccagcccccatggcttcagaagaggtaagtggtccggccccatattccttatg

SEQ ID NO: 17323 - DNA, 122 bp, Homo sapiens
gctagacttggccacaggcccacttctgaagaagtctgggggtggtgtcaacaacatccacgacagctgagaggaaggggtgattccccaaaggaaaatcaaagttttgatacaaaaacaag

SEQ ID NO: 17324 - DNA, 122 bp, Homo sapiens
tgcagagcgcttcctttgttccggagcgagtaggacgcgctacctcctggaggaaagaagcgactgcgtttcgcagtgctgacttttttttacagtgtgagctaacgtgtatgctctgaaaa

SEQ ID NO: 17325 - DNA, 122 bp, Homo sapiens
tccatgttctctctccaacttagtcaactccttccaggtcccccctcctcctcgcgccgacgagtctgggaaatagggagaggggaagcttcatgaacactgacccagagtggaagggtggg

SEQ ID NO: 17326 - DNA, 122 bp, Homo sapiens
ccagctttcagttttctacattagtttggagtgatatgaaagaatgatctgtttcacctgcgcacaaacaagtaaggacagtgatgttagcttctgggaagttcaagtgtataacctgagct

SEQ ID NO: 17327 - DNA, 122 bp, Homo sapiens
agtgatccacctgcctcggtcccccaaagtactgggattacaggcgtgagccactgcgcccggtgagaagattattctgagctttttgaagtggagacaggaaatagcatgtaaacgctcct

SEQ ID NO: 17328 - DNA, 122 bp, Homo sapiens
agctctactggtccttccaggcaccgcgcatccctcccaccggcctaaggggacgggagccgctgacctttaggacctgtgcaagggtcatggtgctgtgtgaaggacacgactccaggcca

SEQ ID NO: 17329 - DNA, 122 bp, Homo sapiens
tgaactcctgacctcaggtgatcggcccacctcggcctcccaaagtgctgagattagaggcgtgagccactggacctggcctgaaaccctgattttaaaacctctggcaataatttctcaaa

SEQ ID NO: 17330 - DNA, 122 bp, Homo sapiens
tgaccaaagtcaggacacaccccctggttgcctcctgatgagggctaagggtgaggattccggcactcccagtttggactcagaagacaggagcagtgtggggagcagcaccgcctgtacct

SEQ ID NO: 17331 - DNA, 122 bp, Homo sapiens
ggaggtcagatctgagatttcgatttgggagtcagtgtctctggctagggcccagcatcccgggttgctgcatggggtcaagcactctggtcggtcccatggagctctgcactgtagcttcc

SEQ ID NO: 17332 - DNA, 122 bp, Homo sapiens
ggaccgaaggggccacacagagacgtctgcggcgctgcttcccattcgcgcagatgcacacggattccgggcccagcgctaactcggatgtgttttccagctccgtttattgtcttccataa

SEQ ID NO: 17333 - DNA, 122 bp, Homo sapiens
aaatggcccaggcttgggaggccgctggcggtccaggtcccgcaggatgtggaggattttcgaggagggcccaggggctggagggtgcacaggcccatcttgcacaggagccacggccccgg

SEQ ID NO: 17334 - DNA, 122 bp, Homo sapiens
ggacgtgctgctgaccgagctggttcgcccccggttcggctcgtggagagccggcccctccgtgagtcttctgtcagtcattggctccctgcggtttccttggggacgtggcgccgccgccg

SEQ ID NO: 17335 - DNA, 122 bp, Homo sapiens
attcacgaagccccatgtttctgttctatttctttttaattatttgtataagtttaaggacgacaagtgcagtgtcatgacatggatgtatcgcatagtggagtcttgtcttttagggtaac

SEQ ID NO: 17336 - DNA, 122 bp, Homo sapiens
tgaggacgtttagtgacaagcttctccgaagcaggagcatcgtctccccacgtctcctgtcggctccctccagaagctgcagccaaatggaactcaaggaatgagcctgggccccaatactg

SEQ ID NO: 17337 - DNA, 122 bp, Homo sapiens
aggaatctggcagggaacccaagcttctgcaccacacgagcatattttcttgctgcaagtcgagactgctcttcactggggaggggcaaatatgtttaaagatgtcttaatcgctacatcct

SEQ ID NO: 17338 - DNA, 122 bp, Homo sapiens
aaggtgggtggttgaaggagtggagacgttgcaggctggcctggcactgtgctgtcggcacgtgtgtggtggaattgaacaggcgccctcatccacacccgagcataactggaacggcgctc

SEQ ID NO: 17339 - DNA, 122 bp, Homo sapiens
gtgtttgacggcatcccaccgccctacgacaaggtgagctatgccaaaccccacaggcagcggccttacctgtggcgtccatgatgttccgcaactacctacattgtttgatcctcatgaaa

SEQ ID NO: 17340 - DNA, 122 bp, Homo sapiens
ttggaatttctcgccccaaaacagatattgtcgggttggcctccttgtaacccaaacatacgatgggatgacattacagctgtgctactgattgctgctttgaccgcctcctatgctgtgta

SEQ ID NO: 17341 - DNA, 122 bp, Homo sapiens
gcagggcatggtggtgcatgcccgtaatcctagctactggggagggtgaggcacaagaatcgcttgaacctgggaatcagaggatgcagtgagccgagatcacgacactgtactccagcctg

SEQ ID NO: 17342 - DNA, 122 bp, Homo sapiens
cttgcgcagctgctggctgtagcgctggactttctgctcgatgtcggtcagcgtgcgggccgtgtccgcctccagctcctctagcatggccttctggcgttcacgcagcagccggtgcagcc

SEQ ID NO: 17343 - DNA, 122 bp, Homo sapiens
gtgcatcccttacatcagcaacgtgccggatgaactcagtttgcacacaggcggtgtgttcgctcggagagccagttgttagccatgtagcagcacggcaccagtcggggggcttccgggag

SEQ ID NO: 17344 - DNA, 122 bp, Homo sapiens
ttttgtgttttgttttgttttccttttccatatactacaggggcggtgtaagaactttcccgagccatcggaggcatcaacgggaatcactggaataataatattagtaaagttgtttttat

SEQ ID NO: 17345 - DNA, 122 bp, Homo sapiens
ttgctgggtcactcagaggtcagagccgcattccagacctgcttttcccacggggccacgcgtgctcttctgaacggaagtcgttgtgtctggtgtcacagttggtctgtgggtgtctgccc

SEQ ID NO: 17346 - DNA, 122 bp, Homo sapiens
cggccacttctagggttaaaagtctctctaacgcctcctcccaggacgtgccaccccgggcgctcctacgcaagcattttctgggggcctgacactgctgcctccccgggctcactgaggag

SEQ ID NO: 17347 - DNA, 122 bp, Homo sapiens
gagcttgagtgacagggtggcctctgatgccgttgaccgacacaatctggggacgaggtgcgggtggcagagctgggaaattggagcatggtcacgggggacatctttgcgacaccaagtgg

SEQ ID NO: 17348 - DNA, 122 bp, Homo sapiens
atgagaagcacagaggccaggggttgggctcctcgagagtcgtctgttctttcacccacacgcttagacacgtgttttgcaaaagtcgggaaacccagtttggaacgctttctggcactgaa

SEQ ID NO: 17349 - DNA, 122 bp, Homo sapiens
atatatgtggtgagtgttcccatagagataaacccagagggttatgaaagcactggggtgcgggggcaccttaactcagtatggaggctaattcttaaaggtgatgcaaaaatgacacttaa

SEQ ID NO: 17350 - DNA, 122 bp, Homo sapiens
ggtaacaacccgtatctccctttgcagatttctctgaagatttgtttattttcattgtttcgtttactatttgtgttttaattacacatttccctttgccatcccccccaaaatgtggaagg

SEQ ID NO: 17351 - DNA, 122 bp, Homo sapiens
agccgatcccggcacacagccgatcccggcacacagccgatcccggcacacagccgatcccggcacacagccgatcccggcacactgctggcagcagtgaggggagctcttcaacatcacca

SEQ ID NO: 17352 - DNA, 122 bp, Homo sapiens
tcaccctgcgttattggctgaacactctgacacctctccctggcggcagtagctgtcacccgcaaacctccaccgccactggcagacccggtgctgggctgggttggcagggagagcctcgg

SEQ ID NO: 17353 - DNA, 122 bp, Homo sapiens
tcagggccagtttctgatatgcctttgtaacatcctccggtgaggcatgtctctgcacaccgagaacttcctagtcatccaccgtgttttaagagattgttggtattggtccgaggacagag

SEQ ID NO: 17354 - DNA, 122 bp, Homo sapiens
acagagaggtaaaagccctgggttaaagtcacacagcacataaaaggttcctgatcatgccgtgcagggcatctcgccaaacctcaaaaattcacaatctcatagcgcagcttgctctgtga

SEQ ID NO: 17355 - DNA, 122 bp, Homo sapiens
gacttcggcagcttcgagcacattttgtcaaaagcgtcgagtatttctttctgaaacacacgagaggatcgtgtgagaagacgggaggccggacaagggttgggggacattctgaaaatact

SEQ ID NO: 17356 - DNA, 122 bp, Homo sapiens
ccagcctctgatggctcggagatgatggaccgtggaagggaagcgtctgtggggagtgagcgcttagatggccagcagctgctccttctgggaagctcgcaccttggcaacagaacagccct

SEQ ID NO: 17357 - DNA, 122 bp, Homo sapiens
ttatcgcgagaactgtaactgactttgccgctgaggggcggggttgcaagagaaacccagcgaagaggagaggcggagccgggccgggcagggggcgggactatttagagaagtaggcgggg

SEQ ID NO: 17358 - DNA, 122 bp, Homo sapiens
cgtgttgggctggtaggactccagcggggagcgagcattcctccggaacctggggctggacgacagcagcaggaggcgtgctcccatctccggtagtccccggctcccgctgctcccctttc

SEQ ID NO: 17359 - DNA, 122 bp, Homo sapiens
ctcatattaaggcctgtgtttaagtgttctaattccaccctcaaaatctgcttctgtagccgtgtcagaatgatcattgtctctacttcagttagttaataattcttcctagcatcaatgtt

SEQ ID NO: 17360 - DNA, 122 bp, Homo sapiens
accgccagcctgcgggggctgcggctgcaacggttccaagctgggtggaggctgcctgcccgcgagccaagagccacgctaggaggcaggagtcgggaagtcgtgtgcaggcccggaggaga

SEQ ID NO: 17361 - DNA, 122 bp, Homo sapiens
cagcggcagcggctgcaagtgcagcgcatctttagggtcaagctgaacgccttccagagccgcccggacaccccctacttctggctacagctcgaggggccccgagagaacatgggcaaagc

SEQ ID NO: 17362 - DNA, 122 bp, Homo sapiens
ctagttacatctgcatctttttgtctcggactctaaaaaggtccctgggatccatccaaacgaccccaaccaaatctgggggccaaaacgcaaagatcgcgggagaagcccagaacggcgtt

SEQ ID NO: 17363 - DNA, 122 bp, Homo sapiens
cttgctttccatgtcttttttgaagtccacatattaaatacttcttcaatgaataatgtccggtggtagtgctcttagtttttgcttaatcctcccgtataattattattctattagttctt

SEQ ID NO: 17364 - DNA, 122 bp, Homo sapiens
tgcatgatgtttggatgctagactagttgcatctgacgggagaagtttgtgttgtaccagcgcatgccttggaaagacttaagtaatgcaaaaggttgtccttttttttttttttttttttt

SEQ ID NO: 17365 - DNA, 122 bp, Homo sapiens
ccagctccgagggtttaacttcgccggaaccggcctgggctcggcatcatcaggtcgcgccgggcaaggactagcccttccggcgcataggcaatgacgcaactccgccctgcgcggccaaa

SEQ ID NO: 17366 - DNA, 122 bp, Homo sapiens
cacgtccgcgaagctcacagtcccgggcttcctgcaaccaggccgggtctccccgggcctcggcgccaggagcggggctgggggcggcgccatggggcctcgcagccccgatcggcggccgc

SEQ ID NO: 17367 - DNA, 122 bp, Homo sapiens
cacactgtcctcctgggtgattgttgacagttattgtagccacagagagaacataagacacgttgcgttcattcgctagaaatccctgtttccttctctcagaaggcagtcacagtccctac

SEQ ID NO: 17368 - DNA, 122 bp, Homo sapiens
tctgcggggtcactcagtctaacatctttatttacagatgaaggaaactccagagagggacgtgacttgccccaggtcccacacagcacagggctgaccagaactggggggacttgggcaca

SEQ ID NO: 17369 - DNA, 122 bp, Homo sapiens
ctctcggtatcccgagctgcctgccgtccggccctctgtccctggacaatctgattagggcgcaggaaggatttccccagacgatttgtttgggaactcagaggtcacacgtgcctaaacaa

SEQ ID NO: 17370 - DNA, 122 bp, Homo sapiens
ccaaaccatatcagtgtgtcaggcagatatacccatgtgcgtgcatgcctggtgtgtgttcgtgtggcatgtgtcggtgtgtgcacctgccatgtgtctgcatggcacgttttgtgcatatc

SEQ ID NO: 17371 - DNA, 122 bp, Homo sapiens
cctgaagctgaaatgaaaatccatgtaaagcacccagtccagtgcctggtacaatgtaggcgcttggcaaatgtaaggctcctttttttcttctgttctccaaacgaaaccctggtttcccc

SEQ ID NO: 17372 - DNA, 122 bp, Homo sapiens
aaacacatccctgtgtcgtcaacaaccacttggctgtctacggacatcacgggtgctcggcgcgggatctgagtggcgggcctgagtccaggtgtggagtgagggggcagtgcggtctgggc

SEQ ID NO: 17373 - DNA, 122 bp, Homo sapiens
ctccaccgtgtcaccaccccctcctccccagcccttccctagaaggaggaaccaagaaggcggggccaggccagctgggctgcgggccagattgcaactggaaactttgctccttcccctac

SEQ ID NO: 17374 - DNA, 122 bp, Homo sapiens
gagatgaaacacttagacccattcagtgcctaggaatctctccctgagccttatggaacccgcgcaaatgatgttttcccattcccctgatctccagtccccgatcggaagggagagccggc

SEQ ID NO: 17375 - DNA, 122 bp, Homo sapiens
tgattcttgttgtacataagatttaaataatgcacctatttaagacatgttgacaaattgcgggtctgggacccgcctcttatttatgaagtctttgaccgtcccccccgcccgaccccacc

SEQ ID NO: 17376 - DNA, 122 bp, Homo sapiens
tagtgcctcttcaatggtggatgccctacactgggccttcacatgggatacaactatcttcgccctttgtgcccaatcccatatctccctgcacattcctctaccccagaccttcttgtccc

SEQ ID NO: 17377 - DNA, 122 bp, Homo sapiens
ggcggggcagaggaaaaggcgccggccccacagtgctccccgcttccgcccagtccagcccgggccggctgaccgggtccgacacagtctcctggaccaggctccctccatcctcacccctc

SEQ ID NO: 17378 - DNA, 122 bp, Homo sapiens
aatggaaatactttcctggggtacttgggacagggtcagtgggctggggtgttgaccagacgcgtggagaggagagcaggccggcagctcttgagagtgccaacttcccacgggttgagctc

SEQ ID NO: 17379 - DNA, 122 bp, Homo sapiens
accccgatgtgacttcaaaaactggtaccctataattgtattaagcagataatcctctaacgtaagaattgagttttattttcaaagtctgcttgaaaataagatttgcacactgtattcca

SEQ ID NO: 17380 - DNA, 122 bp, Homo sapiens
attctgcttatctacaaatgtaaacagtactgtcggccagacgcagggtccggggcgggtcggcccggactcagggtctgcttggaggcagagctagattagggcggggtcgtcctgtggcc

SEQ ID NO: 17381 - DNA, 122 bp, Homo sapiens
gatttccctgcagccagtggcgcaggaacacaaccccgtggacacggaagggcaccaccgcggcccctggcaggcctcacctgtagccgctgcgccctccccgcgggcaccgggctctgcat

SEQ ID NO: 17382 - DNA, 122 bp, Homo sapiens
ggtggggcctgccttccctggggcagtgagttcgccttttgttcaagggtctctgggtaccggtatggcgttcgagctcactgcacaggaagccagctacagggaggaagctcgtaggtttc

SEQ ID NO: 17383 - DNA, 122 bp, Homo sapiens
ttgtcgcctctgccggcgcaaaccttacaaccttctccgtggggccggagttcagcgcgccgcaagatgctgggacacaaaggtggtaggcgaggatgcaatacaaatgatcagagctactc

SEQ ID NO: 17384 - DNA, 122 bp, Homo sapiens
ggacctggagaagaaggtggagtcgctgctggacgagctggccttcgtacgccaggtgcacgacgaggaggtagccgagctgctggccacgctgcaggcgtcgtcgcaggccgcggccgagg

SEQ ID NO: 17385 - DNA, 122 bp, Homo sapiens
cactcccgctccggctcctcctcgccgcggccgaaggggggaaaatggctccggctccagcgtcgcctcttaaagggcctgaaacaccggccgggaaatcccaccgcacaggccccgccccc

SEQ ID NO: 17386 - DNA, 122 bp, Homo sapiens
gggctggagggcgcgggcggctggtggctgcggctccgctgccggccgagtggagcgctgcgcagctcccgccctcgagaaaccccgccgtgtcatttgaccatataaggagatgcacgcct

SEQ ID NO: 17387 - DNA, 122 bp, Homo sapiens
gccctaggcccgctataggctggataaagtgaaccaagcaagggtcccagaaacgtcacacgtgaactcgcccattcacactcacccattcccatgcacactggccattcactcagccattc

SEQ ID NO: 17388 - DNA, 122 bp, Homo sapiens
aacgactactgaaaactatagggaagactttagtacaatttaatctgggtcttactttggcgaggcaatctagaaaagttaacagaatgggctaggtggcaactgccaaggttggaatcctg

SEQ ID NO: 17389 - DNA, 122 bp, Homo sapiens
accactccccaagcccaggaagtggcgtgcatacgctgggaccagccctctccagggggccgtggggcttgtgtgttcttctggagaccggggggatgcattttgaggaagcgcctctgact

SEQ ID NO: 17390 - DNA, 122 bp, Homo sapiens
ggactgtaattttggtccatttgggcatcccccaaatggacctgtcctctgagtgccagacgtctctagccatagtgggcaccagtgccatttgaagaaggatcctgccataattggtgacc

SEQ ID NO: 17391 - DNA, 122 bp, Homo sapiens
ggtaagtgagcatcccctggtggagaaagggagtcttttcccagaatcagtgttttccctcgccttgtgtccattggcaatcactcaacacaaactggtggccattcggtacaatcaaacaa

SEQ ID NO: 17392 - DNA, 122 bp, Homo sapiens
atagtcctcaaagcggtccaaatctcccctttcagattctaccaaaagtgtgtttccaaacggctccatcaaagggaaagttcaactcggtgacttgaatgcaatcatcacaaagcagcttc

SEQ ID NO: 17393 - DNA, 122 bp, Homo sapiens
ccctgtggagcgcacgttcccaatcacggttgtctgttttcagtgtgaaatatgagttggcgaggaagatcgacctattatcggcctagaccaagacgctacgtagagcctcctgaaatgat

SEQ ID NO: 17394 - DNA, 122 bp, Homo sapiens
gactcctgtgctgcctgtcttcgcttgaggctggaagtggctgcccgacgccttgctctccgcagttctgctatctttgcgcatggaagtctccaagaggggctccaggaagcagcgagcag

SEQ ID NO: 17395 - DNA, 122 bp, Homo sapiens
cccctttctcccacctcaggctcagtacccaccggtgggctgcggggctggagctggggccggcgggaacgcggagcctgggggtgggaacagcctccgagccctcccgcgcctccgcccct

SEQ ID NO: 17396 - DNA, 122 bp, Homo sapiens
cggaaggggtggccagctgggcttcactgcagtcctcaccagacaggattgagattttaacgtgttaacttgttttctgtcttttccaaattgtttatggtagccatgcattaattttataa

SEQ ID NO: 17397 - DNA, 122 bp, Homo sapiens
gacacgtggaggtgggggtgggggtgctggtgctgctggcccgcctagagggagtctggccggcttcggggttggaagcccccagagcagtggagaaaaacaggtagagaaaccagacaggc

SEQ ID NO: 17398 - DNA, 122 bp, Homo sapiens
tgacggcggcgcgggtggtggagcgctgggcggccaggctccctggctggccggtttgggcgtctgggccgtgaaggtgggacctcctgttccgggccgcaagtttccctctccagccgccc

SEQ ID NO: 17399 - DNA, 122 bp, Homo sapiens
aagacctgcggccggacgcttgcggaccggtaggaacgtggcttgtcaggcccgggctggcgtgccctggcctccccgggccctgggccaaagcccggacacttccagattgggccgccgct

SEQ ID NO: 17400 - DNA, 122 bp, Homo sapiens
tcatgagggagggaaacctttctcaaaaaccccaaagtggaactgcccaccagagtgtaccggacaaacctggatcacgttcccatgccctgaaagttagaaaaatgtaaatctggtatttt

SEQ ID NO: 17401 - DNA, 122 bp, Homo sapiens
ccaacatggcgaaaccccatctccaccaaaaaatatgaaaaccagtcaggcgtggtggcgcgcgcctgcaatcccaggcactcggcaggctgaggcaggagaatcaggcagggaggttgcag

SEQ ID NO: 17402 - DNA, 122 bp, Homo sapiens
tgtcatcccagaataacttttacacagggtgactaagcgagttagtgactgcgcggaaaacgggcttccaaggttcacaaggctcgtgctgcggctccgggagttatgtcacagtaagctta

SEQ ID NO: 17403 - DNA, 122 bp, Homo sapiens
gcactgaccacaccccctggattctgaggtgctgcgacgatgagttgcagtgtccagtttcggtttgggattaggaaaacatggtcgcaggaagggattgggcaagatgtgtggttgctaat

SEQ ID NO: 17404 - DNA, 122 bp, Homo sapiens
ccccggggctagccaccggggaaagcacagagaagccaccacaaggggaggtggcctttccgcaccacccccgacgctcactcacaggcccccggagttacccgtgtgaggagtgcgggtgc

SEQ ID NO: 17405 - DNA, 122 bp, Homo sapiens
ccttgttggagtccgagctggcgaagaaccggagcagctgcgccttgtgggccctgatgtcgtagagggtggacatgcccacattgtactcctgcatcagtgccttccggctctcgcccttc

SEQ ID NO: 17406 - DNA, 122 bp, Homo sapiens
aagccgcctccaagatgatcttctcgttctgcaggaggcagatcgtgtcctccctggaggcggcctcgccctgcagctcccccagcctggcctgcagctcatcgtagtgtgtctgcagggca

SEQ ID NO: 17407 - DNA, 122 bp, Homo sapiens
actcagtctgggttgccttcactcacgccctctacctctgaccctggtccttgcccttgccgctggccagcttcaagggtttggtcaagacaaccaaacactggccctcctctctcctctgc

SEQ ID NO: 17408 - DNA, 122 bp, Homo sapiens
aggtgcgtcgccttagggacagagctgccaagtgccgagctggggctgccagagccgagccgggaacggcatttgccagagccgaggcggaagccggagcatttgggggacgggaccgcggg

SEQ ID NO: 17409 - DNA, 122 bp, Homo sapiens
gtagcttcaaccccgggtagcctgcggaggccgggccgccacactcctgccactggagcgcggggccaatggggagccttcaagagccacaaccgaggccctcagccaatcagcgccgagcc

SEQ ID NO: 17410 - DNA, 122 bp, Homo sapiens
tccgaacatcagaaggaacaaacgccggacacgcggcctttaagaactgttaacactcaccgtgagggtccgcggcttcattcgtgaagtcagtgagacctaaaacccaccaattccggaca

SEQ ID NO: 17411 - DNA, 122 bp, Homo sapiens
aagtgtttacggtttgttttgttttggtaagtttaccatgattttgcttgaattgctctccgttgatcttctcagctaagatggaggtagagagttgcacagtggaagagggctgcatgtaa

SEQ ID NO: 17412 - DNA, 122 bp, Homo sapiens
atataggatagcaattctcgagctccccaacaacatcccaaagctttgggatggttctaacgacaaagaatttacatttctctttctttagtctgatttggaagctccaatctagaatttaa

SEQ ID NO: 17413 - DNA, 122 bp, Homo sapiens
cccgagagcttaataaaggaacttttgccttctttgccctgcctctcgaccctttttgtccgcggcacccttccattgcctttcacttttcacctcaaaagtaaggttcaaaatgtggacca

SEQ ID NO: 17414 - DNA, 122 bp, Homo sapiens
tgtccgggggccctgccgctgacctgtggggtctctgtgacatcagcaagccccctgccgcgagcttggagaggcaccccagccccatctggcactcaaggaaatcagctcagagaggttga

SEQ ID NO: 17415 - DNA, 122 bp, Homo sapiens
cttggatcatcgcgacggagcctctcggcatcggcgccctgcgcgctccgtgcgctgcctcgctcaaactttccgtcttgagttttccttaatgtgttttatttggggagggggggaggtgc

SEQ ID NO: 17416 - DNA, 122 bp, Homo sapiens
ggcaagggtgcacagcgacccagccatggttacagcaaagaccgcgggtggaggtgggggcgtggtcaggcaaggtcacagcaacccagccagggctaaagcaaggagccagggtgggaggg

SEQ ID NO: 17417 - DNA, 122 bp, Homo sapiens
ttcaacttataaccaaatgtgtccaggaacagaatgggtttcctttaaagagattcgcttcggatcactggaagaggttccaaacgggctcgtcaaattatcggggggatttggggattttc

SEQ ID NO: 17418 - DNA, 122 bp, Homo sapiens
cagagggaggattgtcggtgtgtgaattgctaccctgggatccggacccagagcggcagccgcgcccctccgccccccgcgcgaccccgggtccgaggcacgctcccagcggagcggtcctg

SEQ ID NO: 17419 - DNA, 122 bp, Homo sapiens
cctgcacacaaaagctgcagctcccataaggaggtgagtctatttcccgtcccttagaatcggacctggctgttgacttcctttgaataatagaatgcgatattgtgtcagctccaagccaa

SEQ ID NO: 17420 - DNA, 122 bp, Homo sapiens
aagttactttccatttagaatttaaacagaggggactttattatactgacacatattgaccggaatatcctggttttctttgggaaactggcctgtttcaaggttcagtttgattaaatgac

SEQ ID NO: 17421 - DNA, 122 bp, Homo sapiens
gtcagaggagaaaccagcagggggcagctttgcaataagggtgggatggtttcagctttgcgatgagggtgggatggtttcaggaccatactttttgaaggttcactagccaggaagggcca

SEQ ID NO: 17422 - DNA, 122 bp, Homo sapiens
accgactctgccacccagatcaggtgcccagatgctcagtcgctcacacaggtaactactcgctccctacctccgttcccgggactgcggcgccccaaacccggcggtgtctcagctttccc

SEQ ID NO: 17423 - DNA, 122 bp, Homo sapiens
caactgtgggtgggctggtctagagggtccagtgtggcttcactgccatgcaggcacagccggcacctgctcctggtctccacaatgacagtcccggagcacttggacttaggaggcagctg

SEQ ID NO: 17424 - DNA, 122 bp, Homo sapiens
tggccgcagctggcacctgacccgctgcatgggtctccagggagctcgctgccaacctggcgctgcagcctcggctccctcatacgcgctctggtaggtgctagggacgaccctatgggcca

SEQ ID NO: 17425 - DNA, 122 bp, Homo sapiens
ggtctcactatgtcacccaggctggttttgaaatcctcagctaaagtgatccttctggatcggcttcccaaagtactgggattacaggtgtgagtcactgcaccagggccattcagtcttat

SEQ ID NO: 17426 - DNA, 122 bp, Homo sapiens
aaggtggcgcagcaggtgcaggcagtagggaggtggtccgtgatggaatatcgatgcccgcggcccctcccctgcctccccggcagtcctaatcttacagctacagtcctgcccgcaggggc

SEQ ID NO: 17427 - DNA, 122 bp, Homo sapiens
gaggaaggggcgcggaggtcagtgccagccgcagggtctggccagcccacctcgcgtgctcgctctgcacccctagagggagagctgggcagctcctgcaggcgcagatcccgccgccgcgc

SEQ ID NO: 17428 - DNA, 122 bp, Homo sapiens
acagaccaagaccctgtctcaaaaaacaaaaaacaataacaaaaaaagaaaaggttgggtcgatgacagtttctagcgactgatgccaccactctgtttacagaatcacccctctcctctgg

SEQ ID NO: 17429 - DNA, 122 bp, Homo sapiens
ggtccccgaactcgctcgtctcctctgcgctctcctggccgcctcctctccccgagcctccgcgtcttgctctggtctgggaaaaagcgcttgtgaaagtatttgctggaggctggaagagg

SEQ ID NO: 17430 - DNA, 122 bp, Homo sapiens
gccacagcatttaccatcacttgccacaggatatatctgcgttgactgcttgtctctccacggcaacgtgagaactatttttgtgtgctgtggcaccgcagcactgagagcagcatccagta

SEQ ID NO: 17431 - DNA, 122 bp, Homo sapiens
gtgctcttttgggcctaaatataattagatccttcgccgttgttttgaggtaaatctaaacgaaaaggaacacctgttaacaggtagtgatgccgcaggaaagtgctgggaagggaatgctg

SEQ ID NO: 17432 - DNA, 122 bp, Homo sapiens
aaaggcacagaacaaaacccctccttcccaggggccctcagaaggtgtccagattctaagcgacacggcagcacacacctgcaccagccctcgcttgtacatggcgcacaggatgaagagcg

SEQ ID NO: 17433 - DNA, 122 bp, Homo sapiens
acgccagagggagtgcgtctcttaacactccccaaaatgtctctactgcgagtttccttccgctctctaccctgcctttctgcttttatctgccggggcttgcaggtccgcggcgcagactg

SEQ ID NO: 17434 - DNA, 122 bp, Homo sapiens
atttctttcagcagactccacctacacgcgcacacagacacacagacacaaacggccacacgtacgcagacagccaacacagcaacactcccacagaagcacgcaacccagcagcttctgag

SEQ ID NO: 17435 - DNA, 122 bp, Homo sapiens
ttagccaattggaagttttggagggcgggttctcctctgggggagggacagagtgatgggcgtctcttttggctaatggaaacttggctgctggtaagctgtgaccaatcagaagcgagaac

SEQ ID NO: 17436 - DNA, 122 bp, Homo sapiens
attttctgtaaaatggggatacttgaaaacccctgcatttgctatcagggaaatcaaacccggtcggagacccaagcgtaccagtgaaaatcagcaaagcagtggagacgggaaactggtct

SEQ ID NO: 17437 - DNA, 122 bp, Homo sapiens
gaatctaggctgctgcctggttttgtaagtagttttactgggaacacagccacactcattcgtttgtaccctgtccatggctgcttttcctccctaacagcagatttgagtagtctccatgg

SEQ ID NO: 17438 - DNA, 122 bp, Homo sapiens
taggtgggttatgaggcctactggtacatgatagtgttgaatgtggattagaatgaactccgtggagtagaatctcagaccataggcaaacatttacttgttttagaataagcacatttgag

SEQ ID NO: 17439 - DNA, 122 bp, Homo sapiens
ccaggcggggattgggggcggtggggacagaataagatgctgggcgcagggatgattagccgcctctcaagctttcatccctcaggcactctggggacgaaagtgacctctgtttgtttttg

SEQ ID NO: 17440 - DNA, 122 bp, Homo sapiens
gcagagccgtgtagctgcacctttaccacacgcgtgtgggtttaacatgtacatatgtggcggcccacgctgtcgtgtgcagtgtacctgttcattgcatgctgtgcttagattcggcatat

SEQ ID NO: 17441 - DNA, 122 bp, Homo sapiens
gaccagttccctccagcctgcgtcatggagccctgggcgtggctgcagggtttaaagagccgacccacgtgcccagcagcctcctcagatccgttctctgcgctgccagctcaggtgagccc

SEQ ID NO: 17442 - DNA, 122 bp, Homo sapiens
gcctggagaaggaggtggcctttacttgggtgtcacccggggaccacttgggggtccaagcgggacaggcctccgaggtccccgccatgtatggaggccgaaaggcagcgtcccaggcgaac

SEQ ID NO: 17443 - DNA, 122 bp, Homo sapiens
tgcacccacagaggataggaacataaaaatgcggactccctaaggcctccttcccctccacgttctttcttcagtcttcctctagggggagctcaagttagctttagcacagtgtgaagcca

SEQ ID NO: 17444 - DNA, 122 bp, Homo sapiens
acaaagatgtctcaacagtgaaagctggctgtatcctatagatcccttggtgctacaaatcgagggggattcttccaagagccgagagagcagataaacccagtgaataaaggaagtgtctg

SEQ ID NO: 17445 - DNA, 122 bp, Homo sapiens
tccggcccccctgtcggggagctgggattgatctgggagcggccttccagctgagctgcccgggttgcggagggccgggaagtgcatggaactcgacggctccgcatggattctccccttgg

SEQ ID NO: 17446 - DNA, 122 bp, Homo sapiens
cacctctgcccgcacaggctcaccgtggcctgggcagcgatgagagcggccagcatactgcggccggggggcccaggggcgcagaaggagactcgcaggtggctgccccccagggacaggcc

SEQ ID NO: 17447 - DNA, 122 bp, Homo sapiens
ggcgcttctcacttcccagacagggtggcggcctttcagaggcactcctcactgcccagacggggcagggcccgggcagaggcgcccttcacttctcagactgtgaggcggctgggcagagg

SEQ ID NO: 17448 - DNA, 122 bp, Homo sapiens
tcccgttacactagcacctttgtagtgcctgccaccccgttcttcctcctgtgactgctgcggcttcccaaccttagagtctgtgagaggtgcagctgccaggcagtcctggaagggttcag

SEQ ID NO: 17449 - DNA, 122 bp, Homo sapiens
cacagagaacataccagagacggtcgtgagccgtgagtttccccgctgggtccacagcgccgagcccacctacttcctgcgccacagccgcaccccgagcagtgacggcactgtggaagtac

SEQ ID NO: 17450 - DNA, 122 bp, Homo sapiens
cctggatggacgccttcgctcctgctcccggcagcagccctgactagggacagaggccaccgggctgctgctccacccgccccaccccactcaccacaaggatgagcacgcggagttcaggc

SEQ ID NO: 17451 - DNA, 122 bp, Homo sapiens
gattctaccgagttggctgttggatgaaagttgtttaaattgttctgcagctttgtttaacgaagtaacattttgagcagtaggctttatcaataatttgttaggcctaagataaagtgata

SEQ ID NO: 17452 - DNA, 122 bp, Homo sapiens
agaggtttcatcctcagtatgtgagtgaccctgtggcccaggctgagtacctagggcccacgggacacagaagacaatgatttgagctgtgtgtctcatgggtgagaggatgcctgaaagtg

SEQ ID NO: 17453 - DNA, 122 bp, Homo sapiens
ctccaggcgtcactgccaccccagggtcgtggggctcggactggggacccctgagctgctcgcctgcggtcggactgctctccccttctacgcccaagcaccgccggtctgccctgctgcgc

SEQ ID NO: 17454 - DNA, 122 bp, Homo sapiens
tatttgccaccaaagcgaaaaacaaacccagggagggacggaggcctgagtcaggggttccgccagggaaaaaggcagaccttgaaactgccctcttagggcgtgagggagaaaagcccggt

SEQ ID NO: 17455 - DNA, 122 bp, Homo sapiens
cttcagctcgctcacgcactccgccttcagctccacgggcctcggctcctccgccgccgccgcctcccacctgctctccaccagccagcacctgctggcccaggacggcttcaagccggtgt

SEQ ID NO: 17456 - DNA, 122 bp, Homo sapiens
cgacatcgcacactgcagccacgatgagacagcaccacacacccatcacgatggggcagacgggacagcagtgtgagcacactgatgctcgacatcgaatactgcagccacgacgagacagc

SEQ ID NO: 17457 - DNA, 122 bp, Homo sapiens
cgtggggaatgagggacaagcgcgagaagaaagggaaaggcctttctctctggtgacgcgcgatcacaaggcgttccctctacgtggacgctcaccattggcggagaccgcactgacgtccc

SEQ ID NO: 17458 - DNA, 122 bp, Homo sapiens
caggcttcaaggtcagagttgaggagttgccacagagactaaagtatttactctttagcccgtgacagaataagttcatgacccctgaactagaggctgttgatctcgtttacagtgaaaga

SEQ ID NO: 17459 - DNA, 122 bp, Homo sapiens
atcctcactgtctccataaggcaggcaggacaggggttaggatcaccattttacagatgccgcagctaaagcctgaaagaggaaggggtgtggccttctccagggagtgcagtgattccaga

SEQ ID NO: 17460 - DNA, 122 bp, Homo sapiens
gcaccagggcctccaaactttttggactcgcagcgacgagggtcagctaccagcagggtccggtcatactggatgaggatgtctttgatctccttcttggaagcctcatccacatctggcaa

SEQ ID NO: 17461 - DNA, 122 bp, Homo sapiens
acttctccactctctggaagatgaaattgtcggcatgcaataataatagctgacgcctaccgagttctttctgtgccaaaggcgcctttaccatgaggaagcggaggcacggagatgctgag

SEQ ID NO: 17462 - DNA, 122 bp, Homo sapiens
aagttctgtcttcccataataaactcctcccatgcaatgcagtgatttcattgaaaggcacgttggaatcaactgtaaagccaaagaaaaggtctgcccaaccctttcccccaggagattct

SEQ ID NO: 17463 - DNA, 122 bp, Homo sapiens
aaattgtttgcagaacgggtggtgcgaccagaagtgatctcctgggacactgaggcagtgcgcccggcgtggagggcgaaggggtaggggttcctgccagcgacgctggagttccagcttct

SEQ ID NO: 17464 - DNA, 122 bp, Homo sapiens
ctttggctactacacagtaaggacagccgctggagcgctacggtctgacgaacgagcgagcgctcggttcaccccaggacctgggctcacaggccgcgggccgggggaagtcgtgcaagcac

SEQ ID NO: 17465 - DNA, 122 bp, Homo sapiens
ctccgtttgggtggcagaaaatgtcacagggacctttcagccacaaagaggcttttaggccgtggttgggggtcttcagggtcttgctctgggcctggctgtatccatgctcaagagtggag

SEQ ID NO: 17466 - DNA, 122 bp, Homo sapiens
ccgagggtcggcagccggatcgccctccgtgccccatagcacccctcacactaaaaacgacgactttattaagatgtgaggtattctatacatacgataaataccaggaaatttaagtacag

SEQ ID NO: 17467 - DNA, 122 bp, Homo sapiens
ttttatttgactctaggtgctggaatagctttagcaatcattctggattgaagttggaatcgtggttagggtccggctaagcggcaagcaatttctcactccccaagtgatctgttactcgt

SEQ ID NO: 17468 - DNA, 122 bp, Homo sapiens
ctaccaggttaaccctctgttttctgtgtgtgtgtgtatatgtgtgtgtatatatatatacgctttgatgtaagagaaacagaaagtcttaagtaattttgtttcacagccaaaatattata

SEQ ID NO: 17469 - DNA, 122 bp, Homo sapiens
ctgtttgtcactgctttttctgaaagaagtaaaccttagtctgagtaaggtgcgtgaaatcggctgagcaaagtctgaccagcaggttcctcctgaaactatttataaccagatgtgcctcc

SEQ ID NO: 17470 - DNA, 122 bp, Homo sapiens
gattctcaaggctgtaggaggtttagaatacagcgtgtgctggtgcggcctgtgtgtgagcgagagtgtctgccgagaatcatacgggccccacttccgtggaaaacaatccgaattccctg

SEQ ID NO: 17471 - DNA, 122 bp, Homo sapiens
tgcatgtgtgtacgtgcatgtgtgtgtatgcatgcatgtgcttgtgctattgaagccatgcgagcaagagaacacccagaagagagaggtagggggaagtggagtcctcagtggtggaggcc

SEQ ID NO: 17472 - DNA, 122 bp, Homo sapiens
tggtcattaatggaacccgcccatcctctctctcaccagcatcactggaaggggtgcatgcgtggtcactggccatttgtccccactggttacactgagataactgatgcaaggccacacag

SEQ ID NO: 17473 - DNA, 122 bp, Homo sapiens
cttctgaggatgcttagaatattttttcccaagttctttgaaactaggacaggctctctccgacagtgcgatggcacacggaggggacgctgccatctcagaggccattcgacactggcact

SEQ ID NO: 17474 - DNA, 122 bp, Homo sapiens
aggtcctccggcctcggagcctcggatgcgggagctccaggaagggctcggggtgcgggacgcccacagcttggggagctgccagccccgggcgcagggacgaggacccctacgcctccggc

SEQ ID NO: 17475 - DNA, 122 bp, Homo sapiens
gtgaggcctgggaccaaggtggccattgggcctggggtttcaatagggcagacatcatcacgggctcgggcagcagtcctgggaagacgcatccagaggcgtgaagttcctctgggaaaaga

SEQ ID NO: 17476 - DNA, 122 bp, Homo sapiens
agcccaccagcccagggcatgtgggaggcccaggcataaagactgggtgtcactgaaggtcggcaccacccactcccctaacaccccgcaggggatggggggcccagctgctgcccatggca

SEQ ID NO: 17477 - DNA, 122 bp, Homo sapiens
ggccagctccaaagtctcaagtcagcccctgattctccatcccccctgccgcagcagtggcgctggtcacccctgcgtcacctggagcttccactgcagcctttccacttgtctctcccttc

SEQ ID NO: 17478 - DNA, 122 bp, Homo sapiens
tctgcgctttctcagtcctcaaaaattgcatagctagcactgccagagcagttactaacacggttctggcattcagctgatttttctaagtgaatataaaaccttacataataaaagatatg

SEQ ID NO: 17479 - DNA, 122 bp, Homo sapiens
aaactgtggtggtcttgtctctgccacaagataatgtaggcttgggcctcaagataatgtcggcatggtgtcccatctttggcatgagtcctaccctttccaagtgcagtggtggctgattc

SEQ ID NO: 17480 - DNA, 122 bp, Homo sapiens
tggggcccgcttgggctgggggctcctggagacagactggcaggctgctggctctaccatcgttcagcagaacctcatgcgtaagaagtaggggaaggcatgggatcatcatcccctcctga

SEQ ID NO: 17481 - DNA, 122 bp, Homo sapiens
gccactttccatacccgcttggggcagggccaacttcccattagcactgctgttacagatcgggcctgctttgcagccggccagtgccaactgtggtcatggcctgttaggaaacctacgag

SEQ ID NO: 17482 - DNA, 122 bp, Homo sapiens
gctggagtaaaacaactcaaacagcagttaaagcaaagggtgcagcagtagccggggaatcgaggaggcgcggggcggaaagggttagttaggagcccagaggctgatctgtgggcgcccgg

SEQ ID NO: 17483 - DNA, 122 bp, Homo sapiens
gcccaatctgatgcagctgtagctgcagtggtcagcaggcttgcaggccccagtgctgaccgctccacctgcctggaggccaccccccacttctcccctcagtctgcttttctcctgctcat

SEQ ID NO: 17484 - DNA, 122 bp, Homo sapiens
agaaaaattcaaaattttctcccgatcagtaatgtatccagagctggcgcccggatcctgcggaaccttatccaatgatccagagaatggaatggttagaattgagttagaatacctgaaag

SEQ ID NO: 17485 - DNA, 122 bp, Homo sapiens
ttccccgacggctaataataaacccgggttcctgtttcccggccgcggccactccagattcggggctgaggggctcactctgcaaccaaggcacgtgcattctggtcatcccacgcggggag

SEQ ID NO: 17486 - DNA, 122 bp, Homo sapiens
ctggcacctaccacagtgccaggcttacagcaggtgttcctgaaaagtctgctgaatgaacgaaggagggagtgcatgaattcatgtaaggatggagatccacatcccagggtacagagata

SEQ ID NO: 17487 - DNA, 122 bp, Homo sapiens
aggtcctctcacgagggagcgcccatggtacctccttactctcagctatctgtctctccccgaccccagagtgattgcgctgcttcctccagagggcgggaaccttggacgtggcggggctg

SEQ ID NO: 17488 - DNA, 122 bp, Homo sapiens
catcttctcctcctttctcagagaggaccaccctaggtttggaagacagaatgagaggcacggtcattttacttgactcctctagataagggatggagggggtgggcactgggtgctgtcac

SEQ ID NO: 17489 - DNA, 122 bp, Homo sapiens
ctctgccttaggaaagcgcgcgagagggaggggccggaacaacgaacgctggttacctaacggtccggcccagccagtcaggttcccaaagcccacaccgcgcgggccgccgaggtggcagc

SEQ ID NO: 17490 - DNA, 122 bp, Homo sapiens
tgtaccgctcagagggcatgaaggtctacaactccacactgacctggcagcagtatggtgcgctgtgcgggccacgcgcctggaaggagaccaacatggcgcgcacccagatcctctgcagc

SEQ ID NO: 17491 - DNA, 122 bp, Homo sapiens
agaggcagcagcgcccccaaggggccagcaaggtggggcagcggcgggagtgctgagctccggaggggagctctcctttcttcaacaggcatttattgagcacctgctgtatgtggtccagg

SEQ ID NO: 17492 - DNA, 122 bp, Homo sapiens
taaagctggcttgtgaataaaggagcctgctagagaggtttatggctggaaggataaaaacgtctgtcatgtttcaggatcagagagtaacttctttggattacttgtcacatttttctctt

SEQ ID NO: 17493 - DNA, 122 bp, Homo sapiens
gcttggcacagccacaactgaagctcagccgtcggatgtgattattgttgctattgttaccgctccgcctggactgggtgcccggtcggaaagtcccgctccccgctcctcctcccaggcgc

SEQ ID NO: 17494 - DNA, 122 bp, Homo sapiens
aaagcgctttggaagctgtttggtgcacgcgggcgtcagagggcaccgtaggtcactgagcggggtctcacccagggagagaatgcgacttcattcctaggaggctgtgctgggggctccgc

SEQ ID NO: 17495 - DNA, 122 bp, Homo sapiens
ctgcagccttgcagggagccgacacctgtgctggctcctggagttccctgcccccactgccgccagcatgcctggctgtgcgcagtggccggacacctcacttacccacacacccctcaccg

SEQ ID NO: 17496 - DNA, 122 bp, Homo sapiens
ctcggctgtgtccagtcggggggagcgcatttgcaggccgcgctgggagcgctgggaaaacgagcgctggccccctgcacacacactcattctgcctggccttcctccgggtaatcgctttg

SEQ ID NO: 17497 - DNA, 122 bp, Homo sapiens
tccagcgggagcaggtcggccgagtccttgtgcaggaactgggtggcctgtttgagccggcgctgctggctcaggtgggctcggtctcgaagctgtgcctcctgccccctcgtcctggcttc

SEQ ID NO: 17498 - DNA, 122 bp, Homo sapiens
ctggtgggatggccaacggcatccagcagtgctgagaggttctggggggatggccaagggcgtccagcggtgccgagaggttcgggtaggacgaccaacggtgtccagcagtgctgagaggt

SEQ ID NO: 17499 - DNA, 122 bp, Homo sapiens
gaaaagatgtcaattccccataaattatctatcaatgtaatgccgttttcagtacattaccggtgaactaacttactttatttttcttctctttctttctttctttctttctttctttcttt

SEQ ID NO: 17500 - DNA, 122 bp, Homo sapiens
gtggagaaatttagcagaataggtctgtggactagtgtagaatgttatcttggagtaattcgggcaattgagtccagtgttgagtacagtgtccctaaaacaccatctctttgtatctattt

SEQ ID NO: 17501 - DNA, 122 bp, Homo sapiens
attaggccctgtgttccagagtcccaggcatccttgtcatggagcaatgacagagtcttgcgaaagagacataccccagctctgaattaggggacagagtaacaccaggatgtggactagac

SEQ ID NO: 17502 - DNA, 122 bp, Homo sapiens
tcgtttgtgttaagtccttgctccattggctctcagctgcactcacagcaccagtgagaccgacacggttgtgccccatcccacaggcgccaaatggagggcgcagggttttaggagctcgc

SEQ ID NO: 17503 - DNA, 122 bp, Homo sapiens
ttacaccctcctatgctacatatgcttttctccaatttttgtaaccagcacttgcttaatcggtgataatactgcttttcttcctttaggctaagccacactcctcaaaaatcctgaagttt

SEQ ID NO: 17504 - DNA, 122 bp, Homo sapiens
acaggtttaaaacttaacacatttcttcctgactgggacatccttggttatttcattaggcgtggtccccttcctcctcgagcagcctggagcatctgctcctgacttgttcttcacgtcct

SEQ ID NO: 17505 - DNA, 122 bp, Homo sapiens
ctggaaggtattttgccttcttcattgccccaaattaggatgtagggggagacgaaaagacgtcctgcagggaagggcgtggattttggagacagccacaccgggttcaattggcctcgccg

SEQ ID NO: 17506 - DNA, 122 bp, Homo sapiens
aaggctattgtgtcagatagtgcagataaagaacattttcatcaatgcagaaaaatctgccggacagcactggccctagaggaaagtcagataaaatgaaaaacaacaatttcgcccgccgg

SEQ ID NO: 17507 - DNA, 122 bp, Homo sapiens
cagtaaggcaagaatccaggagtacttctgcaaggtgtctgaatggggctcagcggtgagcgctccagggcccctgctctctctcctctcccctcctcaccactgatactcagaacacacct

SEQ ID NO: 17508 - DNA, 122 bp, Homo sapiens
gctcaagaaatagcctgcaaactaaaggacagcgcccaccttctcggacgtccacattctcggacgcccacattctcggacgcccacattctcgggggcgcccacattctcggacgcccaca

SEQ ID NO: 17509 - DNA, 122 bp, Homo sapiens
cattgctcacggatgcccaaggaggggacgcacgagcccccgggggtcgggtgacaaacacggttctcaaactcatccgagacaatcagtgagcagagccacgtgattacacccagcacatg

SEQ ID NO: 17510 - DNA, 122 bp, Homo sapiens
cccgccaggcggcgtccagtccagggacctgagccaggcactgctgaccgcaggcaagagcgaagactgcctggagtaatagctcaccaatgcagcacaccggcctccatgccaaagagggg

SEQ ID NO: 17511 - DNA, 122 bp, Homo sapiens
cgtgggaatactgcggtcctcctttcaggcagctgtgaatgacaaacggtcgctggctgccgtgacacccattgtcccgcgagagtgccctagctgggccccagtgcactcgaggcggtccc

SEQ ID NO: 17512 - DNA, 122 bp, Homo sapiens
aaacagcaggttgaaaagccctagccctttccagtactgggaacgctgcaggcaccaccacgtggataagtctgagctggtctcttggaggatgagagaccatgtggagtgaggcctcagcc

SEQ ID NO: 17513 - DNA, 122 bp, Homo sapiens
ccttggacaaaaggctcaatggccttgagccacccaagttcaagccagtgaggtgggtagcgttaacatccaaataccagtaccagcgttggtttcaccccccatctctcctgagacagctt

SEQ ID NO: 17514 - DNA, 122 bp, Homo sapiens
tggcacccgtcggtgaggcggtgccgggcgggggttgtcgggtgtcatgggcggtggcgacggcaccgcccccgcgtctccctgagcgggacggcagggggggcttctgcgctgagccgggc

SEQ ID NO: 17515 - DNA, 122 bp, Homo sapiens
ttgggaatagctttgtgggtcactgcgggtgaatctgcacacagaagatgtggctcaaaccgaatgtgtatcgcatttgaaatgtttatatcgttcattacccggtgtatccgcatttctcc

SEQ ID NO: 17516 - DNA, 122 bp, Homo sapiens
aggtgctgcagggttggggtggtccctgtcaccgcctgctgctggtgggggtcagctgcacggatgcacggcctcgcaccagcggcagccccagaggccatgcatagggcaggccccggtgg

SEQ ID NO: 17517 - DNA, 122 bp, Homo sapiens
aactgatgtcacgtgtgtgcacggccagaggcggagggctcggctggctgctccagtctgcgccgtccatgcgtctcgggtgtcctatcccggaggatacatttttctttttcagaaaaggg

SEQ ID NO: 17518 - DNA, 122 bp, Homo sapiens
aggctgggctgggcaggcctccttctcaggctgctgggcatggccaggcctgcctgcatccgcaaatgcccgcagcccatcggagcgaaaaggggcggggcacgcactctcagagaccctcc

SEQ ID NO: 17519 - DNA, 122 bp, Homo sapiens
aggcagagtgggatgtggtgccaggggtatccccctgggaatgggacccaagggatctgacgctgtccagggagggcgagtctggacggggagggaaaggaagggaggactgcgtacccgga

SEQ ID NO: 17520 - DNA, 122 bp, Homo sapiens
tgacctcccaccactgtggtggtccgcacagtgcgtgtcactcggtattcctcgaggctccgggagctaccactggtgagacctacacctgggtggggacttggctctcggggcccaggcag

SEQ ID NO: 17521 - DNA, 122 bp, Homo sapiens
ggatttcgccggaaatcccggaagtgacagctttgggggtttgctgctggctctgactcccgtcctgcgatgggttgcgacgggggaacaatccccaagaggcatgaactggtgaaggggcc

SEQ ID NO: 17522 - DNA, 122 bp, Homo sapiens
caaatccttatttggaactgtatttatcttaatagggccaagctcggccaccaagctctacgatgagatgcagagacaaaaccctgtccagtggggtcctctctgccaaggaaaagccaagg

SEQ ID NO: 17523 - DNA, 122 bp, Homo sapiens
atccccggttgcgtcattagtaggcgtggaggggcgggactcgtgaagctgcgctggggccgggctctgagaggaccggcgcagccgcggggagcctttgaggccctccctcggtgtttttt

SEQ ID NO: 17524 - DNA, 122 bp, Homo sapiens
agagaactgccaggcccgtgggccttaagtcccagccatagggaagggctgcactgagcacgtccgaaggggcatagaaacggatgggcgagaagaaagcgcagggccgaggggagaggcag

SEQ ID NO: 17525 - DNA, 122 bp, Homo sapiens
tcccttgggcttagggatgatgtctgtgtgcacctctcaggccactttagggttgtggggcgccccttcccttcttgcagcctaagaaaaaacgcatatcagaccagacgtgggggctgcgg

SEQ ID NO: 17526 - DNA, 122 bp, Homo sapiens
gcagggccgggcagcaccaggcggcaggtgtgatcagacggagcgggtcccacggaagggcgggggcttgagctggacaaaggctgggccagtgggtgggcaggacctcaggtaccaggtct

SEQ ID NO: 17527 - DNA, 122 bp, Homo sapiens
ttcctctcacgtttacatcccattcattcttcctccgggcaattcaagtccattcacagccgccacagatgcacgtgtgcacgcgcgcagctgcacctttaaagaaactctcaagtcctggc

SEQ ID NO: 17528 - DNA, 122 bp, Homo sapiens
cctgtgggggctgggagacgccctggggcagcagccctggggtaaccaagggaacaaacacggaaaaccagggacgtcagtccttatctggagctcattaaatggggaacattagtcagctg

SEQ ID NO: 17529 - DNA, 122 bp, Homo sapiens
gtataggggaaccaagcacaccgcgggtgagaaggagagggattgacaagagccaaggggcggacgtgggagggatccagatgaccccatttactcagagggaggacagacagctgtactga

SEQ ID NO: 17530 - DNA, 122 bp, Homo sapiens
gagaaactcctatgacatgacagattttattttccccacttaaagagaaacacatggcttcgtgcatttccatttttcctcttctctcctacgttcccttggatttagctcttttgcttaaa

SEQ ID NO: 17531 - DNA, 122 bp, Homo sapiens
caaagacgcagggttcttcactccggagccaagaggatcacggagtggcagagtgtgaaccggaaggaccctcagaaactgcgtccagccgggggaagctcaggcccgaagaaagtcaccgg

SEQ ID NO: 17532 - DNA, 122 bp, Homo sapiens
taacaccttctgtaagatgctttatttcattgaccaacaacatggggtctgaaaacccagcgggaggggtctttttatcacagagccagtcccaggcgagctgatgcatctctgctcctctg

SEQ ID NO: 17533 - DNA, 122 bp, Homo sapiens
ctcgaactcctgaccttgtgatccgactgcctcggcctcccaaagtactgggattacaggcgtgagacactgcgcccggtgaaaggcacatttttgaatacaggagatgggatggggtagat

SEQ ID NO: 17534 - DNA, 122 bp, Homo sapiens
acgggtctctggttcttcaagttttcatctaaaactctcagtctttgctatcacaaccaacgcacccttcctacactccaaagttgatggaatgaaatgtcttggaattgagggtttaatta

SEQ ID NO: 17535 - DNA, 122 bp, Homo sapiens
acacgtgaccaacacgtgtgtgacacgtgacacatgactgacatgtgactaagacgtcaccgacaaacacgtgactgacacgtgatacatgattgacatgcgaccaacgtttgagacatgtg

SEQ ID NO: 17536 - DNA, 122 bp, Homo sapiens
ccactctagaatactcaggtttcatttaaaaagaactactgtaccatctcaggctatcaacggcatgtgtacttgctttgtttttcaataaaaattccaccattttctctttcttgcaaatt

SEQ ID NO: 17537 - DNA, 122 bp, Homo sapiens
ctctatgcgaagtgcggtgggaaccgtcagagggtggcagccccacacccggctctcccgcggcgcctcgggctctcccaggcacctgacccagcccgcgggccccctactcaccgggcgcc

SEQ ID NO: 17538 - DNA, 122 bp, Homo sapiens
atttgcattagttggcaactgatgattctggcaaaaccacatgcaaagagctaatgaacccgttgactccactgataaccacattctgtagttggaggaggtagtaggaatttagaatcaaa

SEQ ID NO: 17539 - DNA, 122 bp, Homo sapiens
gtagatgatgtctagcattttttttaaatgacacggaatagaataaaaataatcagaccacgctgaggtaaaggatgttctggaaattattgtgtggttatgtacttgtgggtcatgatgtt

SEQ ID NO: 17540 - DNA, 122 bp, Homo sapiens
atagaaaaaaaatgacaaataatagaaaaaaactaaataggggctgggcacggtggctcacgcttataattccattactttgagaagccaaggtggacagatcatgaggtcaggagttcgag

SEQ ID NO: 17541 - DNA, 122 bp, Homo sapiens
gaataaagagggtgaaccaggcctggaaggggacacaggtttggcgaccagacgggtcaccgcttggcccggcctaatccaactgcgcacgtcggtgggccacagcatcgcagcgctggatc

SEQ ID NO: 17542 - DNA, 122 bp, Homo sapiens
cgggtttgcttcccacctgccctcagcctgcggggtgctcctcctggctcctcgggacaccgtggccttttatcctggagctgagtgtcgggcctgccctgccatgcagggttatctctgat

SEQ ID NO: 17543 - DNA, 122 bp, Homo sapiens
ctgatgataggctaatgcttatatttactgataaacttcctttttgacggtcatgggcttcgggggccacccaaccaaactgtgtggctgcttttatgttgggccaaaagacaggctccttg

SEQ ID NO: 17544 - DNA, 122 bp, Homo sapiens
tctacctgagtcctgaagctccctgtcctgaaagccacagacaatatggtcccaaataaccgactgcaccttctgtgcttcagctcttcttgacatcaaggctcttccgttccacatccaca

SEQ ID NO: 17545 - DNA, 122 bp, Homo sapiens
aacgcttggataaagggcgttagtggagggacagaattgcagctccgtcctcccagggggcgctgcaggcacgtctgcttgggcaggggcccggcggaagcgccgctctaggctgcagccgc

SEQ ID NO: 17546 - DNA, 122 bp, Homo sapiens
gtgctgggattacaggcacgagccaccgtgcccggccaacactgttttatcacgtctgcgcgccaactgctcttggtttgcgcaccacctggaaaggggtgtggctttcactcattctggta

SEQ ID NO: 17547 - DNA, 122 bp, Homo sapiens
ccactaagcctctgtgattttaataccgtgccaggccatggcaaagtgaggtgcctctgacgtttgggctgccacagcgtgtttttcagttactctggtaacacctgtgacctgagggttat

SEQ ID NO: 17548 - DNA, 122 bp, Homo sapiens
tttcagcaatggtttgatctaactggaaggttagaaggaaggaaatgtgatttagtagctcggattcaaggcattctcatcaatgatgtgagagcagttactgggatatccttggcttccct

SEQ ID NO: 17549 - DNA, 122 bp, Homo sapiens
gccccccggcgacgcttcctgctccgcccctaagtcgggaaggttccttgcggttcgcggcgtgccggacgtgacaaacggaagccgcacgtctcactagtaccctcgcagacggacagcgc

SEQ ID NO: 17550 - DNA, 122 bp, Homo sapiens
gaatttctctctgcccctcaccttggaataaacaggaagcgacaagcacccagcccggcccggcacttgcctttgtgaaggggtctgccctgcacagcctttaggaagcttcctcgggaccc

SEQ ID NO: 17551 - DNA, 122 bp, Homo sapiens
gttcttccagctggccgcgcagtggtcctcgcacgtgaagcacttccccatctgcatcttcggacactccaaggccaccttctagccccacccaccagggggcccacctcctgccccatgct

SEQ ID NO: 17552 - DNA, 122 bp, Homo sapiens
ccatggaacttggtaagcctttgttaactcactggcactgctagatcatgctatggtccccgagggccagggaggcaagtgtgctagtccaagtaaaaagctgatatgatctttgtatgaac

SEQ ID NO: 17553 - DNA, 122 bp, Homo sapiens
caggccaggtctgtggatggcatgtttgaagctggtgtccccaggaggagagaagcaagacgaatgaggaggtctgcatgtccaggctcaaaacttcactctacattatcattggctcctgt

SEQ ID NO: 17554 - DNA, 122 bp, Homo sapiens
ggatcttgctgaatgggataatgatattgccatcaggccaaagtagtaaagagcccttatcggacagatgcataggacattacatgacacctggggctaagtttgcaagaagagcagtgttg

SEQ ID NO: 17555 - DNA, 122 bp, Homo sapiens
aggagggcggggcctcggactgactctcgaatgtcccggatgtgcggtcttggaggccggcgtagcgctaagcttctcggcagcacctgcccaactctgtagaaggcgctcagtgtatactt

SEQ ID NO: 17556 - DNA, 122 bp, Homo sapiens
acttctccttctttgatcccaccgatttctcccctcctcgacaacatcctaatcctccaccggaacagcatgaccccccaccgtatgcctccgctccggctctacctctctctccccttctc

SEQ ID NO: 17557 - DNA, 122 bp, Homo sapiens
gtatccacaaacagactttaaaaccagcatataaaacggaaatggcgggtagggggtggccgttcagggtaggtgcttaacttgctaatcatgggcgcagaaatatttaaaacggagatagt

SEQ ID NO: 17558 - DNA, 122 bp, Homo sapiens
cctctcccacgcagacacgcagacacgcaggcacccacaaaatacagtctcatagacacacggtaagcaactcggacagttccatggatgggacgcccgcagccccgtgggacacgcgatca

SEQ ID NO: 17559 - DNA, 122 bp, Homo sapiens
atttagccacctgccatcttccatgaaagcaaacacagttagccaacaattcccattttccgagagaaacacaaagtctacagtttaaatgtaaaaccttctgatttttaagtgttgccatt

SEQ ID NO: 17560 - DNA, 122 bp, Homo sapiens
aaatttgcaactagtcacctaaaagtactggtttacagcactggcatttgaccttggctgcgctctgtcatcacctagagatatttacactattgcccaggttccattgcaggaattctgat

SEQ ID NO: 17561 - DNA, 122 bp, Homo sapiens
ctaggcaaccattagccaaaggtgatgagagccgggttctgggaaggacagcaggctgtgcggggtgacctcagactggacagaaggctgtgactaactttattggcatctctctagagaca

SEQ ID NO: 17562 - DNA, 122 bp, Homo sapiens
ccagatctgagcgctgaccacagagcctttcctgggataaggccagggtggggaggctcccgccctgccaacctccatcccggaacctgtgctgactggtctctctccccaggtgactatga

SEQ ID NO: 17563 - DNA, 122 bp, Homo sapiens
taagtggaccaagcaccacactgactcacaacccttatctcttcagcatttggccgggtgcgtatcaggtaactgcgtgtctgacttgctgcattgctgtcgaccatgcatccagagcaagc

SEQ ID NO: 17564 - DNA, 122 bp, Homo sapiens
ccatcgcctcggtcccctccggaaactgcttctgaagctgaaactttgggcgcctaccagcgcgggcgggagcctagggggcggagggcggcttggtgcgggcctgcgggcgcccctcggcg

SEQ ID NO: 17565 - DNA, 122 bp, Homo sapiens
gtttgtattttctgcatattctctggcaaccttgccccatacttacttatttagcatagtcgagtgctctagtttctgtctctcaggcactcgtaactaaggaccaccattggccattggta

SEQ ID NO: 17566 - DNA, 122 bp, Homo sapiens
atataatattttttaaggacaaaatgtagcactccctgtcagagaaacccttcactgagacgacacagccaatgaagttggctataaaggactcctgtattcccattatacatgggagacac

SEQ ID NO: 17567 - DNA, 122 bp, Homo sapiens
tatccagctcgatcttcaccttctgggatatgctcttctggatcctcttgctgaagctggcgttgcctgctgcccgaccgcaccgctcaccatcctccgcaggcagcacagttgccaggagc

SEQ ID NO: 17568 - DNA, 122 bp, Homo sapiens
attcacactgttgtgggagacccagagcccagcgccccgggcaggggccatacccagctgcgtgtagctgaaacctgatgaaatagccgccccgggcaggatcacacccggctgcgcgtagc

SEQ ID NO: 17569 - DNA, 122 bp, Homo sapiens
gaagccaccaacaatgagtactcagagatcaagatccccaagtaagaaaatgcagaggctcgggcttgtttgagggttcacgacccctccagcaaaggagtctgaggctgattccagtagaa

SEQ ID NO: 17570 - DNA, 122 bp, Homo sapiens
gcagatcataccctggttacaagctaattaccacatcctatacaatgtggatgtgttcaacgtgtattcaatgatatgaataaatgaacatttgcaattttaaaatcccaaatcacttgcca

SEQ ID NO: 17571 - DNA, 122 bp, Homo sapiens
tcaggatggcagcttgttctaaggaagcatttgtatcttcagacgcaaatttccccagaacgcccctggctggtttcaactgtcagtcactccggatcgctcctgggtgtctctctcccggg

SEQ ID NO: 17572 - DNA, 122 bp, Homo sapiens
aaagtatgtactcttttgtctggcttctttcgcccagtatcatgtgtgtagattcgtccacgctgctgcatgtggcaggggttctcattgctgtgtagcatgccaacgtgtgaatataccac

SEQ ID NO: 17573 - DNA, 122 bp, Homo sapiens
acctgaccctgaactcaaattatgacgtatgatggccatcccagcaaacaagataatgaccgtaatctaaaccttacctatctaaaacggacctgactcacactaactcttaagttttaacc

SEQ ID NO: 17574 - DNA, 122 bp, Homo sapiens
tgatcttggggccaagtgcttccagactttgttctctggccttaaaggtgaagagcccggcgctgaaggccacagacatcacggcggatttcacagagggccgcgttccgggagcgggtggc

SEQ ID NO: 17575 - DNA, 122 bp, Homo sapiens
tgcaggctggttccgctgctcaggctctgtcatcctgcttcttccttctcaaggccacctcgggagcagctggcaggcaagaatgcccccctcacacacagggaacccaagtccctgctgac

SEQ ID NO: 17576 - DNA, 122 bp, Homo sapiens
atctcttataaaagccgagaggaagcaaatcagattccaggctgctgccaggtgttgtctcgtcttccgccgttgctcagcacccgccgctgcccccactggctcgattcccaaaggggtgg

SEQ ID NO: 17577 - DNA, 122 bp, Homo sapiens
ccccgcccccgagcccggagcatgctgggattgtagtcccgaagcgcttgaaacaacgggcgggagcggtgaaaagactacagctcccagcatgtacagcaagcccggcgcagccctgcttc

SEQ ID NO: 17578 - DNA, 122 bp, Homo sapiens
ctggacgatggcccatcatggcgacgcgatgcagagccgggtacccagagctgggggaaccggcagaaccttctggagagagagaaccagacagaagcccagaaaacgctgcctcctcaggg

SEQ ID NO: 17579 - DNA, 122 bp, Homo sapiens
taccgcaggattgtccacgccactgattggatcgattgtcacttggccacccccatctgccgtccctgcctctgaactgtctgctatcttgcaaccgattgtctctgtttctttggttccca

SEQ ID NO: 17580 - DNA, 122 bp, Homo sapiens
ccctggcagcttcccttcagcccacgttggtttgttccatgcagttcatgaagtccctaccgtggtccaggcgctgggggagagggcaggacagagagttcagaggtcaggtcgtgacgaga

SEQ ID NO: 17581 - DNA, 122 bp, Homo sapiens
tgagctgtttctctgttctcaaacataacttgcacttgacaccctgtgggcacacacccacgcacacactgtggattttgagcaggaaataaagtttccaccctctcctgggcgtcagtgct

SEQ ID NO: 17582 - DNA, 122 bp, Homo sapiens
acgcttggaccccattattaacacttttaatagttacatggagaaagatgttggaggccacgcttttgcatctgatataaaatcagggttaatgatttttccaccagaagtattcaaaagta

SEQ ID NO: 17583 - DNA, 122 bp, Homo sapiens
gtgctaggattacaggcgtgagccaccgtgcctggcctcttgttttatgtttgctgttctcgctgtaggtgaggcattcccaccatattcccttgttaaaatcctactggcccttcaaatgc

SEQ ID NO: 17584 - DNA, 122 bp, Homo sapiens
caggactcaaacaggaaaactgagcctcggagacgttcaactccaacagggagcagcagccgctgctgttcggtcgcccagcggcctccctggaggagagtccctcagtgatgcctcttcaa

SEQ ID NO: 17585 - DNA, 122 bp, Homo sapiens
ctcccgggcccaggctcctcatcagccagagcaactgaatcacgggcctgctgcagggggcgtcaccctgcctgctcaaggggaagagggagctgggcctgtctgccggcttgacaccacct

SEQ ID NO: 17586 - DNA, 122 bp, Homo sapiens
aggctggccagggaagcctggatgaatgaccacattcatggactgtgcaaggctgcttgccggtccccttgcttcacacatgaggagacggaggcccagggaggagaagtgacatggctcag

SEQ ID NO: 17587 - DNA, 122 bp, Homo sapiens
gaacggctgcggcagctgctgaggcagcggcaggcggtgggcaagctgctgggccactggcggagcctgctgcgtcgcgtgccggcaagcccgggcctggcgcacggcctgtattggcccca

SEQ ID NO: 17588 - DNA, 122 bp, Homo sapiens
gattctaagtgtgtggggaaagggagtttaattgactcttatcttccatattttttttcccggatgtacatttgctccatttaaaaatttatctttgggggagcagagaagctgtcacctgt

SEQ ID NO: 17589 - DNA, 122 bp, Homo sapiens
tacatggttattctcctaagttgctttgtgtgtgcaccacacagagacgctgacatcactcgttgatttcatctggccttgtgccctgagccttgattgaaacctggctaagtcatgctggc

SEQ ID NO: 17590 - DNA, 122 bp, Homo sapiens
ggcggttacctgcttcaaaggcgatcagatcatgccaggggactgggaacagaaggctagcgagcggtgggggtggggaacggcctgagctttaggacagaaaggatggaaacttctttaaa

SEQ ID NO: 17591 - DNA, 122 bp, Homo sapiens
cgagactctgtgggcgtaggaccctccgagccaggtgcaggatacaatctcgtggtgcaccgttttttaagccagtccaaaaagcacaatattcgggtgggagtgacccgattttccaggtg

SEQ ID NO: 17592 - DNA, 122 bp, Homo sapiens
aggcggaagcatagggacaagcctgagcgtcacaggctccccacaaacaaccgcgtgacccggggactttccccagggtgtgcaaaagcacaggcaccccctcagttctggggtgaaggtgg

SEQ ID NO: 17593 - DNA, 122 bp, Homo sapiens
cgcaggcaggcggcaggtgctagaagcggggctgggcgaggtgtgtgcccgctgggctcccgggccgccgccccctcactgcccaggtctttccctcccttcgtgctccccagcgcgtccag

SEQ ID NO: 17594 - DNA, 122 bp, Homo sapiens
ttgtagtcctgcagccaggcgaccagagagccgggagccgttaagagactacaacgtccccgcacgcccggcgaggtgcgcagcgccctgcctctctttcttcttctttcttctttcttctt

SEQ ID NO: 17595 - DNA, 122 bp, Homo sapiens
cccacatggaagcatgaggccttacttggacatgtgtcctcctgtcctagatggtgagctcggaggaagacttgcattgggcccaatggagctgggccagtttctgtcagccaggtccccag

SEQ ID NO: 17596 - DNA, 122 bp, Homo sapiens
ggctgtttaggaaggctcagggtgtttgaaagacaacgttaagctctgggtgagtctgcacggggctgaaccagactccactttgcagctccttggtttcccggggtgaggaatcacaaaca

SEQ ID NO: 17597 - DNA, 122 bp, Homo sapiens
tgtacgacgacagtggatctgatcaccgagacggctgctgagtaactaacgagtggggcgcgtctacactgtggaggtgctggacagagggaggagtcgcctcctgggctggtcggagtagg

SEQ ID NO: 17598 - DNA, 122 bp, Homo sapiens
gctgcgcgcggcgcttgcgggccagctggagttccgggtgggcgtggccttggcgggccgcgcactctgagcagccggcctgccctgcaggccacgggcaatgaggggcttagcacccgggc

SEQ ID NO: 17599 - DNA, 122 bp, Homo sapiens
acaccatatcattcataggaccccttcattccaaagctcagcattgggctgaggcctgggcggagggcaatggagaggtgcagcgtgggggctgagtgcggcttggctgggtccccaccggt

SEQ ID NO: 17600 - DNA, 122 bp, Homo sapiens
agccccgcgtctccccagattgtgcggaagcaacgggagggtcatggaggcatcctgactcgggtgtggggttcgtgcgtgggaggagcagtggtctgtggggcccccagtccccactttct

SEQ ID NO: 17601 - DNA, 122 bp, Homo sapiens
agcttcctctccctccatcctcatctctgtctccacatctcccccttctagtctgaggcacgggagtcattgttcaagttcaggccagaaatgtatacacaggtcaaataagaacactctaa

SEQ ID NO: 17602 - DNA, 122 bp, Homo sapiens
gtgcctggcagaagggttgaacatagggcaccaccctggggtataggtggtctgccccagcgtatccagtctgtaatgatgtagggagcaggctgatcaatgctaggccttagcccagtaaa

SEQ ID NO: 17603 - DNA, 122 bp, Homo sapiens
ccacttgtgcttcatttgagaaagctgggtttccttttgcccatttgtctataggcaaaacgtgtctacgtgtcttttgaacacactgataatgctgtctgcattaagacttccggccagcc

SEQ ID NO: 17604 - DNA, 122 bp, Homo sapiens
aatcaaccattgagagtaaacacagttttcataaacttaagtcactgtaggctactcccacgatcttggctacacctgaacagcacctgcattattatttgcttagtcatatcctttaaatt

SEQ ID NO: 17605 - DNA, 122 bp, Homo sapiens
ctgacctggcaagccaggagcccctgccctgcggccgggtgggggcaggtggggcagggccggggcacgaacctgcgtctgccagctgctccctgtcaggctgcagccaagtccgggcagct

SEQ ID NO: 17606 - DNA, 122 bp, Homo sapiens
aagtgactcaacccaggcaccctgcacaggaacatgtgtcatcacggtttcagctccggacggtgagatcgcagtgtgttctcaggcccttgttaggattcttagcacaatagttgtttctg

SEQ ID NO: 17607 - DNA, 122 bp, Homo sapiens
tgcagggaggggctgcagggggcggggctcggggagaaaggggaggagcttgcagggaggcgagggattcccttacttgtagtcaattgctgccattggcctagagacacacagaagagacg

SEQ ID NO: 17608 - DNA, 122 bp, Homo sapiens
aaaaagaattattaccagctgctttgtggtcaggatgtcccaagctggcactgcagcaaccgctgttagggggcttggtgccatttgcaaggatgtcatcctcagccactggtttctaggca

SEQ ID NO: 17609 - DNA, 122 bp, Homo sapiens
ctggtcttgaactcctgacctcaggtgatctgcccgtctcggcctcctcaagtgtgttaccggaaaatgtttaagcatgtttggagcaacttacctatgtgaactactgtttgcaaatttta

SEQ ID NO: 17610 - DNA, 122 bp, Homo sapiens
ggcgccgcgggcagcaggagcaggggcaggctcaggacgcacagccagcaggtcatggtgcggagcgtgggcctagggccgcgccaccatcctcctgcgcacctgcgggcgggcggggagcg

SEQ ID NO: 17611 - DNA, 122 bp, Homo sapiens
gggtgaaggaagagccgcagccgccacgtcctctctttctccgggaatgtgcaggattaccgtgaaattatgactcgtcatcctgcaaattaccaatgggaaaattggagtctagaaaatgt

SEQ ID NO: 17612 - DNA, 122 bp, Homo sapiens
acctgagtctcctctgcggagcggacctccttgttggtcagcccacgcagattaggagaccggggcctgtgtcgcagctgcaatgtggtgtccctgagcacatcacagcctcgcagggctgc

SEQ ID NO: 17613 - DNA, 122 bp, Homo sapiens
gcctgggactgcggccgcctctctaaatagcagccatgaggcgcctgggggcagtgtcctcgcgggccagcgacgggcaggacgccccgttcgcctagcgcgtgctcaggtaggagactctg

SEQ ID NO: 17614 - DNA, 122 bp, Homo sapiens
aggaggtaaagaattagccaatcatctgtcgcctgagagcacggcaggagggacaatgatcgggatataaaccccggcattcgagccagcaacggcgacccactttgggttccctcccattg

SEQ ID NO: 17615 - DNA, 122 bp, Homo sapiens
ttacaggagtgagcccccgcgccctgcctctgcgtttcttttctgtctatgaaattatcccgattgttctgctcattggaacactgtttctgctttatagaatgagacgttgcccaattcta

SEQ ID NO: 17616 - DNA, 122 bp, Homo sapiens
ggcttccccgccatcttccggacaaagtgtcaagtacaagttcaagttcagggccaggcccgggggggggcgctgagccttacccggccgcctttgttctctggcataatcgctcccacgtc

SEQ ID NO: 17617 - DNA, 122 bp, Homo sapiens
tgcagctacacggtgagcccaggccaccctcagcgcccacgcccggcacccacctgcgcccggcacccacctgtgcccagagctgtgtccccacattccttgagcctctgccaagccctccc

SEQ ID NO: 17618 - DNA, 122 bp, Homo sapiens
ccactgcactatgggagcccctctctgggctggtcgaggtcggagccagctccctctgctcgcagggatgtgtggagggacaggcgctggcaggaaccggggctgtgcaccacgttcgcggg

SEQ ID NO: 17619 - DNA, 122 bp, Homo sapiens
accatttttctacatcgtcaagtgcacgcaccccgtgtctcatagtattagtgatgaagacgaggatgaaactaccaaagacatcagtggggagtgaattatacttgggggaggtgtaagca

SEQ ID NO: 17620 - DNA, 122 bp, Homo sapiens
atacttaaaagccacttaaaactgtttccaaggcctacatttaaccctccccccaccccccgccccaaagctaatggattgtttttgattttaaagaaatgcctggtgtatatgtatttgga

SEQ ID NO: 17621 - DNA, 122 bp, Homo sapiens
gaaaaggcagatcccacgcagcttcctgtcctaattgttccatgtggattcaactgttctcggttttgggagaaatatatacttgttcaggtctcaaataatctgcccctgaactcaaagga

SEQ ID NO: 17622 - DNA, 122 bp, Homo sapiens
gtggggggtgagacgcgggtgctagggtctccggcacctgggagatccccttcctccccgcgtggaagagccaagttgggaagaggaattccacctccagtgcccgaggggctaacaggaga

SEQ ID NO: 17623 - DNA, 122 bp, Homo sapiens
acacccggctgggtctttccggagctctgcaatccacctgtctgctatcccatcaaaacccgaggcttactccctgcgcgtcagcagtagccgaactctgcgaagttgtcccttccgcctcg

SEQ ID NO: 17624 - DNA, 122 bp, Homo sapiens
caacctggtgtcgcaccggcgcatccacacgggcgagcggccctacgcctgtcccgactgcgaccgcagcttcagccagaagtccaacctcatcacccaccgcaagagccacatccgggacg

SEQ ID NO: 17625 - DNA, 122 bp, Homo sapiens
tcctgtcatcatgggaggcgtgtagacttcaggaattcctgtctattcaatattttctctcgaggacgcagggagagggaaggaccactctcagggccacagtccatattccaaaccaggcg

SEQ ID NO: 17626 - DNA, 122 bp, Homo sapiens
tcagcccaggcaaggcctggggccctgggcagcctccaggtgcagtgccctcccgtgggccgcacccttgccactgccccagggcatgtctctactcaccaattatgaagggcttcggcatc

SEQ ID NO: 17627 - DNA, 122 bp, Homo sapiens
ttaactcatttaagtcttcataaaatttcatgtaacagcattatttttagggatgggaaacgaaggaaagggattaaataacttccttaagcttttacagctagtaggaggcaaaactgagg

SEQ ID NO: 17628 - DNA, 122 bp, Homo sapiens
ccccaggccttcagccccgccccgcctggggccgcctcctgcccgctcccctcccctaggcgctgggccgctgcggactgcgaggttagcagttaaccacacacaccaataataataacata

SEQ ID NO: 17629 - DNA, 122 bp, Homo sapiens
ctactttttgttgggcccggtggttgatgcctgtaatcctagtactttgagaggcagaagcgggtggattgcctgagctcaggagtttgagacctgtctgggcaacatggcaaaaccccttc

SEQ ID NO: 17630 - DNA, 122 bp, Homo sapiens
gctaccagtgtcctcctcacccttgacaacaacgtggtgaatggttccagccctgccatccgcactaactacattggccacaagacaaaggacttgcaagccatctgcggcatctcctgtga

SEQ ID NO: 17631 - DNA, 122 bp, Homo sapiens
gtgcatgtgttaggagtgtaggagtctggaccactgacctctctggacgggtcctacacgcgggtcccgagcccccaaccgggctcctagcacgtggggagagagccaaggtcaaggagcct

SEQ ID NO: 17632 - DNA, 122 bp, Homo sapiens
gggtgatggagtgagaccctgactcagaaaacaaacaaacaagtaactctgggttgccaacgcctcattatagtccatactttctggacagattctgttaacatcaccatcttgcagatgag

SEQ ID NO: 17633 - DNA, 122 bp, Homo sapiens
aaaggggggtgaacagccagtacgatagtgcatgcctgaaattccagtgctttgggaggccgaggcaggaggatcgtttgaggccagtagttggagagcagtgtgggcaacgtagcaagacc

SEQ ID NO: 17634 - DNA, 122 bp, Homo sapiens
ggcaagagaagaatgtgagcatctccaggggcctggacttcctgctgtgggatgagaagccgcatgcccccgccaggaggcactggaccaggcatgcacgtgagtccagcaggtggaaacca

SEQ ID NO: 17635 - DNA, 122 bp, Homo sapiens
attctctcacaggagggccatgaaacgcaacgcccggctgaggtgccccttccggaagggcgcctgcgagatcacccggaagacccggcgacagtgccaggcctgccgcctgcgcaagtgcc

SEQ ID NO: 17636 - DNA, 122 bp, Homo sapiens
ggtttggggttacacggatgaactgtacagtgatgaacgctgagattttagtgcacctgtcgcctgagtagtatacattgtacccaatatgtagttttttatccctctatattatcattatt

SEQ ID NO: 17637 - DNA, 122 bp, Homo sapiens
gccggcgccaggcagtgggaagtcaggttcttccgccacctcccagccaggtaactgccccgaagcctgccccaaagcctggaaccccccaagctcggggaccccaccccgaagaatcgcga

SEQ ID NO: 17638 - DNA, 122 bp, Homo sapiens
cctccccgccggccacccctggccattccggggctccccgcccgggcaggagtttccgcgcgcctggcacccccgcccacccccgggccatttaccgatgtggttgtcctcgatgtgctcga

SEQ ID NO: 17639 - DNA, 122 bp, Homo sapiens
agttcgaactcttcccgccttggcctcccgaagtgctgagattactggcgtgagccactgcgcctggccaaaactaacattttgccatgcaagtttattccccagacactcttctgggcaag

SEQ ID NO: 17640 - DNA, 122 bp, Homo sapiens
tgggctggctgctgggtggggctgggaggcgtaaggggtgtgcaagggagaggtgacacccgagtgcctcaggaattgatgttggagtggacaagagtgatctggctagccccacccactgg

SEQ ID NO: 17641 - DNA, 122 bp, Homo sapiens
ctgaataaataaggtgttgttttccacaaagagtgatgatattttgtttggatctgagttcgtgtgttattactttgtgtgaagctagataggagtagtgtgaacttttaacgatagccttt

SEQ ID NO: 17642 - DNA, 122 bp, Homo sapiens
ctatagccaccggcggtgcaccagatgctggaggctctgacacgggcaccagagttcccacgccagcctaacaggttttgcaagcaaacttggacatttattgtcataagccatcaagattt

SEQ ID NO: 17643 - DNA, 122 bp, Homo sapiens
gagagggaaggagaagggtcagggactggggaccctagggcctggcacatccagacagtccgagtctcatttctccagtctggcataaaaaatatcaggcttatattaccattgttgtcact

SEQ ID NO: 17644 - DNA, 122 bp, Homo sapiens
tagtgctgggtcttcacaactctaaatatctccaaccctagaatgttctgagcaaaccaacgtatacataatatatgcttctgttcttaactaaaagcaggcctccagaccttgaggacacc

SEQ ID NO: 17645 - DNA, 122 bp, Homo sapiens
tgttagctcataccactaattattactaaatcagtattatagttctttgcctcctattttcgccatatctgtcaggtacattcataatcgttccaaatgagcagtcactgaaataatttcag

SEQ ID NO: 17646 - DNA, 122 bp, Homo sapiens
cccagccgatgttttaatttttggtagacatgaggcctccctctgtctccaagctggccacgcccggccgatgtttcaatttttggtagagatgaggcctccctctgtcgccaggctgactg

SEQ ID NO: 17647 - DNA, 122 bp, Homo sapiens
ttttgagtataattacaattaagaatcccattgggttcagtcaaggctagagttatttcacggcacaagttagagttttaaaagaacaaatactaatgcttacccttctactatgtcagaga

SEQ ID NO: 17648 - DNA, 122 bp, Homo sapiens
cagccacactccttcagctcctcccggtgcgcctcctcgggcttggccctgccgtccctgcgctccttgcagctctccagggcgtcctttctgtcccgcccggcctctgcggactctctcct

SEQ ID NO: 17649 - DNA, 122 bp, Homo sapiens
gcgcctgtgatactggggacagtgcttatctgagaagcctgccctgattgctgtgaccgccgcacctgggcctttgctctttctccaccctctgcggccccaggactgaggtgtgtgcccgg

SEQ ID NO: 17650 - DNA, 122 bp, Homo sapiens
actgcatacagcacatttagttcaatatgcctcagcacaggccgaggaaaatgggtcctgcggtttattcaagatgcctcagggcctaaatgagggatggactgattcacacttgctgtgat

SEQ ID NO: 17651 - DNA, 122 bp, Homo sapiens
aaaactacggacgacagaacttcgggcagagaatggctgcagaagagttttacaagttttcgccgagccagtgggggctcccgagaaggcgcatttcgcggcgccgggaatcaggcagccgc

SEQ ID NO: 17652 - DNA, 122 bp, Homo sapiens
tgcactcgggtgtgtcactgtaaaagctgcactcgggtgtctcactgtaaaagctgcactcgggtgtctcgctataaaagctgcactcgggtatctcactataaaagctgcactcgggtatc

SEQ ID NO: 17653 - DNA, 122 bp, Homo sapiens
aaatcagggaccgtcccgagttatccggtggtcggaaggcatctcgtccttaacaggtaccgaccgccgtgcgcgcggccggcgaaagctgtcgccgcagggcgccctccgtgaagagaccc

SEQ ID NO: 17654 - DNA, 122 bp, Homo sapiens
tgcgtcccgggggcacaggcgttcttaaggctgcagagccctgggtcccccacccggccccggttcactttgagcggtcccaaggcctgagggcctactgtccagtccccaggttatcgtcc

SEQ ID NO: 17655 - DNA, 122 bp, Homo sapiens
gagcattctaggtaccatttattatctactgcgtttcggtcagtagctgttgtaggtacccgcatcagcccttgttcctaaggatgtgtggagcccaggctgtactctttgacattccacag

SEQ ID NO: 17656 - DNA, 122 bp, Homo sapiens
ggaaggcatgaggatggcaggtgatgtgtccatctgggtccggtaggccagggctgagcccgcgctgcccgcatgggagcagtgaggcaagggggcggcggagccggccgggtgctgcccgt

SEQ ID NO: 17657 - DNA, 122 bp, Homo sapiens
ctccggtgggttccggggcagtcgaaagaattacttccgctgggtcagagccgctttcggcgacgcgcgggagatccgtacctggtgaggcgaggacgcagagtgtgtcgctcacttccgtc

SEQ ID NO: 17658 - DNA, 122 bp, Homo sapiens
gtttgagaccagcctggccatcatggtgaaacctcgtctctagccgggcatggtggcgggcgcctgtaatttcagctacttgggaggctgaggcacgagaatcgcttgaacccgggaggctg

SEQ ID NO: 17659 - DNA, 122 bp, Homo sapiens
cgctttccaagaggttttctttgaatgttctttgtgtcctgctgtacggggggacacggccggcctgcccgcatctgggggacgctgggcttgtcccggtaatgcaatactcttttaaagca

SEQ ID NO: 17660 - DNA, 122 bp, Homo sapiens
gtattggaaaaaccttcctattgggtcctgaatagaagatgaaaaggagaactttggacacgtgaataaaccaaactgagctgttaataagcagagaactatcaattagacacagagacaaa

SEQ ID NO: 17661 - DNA, 122 bp, Homo sapiens
tcatgtcacctcctctgattctgactctcttgcctactgcccatcctataaggagccttgcgattacatcaggcctactcagataatcaaggatgagctttgcatctcaagatcctgaactc

SEQ ID NO: 17662 - DNA, 122 bp, Homo sapiens
cattcctgaagctgacagcattcgggccgagatgtctcgctccgtggccttagctgtgctcgcgctactctctctttctggcctggaggctatccagcgtgagtctctcctaccctcccgct

SEQ ID NO: 17663 - DNA, 122 bp, Homo sapiens
cgctagcccatccatcagcccgccggccgcggttctcccatcccacagccggcggggggccgccgagacccaggaccctccaggctgacagctctgagccctcacactcaccgggcctcccc

SEQ ID NO: 17664 - DNA, 122 bp, Homo sapiens
ttaaaaaacttaggctccaaagcagcagatgagtatgattgcagtagcttttgaaacggtcgtgttgggtgagtgtttatacagagatgtctggggcaggagagagaggcctgggggccacc

SEQ ID NO: 17665 - DNA, 122 bp, Homo sapiens
ccagaagactcattttgaccccggcctgtcgtcatcgagagcaaggccacggcagtcacccgctgcccttgtgcgcaatcgctgctcagtggacgctgcctccgtggccttgttctgaccca

SEQ ID NO: 17666 - DNA, 122 bp, Homo sapiens
tcccaggcacatgttgtgcaactgagccatggggctagggtagaaagccgtagtgagatacggtcccgcgtctcaaagagtcagcattcaaggggcgtgtgtgtataatacaaggcggagaa

SEQ ID NO: 17667 - DNA, 122 bp, Homo sapiens
acagcttcttacaaatgcactcacagagcagagtgcctgccccccgagacggcctggtagcggctcctacggagtccgaggtggcctttctgcctgtgcctccccaccagggccctccgtaa

SEQ ID NO: 17668 - DNA, 122 bp, Homo sapiens
agaggagctgctgacattgacaatgaatccaaacaggagttgcactagcggtgtccaccacgttgcctctcccccgcctggccttctgggagctgtagttttcgtgggagcggctccccagg

SEQ ID NO: 17669 - DNA, 122 bp, Homo sapiens
ctaagaagcggtggaagccgaatccgaacttaagtcggtctgtcatcactgtagcctttccgagacagttgtcttatggagttgcttggagaacgtaaaataagaggcctaagcaatgcgtc

SEQ ID NO: 17670 - DNA, 122 bp, Homo sapiens
ccccacgattcccccgccccttcctgaggcgggtcggggacctcgagctcccgaggagagcggccccaatatggactttctcaaaggtgctaggagccccggggcgagacaaaaccgggggc

SEQ ID NO: 17671 - DNA, 122 bp, Homo sapiens
ctcttcccagtgatggcatcccaggatgggctccaccgtcgaggccacctctcataccaccgcaagggctgtgctcacatttgccctctccagttgacatgcacattcctacagcatgagcc

SEQ ID NO: 17672 - DNA, 122 bp, Homo sapiens
ccctttgctcaataaacattccgcactccattttcaggctcttccttgcgtgtgcgtgcacgttgggtgctggggggtggagaccggatcttcctcgcttgggtactttcctctcggtgtgt

SEQ ID NO: 17673 - DNA, 122 bp, Homo sapiens
accctcaccagcaggtggcacctcttcatctggccatcaaatctgctggtgtctggtctgcgagggccaagagttgtgctgggcctgagggtagccaggacctggctgctgtcctctgccct

SEQ ID NO: 17674 - DNA, 122 bp, Homo sapiens
tgctcctcagggaacgggaggcattatcctgcaggacccactcttacccatgagagacaccgggaaatgctcctgcggaagctggagctctgcgcgcttgaccacttcggggtgaagcttcc

SEQ ID NO: 17675 - DNA, 122 bp, Homo sapiens
cgaaacggtttccagggccctggttaatggtggagccagcctggtgtgtggcagccaggtcgggctggtgtcttcagagtggctgtgtcagaagggcctcgtgtatgacagaagtaagtgag

SEQ ID NO: 17676 - DNA, 122 bp, Homo sapiens
gggcattgtatcttcttgatagattctgattatctcaactctcctctgattgaaaacccccgtttaaggcagctgggaagttctttccattacatcttatttaaaagccattctgtttatta

SEQ ID NO: 17677 - DNA, 122 bp, Homo sapiens
atggcaggaaagctttctcagcagcacgagtgcacaaagaaaaggctcgggatgcagcttcggttacaaacaaatggtgaaccaaactcaaaaccaaaccaaaagtgagagaggaaaaaaca

SEQ ID NO: 17678 - DNA, 122 bp, Homo sapiens
cagtccgtctgggccctttgtttttatctggcctgccctgtggccctcaagcgaacgctccgtgtcattactgcgcttgagacgctcaggtaccagctcgtttgtcaatcagcaccgagcat

SEQ ID NO: 17679 - DNA, 122 bp, Homo sapiens
aggcactaggctggggaaaaaggctgcgggaggagggacatagggtgggaggtgagtaggcgacttgcttctcagattattcccaattagcaccaagttggcagacaaccccacaaacccac

SEQ ID NO: 17680 - DNA, 122 bp, Homo sapiens
gaagcctccctgagttcccctcacagtacctttaagcctggctgggtgccggaaacgctgcgcagaataggaaacagcctctgccctgggagaactgacggggtgtggggagggaggaggca

SEQ ID NO: 17681 - DNA, 122 bp, Homo sapiens
gattgtagcctcccttgcagcacatctggcctctggctgttaggctgttggtgctgggaccgcgggataggtccccatcacccacatatacacaactattagttttcttgggactgggccca

SEQ ID NO: 17682 - DNA, 122 bp, Homo sapiens
atctgtgttcagcagccatctggcccgaaatgggggaatcagctgctctcacaacaggctcggaggctgaatccatttcagctcattttctagatcatctggtcccgcacccaaagcgtgga

SEQ ID NO: 17683 - DNA, 122 bp, Homo sapiens
aaccgttttctgttttcatgttctcatttaactgttggccggaaattgccggtaggctgccgtggcctgaccctactacgtgcacaactccgcaggcattaggggaggggtcatctgctcta

SEQ ID NO: 17684 - DNA, 122 bp, Homo sapiens
tgggctgctgttgccccatcagggtcctggtcctgattctcctaattctattccacctcacgcctcctagcactgcaggtggctctgggccacttgtttcacctcctcctcctcctcctgct

SEQ ID NO: 17685 - DNA, 122 bp, Homo sapiens
agcacttgcccgcacccctgaccgcccccgccccccccccgcacacacacactattgccccggaaagcaaacctacctggaatctcctattgtggagaggaaaaccaggattccggaagctt

SEQ ID NO: 17686 - DNA, 122 bp, Homo sapiens
cgggtatccccctcggcctccctccgcctggtaagaagtgagtttggtgtgtgtcgttcgcgtggctgtcattaaggcagcctgttattgtgcgaggctgaatcagtggctctttgtgcgct

SEQ ID NO: 17687 - DNA, 122 bp, Homo sapiens
gttactaaactatgtaggtttcccatttccctaaacatggaaacagaagacctcctaggacgtctccattgcgggagggagactgcagaggtctccggccacaggactgaggaaaaccgcaa

SEQ ID NO: 17688 - DNA, 122 bp, Homo sapiens
gcagtgctatggaagtccagcagggggagacattagcacgtgggtacgtcctctggggtccgaccagcgagagtgggtcggacctggaaggtctgagctatgggatcgagccaagttataag

SEQ ID NO: 17689 - DNA, 122 bp, Homo sapiens
gcctctagtaagcatgcgagagcgagggcagggctttgaagctgctacttgcttggcgggcgacagggtccgctgggggcagagtcgtttacacacaagtgagtggcgctgtaatgagcagg

SEQ ID NO: 17690 - DNA, 122 bp, Homo sapiens
caaacgccaatgaaatgactccctctctggctggcagcttaagcctgagtcagtcttcttcgccttttgtaattgtcttaagtaggcgtggctacgtggctacaagtgcgtcgtcaaaacgg

SEQ ID NO: 17691 - DNA, 122 bp, Homo sapiens
ggtgcttagtggaatagcaccagtaagtactataacatgcatgcctgcttgtataaaatgcgtgtgtatatgaatatatgtttattatcggtgccttccccaaattccatgttctatgatca

SEQ ID NO: 17692 - DNA, 122 bp, Homo sapiens
cccagccttgcccaaccctggggttgacacggactttagcgtctttttaaacttccggcgcgggctctgcggtggcacaggagggtcctccaaactttcctgcgatctcaaaggtccagatt

SEQ ID NO: 17693 - DNA, 122 bp, Homo sapiens
tggctgaggcccagcgccgagaagcggcaggcagagttcggggtcggggagtttatcctgcgctggcctcggcaggggtccccggggtggttgatcctcgactggcccgggaggcgcctggg

SEQ ID NO: 17694 - DNA, 122 bp, Homo sapiens
aaaaacccagccacaacagaaaaattcaccaaacttccaacagaggaaacctagaaccaacgtgaagcccagcacctccccaagcctttgcctacacacaaaaagccacgttctagaggctc

SEQ ID NO: 17695 - DNA, 122 bp, Homo sapiens
acagaaatgctgagagatatcatccgtgaatacactgatgtttatccagaaatcattgaacgtgcatgctttgtcctagagaaggtgagaaggcagccctggggtacaggaataatggggaa

SEQ ID NO: 17696 - DNA, 122 bp, Homo sapiens
gtggaagggaggagggctggcttttctcgtggccttggcgagcagggcgtggtgcagtgtcgtgagaacactttcaggacctgccgcccagcttgggtctctccagctgtgatgcaaggacc

SEQ ID NO: 17697 - DNA, 122 bp, Homo sapiens
ggaggtgatgccgggggctgattaccatgagaaaggctgtgcctggaaaagcctcctccacgcgactgtcaatctcactaaggcttggggggcggggagcggggggggggacggaaaggggc

SEQ ID NO: 17698 - DNA, 122 bp, Homo sapiens
tgggggcgggcggggcgggagtggcccggacaggacctttgtgtccgcgccttagactggcgggagagcggaacgcagagcgcgggacgtaggggccggggcggggcggggcggggcggagc

SEQ ID NO: 17699 - DNA, 122 bp, Homo sapiens
ccgcgtcggccaggagagtctgggggtctgctccagttccggcagaacatcctgggtggtcgtgcccccgaggtccttgccggtgtggctgcacgctgccaccaagtggctggcagggcctc

SEQ ID NO: 17700 - DNA, 122 bp, Homo sapiens
caagttccctggctctcacccttagggaggcaagttcagcaccatggaaagggctcaagtcgcgtgcgaagggagaaaagaaagcaaagactggggctctcccccggccactcaccggcgtc

SEQ ID NO: 17701 - DNA, 122 bp, Homo sapiens
agctgtgaaaagactgggccacctctccatgtgcaataggaacagctccatcttgccaggcgtggtggctcacacctgtaatcccagtactttgggaggtgaaggtggggcggatcccttga

SEQ ID NO: 17702 - DNA, 122 bp, Homo sapiens
ggcacgtcgctaccctgaggggcggggcgggagctggcgctagaaatgcgccggggcctgcggggcagttgcgcaagttgtgatcgggccgctataagaggggcgggcaggcatggagcccc

SEQ ID NO: 17703 - DNA, 122 bp, Homo sapiens
gcatcatctaatggatggagataacaacttgttcaggcatgtttggagtacctgctgtcacgccaagctctgtgcagggccatggaaacctagctaagccaggaacatccaagagtctgagc

SEQ ID NO: 17704 - DNA, 122 bp, Homo sapiens
ctcagcagtgttaaagctgttactttcacagcttcctgggagcgagtgctttctcaagcccgtcttgcaaggtgggtccttttttgtttttggcagaagggagggacagtgaaatgtgctct

SEQ ID NO: 17705 - DNA, 122 bp, Homo sapiens
ttgcgccccctgctggtcgttctggcagcacacagcctcctgccttgccagtgtgaaacccggtgctgtcttgttccccgggtggaatgcaagagaatgcttgggaagaactttgttaccca

SEQ ID NO: 17706 - DNA, 122 bp, Homo sapiens
cgagcgcatctgtgggggtgcagaccagccgtctgctctgggctcacctgtgtgggagtccgtcggcccagtaggtcggtggcctccctccttcctggggtgagcctctccagctaggctac

SEQ ID NO: 17707 - DNA, 122 bp, Homo sapiens
ggctgtggtggaaagtgggctggacgctgtcaggagagtcagctggcacctgggttcggccgtggccctaccggtgacccgggcgagtcatatttccctggggacggtctgtgctaacagta

SEQ ID NO: 17708 - DNA, 122 bp, Homo sapiens
cttgcctgatgacaggcatgtaccatgtttttggctgggacatttttctgagccttgctccgggctccgtaaagcggacacggtgccagggagagaatttcggggcggttgcgggcacaggc

SEQ ID NO: 17709 - DNA, 122 bp, Homo sapiens
gcgggggtgccgctctgccggcagggcgcacaggggagtgggcacagaggcgggctggagcgatctcacccgttccgggctggccagcacgcgccctccctggccggagcgctgctcatctg

SEQ ID NO: 17710 - DNA, 122 bp, Homo sapiens
ggaaatggttagccacattactaggtaataaggttgcaaattccaagtctcccttgtagtcgaggtcagatgttgtcctgggagtgggtgggaaggtagagaggccaagattgaggctgcta

SEQ ID NO: 17711 - DNA, 122 bp, Homo sapiens
ctggccggatccagccttggctcggcctctaaccgtgcagtattgtggacccctttcttccgccccgggcctccaggccccattttataatgagggagggaatgcaatgacccccaggactg

SEQ ID NO: 17712 - DNA, 122 bp, Homo sapiens
aggtttatgtttcttagtcattattcctgttcatggcctgactcagaggcctggggcagtcggaaagcaggaactcaagaagcctttcttggacatggcatcaatgcataaataataatact

SEQ ID NO: 17713 - DNA, 122 bp, Homo sapiens
acatgcccatctgaggctttcttcccttttctagtgtagtgcccccagaaggtcatactacgtcattgtgtctcttaatgcgtgtgcggggaaggtgcttctccctggaacatttcctaggg

SEQ ID NO: 17714 - DNA, 122 bp, Homo sapiens
atgctggcgccaggcccttctgttcctgctgttgtgggcagtcagggctgcctgaggagtcgagggtgatcagaaataacgtgtccccttgggtcttttggtgtgggcttgggagaggcccc

SEQ ID NO: 17715 - DNA, 122 bp, Homo sapiens
gaaaagccttatacatgtcccttttgtaagacaagctaccgccagtcatccacataccaccgccatatgaggactcatgagaaaattaccctgccaagtgttccctccacaccagaagcttc

SEQ ID NO: 17716 - DNA, 122 bp, Homo sapiens
aatcagcgggtggtcggaagcaaagcaggattcgaaccccgtctgtctgaagctagaggccggccaaactcaccctgtggcctggtggattttctttcagaccagttctgcgacctccctta

SEQ ID NO: 17717 - DNA, 122 bp, Homo sapiens
tggccgaaaagttgcagccgtggagttcccgtcccgcctctgcgcgcttgcccggcaggccggtgaaccccagcatccttggctctgcgcttcctgcccgggaaacagagaccatgggactt

SEQ ID NO: 17718 - DNA, 122 bp, Homo sapiens
tattcccgatgtgggggggttgttacggggtggtcgccgggggttcgggagcgggggccgcgccttcaacggagctgcaatcctaacccgccatctggtggcattttccacacgccaatggc

SEQ ID NO: 17719 - DNA, 122 bp, Homo sapiens
gaatcgcaattcctaaaacctcaataaacgccatggtttactgcattgcagcctggtcttcgactcttttttttttttttttcaattaaagttttagggtacatgtgcacattgtgcaggtt

SEQ ID NO: 17720 - DNA, 122 bp, Homo sapiens
gcgctcagggcccggtggcgggcgacgcggccgtgtgcgggctcgcggagtcagtgcgtgcggtgcaagcccgggggctcggtattgttatggtggttatttgccaataatcaaagtcgccg

SEQ ID NO: 17721 - DNA, 122 bp, Homo sapiens
tatccccctcccggtcctggaaaagtagagaggcagccgggagcctgccttctgtgttctcggtgcaggggtattctgagaacggcccctgctcacacgggtttaaaaggaactcagtgacc

SEQ ID NO: 17722 - DNA, 122 bp, Homo sapiens
ccgtgtccttctggaggccgctccttggccatgggccctcggtcctcgccctgagcagcgcgccggggtataagggacgccctcagaggcctccaccccacactccaccgcgctctgccaac

SEQ ID NO: 17723 - DNA, 122 bp, Homo sapiens
tatttttagtagagacggggtttcaccatgttagccaggatggtctcgatctccagacctcgtgatctgcccaccaggcagtcagactttattagaacatgcacttaaaattagcaagaagg

SEQ ID NO: 17724 - DNA, 122 bp, Homo sapiens
aaggaccaatggtctctctctgggcggggctgctgttggacggcctgggccaatccgaggcgccggaggccaatcagttggcggagcggcgcgtgcgcgggcgaggaactgcccgggcgcgg

SEQ ID NO: 17725 - DNA, 122 bp, Homo sapiens
ttgtttcaaggggactccgcctgactgccaggagcagagcgcgagtcagcccagccaatgcgcatgcacgaggcgccagccgcttctcccgtcacagtgattcccatggttgtcttagaaac

SEQ ID NO: 17726 - DNA, 122 bp, Homo sapiens
ccaccctacaaggcgcgacccggctgatccctgccctgcaggaacccggtttctcgccagcgaactgctctcagaggctaccgagcgttcccgcctcgccgcaggaactcttctagctcgcc

SEQ ID NO: 17727 - DNA, 122 bp, Homo sapiens
ccccttcccgaaataccctggcagcccccgcggccgcgccgttccagcccgcggcagcggcggcatccaaactccacaatattaccaccaccgcccgccgcgattggcggccgcgcggggga

SEQ ID NO: 17728 - DNA, 122 bp, Homo sapiens
gctgggtgggtgacagccgctgaggctctgagtgaccctgcaggctggtggccagccggccgcccatcttccacaccatgtcggacggcgagggcccctccgccggtgagtggcagcgctat

SEQ ID NO: 17729 - DNA, 122 bp, Homo sapiens
aagagagggttatgggagttcagtacccttggatcatgtgtgcgttttgtgctgggaccccgtactctccaaccactcactgcatccctataaatcccgcattttataccaacagggtgaag

SEQ ID NO: 17730 - DNA, 122 bp, Homo sapiens
ggcagtgtttccaaaccagctgaaacagtgccctttggggagtctagtgggggtcagtcacggcctgttagaacaggaaggggcttagccagcatgaatttgagcacccactgtttcataca

SEQ ID NO: 17731 - DNA, 122 bp, Homo sapiens
actttgtcttcctcagaagtctttctgcaatgtattccatggtgaggctgctcagcctctcgcatccattcttcaacaaggtcataatggggaagaatgaagtgcaaatccattgttgcatg

SEQ ID NO: 17732 - DNA, 122 bp, Homo sapiens
cgagaaagagtttatttcaacaacacccaagttagggtaaaactccctacctggtgtctccgtattagcatggcaactcatcacaggggcaaaatcctgctattcctaagcatactaattta

SEQ ID NO: 17733 - DNA, 122 bp, Homo sapiens
cgccccgtgaggcccctgtgcagggaggagctgcctgttcactgggatcagccagggcgccgggccccacttctgagcacagagcagagacagacgcaggcggggacaaaggcagaggatgt

SEQ ID NO: 17734 - DNA, 122 bp, Homo sapiens
tcccttgcatgggggtgctcttcagctttgaggcttgaatcccggcaccacaggcaccgtcgagtgcaccaggggccactggctgcctgttgagacagttcccatactgcggggccttacag

SEQ ID NO: 17735 - DNA, 122 bp, Homo sapiens
gcgccagctgctcaggctgcagacaaatctaaacccttgcttgctgccaacatctctctccgtgcacttcactgaggactttgccaaaggaaagagctgaggaaattgaggaggccgggtta

SEQ ID NO: 17736 - DNA, 122 bp, Homo sapiens
tgggccagaggaggaaggttacatcaacagtacacaggagcctgggctcctgacatcctacggagaatgcagaatcacgtgctgggcctgcaggatgggtggagcttcctcaggaccccagt

SEQ ID NO: 17737 - DNA, 122 bp, Homo sapiens
ccggactgacgtgagtcaaaatattggccatatgttcagcggtaataaattgggtatgagcgcaaacacacttgggcttcgatggctctttcagctgccacatggtaggctttgcggggagg

SEQ ID NO: 17738 - DNA, 122 bp, Homo sapiens
cgagtaggggacactgtcttgaacccggtgtcctggatttctgctggcttggaggcatctcgtgtctgttgtgtcgcttgcatgtctttgtgttttccttctctatttcaaaccacactcgg

SEQ ID NO: 17739 - DNA, 122 bp, Homo sapiens
acagaacttgccgacgcttagcccgggagcgacccagagaaatgcgcaggcgcatctcctcgccctgagccccgcccacagggcgaagatgtgtgcgtggataactcccagagccccgcctg

SEQ ID NO: 17740 - DNA, 122 bp, Homo sapiens
taaaacgcgcgggtgggattggttctttttattttctgaaaggagatgggactgaaaaaacgacttttaattgcatatgctctcccgagccccgagctttttggagatgtggtggctgcacc

SEQ ID NO: 17741 - DNA, 122 bp, Homo sapiens
ggggccaaatatcacaatggagagggctcagcagctgtggtcacaggcctcagcctggtccgagctaacgttcaatcaagaatgtcgaatcgtcataaaaagtgagaaaactccaggcttta

SEQ ID NO: 17742 - DNA, 122 bp, Homo sapiens
aacgaaagtctgcgttgggatggaattcttgctgacccggaggcagagaaggaaaggattcgcatctataaactgaatcggagaaaacggtaccggtgcttggccctcaagggcttccaccc

SEQ ID NO: 17743 - DNA, 122 bp, Homo sapiens
cacacagtctttatcagcacaggactgaccagtgctcatcattctgcagaaggctggcagcgcttgcccacactgcttctggaagccccaattgggggcagtaaggatggtgccacagttag

SEQ ID NO: 17744 - DNA, 122 bp, Homo sapiens
catggacactaggcctgtcgttgattccctcatttcaaaagttgcatgtgccatgggaggcggagtctctgaggacatcctggctgtgcctcggcggctctggactccagctctacgcagag

SEQ ID NO: 17745 - DNA, 122 bp, Homo sapiens
ctttctcttttttctcctctgaaaaaggcccttgtaatcccagctgtggctgcaagtcagcgtatgcctccaactctttcccaaatgttttcaggctagagaaatcccaaacacatttccac

SEQ ID NO: 17746 - DNA, 122 bp, Homo sapiens
tccggtctttatttttttgagagagggtctcgctctgtcgcccaggctggagtgcagtggcgttaacatagctcactgcagcctcaatgtccttggttcaagctatcccctcccgcctcagg

SEQ ID NO: 17747 - DNA, 122 bp, Homo sapiens
tggccagaagatacagaagggctctaggctgcccaggcccttcagttagaacatcccccccgcctccccccggctcccagggcaatgtcagagaccatctggatggaggatggggctggtcc

SEQ ID NO: 17748 - DNA, 122 bp, Homo sapiens
gaatgttttggccaacttcctcccaaccctaagtcacagctctggtcctggccccggccccggccccagctgtgtgaacccaaggccagataaaaaccaacataaaaagaacggagaatgtt

SEQ ID NO: 17749 - DNA, 122 bp, Homo sapiens
gtgatgggtcacaggctgtggggatccctacaagggaattgtggaatctttgccttgaagcgatctggtgttcaaaaggtccctgactgatcattagcagaaatctgaaccagaggaggaaa

SEQ ID NO: 17750 - DNA, 122 bp, Homo sapiens
ctggaaaattctaggaacttggcattcataggtaaggaggcccccttcctgcacttagtccgtgatgggaccagtgctggtttggaaccgtgttctgggaagtgcattggaaaatgggaact

SEQ ID NO: 17751 - DNA, 122 bp, Homo sapiens
atcgtaggcaaggagcaccgcggagtcccatcgcttttccctgaagggtgagattctgaacgtttttccctcagcattctgagtgtaatccaaacgctcagtggagtcgtggtccatttgac

SEQ ID NO: 17752 - DNA, 122 bp, Homo sapiens
agaatttaccatccaggaacaagagagcaaacagccacaagtgggaggaatatttagaagcgaggagtccccttggagaacttgacctggtctgacaatcaggagcagactcgaatcttctg

SEQ ID NO: 17753 - DNA, 122 bp, Homo sapiens
cgcggcgcggggggcgtgcggggcgggctggcggggcgggcggcggtggaggagcggctacggcgcgcccggagcccggagcgcgagtgcacctcggctaggagccgctggcgcctggcagc

SEQ ID NO: 17754 - DNA, 122 bp, Homo sapiens
ccagtcccgagggccacccccagcccccaacaccgcggcggtgggcgaggccagcggccccgccccgttccctggcgctgccgttcactggcgtttcctagcaaggatctgcagggatcccg

SEQ ID NO: 17755 - DNA, 122 bp, Homo sapiens
tctcagaggccagtcacaagtatgggatccacaggttaccaactcttctctccatcttggcgacaaattcaggggttcctataaccaccttctcagatttggtaattcactagaatgactca

SEQ ID NO: 17756 - DNA, 122 bp, Homo sapiens
caaacttctccgcgtccgccgggagcaggtcagggaagggacgcgaggcggcgctgtcaccgcattctgagcgccgcagctccctgggccccttgtatcatttcagtgaaggtcactccagt

SEQ ID NO: 17757 - DNA, 122 bp, Homo sapiens
gagatccagctcgccgctggagggaacagctctggcctcccagtgacgctgatatagacgcgaggctggagtgatttttttgataatcctgctagagacagaatgggtaaggatgggtaagg

SEQ ID NO: 17758 - DNA, 122 bp, Homo sapiens
agccgagcggcgcagctttgcgggcccgaccggctccgcgtggcaggtactgcccttccccggcaacagccttgggacgctggtcttgcagtgaccttagactgctgccccagccgtccggc

SEQ ID NO: 17759 - DNA, 122 bp, Homo sapiens
ctgggtccaccccctctctcactcaagtcctcttctgcccctaggccttatagcaccctgcgagattgcctggagcactttgcagagttgtttgacctgggcttccccaatcccttggcaga

SEQ ID NO: 17760 - DNA, 122 bp, Homo sapiens
tttctgatttcaatgatgtttttaaaatgtaagatagaaaaaagtggcattcatattgtgcgatgttctattttgaagcctctttgtagtcaccattgtctgggaaaatggactgaagggtt

SEQ ID NO: 17761 - DNA, 122 bp, Homo sapiens
aaagcaggcataggacaccgtcgaaccaccactcccacgaggctctgcgcaggccgctcgcgttggctcagttaccatagcaacggcagaggtccctcgctcttgccgtcatcaaggctcgc

SEQ ID NO: 17762 - DNA, 122 bp, Homo sapiens
agctgcccagagagggctctgggaactgggtgacagtcaccgcgcagggacaggacgagacgcccgggtcccggcggccggcccagccccactgtggggccaaggggaccaagggccgagct

SEQ ID NO: 17763 - DNA, 122 bp, Homo sapiens
gcgcagccgctccgcctcgtccacgtacggcctcttctgggacagcgtcagcgccttccacgactttcctgctcacacaaggcagaggaggccatgctcagtgctgtgccccgcaggcatcg

SEQ ID NO: 17764 - DNA, 122 bp, Homo sapiens
tgatgttatcctgatttgtattcttttcttttccttttttgagatggagtctagctctgtcgcccaggctggagtgcagtggcgcgatgtcggctcactgcaagctccgcctcccgggttcc

SEQ ID NO: 17765 - DNA, 122 bp, Homo sapiens
tccgcctctgtgttgagattacaggcgtgagccaccgctcccagcctctaatagtttttccgttttgttttattttgtttgagagagagtctcactctgttgcagggttcaagcgattctcc

SEQ ID NO: 17766 - DNA, 122 bp, Homo sapiens
ccccggcgtgagaggggccgtgcggccggacgtcctcggggtgggcccccagtcggtggccgaagacctacagctcaggcccctgggtcccaaatttccaggctttgcccctcctcctttct

SEQ ID NO: 17767 - DNA, 122 bp, Homo sapiens
cgcaaggccgctgggggttaagtctgaagggccgagctgctcggcgacagcaagcgtccgcgcgcgggacaatggctgctcttgtggccgaacccggaagtgcacttgggctcggagagcca

SEQ ID NO: 17768 - DNA, 122 bp, Homo sapiens
cgcctccgcttagctccgccccgtcgcggctccgccccgcggtaaccacgcccacacaaccgtatccccgcccacagctggcttcgccttggccccgcccacaaccctctttccaagcggcg

SEQ ID NO: 17769 - DNA, 122 bp, Homo sapiens
cacagtattatttagcattcggatgtacatgaactaggatacttatgagaaacccaactgcgtcaaaagtatgacattgtggaaaaaatgaactcaaatatatcaaaatgcacaaagcacta

SEQ ID NO: 17770 - DNA, 122 bp, Homo sapiens
cacgtcgtcgtttaaacaacagacaacaccgttacagccgcatcttttatgcttacctgccgctgatataaaccagccatcaggacgactcttagcaacacgtgggtgtaggagtcggcctc

SEQ ID NO: 17771 - DNA, 122 bp, Homo sapiens
ctcactaattttctgatttcattattctacagtctgaaatattacaaatgtacctttgcccggtccttcttttattttcatctatttatcccaaaaacagaaatattttgaacaccgagatt

SEQ ID NO: 17772 - DNA, 122 bp, Homo sapiens
gcctcgtgctgtgcaagcgtctagggcttcgtaggtgtgttttgatgaaggtcacagacgcgcctgggtccctggtggggaatctgggccatcggcaggaagcgtgacattgaggacaagct

SEQ ID NO: 17773 - DNA, 122 bp, Homo sapiens
attcccacatgttgtgggagggactcaggggaggtaactgaatcatggggcccatctttccggtgctattctggtgatagtgacgaagtctcatgagatctgatgggtttatcagtggtttc

SEQ ID NO: 17774 - DNA, 122 bp, Homo sapiens
gccatgaccttgagttctaggttcaagccagccctggagagcaggcttcctcaccctccccgcctctccgtacctctgtctctggtggtctcggtctttgtgtttctgtgcatttctcgggg

SEQ ID NO: 17775 - DNA, 122 bp, Homo sapiens
tggccctgtccttctccacctgactcctgtctcgccagcctaccttcctcccgacacccgcggcgtcctcctgcatccaccctcagaggttatcgaatgccgaggagcccaggatgcacttc

SEQ ID NO: 17776 - DNA, 122 bp, Homo sapiens
cgtgaccaatgtggtgaaaccctgtctctactaaaaatacaaaaattagccgggcatgctcgtgcacacctatagtcccaactactcagcagggtgaggcaggagaacctcttgaacccggg

SEQ ID NO: 17777 - DNA, 122 bp, Homo sapiens
ctagtgggtacctggggtcctgcagctcagaaccgcgaccccagcccacgggagtctctgcgtccacgcacctggacgtcctcctgcggcaggcgccccggaggcccctccagtgttcccac

SEQ ID NO: 17778 - DNA, 122 bp, Homo sapiens
agatttggagggtacaaatatccaaaccatattattgtactcctggctccccaaatctcacgtccttctaacattgcaaaatacaacaatctcttcccaacagtcccccaaattcttaactt

SEQ ID NO: 17779 - DNA, 122 bp, Homo sapiens
ctgatacacagcaggagatgagctatgtcttccaacctctccttttggaataaaacctttcgggaatccctttccaggagacactgggaaggagagcacccactattcccgccgtcccacac

SEQ ID NO: 17780 - DNA, 122 bp, Homo sapiens
cgcccgggagcggcttggggcaggggtgcgctcggccggggcgtttggtggccccgggcccgtgcaccggcgcccagaccgctgtcattacctggccagtgtagttttcccggagcccggga

SEQ ID NO: 17781 - DNA, 122 bp, Homo sapiens
gcctgctccttcccagccttggctcgtgaggctcctccgaggaccacgggccttccacggcgtagccctgccacgaagcctccccatgtcttgcctccagcatcacctggccgagacggacc

SEQ ID NO: 17782 - DNA, 122 bp, Homo sapiens
gagaggactaagaggggagcaaggcgaggaggccgcggcgggcgcagcgggcacctgggccgtgctgcccccgcgagcaaggcgccgccattccgctgctcggggcgccgccgccgccgcca

SEQ ID NO: 17783 - DNA, 122 bp, Homo sapiens
cgcgattctcgtgcctcagtctcctgagtagctgggattacaggtgcttaccaccacacacggctacttttttgtttgtttgtttttttgagaaggagtgtcgctgtcacccaggctggagt

SEQ ID NO: 17784 - DNA, 122 bp, Homo sapiens
accaggtgcgtgcatgtgggaggtcagagggcgcctgcttctgcctcgatgtctgtgccccgtctctgactgctggctttctgctcacacctaggatggctgcctgagaatgggactcttgt

SEQ ID NO: 17785 - DNA, 122 bp, Homo sapiens
ggttgtaacacaactgcccccccagccaacacacacgcccaagcacgcagactttgcacacgtgacatgggggtctcaacaataaagaaaaaaaagaagaccttacagcgcgaagaagcggg

SEQ ID NO: 17786 - DNA, 122 bp, Homo sapiens
ggactcgcgcccgggttaggcctcccagggccgctcaggctggtgggtgttgcctggtgacgggcctgccggcggccggccgggcgatcggcggtcggcgcccgcgcaaagcggggctggac

SEQ ID NO: 17787 - DNA, 122 bp, Homo sapiens
gtcagtttccctttgtttagattcaatctgggcttcccagctcccccgcgcttctgtacccgggatctgagagtcaacacagaccttgaaatccccgcaccgctccctccaccccgtgtaaa

SEQ ID NO: 17788 - DNA, 122 bp, Homo sapiens
gcattcctgggaggccggcgctctgacgtggacccgggggccgcgggcgcggcgggggggcggcggtccgggggcttcttaaaccccccgccccggcccagcccgcccttcccgagcaccgc

SEQ ID NO: 17789 - DNA, 122 bp, Homo sapiens
gatgaaggccatgaggtccccgtgcaggacgggctccgtcaggaagctgtaggagtgtgccgactcgatgccaatgccgtaggccgtcacgatggctgagtgcgcgcccagcgagagcccca

SEQ ID NO: 17790 - DNA, 122 bp, Homo sapiens
aaggaattccagactcagtgtccaatggagacatctccttccctcaaagcaaaaggaagccgagtccaaaccaggccacactggaacagcagggagggcctgatgtcctccagagatcagga

SEQ ID NO: 17791 - DNA, 122 bp, Homo sapiens
accagcggccgtgcaccagcaggaggcgctgcaggaagcagaactggccgagcacgaagtcgctgttctgaactgcctgcatgccctcctggcccgccagccccacgcccacgtccgcggct

SEQ ID NO: 17792 - DNA, 122 bp, Homo sapiens
gggggagggattggtgatccagatacccaagggggcccgggggcggggggcgaaggagtgcgactggacccgcacctgggcaaccgcgtctccagcctccacggccctgtcccgcccccttc

SEQ ID NO: 17793 - DNA, 122 bp, Homo sapiens
cgtccagagaccgattacatcgcgcagccacgcccccagcgtgcgcgcggccgccgtgtacgacccggcgcatgctcccggcacgctccacgcgctcctcccatccaggccgcgcctgcgct

SEQ ID NO: 17794 - DNA, 122 bp, Homo sapiens
ttttaaattttcttcttttgcattccattttggccagctcgcttgaactctgcgttcaaacgcctttctctcccaagcaaaagctccaggaggaatcttctggagcaaagttagaaccgcag

SEQ ID NO: 17795 - DNA, 122 bp, Homo sapiens
cacatccagccaggcacaccagctcatcccacaatactgggctgggcccctctgatgctgcgcccctctgggaggaagggctgggcttgggctggcaggggagagaggaactgggtcctttg

SEQ ID NO: 17796 - DNA, 122 bp, Homo sapiens
ctgggcctccctggcctaattttcttctctggaaaagtaagggggtgatttagaataacccgcagaatgtcttagggcccctacatttgatttaatcagggtttttttgttttttttttttt

SEQ ID NO: 17797 - DNA, 122 bp, Homo sapiens
gacaggcttagctcctgctccccgccttgaggtgtgacctgagaacttcccatgaaaggccgggagggtttcacgccagggcagatgccagggcgcactcctgcaggagacacgtccgcccc

SEQ ID NO: 17798 - DNA, 122 bp, Homo sapiens
ggtgaagaagtgaggagcagcaagaggcgagcggtggacggggctctggttgccgggaaacggtggagtcacgtgccctgagcattgcccctcccctcccgagggccaggttgattccttgc

SEQ ID NO: 17799 - DNA, 122 bp, Homo sapiens
agactcctgccctcagaggacatggagaaacccgcggcactggccctcgcttgtgagtgacggagaaacccgcggcactggccctcgcttgtgagtgacggagaaacccgcggcactggccc

SEQ ID NO: 17800 - DNA, 122 bp, Homo sapiens
gagatggggtttcactgttggccaggctagcctcaaactcctggccttaagtcatccacccgcctaggcctcacaaagtgttgggattacacttgtgttgggtggcatgagccactgtgcct

SEQ ID NO: 17801 - DNA, 122 bp, Homo sapiens
aaataacaatgaaaaacatttcccttcctatattcatatcattgtctacaaatttctggacgaggaaattacgagtttgctactaaagtcgagcttttttcctctctagttcccaactttac

SEQ ID NO: 17802 - DNA, 122 bp, Homo sapiens
aagaaggacatttctgcgcggaagcgcggcagagagggcaaggggctcccggagaagggtcgtgccttgaggccctcagctctcaggactggtcccactggcatacctgggtgggctaggaa

SEQ ID NO: 17803 - DNA, 122 bp, Homo sapiens
cagagcgtacaggctcacggggccgcgccaggagcatacctggcctggcggcggggcacccggggaaaggctgtgctgccctccctgcgttgctggctctgtggactctgggcttggcagct

SEQ ID NO: 17804 - DNA, 122 bp, Homo sapiens
ttgagctctgctgggggcccgcccggaagaaacgtagctcgagaaggccgtagaagagaacggggtgcggggccgggacgaggggcgaggggcgaggggcggcgggtggcagggcagggcgg

SEQ ID NO: 17805 - DNA, 122 bp, Homo sapiens
cctgagccttagccatggccgaggcaggggctgggctgagcgagaccgtcactgagacaacggttaccgtgacaaccgagcccgtgagaaaggcgggggggcggtgctgtttaggggtctgg

SEQ ID NO: 17806 - DNA, 122 bp, Homo sapiens
gtgccagacccctgctaggtccgggggtaagagagatcaaagccaccatcccccccgctccgcccctccagaaagcaggacagccttgcccagcagtggggaaagctctgcaggagccccgc

SEQ ID NO: 17807 - DNA, 122 bp, Homo sapiens
cttgggagggcgcgggatgatagcgcctagcacctgtctccgggccttcccgatgagccgcgcttagggtccgtgggcttcagctgcatgaaccacgttccagcagttcggccctcctggcc

SEQ ID NO: 17808 - DNA, 122 bp, Homo sapiens
aatccccctaccttgatgtcttctcttagtaatcccactgatcctctctgttttctttgccgtattcagtgttaagcacagtaagtctttcctactgaaatagccatggtcctaatcataat

SEQ ID NO: 17809 - DNA, 122 bp, Homo sapiens
acccaaactgaggagttatttcttctggtaaacatttttcagatggggtggggaatgcctcgatctaaccagtgaaggtgtcagtaagcattagcaaatatttgaatctcctgcagaaaggc

SEQ ID NO: 17810 - DNA, 122 bp, Homo sapiens
cagcctctccacactctccccagcgcctgcagcacccccagtgcgcacagctctgccagtcgcttccccgggcgccgcccctgcaccacttcggcccataaccttgcggcgactgtctgaag

SEQ ID NO: 17811 - DNA, 122 bp, Homo sapiens
tgacctcgtggtccacccatctcggcctcccaaagtgctgggattacaagcatgagccaccgtgcctggccctttatagataactcttgaagtcaggtgatatgagtcttccaactatattc

SEQ ID NO: 17812 - DNA, 122 bp, Homo sapiens
gatttcaagtgtccacacttctagtttagacatttggcaaccaattcggaacagccgggccgcgaggggcccccaggtctttggcggcgtcgttgggaggccgcggagttgtccctgggctt

SEQ ID NO: 17813 - DNA, 122 bp, Homo sapiens
ctgcagctggtttaacatgtatattgtgcccagttgccggctcgcctcctcttaccttcacgttagtccggagtgcacagtaacatgcaaagaacattgcagtaaataaggagcatatggac

SEQ ID NO: 17814 - DNA, 122 bp, Homo sapiens
ccagttctttaagaagagtcctgagatgtacccaggagtagcaaagtggatgtgccaacccgagggaagagattagtaagctgctgccccctgagacagggctccatgagctgacaggttga

SEQ ID NO: 17815 - DNA, 122 bp, Homo sapiens
gggcggggtggaagccgggggcaaggacccgctggaggcccgccacacccgcgaccctcccggccacgccactgcccaccccgacgtctaccctggcggagaagctcctgggcgacggggcg

SEQ ID NO: 17816 - DNA, 122 bp, Homo sapiens
tgcggtgcttcccggcttctggcctcactcatcaggcctcgacctggaatccagggagcccggccccttgtgtaaacacaggagggcccccacaggcccctggaggaggtccgggggtgcgg

SEQ ID NO: 17817 - DNA, 122 bp, Homo sapiens
ggaaggggcgcctccgaggacgggccgctgtccctggagcccatgtctgcatcatttatccgggccttcacgtgctcctctagcacgcaccaagcactgagcacatgccagctcacagcgca

SEQ ID NO: 17818 - DNA, 122 bp, Homo sapiens
gacacaccaggacatacccaaataataaacacttaatgtgacagacacacagaaacacaccgtctcacacattggctgccaagtctaagaatctagcctgaaagctctcacctgtgtcaagc

SEQ ID NO: 17819 - DNA, 122 bp, Homo sapiens
ggggtttcaccgtattggccaggctggtttggaactccggaactcgtgatccgcctgtctcggcctcccaaagtgttgggattacaggcgtgagccaccgcgcacggacgggaattacaatt

SEQ ID NO: 17820 - DNA, 122 bp, Homo sapiens
gccccgcgcacctcctcatcttgagcagctgccgcaggaagtgaaaggaaacaaacactgcgtggcagactctcagcgggacgcccccgcccgggcagctcccacttcctcaaatctcagcc

SEQ ID NO: 17821 - DNA, 122 bp, Homo sapiens
atagagtttcgaatatgcaagatgaaaaacttctggagatctcttccacaataatgtgaacgtacttcacactactgactgtgcacttgaaaatcgttaagatagtaagtttcatgttatgt

SEQ ID NO: 17822 - DNA, 122 bp, Homo sapiens
ttcagggagatgattgctcgtttttaccagtgagctgttcagtatctcatgtctcacccacggcagggccaaaacaattttccaatacctgtggacacctgagcaactgttatcaatatact

SEQ ID NO: 17823 - DNA, 122 bp, Homo sapiens
caattttcctaagctagaaaggacctttcgaccctccgacttgtgcccatagtaaagcggcggccctaagacgacgcgggggtccttgtgcgcacttaaatggagtcggctgcgcttggtga

SEQ ID NO: 17824 - DNA, 122 bp, Homo sapiens
ggacatgatggggggcggagccgaggcctccgaagcggaagtgggttgctgttgaggcggcggcatctttctcgaggagctctcctgggcggctgaagaaggagcttcttctccggagtgcg

SEQ ID NO: 17825 - DNA, 122 bp, Homo sapiens
aagcgatcggggaagctcgggaatctccggcacgggcctgggattgtcctggaggcacagcgcggctggagtgcggggcagcgcggggggggcggggtctgtctcctttctgggcggggccg

SEQ ID NO: 17826 - DNA, 122 bp, Homo sapiens
tcccaggccaccgcccacctacacagcagccgagaaaagctcttaactcacagggtggcacgcggcgtccctcgaccacaggacagagtccatctccccacacacaaccccaagaaacagta

SEQ ID NO: 17827 - DNA, 122 bp, Homo sapiens
cagtggaaaaatctgggaccggaactctgggagaccgttgccttggcacttggcgtccagcgtttggcaaaacgagggcgggtatcaccggatggtactcgaactccagcagtgacactgct

SEQ ID NO: 17828 - DNA, 122 bp, Homo sapiens
gagagcaagacaattaaaggcagcaagcagtcagttccgccatcacagctggagagttgacgctcagaaccagaaattctgtcagtgtgacctttaagttacttctctatttccactgcctt

SEQ ID NO: 17829 - DNA, 122 bp, Homo sapiens
agtaaaacaaagaccattttcttctggaggcaactcaaggaggtaagactgtgagtcaagcgccttggaggataagaagtccaggtaagtagaaggcaggaggaagcttccctaatatcacc

SEQ ID NO: 17830 - DNA, 122 bp, Homo sapiens
gcgggcagagcggctagtcggtgggccgagctctctgctacccccgcaggagtgtcccgacgccatcccagaagcagcacctgtgggccacggcgtttgcttagagcctggactgaggctgc

SEQ ID NO: 17831 - DNA, 122 bp, Homo sapiens
tagtcacttcacatttctgagagagaacaggaaatgtttatagttaagaaatttgtggtgcgtcacttaagcaaaggtgcagatacaaaaatgagccagatttgttggggtggctccaagca

SEQ ID NO: 17832 - DNA, 122 bp, Homo sapiens
gcggctcgggcgcgccgggctcagcactcgcggccccactcgcggtccttgggcggcccgcgccctcatgcggcacacccggcggggccggcagattgcttgaattcaagtgtccgagacca

SEQ ID NO: 17833 - DNA, 122 bp, Homo sapiens
cccttgctaaccttttgctatcgctgcctcttcaaaccagaggagttgagagttccgggccggcagaggaaggcgcctgaaaggcccctggccaatgagattagcgcccacgtccagcctgg

SEQ ID NO: 17834 - DNA, 122 bp, Homo sapiens
actccgcaacctagggtcccaaaaccctggagcgaatgcggactaagggagagcggccggcgcgtcaccggcgctggcgtgtgacgtcagcgcgtggaaggcggcacgcagcggaggcggct

SEQ ID NO: 17835 - DNA, 122 bp, Homo sapiens
tgtgaggttacctttttccttgttgcattggaagcgggccttctcttccagcaggccttccgcctggttgttgttggtgtctgtgatggctgttgttttgtctgttaatttcaggacctcct

SEQ ID NO: 17836 - DNA, 122 bp, Homo sapiens
cttagcctcccaaagtgttgggattacaggcgtgagccaccgtgcctggccttattttttcgattaatctttctgagggggactttcctgggctcaagtggtcctcctgcctcagactccca

SEQ ID NO: 17837 - DNA, 122 bp, Homo sapiens
tgctgccccataccccacacactcatcagcctgaagttagcccctgagtgccacctgcatcgtgccataaccctgaccgcctggggcaggaagtattcaggttggctgtgtcagatgctaat

SEQ ID NO: 17838 - DNA, 122 bp, Homo sapiens
ggaaatctagcagggcaaggagagactaaaacatccctacttcccaaaaagagtaagaaacgaggacctgatccaccagcctgcgagtcattgtttgaggctgagttccctcaccgatgagc

SEQ ID NO: 17839 - DNA, 122 bp, Homo sapiens
tgcccggtgcagactaggctgcagcctgctctgcagctgcccagcccaagcctggggtggcgcccgcctcggccgcctcgcctgctcagtggctgcgtggaacacaaagcgctgtctccgag

SEQ ID NO: 17840 - DNA, 122 bp, Homo sapiens
gggccgcgcacgcctaagaagcccaagccagccaatcaacgccgcgcgcctcccagcctccgcctcccattggctgcgtccgcaattcccgaaccgctggactccgggactgacccgcgggc

SEQ ID NO: 17841 - DNA, 122 bp, Homo sapiens
cgagacggaatacccaggagtcgagtacttgggcgcatgcggcaaccgtatctcagttctcgcgaggtttcgtcttcccggaagcgttggaggacattccctgttgactgcgtcgcgatgtg

SEQ ID NO: 17842 - DNA, 122 bp, Homo sapiens
cgagaggaggagcaggagggtcagtcctggacccgggcttaggaagccgggagggaggttcggatccgcctcagagacagggcgatgaagatctgtccaagtcttggagtggagggaaggat

SEQ ID NO: 17843 - DNA, 122 bp, Homo sapiens
ttcttatgcctctgccagccaaggcagagacagataaataaataccatcactgagccaggcggcacagcgcgacctccaggcccgcacccctctcaggcatcctgcctggccggtctacctc

SEQ ID NO: 17844 - DNA, 122 bp, Homo sapiens
ggtgaggatgtgaagaaattggaactcttgtacactcttgataacaatgtaaaatagtatcgctgctatggaaaacagtatggaggttcctcaaaaaattaaaaaatagaaccattatataa

SEQ ID NO: 17845 - DNA, 122 bp, Homo sapiens
ggggggcggtgggacggtgggacggtggaccaggaacccaactgggacaccgggccaggccgggcagcggtgggcctgggaagccgcatgggtccgaaggtgcagtgaacatattcgcagta

SEQ ID NO: 17846 - DNA, 122 bp, Homo sapiens
atcatggctcactgcagccttgacctcctgagctcaagcaaccttccacctcagcctctccggagtatctgggactacaggcacacaccaccaagcctggctgatttttaaatttttttgtg

SEQ ID NO: 17847 - DNA, 122 bp, Homo sapiens
atggggaaggggcagctgcctctcactgggaccctggcaggataagttcagtttattctccgcaaaagcactaacactgtgggtgctcgctcagtgggtgctgctgtttaacaacctcagaa

SEQ ID NO: 17848 - DNA, 122 bp, Homo sapiens
caggtgacttgagagattaccttggaagaggctaaagcaggcaacttgagagatcaagtgcgcagtttgacctttggcttagggttcatacgttagcatgcttccaaggccttgcatccctt

SEQ ID NO: 17849 - DNA, 122 bp, Homo sapiens
taaagatctaatttgtagcacaaaatttttttgtggaagtttgtattatttcagaagaatcgtgcttaagctgaagccattgctgtgtggcttgctgagcaaatgcttatttttgagtgaga

SEQ ID NO: 17850 - DNA, 122 bp, Homo sapiens
cagacccatccagtgtgcactgaactcggtgggtcagacccatccagggtgcactgaactcggtgggttggacccattcactgtgcactgaactcggtgggtcggacccattcactgtgcac

SEQ ID NO: 17851 - DNA, 122 bp, Homo sapiens
tcattttgtctcactatgcattttttttttgtggggggtggggggattggttttgtatgacgttgaattgagcgtctttaatcttgaccagtgttgtcagatttctgaagagcattccggag

SEQ ID NO: 17852 - DNA, 122 bp, Homo sapiens
gttggcggagtatgaccttttggggacactccatcggaaaaaagggaaggaaggatcagacgcggctgtatacaacttcttaaactcactgtgtgctcaattcccagaagtaaggagggcac

SEQ ID NO: 17853 - DNA, 122 bp, Homo sapiens
gaaagtcctaaaacctcggagcaaagccacccctgtcccctcaggcatgttaggttagggcgggttctgagcaactgggctccgttgctccttagtgtgtaagctatagacagttgtccctg

SEQ ID NO: 17854 - DNA, 122 bp, Homo sapiens
agcagactgcgcagtctgcagtcttcgtggcgggccaagcgagcttggagcccgcgggggcggagcggtgagagcggccgccaagagagatcacacccccagccgaccctgccagcgagcga

SEQ ID NO: 17855 - DNA, 122 bp, Homo sapiens
gccaagagaacccaaaacgatgcagagctgaaaagccaagatataacttgtatatttcatcgtttccgagagaattaagccaaagaagttgaaatcagtagttcttgtatcaagctgatcag

SEQ ID NO: 17856 - DNA, 122 bp, Homo sapiens
agttgaaattccctttgaaaatcacttgaattgtccataagaacagtatattgacttttgcgtacataccactatacagtaagtcccacagacactaaattttgagcaaccattgagataaa

SEQ ID NO: 17857 - DNA, 122 bp, Homo sapiens
gcccccgcgggcctggagctggatccagagctagggaaactggaaaaacaggcacaaactcggaagccgcggtacggcaagagcctaagcaaagaatcctttccaagattcacacctcgtct

SEQ ID NO: 17858 - DNA, 122 bp, Homo sapiens
ctgaaagtgctaattttaagaaacagtcaggaaactatcccaaacagctgaggttgagcccgcgggtgtgcctactacatagattggagcaaatctatgtaacccaatggcccttgtcaacc

SEQ ID NO: 17859 - DNA, 122 bp, Homo sapiens
atctcaggaagcaaaggtgttcgaaggaagagaagaaagaatggcctagtgtggcctcaccgcctttacctgtgtgtgcaggagcgtctcagaacagaccccgagtgtgactgagtccgctg

SEQ ID NO: 17860 - DNA, 122 bp, Homo sapiens
gcttgttagtacaagtgactctgttttggaaattacggacaagaaaccttggaggaagaacggcattaaagatcaaaagcatgatgactcctgatgaaaacatcaccaaatgatgaacccac

SEQ ID NO: 17861 - DNA, 122 bp, Homo sapiens
gggtggacagcagcgtgggcgacagcgaggctgcgaggagacctcgctccggaggtcccacgggctccaagggcacctggcctagttcggcaccctctgggacccctcgaaggatgacgtgg

SEQ ID NO: 17862 - DNA, 122 bp, Homo sapiens
tcgtccggctactctaacggcgagcgcagcctcctgggaaatgcagttccaagccgcccacgcccctatgtctggaggaaggtggagctacacttcccaacatgagattgcaccattgcatt

SEQ ID NO: 17863 - DNA, 122 bp, Homo sapiens
tccagcagggactgaaggtggtgggctgcgcccgcactgtgggcaacatcgaggtgaggccgggccgagggcggggacgtcgcgggcgggtcgtttccccggagtcgggttcacctgcccgc

SEQ ID NO: 17864 - DNA, 122 bp, Homo sapiens
catcctctctggacctgtcctttgactcattcatacagtgggggaggggtacctatcttacggagttgtcctaagttctaaatgcaaagcgctcccatctggcatctatggcacagatatat

SEQ ID NO: 17865 - DNA, 122 bp, Homo sapiens
actgtcccccctgagactccgcctgccgggaacctaggaatgtcccgctgacactagagccgctgggaagacacactagagaagcttcctctgaacagccggggaaacggtctgtcctcaac

SEQ ID NO: 17866 - DNA, 122 bp, Homo sapiens
tcccctgagtgttgggggtgggggttctccatgtggaaggtcctttgtcccttaccacagcgtctcccccactgctttgtctatttcacacctcacttggaggcctgatacccttcttcccc

SEQ ID NO: 17867 - DNA, 122 bp, Homo sapiens
gactggagttaccaatgcgggagtcttcagcatgcagcaatagcattggaagccaaaaggcggaggagctccccagggagtgggggaacacggaggtcagctggtcagatgactgagcacgg

SEQ ID NO: 17868 - DNA, 122 bp, Homo sapiens
tcctccggctgcagtagagggcgagcgggctccgcttttgttccctggggctggcaggtccgtgtggggccagggcgcgcgggagacgccgcggagctgggtatcccggagaggggatgctc

SEQ ID NO: 17869 - DNA, 122 bp, Homo sapiens
cgagtgggcggggctagagccgggcttggtgtggccggcggagaagcacttggcccactgcggagaagcacttggcccactgcgcagtagcacttggcccactgcgcagtaggtccactggg

SEQ ID NO: 17870 - DNA, 122 bp, Homo sapiens
gcctccaggggcgcggagctctggggatgggcgtcgggccggcagtggtgcggctcactccgtccctgcccacctgcgacgggatcccccgaccggcacgggccacgccgagctcccggcca

SEQ ID NO: 17871 - DNA, 122 bp, Homo sapiens
gtgtccccagtgtggatggaggcattcaggaaaccacagaggtaggagcctatggccagacgagcacacacagttgttgtcatggttgtggtgtaatgtaggggtttgcacactgctgcata

SEQ ID NO: 17872 - DNA, 122 bp, Homo sapiens
gtcccatgtagtggcacacaggcaagcacacacacacacagggtcacacacaagcgcacacggtcacatggccacacacagtcacatggacccacacaggctcacactcctgcaggtcacac

SEQ ID NO: 17873 - DNA, 122 bp, Homo sapiens
cagtcaggagaagacacaataacttttattgtagaatgtcaccagctcacctttgtctgccggactggcattaatgtgcctaatttcatccacttgatggataacgttttcatttataatga

SEQ ID NO: 17874 - DNA, 122 bp, Homo sapiens
cagaaagggagattagcaaggagcattgtgagagctgggagatttttcttgggtttagcacgagaagaatgtaatgctgtgtgtgtttgacttgctcgttctgttggtgtcccccctccctt

SEQ ID NO: 17875 - DNA, 122 bp, Homo sapiens
ctgcgtggaccgagcgcgtgcgggcagggggcgcgccaggcgtgacaggtgtgctgcggacgcgcaaggctgcggcggccgcgggccggatccggtgcgcccccgccccgcgcgtccccgcg

SEQ ID NO: 17876 - DNA, 122 bp, Homo sapiens
aggctgtccgtgggcgctgccgagaaacaggaagtggcctcagtgacccctgcgcccggccgcgcggcttgttcgtacttggttgccgtgacaaccagacttcctagccccaggtgtccctg

SEQ ID NO: 17877 - DNA, 122 bp, Homo sapiens
ctgtaaacatgatctcatccccccatcccttcttccaaggagcttcctatgacaggaaatcgaattctagttggcaaatccagtgatgaggtctgtagaaaaggggtcccgtgtcacagcca

SEQ ID NO: 17878 - DNA, 122 bp, Homo sapiens
gatgagacaggctagagatttccctgggaaggtattcgggggggtctaaggcattcacggcgcacctgaggcggtccacccagaggccccacaaggcaccgccctattcaacttaagtgaca

SEQ ID NO: 17879 - DNA, 122 bp, Homo sapiens
ttccctccaggcctgctgctggcctgccagagaaagaggccctccctccccacactgggccggccacccgcgcccagggcagggatctacacttgagtgtttccgcgtctgggtcctaattc

SEQ ID NO: 17880 - DNA, 122 bp, Homo sapiens
caatcagcggctgcctctcggtgctcgcagccaatccgcgtcttccgcttcgggtggacccgacggaaacattccagagggatccctccgcctcgcccggctcttcccgactcctcccctcg

SEQ ID NO: 17881 - DNA, 122 bp, Homo sapiens
cagtgacccgctgaagggcctccggaaactgggtgaactggttcccgtgtccctccccgtcgctggtgtggctgtgtctggcctcctggggtccttttgtccaaggacaaggtgtcggctct

SEQ ID NO: 17882 - DNA, 122 bp, Homo sapiens
acctcgggaccggggctcccaaatgaacagcgcgcacagctgggagcagggcttggggagcggggctctgcggccggggatccgtagaagccgctgcctggaagcgggcgccggcagggggt

SEQ ID NO: 17883 - DNA, 122 bp, Homo sapiens
aaagcaaatataggaggtactctgattaaatataaaaatttggccgggcacgttggctcacgcctgcaatctcagcattttgggaggctgaggtgggaagatagcttaaggccaggggttca

SEQ ID NO: 17884 - DNA, 122 bp, Homo sapiens
ccgtctagagagccccagtggcccagggccacctccagtccctggacttggaaatcaggacgctgtggatcccacaggcgccccgcgacatcctggagtcgccgggagtggcgctgcggtga

SEQ ID NO: 17885 - DNA, 122 bp, Homo sapiens
cggagacccggcagccaggctgggctgcagcagcctttgcctggacgtcagggtggagcccgggaatcgcccctgcgccgggtgacggaggagaaaggggcccgcaggaggcaggagggagc

SEQ ID NO: 17886 - DNA, 122 bp, Homo sapiens
gctgcccagccctgtgcttgcagcccctctgtggtcctggagctctctgagaggagcctccgtattgggcgatgcccttgggagcactgccgtcctggtttcctgctagtttccgcacttac

SEQ ID NO: 17887 - DNA, 122 bp, Homo sapiens
ggggaagaaggggtgggaagatgtcggcaatggcggaggcgtgcagccaaccagccaggacggctgtgtctgttcacggctgtccacagtgctgcccagctcctgaatctgctgttgctgga

SEQ ID NO: 17888 - DNA, 122 bp, Homo sapiens
ctctcactcatggtggagggaggggagtgtgagttcatcccactgagcagctggcaaaggcgagctgggatggagaagggaagacgttccaaggctcaggtctgagctcacaggcaggggca

SEQ ID NO: 17889 - DNA, 122 bp, Homo sapiens
tgggcatcccggaccaggcttcctgacgcacgtgttctgcgcgctctcgtgggaacccagcgtttccgactcccagatcccattctgatggcgccgggtatccctctgaccctcgagtaaaa

SEQ ID NO: 17890 - DNA, 122 bp, Homo sapiens
gatctaggaaggatttggaagaattcaacagcgctcaggataatgagaatgtggtcactccgcgcgaagtttaagaactaaagttttagaaacaaacaaacaaaaaacactaactgcccaat

SEQ ID NO: 17891 - DNA, 122 bp, Homo sapiens
acctgactatgagctcagggaaagaaccgccaagcctagttccatccctcaggctctggacgcctgtactgggactgctgggatctcagcagtgctgccaggggaagtgagccaaacgtggc

SEQ ID NO: 17892 - DNA, 122 bp, Homo sapiens
tctcagctacagagccaggagcgggagctcagaggggtgtagaaagctccaccctcctcccggcagcgcgcctgactggcagttcccaagaactcgcccccaacactgattgggtagagctc

SEQ ID NO: 17893 - DNA, 122 bp, Homo sapiens
tagtgggtcagatggaaacacaaacaccttatgaggaataagaaggctgggaaagagtggcggcggggggttgtcattttattacaatggtggtcagggaagacatcactgaaaaatgactt

SEQ ID NO: 17894 - DNA, 122 bp, Homo sapiens
tttccttctttctctctcttttctttcttttcttttcttttctcttctttcattttgagacgtactctggctctgtcgcccaggctggagcgcaatggcgccatctcggcgcactgcaacct

SEQ ID NO: 17895 - DNA, 122 bp, Homo sapiens
ctgttgtgtcctgttctgacttgtgtcagagactgttgtggtgtcactccgtgtggtgagcgtgcctcctttgtggtgtgggtggcctatggtggtgcttcctttcacaaattgtgtgtccg

SEQ ID NO: 17896 - DNA, 122 bp, Homo sapiens
aattaaaaagaatggcctaatcttaagcaacaacaacaaaacaaactctgaagcaccctgcggcaggcagcttctgcatcgtgggggttgtggaaggggctgatgggcaggatcatgagaaa

SEQ ID NO: 17897 - DNA, 122 bp, Homo sapiens
cgagggagcaaccagctgcgacccggaaatgccatataaggagcaggaaggatcccccgccggaacaacccttatttgggcagcaccttatttggagtggcccgatatggcccggccgcttc

SEQ ID NO: 17898 - DNA, 122 bp, Homo sapiens
aaatgtcactgtcccctctgacccctgcctccaccaaggttcctcagtgttctccgtaggcggattctggatttctccagctgaggtgacctgggcaccagatccttctgggtttgagaagg

SEQ ID NO: 17899 - DNA, 122 bp, Homo sapiens
ggagctgggcccagcggcagtggcagttcccttctccaccgcgcagtcccactaaagctgcgggcagctcttgatttgtgtatcttacaagaagaagaggagggggagaagaagggaaaagt

SEQ ID NO: 17900 - DNA, 122 bp, Homo sapiens
cccggggaggaggaaatcgacttgtcacttcctgaagtgtttgcaactcgtccctttaaccggcaccggccaggccgcccgcacccgccgccgccgcggagccgccagaccgcggctgcgtg

SEQ ID NO: 17901 - DNA, 122 bp, Homo sapiens
gacaaagggttaacgcgttggcagtgactgcgggccccggatgtgagagccttggcttgacgccctggctgcgctgcaggtgcgccgggccgaacggagccggcagcctggcggcgacctga

SEQ ID NO: 17902 - DNA, 122 bp, Homo sapiens
tccgtgacctcagtgtttcttttgcacagatcgcttcctctggctgggctggctgcggtgcgttcgccttcgcagcaccactggaactgttcttccaggcaggggcgtcttttcccccatat

SEQ ID NO: 17903 - DNA, 122 bp, Homo sapiens
cctcgcgtttattggtcaatctaaaagtaggcgcgccccagtgagccgacagactggctccgacagcgcgcggtctcgtgatctgggtgtggtgctcggtgggagccgccatgtttagtact

SEQ ID NO: 17904 - DNA, 122 bp, Homo sapiens
ggcagaagctgggcacagaggcctcagttatttcggggcacagaggagccccctggggaacgtccgagggtgactcccaagctcccccttccccgagccctgccaggtccaggtggcctcct

SEQ ID NO: 17905 - DNA, 122 bp, Homo sapiens
tggcaatgtcatatggcattaatgatgcatgagatctatgggtgtagtgtcacgtctaggcgtgtagtaatccagtcttcggccttactccagggagaaagattcagctttgttactttcca

SEQ ID NO: 17906 - DNA, 122 bp, Homo sapiens
atagggcaggtttccctggagtctgaccacagcaagcagagtgcagacttccatagaggccgcgaccatggttcctgacggttccatcccacttcccgccagtgtctggcactgagcctcca

SEQ ID NO: 17907 - DNA, 122 bp, Homo sapiens
tgggtgggatccagctcctccgcgtgctgggcaggtatcgtaacgtgggaatcgatgtcacgacaagcaaggcgcctgctgcgtagggcacctgccgcttaggactcctgccaccgcgtagg

SEQ ID NO: 17908 - DNA, 122 bp, Homo sapiens
gtgggttcaagcttgggttctgacagcagggcagattcctgagtatgtcaccatgttgcacgcgcgcagcacacatatgcacactcgcgcacacgcacacacatgcactcatacagacaggc

SEQ ID NO: 17909 - DNA, 122 bp, Homo sapiens
taggaatggcaatagtggtttggaatggagactgcacgcaccagtcaacagggtgtgtcccgaataagcagtgggtaaaggacatttactgaaatgctatctccaactccacttcaggaaag

SEQ ID NO: 17910 - DNA, 122 bp, Homo sapiens
accctttgagggtgagctgtcgccccttgtcccagagaggtgaggtgcgggatgggataacgtcctatcaagggaatcactcatctgctccaggaattcttaccttctggaaaaacatcacg

SEQ ID NO: 17911 - DNA, 122 bp, Homo sapiens
tcccgacagggcggccccggtgtgtccagacccgggagcggtgggggagggggacgcgtccgggcggtacctccagcatccagtaagccagcatcttccgcatgtgcggcttgatctcccgc

SEQ ID NO: 17912 - DNA, 122 bp, Homo sapiens
catgggggaggcggaccctgtttagatctctgaagctcaggcttttgcaatctctgttaacgaaacctatgccacaagtggtaaataccgaggacgctccattttagtcatgatctttatgt

SEQ ID NO: 17913 - DNA, 122 bp, Homo sapiens
ggtccccggagctgtcccccttgagaaatttctcggcgaaccagcgattgaagcactggtcgtactcgcgcttcatgtccgtgcatgcctcccccacactgttcatggcgacagtggtggcg

SEQ ID NO: 17914 - DNA, 122 bp, Homo sapiens
ttccaggtgccgtctgtcatccctttctttgactaggaaagggaactccctgaccccttgcgcctcgtgagtgaggcaatgcctcgtcctgcttcggctcacacatggtgcgctgcacccac

SEQ ID NO: 17915 - DNA, 122 bp, Homo sapiens
aggggcgcgccgggcaggcaaagttgctgagttgctctgcacgctcagaagttgcagctgcgacggcagcttccctcccccttcctgcactgggctacccggaacgcacacccacccgtcac

SEQ ID NO: 17916 - DNA, 122 bp, Homo sapiens
gcgttgggctgtggattccccactgtggccaagccctcatggccattttcccgttgtggccgctcaggcctcctcctgccctcggccctgaccctgttccctgtcttgcagcttcactacca

SEQ ID NO: 17917 - DNA, 122 bp, Homo sapiens
gtgctgagagcaagtgttagagaacttgaaaggaggctcttctctctgtgatgaaagaaacggaaggtggctctgcagatcccctcagatgatgcacgctgtggacccgagcaccgagcctg

SEQ ID NO: 17918 - DNA, 122 bp, Homo sapiens
gccgcccgcccaccccgtgcgccgccgctcacccacccacctgtgcacaccctggctggtcgtggaacgcatctcccaggagtccccagcagactccaagactctggggtctcgctcttggc

SEQ ID NO: 17919 - DNA, 122 bp, Homo sapiens
tttcccagttctaagcaatgctccaatgcgtcatagcacatacctttttgcacgtatctgcgattattttctaggcagcaaggaggtgctggatcagaggtctgcacagttttaaagaactt

SEQ ID NO: 17920 - DNA, 122 bp, Homo sapiens
ctgctcgtgtgtcagcctagggactcactctccctccttggagcagggagttctcctggtcggaaaggaacgtgtctttgaagcacatcatgcagcacatcgaggcggcccccgacatcatg

SEQ ID NO: 17921 - DNA, 122 bp, Homo sapiens
agcagctcgtctgcccatagggtccccctccttttgtttcccatgtgccctccttgaagccgcccgtcagccctgggtgtggggaccctgcacggatatcctgtgtgctctggtcccggcga

SEQ ID NO: 17922 - DNA, 122 bp, Homo sapiens
agggacaatatggcggcgcggccgcatggagggcctctcatcccgccccaagcaggttgacgccacggtacctgcaagccctgccatggcgccgccgccactgtcgccgtctgccgcagcct

SEQ ID NO: 17923 - DNA, 122 bp, Homo sapiens
ggccaatcgcatcggcggtcgcgcagatttgtgggatcccacttgaaaaaggttggtcatcggactgtggtctagactcaccaaaatctacccattccctcatctgactgcccaaaaaaata

SEQ ID NO: 17924 - DNA, 122 bp, Homo sapiens
aagctcaccatccatgccatcggataaagtgactcctgtggaatgccctcgttcctgtaccgcacacccctggagcccaggtctcctggttcctagcatgccacgatgcggcccctgcccgc

SEQ ID NO: 17925 - DNA, 122 bp, Homo sapiens
tcctgcaccgcgacctgaagctcagtgagtgccaggaaggggaactgtgggcgggggcgtcgggaggtgggcacggatccacccccatgcgcaatgcccctcccactgccaggtaacttctt

SEQ ID NO: 17926 - DNA, 122 bp, Homo sapiens
gtgaaggatggccaccctggactctgtccacagaggtgccagctgagagtgtgctctgaccgtggcacaccggtccctccgggcactaaaatgagaccctgttcatttcgtgtctcccacca

SEQ ID NO: 17927 - DNA, 122 bp, Homo sapiens
cccttcttgggttaatttacctatataacttttctggaagggtgtgaccctggcagcctacggagaccctgggaatatcttccagagggccctggaccagggatgtctgcctgggtgtgaga

SEQ ID NO: 17928 - DNA, 122 bp, Homo sapiens
cgggatgcctggggggtggcgcggcctctgagccaggggctcaccttctctggtccacaccgggtgccctcgggcactggttcatacgcagtgccatcctctgtggtgagcgcgtggcacac

SEQ ID NO: 17929 - DNA, 122 bp, Homo sapiens
tgagaaaaattcctttctagtttgatcaatccttgttttcctcggcagagcccgggcgcccgcccagcgcggagacgggcgcgcggggtctctccgcggcgggggcgccgggcctcggggga

SEQ ID NO: 17930 - DNA, 122 bp, Homo sapiens
gagacatgcattacatacgcgaagatggggagagagattgcttctgtgctgcaaaggaaccgttcccggtgattcgcagtctgatattcctcagtcttgtaaggctttccagaaatggagct

SEQ ID NO: 17931 - DNA, 122 bp, Homo sapiens
cttgagtaggaaagcagccgcaggttgtggcgctccaccacgccgtccacgtgcgccttgcggtctctccatttatcgcttgagatctccagccttaccgcggctcgaaatggaccccaact

SEQ ID NO: 17932 - DNA, 122 bp, Homo sapiens
ccaccctcccaaaccccaccccggaagtacctcgggaagcacgcactcttccattttgcacgccacaaacaggcaagccacgcccagcagctgcaggcgatgtagacgcacgcggccagcgc

SEQ ID NO: 17933 - DNA, 122 bp, Homo sapiens
taccgaagtgtgtacccgctacgcacagtgcggtgatgcctggccacctccagcctccagcggggacctcctgcccaggtggagtctgaatgcccaccgccaccagcccacgcgcgcagtgg

SEQ ID NO: 17934 - DNA, 122 bp, Homo sapiens
ctggccgccgcccggcgccgccgctcggacccgtgagtgccccgccggccaagcggggcgcggctgtcacagcccagcccaccattcacagggtctcggcctcctcgtcctcatcttcaaaa

SEQ ID NO: 17935 - DNA, 122 bp, Homo sapiens
tttccccagacgaaaggcccttttgggaagttcaggtggagttaaggccactgttcaaagcgtactgcctttgtgtgcctgaagcttgaatgacaaccattgaccgatacgactggccactc

SEQ ID NO: 17936 - DNA, 122 bp, Homo sapiens
tttccagacaggaccactggtcctgagctcttttccccggcgtccgccaacgggactatgcgaggtttacaatggagagagatggggccaggaccaagccttaggtttcgcgctgacccctc

SEQ ID NO: 17937 - DNA, 122 bp, Homo sapiens
ccccaccctcttccctgccaagctcaggaagaaaagtggaccctggtggctccctctaggcgtggctgctctgacccttggtggggtgggtgccttcctctggaagctctgacatattgggg

SEQ ID NO: 17938 - DNA, 122 bp, Homo sapiens
ccatgtggaggacagtctgagggagccactgtcccttgtccactgactcactggctggtccgagttttctccgcttctggcagtggtatttctttttgtcttggtcctgcatgatttagggg

SEQ ID NO: 17939 - DNA, 122 bp, Homo sapiens
gcacgtgcggagagtacgccgggtgtgtgcggagaggaccacgcccgcgtgtgtggagagcgctggtgtgtgcggagaggggtgcgccggtgtacgtggagggcgctgggtgtgtgtgccga

SEQ ID NO: 17940 - DNA, 122 bp, Homo sapiens
agacccggggagcatctgggcttccaaggtcctcggtacggcccaaggcagcgaaggacgcgcggctccaggctgcgggagccaggacgaccgggggctcccagagcgcgaagtcgcgatcc

SEQ ID NO: 17941 - DNA, 122 bp, Homo sapiens
ggcctgggtgtgccagacagcaggcactgagaggggccacagtgtgtgaagcccatacagcggggtgggacctaggagacaggtcagcccccagtccatgcctcccattccctccagtgcct

SEQ ID NO: 17942 - DNA, 122 bp, Homo sapiens
ggggaagaaaccaggttcgttgggcgtgaccttggctcagctcgtctgtgaaattggggccgcagacttagtttgcgggtccctgctaaattcctctccctcttcctgggattcccatccat

SEQ ID NO: 17943 - DNA, 122 bp, Homo sapiens
ctgggctcaggtgatcctcccacctcagccttctgagtttctgggactacaggcatgaaccgtgaggcccagctaatttttgtgatttttgtgttttttgtagagtcagggtttctccatgt

SEQ ID NO: 17944 - DNA, 122 bp, Homo sapiens
actataagcccacaaattgctcagagaattgcagcatctcttcaactcctttgatgtaaacgtctacttaaagaaagaaaaggaaaaaaagaaagaacctacacctcaatactgctctgcat

SEQ ID NO: 17945 - DNA, 122 bp, Homo sapiens
ccacccgatggcggcggagcgtgccgccggttgctaggtgacgacgccaaacagccgcggcgtcctgcctaccgggagctgacggacgacgactgccaacaccttagccccagctggcccag

SEQ ID NO: 17946 - DNA, 122 bp, Homo sapiens
catattattcatctctttaacatgattgcattagagtgatttttttctggtgacaactttcgaggtaggtttttaaaagaataaacacagtctagtggaaaattatgcctaaagtcttggcc

SEQ ID NO: 17947 - DNA, 122 bp, Homo sapiens
cagtccgcagggtggatactatcatcatccccattttacacaacaggaaactatgtttagcggttaatccatttgccctctcatacaaagtcatgtgattgcagagcccgcatcctgtccat

SEQ ID NO: 17948 - DNA, 122 bp, Homo sapiens
ggtggtcgatgggactgggcgccgtggagcagggggtggcgctggtcggggaggctcggccgcacaggagcccatggagggggtgggaagctcaggcatggcgggctgcaggtcccgagccc

SEQ ID NO: 17949 - DNA, 122 bp, Homo sapiens
cgagctgtccgggcgccgctggcagctaggtcggaggctgtgccagctttggatcgcgtgcgacgtgctttgctgcacggccagcatctggaacgtgacggccatagccctggaccgctact

SEQ ID NO: 17950 - DNA, 122 bp, Homo sapiens
ctgagtctcagcgaggggttcactggccctgcacggctcccggcactttgtaacctataacgagacgaggaccgtgaggatgtattcatatttcacgcattcagcttctatttaactatgtc

SEQ ID NO: 17951 - DNA, 122 bp, Homo sapiens
cccttctccatatgtccaccatggcccatcatgaattagaaggtggtttccacacctccacgtcccaccctgtcccctatggcaggatgtctagatgcaagagccctgggaagttatttcat

SEQ ID NO: 17952 - DNA, 122 bp, Homo sapiens
ctgctcttcccgccactcccctgggctttgcgatcttccctacgccccccgggaagggggcgctgcggccaccgaagacaccgcgggagccacttgtccctgtgggcccagcccgcgagagc

SEQ ID NO: 17953 - DNA, 122 bp, Homo sapiens
tcttcccactccataaacaggaccgatttccacctctttcccaacacccacccggattctcggtccctgtggggctactgcttgtccgggtgtaccctctgacccctcaatgcccatttcta

SEQ ID NO: 17954 - DNA, 122 bp, Homo sapiens
gagggcacagcgacctgcatctccagtttctcctcaggacacaaggctgacttcaccttccggacagctgcaaagcccctgccagaaccaaaccgaactcgcgcctcggagaggggcttctg

SEQ ID NO: 17955 - DNA, 122 bp, Homo sapiens
gagtatgacttgatcctagctccacatttcttacatattaatctttactaccgaccagtacgtcatacagcccccaaaaccaggcagcagaagaaggcatatcaagctgtcagcttgggctg

SEQ ID NO: 17956 - DNA, 122 bp, Homo sapiens
ccacgacctctcagatccagctgtccctagccgagtctccgccgctcactggcccaaccccgactgaggccctccagtgtcccctccacgtgacctcccgtgttccgttctcccacgtggcg

SEQ ID NO: 17957 - DNA, 122 bp, Homo sapiens
gctacccagccgagcatcccgcaccgccccggccccggccccggccgaaaccctgctcttcgggccctacaacccgacttctttagaagccgattggccgtctcaggcccgccccgaggccc

SEQ ID NO: 17958 - DNA, 122 bp, Homo sapiens
gccgcgacggcccttggcgtcacgtagagacctttcccagagctcgcggggtggaagtggcgtcgggcaggaccagatggactggcccccagcctctggtagacacaccgccggctcgccga

SEQ ID NO: 17959 - DNA, 122 bp, Homo sapiens
gaacctgctcacgcaccagcgcatccacagcggcgagaagccgcaccagtgcgcgcagtgcggccgctgcttccgcgagccgcgcttcctgctcaaccaccagcgcacccacgcgcgcatgc

SEQ ID NO: 17960 - DNA, 122 bp, Homo sapiens
ctgtgaaacacataagtggcaggcgttgtcattcctccatgacagatgaaagaacagagacgctgtgaagctcttccccagcgaatcagcgcggcacccgctccctcgagcagctcggcctc

SEQ ID NO: 17961 - DNA, 122 bp, Homo sapiens
gggcccgacggccaaggaaagcccaccagccctccgcaccgtgggcgacgggccaagacccggccctaaacggccagacccagcccctagtcggctgccgcccccgccccacgcaggcgcgc

SEQ ID NO: 17962 - DNA, 122 bp, Homo sapiens
acttaataaatgtttcctaaatctgagtttctgtgacaaatccttgaccagattggcgcccggaagggcggcccaaattctagttcccttgtgttaagagttgggtaagacaatttcccctc

SEQ ID NO: 17963 - DNA, 122 bp, Homo sapiens
gatgggaggtggagaggcactccaggtccccagggggccaggcggagctgcgggacagggcgcagaccccgaggcccagggagcaccgggtggccggcggcctgcaggctggcgagggcgtc

SEQ ID NO: 17964 - DNA, 122 bp, Homo sapiens
ccgggtggttcaggatgatgacctgcgagcggagccacaggcggccatcaggcacatcggcggtgggcaccgggagggcgccagagcggggctgggaggcccagtcaccggcgcccctgcac

SEQ ID NO: 17965 - DNA, 122 bp, Homo sapiens
gggaaagcctggctgagcaactgaccttgagcaagcactgcagatggcccttgttcctgccgggctcctccagctgggagctctcagcccctggtaaattctggcagtgaaagacacattag

SEQ ID NO: 17966 - DNA, 122 bp, Homo sapiens
cagctgcagtgaaagtgtcctggcagctggctcttgagacatagaaaagcaaaattgccacgtaagctggcaactgagtagtcatgctgaagtccaatgagtgctgaaaaacagagcatgtc

SEQ ID NO: 17967 - DNA, 122 bp, Homo sapiens
ccagccgcacattagacctcaggctgcggcggggacacggcaggccgcagcagggacaggcggtgggggaagcctcggtgccggtcgccggcggagtcccccagcggcgggccagacacgcg

SEQ ID NO: 17968 - DNA, 122 bp, Homo sapiens
gcacaggcgcacggttggtcgaggtgggacaggtggcgggggtctccactggcctgcgtccgcgccccccaccctgtttaggagttcctgtttggagatggctccccctcgtcctcagctcg

SEQ ID NO: 17969 - DNA, 122 bp, Homo sapiens
tttttggctgcctgtggcagaggagcagccgtcagccgctgtccaacgttagcgcagacacggtggcggcgtgtgcgcctccggggctgctgattagaataggggacttggccgtggatgga

SEQ ID NO: 17970 - DNA, 122 bp, Homo sapiens
cgctgtgtgctcctcctcgagtgaatgtatggctcactgtgcattgtgctgccgagctcacgtgtgtgacgcggatatgttctttcttttcaggttatcaccaatctagtgaaaatgttgaa

SEQ ID NO: 17971 - DNA, 122 bp, Homo sapiens
tgcatgcgccagagagaacctctccgcccacaggcaccaaggagggggccgagtccctgccggtctcccaggcccccgaggccactggtaccttctcaggcttgtcccttccaaatcactcc

SEQ ID NO: 17972 - DNA, 122 bp, Homo sapiens
ccggagccccacaccgccagctgcggggtttcagccgctgctcaatggaagcttggttcccgtgccgcccactactcctgcgccgggagtgcagctggacgtggaggctctcatccccacgc

SEQ ID NO: 17973 - DNA, 122 bp, Homo sapiens
ctggaaggcgggcgccttggtttaggggggtccaatcggtttcaaggggttgcagcggggcggggagatgggcgggaggagtgggagctggccccgcgcgcgggggagggctaccaggctgg

SEQ ID NO: 17974 - DNA, 122 bp, Homo sapiens
gcggccccggggggacccggcttccgcgcctgtgagtgcggggtggtggtcccgagagagcggctccgggggggaggaggatccctggggatggaggagacagtcctccagggagagggagc

SEQ ID NO: 17975 - DNA, 122 bp, Homo sapiens
ctcaggtatccccttagtcagctccacaatctgcgccggagttcttgcccagctcggcctcggttcccttcagccataagatggcggctgcgcttatagcgcagcccccaggcgtcctgtct

SEQ ID NO: 17976 - DNA, 122 bp, Homo sapiens
cggagccggaggaagggccactctgtgacaccgtgagcccggacgtctgtcctccggagccggaggaagggccactctgtgacaccgggagcccagacatctgtcttccagagcttccgtgg

SEQ ID NO: 17977 - DNA, 122 bp, Homo sapiens
acacgtgcagaggccggcgcatctgcttttgggctttggctccacagcagcgtctaggggcggatgtctgcgactccggaagcccaggtagacgtgtgtcacaaggctctttcagatttgct

SEQ ID NO: 17978 - DNA, 122 bp, Homo sapiens
ctttattctcttatcctactcctctccatgcccctcatctcttcgtttaggtttttgccacgcaggtcttctctgtaggcacccctccatggatgcgcgaggaacgagtgtggcgaaggctg

SEQ ID NO: 17979 - DNA, 122 bp, Homo sapiens
cgcgtggagctaaatgtgttgtctgttgctaggagacagtctgtaatttaccaaatgtgccggtccttggccaccgcacccctagggaccacccggaggcttccccaccgctgacacccccg

SEQ ID NO: 17980 - DNA, 122 bp, Homo sapiens
ccacacctccctcgagcatggcagcagagagcctcgtaagctcatccccggccggggcaccggggcccctttgggtctcggtgactgcctgcagggccctctcaaggccatccatacgggca

SEQ ID NO: 17981 - DNA, 122 bp, Homo sapiens
aggccatcttcagcaagctgtgggactgggcgcttctctccagcatggcctgcgagagctcgatggagaagtcgcacacacacacgttggactcaaatttcgtctcagcactgcacagactg

SEQ ID NO: 17982 - DNA, 122 bp, Homo sapiens
cggcagcgtgctgcttctccagacaaaactgctccctcttgggtgtctagaggtgattcccgcgtagctctgcctggactgggaaacatattcctaaccccgtgcaggggctgcagtccctc

SEQ ID NO: 17983 - DNA, 122 bp, Homo sapiens
gcatgcatgtattgtgtgttacatggtgaaacagaacagatcctgaagttacacagatggcgtgtgcatgggggtggtgagcacccgcatggcctccgcaaaatgagtgccgcttaacaaac

SEQ ID NO: 17984 - DNA, 122 bp, Homo sapiens
tctgcttctctccccatagtatatacgtctgtcctgcgacacggacgcggaaatcctttacgagctgctgacccagcactggcacctgaaaacacccaacctggtcatttctgtgaccgggg

SEQ ID NO: 17985 - DNA, 122 bp, Homo sapiens
gtagcagggcactgactggtatccgacacggggcccagggcttagttcagatggtagcgtcgccactggtttgcaacctgaccttgggccaattatttccctgtctgtggacttcagtttaa

SEQ ID NO: 17986 - DNA, 122 bp, Homo sapiens
tttcttccttccttggggttggggacctcctggctgagagctggaggctggccatactcacggctccattctgtatggccttccacctcctgcagagggcagcacagatagtggaagaggcc

SEQ ID NO: 17987 - DNA, 122 bp, Homo sapiens
cacccccatagactggggaaggaaatggaccagagggcaccgccggctcccacccagacccggcctccaggcccgcaccaccccagtccacccggagctggacagcccactgcgggccgggg

SEQ ID NO: 17988 - DNA, 122 bp, Homo sapiens
gcggcggcggccgcagcggtgctggaggcgcagagggcggcgcaggcggagcctggcgagcgcctgagctagcggagacctggcggcctttcgggaggccgcggcggcaccccaggcccagc

SEQ ID NO: 17989 - DNA, 122 bp, Homo sapiens
ctgtttgagcggggatttagcgccccggctattggccaggaggtggctgggttcaaggaccggcgacttgtcaaggaccccggaagggggaggggggtggggcagcctccacgtgccagcgg

SEQ ID NO: 17990 - DNA, 122 bp, Homo sapiens
gagggaggaaaaagccagagaagacttgaggactgagaatacaggctaaggccaggcccacgcctggaagagaagaactttctctttgtctccttgcccactgcctgtccctgagcctgcgg

SEQ ID NO: 17991 - DNA, 122 bp, Homo sapiens
cgccgggcaggtccgcactccgcagaggcgagcgcgctccggttccagccgggaggtgggcggcgacccatcccgctagaatccgtccagtctctgctcgcgcaccgtgacttctaaggggc

SEQ ID NO: 17992 - DNA, 122 bp, Homo sapiens
gagctagacaatctgggcatccagccataaaacatcactgctgtagcacagatagttgttcgcactctcctgagccctctgtggctgcaaaccacaacagaagtaatggtcttgggaaagga

SEQ ID NO: 17993 - DNA, 122 bp, Homo sapiens
tgcggccgcacaggccaggcaggtgaggactagggtaggacttccacaggaaaggggaaacggtaagaattagaggcagctcaggtgagacagagcaggcacagaaccatggggaaaatatt

SEQ ID NO: 17994 - DNA, 122 bp, Homo sapiens
tgtttctcacagacaaaatcacgcataagcaaatagaattcccattatgctcacatcgtccgcttctatatcaatagcattggaacaaatttgcattttcaaagcaagcattaccgcagaac

SEQ ID NO: 17995 - DNA, 122 bp, Homo sapiens
cagcctgagcaacacagcaaaaccctgtttctttttctttctttctttctttttttgagacggagtctcgctctgttgcccaggctggagtgtagtggcgccatctcggctcactgcaagct

SEQ ID NO: 17996 - DNA, 122 bp, Homo sapiens
aaaggggcaggtctgtctgccagtaattagtgctgaaaactggaagccagcaaccaaaaccgaccaagtaatccagtccctcatagcactggtgaatgacccgcagcccgagcacccgcttc

SEQ ID NO: 17997 - DNA, 122 bp, Homo sapiens
cgagaatcaaggtgccagaatcacaggacgcgggaatcacgggacgcaggaatcacgggacgcgggaatcacgggacgcgggaatcacgggacgcgggaatcacgggacgcgggaatcacgg

SEQ ID NO: 17998 - DNA, 122 bp, Homo sapiens
ttcagaagatggacccacggtttaagcagcctgtcaccattccaccagcctcacagcctgcgggttaagtgtatagaccctggagcccaaatgcctgggttcaaatcctgtgtggccttggg

SEQ ID NO: 17999 - DNA, 122 bp, Homo sapiens
cctgcctcagttctggtacctggggtcaaatcggctgtagtggttgactctcagggcacccgctgccgggtcccagtccacctttgctactttgtcctactcccagcccgcgggcgctaggc

SEQ ID NO: 18000 - DNA, 122 bp, Homo sapiens
agtcgtgggtggagttttgcttttgagcggagagcggggccttcaatctttgctatctggcgctgggaatgggcggagctgaagtgggctggggcggggctggggcggggctagatcgggga

SEQ ID NO: 18001 - DNA, 122 bp, Homo sapiens
catcaaatggaggcgggaaataggctggggccgagctgaggggctgaacacagcagtgaccgtgggtcagcaggtcgcctgcccagcaggccccccaggagagggctcgggcgcccctggca

SEQ ID NO: 18002 - DNA, 122 bp, Homo sapiens
gctatcctttgggattttgaggggcgggtccggcaaggccccccaaagtggctgctcctgcgagtctccgagaggggaacaggtggtcgcggggtggctgcggcgaaggtagctcctctccg

SEQ ID NO: 18003 - DNA, 122 bp, Homo sapiens
gtttttctgctgtgcagacagtctttgcaagggctggcatgggcccagaaatgcaatcctcgtgcagagtaggtgcctgtggcaggaggccatgcaattgggctctagtcttgcttcattca

SEQ ID NO: 18004 - DNA, 122 bp, Homo sapiens
gtctgatagcttgcaatctgaggtgtgtgtgcgcgcccgcgtgagagagagggagcggaacgtgcctgagcatggggggaattgggccatgccccaggacttgagccatctctggcacaaaa

SEQ ID NO: 18005 - DNA, 122 bp, Homo sapiens
cgcgctgtctcgtcaactgggtgccggaccccgactggcctagaaaggtctttcaggcagcggtgccctaagccgagtgaaagaccccagttaaaaagcctggaaaaaacaaaaccgggcga

SEQ ID NO: 18006 - DNA, 122 bp, Homo sapiens
cactgagatatgcacgcatacatgctggggtactcacgctctcacacactgagatacgcacgcattcccgctggggtactgatgctctcacacactgagatatgcacgcattcatgctgggg

SEQ ID NO: 18007 - DNA, 122 bp, Homo sapiens
ctgcaggcgctacggcaagtgaagaggttcaagcttgccgggaatgcgacgagacagctccgcctcccgagacgaaagcccgcccctcagcccgccggactcaggctcaagtctgagcttcg

SEQ ID NO: 18008 - DNA, 122 bp, Homo sapiens
gccagcacaggtggggctcctgaggatgctgggggagagttcccagcctgtcctggcagccggtccttgccagggatggctcatgccccagctccagagagaagcaggtagacatctctgca

SEQ ID NO: 18009 - DNA, 122 bp, Homo sapiens
cggctcctgtgctggaaagcgttgatggggagcgtcggcgctgaccacacgcgggagctgcggaagcccagcggttcacacaggcctcccttcaacgtagtcatcccctggtggtggaagca

SEQ ID NO: 18010 - DNA, 122 bp, Homo sapiens
ctgacggggtacgtgctgcgttcagtcccaggcaggtgtagggctgggcaggtggagatgcggtgccctcgctcaaccggggtctaggctcctcgccgggcggggttcacctgctatcccca

SEQ ID NO: 18011 - DNA, 122 bp, Homo sapiens
cttgtgtggacgccaggcagaccctgccgtctggggcgctcgactgtggacacccgagaccgctgcctcaccccattgggcatgtcgccagtgatgtgcccagcagcccccaggactagtgt

SEQ ID NO: 18012 - DNA, 122 bp, Homo sapiens
attattgcagagggagggagaaagggattcttccaatagagggagagggcctattgcaatcgggagaatgctctgacaatagatttgcaagcatctcagggttagacaaaagggtttttctt

SEQ ID NO: 18013 - DNA, 122 bp, Homo sapiens
gcaaagcacagtcatgtaccgcatagggatatttcggtcaacaatggaccacatacatgacggtggtcccataaaatcatgatggagcatatacagaaatctgatgcatggcacttgatatt

SEQ ID NO: 18014 - DNA, 122 bp, Homo sapiens
ccacgaaccacagtgagagcatgcagctcccccgaaacgcacccccagccaccgctgccccgggcccttcacatcccccagtgtgcacagggccccattgagtcagagatcctaaccctggg

SEQ ID NO: 18015 - DNA, 122 bp, Homo sapiens
tgggtatgtgatgttaaagcccatgatgtttccaacagtctttggacctatcaggtgtctcgtcattgggctgattgcagtcatgtgataagatggccccattttgcagttcatttggttga

SEQ ID NO: 18016 - DNA, 122 bp, Homo sapiens
tggcccgcccggtgattggccgcgcttgggggtgggggtggggtgcagagactgaggccccgggtaggctatttctttgtgtactcccggggatttattgggtatattaaaccctgttggga

SEQ ID NO: 18017 - DNA, 122 bp, Homo sapiens
aggagaaggaaaggaacgtgaaggagaccacatgtgtgaggagccagagtgctgggccctcggtcccgtgtcccgggggcttcgctggagcgcgaaggccggatttcaaggggcggccggcc

SEQ ID NO: 18018 - DNA, 122 bp, Homo sapiens
gggagctcggtcgcgcatgctcagcgcaacggcggggaagactccagccgccagggggagcgcgtgccgttcttgcctctctggcctgcgcctcctgagccgagtagatatcccggagttcc

SEQ ID NO: 18019 - DNA, 122 bp, Homo sapiens
ggaaaagctgccagatccaaactctaaaggaaaactattggagctcatttttcctgcccacgttagctagcacattttgttgacattgaaaaaaaaaaaagattttggtgaaactgaaaaaa

SEQ ID NO: 18020 - DNA, 122 bp, Homo sapiens
gtccttcagcaagaggctaacatgactctggaactaaatttcttactgcaaatccatggacggggcttcagaaggcccatgactctaaaatttatgcagaagtttgtataaatgtgcttgta

SEQ ID NO: 18021 - DNA, 122 bp, Homo sapiens
cgaaccactgggctcaagcaatctgccggccttggcctcccaaagtgccgggattaaaggcgtgagccaccgcgcctggcccactaaacttctctgtgcatcagttatttcatttgcctaat

SEQ ID NO: 18022 - DNA, 122 bp, Homo sapiens
gatccccgtaatgatgggattttaggccgcagagaagcagttaagcttcttttttccatccgctttgtccccatcgtaacgtctgctgacctgcagctgacattttgtgcgatatggatgtg

SEQ ID NO: 18023 - DNA, 122 bp, Homo sapiens
ttactgtacgcagttgttctgaggagaaattaggaaaaggtatgcagttacacaatgccacgtacaactctaaattccaattaataaatgtaggacaaacgagggaagtagaaaaatgcaca

SEQ ID NO: 18024 - DNA, 122 bp, Homo sapiens
agaattcctgtcatagctcacagttgttcttcctaaatatagagtttgatacaagccatacgctggctgcctccgaaaggcttgaccgtgcggaaagcaggctcaaatgtcagccgggaggt

SEQ ID NO: 18025 - DNA, 122 bp, Homo sapiens
ctggtgcggaatcggaataacaagctccgtgggggtgcgcaagaagcatcgccgtgtcttcggacccagactatgaactgatctatgacgctgaacttgagtttgagtttgccttggaagcc

SEQ ID NO: 18026 - DNA, 122 bp, Homo sapiens
aggcgaagagagcggctccgtgatcaagtgcgcgccggcagccacgcaggcgggagagcgcgcaaacccggggatttgcagtggcactctcctgtagcgaatgcaagtaaaacaggcggctg

SEQ ID NO: 18027 - DNA, 122 bp, Homo sapiens
atagggtactgcagggggcggggggcggggcttcggcggggcggggctgcagggctcccgcgggctggcggggcggcttcggcgtgcggggcggggcatcggcggggcggggctgcagggct

SEQ ID NO: 18028 - DNA, 122 bp, Homo sapiens
ccactgattaaaggttgttgcataataagttcttgctatgttcagcagttggattcacagcgccagaaacctataactgcttgactttcctccccactacactgcgaaaattgccccttaaa

SEQ ID NO: 18029 - DNA, 122 bp, Homo sapiens
ggggggcggggggcctggccgcccgctgggagctgcggacgagcaggcgcgctgaggacccgagggaggacacggttaaagcattgctatcaactgtgaacccagagagccctccttagcca

SEQ ID NO: 18030 - DNA, 122 bp, Homo sapiens
ggtactcgatctccagcgaggccttcaggggcatgggctggtagaagcactccttctggccggcgggaagggtaaaggtgaagtcgctatcgagggaaggtgtgaagccggccgccccaggc

SEQ ID NO: 18031 - DNA, 122 bp, Homo sapiens
atctgtgggcgacgccagtgcaccccggtgcacccagtttgcctgctggggccactctcccgttacagttgtgttactgtccccggggccccgcctcctgtccagctccagagtcctggatg

SEQ ID NO: 18032 - DNA, 122 bp, Homo sapiens
caatcctgattcagcaaataggtatttgccagtagcaatgagcattgtgtactacaatgacggtgctgcttaactcgatactgttcccacacctcagttagtcgggcccagtgcgtgggtaa

SEQ ID NO: 18033 - DNA, 122 bp, Homo sapiens
gctgctgactctcgatggcaataccaatctcaaattggcactgagatgtaaagctgctgccgcgttcacttttagttctcttattcattatgtttgcccggttttgtgggtgtggtgtcatt

SEQ ID NO: 18034 - DNA, 122 bp, Homo sapiens
acaccaaaacgaaaggggatctgggcttcaaaatactaacagttctatttcctagccagtcgtctcccgggctggatgtgccgccgtcccagatctcagcggcggccgcagagcgcagaggt

SEQ ID NO: 18035 - DNA, 122 bp, Homo sapiens
ttggtctccttctgttctttgcctgtggagagggaagaacaaagggaccagttcgttggtcggcagaattactggagtggctcacaggccccaccttgtgcctggggtccctgccacagggg

SEQ ID NO: 18036 - DNA, 122 bp, Homo sapiens
tgatgggtagcagttttgccatttccaaactgctttctggtccggtccgttctatggctccgtcttcacaaaagcccagagagggaggctgactacaagcggaaaccaagccagaaacctgg

SEQ ID NO: 18037 - DNA, 122 bp, Homo sapiens
tacaccttcgccaagaaggagcagttcgaccgccacatgaacaagcacctcaggggggggcggcagcccttcgcgttccgcggcgtgcggaggccgggagcgccgggacagaaggcccgggc

SEQ ID NO: 18038 - DNA, 122 bp, Homo sapiens
ccttggtgaggacagtgctttgcagatgtgcaggtgtttctgccacctcaatcagttgggcggtttcttttttttcttttacaaggtgaggggattcaaagcaaaccctttgcttaactcag

SEQ ID NO: 18039 - DNA, 122 bp, Homo sapiens
acacacggacgacacaattataggagctgagggttcgagtcgtaatcctgttagaggccacgcatcccctacccatccctgaactctgtgttgatagcgcttcctccactggggaacaactc

SEQ ID NO: 18040 - DNA, 122 bp, Homo sapiens
tccctcgaatccacctctctctgggaggctgccctgcaagtgatgtggacttggggaagccgttgtcctttcctggcccctgctgtcctttggctctctgtgggttggctgtatttgtcaca

SEQ ID NO: 18041 - DNA, 122 bp, Homo sapiens
acacagtcctccagcctgacctggaaccacaggtgttgtggggccagccaggccactgaacgccctgcccgccccaagggcacagccccccacctctccaagcccttcaaagcaaactgcca

SEQ ID NO: 18042 - DNA, 122 bp, Homo sapiens
agtaggccctggagagaaagccggggcatgacccagccctgggcaccacgcccccgcacccgcacctgggagggcagggagacgcctttgtcctgcctggcaccctctgatgtgttttttat

SEQ ID NO: 18043 - DNA, 122 bp, Homo sapiens
ctggacccgccccctaaatccaggagaccatcaactatggaaaggagatctagggaacaccgtcttgaacccgccaggggttttgagtctcggacccaggagatccaaccctgaccaccctc

SEQ ID NO: 18044 - DNA, 122 bp, Homo sapiens
gcacaaactgtgatgttctcccaggtctgcctggagcaccttgctagccctagctgagcacggtgagccagctggggaggggcagggcaagctgcttacccgcatgttggggtcactcagcg

SEQ ID NO: 18045 - DNA, 122 bp, Homo sapiens
gggcggacggggcgcggtgggggcggggcgggtgcaggctccgcccccttcgccacagcgcgaccaggccagcgatgagggactggcatccggaggcttcaccctccgctccacagggtcgg

SEQ ID NO: 18046 - DNA, 122 bp, Homo sapiens
aggaggggcaatagctaaacaaatacctgcattagtcaaggagcactcagaaacagggctcgacctgctgggagaggattttgctaaggaaagcctgtactcacagaagaaggaagcaaaac

SEQ ID NO: 18047 - DNA, 122 bp, Homo sapiens
ctgaagacatactaaaaatatgaagcagggtaataaataccttacaattatctggcaagccgtttaaaagagcagggatgatgggaaaaggagaacgaaaaatcggtttactgtaaggtatg

SEQ ID NO: 18048 - DNA, 122 bp, Homo sapiens
ctcggagtcgggacttgcaagtgatgggtcttggacttccatccagcaagaagtattgagcgctgctccatgcaggcactccactgggcactggggacagcatgggaatgagaaagacaaac

SEQ ID NO: 18049 - DNA, 122 bp, Homo sapiens
agttcagcaatcagaaggctggagccttaagcaagagtcaatcaatctatcccattctgccgtactgggctcaccttgggatccagctggacttccagacaattggaaagaagatgacaaca

SEQ ID NO: 18050 - DNA, 122 bp, Homo sapiens
tatctcgttggggactaaggcgtcggttggcgcgcaacgggttctaggctgcaggcagctcgaggacccgcggccccgccccggctcggcctggcaggtagcctgggatgggtagaagggca

SEQ ID NO: 18051 - DNA, 122 bp, Homo sapiens
gagtggccaaccccatgccgttcccaattctcccttttacagctctcacccctccagtgccgacggtagcgaaagactttcctccaggggcttcctcactggggaattgccggaaagagcaa

SEQ ID NO: 18052 - DNA, 122 bp, Homo sapiens
gcacctggcagccatcgccacagagctggcacaggcccacatctgccaggcatctgaaaacgtaagagcacttgggagatgcgggagtggagaggaggagcctcccctgcccggccgtcagc

SEQ ID NO: 18053 - DNA, 122 bp, Homo sapiens
tgggagaggggctcagggggctggaatccctattcctgcgtgggactccgggccactgggcggcgtcctggggtctggggaagggcctccccctgcgccgagagcgtgcccgggcgggcgcg

SEQ ID NO: 18054 - DNA, 122 bp, Homo sapiens
gctgaccctggaacctgtgaatgaggccttatttggaaaaaggtttttacagaggtaactcgttaaggatctcaagatgagagcatcctggatcacccaatgactggtccttataagagact

SEQ ID NO: 18055 - DNA, 122 bp, Homo sapiens
catggtgcctgccaccttaggctgagtcatctctttaggctcccccatcaccactgcctccgtgagatcagccttagtgcctggttgctttgaagaattcagccccagctcctcactcttat

SEQ ID NO: 18056 - DNA, 122 bp, Homo sapiens
gcccaaaggcttccttccgccctttcgacctattaacaggagtggggaaggacaaagaaccgtgaatcggaaagaacgattcccagcaatcttcagtgatcgaaaataaataaagaaaaaca

SEQ ID NO: 18057 - DNA, 122 bp, Homo sapiens
ctaagcccaagcatcctcttctgcaaaaacagtgaccaccaagcctccctttcaggctgacgacaagactggcagaaccaaacaagtgcctggcaggtggctggcccacaggagacacgcag

SEQ ID NO: 18058 - DNA, 122 bp, Homo sapiens
tccagacccccagcccagggcacatcccccagccctcaacctgagaacaaatccccatgccggggcagagcccgagtccagaccccatgacaccccagccccagtcccaaccctggcctgct

SEQ ID NO: 18059 - DNA, 122 bp, Homo sapiens
tccgtctctcccaacctcgctaccggctctggtccgccagctacgctcggccagggcgggcgtcagggctcgggcagctttcgctttcgcttccccagccaaggccttcattctgggctggg

SEQ ID NO: 18060 - DNA, 122 bp, Homo sapiens
tacatcatcaaacccacacacccgactacagtcccatggcctcctcggactcccgggactcgctgccgcctctgctccatctctaaactggggctctgacccacaacggcgcacgcgcccgc

SEQ ID NO: 18061 - DNA, 122 bp, Homo sapiens
cccgccagcggggccgagagcccggcgactcttgcgtgaccgagcgggctccgctgcctacggcagcccacccccagcccctgctctgaggcaccgagaaacgaggaggcccgtggcgagtc

SEQ ID NO: 18062 - DNA, 122 bp, Homo sapiens
cagcaggtaaaggcctttctctcagacgccttcagcagtgtggctgtgttttcccgaggtcgcttgttctaacggaagagttgccggacgcacacttgtcagtttgcccaggcaggctctgc

SEQ ID NO: 18063 - DNA, 122 bp, Homo sapiens
tgccttttttttttttttttttttgagacggagtctcaccctgtcccccaggctggagtgcgatggcacaatctcggctcactgtggcctctgccttccaggttcaaacgattctcctgcct

SEQ ID NO: 18064 - DNA, 122 bp, Homo sapiens
aaattggaactcagtaagaggctgaattacatatggtaaaattacaactatataaggtggcgacaatgatcgctctaggcaagcaatgttggctggctgactgagaagttttcttgagctaa

SEQ ID NO: 18065 - DNA, 122 bp, Homo sapiens
gcccaggcagccacaggcgggggagtgcggaggtcacacagatactaacttgtaatctgccgtccacattgctggctgtggaaggtgcagagacccctccatctgccctattcttcccgctg

SEQ ID NO: 18066 - DNA, 122 bp, Homo sapiens
tgagtcccagtggaaaggagcacacaggcttgcagggagcccagccacagtgcaggcagtcggggccctgcagcccggtggggaccagcagcggaggagacctccggggagcatcgcccctg

SEQ ID NO: 18067 - DNA, 122 bp, Homo sapiens
ggccgcctcctcgcccgcccgcccgcagccgaggagccgaggccgccgcggccgtggcggcggagccctcagccatggcctcgggcgacaccctctacatcgccacggacggctcggagatg

SEQ ID NO: 18068 - DNA, 122 bp, Homo sapiens
ggtgtgttattttccttgcttacaggtttgtgaaatggctgctgacatttctgaatccagcggggctgactgcaaaggagacccaaggaacagtgccaagttagatgccgattacccacttc

SEQ ID NO: 18069 - DNA, 122 bp, Homo sapiens
ggtagaggaacggggacaggccggggcaagcccacctctgcgaaggaagggcttctggcgcgttggggaagcctcatgcatagattgggtgagtaaggctggcccagttctcctcccggcaa

SEQ ID NO: 18070 - DNA, 122 bp, Homo sapiens
tccacctgctcaaaaaccatggccagtagtaaacttccaaaaatatctggattgtttatacgctgtgctggaactctacctgagaattaacctaattatcaaaatgagacagttcctataac

SEQ ID NO: 18071 - DNA, 122 bp, Homo sapiens
ctaaggatgtccacaaatgtttctacaggctacagtcctccgctctaccagctgagctatcgaagggcgcacgtttctggggttgggtcattgatctttcagcaaatgcaagactccttgca

SEQ ID NO: 18072 - DNA, 122 bp, Homo sapiens
gcgctttgcctgtcccgagtgcggcaagcgcttcatgcgcagcgaccacctcgcgaagcacgtcaagactcaccagaataagaagctcaaagtcgctgaggccggggttaagcgggaggacg

SEQ ID NO: 18073 - DNA, 122 bp, Homo sapiens
gggctcacaagctgcctggggaagaggcccgattgtcgccgcgcacatgcacccttccctcggccgcagctcccacctctgaggagctcagaccctgtggaacccagactagtgggtcgagg

SEQ ID NO: 18074 - DNA, 122 bp, Homo sapiens
atctgagaccccaagccccctgcgccacaggcttctagagccttctgcccagcagggccacggggctctccaagctgacagccatttttctggctgctgtcagcagcctcggcggcagaggc

SEQ ID NO: 18075 - DNA, 122 bp, Homo sapiens
cgcatgctaagctgaaatccctttaacttttagggttacccccttgggcatttgcaacgacgcccctgtgcgccggaatgaaacttgcacaggggttgtgtgcccggtcctccccgtccttg

SEQ ID NO: 18076 - DNA, 122 bp, Homo sapiens
caagggggcggggggaggcggggcggaggaggagccgcgggcgcggcgccgcgctgtccccggccgccgcccgccccactccgcaccgcatgtaaacagtcccagccggcccagcccggccc

SEQ ID NO: 18077 - DNA, 122 bp, Homo sapiens
ctttgcccgcccagccacatgcttgaaatcgacacgatttcagccggtggatttccactgcgacctgccttgtttatttagataggaaagatgaaagatactgagatagaaagatggatacg

SEQ ID NO: 18078 - DNA, 122 bp, Homo sapiens
tgtggggaaaaaataccagcaaggttccccattgtgtaaataaaaggctgaggccgggtacggtggctcacgcctgtaatcccagcactttgggaggccgaggtgggcggatcacgaggtca

SEQ ID NO: 18079 - DNA, 122 bp, Homo sapiens
atgaccagaacaatcttcctaccatgtgtgatattcatgggagactggcaagcagatgctcggcttcatcgatacgtctctggtgagaccgtcagcatgggttctcccccgagcctgaccaa

SEQ ID NO: 18080 - DNA, 122 bp, Homo sapiens
gtgaatcagtcggtggcctcagacttcattctggtgggcctcttcagtcactcaggatcacgccagctcctcttctccctggtggctgtcatgtttgtcataggccttctgggcaacaccgt

SEQ ID NO: 18081 - DNA, 122 bp, Homo sapiens
tggcctgggagaaagtccattccgatggttggcgacacggggggcttagaattgtattttcggtttacatctaaaagaagaacaaaggtctaggcttccagaatcatgggttctggtgaccg

SEQ ID NO: 18082 - DNA, 122 bp, Homo sapiens
gaggttttgtgttaaataaggcgatgtacctacaaaagcacactgcacatcttaaaatgccgtacaaaccgtagatgtttattaataaaccggagtccgtgtcttccctcccctcaggcacg

SEQ ID NO: 18083 - DNA, 122 bp, Homo sapiens
gtagggtaaaggagggatgggtggtaaaagggacttttaactgtgtgcagctttatagttcgaattgtttaattgagaaaatgtttgtgtattacttctgtcattaagggagagggggaaaa

SEQ ID NO: 18084 - DNA, 122 bp, Homo sapiens
gcattcttggggctcgctcatccgggggtggaccaagggtgggcctcttttcagggatgccggtgctgtgacctcccccagggcccatctccactggggcagctagaaggggagaagccggc

SEQ ID NO: 18085 - DNA, 122 bp, Homo sapiens
gtagcataatccattttaggaggagaggaggaggaaggttactgaagcccagaaaggtgacgttacttgttacacggacacacagccgttcaatggaagaacccatactcaacaggaatggc

SEQ ID NO: 18086 - DNA, 122 bp, Homo sapiens
gatattaactttaatgctaacgttaaattgcctccttctgtgctgagtcttcagagcactcgggctgctgaggggagagagcattgcgccctcatggctgcacatcccatgcattctataag

SEQ ID NO: 18087 - DNA, 122 bp, Homo sapiens
ctggattctagtatcacccttaaactaccaggggacaaaagtggagtccataataatgaacgttctctccccaaaccctcttcagctgggtagttcaatagcaattggtccacagaagagta

SEQ ID NO: 18088 - DNA, 122 bp, Homo sapiens
atctcaaaacaacagcaaaatggattctatatcagtgatgtcttagtcaatacaatgaaacggcgtctgaggtaattcacgtgaaggtaaacgcaaaccagtggggctggggggagggaggt

SEQ ID NO: 18089 - DNA, 122 bp, Homo sapiens
tatcctccaaccttactttgtcttccttccctgatctgatcccactgaccagcaccttatcgacgaggttgcttaaagtaaatcaccatcccgttgagagaggaagtgaatcaaagttagag

SEQ ID NO: 18090 - DNA, 122 bp, Homo sapiens
cgccacctggcgcacctcggcccggaggcgtcagaccccgctggggaagctgcgggggcgcgccctggagcccagagcgacaggggcattacccaccttcccgggacggagatgcccaggac

SEQ ID NO: 18091 - DNA, 122 bp, Homo sapiens
aggggaagaagatgagagacctgcaaatccagcgccacagaagccaggtgaccagggacccgcgggctcgggttgccgtttcccgccccaccccgcggccggcctggcttcactggcgccct

SEQ ID NO: 18092 - DNA, 122 bp, Homo sapiens
ataccttgaataccttctacctagacatttaacctcttcatttctagccatagttacaatcgcagtagattagccagggaggccaaagttttagaataaggatggccatttacagatgagta

SEQ ID NO: 18093 - DNA, 122 bp, Homo sapiens
cccagtgtgcgctgcgcccgacgcccccaagctgcagctcaggacgccgcgccacgcccccgccgcctccgaacagccccgccccgcgcgcttcccagcacgcacacctaccgcccccgcat

SEQ ID NO: 18094 - DNA, 122 bp, Homo sapiens
ggcccgtctccccacccccgcttgtcttcatggccttcttcccgatctgcttgatgaggtcgttgtaggtctcttccttcttggaaagaaagctgaagatgttgacgtccttggaggctgtg

SEQ ID NO: 18095 - DNA, 122 bp, Homo sapiens
cacttctcagttgtatgccccaacccaacctgtctggctctgtcctccttaacagaaggacggccctggccacgggccacagccagcaacgcttaagcaccagggccggcgagtgccctgcc

SEQ ID NO: 18096 - DNA, 122 bp, Homo sapiens
gagtagttggggttgctgcttgcagccagaggcatgggagtgggagtggaagtggaatgccgggtgcttttgtctgcctctggggatgggcaggaagccgtgccatccttccatagggtacc

SEQ ID NO: 18097 - DNA, 122 bp, Homo sapiens
atcacccctaacacacaatccggaatgaggggcccagtccctaaagacagaactagggtgcgtagctctaagaggtgccccgtgacttagggcctggggactccccaacagtctcctggaca

SEQ ID NO: 18098 - DNA, 122 bp, Homo sapiens
aggacggcgggcgcggcgagccaatgggcggcgagcgtgaaggggcggtgcgtggcggtgcgtggcggcgcgaggccccggatgtggctgcggcggcccctcctcccccgcgctcctctcag

SEQ ID NO: 18099 - DNA, 122 bp, Homo sapiens
gatttaagggtaaaacgaggaccttgctttaaatcagagttgcctcagacttttactctccgatgcataatacttttctgagttgtagacagtaattgaccctctacagattcaacttcact

SEQ ID NO: 18100 - DNA, 122 bp, Homo sapiens
ccttcgtacctgcctgagcattgacgtacagggtagtgataagcataggccctgggcttgcgtctctcttccaccgttaactgctgtgtgaccctggtgactaagctgccttctctggacca

SEQ ID NO: 18101 - DNA, 122 bp, Homo sapiens
ggaggactgagtcaactcctgatgagatggtgtggaaccatatggaaaagtggcagctgccgcaggacctcaacgtgggagaggctactgttgcccctgggtgagctcaggaaagaggggca

SEQ ID NO: 18102 - DNA, 122 bp, Homo sapiens
tttaaatatagttctctggaacacacaagttgattcacagtgctcctgctgctgcactgccgccgcctgacagcctgtcttatccgccaaattgctcattaggtttggcaattttcacctgc

SEQ ID NO: 18103 - DNA, 122 bp, Homo sapiens
tggggcgggatgcccacaggaaggtgaggctcagcccctccccacactcccctgcctgcccgagacaaagtcgaagctccaagccatgcagggaagcagagacctgctcgcccactcacagg

SEQ ID NO: 18104 - DNA, 122 bp, Homo sapiens
ctttttattgtgaatataatacacctccaggaaattacataaaacttgaatgttcagggccgggcgtggtggctcacgcctgtaatcccagcactttgggaggccgaggcaggcggatcacg

SEQ ID NO: 18105 - DNA, 122 bp, Homo sapiens
ggccccgccgccgcctgggccctccccccgcattagctcttaagctgtgcaaatagacatcggagggagccctgtttaaagtatttagacgaaatgaaaaaaggctttcatcggcactaatg

SEQ ID NO: 18106 - DNA, 122 bp, Homo sapiens
ttccagtggagtgagtgaccttaaggggaaaaatctaatttccggaacagctctgtgaggcgtttgttctcaccactctcgttcgccttaatctgagtggttgtgggtgagcggcggccggg

SEQ ID NO: 18107 - DNA, 122 bp, Homo sapiens
aggaagagcggcggcgtggagctggctctaccagcacctcacttgtggctgccgtgccagcgcctcccgcgggtggaagtggctctcctgcgccttgcggaaggcgtagcagctctggccgt

SEQ ID NO: 18108 - DNA, 122 bp, Homo sapiens
aggaaaaaaaatgaggacagtggcgattcggactgcggacgtctgactccttcacacagccgggcccggtgtgaggggacgtccggggtgagagggggagggaagctgcagcaggcactgaa

SEQ ID NO: 18109 - DNA, 122 bp, Homo sapiens
agccgctcagaccccacactgggccaaggcgcgaatgtcctgaacactttcactgccgttcgtgtcattgtcacctgcaggcagagacagactcttgagggaaaacacagagttcagtaacg

SEQ ID NO: 18110 - DNA, 122 bp, Homo sapiens
aattcactttcccaaggccagggattaagagccgcacggtcagctccagatagcgctcgccgccgtgcgccccgccccgccgtgcgccccgccccgccgtgcgccccgccccgccgtgcgcc

SEQ ID NO: 18111 - DNA, 122 bp, Homo sapiens
tgggccaggggtttagagccagaggtaagaatgatcctagacctcaggcagtggggcccacgtgggagttggacacaaagatttagagccacaggtgagagtcttagacctcaggcagagag

SEQ ID NO: 18112 - DNA, 122 bp, Homo sapiens
gggctgcggtgcctccgggggccttttggggcgccttttaccccagagctcagaaagctccgggcagcggggtggtggcgggatggccagtagccagggcccacctggcggcccgccgggat

SEQ ID NO: 18113 - DNA, 122 bp, Homo sapiens
ctcggcctgggggtgccgccgccgccgcccgcacggccgcccgctctccgctcgctcgcgcgcccgcccggctccgcctgcgccgccctctgcgcctccagcaccgctgccgccgccgccgc

SEQ ID NO: 18114 - DNA, 122 bp, Homo sapiens
aaggtccgctgacctctgactcaaagcaacaatcatttatttcacttgtgattctgcaggcggggatcagctgggcagctctcctggccaggcggggctcagctgggtgcctcttctggcca

SEQ ID NO: 18115 - DNA, 122 bp, Homo sapiens
tcccggccagaacttactatctgacctatatccttagcgaagtgtagaacagaggctggccgcggtggctcacacctgtaatcccagcattttgggaggccgaggcgggtggatcacaaggt

SEQ ID NO: 18116 - DNA, 122 bp, Homo sapiens
atagcggagctgttccctgctccccgcccactgcgccccaccttcctgaaggtcgaggcacgctttcccaacatgctctgcagagaaatcaaagatggcggttgtatctgctgttcgctggc

SEQ ID NO: 18117 - DNA, 122 bp, Homo sapiens
agcacaccttctcctgtgcagatggggctcccaagtgcccactacagggggctagcagggcggacgtgggtgatgcgttggagactgccctggagcagctcaatcggcgctatcagccccgc

SEQ ID NO: 18118 - DNA, 122 bp, Homo sapiens
cagcggggaggccgctcagggttgctgtgtccacataagaccgacagtgtcctcactgggcggtgatggaatgaggagcattcgccccacggtggatagccccagactctgcccccagagct

SEQ ID NO: 18119 - DNA, 122 bp, Homo sapiens
atagaagacagcctccctttccaaagagccaaaaggaacccatttcgtctagttaagagacgaggcaaagcggtaaaatggtgacaacacgtcctggtgagtggttctgaccgtgaatggtt

SEQ ID NO: 18120 - DNA, 122 bp, Homo sapiens
cattctctgaccagagaggtcctgcagccccgtcgaagcctgcacacaattcctggtgagcgctttcctgaccacctgacctggaagggcctcacccagtcttgatcgtcacatttcccaga

SEQ ID NO: 18121 - DNA, 122 bp, Homo sapiens
cctttgagcgccgcgttcccatttcttcaaagcgcttcaaatacaatcgaaacagctgggcggacaccactcccttccgggccacccctcatcaccggttcgagtccccggagaggatatct

SEQ ID NO: 18122 - DNA, 122 bp, Homo sapiens
cttgcagttgccccccagcggtcccggaaaaagcgctgtccctataccaagtaccagatccgcgaactggaacgcgagtttttctttaacgtgtacataaacaaagagaaaagacttcaact

SEQ ID NO: 18123 - DNA, 122 bp, Homo sapiens
actgtgtctgtactggtatagtgcctgggccttcaaaggtactcccggtgcccaagcaagcgctgactttgtctgttcctcacttgctatgggagttgagacaagtgcttgcccagttccca

SEQ ID NO: 18124 - DNA, 122 bp, Homo sapiens
tccttgtcatcgtcacctcctgtccttagcatcctctgacgaaggttccatttctgtctccggcacacgctgtaaccacagggaactgctttggaaacaacattgaaaacgtcccctgcaaa

SEQ ID NO: 18125 - DNA, 122 bp, Homo sapiens
gcctgatgatctgagtggaacagttccatctcaaaaccatttccctgcaccctccattcacgtaaaaattgtcttccacaaaacgagtctcaggtgccaaaaagattggggaccaaagttct

SEQ ID NO: 18126 - DNA, 122 bp, Homo sapiens
agctgctgtgctcgatttctcaccgggccttagctgcctctccacgagcagggtttgggacgggcagctagccatgcctggccgcccgccgcccgccgcccgccgcccgccgcccgccgccc

SEQ ID NO: 18127 - DNA, 122 bp, Homo sapiens
ggaagtggctaaatctttatcccatttacaaatgaatacactttcccttgatcacacagccggagagagtagcgaagctggaattcaaatgcagccctttgtctttccatattgcaatcctg

SEQ ID NO: 18128 - DNA, 122 bp, Homo sapiens
tcactcgggcccgaggggcctcgtggggagcggccatgttggcttcgtcactgaggactccgggcgggtcgggtgttgagcgaggcctcggaccttcggcctgtcgggggcgccctgccggg

SEQ ID NO: 18129 - DNA, 122 bp, Homo sapiens
ttaactctgccttctttttgcatttcttcagtagctccccttgcagaagaagccaaagtccggcttgaaagggaggaataagttttttttcctcagcggatagagttggattctcataagct

SEQ ID NO: 18130 - DNA, 122 bp, Homo sapiens
gtatggtggctgtgtatgctcgaggtgccagcaaagcaatcagagtctgtgttccgtgttcgttccctagcccaagggcagcaagggcagtaccactgcagtgacagcggcaaagtggctgt

SEQ ID NO: 18131 - DNA, 122 bp, Homo sapiens
gggacggagaggtcaatctgcaccacgggaatgtgctccacgcccggggtgtcctggtaccgctgcaaaggcaacacccaggcgttaccggtgcaccgaggggtgacacacgtgcaagacaa

SEQ ID NO: 18132 - DNA, 122 bp, Homo sapiens
tctggcaaatctggcttaccctacagatttcattctgttcctgtaaagccccagcccacccggaagcccccactttggcgctcctgggcttggatcccgctgtgaggccgggggcaggtgat

SEQ ID NO: 18133 - DNA, 122 bp, Homo sapiens
cccggcccggcgtgctgccccgaggacccggcggagagagttgcaggatgggcctacggccgggtaccgcccgggacttcttccccatcgcgagcccaagcgcgagcagagagcgtcgggcg

SEQ ID NO: 18134 - DNA, 122 bp, Homo sapiens
ggtttcaggttcttcagatatgctaggattgatgttacctcttaaagagctcctagaagtcgttaggtcattctaaatgtatacattgaaatacaatttgggaaatttagctagggatgtaa

SEQ ID NO: 18135 - DNA, 122 bp, Homo sapiens
aagacggaaggcaggtggttggctctagtcatccacgacgggctggcacctctccagctgcggccagtctaaccccagggcctgctgggaaatgtagttcgaatgcaaacaaccaatggacg

SEQ ID NO: 18136 - DNA, 122 bp, Homo sapiens
aataaaatagactcttcccctggctgcctttggacaagccccaagagtggcacctggtaccgtttttgatttttcattttccttgatggagctgtcacatctgggagatcatggatagattg

SEQ ID NO: 18137 - DNA, 122 bp, Homo sapiens
ttttatttagtgaaagaaatggggagtttaccggctttaagactcactcactgtagttgccgctatatttagctgtctgaagaagctgcacgtgcatccaaagaaactgagaaggaaactga

SEQ ID NO: 18138 - DNA, 122 bp, Homo sapiens
gtttccccatgtttctcccacaggtgctttcttccctttgccctacttctccctggcaggcgctctgcccagccacagcctgccccgcctggagggcacaccttgcctcagtgccttctgct

SEQ ID NO: 18139 - DNA, 122 bp, Homo sapiens
gctctgccggacgtggagtctctgaacctgctcggtgcatgcgcacgctcccctgagccccgctgttttccttgcaggaccctgttctcatcactgggtggaggtgcagagaggctcagccg

SEQ ID NO: 18140 - DNA, 122 bp, Homo sapiens
taatattacatggatttgatacatactcaatgtattccctcaaaattgagggtgttaggccgggtttggtggctcacgcctgtaatcccagcaactttgtgaggccgaggcaggccgatggc

SEQ ID NO: 18141 - DNA, 122 bp, Homo sapiens
gtctgtagaaaaacgcgtaaatgcgtgaaagactccgagaaaaaccggttcaccctcttccgccacccactcaggcacagccagcagtccgtgttcccaaacactgctgattcccagcaggc

SEQ ID NO: 18142 - DNA, 122 bp, Homo sapiens
tttggacttaatcctgtgggcatgcaggaccctttgaaagatttgcagtgggaaagtgatcggatctgatttgctaactcattgcaatggctctgtggaagaatatcttggagaggggttca

SEQ ID NO: 18143 - DNA, 122 bp, Homo sapiens
gagtatgcaaaaaattaaaggcagttttagcttccagtttgcttgactttaagttcagcacgttttccttcatattctttacaattttctcttctttctgaatattccttaaacattttttt

SEQ ID NO: 18144 - DNA, 122 bp, Homo sapiens
ttccccaatctgcgcatgcgccaagactccccggctttggaaataacctcactggtttcgcggcaaccgtccaaagtacaggttctcattggctaaagtcctaagtatgggtggagcaaact

SEQ ID NO: 18145 - DNA, 122 bp, Homo sapiens
attttcttgtcctttccagcatagagctctacaaacaaaggcagggttatcacatgtacccgagagctgcctgggaaaagtgggagctatagttatcaaaattggaaactttatgaagtatg

SEQ ID NO: 18146 - DNA, 122 bp, Homo sapiens
cccaagagtcagctttatcccatgtgggttttcccaaacctgcaggcccttgcttaggcccgggcctttgcacctacagttttctctctctctctctctctcttttttttccttccttgctt

SEQ ID NO: 18147 - DNA, 122 bp, Homo sapiens
tggcctcacttgaacctctctctgctgcttggccttgggagcaggatatccaggaagccccgctgggcccggctgctcatcggcccctcaccccatctgctttgggtcacctcacctgagga

SEQ ID NO: 18148 - DNA, 122 bp, Homo sapiens
tgtgaggggggcggttggggcgggggtgcagacacatcacggggcggtttggtatccatccgctgttctctccagcgcggctcttcccgacctcgcgatcctgtcccctgcccgggccccca

SEQ ID NO: 18149 - DNA, 122 bp, Homo sapiens
ctcaccacagatgactgctcccggcccggattgactgaatgctgattcctcgagaaactgcgaaacaggttgaatttccaggaggaatgttctggcttccgttgcacctctctagaaagggc

SEQ ID NO: 18150 - DNA, 122 bp, Homo sapiens
ggagagcctgctggagaatccggtgcgcgccgtgctctacctcaaggagctcacggccatcgtgcagaaccagcagagcctcatccacacccagcgagagcgtatcgacgagctggagcggc

SEQ ID NO: 18151 - DNA, 122 bp, Homo sapiens
actcagttcaaggtttataagaagaggaaatgttttgccctggccgcgtttccttttccacgtattgtctgttagagtgcaagctgaaataatgggttttctagttaatggcatgttccaat

SEQ ID NO: 18152 - DNA, 122 bp, Homo sapiens
tgggaggtcaggaaggggttacccaggaagtgttgctggatggagccctcaaatgtggggcgatgtcggcagatggagcagagtgggaagggaatttcagtctggcaggcaggaggggaggc

SEQ ID NO: 18153 - DNA, 122 bp, Homo sapiens
tggcagttctccgtttgccagctctgcatgcccctctccctccggccctggcatttgggacgcagcaggctgtgctctttggattgttactgattcagcctttgagaacggccggcggtgtt

SEQ ID NO: 18154 - DNA, 122 bp, Homo sapiens
gccgcctctgtttacacacagaggaggtgtcgtctccagtctagacaagggcgctaataacgcccataaaaggcggcctctccagagatgctctggcaactccgctcccgcgcgcctgccgc

SEQ ID NO: 18155 - DNA, 122 bp, Homo sapiens
ctggctggacctgctgggcatccttgtctccctactgggcgagctctggtgtctcgtgggcgtccgcaccctgcttgacctctgccagatacaggtgggcacccccatcccatgtgtccccc

SEQ ID NO: 18156 - DNA, 122 bp, Homo sapiens
catctgaaggcctgactgcctgtgttcaggatattcaagtctgtgccaggtgggacactacgtaagatctcaggagaaaaggtttactcactccaagagctaccaatgccttttaagattct

SEQ ID NO: 18157 - DNA, 122 bp, Homo sapiens
ggggtctgagaaaatacctgctttttcaggcagaggtcacacacagccacatgacacacacgccaaaccctgacagtgttgcccacgcaaccactcaaatcccgtggcacatacaccacagt

SEQ ID NO: 18158 - DNA, 122 bp, Homo sapiens
ccacaggtccgcctcgccggggcccaagccatctttgaggcccagcagctggcaggagtgcgacgaggcgccaagcctgaggtgcctcggattgtggtgcagcccccggaggagcccagacc

SEQ ID NO: 18159 - DNA, 122 bp, Homo sapiens
gttggaaaacccttaagctatgtggagagccctctggtaaattttaaaaaccctaggtgtcgtggcacagacagaaattggttaccagtaagagtcacacagaccaaaaaaatgaagaccaa

SEQ ID NO: 18160 - DNA, 122 bp, Homo sapiens
cttaccttttggcacacaacacaaaaactccaggtgtgccctgaggcctctgcagggacccggccaggggagtggtggctgaagctcctccgggtctcctttctcagaggagagagtaacgt

SEQ ID NO: 18161 - DNA, 122 bp, Homo sapiens
ggcagatgggtgcggcagcagggcccccgggtgcgccggggcatatctcgactctggttgcgggttctgctgcgcctgtcacccatggccttccgggccctgcagggctgtggggctgtggg

SEQ ID NO: 18162 - DNA, 122 bp, Homo sapiens
tgttgcttctgttctagccagtcaagcttcatttcctcctcagttataatagctgctttccggagctagtaaaccatatcctcctacactctgagcaatctcacggggtagaccgcaggtta

SEQ ID NO: 18163 - DNA, 122 bp, Homo sapiens
gaggttgaaaagaggggtggcaagcttactgatagtgcaaaggcaggagcaggctggagacgctgatccaccagccagagccactggtttcagagaacaggtgcagagttatctcacctctg

SEQ ID NO: 18164 - DNA, 122 bp, Homo sapiens
aagttctgcaccccgccccctctgtctgcgctcccgctcctcccagcccctccctcgcggcggggcgggaccaatcgctccccgagccgctcctgacccacctaccccagctctcgcgccgc

SEQ ID NO: 18165 - DNA, 122 bp, Homo sapiens
tgttcttttgggtaaatcattgtcagtgactgattttttttttatgaaaggataaaaacacgccctctattggggtcaggttttgtgctggtatttctcccacctactgtatcataggagct

SEQ ID NO: 18166 - DNA, 122 bp, Homo sapiens
gtgtctttttggtaatactggtttttgactcttatactgtgaccggtgcacctttttggacgaccaataaggcggaagacgttttcacgtcccagaacagaagagcataaggagccctggca

SEQ ID NO: 18167 - DNA, 122 bp, Homo sapiens
ggtccgggggtggggggcgtggaggcggttcccttggagcgcccaatcagcagtaaggcccggcggtggcgccagtgacgtagaccgcgcttccctccgccccactgcgggccgtcgctcgg

SEQ ID NO: 18168 - DNA, 122 bp, Homo sapiens
gactcgtctggaggagcgaaggacccagggcgccaggcaccaggcagatgcccccagagccgccgcccccggtcctccggcccccggtctgccccgcagcgcctgcccggccgccctgccca

SEQ ID NO: 18169 - DNA, 122 bp, Homo sapiens
caagtctttttatttatttgctgagttaaaatgattccagtaagttccctctaaaaccaccgccagatttttggtgggaagaatgcattggagacaggcattaaacactagtccaggttaat

SEQ ID NO: 18170 - DNA, 122 bp, Homo sapiens
tgtgtccgctatacaccctgcttctggcctgtgctgactggtccagtggtagatgcctgacgcacactgggccaatcagatgatctctcccaggaattccaaattgaagacaagaaaacagg

SEQ ID NO: 18171 - DNA, 122 bp, Homo sapiens
tcaccagccccatggttactgtcctttagtgtgactgtcaggaggtgtttctcagtccttcgttgtaagaatgtagatgccggttgcaccttctgttgtcttggaagagactgcagtgcttg

SEQ ID NO: 18172 - DNA, 122 bp, Homo sapiens
agctgtgacccagtgcacgcaggtccctgcaacattcttccccccacacgcattagcggacgctccacacgcagccacggagacagtagagggaaaaccagtcgcgtttcccatcctaactg

SEQ ID NO: 18173 - DNA, 122 bp, Homo sapiens
cagcacaagcaatgcacactgatcatttcaggagaggttgagggtcctctcctattgatgcggcctgacgggcactggtctgatgacttgctgaaaactagctgcatctccctttgctgaca

SEQ ID NO: 18174 - DNA, 122 bp, Homo sapiens
cccccagcctgggattgagccctggggatgacccggggttggcaagggaagagctgaaatcgccctgtccttggggaccccaccctttgtgccatctgccgtttccctagtgctgggcatcc

SEQ ID NO: 18175 - DNA, 122 bp, Homo sapiens
tgcagctatcaccacaatctaaatttagaatcttttcatcagtccaaaaagaaacttgaacgcattagcagtactttcacccattccttccaaccttatacaaccactatagtaatttcggt

SEQ ID NO: 18176 - DNA, 122 bp, Homo sapiens
gaccaggtgaggaggagcagtcagtcagagaagagccttggcaggaactgaggagggaggcgtggacagcagcatccgtgggaaggaggactccagaggctcctgacttgggtgagggagcc

SEQ ID NO: 18177 - DNA, 122 bp, Homo sapiens
gcgccgggagggggcttggcggcggctctttatggcgaggagggggtggtggcgccgcgccgggagcagtaagtgagctgcaccgccaacaagatctctcacacacagacacacacacgcac

SEQ ID NO: 18178 - DNA, 122 bp, Homo sapiens
gccttggtcaatgttaattgcatttgaacctgacaccaacccttcatttccatatgaggtcggaagagttaaggccctttgccaaggtcttgagactggtgacagggctaagacaagagcct

SEQ ID NO: 18179 - DNA, 122 bp, Homo sapiens
atatcctcctgcctatttggcctcagtcagtttcaatgtttgagggccccatgcttacgccggtaccccccagaatgccctctctcctctgagccatctgttgaaatccaaattagaatctg

SEQ ID NO: 18180 - DNA, 122 bp, Homo sapiens
ggtggctccctctgccatcccgctgggctcctgcttggccactgtccagtcttcagctgccgctgccaagccctgaacctcatccgcactgaggaagggccacagctcctcgcgctgcacgc

SEQ ID NO: 18181 - DNA, 122 bp, Homo sapiens
cccatctgggatgtgaggagtgcctctgcccggccgagaccccgtctgggaggtgaggagcgtctctgcccggccgccccgtgtgagaagtgaggagaccctctgcctggcaaccaccccgt

SEQ ID NO: 18182 - DNA, 122 bp, Homo sapiens
ggggagagagggagttggaatcgccagctgcccctggccaggggatccagaggttttgagcgtgaactgacttttctcagagctctgctctgtaggctgcgcacgcgggccccgcacagctg

SEQ ID NO: 18183 - DNA, 122 bp, Homo sapiens
gcgaagtacctgagctcaaagcagttgagcaatcttaagtgggggtgcccgaaagtggtgcgttctgaccccaaacgtcacactacccgtccctggaggagcgggttgcagcccagctgcgt

SEQ ID NO: 18184 - DNA, 122 bp, Homo sapiens
ctgaagagatcctcctggctcagcctcccaaaatgctggaattattggtatgagccaccacgcctggtgatctggctgtttttcctgcattctgcctgtaattgttttttagggtctttttc

SEQ ID NO: 18185 - DNA, 122 bp, Homo sapiens
cagcatgtgccagggccaagggctggccggaggggcggcactctccacagactccaaccacgccagccccaggcagagacgccacggcttctgtggcacggtcctcccttgttctctctcct

SEQ ID NO: 18186 - DNA, 122 bp, Homo sapiens
gagaataaagcccatgcttttggccagcacagcagccagggaaagcccggggaggaggaccgaaatagagccagggcactaaatagtagacactggctgatggaaaatgagtttgaagatga

SEQ ID NO: 18187 - DNA, 122 bp, Homo sapiens
cagattaaacaacaagttgctaaaacaccaaaaatgtctctgcttgtaagattaaaaaaccggctaaaatggattaaaactaataaggccaactggagttggccagaacaggcttgctgaag

SEQ ID NO: 18188 - DNA, 122 bp, Homo sapiens
ccaagtccaggatgcacatgaggagcgtttgtagcagtcactgaatcacctcatgactagcggggcaggcctctaattcaccgcaggatttccggtaggttggattgtggggttggtgtttg

SEQ ID NO: 18189 - DNA, 122 bp, Homo sapiens
cacttcaagttccctcttctctctgtcctcccagtggctggctgctaaggccaactgagccgaccctcccacagccacagccatgcaggacagccaaggccaagaggaaggacctgactgac

SEQ ID NO: 18190 - DNA, 122 bp, Homo sapiens
cccatccagccgtcggtgtgctcgccagctcggaggccctcggcgggccctggccagacccgttgtgatcttcagcctgtacacagatgtgtcgtaggcctgtgcttgcatctgcacgccca

SEQ ID NO: 18191 - DNA, 122 bp, Homo sapiens
ttattcattcattcaacaaatatgaattaagtgctcattatttgctgggcactgacgtgtcggagacacaaaggtgaaaagccccagttggggccttctaggaccaaagccgtgggctgtgc

SEQ ID NO: 18192 - DNA, 122 bp, Homo sapiens
aaaaaatgaaattactttgttagtcacagtgttgattgccagagttggagaggcacttcccgaaataatacactccattcccaaagaatctgaatctatgctatatggagttgaggcctaaa

SEQ ID NO: 18193 - DNA, 122 bp, Homo sapiens
aaaagtgcgggaagtagtgggaaatgaggcggatgggccggatggggcccgggctcacatcgatggccatgtgctcctgcatgctaacccggggaggctgcccacctgctgccgcagtgccc

SEQ ID NO: 18194 - DNA, 122 bp, Homo sapiens
gcaaccaaaccagggcccctgccggaagcggaagccagcacgcagggcggtggggtgcagcggcggcggtctcggcgtgccaggcccagggcgccccgcgggggcgtgcgcgccacacgcgt

SEQ ID NO: 18195 - DNA, 122 bp, Homo sapiens
aaaagcctacatatactattctctgcatgctatagcaagaaagaaaggaaagtggcttcccggtggttttctgcctattgtacaaccaggaagctgacaataaagtttatttgagcgtcgac

SEQ ID NO: 18196 - DNA, 122 bp, Homo sapiens
ttcagtcccactgtttctcagtcttccctcgttttcttccaccctgactgtggcctgctccgtttcgcagattgctcatccccattcccgcccactgcttttctggaagatgaaggggctgg

SEQ ID NO: 18197 - DNA, 122 bp, Homo sapiens
gtctgagttttctataggtacatcttttggttagtttttctctagtacaccttttcccatcgttttactttttggtgcccttaggttttaaatttcctcttgtaaatagcatagagctgcat

SEQ ID NO: 18198 - DNA, 122 bp, Homo sapiens
gagttctggaaaagactgttgatatcacccgagccgcagggcaagctgggaaaggtagctcggcacagtccggctgctggactacaaatcccagcatactcctggaggagagggcgaggcgg

SEQ ID NO: 18199 - DNA, 122 bp, Homo sapiens
aggaggacaggatgagggaaaaggggaccaggagcattaacacacagcagatgtacatggcgttttcgaagactgaagtgtcagcacaagccaaacgcaccaacacgggggcctcgcagaag

SEQ ID NO: 18200 - DNA, 122 bp, Homo sapiens
acacacacacacacacacacagaggaaaacagctctgtcatccactttttcttcctttcccgtccccagaccctcgattctctctttaaaatgactgctgtgaagataacgtaacacagagt

SEQ ID NO: 18201 - DNA, 122 bp, Homo sapiens
aaagttataaactgccagtgtccaataaaaccagtcaggtctcacatattatgtagttaacggaatccagttttcaaatgactcaaacgacaacgaaaacaggatagaccactctaagatac

SEQ ID NO: 18202 - DNA, 122 bp, Homo sapiens
tgtccctctgggaagccttcctgacctctcctcaccagactgtcagatgccacccacagacggcttcttgagcttacactatgacagtgcaaatcactctaggagggcaactttctaagaga

SEQ ID NO: 18203 - DNA, 122 bp, Homo sapiens
cccgacacgcagccgacgggatccccccctttctccccggccccttctagcagttccccgcgggccacctggctgtcacagcctggactcctccatctgaaggggcctggcagcatttgggg

SEQ ID NO: 18204 - DNA, 122 bp, Homo sapiens
tatccacaaacttttgtcataataaaaacatgattcggagttgttatgtggtctgatccacgaagaagagctaaaattacaatgctgagctaaaagttgaagtgaaatgtacccagttagaa

SEQ ID NO: 18205 - DNA, 122 bp, Homo sapiens
gagtgggcctcattccagagttgtggtggccgctccacctggcgagcttcgaggggactccggcaggcgctcgctgtggggtcctcccaccagtcttctcagcacaggaacggtgccttcac

SEQ ID NO: 18206 - DNA, 122 bp, Homo sapiens
aggctgaggcaggataattgtttgaacctgggaggcagaggttgcagtgagctgagacagcgccactgcactccagcttcggtgacagattgaaactcggtctcaaaaaaaaaaaaaaaaag

SEQ ID NO: 18207 - DNA, 122 bp, Homo sapiens
ttaaaacgttcagtgagcattacagaaatagacacgtgtgtccaacgtgggatgtgatggcgttgccttgtgggtcagtagagaagagcggccagttcagagaaggggtccggaggggcagg

SEQ ID NO: 18208 - DNA, 122 bp, Homo sapiens
aggccgagagggagagggagtctgcagctccacctccagcctgtgcaaactgccaggagtcggctctgcataaggcacagtgccatttggtcatcactcaagaaccagtgtgagcttttaaa

SEQ ID NO: 18209 - DNA, 122 bp, Homo sapiens
aagcgtggcagtaaggagatttctgggttcagctgcagggactaattcagtgctaggactcggatgcagaaggaaatgaaggtgctgaagaacactttctgaatccaattctcaagtgaatt

SEQ ID NO: 18210 - DNA, 122 bp, Homo sapiens
ttttgagtctcacgccaaaggagggactgtgtgtaagtgaaaagctgtactggaaccttgcgcctggccagcacccttgcaagcacatgccacgggaagccaggctgctaacgcctcacttc

SEQ ID NO: 18211 - DNA, 122 bp, Homo sapiens
gcccctcccccgccagtcctgctgggagcagacacaagggtgattctgcgggccccattacggcagctcattcccaccaacctcaagagccccttcctgcctcttccaaattagctttcacc

SEQ ID NO: 18212 - DNA, 122 bp, Homo sapiens
cattccattaacgctgggtgaacaccgctcacaaaaggcaataaccaagtctgcagctggcgggagacatttgagatggcacaccaccaagtcatgctctccaggagacaccagacagacag

SEQ ID NO: 18213 - DNA, 122 bp, Homo sapiens
tccctctcctccctccaccaaattctcaccagggctgggcctgaatgagggcccaggtcccgaggatggtgaccagagaatgcaaagtgtgggggccacaggtgaacagggtgagccccagg

SEQ ID NO: 18214 - DNA, 122 bp, Homo sapiens
tgcccaaggtcacacagcctgttcccagtggcattgcctggagcccaaggctgcttatgccgaagccctgcccctagctcctgccatttccctccctccctccacccacacctgctgtccac

SEQ ID NO: 18215 - DNA, 122 bp, Homo sapiens
tgtttctttgggcttctaggcttaagtgtgggtgggctcttcagcctccaggtgggactgcgttcaccttcaccacaacaacagccttcaagaatgcttgtcaagtgacttctcatcaacaa

SEQ ID NO: 18216 - DNA, 122 bp, Homo sapiens
cctgaaactaaaacaatccaaacgaacaacaacaacaaaaaaaaacagataagttaccaacgagtgacgattcctataagaaaaaggaatcttgagtcaagacactggacttcttaaaagta

SEQ ID NO: 18217 - DNA, 122 bp, Homo sapiens
agtacaagaccgtattatttgagagaaagtctcgaacgctgctggctaaggggaaaagtgcgataacttgtgatgattcagggaatgactagacaggatgggaaaatacccacgtgtctctt

SEQ ID NO: 18218 - DNA, 122 bp, Homo sapiens
acaggcagcctgtctgccgaagccccccatgaccctgcagaccaataggaggccaccctgcgtgcttggggttagaggccactatgatgtcttctttgcggcttggattcctttccggagtg

SEQ ID NO: 18219 - DNA, 122 bp, Homo sapiens
attccccagcctaactcttctagaacttgcagtaaaattctgaatttccagtttcttcctcgtactctcaaactccaacttcccctttccaatttacaacattattatttgttctttattgt

SEQ ID NO: 18220 - DNA, 122 bp, Homo sapiens
tgtgggtgggtgggtggaccagccctgtggcattgagctcttgacaagtgcttaggcagacgggtcctatagctgctactgctaggagtgagtcagccactacattgtgtggtgccttgtct

SEQ ID NO: 18221 - DNA, 122 bp, Homo sapiens
tgcttttgccctagtccttacccctaggatgatgctataaaagccaggtcaattgtcctgcgtgagtagccagacactctgtaggtgggggacaaggaaaaattatttttctctcctatgaa

SEQ ID NO: 18222 - DNA, 122 bp, Homo sapiens
acacagactcacggtgacagcacgggatcacgacccagacacagactcacggtgacagcacgggatcacgacccagacacagactcacggtgacagcacgggatcaccacccagacagactc

SEQ ID NO: 18223 - DNA, 122 bp, Homo sapiens
gatcctggattatggcatgtgccgtgaaggtaggcagagcagacctcgccagttatctctcgctattgaagtttccaaagaaaccagtggtggacagtggaagtcaggaagtttgggcatgt

SEQ ID NO: 18224 - DNA, 122 bp, Homo sapiens
ccacactcctccttgtataaaggccgcgcttgggcccgccctcctcacagccccggagcgcggcctgccggggaggtggatctcgcgctccccacacagtcacactccgcgcactcacacac

SEQ ID NO: 18225 - DNA, 122 bp, Homo sapiens
agctctaggttgggccgctctctgccctaggcctccggggttgcatacataaggacatagcgctcagaatatgtgtttgactatccatgtgacatagccatcgaagctgctatgagaaaata

SEQ ID NO: 18226 - DNA, 122 bp, Homo sapiens
tgctcagacagtagggaatctggagggatgaatgagcaaagcctgtgtcatcctagaggtcgtgtggaggtttgcaagagtaaaggatgcttagaactgtgtctcacagaggtaacgtagga

SEQ ID NO: 18227 - DNA, 122 bp, Homo sapiens
cttgtggacctggccgggagtgagcgacttgaccccggcttagccctcggccccggggagcgggaacgccttcgggaaacacaggccattaacagcagcctgtccacgctggggctggttat

SEQ ID NO: 18228 - DNA, 122 bp, Homo sapiens
gtcccgttttctcgcatcccaggtggaccaggatccagatcaatctgtcgatattgggaacgacgccggaccaggaaacccagcgccaagggccgggttggaggcggggactggcgcagcgg

SEQ ID NO: 18229 - DNA, 122 bp, Homo sapiens
taagacaccactggagctttgcagggcacagcttgcacaagtatgagccagccctgagggcgcaggttggtctgaatccagagaaccctttcctttccacgctaccgctaccggcagataca

SEQ ID NO: 18230 - DNA, 122 bp, Homo sapiens
atggggcggctgctgggcggagggactcctcgcttctcagatggggcggccgggccgagacgctcctcacctcccagacggggtcgcggccgggtagaggcgctcctcacatcccagacggg

SEQ ID NO: 18231 - DNA, 122 bp, Homo sapiens
attcatctatagatccttagcatcaaagatagagcttggaacaaactaagctagtttcctcgagtaaataaatgaatgctagtttcttgaataaacaaagactacacagagagataaaatga

SEQ ID NO: 18232 - DNA, 122 bp, Homo sapiens
ggcgtggaggccggcggcggccagtagcggcgccgtgtgcaggggcagcgccgcctgcgccgcgttcagcacgaagagctcgctccagctcaggcgcagcagcgccacctggtcggccaccg

SEQ ID NO: 18233 - DNA, 122 bp, Homo sapiens
gcgcctcagaagagaggacgcggccgccccaggaagcagcagcaagtcagtacgagggcgcggtgggggcaccagcccaccccgtccccactgccggggcccagacacgcgcggggcggccg

SEQ ID NO: 18234 - DNA, 122 bp, Homo sapiens
gggcccgaatggtgatatgtcgcaaggagagaaggggaagtctccgctggccagggtaggcgacatcatagaggatgagtctggagaagagcaggagctggatttgcagcctcaaattcatg

SEQ ID NO: 18235 - DNA, 122 bp, Homo sapiens
aagggagttgtctaggagctgtgtcctctaaggtgaggggcgtggtctctgggcggggtccgccattttgtctggtgaaagttgggaagggacaagcgagactcccacctctggcctcatcc

SEQ ID NO: 18236 - DNA, 122 bp, Homo sapiens
gagtgggggtggggaattttaatattgtgaataactgccctatttcttaacatttgaaatcgcttgagtatagcttcataagacactttactggctttagaaagtcagcagtatatatttga

SEQ ID NO: 18237 - DNA, 122 bp, Homo sapiens
aggacaggatggcttctaccccagagctccagcctgaccctctgcctgctctccccaccacgcccttgtagcctgtgcttcgccttcaccttggtgtcgacagcccttcaggcacctaaatc

SEQ ID NO: 18238 - DNA, 122 bp, Homo sapiens
ggtaaaatcagaaacctgcgattacacactgctggtggtattttgcctgaaaaagcctctcggtgtgagaattgctaagtgcctctttcctgagaacaagtatgaaccaagagataacccaa

SEQ ID NO: 18239 - DNA, 122 bp, Homo sapiens
gtgctttctggaatcagggatcagggaagcgaagaggaggagggaagaggaggaggggcacgtatggggcatggcatcaccttgggtccctgacgtccaggatagccaggcagaccaggaac

SEQ ID NO: 18240 - DNA, 122 bp, Homo sapiens
ccggccaacgtggctgggcgggagacagacgctgagtcctggtgccagaagctgaaccagcgcaaggagaagctctccaggcgggaacgggagcaccacgcggaggccgcgcagttccagga

SEQ ID NO: 18241 - DNA, 122 bp, Homo sapiens
tggtgtatgaagctggggatcaatgcagatgaggagaatggtgagggtgttgccactcaccgcaataaggaagaccaccatggtcaaggagaaaaggaaaaggtgggtaagggagtcatcga

SEQ ID NO: 18242 - DNA, 122 bp, Homo sapiens
acaaccggcctaatttaacctaaatccagaaataatcccttaaattttgtagctcacaaacgcatcctccctctttccccacaacattccatcagactcagggaacgtcatcacacatcaac

SEQ ID NO: 18243 - DNA, 122 bp, Homo sapiens
aattttaaagtctcaaagtagaaggcacctaatgagccttctcgttcattttgtctgtgacggcctctgctcaaccatttccattgagagaggagtctgtatttcatgttgccatctctagg

SEQ ID NO: 18244 - DNA, 122 bp, Homo sapiens
attagctgttgggaagaaaaatagcattccctccttgggtgaagcagatactgcatctaccgaaagtggggctttcattcttattatttagctccaaggtgggaatatgacaccagatggaa

SEQ ID NO: 18245 - DNA, 122 bp, Homo sapiens
ctaatagcattagatgagaatctaatgctgccactgatgtgacaggaaggggagctcaggcggtaaggctcacttgcccattgctcatctcctgctatctggccgggttcctaacagaccga

SEQ ID NO: 18246 - DNA, 122 bp, Homo sapiens
caaccatagctaagataacatgtgaactgagatggcagccaatgtcttacatttgtccatcgacaagactgtgagtaaagcaaccttttctatccaggagtttattttttaactgatgactc

SEQ ID NO: 18247 - DNA, 122 bp, Homo sapiens
gcttgccgtggagctgcggcccttctgctttggctttggctggaagggagccttagcctgcgggtcatagccctgagggaggggacaggagtgatatctgttacagcctcggagtcagggaa

SEQ ID NO: 18248 - DNA, 122 bp, Homo sapiens
cctgggggcgctgtgggtcgctttgggtcgcgggggcgctctttctcagcattcttgtttcgtactgaggctttcgggacggcggcgggaagatggcggcctccaggaatgggtttgaagcc

SEQ ID NO: 18249 - DNA, 122 bp, Homo sapiens
actttccgggtctaggagcaacgcctggagggggctgtagagacccagccccccgggacccgcaactacaatgggccggagcttctaaggtcgcctttgttctggcaggaggacggggaatg

SEQ ID NO: 18250 - DNA, 122 bp, Homo sapiens
cagaggaaaacaggcaatcctggagctttccttaccacacaccgagaaggatggtgaggacgtaataggagccggcagcgagtctcccggagccggtggtgtggaggaggtgggtgagccag

SEQ ID NO: 18251 - DNA, 122 bp, Homo sapiens
tttgaagcagtttctttggaagctgctgcacaggggttaacaacaagcaacaactcaggtcgcattcttgtcaacggaagggagggccaggtggaaccgccaagggggccatttctggcttt

SEQ ID NO: 18252 - DNA, 122 bp, Homo sapiens
cacacaataggcgccctaagaaagcgtgtttgacttgatcgctggagcatctgccggcaccgcccaggacccgcccaggacccgccccgccccctgcggccccgccccccgcatgctgaatg

SEQ ID NO: 18253 - DNA, 122 bp, Homo sapiens
gcgtgtgtgtgtgtgtgtgtaagagcgtgcacctgcaggcagcaccccttctggtggccacgacttgcccaaggtggccacaagaaagcgttaactggggacgggaagggagttgaggggtg

SEQ ID NO: 18254 - DNA, 122 bp, Homo sapiens
cggctcggggtgggcctgcttgggggacctgggccaggtgcaaagtctgaatccaggtcccgcagggcactcagtggctgacctgcgggcggcagaggatgctgtgtggagcggagccacct

SEQ ID NO: 18255 - DNA, 122 bp, Homo sapiens
tttggttcccaggtgttgcatttgaagtggccgtctgggaggtggccacttgctggctgccgggagtacagctccagggctggggactctgccctcctgtgaaggccatgaggaaccctggg

SEQ ID NO: 18256 - DNA, 122 bp, Homo sapiens
ggcctccgtggcccgtggcccggtcagagcagcaccgcccctgcgcctcgggatccgggccgcacagcttaagccctcccgattgctggccgcgccctgcctgcggcctgtggcctggatcc

SEQ ID NO: 18257 - DNA, 122 bp, Homo sapiens
aaaaaaaaaaagtctccctcctagagtaaaatgaggcgacccagtctgagagtgtgggtacggggacttcccgcagcctctcccaggcagcaagggaagggaagaaaccgagtgtaagcgga

SEQ ID NO: 18258 - DNA, 122 bp, Homo sapiens
actccagcactgggtcagatggaggtcataaggctggtcagtgtgggaatgtgccctgcacgcactcagacaaggccactccttaccctaagtgccactgccaagcaagggagatagccaaa

SEQ ID NO: 18259 - DNA, 122 bp, Homo sapiens
agaaggaaagatgctgtgatgagaaccgactgctgggagtttccagagcgggacaaaatgcggctggggtgggtaggataggcaaacaggcatgggaaaggacattgcaggcgccggtagtt

SEQ ID NO: 18260 - DNA, 122 bp, Homo sapiens
ggggacatttcaaccagtttgatgtttatgaggaacgcttacaagatcgcttcttgtaggcgttctcaaggttctgtcctagggtgtttctctttgttctccagtgattatgtgccacctct

SEQ ID NO: 18261 - DNA, 122 bp, Homo sapiens
cctgccttccctgcctgggaggacgctgcggccgccaccacctggacgggagtggcctgtcgcagctgcaccctgcgtgggctcgtggctgccacgctgtttctttacacctttctcatatc

SEQ ID NO: 18262 - DNA, 122 bp, Homo sapiens
agcaaggaggctcagattaagctgcggttggatgcgggtagcaggagccgaggaagggtccgctgcctgggtctttggaagtgatgtgggcagaattatcaagtcctagggagcggcacagg

SEQ ID NO: 18263 - DNA, 122 bp, Homo sapiens
cttgatcatagagtttctttttctaggctaatgatctaatacctgccatccttgaaggttcggataaaacctttcccttctttatttagccttccattagcccatcccagctggaagtgagg

SEQ ID NO: 18264 - DNA, 122 bp, Homo sapiens
tgccaacctttgtgcagacaggtactctcatacacactcgtgcacatgcatggtcttgtacgcacctggtaaggtgaccttccaggaagctcagggccccctgatatgagctgacactgggt

SEQ ID NO: 18265 - DNA, 122 bp, Homo sapiens
ggcttagtcttttcagtgaggtaaaatgcctcactaaatgcattgtcactctacatcagacgtttcctaacactctggccagctacatggtcttgggcataaaacccaaggcttgacatcaa

SEQ ID NO: 18266 - DNA, 122 bp, Homo sapiens
acagccctgtcacctggcaggaaggtggggccctggcggggctgcagaggcagctgctgccgtttccgcattcctggcaccatggcaacaggaggccactcagacgggtgacctgcacagag

SEQ ID NO: 18267 - DNA, 122 bp, Homo sapiens
acataggaaacgaaaagtccgaatctgtccttacgcccccaaggcgaattctggggcgcgcgggtttattccgacccactaccacatcgcgtttcctgaggtaacccggcctcggctctgcg

SEQ ID NO: 18268 - DNA, 122 bp, Homo sapiens
gggaagatgcgagacgcgaaacctggagcaggaaacacagagcgatgggatccccaaagccgcacggtcgggctgtacggaaacctctcaacgcctcctcagagccctcaacctcccttgga

SEQ ID NO: 18269 - DNA, 122 bp, Homo sapiens
gcaacaccatttgcattttatgtcttaataaagctgcattaatttcttcttttagatgaacgtttaaatagaaagtctcctgttttcttgcttttcatggcctattgtttctattttcttgt

SEQ ID NO: 18270 - DNA, 122 bp, Homo sapiens
gcgggaggcgggggcggggctccggggcggggccggcagcgcggaagatggtgggcggggcgcgggtcgtgggccgggccgccggcgggggcgcgggggacgcgggggcgcgggctcacctg

SEQ ID NO: 18271 - DNA, 122 bp, Homo sapiens
gttgccagcccgggtcagccggacaccaaagcctctgggtgccggagaagctgctgccagcggagtccaaagtcagctccatagaagatggagcccccgactcagtggcgtcctctgcctga

SEQ ID NO: 18272 - DNA, 122 bp, Homo sapiens
cacatggggtaggagaagcctccattgaggaaattacatatatgccctcccccgcaccaccgctgccactgtaaattaagaaaaaagcactgttgtgttggaaggtgtgccttagaggggga

SEQ ID NO: 18273 - DNA, 122 bp, Homo sapiens
ccggctggccagggacgcggccggcaccagcctggggcgcccgcttgggggcggagctcccggggcgcccccaggatatgatagggcgctctgctccactcgcgctcactcattggccggca

SEQ ID NO: 18274 - DNA, 122 bp, Homo sapiens
ttttgcccgtggtgggggacctttgcctcgccatttgttttccttccacagcgggtgcctcgacctcccctttcaagccctcctgccgccttggcctggcccccgtgtgccaaggtgcttca

SEQ ID NO: 18275 - DNA, 122 bp, Homo sapiens
ttttgcccctctttactctcttttatgtaggctctccactcactgcagagacctttccctcgtcagttgcactttctgcctgccagtcagagccgagtggaagcagaggcggcggcagcagc

SEQ ID NO: 18276 - DNA, 122 bp, Homo sapiens
ctgggaagcctcccagcgtgtgtcccaggaggcctgctgcctgcagacactgctcccagacgcagcggcctcggccatcagagcgtgtcccacgatgaggtggcaacttccctgaagggctt

SEQ ID NO: 18277 - DNA, 122 bp, Homo sapiens
ctcgaccctggtataaccataatcggagatgttcgtttatttccggacctagagatgaggcgctggggcgcttgggtgtttggggcgggtccgaggccggaagtgcgtgggctgccgggctg

SEQ ID NO: 18278 - DNA, 122 bp, Homo sapiens
aaattcccagagggcagcgcagacggggcgggctctgagactccgggctccgcctctttccgggaaccgcccactacccaggactccgacagagggtgaaaaaagataacttccggtctcgc

SEQ ID NO: 18279 - DNA, 122 bp, Homo sapiens
attctaaatcggctcaagcagttccccaggtgagagcaattccaggggccggaggtctcacgctgggaaggagccccacctggcctctctcccgggggtcctagtgagtggtctagaggctg

SEQ ID NO: 18280 - DNA, 122 bp, Homo sapiens
cccacagccacatctgctttccagggggtctctggggcaggcggtggctcacctgatagccggaagccttgacagtagggttgttctcgatctcccacagcccctcgctgaaccctttcctc

SEQ ID NO: 18281 - DNA, 122 bp, Homo sapiens
caatcctcatgctagaggcggggctaaaggccagtggcgcaagcagaaggaggagcgcagcggctgcaagcacgtgaccggggcctgaagccggaagctacctatctggtagggagctcccc

SEQ ID NO: 18282 - DNA, 122 bp, Homo sapiens
catctatgtattcattaaaatttccatcactatcccagtcaactcggtggcccctgacaacgactggtctgatttccatcactatggatgcaatttgttgtttctggagtgtcacacaaagg

SEQ ID NO: 18283 - DNA, 122 bp, Homo sapiens
cgacccagagcctgcaggaccgctggcctggataagctctgagagcccagtctcccccgacgcgggcggttgggctgggccggcctcctggcgctgcacctccggcactcgggttcgccttt

SEQ ID NO: 18284 - DNA, 122 bp, Homo sapiens
gagtttaggccttaggggcgcggcccctcgcgccctaccgtgccccaccgtgccatgttccgggctgcctgccttctaaaagttcctgcaggaagcaggtgatgtggcctccccgacccggg

SEQ ID NO: 18285 - DNA, 122 bp, Homo sapiens
catttggaattggtctagagcatatctgaagtggactgattttagaatgactatacttagcgcattgtatgtggaaattaaaataggctattaggctgcacacccatttgaggcaggtcttg

SEQ ID NO: 18286 - DNA, 122 bp, Homo sapiens
cgggactgaatgcttcctcccacagctgcgactcggggggtgactgtgagtgcctctgctcggccattgccacctatgcagatgagtgtgcccggcatgggcaccacgtgcgctggcgtagc

SEQ ID NO: 18287 - DNA, 122 bp, Homo sapiens
tactctcgtcggaacttgggtctccttgttgggaggtagctgtggaggccatgggagctccgagggttgagaccaaggcccttgcaatttccttagatttgtccacacatgctctgacctct

SEQ ID NO: 18288 - DNA, 122 bp, Homo sapiens
gtggcccgtgggagtcagcgcttgggcagctgcctgactgaccgaccacaggtgagaaaacgccccggcgctaagcgtaggccgagttcgcacctccacccacccgtgtggcctctgcatct

SEQ ID NO: 18289 - DNA, 122 bp, Homo sapiens
gggcccaccacccccggaaacccgaaccttcgacacttaggttccgcttcccgtgcctggcgtcccaccaggctaagcgccgatccgagtagccagtcttcatttactccactaaaatgtaa

SEQ ID NO: 18290 - DNA, 122 bp, Homo sapiens
aggcctcacggatgggtggttccattttctctgcgctgtgtagctcctacttacagctgacgattctcgacttcggacggcctccctggagatgtcacacgccgcccatgcacgttcaagac

SEQ ID NO: 18291 - DNA, 122 bp, Homo sapiens
acaggaccccctttagattctccctgcccacgctctccccaagttctgtcttcctctccccgttttgaggacatatggccccttgaagtttttgtttgcttgcagtaggggaaaaacagctt

SEQ ID NO: 18292 - DNA, 122 bp, Homo sapiens
ggcctaggggagccggggctctcggagaagggagttttgtgtggcttgaaaggagctctgcgtgggacagccaggtctgccaggcctcccagcaggggtgcctgcccagcagaaggggcaga

SEQ ID NO: 18293 - DNA, 122 bp, Homo sapiens
tccgaaccgccctcactttttgcatccgcagagcctccaagctcatggcctccttaggagcgaacccaaggaggacaccgcagggaccgagacctggggcggcctcctccggcttccccagc

SEQ ID NO: 18294 - DNA, 122 bp, Homo sapiens
gccgaggagacaggcacttccgggcggagtgtaagacgctggccaatcacagcctggcagcgggacttccgtcgtcgtcctcggaccatcactttggcatttctcgattttgtctgcttctg

SEQ ID NO: 18295 - DNA, 122 bp, Homo sapiens
ccagtgtgtcccagaaagagatctggtcatttagtgtttgtctatcccctccctctggcccgtgaattccacatttctgacaatcttaccttcatatcttccattctgaagatgagtgaaaa

SEQ ID NO: 18296 - DNA, 122 bp, Homo sapiens
gcgcccccagactcacttctgcccaagttgctgcttcctgggctgcgtctgaagatatttcggttttcgctctttgaatctgtctgcctctctcctggctttctgatctccgtccgtgggcc

SEQ ID NO: 18297 - DNA, 122 bp, Homo sapiens
tcctgatgtcgagtcatggccgcctgggtttcttcacagctttccttttggagctcagggcggctgtcgtcttgggctccaagggtgcctttccgccttctcgggtccttccgggtgctgga

SEQ ID NO: 18298 - DNA, 122 bp, Homo sapiens
ggcattctcaaaaacctgagatcaactcctggaaaaacactcttgaccacttaccaccaccggaagctgctagatggcaatcagaatcagcatctcatcagaagaagaggaagaccttacaa

SEQ ID NO: 18299 - DNA, 122 bp, Homo sapiens
accgttgggtcagagggttcctgtggacccctggggcgagcttaatgtccccgaaaactgcgtgctccagtatcacttgaatgcccaccgggttccggaatcacgagtctccagagctgtcc

SEQ ID NO: 18300 - DNA, 122 bp, Homo sapiens
cagtaggaggcctttgcccttgtgtaagtcttgcttcttctcgtcaggagtgcctgactgcgtgcctcgcttcgagcctcccgtcccctctagccagctcaacagcatctccttatattccc

SEQ ID NO: 18301 - DNA, 122 bp, Homo sapiens
gagaacctagtgggaggcaggagtgggctacagagacagacttgggtgaactgcctctggcgaggaggggaaggggaaatgaaggcagggcccagtcttcaggggactatatggttgggtgt

SEQ ID NO: 18302 - DNA, 122 bp, Homo sapiens
ccgccttggagagcatctgcatccgagtgcctagcaagttcttgccgatggctttgttctcgtaccaggtcacatcgccctcgctgcagtggtcccggggccgctggaagaacgccttgcag

SEQ ID NO: 18303 - DNA, 122 bp, Homo sapiens
tgttgatggacgaattttccatttgcttattttgctgagaatgagttgaatgcacatcagcgaaacaggcaaacggagaaaccacccacctctttatgattcccccaactctggggaacaca

SEQ ID NO: 18304 - DNA, 122 bp, Homo sapiens
aagcattttgtaaactgtagtgcaagcatacggcaggggagtgaaccatactttcactagcgacttgaatgaggtgataaagaaaaggctcagaacttcagaaaatgcaagaggggcttgac

SEQ ID NO: 18305 - DNA, 122 bp, Homo sapiens
gtcccacaggaagtccatgatggcggcggcactgcggccggagtcccagcacccccgcggcgatgaagtgctgctccacccccaccaacccgggaccctgggacctccagccccgttctcgg

SEQ ID NO: 18306 - DNA, 122 bp, Homo sapiens
ggctacacctaaaaggcggggcgtggacctaagtcgtcgccaaagaaacggcgttctggacggggacgtagggtcccgcccattccttctcgtgaaagcgggtgactggtcatgattatgat

SEQ ID NO: 18307 - DNA, 122 bp, Homo sapiens
agaaatgtgatataataaacaggctcagaggtcttgctttcatcatggctttggttacttcgagcaaattatagctcttttctcaaactactcccacccctataatttatgccaaagtgttc

SEQ ID NO: 18308 - DNA, 122 bp, Homo sapiens
agtcttccagcctgctctgctcgcgtgcctttctgttgtgagcttttttccacgtggctacgttggggacctccgtgatgcttcctgagtgcttactatgcgccaagcgctgctttcaccat

SEQ ID NO: 18309 - DNA, 122 bp, Homo sapiens
gatgatccacccaccttggcctcccaaagtgctgggattacaggcatgtgccactgtgcccggccaataaatgctgtttctaagccaccagagtatggcattccgtcacaccccaaaggacc

SEQ ID NO: 18310 - DNA, 122 bp, Homo sapiens
tagcacaacacacagaatgtcttggttatttcacaactgccttataaatgctcgagtaaccgtcatgagaaactgactaccaggtgaaagggcagccatactctgaggagacactacagatt

SEQ ID NO: 18311 - DNA, 122 bp, Homo sapiens
cgccaggccccgccccgccttcccgccgcgcagcgacaccgtccaagtccggcccgtgcccgcagaaccctgccagcaagccccgggcctggctagcatgccaggcggttgttgcactggct

SEQ ID NO: 18312 - DNA, 122 bp, Homo sapiens
tgcttccagaacatggtaagagcccctgcagaggctgagctcatctgtggccgggctggccgggcaccacccagcaccaggctcctggaagggtttggaggtccagcctcccaccccatgct

SEQ ID NO: 18313 - DNA, 122 bp, Homo sapiens
cctgggtgactgacacggcggtcttgacagcatagatgtttgcctcctcttggaactttccgatgtttttcttatagcgaatcctcttgttgccaaaccagttggagacctgtggggcagaa

SEQ ID NO: 18314 - DNA, 122 bp, Homo sapiens
cagatatattcaagaagtcaagatctccatcttggtataaatacacttccacagtcagcacggggatcacagacttagaaagttcaactggactttggcctacaatttcccagtttactctt

SEQ ID NO: 18315 - DNA, 122 bp, Homo sapiens
cggtccagacgaggaaacccgatggcctagccagccgctgactgactgttgacggcaagccgctgaccttgaacttcagtgctcagggtttccagtcgtatcaacacactgcgatccacaag

SEQ ID NO: 18316 - DNA, 122 bp, Homo sapiens
gaaggtgataagggttacaatattaacagctgccattgcttattgcctgccaggcatgggcgaggcacgacacctcacaaccacccagtgacattggcattggcctgccttacagatgaaga

SEQ ID NO: 18317 - DNA, 122 bp, Homo sapiens
ctggagggaaaccgaagcaacgctctgagctccgattcactgaagaaaaggaaaggaaaccgacttctgagagcaaataaagcggagccctggaagagaagaaagggcacgagcccttcctc

SEQ ID NO: 18318 - DNA, 122 bp, Homo sapiens
tccagagcagcagcagcgggagcagcagccccagccccatggcaggcagctcggtgggagcgctcgggttcgtctggcccccacagctcccaaccccctccctgcttcctctcagggctttt

SEQ ID NO: 18319 - DNA, 122 bp, Homo sapiens
tggaaaggacacatacacaaagccttctcttattttaatcctcaaagcagtttgtcagatcgccccaggttaatttcaaaattgaacaaattaaaatttcaatgtgataactttgggaagaa

SEQ ID NO: 18320 - DNA, 122 bp, Homo sapiens
ggactcatgccaaattacattctcaggaggactcccagaccaagagactctgggcttgggcgtgagagacttggggctgttctttttctttttttttttttgagaagaagtttcactcttat

SEQ ID NO: 18321 - DNA, 122 bp, Homo sapiens
tagctgggaccataggcacatggcaccaagcctggctaattttttaattgtttgtagaggcgaggttttgccatgttgcccaggctggttattttttccttttataaacgcatttaagcatt

SEQ ID NO: 18322 - DNA, 122 bp, Homo sapiens
actctgtcaccgcggccccagcaaaccgacactaacacctggcaagcaggcatctcaggacgcacctcagtcctcgtgacgactccaacaagcgggtcggccctgtctccagctgaactgag

SEQ ID NO: 18323 - DNA, 122 bp, Homo sapiens
tttagtaagttcattgtttattttttatccaaccatacctccaccccaggtccatgagggcggggacttttgattggtttgctgttgcctgtcaagagctttaaaaatgcgaaataaatatt

SEQ ID NO: 18324 - DNA, 122 bp, Homo sapiens
cacattcttcttccctcccccaccatcccgcagaggccccaacaggtgccgagggagacgcggacctgaggttcccctggctggccctcaagagccaagagagctgtccacgtctgagaggc

SEQ ID NO: 18325 - DNA, 122 bp, Homo sapiens
tttgtctagataacttcaacccagttaagctcaatgaaactgaacacttcgtttagtaaccggcaccaaaaataatctgacaaagaaatttcgaaatagaactattagtgtgttttcacaaa

SEQ ID NO: 18326 - DNA, 122 bp, Homo sapiens
gcgaacaaaggccaagaatcatgctggggttcccggctccccggcggctttgacattgatcggaagtgcgccatctcgtggcggctgcgcgcctaggttgggccggagttccagccccgagc

SEQ ID NO: 18327 - DNA, 122 bp, Homo sapiens
cctaacaaagctggcactggccacccccagggttccggaaactctgagtcagtctggctccgtctcctggcaaccagatgcaggggccatggcactcttaacaccccagggagtgaaagaag

SEQ ID NO: 18328 - DNA, 122 bp, Homo sapiens
accggggagtagggggcggaacaggtaaatggggacgtggatccgggtcccctcccccagcgagcccccggagcgccaggagggtgtccccgctgagtaacaatgaagaccccccacccagc

SEQ ID NO: 18329 - DNA, 122 bp, Homo sapiens
tagctgagtgggtgaaacggcatcaccaacatttggccctgctgctccactgagagccggcgccgttcgcgggataattatcctgtagtcttctcacctccggagagaatgcaaggcgccct

SEQ ID NO: 18330 - DNA, 122 bp, Homo sapiens
gaacgagcagctttgatacttgtttcctcttcctcagcttcagccacctcaagtcggcttcgagttttggctttagaatgtggtagctgtaacattgttggtggggaggagtggcagaagaa

SEQ ID NO: 18331 - DNA, 122 bp, Homo sapiens
acaagagtcacctgtgaaacatacttcaccaaagcacccatggtagcacttattaacaaacggagtttaccagggatggggcagaagaaagtcttagcttttcaaagaatttcattcctgag

SEQ ID NO: 18332 - DNA, 122 bp, Homo sapiens
gaggaagcctcttccaggcgtggagcagccttgggccctgaacaggcaggcctctggaagcgcctcgcttttcctccctccggcctcatcctggttttctcctcatctccccgtcgcagggt

SEQ ID NO: 18333 - DNA, 122 bp, Homo sapiens
cattcggcgaatttctgcgcgtgcgtgcccaggttacttccaggacctcgcagctctaagcggtgaatctctgcaagtgagggcccaggttacttccaggaccttgcagctctaagcggcga

SEQ ID NO: 18334 - DNA, 122 bp, Homo sapiens
cgcgccctcctgtccacaatcccagagcctggggaaaggagcatcgcggccagcccaaggcgtctcgttttgattgcctccaccgagcaacctaggataggggttgatttttgccattgttt

SEQ ID NO: 18335 - DNA, 122 bp, Homo sapiens
cggataacgggggtgacgatggggtagtttttctgaaatcaagcctcctagtaacacatacgggtcaagcagggcgtgaacaaggcagatgaccattgaacaagacactctgatggcttaga

SEQ ID NO: 18336 - DNA, 122 bp, Homo sapiens
ccgctactgccgcaacccgcccggcctgccgcgccgctccgctcctctccgcgcccaccgcgcggcccgcccgcatgttctgactcataggtgggaattgaacaatgagaacacatggacac

SEQ ID NO: 18337 - DNA, 122 bp, Homo sapiens
aaaggtacactgactcttggccaaacaggataatgtttacaaacttggtcccaccatagtcgtgtgctgataaaaagtgtttgcgttctttttttttggagatggagtctcgctctgttgtc

SEQ ID NO: 18338 - DNA, 122 bp, Homo sapiens
cagggggctgggcccaagccagggagggtctgtcggcccctccccaccccggggaccaagcgtgcctttccgagggccagattcacacatcccccggcccggggggtgacttctccgtgccc

SEQ ID NO: 18339 - DNA, 122 bp, Homo sapiens
aatcgataaaatttaaaagtatacagtatttattttcttctttcaggttgattatgtgaccgctctggcaaaagcactttgacaactgtaagatgagagggcatgcgcacacagggaactgt

SEQ ID NO: 18340 - DNA, 122 bp, Homo sapiens
ccaaggtcctgagtagataattatatcaaaagcagaaagggatggacaccggtagctacgcgaggttctggaatgggactcagtcattgattcctgtatgtccgccgctggcatgttatata

SEQ ID NO: 18341 - DNA, 122 bp, Homo sapiens
ggggggatgtggaatttctccaccagaacttcacagtgataatgacaccaaacacaagaacgacaataaccaaaatcaggagttttattctcctaccttctctctctctctctctcctctca

SEQ ID NO: 18342 - DNA, 122 bp, Homo sapiens
aaagcgtccatctaagcatccatttggcttcctatgacaggaaaggcatgggatcagtcccgggctgggactacaggatcagacgatgcccagctcacagatccatacactggagatgtgat

SEQ ID NO: 18343 - DNA, 122 bp, Homo sapiens
atcgtacgtgcacacttactagcacactccttctgcttgtctctgacaatgtgtctctgtcggtctcttggtatctcattgtttatctgtgcctctctgtgcctaagtctactgtttctctt

SEQ ID NO: 18344 - DNA, 122 bp, Homo sapiens
gggttttgaccctactgtccaatcctctagtctaggagtctttctggcagacagcaggctcggggcactcagaggaagaactacagaagttctagctgctgcttgggatggctgaaggaggc

SEQ ID NO: 18345 - DNA, 122 bp, Homo sapiens
gtgaagaaatgtaagttggttttatcactgtattaaatacttgagtgtttaggtggaaggcgcatccataatatgcatgtgaggaccaattctgtatgcatctaatttcatttgcgtaatac

SEQ ID NO: 18346 - DNA, 122 bp, Homo sapiens
ggcagattctatatggcctatcatgtttcttcaccttcccctcgttgctggctgatacagcgaggtggtcagctgatgactacttagtcaatatgacctttagtcgtgaaactgacagcagc

SEQ ID NO: 18347 - DNA, 122 bp, Homo sapiens
gctcctgatgccgccctgtgagggagacaggctggcttgggggagggcacctgggggtgccggcttcgtcctctcgggggctataaaaggggaacagaggctcccgcctcctcggctccact

SEQ ID NO: 18348 - DNA, 122 bp, Homo sapiens
actgcactccagcctgggctacagagtaagactctgtctcaaaaaaaaaagaaaagccatcgtgctgggcacagggcactggccacttggcttccacaacacaaatctcccaggagcagcag

SEQ ID NO: 18349 - DNA, 122 bp, Homo sapiens
cgccctggaggcctggtctgcgctccgggcccccaggctaacaccccacccccagccccccgacaccaagactgtgcccctctgggtcaaggaaaaggaaaaacttttaaacctcttagtca

SEQ ID NO: 18350 - DNA, 122 bp, Homo sapiens
tgctctcagttcctaacagaaagtgtcgggcccccagtgggatttctggggaagaactctcgtgtctcaacgggagccctgtggcgggaggggaggccagggtttggggttgtgttcgttgt

SEQ ID NO: 18351 - DNA, 122 bp, Homo sapiens
ctgcacggcctgcactctccaccctaccatcttccacagtctccttgaattcctccagggcgaggccacgccagcgcacaactgcagggggcgccgttcccacagcagccctgcaaagtgag

SEQ ID NO: 18352 - DNA, 122 bp, Homo sapiens
gcgccgcagcagctccacgtggctatagaagacgtgcagaacctgccaggccagcaccagcgggctcagcgccaggttcagggcggccagcagcagcactgtgcgcccccagcgcgctgcta

SEQ ID NO: 18353 - DNA, 122 bp, Homo sapiens
aatgcagggaccacaggagaaaatgagttttattgcctctgatgggagcctaaaaccccacgaggctcccaaagggcggaattcccaagccaattcctcgcgtctatgatccacctgcaaaa

SEQ ID NO: 18354 - DNA, 122 bp, Homo sapiens
gcctccctgcccccgcaggtggccgtggtggtcatgtgcctcgtgtctatcatcctgtaccgtgccatcatggccatcgtggtgtccaggtcgggcaacacccttctcgcagcctgggtgag

SEQ ID NO: 18355 - DNA, 122 bp, Homo sapiens
catcgtcgggctcagactgctccgccggcggccactgccgctacacataccaacaagaagcgatctgagtggctggcgcccactggggctaaaggttaaaggctgccctgcgctacggggcg

SEQ ID NO: 18356 - DNA, 122 bp, Homo sapiens
cacaggaacgcttctcatcagtggaagaaggacaagaaaggtcgtgcaagtttcaaattacgtggagctggggctacagccattactttcggacaggtgcaattcaaagcgtgatcctccga

SEQ ID NO: 18357 - DNA, 122 bp, Homo sapiens
gcctgcgccgcgcctcactcccgcccgcccagcgacccctcccctccggggaggcgccggcgtgcgtctacgccctgctccgcgtctccccaacagcggcgcgcctctctgcgcctgcgccg

SEQ ID NO: 18358 - DNA, 122 bp, Homo sapiens
gccatatgcccattgcgtgatttgaagcgtgtattcccagcctgactcttggtcaccactcgttctgttatttgcagtcagtaacaaagattcatccttgtgtccatcatgcaacaaggaga

SEQ ID NO: 18359 - DNA, 122 bp, Homo sapiens
aatacgatgagaataatgaggacaatagccaccacgtccggcaaactcaggcgtgagctgcgaggactcggtaccgcccggcagggaaaaagcagggcctggaggccgaggagccccacccg

SEQ ID NO: 18360 - DNA, 122 bp, Homo sapiens
cgcgctcgggggagggggctgcgggtcccgggcggggcggggcggcgtggggcggggcggcgcgggggtggcggggggcgcggcggggcggcaatctcggccccgcggagcgctgccctttt

SEQ ID NO: 18361 - DNA, 122 bp, Homo sapiens
aggggacaaagccagacaaagtcgggctcctgcgctagagctcagcgtgcaaggcaggggcgagcagagcgcacgcagctctcccccgccttcctgccttaagaaggtgcggccacctctgc

SEQ ID NO: 18362 - DNA, 122 bp, Homo sapiens
ccaggtcaccctccccaagccatctgtctctcgtactcttcacacagaaaacatccagggcgccccagactccaagagttgtctccaaggctgtaataactttactgtcttaggaaaatccc

SEQ ID NO: 18363 - DNA, 122 bp, Homo sapiens
ccacgtggggcaggagagcagaggcgcagggcggtgcctgcagccaggatgcccccgagccgccggccggggccatgtggacgtcctccttgccagccccgggctgagtgaggagcttaggg

SEQ ID NO: 18364 - DNA, 122 bp, Homo sapiens
gagaccggaggaggccagccgggccgcgtggcccagcacctcctggctgcccatagcctccgcgccaggctcagacaccaggaaatgccgccgccactccgtttagtcgcgataagatggcg

SEQ ID NO: 18365 - DNA, 122 bp, Homo sapiens
gctaacgtgacctttgcgtttgagtgagtggtcagaatgtagaaatctctccaggggtagcgtacggggctgttgatttttaaggacctatgaacggattcagctcgcggtaggaagcccgg

SEQ ID NO: 18366 - DNA, 122 bp, Homo sapiens
accaggcttctctgccacaacaactccagatgtagccgtgacccaagagctcaaaaccaccgcacgcaattctggagtgggagccccatgctgaccacaggtgccaaggacccagggactgg

SEQ ID NO: 18367 - DNA, 122 bp, Homo sapiens
cagcccgaggccgggcgaaggcgggggccgcggccgcttccttggcctccgagtgcctggcgggcctccaggccccagacacacccctctcgaccccccgaggtttcctcccagatctgttc

SEQ ID NO: 18368 - DNA, 122 bp, Homo sapiens
tcccttatgactcctgcccttcccctggtgaacctgcaacccctggctctatggagcgcccgggccatcccactaacctcacaggtcttggtttggcaaatcatgaccgtgccagggtcttt

SEQ ID NO: 18369 - DNA, 122 bp, Homo sapiens
tgaccatgtggcggcctgtctcagatgttctttatcttatcacatggcatgtccatgtgccgctgggcatttctggcacttcgcacagctcctaaacatctgtttgtccctgtggttacaca

SEQ ID NO: 18370 - DNA, 122 bp, Homo sapiens
gaccccagagtgactcagcctcatggtacagcagagggcacgcccgacaggggaggtcttcgagtcaacaatgggaagtagaaatctgcccaagatgaggggaccagtccgagtggggaggc

SEQ ID NO: 18371 - DNA, 122 bp, Homo sapiens
cactctgtaaaactgtcctgcaggttcttaagctagacacacccctaccagagactcagccgttccactcctaggaattcttcccagagggatgaaaacgcgttcacacaaggacttatgca

SEQ ID NO: 18372 - DNA, 122 bp, Homo sapiens
cctttctaaatgacttaatagagaataacttggaaatgttttcattctgcaatcagtggacgagagtttgctataaaaagagcatgtacagtgtgatccaatttggagagaaagaatatatt

SEQ ID NO: 18373 - DNA, 122 bp, Homo sapiens
ccagacaggcagcgacgtgactgtgtcctggagccccgaggaggctgaggcctgggagagcgagaaccggccgagggcggccctgggcccagtggtgggcgcgcgacgggggcggccaccca

SEQ ID NO: 18374 - DNA, 122 bp, Homo sapiens
ctgactttcatcatccaattagaaataacaccgtcttcttgctaccatttctctgggaaccgtagggagtagacccccagcctcctgcactccccacaggggccagccgagcttcaaaggag

SEQ ID NO: 18375 - DNA, 122 bp, Homo sapiens
gtgcctcctgggtgttgtagtttgcttccttggcgagaggccttcgggctggctggacgccggggccttgggaactacgcctcccagcgcgccccgcgcgagagcccaggtcgcctgccctt

SEQ ID NO: 18376 - DNA, 122 bp, Homo sapiens
cccctgctctttccgcccacccacacacccagcagctggcctctctgcggccagcctgctcgcttgctggacacctcgacagccccaccgccagccgcaggtgcgcgcaagggacccgtcac

SEQ ID NO: 18377 - DNA, 122 bp, Homo sapiens
atctttttagatcaggtactactccctaggaagcaggactattactctgacacctcatctcgctcctctgccctgccaaaccaggctcaaactcctgctgtcctggctctcactgcccaaac

SEQ ID NO: 18378 - DNA, 122 bp, Homo sapiens
atctgtgagatgaaggggctgaaacatctctaaagctcattccaagtttaacattctctgcggacttaatataagaatgagcagggttccagtgttggctttgctgcttccatatggtctgg

SEQ ID NO: 18379 - DNA, 122 bp, Homo sapiens
gccaataactggaatacctaaggaaagtgaaagagacattagagaagcagttattgatggcgacatttgaagtaacaagacctcctacattactgtgattgacttgtgcatattagtttttt

SEQ ID NO: 18380 - DNA, 122 bp, Homo sapiens
ggtgaaccgggtgcaggaccacatccagagccgcatcgtgtactacctgatgaacatccacgtgcagccgcgtaccatctacctgtgccggcacggcgagaacgagcacaacctccagggcc

SEQ ID NO: 18381 - DNA, 122 bp, Homo sapiens
agcattccatgtgttccaaggctagcacagtgcgcgcgaggtccgcttttttaaacagcgcggaatcacgtggccgacagcccgcggcgctactggccctcggagtctccctcttggctttg

SEQ ID NO: 18382 - DNA, 122 bp, Homo sapiens
tgggcaggatgatttgtagcccccagaatctgtcaggcaccagccaggcattgctcagcccgtttccctctgggggagcaaggagtggtgctgggtttgtctctgctggggtttctccttct

SEQ ID NO: 18383 - DNA, 122 bp, Homo sapiens
gggataagcagataaacagataaagccgggacaagcacccaccctaggacacacagcgggcggcgctggccaccccttggtgggaggcagagaagcattgcttctttctaaagtacggctaa

SEQ ID NO: 18384 - DNA, 122 bp, Homo sapiens
tcctgtgggggtagggcctgtccaagtcccgtcatgcttcagtacctaagcaggtgcattcgctcccttcctgtgcctggagtcctgccatccattgctcaactccaatctcttgttgtttt

SEQ ID NO: 18385 - DNA, 122 bp, Homo sapiens
ttttagaacctggctggaaggaatagcgtagaaatggtgagtctgcctaggcatgaagagcgtggctctgaatctccaagctgtgttcccttttacggtgaactttaaacatcatagttctc

SEQ ID NO: 18386 - DNA, 122 bp, Homo sapiens
gggcgcggcgcagcagctggtgccgcggtgggcatctgttcggcctcctctgtccccacgcgtgacctgatcgctgcgacagcggaatcccacggtgcaggcccagagctgcgccgagagcc

SEQ ID NO: 18387 - DNA, 122 bp, Homo sapiens
ggacaggaatggcatcacttaaatgtattttcaaggagcagagtcacctgatgctgagaacggctagactaaaaaaaaaaaaagaaagaaaaaaagttgataggtactcgaatgtgttttat

SEQ ID NO: 18388 - DNA, 122 bp, Homo sapiens
aagccacggcgggaaaaaccggcggcggcgggggcaaaatgccgcaggggcaaaaagccgcggcggcgggggcaagaagccgcggtggcgggagcaaaaaactgcggcggcaaaaaggggcg

SEQ ID NO: 18389 - DNA, 122 bp, Homo sapiens
ggcgaggcgcggcgggagaggacggaagttggtcactccctcgaattgccccctcgctgccggatgctaggccagccttgagcaggagaaccggacactgtgtactcagcagggggagccaa

SEQ ID NO: 18390 - DNA, 122 bp, Homo sapiens
cgcggcctcggcagcccccggggcagctgcgcgtgctgcagtcttcccctgagtagcctgcgtcacacacgcacacgccatcctcgcaaaggccgtgcccacggcagtccccgggacagcga

SEQ ID NO: 18391 - DNA, 122 bp, Homo sapiens
caggcagccacccttttgtggcaatccatgcctctgcctcccaagtggggctgctttggccggggcttcacccttagctcaggcacagagcttctgatctaaatcaatccaaagcttgcatt

SEQ ID NO: 18392 - DNA, 122 bp, Homo sapiens
agagcgtctctccaatgttagtcccagcctgcacccttcttccatccctgctttcactcgcgaccctctaatgcagccctgcctccagcgacccccgggatggaacccctcgcccacccaca

SEQ ID NO: 18393 - DNA, 122 bp, Homo sapiens
tcccaggcgggactacaactcaatgcctggcacgggggcgggctcggcggtgacttaatccgggctgagtttggtggtggtagtgagggcaggtaggggcactgcccattttggccaagggt

SEQ ID NO: 18394 - DNA, 122 bp, Homo sapiens
aacgtgttttgtgctcacgaggcacacgagggagggctttgggcacacagcccattcatacgctggacactgcatgtttatttttgtgaaaagaatacctccttattgctagacacctgcaa

SEQ ID NO: 18395 - DNA, 122 bp, Homo sapiens
gactgtgcagggtctttagggtagggggagatacgtctgcagaaggggtggggtggggggcgtctggcctagcaggccttgggtccaaggggtataacactctgggagtcaatttcagagct

SEQ ID NO: 18396 - DNA, 122 bp, Homo sapiens
atgaaaaaccctggaagatcagggatccctggaggaaagggctcccagacttcggcaaatcgtcctatcagtttgggctgtgaggtgcccaagccggtgccaagcacggataggtgagctgc

SEQ ID NO: 18397 - DNA, 122 bp, Homo sapiens
tacgggaggcactgggaaggccgccccgagagcgactatgggcgccgccggttaccatggcgacaaccccgccgaaagcccccgcccgccagctgccccgcgggcctacggcgagcccgccg

SEQ ID NO: 18398 - DNA, 122 bp, Homo sapiens
tatctggaacttggtctttcattttaatttcctctttttggagatataaaatcttagatacgggatatagccagcaagcagcatttttgtatgacacattatctacaaatctcagtttgttc

SEQ ID NO: 18399 - DNA, 122 bp, Homo sapiens
aacaagccaggcgccgattggtcgcgccggacatgattgcgcccactggctcggatggtgcgacagtggtgcttgctggttttgcgcctccacgtggaaaacgaaccagcgctgagggcggc

SEQ ID NO: 18400 - DNA, 122 bp, Homo sapiens
agaggaaggtgtggaggccttatggagctctcctggggtcttggatgttcactccgagtgcgatgggagctgcaggaaggtttgatccccggagagaccagatcgggcttgagctctgaccg

SEQ ID NO: 18401 - DNA, 122 bp, Homo sapiens
ccctctcgcaaagtgccttttagcttgcgcgcctgcctctgagggccggggcgagagagacggctggcgtcggctgcaacggctgcaacgagtctgaaggcgctggcaagaaaatcccaagg

SEQ ID NO: 18402 - DNA, 122 bp, Homo sapiens
tcctctcatctgaagttccctctttctgcaacagtcaggtggacctcagcccttctagcccggagcttcctcagctcaagagtttttctcaatcatcagtttctccctcttcaccaagccta

SEQ ID NO: 18403 - DNA, 122 bp, Homo sapiens
ggctcgaactcaggaccttcagattatgagactgacgcgctgcccgctgcgctaagagggcgacgaagtataatgccgcgccagcttccacaggaatttcctaatttctttccccaggtggg

SEQ ID NO: 18404 - DNA, 122 bp, Homo sapiens
gtgaaaaattcatgatgcttctctgcagtctgtcttcaagtttcatggaggcgtgcgttccgttggtgcctgggcagggcagcttctcctgacccaggctcagaaatcagaggacctggagt

SEQ ID NO: 18405 - DNA, 122 bp, Homo sapiens
ctctcctctggactctacccctccccagatccccttccttccccaggccctacctctccccgagctccttgtgctccagctccagattccgatgcagtgtctttaggcagctgtgctggcgg

SEQ ID NO: 18406 - DNA, 122 bp, Homo sapiens
gactggaaacgttgggctggtcccattgtgtgaatcacacactttcatccgcactggccacgacaacctcacaaggataccatcagctgggctgagggcaatggctcaaccttgtaatccta

SEQ ID NO: 18407 - DNA, 122 bp, Homo sapiens
cagtggactcctcgcaggctctgtgtgggcccgggaggcgccgggtggacgagagggggccgaggtctctgggtttggattgagaatgggacgtccttgtaattcaatgtgggagaagcagg

SEQ ID NO: 18408 - DNA, 122 bp, Homo sapiens
accacgctctcgtctggtttgatcacaagacgggcaaggtaatgtcaccacattgtccagcggcattgtttaacaaactttttttccccttttgccctccctgagaggactaatgtatgcag

SEQ ID NO: 18409 - DNA, 122 bp, Homo sapiens
tctcgagccgcttcccaacgtgcctcttctgagcaaataagtcataaacaaagcaactcacgtgcaatcaaatagtttacagtgggggagtgcgggactcggccttctgttctactggatga

SEQ ID NO: 18410 - DNA, 122 bp, Homo sapiens
atccacattctatatctttgcagggaggtcgactagaagggcgcctgctatcaatcaccccgactctgggattgcaagaggacattcagtctggtactctctctttaccaataaggaaatgg

SEQ ID NO: 18411 - DNA, 122 bp, Homo sapiens
gtgttgaggctggtccccaacagtatctgcagggagcaggaggcggagaccagtgtagctcgcgcctggcattggctcccaagttcttaatgtctccctctccgtcattaagagaatcaagg

SEQ ID NO: 18412 - DNA, 122 bp, Homo sapiens
agagatgccaagaaggaggcacctccaacagagcagtataagagtgagtgaaggccaccccgcctagtctgggggttcatggacaacttctccgaggaaatgatatttgagccaagacctga

SEQ ID NO: 18413 - DNA, 122 bp, Homo sapiens
gtcctaattcctattaacttctgcaccttgcaggcctttctttagctgctaaaaggctgtcggtctttgctgatttgcagaaaggtgcacgctcatgatgaggttttcaattcaggtgggaa

SEQ ID NO: 18414 - DNA, 122 bp, Homo sapiens
attcggggcgcttctccgtgcgcagcgcgaagcagcagcgcctgcacacgccagttagtacggatggaaggtgtgcccccaagggaggcctgaactctagaatttgccctgcctccccaggc

SEQ ID NO: 18415 - DNA, 122 bp, Homo sapiens
tccccacctccacccgccaggttactgcaacctgaactttgaccccgccaccgccggcgacgagctgttccagctctaggagacccgctgggtgctgaacctggggatcctcctggagcccc

SEQ ID NO: 18416 - DNA, 122 bp, Homo sapiens
cctcccccacctcctcatgcttgggtcagacctgggggctgagggcctgaatgtcatgctcgtaggcacagtgtcggcgctgcagggcctcggcagcgttgaggtcgcggccagtcccgtcc

SEQ ID NO: 18417 - DNA, 122 bp, Homo sapiens
ccaccttacatcctccagatcttaggagggaaactccactgagatagtcaaggaagtcagcgagcatgaaatagctctatggagaacaacagtaataataatcctatttgaaaatgcaccat

SEQ ID NO: 18418 - DNA, 122 bp, Homo sapiens
ctgcaccagggcacaggtcagcaccggggcacatcgccgggtcacagagaccaccgaggccggctctgcctggggaccactggcccacaacgacagtactgtgctcacctgctcatctcgaa

SEQ ID NO: 18419 - DNA, 122 bp, Homo sapiens
cgggggcagtccagaaccagttggtgtctgactgcgcttttgccgcccatttcctgctttcgagcggctgaggcgacgcgctcccctcgggcagtggagggagcggctctctccgcaggaca

SEQ ID NO: 18420 - DNA, 122 bp, Homo sapiens
ggtcttcattcttcatactacctggaaggcaataatcttacattagccatatgttccccccggaacactcagcatagcatcatccatatggggagaggtgaataaatgcttaattcttcctc

SEQ ID NO: 18421 - DNA, 122 bp, Homo sapiens
tctttccgaccttccacccttactccctgcccgtgggattgtacttttagaggaaaacgacgttatctaaattgatccgctagtcaggttgcaaatgaatgttagaaagaacaattgacccc

SEQ ID NO: 18422 - DNA, 122 bp, Homo sapiens
gtccctttgccatttttaagatgcttttgaatccaggattcttttgaattaaaggtacagcgatcacaggagtataagcattgattaaatacctatgatgaaatagcacagcaaaatgggta

SEQ ID NO: 18423 - DNA, 122 bp, Homo sapiens
tgggaaaaggagtccagagggtgtgagaccactttgctccttggagaccccatgcggccccgattttccctcagtgcatgggcacgccaggtgcttcctgccgatgagcagacggaagaatc

SEQ ID NO: 18424 - DNA, 122 bp, Homo sapiens
gccgggcgccccacactctgaggcaatgtggaggctaaggaagacctgtggaggtctggccggatccagccttggctcggcctctaaccgtgcagtattgtggacccctttcttccgccccg

SEQ ID NO: 18425 - DNA, 122 bp, Homo sapiens
ttctgggacaagtatttggagtttcttaagccctagagctagactggagcccttcagctccgtactctaccacttagttattatgaacacttgggtggattactgatcctctctgtgccttg

SEQ ID NO: 18426 - DNA, 122 bp, Homo sapiens
tcagagtcaattctctaaagcaaatagaagtgagtcacagagcagtgcctgtcttcctctcgaccatagtgccgccctccaaatcttaatcgtacctttctaattatggatgcctgaatttt

SEQ ID NO: 18427 - DNA, 122 bp, Homo sapiens
cacacgacgtgaactggggcggtggcagcacgccaggcctctgacgtcccagggctcaagcgcggaggacatgtggaactccactccaaaagcggcggcttgcggcggagctctctctagtg

SEQ ID NO: 18428 - DNA, 122 bp, Homo sapiens
cggaaaggcagggcctcggcgacatcaattaacatatgtaagatgaacattggcttggtccggaaaggcggggcctcagtgacatcaatcaacatatgcaagatgaacattggcttggtccg

SEQ ID NO: 18429 - DNA, 122 bp, Homo sapiens
agaagctaatagacaaaaaagcactcttaccttgagacattcatagtctagtgacagaagcgtgatagtacgaccacttcttgattgcttaatatgtctaaagcagagtttactggcaataa

SEQ ID NO: 18430 - DNA, 122 bp, Homo sapiens
agcatttatcccattttactgatgaagaaactgaggcctagagaagtgcacctgtttccccgaggtcacttagatgatacacggtaggagccagaatctgaacccaagcctatctcatgcta

SEQ ID NO: 18431 - DNA, 122 bp, Homo sapiens
cgcctcgggagggtgagcgggccaggtgcacaccaagggccagccgctccgggaggtgcgcgcgctcgggggtcccctgcatcccccgcagccaagtggattcgtggctggtgcacagcgtg

SEQ ID NO: 18432 - DNA, 122 bp, Homo sapiens
ccaatggcagcggcgctggcttgtgcgcatggccacttgggctcacatccgggctctcagcgcggggactcctggaggtgagaacccggcccagaggaaataagttggtgggcggagcgggc

SEQ ID NO: 18433 - DNA, 122 bp, Homo sapiens
atgatcctatattcatgcatgtatttgtctatctagcaactttccatcagcaatttttaccgttttgttctacaacacagtgataaatccattcccatctgtaatcatggcttactgaggcc

SEQ ID NO: 18434 - DNA, 122 bp, Homo sapiens
cctctgggactctgcctgccatgtgggtcactctgctctgtgcactggccgcaggctgaccgtggacgagcacgtctggttctatgggcggctgaagggtctgagtgccgctgtagtgggcc

SEQ ID NO: 18435 - DNA, 122 bp, Homo sapiens
cccaaactaaaccaaaatagaaaccaaaaacaacaaaagtgtcagtgcaaataaaggaatcgagatgctacaaaagaccagaggaaactgagaaaaacagtaggagcttactggttgctatt

SEQ ID NO: 18436 - DNA, 122 bp, Homo sapiens
actgcatctccacctgagccctgtgtggctccccttgcacctggtgctagacctgactttcgggacaggcttcctttttgctcttcactttcctccagcccgcctccttctaggtctcccct

SEQ ID NO: 18437 - DNA, 122 bp, Homo sapiens
ggtcagcaaaaacgctgggctgaatgtatcatcacagaacccaggagggaaccagcaaagcggcgttggcgccccggtctttcctgcgttggcgctggccgcggggcccagcacccgggacg

SEQ ID NO: 18438 - DNA, 122 bp, Homo sapiens
ttgagtcacttccagtttttctaaaatggcttcaagctcccattcaccccatcaggaaaacgaaaggattttctctgtttgttttcttccctgctttaccccagtgtctacaacaatgccag

SEQ ID NO: 18439 - DNA, 122 bp, Homo sapiens
ggtccctcgaacgccccagctaagaagggcgggggccttgccagggcgcgagcaacatgacgttcaaggtcttcctgtggcttctgtaaagaaatgttcacgtgggagcctgtccacatggg

SEQ ID NO: 18440 - DNA, 122 bp, Homo sapiens
gcggcgacggccgttggggctcgcgcgcgccctcggttgccccgcccccgcccctgcgcccggccccgccacgcccacgccccgccggctcccaggtctccccgcgcccagtccggccccgc

SEQ ID NO: 18441 - DNA, 122 bp, Homo sapiens
cccggcactgcgggcacgacacgttagtctctgccgtgccccagcagcgggcgaggcacgcgcaacagatgttatggccgcagtcgagcatcatgggctctgcgaagtactgcaggcacacg

SEQ ID NO: 18442 - DNA, 122 bp, Homo sapiens
aatagctatttagtccaacagcaacaacaacccctcccgacaggctgtctggaacattttcgaaccctccaactgggatcggtctggttcagtgtttgttttctaagcagggaggtgtctac

SEQ ID NO: 18443 - DNA, 122 bp, Homo sapiens
agccctgctgctgctcatttacctatctgcgtcttctgaagtagctgaatgtggcacagacgttcctggtcaccactatggaatgcagctgcacaaactggactttgtacattttaacagga

SEQ ID NO: 18444 - DNA, 122 bp, Homo sapiens
agagttctgaaaggtagatttccaataggctgtgatcatctttgaaaatttttggctgagcgtaagcctgccagcattggaaatttgaaatcttcaagcatgggcattgcaattgccatgta

SEQ ID NO: 18445 - DNA, 122 bp, Homo sapiens
ctcatttgtgtgacgtgtttatttttcagtgcaaatggtcaagaaaaggcttcatccggacgaggtggtgcattgcagactggtacgtggtgtctgtgctttgtcaatttccataacgtttc

SEQ ID NO: 18446 - DNA, 122 bp, Homo sapiens
atcgagtcacatcacacgtagggagggtgccagctgcccggcacaggctggagaactgagcgtcctgcgctacaggctctctttatactcatggggtcccacgcttcggtgacgttgcaggg

SEQ ID NO: 18447 - DNA, 122 bp, Homo sapiens
aaagtgaatcaatttctaggttggcctgggtgctggacgacagggtcctcttggccctctcgcaggcggtgcgcagccgcctcacggctcgcttgttctggctgatgtcctttttgtgtttc

SEQ ID NO: 18448 - DNA, 122 bp, Homo sapiens
agccgtggtccaccgcctccaccccgaagctgtagtgctccacctcctcgcggtccagctcggcacacactgtgatccaaccggagctgttgtggatctggaaggggaagtcaggggtgggg

SEQ ID NO: 18449 - DNA, 122 bp, Homo sapiens
tgggcggggaagagcgggggagcgtccctggcaccttgcgccctatcaggaggaagagggcgggccttcctgggagcgcacctcgctgcctgtagctagaagatcagaaaaggaacaaccgc

SEQ ID NO: 18450 - DNA, 122 bp, Homo sapiens
aaccccatcctcccaccaggactgagaaatgctcccaaacccgccactctgtccaaatgacgcttttgtgttacctgggacacagggagaattctcatccctggagctttaagtactttctt

SEQ ID NO: 18451 - DNA, 122 bp, Homo sapiens
cagcgtgcgcgcctgccaagcctggcgcgggcatgtcccggggcaggtttggggctggcacgagggggctgaaagtcgaaacccgcaccgcagcgcagcgctggggcggccgcccagggggt

SEQ ID NO: 18452 - DNA, 122 bp, Homo sapiens
ccccagctgcacaaagccggcccggggagggggcgataaggagcgagcctcgggtcggcccggcaccgctgcttcggctcagagtccttgcaatcgcttggcctacgaacaacctaaatgaa

SEQ ID NO: 18453 - DNA, 122 bp, Homo sapiens
ccggggaagacacgggttggtttatgcaaggctatgtggaccagagaggtggaaaacaaccgaagcccaccgaaggagaactgaagaatgtgaactctgagcagcgcttaacaaataaaaca

SEQ ID NO: 18454 - DNA, 122 bp, Homo sapiens
gggcgacagagcaagactctgtcttgaaaaaaaaaaaagaattaaaaaaagaaacatggccgagtgtagtggctcttgcctataatcccaacactcagggaggccaaggtgggaggattgct

SEQ ID NO: 18455 - DNA, 122 bp, Homo sapiens
tgtaaagatggccctgaagggccaggaggcactgaaaaagcaaccattgctggcggaggccgggcactgatgcgtctctctcctgcagaccggaagcctcccctcgctgctgccttaggtga

SEQ ID NO: 18456 - DNA, 122 bp, Homo sapiens
agagtcacctgcagatgaagcttcgtcggcacccactgtgggcaggaggggctgcgcatgcgagcggtgggcagaggcgcagtgggagatgggccctggggtcagggacaggcctggtgcca

SEQ ID NO: 18457 - DNA, 122 bp, Homo sapiens
agggggactccgctctgcagacccgaagtcgctgcaggaaggcctgggtcctgctagagccggttcgagccggttcctcccggcccctcccccgtctcgggacccccggccccgcacactca

SEQ ID NO: 18458 - DNA, 122 bp, Homo sapiens
cagcagcaccgcctggctcagccaggtccaggaaggcctggcgcagcagggccgggctttcgcctagcgcgcagcctagcgccgagggcggctgaggcgggggctgcaggtaggtgggcacc

SEQ ID NO: 18459 - DNA, 122 bp, Homo sapiens
gataccgcacaaataaaatcaaatccaagtcccccatcccaacccgaatgatggaggctgcggcggccggagtgaccccgccgccgccagccccagcccgctagccgcggaccaacaggtaa

SEQ ID NO: 18460 - DNA, 122 bp, Homo sapiens
tctgtcccttgctttagccgttgtatggaggaaaaccataccaatccttagactcacgttcggtctagggctcctggtaaggctccctatatatttttaagtgcaaaccagcaaaattgaaa

SEQ ID NO: 18461 - DNA, 122 bp, Homo sapiens
tatggtggagaatgtgacccttccaaaaggaaaccacagctggttgtggaatgcaagatgcggaagcactgatgcctgccttctatgctgttgctattgtgatttctgcagcattatgagga

SEQ ID NO: 18462 - DNA, 122 bp, Homo sapiens
gtctactgatggtgccgggggtccggctgtttctgttgtctactgatggtgctgggggtccggctgtttctgttgtctactgatggtgccgggggtccggctgtttctgttgtctactgatg

SEQ ID NO: 18463 - DNA, 122 bp, Homo sapiens
cgaccttggcaagccctttgcccactctgggcctcaggatccacctcggtaaaatgggagcgtggaacaataataccaagggttctttttttttttttttttttttttgagacggagtctcg

SEQ ID NO: 18464 - DNA, 122 bp, Homo sapiens
aggaagagtttccagcaagcttatttttaggattaaaaacgacagcaaaaattacacggccggaagattcttctgattgaatgctgagttgaaaatgaaacttaattgtgtcctttacgtcc

SEQ ID NO: 18465 - DNA, 122 bp, Homo sapiens
tagaagaagcctacctatgtccccttcacatgttgtggtcaatgtgtcaactgcacgatccgggcccctcaccacatcctctgcaccggtcagtcgagccgagtcactgcgtcctggcagca

SEQ ID NO: 18466 - DNA, 122 bp, Homo sapiens
caaggtgcgcagtggggagtggaccgaggacgaggtgctgcgccgcttcctggacaacttcgactcctctgagaaggacgggcaggtgggtggctgcgcggggggccccctccccaggcagt

SEQ ID NO: 18467 - DNA, 122 bp, Homo sapiens
agacggtggccatccctgccgagctgactgcagccctgcctgctcctgggagccgccttccgagagcctgcaggtcacctgtgctgcccctggcagggttgccagatttatcaaacaaaaca

SEQ ID NO: 18468 - DNA, 122 bp, Homo sapiens
gatgggtacatttgggaggagcttagcagacatcagaggacctgcagagagttgacacagcgggaggaaccagctgcactaccactcatgttcttttccatcttagcatctcgtgagcataa

SEQ ID NO: 18469 - DNA, 122 bp, Homo sapiens
ctccgcccgagaggaagcgtctggccaagatgctgcagctcagcgagagacaggtgagctcgcggggggcctggggccgcctccggggaagggaaggcttctggggtaggggtcgccgggcc

SEQ ID NO: 18470 - DNA, 122 bp, Homo sapiens
cgttttgccagccgagcacgccgtcgtggcccggcagccctggtctgcgggccagccctccgcaagtgacttttaaagactttctagcctcgataatctgacatagttccgacctcaccccg

SEQ ID NO: 18471 - DNA, 122 bp, Homo sapiens
tgagacgggaacagctgcaaatttcgagagctcgtaagattatgtatgactggagcacaacgacaaccaaggtaggtacaaccatggaagaacaactcagggctgacttgcctttgcccagt

SEQ ID NO: 18472 - DNA, 122 bp, Homo sapiens
actccccgtgcacctccttccctcagggtcttttgcaacctccattccattgtctgagttcgtgaatttgactgtgggaatctcatgtaaatggcgtcataaagtatttgtcctttcctgac

SEQ ID NO: 18473 - DNA, 122 bp, Homo sapiens
gtccctttaattggcatgtaccaagtccttccaggtcacatttcctccctacgtcccagccgtttggactcactggccaaaagtccaagaggacggaatgtggagacagtgttgtatttttg

SEQ ID NO: 18474 - DNA, 122 bp, Homo sapiens
atcaaccctcccacgtcccctggctcagctaatgctggtggtcattcgttgccatttctgcgaaaggggacggacggaaccgcccgcagtacccgcttgccaccggctggacgagggggagg

SEQ ID NO: 18475 - DNA, 122 bp, Homo sapiens
tccctcttcccctccaccctggcagtccagcacatcagtggccgtcacggcccgggcacgcgcgcgcacggacccacaccccggcggctctcacaatcgcacacacacatacacacacacac

SEQ ID NO: 18476 - DNA, 122 bp, Homo sapiens
gtcatccccaagccaggccagttctccaggtggaactgtagtgtagcgacctcactgctgcgcgcacagtctcccgggacttggactcgagggagtgacgaggaggagctccgagctgcgcc

SEQ ID NO: 18477 - DNA, 122 bp, Homo sapiens
gtgtgactcgaaagtcagcctgcaggcggggtccaaggttagggcgcggtagacttgacccgctttcctcaaactctgttaatgccagaacccggataatctcaacttggtaaagatggcag

SEQ ID NO: 18478 - DNA, 122 bp, Homo sapiens
tctgtggcctttcaaagtctatggttgtttccaacatcacattgtctcagatttgttactcgcagcacagattcgaaatgagccttcagtaaaagtaaaaagaaaggaagaaagaaagaaag

SEQ ID NO: 18479 - DNA, 122 bp, Homo sapiens
tcagactttgtctgaacagcttcgtggcagcaaggaagggagaagggaacagatccaagccgatctttgggaggagagaaccagcatgacttggagactttagatgtcagagcaaaggacag

SEQ ID NO: 18480 - DNA, 122 bp, Homo sapiens
tgtcaagggtgacaccaatcccatccatatctactggatgaaagcaagatgtgcttttctcgaagtttacactaggcaaaaaaaaaaggcagttttattttaaccagatgtgaacaaattaa

SEQ ID NO: 18481 - DNA, 122 bp, Homo sapiens
tgcagtagggggcctccctcttcatcttcacccagggaaggattggttaagggcttacctcggtctgggtccaaccctcagtgctcatccttaagggctcctgggaactgacagctccctcc

SEQ ID NO: 18482 - DNA, 122 bp, Homo sapiens
cctggagaactagaaggggcgcggcggaggctctacttcgggtgtctgtggctggctgggcgtcccagtgcctctcgtccgcccccaaactcatccccctccccagggttgggtacccggca

SEQ ID NO: 18483 - DNA, 122 bp, Homo sapiens
tgggtggaaactaaagcggggttggggactgggcgccggccacgggtgcggttccagcagcgggagcgggtcccggggccgggggtggggggggggggctcaggcacagcagggggcgaggg

SEQ ID NO: 18484 - DNA, 122 bp, Homo sapiens
aaaagttgtgaatagccagaaagatgctcagaaatcccttaaagtacacgacacgacacacgcacacacaccacaagaaaatccacaagaaatgccatcgtgcctgccacaaaccttcacaa

SEQ ID NO: 18485 - DNA, 122 bp, Homo sapiens
gaaagactggcagggtcaccgagccagggcctgaggggatctagcccctcagtgagggtgcggtggtaccaaggcagggctggaagaagggccatggggtgggggagctctgggtaaccaga

SEQ ID NO: 18486 - DNA, 122 bp, Homo sapiens
ggcggagtagatttacagaaacattactggtgatgataaggtttaggttacttagcacttcgtgtgttgcacattatttttcagaggtgtttcttcttagagcaggaaattgaaatcctgca

SEQ ID NO: 18487 - DNA, 122 bp, Homo sapiens
taaaaagaggaattaatttacaaatatttgggggcatttaataaatgccaggccttgtagcgggtgctagggaaacagtggtgagcaggacaaatgtctcttagatagagaagagcttttcc

SEQ ID NO: 18488 - DNA, 122 bp, Homo sapiens
aggttctgatttgattttttttttttcttcatgcctaccctttttttggaagtttccagccgcaatttgaaatgaaatgacaaggtgtatatttgatcaattttcattcccaccattgcatt

SEQ ID NO: 18489 - DNA, 122 bp, Homo sapiens
agcttcagcgtggcgtgactgttggggggccggtgttgccattttatctgctttgaagtgcgcgattcaggatcattcggtgcatccatccccaccatccgttctcagactttcccgtcctc

SEQ ID NO: 18490 - DNA, 122 bp, Homo sapiens
tcaatacatgctggctttggccaagtcgaagctacctgagctgtgcttggatagtcagggcggctctgcgtccaactgtgccacttcttggccactctattctgctgcacaggtagagtccc

SEQ ID NO: 18491 - DNA, 122 bp, Homo sapiens
cgccgtcgcggctgacgctgaagctcagacgctgcagctgctgcacatagcgacccagtccgttgtggagaacgctggccaagaagcggctcggagtcccgcgcgccgtcatagctacagct

SEQ ID NO: 18492 - DNA, 122 bp, Homo sapiens
gctcttacctgatgcagttctggttttcgtgtctgagtttgaacataccgaatagctgcccgagcctccatgaaggggtgagtaagccctattccacgtgccagggtaggagggaggatagg

SEQ ID NO: 18493 - DNA, 122 bp, Homo sapiens
tagaatgagagagtttaacatctatctaaccaaagtccagaaggagaaaaaatagaatggcgtggaggctatgactgcccacatcatgtctgggaactttccagaattgaagaaaattacaa

SEQ ID NO: 18494 - DNA, 122 bp, Homo sapiens
ggaaagctacagctctgaacctctctctgcgaggtctttttgacaagctgtttggggcaccgcgcagacgtctggcgccgggagccagagctcgggcccgttgctgagccctgtgttcctgc

SEQ ID NO: 18495 - DNA, 122 bp, Homo sapiens
gcctttgcctgcccctactccagggctccctttgatttaaggctcttattccaggcgacccgtcagtgtctctcccagtgctgacctgctttgcggctcgtcacatgcaacacgaggtggcc

SEQ ID NO: 18496 - DNA, 122 bp, Homo sapiens
ttcaccgcctgcgcctgagttcgcgggtcctccgcaggccgcctgggaaccggagcctggcgtgccggagcctggcctggtgctctgggctctgccttctggttcctggaggcatcaaaggc

SEQ ID NO: 18497 - DNA, 122 bp, Homo sapiens
ttactctgagaggatcctgcccgggcctggagttcagggagggctcctctaaggacatgacgttggagctgagttctgcaggaggagaacagagctcattctaggtgaaagaatgacatatt

SEQ ID NO: 18498 - DNA, 122 bp, Homo sapiens
caccggcttgttggtgacaagggcccggaagtccggcctggctttcgacgcccccgccaccgtgggctgcctgaagaagtaggatttgctgccatggagcaagcactggtcgtccccaaaag

SEQ ID NO: 18499 - DNA, 122 bp, Homo sapiens
tacccagggaaaccaccagcatcggcagaggtgatagctggggaggagcggggatttggacgagagacacaggatgagtaccgggggcagccctgtgatcaacaactgctgcaagaggggcc

SEQ ID NO: 18500 - DNA, 122 bp, Homo sapiens
cagcaatgccggccagccgtagagggaggaagagcccggggagcccgagcatagcgtaaacggctctctgaccttaatttcatcctgcatggcgaatctctgccgtctctctgaacgcagaa

SEQ ID NO: 18501 - DNA, 122 bp, Homo sapiens
aaaactctgtcggtaccaaccccagagcgttgagagcagcccacctccacgcttccttaacggagaggtgcaggactcagacttcaccagcccactcggtcccagccttgtacgcaaagaga

SEQ ID NO: 18502 - DNA, 122 bp, Homo sapiens
gccttggtgtagaggacagattggaagctttaggaaagctccatgtgcccctgaggaacacgaggtctgcaatgggtgcagcactgcgcccgcatccatgtgaagagcacgaggtctgcgat

SEQ ID NO: 18503 - DNA, 122 bp, Homo sapiens
tgggttacatcgcatagaatattgtgacacagtaacatcagaaacacaattatagtttcacgtcagtacatacataatgacttcatgcaaaaatgaaaaacaaaacccctgttcatgtccaa

SEQ ID NO: 18504 - DNA, 122 bp, Homo sapiens
gtttcttctagaagagctttgcgtcttaaacgcccataccgcagacagctgcctggcgggcgacccagccccatcctgatggccccaggacacaagcccaggagcgccccggtgcgcgcggt

SEQ ID NO: 18505 - DNA, 122 bp, Homo sapiens
gccccgcacccgagggctgcggagagatattttgggtggcaggaggcccctcgtcatttccgccgggcagctagtcgtgctcggggcttcactcccgcgcgtgaggcgagcgggcaagttgg

SEQ ID NO: 18506 - DNA, 122 bp, Homo sapiens
cccggagcgcccggcggctggtttccattagggcagttccggcgccgacttcgctggggacggggaaggtgacccccctactcggatcccccaggtcctaaaggtagcaggatttccagaac

SEQ ID NO: 18507 - DNA, 122 bp, Homo sapiens
gcttggcggggaagttgttggggttgatgggggtggagagcagcgcctccatcgccccgccgggccggggcctcgccccccgagcctagctctcccacaccgttctcgatccctccccggcc

SEQ ID NO: 18508 - DNA, 122 bp, Homo sapiens
ttggtaagctcagagtctgctcatctaaccctgatgtacaacccgaagtcagcatacccacgatggaagtgctaacctttacgtcccccaacagacggtcttccaaggtcccgtgtgggtac

SEQ ID NO: 18509 - DNA, 122 bp, Homo sapiens
cccactgtacctgactgcctgggtctgcgcctgggcccccgcccttttacaaaaggtccacggcctctcaagagctggacatgaaggatgggccaagtccagtcttgatcggtaatgcccac

SEQ ID NO: 18510 - DNA, 122 bp, Homo sapiens
ctaccaagccttccggaggccgtgctattcctggggggtgtgcgcggccatctgggccctcgtcctgtgtcacctgggtctggtctttgggttggaggctccaggaggctggctggaccaca

SEQ ID NO: 18511 - DNA, 122 bp, Homo sapiens
ctggaggggacgggcacaggacacagctcagagcagagtatcaaggacaaggacagggaccggggatgcaggacagagacagggaatgcaggatagagaccacgggacataggatagagacc

SEQ ID NO: 18512 - DNA, 122 bp, Homo sapiens
tcaaaatgccccctaggtgctgggggcgtggcctcaagttggggatgtggctccttccttcgtcgcgcccttgggcgtggcctcccgagagggcggggcatcctccattcctaattccccaa

SEQ ID NO: 18513 - DNA, 122 bp, Homo sapiens
gtaaacgcggcgggtggaaccttgtgtgggcggaacgcgagtgcagcggtgggaggcttccgggggagctgcacgggcgacgggtcggcggagacagaaaagcgccggacgccggggtgatc

SEQ ID NO: 18514 - DNA, 122 bp, Homo sapiens
tgaggtcggggtactcctcctcaggcttgtaattcagcttgaacttgttgtgggtgttaccgaatggcatggtggcggtgtaggagacctgatgggcagggcaggaggggaagattgaagat

SEQ ID NO: 18515 - DNA, 122 bp, Homo sapiens
acgagtcgccaagtaaaggaccgctctatctcgcctttgttctcctctcggtggttactgcgcagacgtagtcgcccaagtcgcgtccccgccttcccggtcgcgggcccagctcgggagcg

SEQ ID NO: 18516 - DNA, 122 bp, Homo sapiens
taatcctagcactttgggatgccgaggtggaaggaccacttgaggcctccctccaggctccggaagagacctcctccatgatcccttgtctaaggggaaggttcctcaggaccttaccgtgg

SEQ ID NO: 18517 - DNA, 122 bp, Homo sapiens
gcgcttggtcttaggctcagatggggaattaggaaactagggtgcgctgtagaagagaggcgctcagggggctgcggcctcactcagaggtggctgagacctctttccagcctgcaaagagc

SEQ ID NO: 18518 - DNA, 122 bp, Homo sapiens
acccgggaaagaaaggcgaacgctccccattgcgccagatgtgcagggaggaccttgagacgcgccccccgcccccgcaggctcctcccgccccccggcgcatcacgcgggggtggcaaagg

SEQ ID NO: 18519 - DNA, 122 bp, Homo sapiens
gtatgctggctccagtattttaacgtgatatatgcgttgtgattatgaccgtcttcagtgcgcaccccttgattccagtttatttagtgcatttagggaatgagcagaagctgcgtataatc

SEQ ID NO: 18520 - DNA, 122 bp, Homo sapiens
accagaccggcacacagacccataaacgtccatcacgcactccacgcacgtccgcatgcacgctacccgtcccggaagcgtggtctccgccgcctgcctctgacgaagcttgtcccggccgc

SEQ ID NO: 18521 - DNA, 122 bp, Homo sapiens
ggcggtggaggggaggtggggggaatcagcaaggacatggctcctgactcctgtgcggaacgtgagtgactgagcggcaaagcccgagtgagcgagcggtgggctgccgggccgggcggggg

SEQ ID NO: 18522 - DNA, 122 bp, Homo sapiens
catatcaagaaacctggcattgtatatggccctcaaaagatgacgccacccggtccaccacggttcaacgaggactaagacatctgccctcaaccatcatggcggcgccactcagtttggct

SEQ ID NO: 18523 - DNA, 122 bp, Homo sapiens
acagtcagggtcctgcgctgcttgtcgcatgcagtctccttccccgaaccgccgcctgcacggcctccactgttttcctattgggctgcagcctgagagccctgacaatgcggcccacaaac

SEQ ID NO: 18524 - DNA, 122 bp, Homo sapiens
caggagaagtaggaatgcggtactcacacacgggagaagtaggaatgcggtactcacacacgggagaagtaagaatgcggtactcacacacatgagaagtaagaatgcggtactcacgcaca

SEQ ID NO: 18525 - DNA, 122 bp, Homo sapiens
cgagatccgcggcctcaaggtgagcgcgggccaggtggggaggcgcggcgcggctgggagcggggtgccccgaggaggaggcggggccaggcaaactttccctccctccctcaacaggtgac

SEQ ID NO: 18526 - DNA, 122 bp, Homo sapiens
tgacctcctgatccacccacctcggccttccaaagtgctgggattacaggcgtgagccaccgcacccatccttaaggctaattgaagtgattagtgataagcctgaaaacataccatttttc

SEQ ID NO: 18527 - DNA, 122 bp, Homo sapiens
cctggctgaggctgagcgcctggggcccctgccggccagtgaccccggccacccaccccccggtgggcctggtccaccccttgacaacagcactggggaagaggcggacagggaccacctcc

SEQ ID NO: 18528 - DNA, 122 bp, Homo sapiens
accctacttctgtttagttagtctttttaatgattcatagtctgcatttgttaagatggtcgaaaatgccaaatgagtaatggtgaatttggtcaaaaatatataaccccaaaatctctttg

SEQ ID NO: 18529 - DNA, 122 bp, Homo sapiens
gctctggtcttgaacaaactctagctgtagcagatctggcaacattcatatctgatattacgttactgaaactgaaataataaaaaggtcaagtgtattagaaatcttagctacagaacagt

SEQ ID NO: 18530 - DNA, 122 bp, Homo sapiens
tcaggttggtatttcacaggcggtgctcccaagtagtctggttttcccatttgtggagggcgaggtcatagaggggacagggggaggctgtctggtcagcactgtgtatttccaaagaacaa

SEQ ID NO: 18531 - DNA, 122 bp, Homo sapiens
agagagcaagcgtcaggccacggtcagcgcaggcggcctggggatggggcaaggcctggacgcatgctgaccatggccgctgggccccatcccgctctgcgcagccacgaggtgctcacggt

SEQ ID NO: 18532 - DNA, 122 bp, Homo sapiens
caggtgggtggctgcgcggggggccccctccccaggcagttcctcggccgtgccccctcacggccctctgttcccaggtcacactggcggaattccaggactactacagcggcgtgagtgcc

SEQ ID NO: 18533 - DNA, 122 bp, Homo sapiens
gggcttcccgtcctgaatgtagcaagaacggtgacactagatgaccagtagccaccaccacgacaacaacagactccgacaaagaaccatcaatgatgctgagacttgtgggtcagtgctcg

SEQ ID NO: 18534 - DNA, 122 bp, Homo sapiens
ctggaatttggacccactccgctgataggtggtggccagggttctagggaacacaagaggcggagccaggtggcttccctgtgctggcattcttgcctctctctctctttctctctctctgt

SEQ ID NO: 18535 - DNA, 122 bp, Homo sapiens
ggccctcctttaaaggtcagctcataaaactaatcagtccagtgcttccgctgcaaagttcgccctcctctctgcaaattctcatttccttctgggttgacaagttgctagccatcggccct

SEQ ID NO: 18536 - DNA, 122 bp, Homo sapiens
ataaaacacactttccaaaaagggaacagaaacccacacacatgattaaatcatagaacacgttggggaaaactcctgtcctctcagctgtgaaccaagaaggaagcagaaaagttctccaa

SEQ ID NO: 18537 - DNA, 122 bp, Homo sapiens
tgccaggctgaaatggagtggaaggcagccctggctggaagtcttgctgggaacctggagcgctgggaggtaaaactttacttggtgctggcagcgtcactatgccagtctgtttcttcccg

SEQ ID NO: 18538 - DNA, 122 bp, Homo sapiens
agaaaggcgcaccggaagttgtggtacccaagccatactctcataaatccagccaggtcgcgctgaaacagtttccggaagcacttctcctagatcgcaccgcctcttcctcctggaagcta

SEQ ID NO: 18539 - DNA, 122 bp, Homo sapiens
gttaattagatacagatttacttggttatttagctttcctctcttttcccctggcatttacgtaaaacccgttactgttacactaccggactaactatgtagctgaaagtctaagataaatt

SEQ ID NO: 18540 - DNA, 122 bp, Homo sapiens
tttcggttcctgcgcctggctgctctgcaggtgtgctggggccacggtgctggagggctgcgcggagcgggaggtcgcggtgctcgtgcccaggtcgcccaatgggtgggcagaatgacacg

SEQ ID NO: 18541 - DNA, 122 bp, Homo sapiens
aaattagcctagggacacaccgcgccactagccggtacagggtaccaggcccgatccccacgccaaggtggccccatcacccagacctgcccagggaagggaggtagaacaggagttggggg

SEQ ID NO: 18542 - DNA, 122 bp, Homo sapiens
aatgctgggattacaggggtgagccaccgctcccggcctgtaaatgtgctttttctttcacgtaaataaatgagatttacacaaatagccattcacaatcatggtcacagtcacctacaaac

SEQ ID NO: 18543 - DNA, 122 bp, Homo sapiens
aggactgaccccctcctcagctccaactcctcccctgccttatcaccttcataaccttttcgtctttcacacattttagagctggaggcattctagggctaagtcactttcccagccgggaa

SEQ ID NO: 18544 - DNA, 122 bp, Homo sapiens
tgtccctgggtttcatctagaggaacaggaggtcccttagatgccctggagttggccccgcgcgaggggtgctgggagttgacaggaaagaggaagtggcagccgagaggccctggtggggc

SEQ ID NO: 18545 - DNA, 122 bp, Homo sapiens
tcctccaggcgcgggtaggtgccggcagagaacttgtgcgtcttgcccgccttgccttgccgggaccacacggtgagctcgcagcgcggggccaccacaagtgaggaggcggtgttggccca

SEQ ID NO: 18546 - DNA, 122 bp, Homo sapiens
ttatttcttcggtgcaaccaactcagaatgaattcctccgcccctgcgtgctcagtgagtcggcaccctagcagtgaactgcatttaaaacctcaggaattgagcgaactctcccagtggct

SEQ ID NO: 18547 - DNA, 122 bp, Homo sapiens
cttcattcctgtcattcattctctcactcattaaataaatattaagtgcccaccatgtgccggaaatacggagaagaaaaaaaaacatgacccctgccctcatgcaaattactgtgtaaaga

SEQ ID NO: 18548 - DNA, 122 bp, Homo sapiens
cgtcacagagccgagtggtgttgcccggatcgctctagagactgatttggggactgcttccgaagcacagaagcgtctgtttgctctgcctcctcggcctcccaatcaccccatcttcacgt

SEQ ID NO: 18549 - DNA, 122 bp, Homo sapiens
atggagctgccatctctctgcctacagcagttttcctgatgcagaaaaaccagagtgccacgaaagcctccacataaacttgaataacattatctcctgggttctccagtcctcgtcaccag

SEQ ID NO: 18550 - DNA, 122 bp, Homo sapiens
gagtaggaacgattcttccaaagaccccctctccctttgaatcattccccaatgaggatgcgttctgaatggcacgcgcctgacaccgcacaccagcggctatagcgcggttcctcacggcc

SEQ ID NO: 18551 - DNA, 122 bp, Homo sapiens
ggcggcagggttgggggttgtctaggccagttggtatatgtggttgtccatttttgctcacgtctgaataccccaatttccatcccaggaaggggtgcagatgcctggttactcagtggggc

SEQ ID NO: 18552 - DNA, 122 bp, Homo sapiens
gttgccgtgatagtctcacacacgcgggggtgtggatctcgttcgttttcatgtagaaaacgagagcgaaactgcagagaaaagaaacgtcgggtgcatcacggcctgaccacggattcctg

SEQ ID NO: 18553 - DNA, 122 bp, Homo sapiens
acccctctctggatctccatacacccggattatctggcagtcactcccttggtcagaaggcgtcactgccctcttagatcaccaccgtaggactagctgccgacccgggtcacgccactcac

SEQ ID NO: 18554 - DNA, 122 bp, Homo sapiens
agatgtccctgctcccccgctccccgcccccacccagggccagcccccgcccccagctcccgaggggttcccagatccctctgccaatggctgcctggcctggctgtttaatattgatgagg

SEQ ID NO: 18555 - DNA, 122 bp, Homo sapiens
ggtgctccgacatagggcttctctccgttgtctccgcccggctcgaggctccctggcgggcgtgcctcacagggagcacaggcctgggtcccagctgctctacaaacgctgcagctatttct

SEQ ID NO: 18556 - DNA, 122 bp, Homo sapiens
gggaatgtgacagtggtttagttctgaaactggagccagtagaaagttctgaagggggtccgatgatcagaactgtctgtgggtttaataaaggtgtatttaattttatttaagcctggaga

SEQ ID NO: 18557 - DNA, 122 bp, Homo sapiens
taggcccccgcccatcccgcgcccgagccccatctggctcgggctggcacctcgaatccacgtgatttctcggcagcagccgccagttccatgcactggcggagcagctctaggcggcggct

SEQ ID NO: 18558 - DNA, 122 bp, Homo sapiens
gggatggggtcccattgtccacctgacgcgagatcggtcaacgcctcaggagactttggccgctccaggagtctggatggtgaaaagctcctgaagccaacagcatctccatgtggaaacgc

SEQ ID NO: 18559 - DNA, 122 bp, Homo sapiens
gcatggtttcttgcccaaaggccaggcatctgcgtggtcagatgggggagcatgagtgcccggagctgtgcggtttagggcagcctgaccttggatacctggttactgggccagtctggcgg

SEQ ID NO: 18560 - DNA, 122 bp, Homo sapiens
aggttcccgggtttcctaagactctcagctgtggccctgggctccgttctgtgccacacccgtggctcctgcgtttccccctggcgcacgctctctagagcgggggccgccgcgaccccgcc

SEQ ID NO: 18561 - DNA, 122 bp, Homo sapiens
tcccaacttttgtttggtccttgataatttgcaaagtacatttgggcacattagtctgggcgtgtatgagggtagagagtgttccagattttccagtattgggagagatgccttgtgtggga

SEQ ID NO: 18562 - DNA, 122 bp, Homo sapiens
aggtgaacagcaggtgatggttctctgtcacgcaggctggaagatgcagcttgaactcctcgtagaactcgggggacctggcagaatcgggctgggggatctgctgggggctggggtcccca

SEQ ID NO: 18563 - DNA, 122 bp, Homo sapiens
cgagtccgtgccctgcagccagtgtgtgtacagctcctgaaccccaggcgcgtcctcgggcgcctcagcccggaccatgccgtacagtctctccacgtgctggaggagctctctgctgggcc

SEQ ID NO: 18564 - DNA, 122 bp, Homo sapiens
aaatcagtgtttcactggaggaattgccaaaactcaggagtcgtgtgtgagacacagaagcggtgtgttactgtttggaaagggttgatggtttcatgtttaacagattcatgagcctgata

SEQ ID NO: 18565 - DNA, 122 bp, Homo sapiens
ccgaggccgcggtaaagtttagcttgaagaacgcggccgcgctggagcaggggtggtggacggggccaggcgcgaggtggcggcggctgcggggctgccgggctgctggagcgcggttcccg

SEQ ID NO: 18566 - DNA, 122 bp, Homo sapiens
cggaggaggcggaggacggagacggctggcgtggggaactgagactgcacccctggaggccgctctggaagcctcgagggcccagacttgaaggaaggagttcaagctgagaggggctgggg

SEQ ID NO: 18567 - DNA, 122 bp, Homo sapiens
tctgggttcttgggttcttgcagctgagcgctcagctatctgggagaagaggccccgtcccgtctcggctgcagcagatgaagactggaccatatgccgatcgcttggctggacccgtgaat

SEQ ID NO: 18568 - DNA, 122 bp, Homo sapiens
ctggagaaaattaacacagtcagctttggcataaactgtgcccttttgataatgctcaaacgagcagtattagttaatctaattctccactttaacacccaggcagcaaaagcaaatgtagt

SEQ ID NO: 18569 - DNA, 122 bp, Homo sapiens
gaggcacctacaaagccagcagactgacacccgtgtcctagccgtcggcggcctgcgaagcgatagtcaaaggaaccaggacccaggaccccggcgctctgcttacccgcagacctccggac

SEQ ID NO: 18570 - DNA, 122 bp, Homo sapiens
ggcaagctgctctgacggctcgctagcaatctgccttttccgatttcaaaatctttagaccgcccaccaaaaccctttttccggtcggagaggcccggcaggctctcaggtcatttgcggag

SEQ ID NO: 18571 - DNA, 122 bp, Homo sapiens
gctcttaggtgaagatgtggaacttggaaatttaggtggtgcacagaggcacttcctgagcgaaagggagtgttggggtggggagttcagtgggcacctcaggggacctggatgctgacggg

SEQ ID NO: 18572 - DNA, 122 bp, Homo sapiens
ggaaactgctccgcgcgcgccgcgggaggaggaaccgcccggtcctttagggtccgggcccggccgggccatggattcaatgcctgagcccgcgtcccgctgtcttctgcttcttcccttgc

SEQ ID NO: 18573 - DNA, 122 bp, Homo sapiens
actagccagactagacacagggcaaggtatgcaccgctgtcgtcatggagcaggcccttgcgtaacgggccccgctctcccacttgggctacgcacgttcctaactaacaaaacacgacgct

SEQ ID NO: 18574 - DNA, 122 bp, Homo sapiens
taacactatatcactaatgagttattcagtctgtgacacacccagaagatggagactgtgcgtataaaggcaaaggatagctcatttaacaaggatgaggggaaaaggaattgtctctgaga

SEQ ID NO: 18575 - DNA, 122 bp, Homo sapiens
ccgctcgccccactccggctccggctggacccctgcccgcccgccgtcgccgcccgcgggcgccccggaggccctcaggcccccggcctccaccacccgggcgccggccccactcacccttt

SEQ ID NO: 18576 - DNA, 122 bp, Homo sapiens
gtgtgtcctatcaggtgtacatgtgtgttgtctggcacatgtcagcatctgggcattctccgtgtgccaggagcagccgggtggcctgtgaagccttctgatgggaaatgcccagataggaa

SEQ ID NO: 18577 - DNA, 122 bp, Homo sapiens
gcgtcgcgagaatatattctcaggcaggagacaatttttacagatgaggtcagctgtccccgccggccgattcgggcctgatgggttgggggttccgatgtcctaactgctaggatcccgtt

SEQ ID NO: 18578 - DNA, 122 bp, Homo sapiens
ttttaacaggaaataaaaagtaggtcaataggattttatctactaaattgttgaaactagcgctacagaatggtttctgattaattttctgtgagttagtaaatgctttattttgggtgcaa

SEQ ID NO: 18579 - DNA, 122 bp, Homo sapiens
cactgcacaatgcagcagaggaacaagctcccatctagttggtttaatcaagaacaggctcgctaatccgtagaaacaacaatgcttgcaatacaaagtagacctcttaaaccaactcaatc

SEQ ID NO: 18580 - DNA, 122 bp, Homo sapiens
tcacctccagcctgcattgaaccagcctgagggactccaagagcctcctctctgcctgcacgccatagcagaagacactaccagatcaaccaggtagagggtaggctgctctgtgtttttat

SEQ ID NO: 18581 - DNA, 122 bp, Homo sapiens
aataaaactttatccagtcacttctgcctgcacagccttagtttccatcagaagtctacacgtgtgtatgtgtatagacacacacacacacacgtgcacacgtgcacacacatgcacgtttt

SEQ ID NO: 18582 - DNA, 122 bp, Homo sapiens
aacatggtgaaaccccgtctctactaaaatacacaaaaaaagtcaggtatggtggcgcgccggtattcccaggaactcacaagaggctaaggcaggaggatcccttgaaaccgggaggcaaa

SEQ ID NO: 18583 - DNA, 122 bp, Homo sapiens
ttctccccaatctcccctgaaaacccctaaagtcagaggtagctggtcagtagcatcttccgtattgaaggcttcacactttctctatccctacccagtgagaaaggccctcctctgcgctg

SEQ ID NO: 18584 - DNA, 122 bp, Homo sapiens
ctgggcaggttgtctgcataagaacagtacctctggtggtggaaatggagggagacgccacggcacagaggacctgtcccagacacgcgggatggcaagcatcagagctggagtgactgccg

SEQ ID NO: 18585 - DNA, 122 bp, Homo sapiens
ccgctgcgcttctcgccgcccgggacaggtgctccgccgtcagctccaggtggatctcatcgagatcttccgagacaccttccatgcgaaactgctggaaggccccctgccgcacctcgcac

SEQ ID NO: 18586 - DNA, 122 bp, Homo sapiens
ggtggaggcaaggagctgaaattctgcgtagccggagtgagaccgctctgcaaaccactgcgtgctttgcagagtgattatcagcacagttccctgccctggataaggaacagctacagtcg

SEQ ID NO: 18587 - DNA, 122 bp, Homo sapiens
gggccagtcatcatgggccggtcatcacgagccagttatcaccagccagttatcacaggccggtcatcacgggcggtcgtcactctcaaagccgctctccggggccttttcctccctgatcg

SEQ ID NO: 18588 - DNA, 122 bp, Homo sapiens
tgaaagcctcagaaacaggcagcctggggcaccccagcccagtctttgctcagtgacactcgacccctaaaacccccatttggctggatgcagaaagacaggaccctgtccggggggtgcag

SEQ ID NO: 18589 - DNA, 122 bp, Homo sapiens
ttattttccagactttctttaatgaagaaatattaactaagaagaaacacggtcagttgacgaacatgaaagacaatgaacactgagttagaaatggtgcaataaacataaaaccacatatt

SEQ ID NO: 18590 - DNA, 122 bp, Homo sapiens
ttggctctggcggcctggagtcctcgcgcctctgagagctgcattcgctcgtctgggctgcgtcctgctgtttccgagaagctactgttggcagttgacttgctttgggtcgtgttctccac

SEQ ID NO: 18591 - DNA, 122 bp, Homo sapiens
agggagcgacctcaacagctagggtgctgtttgggcggggcctgggcggggccagacgcgcgcgagatttgaatttcctctgcgtgcggtcagtgcccgcgcagcgttgagttgcacagcgg

SEQ ID NO: 18592 - DNA, 122 bp, Homo sapiens
cacacgctgtgcacctttctcctcaccagggacgtcgccaagaatgccctgctgcgctggcgcgtgttcatctactggacgctcctgggactgtttgacgcactggtgttcttctttggtgc

SEQ ID NO: 18593 - DNA, 122 bp, Homo sapiens
tattgcagagggataccaaataagtccacctgaagccagagctgaaaccctgtggaggtccgtttaccccttcagaagtagtgtaccaccatccatctaccactggaatccaatttcagttt

SEQ ID NO: 18594 - DNA, 122 bp, Homo sapiens
tccactgcacagtcatgcgacattgcagctgtgccatggtgagggcaagactgtgacacacggcggccgcacgcggtgtccactgcacagtcacacgacattgcagcactgccgtggcaatg

SEQ ID NO: 18595 - DNA, 122 bp, Homo sapiens
aaatacagaactagcttgagtttggaggctattgttcactctgacctccagctccttttccgttataattacccaatcaatactccctcatttctgttgttctctttgtttgcccccctctt

SEQ ID NO: 18596 - DNA, 122 bp, Homo sapiens
tctgaaaatacctcctggtctctgtgagcccctttggagccaggcctgcctgaggctgtgcgaggatgcccagactcagggcttgtaatcagcgtgacaggctggggtggagggtggacccc

SEQ ID NO: 18597 - DNA, 122 bp, Homo sapiens
ctttttatatgctagctgttcccaaatccatctacagttctcactaggggcaaaagagtccgacagcgaagaggaaaccaagattcaaagaaatgttgaagactccgaacaataagaaattg

SEQ ID NO: 18598 - DNA, 122 bp, Homo sapiens
acaaaccgcgatccttggaaaccatcctccaaagcagtgcttggaggcctctaaggcccccggaccaactcccgctggaagaagcctgcagggactcgggaatcacgggaacctttcccgtc

SEQ ID NO: 18599 - DNA, 122 bp, Homo sapiens
ccagtaacaaaaatggcgtcattccgccagcgccaggacctctgtcgctggccgtggtctcgcactgcttctggaggctcccattccagccagaggagaggtgcgtttgggggcccggggga

SEQ ID NO: 18600 - DNA, 122 bp, Homo sapiens
ctcacgcagccggaaccacctgtggcgaaggctaaaatgactccatcttggatgctgacccgccatgtggacttccgatgaaccctagttctgggtccttaggtcaaaacaaccttaatgtt

SEQ ID NO: 18601 - DNA, 122 bp, Homo sapiens
ccagtccacctcgaggcagggtcaggcgccagggagtttggagacccggcagagtcaccccgcaaccgtcccgttgccttgggtcgggattcctttgctttgcagtctacagtagcgctccc

SEQ ID NO: 18602 - DNA, 122 bp, Homo sapiens
cccgggggcctggcccagggctgctctggggctgtagagaacagcagtaccaattggccccgagtcggttgcagcctttgccacaaatctggaagaagccgggaatgtcactccttgtctgg

SEQ ID NO: 18603 - DNA, 122 bp, Homo sapiens
catctgttatgatgcaattaagcagtgactcagtggcgtgaaggctcagtttcgatgtatcgggaactcctttgaatctgtccacaaacttctcaaccaaaaggagaggagaaatgtgtaca

SEQ ID NO: 18604 - DNA, 122 bp, Homo sapiens
ggagcggaccctctggatcccccgaccctggctgaaaggagacaggcttcaccacgtgaccgcccccaactccagcccccgcagtctgcgcgccaccggctccacgggctgacccccgctct

SEQ ID NO: 18605 - DNA, 122 bp, Homo sapiens
tcccttgtacagagggaggagggctctgaatggaaaaccccacatgtggcagaaagcaatcggttctattgagaggctggaggaggcagtgtctgatttgtttgggcccaggggattggttt

SEQ ID NO: 18606 - DNA, 122 bp, Homo sapiens
gctgcctgctgctaagccgcgcacttgcgcgccgcggggggtcggagggcgcaccgatggcggggacacggcggcgctcttcagttgcgcaattatgctacaagttttaaatgtcctaaaaa

SEQ ID NO: 18607 - DNA, 122 bp, Homo sapiens
cattgacacattatacatctccaccattgtgcccaagatgctggtagattatctcatgggcgaggggaccatctctttcatcgcctgcactgctcagtgctttctctacatgggctttatgg

SEQ ID NO: 18608 - DNA, 122 bp, Homo sapiens
ctgctggtgacccatcttgctctcagcagtgcaacgaggtaaaaggaagaagctggcccacgcatgcgctcttcaaatttttgagacagtttacccagaatgcagtgctcaaaggaaacgcg

SEQ ID NO: 18609 - DNA, 122 bp, Homo sapiens
tactcacttgaagttgcacgtctaggaatctagatgatggtcccatgtctgctgtgcccccgccctacgctattgctaggacagccaacctctactcaggggctgcagccggtcagctggca

SEQ ID NO: 18610 - DNA, 122 bp, Homo sapiens
gtcaatgagaccaagaacccaccaattccagacacattttggcaacccagatgggacaatcgcctatcgctgagtgctgagaccatcacccatagctgagtggcgagacaatcacctatcgc

SEQ ID NO: 18611 - DNA, 122 bp, Homo sapiens
cggcgggcagcggcaggcgggtaaggtggtcggagctgcgagcgccgaatgctgcgcggccgcgcagccgccggggacggggaagcagagcgccccgcagagccgggcaccggttccgcaga

SEQ ID NO: 18612 - DNA, 122 bp, Homo sapiens
caggtcccgagccctgccccgcaggaaggcagctaaggcccggtgagaaatcgagcgcagcgccaggtgggctggcactgctgggggaccaagtacaccctccgcagccgctggccagactg

SEQ ID NO: 18613 - DNA, 122 bp, Homo sapiens
gtcttgctcaaggttcttttggttgcagccgacataaacccacggcggcctccacgggcacgcaagctaccagccgcacaggctcgcattcagaatggcttcatgctttgtttcgggttctg

SEQ ID NO: 18614 - DNA, 122 bp, Homo sapiens
ctggtttctccccgtttccggtcaatatatttaaacttcttaacaaccacggcttcgagacgatccagggtttcatctattaaatcctccgtgggcctgagacacctgagtgctcattactc

SEQ ID NO: 18615 - DNA, 122 bp, Homo sapiens
tccagctggagttcaacaatggtacctacaacatcaaagactccacaggcaaatactggacggtgggcagtgactccgcggtcaccagcagcggcgacactcctgtggacttcttcttcgag

SEQ ID NO: 18616 - DNA, 122 bp, Homo sapiens
gccaccccctgctccacggtgcccagtcccatcgaccacccaagcgctgaggagtgcgggcgcacggtgcaggactggcaggcagctccacctgaagcccctgtgtgggatccactgggtga

SEQ ID NO: 18617 - DNA, 122 bp, Homo sapiens
ctgcgccgggttccgtgtgtctatgtcaatgtgtctgtccttcactcctccattgtctgccgccactgctgctgctgctgctgctgccgctgctgctgcacgaatcgccgcagcccccagcc

SEQ ID NO: 18618 - DNA, 122 bp, Homo sapiens
accagcaatcaatgccccgtgctaccaagtctggtccattcgtaattgcaacggctgtctcggacgtttttcctgttcccttagcggtcggtctctttaatattttgtgaccaggaccatcc

SEQ ID NO: 18619 - DNA, 122 bp, Homo sapiens
tatgattaaggacagaaaagatcggctgcctctggagagtgcagtggttagacatagtgacgcacctgggctcccgaatggaagggaactgacaccggcatctccaacttgtacaaattctg

SEQ ID NO: 18620 - DNA, 122 bp, Homo sapiens
ccaaggcctcaactccgcccacagctctgcgaacagacgcgagcgaccctccaaaagtcccgtccacctccagcctcagccaaccacaaggagagtcggcctgggaacccgcccctccccgc

SEQ ID NO: 18621 - DNA, 122 bp, Homo sapiens
gcggggggctggtgcggaatcggaataacaagctccgtgggggtgcgcaagaagcatcgccgtgtcttcggacccagactatgaactgatctatgacgctgaacttgagtttgagtttgcct

SEQ ID NO: 18622 - DNA, 122 bp, Homo sapiens
ttgcagaagtctcactcaaaagagttcaaaatgagagttccaaacctaataaagataacacgtttgccctctggtggacattcattttgagttagaattttctctgctaagactagagattt

SEQ ID NO: 18623 - DNA, 122 bp, Homo sapiens
tccagtagcctgctgcttgaacaagctagataaatatctaataattttgaccatgtactgcgtgttaagtccagtttaagtgttttccaaagacaaagttttcatatactttctgtaaagcc

SEQ ID NO: 18624 - DNA, 122 bp, Homo sapiens
gacagggcccagccctcattctgcaaggattttaaatcaatgttatccagctttccacctcggcgccttcacagatagctccttgctggaaactttacaccaagaagtataaactctgacct

SEQ ID NO: 18625 - DNA, 122 bp, Homo sapiens
cgtttggaccaaccccgacctccctttctcagggtgtctgctgagagggccgcaaccacacgtccttctatccgttcccgatgtctgtgcatttcctgtgacccaggagggtctttctcaag

SEQ ID NO: 18626 - DNA, 122 bp, Homo sapiens
tctgagccaaccttggccgacatgcagcatccacccccagccggggagaggctccgcggtcgctcaggggcatgaccctatgccagtcctggagccacccagagaggacatctgaggactct

SEQ ID NO: 18627 - DNA, 122 bp, Homo sapiens
cctatctggatactccagcgcggaagaagccaacaggccggggatagcgagtagcgtccacgtgatgcctcgcaacccgggagggaggggattggccagcggctggtccaggtgtcatgtga

SEQ ID NO: 18628 - DNA, 122 bp, Homo sapiens
tctttggagcgctcctcccgacggccgctttcggaggcgccgtctgagcgcggggtcccgcgccgcaagttctcctggggcgaccggaggctgctcccccgaccccctggtgtccccggagt

SEQ ID NO: 18629 - DNA, 122 bp, Homo sapiens
aactaataatagcaatagcatttatgtaatactttgtagacattttcagatacattatctcgtttagtttccaaagtaattgttgggaaaatcagaatacatgcagcattattttactgata

SEQ ID NO: 18630 - DNA, 122 bp, Homo sapiens
gacagctgaaacaaggcagggcatcatcacctgttcaactttagctgagaacatggactgcgagcgactcaatttttttcccactgctttgcatttgccacaaaagcactgtgagtactgat

SEQ ID NO: 18631 - DNA, 122 bp, Homo sapiens
ggagaggacgcttgtgcccaggactccgctgccagaagaatctagacaatccaagcaaaacgggtacctttgtaatagctatggagaaagcacttaataaaggtcatcttttaaattattgg

SEQ ID NO: 18632 - DNA, 122 bp, Homo sapiens
cctacccaccttgtacatgaaaatgaagcatgagtcaaaggctcactgccatgtacacagcgggcattcagtgagtgtttgggaaatttaagtggtggttctggaaccagatgggcatgagc

SEQ ID NO: 18633 - DNA, 122 bp, Homo sapiens
aggatcccggtctacagacccgcttgctttcctcctagggcgggtcagagcagacgtcgtcggggtttgggaaggaagcatctccagacctcttgaattgactgaagccaatagaggcttgc

SEQ ID NO: 18634 - DNA, 122 bp, Homo sapiens
cgcctaggaccgggagatgctggaaatgcaaccgcctgttccccgaggagccgctgcccccgggaccccctggcactgtgcgcaccctggtcagcagcccccggagaagacggcgcccccaa

SEQ ID NO: 18635 - DNA, 122 bp, Homo sapiens
aggtaaaatggcaatcatgtccacttcataggagtgctgtaagggtgaaatgaggtcatgcgtggcaagaactcagcatgagcctggctcacagaacactctcagcagcagtcagctgccac

SEQ ID NO: 18636 - DNA, 122 bp, Homo sapiens
cgcttccccgtcttgtacacccctaactcctgaggctcctccgaatcacgcgagtggaagcggagaagctcaagtggccgccatgtcagaggcttatttccgagtggagtcgggtgcgctgg

SEQ ID NO: 18637 - DNA, 122 bp, Homo sapiens
ttttttttagccctaatgtgtttgcttcctaatgacccacagccttaaactcacactgagcgggacagcataaactttctttttttatgctccaggccccaacagggcaaggcacattctgg

SEQ ID NO: 18638 - DNA, 122 bp, Homo sapiens
caacaaccagagggaggcgagctgtggggtcacaagctccagcctccagcgtactgccagcgatttcccattcctggtcctccaagccaggcactgagcagctcaacagtccagccacgctg

SEQ ID NO: 18639 - DNA, 122 bp, Homo sapiens
gcgcgtcgagcggtgctgactctttcctttgttctgtttctgcctctctagagctgacatcgcgctgatcggattggccgtcatgggccagaacttaattctgaacatgaatgaccacggct

SEQ ID NO: 18640 - DNA, 122 bp, Homo sapiens
cccagcgtcccagatacccctcccttttctcgcttgttccaacatcattctccccccagtcgggccatgggaagaatgccgtgtcctctgaactggggccaagagtgacaggtggcggcagt

SEQ ID NO: 18641 - DNA, 122 bp, Homo sapiens
gacatgatgaaggggaagtcaaattcagctcccaagtttggggaatgagctgcggttgcacgtaaatcaattttctgctccactaagtttattcatttaaatgcccgaacttaaattaactg

SEQ ID NO: 18642 - DNA, 122 bp, Homo sapiens
ctcgggctgctgatcattccattccacaccagaccttctgaggtgaatgagctaaagcagcggcacaggtctgagccataaacaaggcagcacccaggagcaggccattgttgctttgtctg

SEQ ID NO: 18643 - DNA, 122 bp, Homo sapiens
tgctcgtccgggaggctccggccgaacaggagcccatggagtgggtgggaggctcaggcacggcgggctgcaggtcctgagccctgccccgcgggaaggcagctaaggcccagcgagaaatc

SEQ ID NO: 18644 - DNA, 122 bp, Homo sapiens
ccctggtgtggtgcccgctgatggcacgcaggccagtcggcggcacttcgggggcctgggcgtcccttcatacgctaacggatgttgtgaagacaatgatttcaaatcactgatacctttcc

SEQ ID NO: 18645 - DNA, 122 bp, Homo sapiens
tcacctcgccgcctgccgcccccggcctacctcgcctcaccccgccccgctgcctgcccgcgccccaccctgcagcaggacccgagccccctagcctgagtttctgacccgagtaccacgca

SEQ ID NO: 18646 - DNA, 122 bp, Homo sapiens
cagccctgccccaggaactgtgctgggggcccctggggatggggacgcaagctcagagggcggagacctcgggcgccccggcttcgtccgcaaggcgagacgggccgcaggggactgctagg

SEQ ID NO: 18647 - DNA, 122 bp, Homo sapiens
atgtacaaatgaaatagctaattcctactatttcagaagagggtattttctttctggtaacgcttgtaagttggcatgctcactgtaggtgaggtaaggagcaatgtcaaatgatgtcattc

SEQ ID NO: 18648 - DNA, 122 bp, Homo sapiens
gcatagagggaagcattgcttgctgcttccacaggaactaatttagtcagaaaccctaaccgcggcaggcagtacatgggtgcatttcatattttgctttccagatctttcctgcacccgga

SEQ ID NO: 18649 - DNA, 122 bp, Homo sapiens
ccaaagtgtcacaatatggatgtgaagggtgtgggtccatttccctaagaataccctctccgttttggagaatttgtaggaggattttaggtaacgtgagctagcagaaaccctcatttcta

SEQ ID NO: 18650 - DNA, 122 bp, Homo sapiens
cgaggcttacacttgcaagcacccaccccatgccttgcaactggcaggggctgggagcctcgagagtcagtctcagccctggaggggaccagatacagtgataaataattacccgatgcaaa

SEQ ID NO: 18651 - DNA, 122 bp, Homo sapiens
agcctccactgctcaggtgttgagtagacacagcagagcactgctgtgctgcaggatgggcgcaaccaggcagccaggctccgcccctttctgtggcactccggacaagttttcgcaccctc

SEQ ID NO: 18652 - DNA, 122 bp, Homo sapiens
atgatcaagcccatcaagcaagtggggttctaacagtacaggaaggctgcacagggttctcgagggagggtgtggctgtggagcccagagttcagcatgatgttccctggcaacttctgccg

SEQ ID NO: 18653 - DNA, 122 bp, Homo sapiens
ccctgccggttcccgtgaccccggaaatcccgctcctgccgcgaggcgccctccgcttcgcgctccctcgtgtcacgagggagccagggtgggcggtctcctattgtacttggcttttgaat

SEQ ID NO: 18654 - DNA, 122 bp, Homo sapiens
tgtatcccccacgatgccccccgggccacgggcccctagttaacaggtttccctttcgcccgctgcctggaagtatcgccacctcgccccgcccaaccccccaccagacagctctgcagcca

SEQ ID NO: 18655 - DNA, 122 bp, Homo sapiens
ggctccctaagctccaccactcaccaaggctcttgtccaccagtggcagcgtgctgtcatcgaagcccccaggactcagtgctcccttaggccccttggcagtagcagcagctgactgagac

SEQ ID NO: 18656 - DNA, 122 bp, Homo sapiens
tggcccccttcctatccattttagattccctttaccttgacctcccacctctgctggtctcggtgacttactggatgacatgtcccacactctctttcaggagtggtctgagcccctggtta

SEQ ID NO: 18657 - DNA, 122 bp, Homo sapiens
ggggcgcggggtgcagcggagcctccagcacccggcggccactctgtccccgcggccgcgcgcgccgcttaaagaggccgcccccgccccgcccccgccccgcccccgcacccaggatgccc

SEQ ID NO: 18658 - DNA, 122 bp, Homo sapiens
acctgaccaagaatctgagaaccctgacgtgagttctcgaggtaggatccgggtttctaccgagaaggctagggatcggcgcggggccgcgcgatggggggaaggtgccaagggctctaact

SEQ ID NO: 18659 - DNA, 122 bp, Homo sapiens
tgttcagatacaaagcctagaatcttaaccactatgcttatgttatcaaggttaaaacaccgtagtttactgcaaaaaatttttcactgctttaaattattcattaactcaaaggtcaaccg

SEQ ID NO: 18660 - DNA, 122 bp, Homo sapiens
atttacgtttattcacgggcatccattgtttcagactcatgacaaccgtgtaaagtagcacggagtaggtaagtgatttgcccaagggcacacagcaagggagaggttgtaatctttaatga

SEQ ID NO: 18661 - DNA, 122 bp, Homo sapiens
tgtgggaactcctgggggaggtggaggtggagccgtaccaggtatttcagccatgtcccgcggagatctgagccagagagccaaggatttgagtaaacggagcttctcaagtcagcggccag

SEQ ID NO: 18662 - DNA, 122 bp, Homo sapiens
tggcagagatttctagtccagaagccactagtgcctctcttccagggactatgcctacatcggaatgtattaccggtgttccttgggtttgaaattaattacatcctgtttatgaagaactg

SEQ ID NO: 18663 - DNA, 122 bp, Homo sapiens
cagagacccagttactcaggccgcgctgcggtgtgtacagatttccgcggcgccggcagccgctctagccaccctgggcgtcgccaccccaggcgttgccaccccaggcacgggctgagaag

SEQ ID NO: 18664 - DNA, 122 bp, Homo sapiens
aaatgaaagggctaccggcagacacctttgctccccaaatcaggtagaagagacctcctacgactattggggtgcttccagcattgaggactcctgcttggcaaggtagagtaaaaaatgtg

SEQ ID NO: 18665 - DNA, 122 bp, Homo sapiens
gatttccacccccccagactgagctacttctccccctccccgtaccgcggggcctccgaacgctccctgcgcactccccaagcccagacctgacatctggctgggcctccgcagctcccgct

SEQ ID NO: 18666 - DNA, 122 bp, Homo sapiens
gggtctcctcagacgcggaagaccttgcaactttagtaacctacgggcccgcctggggtgcggtcagtcttgtttgtgctgctctccggtcaaagttcatggcgcttctccccacgccttta

SEQ ID NO: 18667 - DNA, 122 bp, Homo sapiens
gcgacggatttggggagagaatttgaagaagagagagcgtgcatcgctgctgctgggaagcggaattcggcagcatttttggaaggttatctaagaatgtcagttcaaagaaacaccgtcta

SEQ ID NO: 18668 - DNA, 122 bp, Homo sapiens
cccggggctggggagcggaagccatcagtgggctcggaggacactgtcccagccaggacacggccatcggtcactaatctgcagcactggaatgtccgcgggccaatcagcggggtctctgg

SEQ ID NO: 18669 - DNA, 122 bp, Homo sapiens
gtcacagcacctcgtgcgtcacttggcggcgccggacgttgggctgcgcaggatttgagacgctcccctgaccaccacttgctctgcgctgaggtgctgggacagccatggtttcagacggt

SEQ ID NO: 18670 - DNA, 122 bp, Homo sapiens
ctggggcgcagagggactttaaacttggccccaagaagacaggctccagatgttttgcctcggaggaatatggagagcaggctttcctgggggtggggaggtggggtcctgggcatcttcct

SEQ ID NO: 18671 - DNA, 122 bp, Homo sapiens
cctgcattcctgcagccccgaagcccccgcggcgggaaaggaggcgggaggagggcccgccgcttactggtttgagttatcctgtagatggagaagcaagagaagctgaacaacgcgacggc

SEQ ID NO: 18672 - DNA, 122 bp, Homo sapiens
ctgcgggggcagcctggacagagctggctggaaccctggcctctgtcaggcagcagggagcgccttcagcagtttctcattgccgggcgctgggcctagggatcagacggtccggcctcaga

SEQ ID NO: 18673 - DNA, 122 bp, Homo sapiens
aactggcgttgtttttatgctgatgtattatgccttctttcatcccaatggacccagattcgggcagtcaccaagttgtgcttgtgaggacccagccgctgccttcactttgcccccagacg

SEQ ID NO: 18674 - DNA, 122 bp, Homo sapiens
tatagccagatgaatgaggactcagaaagataatgtattactcactttccagatttagcacgttcctagaattttaaactcatttttatggactgttgcctaactgaggggagacttagaca

SEQ ID NO: 18675 - DNA, 122 bp, Homo sapiens
gcttttctgggtactccagggcacattgtggactggtgaggttttggagaagcagacagtcgagcaagggaagagcactctgagaaggcagaaaaatcatttccacaggtctgcaggggagc

SEQ ID NO: 18676 - DNA, 122 bp, Homo sapiens
gctgggagccctgcccccggcctgcggcggccctagacgctgcaccgcgtcgccccacggcgcccgaagagcccccagaaacacgatggtttctgctcgaggatcacattctatccctccag

SEQ ID NO: 18677 - DNA, 122 bp, Homo sapiens
tatgctcagagaactaaagtaaatcttgattaaaggaagcaggacgacaatgtcacatcacgtagagactgttgatagaatgtataaaaaataaccagtggaaattcaggagttggaaggcg

SEQ ID NO: 18678 - DNA, 122 bp, Homo sapiens
gctgcctcactcttggtgagctcagcggtaatttctgccgtcaggcacagcagacgctttcgggcgctgctctcactgacccttcagcacccttagtgctgctggtcccgtagcttctggga

SEQ ID NO: 18679 - DNA, 122 bp, Homo sapiens
ggcttcgaagggaggcgacggccgagacacacggtccggcgcgagccaggcgccccgcgacgtgcaattttattttgcaaaaggtgcacccaacgccagtcccggtagagttgaacccacca

SEQ ID NO: 18680 - DNA, 122 bp, Homo sapiens
tgttgggaaaagccagaatgttcttcagaacaaaaagacattcctggcccccatcaccaccgccccatccatcttcctttcttttgtttctccttggtcttccttccctgttctgagtaggc

SEQ ID NO: 18681 - DNA, 122 bp, Homo sapiens
tggacaaccggccaattaggtaggaataatccaggccgctgcagaacacgctccccactgcgctgaggagcagcagtttgctgtcgtctgtggctgcgttgcagagcgctcgccggacttct

SEQ ID NO: 18682 - DNA, 122 bp, Homo sapiens
gtggttggaggtatttcgcttagaggataccattgtgcataaagaaactggcccgcttggcgtcttctttcagcccttgtatttattaatggaatgtcgaaagagaaaaggagaaccgtgtt

SEQ ID NO: 18683 - DNA, 122 bp, Homo sapiens
gatgccaggcacgaggactccccctgccccacgcagaggcatggaggtggggaccctgagcgccagcagccagcaggcttaggcgtctggccgccctgggaacatttacctgtgcccgcctg

SEQ ID NO: 18684 - DNA, 122 bp, Homo sapiens
aaagccagttgttcacccagaacatctgactgccataaaaattatggtgacgagaaagaacgtttgctcaaatgccggggtcgggttgagggctggagaaaggtcccaccccgcagcatcta

SEQ ID NO: 18685 - DNA, 122 bp, Homo sapiens
cggggatcaggggtcgggggtcgtgaaagagtgcggggactatgctccgaaatccccccgcgtcaccagtggcgggacatctccacgctccttccgatcttcatccagggattctcccatct

SEQ ID NO: 18686 - DNA, 122 bp, Homo sapiens
tgcccctcagttcccatagaggcaagtctgggtcctgacttggccaatggccctggaggccgctgagctcctcaggcccatagcgcagaaagtgggcgataggtcattccaggacaaggggg

SEQ ID NO: 18687 - DNA, 122 bp, Homo sapiens
tgggtgggtcaagaaagcgatcgcttctgcccgggagcagttgattgtcaggaaggaattcgtgataaaaccgccatcaccacaggcctagatggtggccggtgtttcctggttgcttactg

SEQ ID NO: 18688 - DNA, 122 bp, Homo sapiens
cttacctagctcaccagaggaacaagtagggtagagacagaaacagctttcagggtgctgcgagttgggcagagtggcctttttatagagggaataatggtccctcttagggaggagttgct

SEQ ID NO: 18689 - DNA, 122 bp, Homo sapiens
taaagatacatttctaacaacaggctatgagataattctttcatcacacttttgcttacacgcataaatcttttaaatgttttccacgtgatagcagaaaaatgggatccactgttggtttc

SEQ ID NO: 18690 - DNA, 122 bp, Homo sapiens
aaacaatactttaccgtgaacacggagaatgggaacatacttgtgagtgacagaatagatcgagagtcactgtcttcaaaatcctctgtgtcatacccttagagattgtagcagagaatcct

SEQ ID NO: 18691 - DNA, 122 bp, Homo sapiens
acacgtccgattctccctgtgcattcctttgcgttaggaaccccctaccgtccccgggagcgaacctggttttcaactccaggagtggccaggggtgaagacgagaatgcgctgaattaaaa

SEQ ID NO: 18692 - DNA, 122 bp, Homo sapiens
ggaacaacaagggcatgaaccccaagaggcaaggatgacaggagccatcttgaaggctggcgaccacagatccacacctaactccaaaccaccaaattactcggagtgtgtgtcgggtaaga

SEQ ID NO: 18693 - DNA, 122 bp, Homo sapiens
cagcttccgaaggggaacggcggggacagatgaggggggcgcgattgcaaccagagcgcccgcgagctcccggatttcttctctttcctcgctatttcccgcacacacagccctgcagccct

SEQ ID NO: 18694 - DNA, 122 bp, Homo sapiens
gaacaggcgccttcaaaagcccacttggcgatgggttacagtaagaggtacctccaggcccgggcatccgctggaaacaggggtgggtagggtcgtgtcatctaaaggcgcagcttcaacca

SEQ ID NO: 18695 - DNA, 122 bp, Homo sapiens
gcctctagctcaaaactgttctgtcccacattccatctttctgttcctctcattcttctgcgaaccccatgttccaactttctaaatcaatgctcaccatacacacacacacacacacacac

SEQ ID NO: 18696 - DNA, 122 bp, Homo sapiens
tggtccacaatgggaagatggtcagctctcttctttttccagaggcggctcagtggtgatcgtgtcttccatagcagccttcagtccatctcctgtaagaacccttttgtctacctcttcca

SEQ ID NO: 18697 - DNA, 122 bp, Homo sapiens
ttggtgcacttgatgttctttaaggggtttccacctgagaagcccccaggcaggggtccccggctgccccccgcccccaggctgccccccgccccccgggcagccatggccaccgctgctgc

SEQ ID NO: 18698 - DNA, 122 bp, Homo sapiens
gtgcaatcaggacccctcgggccttgttcacctcacacatcacgaagttgattttggcaacggaaggatgtgcatcctcggaaagcggcagggaaggctgctttttcatgcagtcttcgatt

SEQ ID NO: 18699 - DNA, 122 bp, Homo sapiens
gaatctgtggccagtgtggagcaagctggggccaactgggcctgggaagggcaagtcaaacgggcaacctcccacagttgatagaaagttcagcagtgaagtatggtttggtctcaaaacac

SEQ ID NO: 18700 - DNA, 122 bp, Homo sapiens
cctgagactggtcttcgggcagccgagggcgcgggatgactcgggcaggcgtgtggcctccgactgaccagggttgggcccgggatcagagctttgcttggaagttctctgggtggcagaga

SEQ ID NO: 18701 - DNA, 122 bp, Homo sapiens
tgggccatcagcacacgttgcatatccggggtcttctccaggcacattgggggtcgatcccgataaaaagatctagcagaggcccctgagcgctcacacatgaaaggcaggggactttaaga

SEQ ID NO: 18702 - DNA, 122 bp, Homo sapiens
cccacctgtgtgcttttcctccagacggttactcatcggaggacatcgtctactactggtcggagagccaggagcacatccacgggctggacaagctgcagctggcgcagttcaccatcacc

SEQ ID NO: 18703 - DNA, 122 bp, Homo sapiens
agcaaatggagagttgcagcaacctgtccctattaggttttgcctccatgaccatgaggccgttgtttacacatcagcgtctaagaatattcccacaacagtatcactgtcttccttttcat

SEQ ID NO: 18704 - DNA, 122 bp, Homo sapiens
ggcaggcgaggtcacccactcgaagtcaccacgtttgagtagccctggttggtggggcagcgcccccttggccaacgccccgccctcctctccatcttccgacgctgggctctcgcccttcg

SEQ ID NO: 18705 - DNA, 122 bp, Homo sapiens
ctcgcggtgagtgttaccgctcttaaggtggcgtgtttggagtttgttccttctgatgttcggatgtgttcggagttttttccttctggtgttcccgcccggtttgtggtctctctggctca

SEQ ID NO: 18706 - DNA, 122 bp, Homo sapiens
gcccctcgccgctgctgcctgggctgggacttcagcacgcagcaggtacagtcgcctggccgcagggccacggggccgcctcctccgcttcggtgggggtagggggcgggctgtcacccgga

SEQ ID NO: 18707 - DNA, 122 bp, Homo sapiens
cagcagcggccaaacgggaaaagagtcttcgtggaagggtggcctctggcggcgggggggcggccagaacaggtgtggggctcacctgggtgggcattgacctcccgcagggcaggaggcgc

SEQ ID NO: 18708 - DNA, 122 bp, Homo sapiens
ggccaccgtcggagcctgagcctacctttgggctgatccaagaatgtgagggcgtctccacgaacaccaatcaaagaccagagcccggcttcagtagcgacgattgggcagtctggccacgt

SEQ ID NO: 18709 - DNA, 122 bp, Homo sapiens
cagcgtctgtccgggagcgccgtgctgggtcgctccccagtcatctctccccgcagctgccgcgaccctggcagctagactccacagagtcgggagtcagctgacccggaccctttaaagcg

SEQ ID NO: 18710 - DNA, 122 bp, Homo sapiens
tcttggtactgccaaagccaattgtctcaaggctctgaacttcaactgcacacttcccctcgccaaattttgttaagtcctgggtattaaggcatctaccttgtagttgggcaatagttctc

SEQ ID NO: 18711 - DNA, 122 bp, Homo sapiens
ataggtgtttacagcaggtgcattttgggtcttttgaggtcagggactagagctctggaccgtgtgggattttctctccaaaatcacttgtcagaactttccagaaggatcctgttcttttt

SEQ ID NO: 18712 - DNA, 122 bp, Homo sapiens
ggttttctgtttatttctgtgtaattccacacaacaatgttaagtttaaaaatcaggcaacgtatcatttgagtatcctagttttatgcaaacatggatggtatgatgttaaaggaatgtag

SEQ ID NO: 18713 - DNA, 122 bp, Homo sapiens
aattcccagctccatggttgctttagaaatggtttaccctcatcacgaaatttaaggtgacgttaacaactcagtaatcaagagaaatacctttttttttttaaattgagacaaggtctcac

SEQ ID NO: 18714 - DNA, 122 bp, Homo sapiens
gggcccggaagtggtaggagcctcggtaagagttggtgttcatccgcttgcggaggaaagcgaggtacttcaacttgtttctgtagaaattgccagaaatgttgatgccttcgcagcgtacg

SEQ ID NO: 18715 - DNA, 122 bp, Homo sapiens
tccaacccctcccgtgataacacttggcattgtccctacccaagggaataaactgaaacgcgggaaaggtggtggaaacagaaacaatcaaagtggaaaaggcattagtgaacaagctctga

SEQ ID NO: 18716 - DNA, 122 bp, Homo sapiens
ggaaggggcggtcgatgagagggcggccttagcattaggagtgcgtcggctgcaccctggcggatggaccttgggaaggaggggaggggaccatcggggtcggcggggagctacgggtatgc

SEQ ID NO: 18717 - DNA, 122 bp, Homo sapiens
ggctggagtccgaggcagaaaaggctgtggagggcactggggtcaccacagactggaaaccggttgggcgcaggccccaaaccttgaggaatcgtttgggctgggaccagaacagggggctc

SEQ ID NO: 18718 - DNA, 122 bp, Homo sapiens
accccagggaggggagcggcaatggcggaacgcccactggaatttgggccagagctggagcggcccgtctgggctcgaccccacgacgcgactccagacgggccaacggggcggtccccacc

SEQ ID NO: 18719 - DNA, 122 bp, Homo sapiens
acgggagccgcgtctgcggcagaagacccaggtaaagacattggtctgggtcgcaaaatacggcgagaactccttggaggacaggctggacccagaggtcgcctccagctcccagaatcaga

SEQ ID NO: 18720 - DNA, 122 bp, Homo sapiens
tggcgaagcatactcattcagcacgcgcgcgaggggctgcgggggtacagagacgtgcagcgtgacacagtccccaccctcaggagcgcgaggcgcaggaaggtgctggacacacgccaggc

SEQ ID NO: 18721 - DNA, 122 bp, Homo sapiens
ggctgcgcctgctgcagtctgcgtttctgataaattgaaaccagttttaattcttctgcccgggagacctaaccgccgaatgcgttcggaggtatgttttttaatcgccaggaaagggggag

SEQ ID NO: 18722 - DNA, 122 bp, Homo sapiens
cctgctcgatcatccagactgttctctttcccgtccacagtgttcaacgtcggggagtatcgccgggaggctgtgaagcagtacagctcctacaacttcttccgccccgacaatgaggaagc

SEQ ID NO: 18723 - DNA, 122 bp, Homo sapiens
attgacagccatcatataaaactgtcagcagaataaattatatgaaaaaaaaatacagctcggcagcatcactttctgagacctaagcttatacagttatttttgtgaccatgctgagaaca

SEQ ID NO: 18724 - DNA, 122 bp, Homo sapiens
agagaaccccagtttcctaatcaccatcgatggcaatgagactgagtttggaaagaaccacgtgtgcaaaggcagacgcaacccgtgcggcgctctcctggcctctgcgcccagcccgccag

SEQ ID NO: 18725 - DNA, 122 bp, Homo sapiens
cctgctgcccttcccgccacgcccacccgccttctgcctcggagtccggagcggagaatccgcagccaaacctagcgccagacccgggcccccctcgcacttatcctgcaccgccccagtta

SEQ ID NO: 18726 - DNA, 122 bp, Homo sapiens
ctctgagctgagccttgagttctgagttcatctccagctccagaagagcctgggagatgccggactcgaactcctccggcttctcgccgttgggtttcacgatcttggcgctcgaactgaac

SEQ ID NO: 18727 - DNA, 122 bp, Homo sapiens
agccagatgttccacagacctccggagcagcggactagggcccgcccggccagccggcaccgcagaggccactgtaattccaattaaccagcttcagctgagcaaacagcgggcagtggtgg

SEQ ID NO: 18728 - DNA, 122 bp, Homo sapiens
tggacccgagggtggcggtgactaggactctcaagccctacaaagctgctcccaggaacccgaggcctcaaggctggatctgaaagaatcggaatgaagactcggaatgaagagtcccaggg

SEQ ID NO: 18729 - DNA, 122 bp, Homo sapiens
cccagccagtggctggccaggctggggtggggctgagtgaagagtgaggctgtggcagggcgcagctgcaagcccaagcccagtactccccctgtgcccgccgctggggtgcttgaaggggc

SEQ ID NO: 18730 - DNA, 122 bp, Homo sapiens
gtccttcttctgcatctattccttggttaaatttgtcgccatccctgtgcctcagtttaccggattctcagatgactgtgatcataccagctgtgctttctcataatggtctctgaggactg

SEQ ID NO: 18731 - DNA, 122 bp, Homo sapiens
gaacagcaggactagcatggtaaacagactgtaaacaaggagtgtaacctcttgcaaaggcgaggagaggagaccaggaagggaggtgtccagtgaggtgaggaaagcaggtcgagacactc

SEQ ID NO: 18732 - DNA, 122 bp, Homo sapiens
aggtaggtagataacttgaggtgaggaattcgagaccagcatggccaacatggtgaaacccgcattctactaaaaataccaaagattagcgggcgtggtggtgtgcacctataatcccagct

SEQ ID NO: 18733 - DNA, 122 bp, Homo sapiens
agatcccttgctcatatctcttactgctctgagcagctgttctgccaccattgaacattccgctttgtgtcatgatgtgcctgtctgagcctgatgaaagtgtgctgatgagatttgaataa

SEQ ID NO: 18734 - DNA, 122 bp, Homo sapiens
tctgaccccagggtgactgagtcctctgggagggggcacttctctgtcctgagggcctcccgccacaatgacgaagcgttgacgttggtgcccaaagccagtaggtgcagcacatgagcagg

SEQ ID NO: 18735 - DNA, 122 bp, Homo sapiens
agtttgcggctcagtgtctgtggagggtgggctgcggcctcggggcgtgcgcagtgtcaccgtgcgcatgcgtcccgcacctgggaggctccggactccttgggtcaaggctggtggctgta

SEQ ID NO: 18736 - DNA, 122 bp, Homo sapiens
agaatggttgccttggagacgtaaacccaagagccctgctcctggagctgagaactgcagcgcggaggcttcggagcgagccggggcagtcggggtcggtgggtgcgctcgcggtccgggga

SEQ ID NO: 18737 - DNA, 122 bp, Homo sapiens
ggccatccctatagctgtgaaccaggccgtgacccctggcgctgtgcccccagggtgatgcgggcggctgaggagaccacgtccaacaacgttttccccttcaagatcatccatatcagcaa

SEQ ID NO: 18738 - DNA, 122 bp, Homo sapiens
caatcgcttggcgaggcggcctgacaggcagctcagacgaccagtagtatccaggcaaaacggaccacgccggacgactcgagagccaatcgatgaagctgccggctgaaccaatgagggtg

SEQ ID NO: 18739 - DNA, 122 bp, Homo sapiens
cctcctgtcctcgtacatccccctacactacctctcacacccaggccacccaaccctcggcgcgggcccgagcgcgggggattccgagtgtcagtgctttcctccacccgcgactccgagaa

SEQ ID NO: 18740 - DNA, 122 bp, Homo sapiens
tactggaactcctgtagaagatactttgaaccgctttagatacaataggatcaggtaaaacggcgctgccttgccagccactgcaggttttcacctgacacagcccccagaccctgtctacg

SEQ ID NO: 18741 - DNA, 122 bp, Homo sapiens
tgcttttaaattatttactgggcaacagtgggggtgactccctttggggatacttcttagcgtcctgtttgagccaggagtggctggaagaattaacattggggagagagtatgatgggtgg

SEQ ID NO: 18742 - DNA, 122 bp, Homo sapiens
tcttggcaaccagtgggtaccgttcaaatccccgccagggcggaaacgtccgcccttatccgttctcttattggtcaggttagacgtccatttctgacgccacagcctatccggcgctgcgg

SEQ ID NO: 18743 - DNA, 122 bp, Homo sapiens
accaccttcaattcaaaggctggctacctggtgaacgccaattcagcacccagtcaaagccggttatacttgagttttccttgccagcagcatgttttcctgtttaatccgtgttaacattc

SEQ ID NO: 18744 - DNA, 122 bp, Homo sapiens
agccaaaatcctgagccctttgaccccatcctagctgttttagcctgggggctaggtaggcggcagaggttttctcaatggcagggaaaggagtaggatgtgggtggtgggaagggcttaat

SEQ ID NO: 18745 - DNA, 122 bp, Homo sapiens
tgttcgccatcagctctaagaaagacgtggatcgggttctagaaaagatgactccctgcacgcccctccctgcacctcccgagcagtgattccgacagggccttcactgcccctgattttag

SEQ ID NO: 18746 - DNA, 122 bp, Homo sapiens
cactaagccaatcttctcaaatgccagtcaataaattgttacaggtatgcagaaaaatggcggaggggggaaggaaaactgacaataaagctatactcactcattttttaaaaaaggatata

SEQ ID NO: 18747 - DNA, 122 bp, Homo sapiens
cacctggtgagtcatgggccactctcttctgaggctggcggcctggcccgcccttcccgtcggtacccaggagggagcacagcctgcaatggccgccttatctcaccctcgcccatggcccc

SEQ ID NO: 18748 - DNA, 122 bp, Homo sapiens
ctccacgctagcgccgcccaggctggcacaaaggaggaagcctagtcccgcccctgcgtgcggcgcttctcccaggccccaccttccatccagtgccctggaccctcggctgggtagcgcca

SEQ ID NO: 18749 - DNA, 122 bp, Homo sapiens
cagtgcaaaccggcaaaagggaaacaatgggaggaggaggagacaagagaagaggcggcccgggaagaaccaggaaagggggtaacttgaatgacaggtcttaactgagactccacacgcca

SEQ ID NO: 18750 - DNA, 122 bp, Homo sapiens
aatctgaaagaaattatataacagggttcacaggaagggactcctacaaagaaaagccaacgtttatgtaataccatgggctatttctccagtctccaaaaaattatttaaactcctaattc

SEQ ID NO: 18751 - DNA, 122 bp, Homo sapiens
caccacttgcctctttgtggagcaatcagggcaatcatcggcaaaaaactaaagactactcgtcctgttccatgcagaggcgtagttaaccttgtaactattcttttctgaccttcattctt

SEQ ID NO: 18752 - DNA, 122 bp, Homo sapiens
aggacccctggatccttgccattcccctcagctaatgacggagtgctccttctccagttccgggtgaaaaagttctgaattctgtggaggagaagaaaagtgattcagtgatttcagataga

SEQ ID NO: 18753 - DNA, 122 bp, Homo sapiens
tgctggctgctctcacccaaggctctcttcatgctaatatgtaaaagcagtttagctcctcgtcagcaagcaagatttttctatatattgctcaatctgcttaagaactcagagatgatatt

SEQ ID NO: 18754 - DNA, 122 bp, Homo sapiens
actgcccacttacttcctatattccacttccctctgggtttcagagggcagctgtgtttacggcggctgcccccaagcctgacctgctcagagcagccaggggggcgatgagcaccccaggc

SEQ ID NO: 18755 - DNA, 122 bp, Homo sapiens
ggttttctgactggtgtttctcctgcctagtaaccatccccagcaccggagacctggcatcggctgattggcaacagatccttctctgagccaccgaaacagattccctaagctagaaggaa

SEQ ID NO: 18756 - DNA, 122 bp, Homo sapiens
tgcttggcgtggggtccgcgaacagaagggtcggcactagcagagaccagcaggcagacgcggagcccgctcaaggctaaagcggccgcacctgctgcctcggaaaggggtaccggagcggt

SEQ ID NO: 18757 - DNA, 122 bp, Homo sapiens
gttatttagtaaaaatataactatcacatttgtatgcttcaaataacattctgaatgcctcgcattgcagtctttttttttttttttttttttttttgagacagggtcttactctgtgactc

SEQ ID NO: 18758 - DNA, 122 bp, Homo sapiens
ctggcattacagccatgttacagcagtcactggaaggtctcctattagaaggccttcagacgtctgacgtcgatataatacggcactgcttgcggacttacgccacgattgacaagacacgg

SEQ ID NO: 18759 - DNA, 122 bp, Homo sapiens
ccttcctcttccccttcccgcacctcctcccccaggagccccaggtggggattgggttcgcgccaacctcgcttccggaacagggttcatgcttaggcaacccaactcctctcgggcgctgg

SEQ ID NO: 18760 - DNA, 122 bp, Homo sapiens
tgccaggtccgcggctcacacccaggatggcagcagacagctccactgggctgggctctgcgtgtgtgtgcgtgtgtgtgtgcgcgcgcgtgtgtgtgcacgcgtgcgccgcgttctttccc

SEQ ID NO: 18761 - DNA, 122 bp, Homo sapiens
tgttcctgtgtggctgggaagcgggtctcagacggtttcatctgtaaatgtcagtatcagcgtctaataaagataagcctctttttaagcagccacgacacctgatcacacctaaccaccac

SEQ ID NO: 18762 - DNA, 122 bp, Homo sapiens
caactctgccctacctttcctgccccgctctgcccccaacacctagtcaccctcacacaccggcagctgtggtgccctctgtatccagaaggtctcaggttgctcctggcggtagtcgtgag

SEQ ID NO: 18763 - DNA, 122 bp, Homo sapiens
ctgctcctgtgattggttctgatgctgctcccctgccgggcgccacccacctcctcatcccggtcaatttcccgagttggaagggagctcgcctttcagccctccaccttactggaagcatt

SEQ ID NO: 18764 - DNA, 122 bp, Homo sapiens
cgcagactgtgcccctgccacagaccggccttctccccaaagtccctcgttaacccttcacggcaagtctggagtttcccatttccatggccaggacgctgggcttctggcctccttggctg

SEQ ID NO: 18765 - DNA, 122 bp, Homo sapiens
agtgttagccggagggggcccgctccctttcccgggatcagaactccgagaagagccgggcgccgccaccaaggaaacagaacagagcattggggtcccagatactgagggtgggtggtggg

SEQ ID NO: 18766 - DNA, 122 bp, Homo sapiens
acatctcccagggttccccggggcggaggacgcccacccggattggccagggttcgctgacgctcagtgttttggcccggacggtcacatgtttcctttgttgtgagctgcggcagagactg

SEQ ID NO: 18767 - DNA, 122 bp, Homo sapiens
cggagccctcaagaaaatcatgcggaccgaaggcttctggaggcccttgcgaggcgtcaacgtcatgatcatgggtgcagggccggcccatgccatgtattttgcctgctatgaaaacatga

SEQ ID NO: 18768 - DNA, 122 bp, Homo sapiens
gggacttcagggaaaacgaacgggtgtgagacacagccagggcccttcgcagacagcactcgcccagggccacggctgccgggtgcctgcagcacctcacacctgcggacacagccagctct

SEQ ID NO: 18769 - DNA, 122 bp, Homo sapiens
cttgaatacagcaggcaaagtgacatttttgccagatgactcccccttttcggagtacaccgatatcagtgggcgagcacacgcctaaagaaaaagacaaggattatttttattgacaagta

SEQ ID NO: 18770 - DNA, 122 bp, Homo sapiens
atacgtggcatgtccttcctctgagacatttattcctcccaccaacaaacattaatggaacgcctcacaagtgctagaccccagcgacacaaacaagggcgaggcacactctctgactacaa

SEQ ID NO: 18771 - DNA, 122 bp, Homo sapiens
cgaagtctctcaaaatactttcacacagagaagtagcagggggtgcgtgtccaaggtggccgaggcggggtgcacacttgtgtagggcactttccccccggcccagcgcggagacaggcgaa

SEQ ID NO: 18772 - DNA, 122 bp, Homo sapiens
tgtgcacccctcagcccatttgtcacaggccgtcgcggaggcacagtaaggaaggcgacccgggaaggttaagtgccgtcactgcagatgtaacgtgcaaatgctcatcgcttgggaggcag

SEQ ID NO: 18773 - DNA, 122 bp, Homo sapiens
gaggccgcagcactgaggccctgcctggcacactctccctggcttctctcttcccacccccgacataaatcgccatggcttcctgtccctgtgcatcccaccccgtgccatgtcctggtgtt

SEQ ID NO: 18774 - DNA, 122 bp, Homo sapiens
tagctggggacggagcctgaagaggaggttgaggggaacttcacacgtttccctggagggcggagtttacatcatcccccaacagagttaagacctctgagggattccctgcagtgtccagg

SEQ ID NO: 18775 - DNA, 122 bp, Homo sapiens
tgcaaatctctttgtaaatgtacagtcaaggttcaattaaatggtgtactgtagatcagtcgctcttcaaagaaatgaagagagaatagaaaaaaagaaatgaaacaaccaaactaaaaaag

SEQ ID NO: 18776 - DNA, 122 bp, Homo sapiens
ttccactgctgaaaagtgccgggccttgggaagtgtttttcttttcattccttaccgaagcgtttactgccgccgtggtcgcagtcataaattttgctacaaaccacaatgacaggtgcatt

SEQ ID NO: 18777 - DNA, 122 bp, Homo sapiens
acgggggtgaaagggagatgtttacatggcaggcgtgggctcccctccctgggcgagaaccgtgggaaaccaaattttataagtgtggttgtttgcctcacaaaccagcttctgtgatcatc

SEQ ID NO: 18778 - DNA, 122 bp, Homo sapiens
gcgggaggcagggtgggcgaaggaccccatcaggagaggctacccgacgaaggggccatccggagaggctaccgaagtatctatcaggcatgctcttagaaggagcaaacggacacacacag

SEQ ID NO: 18779 - DNA, 122 bp, Homo sapiens
agctgacttggatgaggccaaaacaatatcctttggatatgacactaaggaggttactagcgacttttgtgagagtggatcagtagattgctaagaacaaatagtagatagaatgaagtgca

SEQ ID NO: 18780 - DNA, 122 bp, Homo sapiens
cggcccggccccttccttctcctcctccgccaactggagtgagggtcaggcacttgtaaccgcgagtgacgccttctccctgtaaggccaggacgttctggactcgccgccgcctccggcta

SEQ ID NO: 18781 - DNA, 122 bp, Homo sapiens
gcaattccctgggaccacaaaatccgtaaacttaaaatcctggtgtggttatgatccttccgtcagcctcccaagaggagttttttaaggttgaagcagtatgacttttaaactgttgcccc

SEQ ID NO: 18782 - DNA, 122 bp, Homo sapiens
tctctaacgcgcaagcgcatatccttctaggtagcgggcagtagccgcttcagggagggacgaagagacccagcaacccacagagttgagaaatttgactggcattcaagctgtccaatcaa

SEQ ID NO: 18783 - DNA, 122 bp, Homo sapiens
tggggtcacccggttgggccgcatttccggggccgtcacctgtcgggctgccaggccgcgcgtaccttgtcccatcgggggctctgctctgccccctgcgctgatgacgcgggtggaaggga

SEQ ID NO: 18784 - DNA, 122 bp, Homo sapiens
tagctaggagcggacgccataggtgcattgtgggaagcactttgctgtccacagccaggccgcttgtgatgaaactgtaacttacaagaaaagggctgggttttgaaaataacacaggctct

SEQ ID NO: 18785 - DNA, 122 bp, Homo sapiens
ctgctctgtttaggtgaatctcctcaaatacaatgaagtgcccactgcaataaagtaatacgtaccaatacctccagggtctggactcttggaatgtaccacttctggttgattctacaacc

SEQ ID NO: 18786 - DNA, 122 bp, Homo sapiens
cagccatgggcttgacagaccttgtacgtaacaagttcccggaaaggatcaaccggatatcgggaatgaaaaagtgggggcaccccgtcccatagacacaggccaacccagccttcgctcct

SEQ ID NO: 18787 - DNA, 122 bp, Homo sapiens
gacgtccattcctctttgtttgggactgcctcagccgcagtcagcgaggctggtcacagacgcggcccaaaatgaatgcaaatagtttggataagaaaatcatttcacgttcaatcccaatg

SEQ ID NO: 18788 - DNA, 122 bp, Homo sapiens
atgttttagagaagaactttattggcacagccagggtctatagtcagggagattgggtaccgtgaatagcctggcttgagtttgatggcagtcagctgaggccaggagtgggatcatgtggg

SEQ ID NO: 18789 - DNA, 122 bp, Homo sapiens
gcattgcctgtcccagcctgactcaggaggccaactggcaccttgggccctgtcctcccccgattcctcctggataggaatccagaggctgtcccctgcctgattccccatctagctgtccc

SEQ ID NO: 18790 - DNA, 122 bp, Homo sapiens
actcaaagaaaggggtgacggacgcacctggaaaatcgggtcactcccacccgaatatttcgcttttcagaccggcttaaaaaaggcgaaccacgagattatatcccacacctggctcagag

SEQ ID NO: 18791 - DNA, 122 bp, Homo sapiens
cgccccgcgtgctggccgcggtaaaagtggtagcagcggaggcgagcggagggtttcccgcggcgggtgaggcgctgggtatgctgggaaggtggggtcgctttggggttctgtgtgcagcg

SEQ ID NO: 18792 - DNA, 122 bp, Homo sapiens
acctcctccctcttgacatgaaatcaaacacaagtcctgctccttccactgtctaaatatcgttcacatctgagtacttttctccatgcacatggccagcaccctagttcaggcctcctgac

SEQ ID NO: 18793 - DNA, 122 bp, Homo sapiens
accgggggtggcaggggcaggggggccgcacttactctgaagggtccaggctcttcctttcgatggccgaggacattggggagggaggcggggtgccgggcggcgggggcgctccctttgtg

SEQ ID NO: 18794 - DNA, 122 bp, Homo sapiens
cattcaattaacattttgcttaattgaaatcatgctcttagtctgaaataggaattgccgcgtccactctctctacgtttggaggctgctgtgccacccacccactcggaggtcccacagcc

SEQ ID NO: 18795 - DNA, 122 bp, Homo sapiens
aagggaggagggcatagtcagccatgtcccacccgcccccacttcatgtcgtggcctgaacggttttcaggttaatttggagtgccctggcccagagaaggggtccattcagatggggtggg

SEQ ID NO: 18796 - DNA, 122 bp, Homo sapiens
caaaaagcaggctgtgtaatttctgtgcatgacacttatttatttttttttttttggtcccgtgtgtgggcctctgttcttgaggggtctgccgccttcattgtctgggttctcagtgagta

SEQ ID NO: 18797 - DNA, 122 bp, Homo sapiens
cccgcgctggccgggtaggttctcttcagttcctgatgaggcaaacgagaacaaagcagtcgaacagcaccatgatcgacgatactttgggggcggcgtgatcagaggattccccttcccgg

SEQ ID NO: 18798 - DNA, 122 bp, Homo sapiens
cgggcccggggcggggtcggggcggggacggggcggggcgctgatcggacgggcagggggcggggccatggccgccaagacaagccccgccatgctgccgctgcccccacggcctcgcttcc

SEQ ID NO: 18799 - DNA, 122 bp, Homo sapiens
agtggatggatcacagacctatagtgtgaggctgagattctgcagcattgggtgactcgccggggccctgcgaccacacaagcaagcaggaggtgctctgtgcctgttttgttttcaggtag

SEQ ID NO: 18800 - DNA, 122 bp, Homo sapiens
caaactgctgggctcaagcaatcgtctcacctcagcctcccgagtagttgggactacaagcgtgagccatcgcgcctggccagtaaagtctttttaaataaccttgttaaaaaaggactaga

SEQ ID NO: 18801 - DNA, 122 bp, Homo sapiens
agggcaagaacgtgcggatttatcaaatagccttgaggaaatatatatgtaagtgacaggcgattttttaaaataattctgttagtgattgtattgtgggcttttgttgaacctgtgaaccc

SEQ ID NO: 18802 - DNA, 122 bp, Homo sapiens
ccttcacattgtcttttacttcttcattgttccttacacagaagcctagtatgcattactcgaactctcagtgtattgccactaagacttttatttcaaaaaaaaaaaagggggagttgaga

SEQ ID NO: 18803 - DNA, 122 bp, Homo sapiens
actgggagggggtaacacaaggagaagcgacatgagtacaccaagatgtcaaagctgcgacgggctggatgagggagccccaagagggcatatgctcagggtgccagccggctgcttttcct

SEQ ID NO: 18804 - DNA, 122 bp, Homo sapiens
cctttgggtacgtttttgacatccctagtcccaccttgttgtaaaagaattaggcagccccgaacttaacttctctaggccgcagtattcttatctggaatttgagataatagtggcaatgt

SEQ ID NO: 18805 - DNA, 122 bp, Homo sapiens
atgggaagtaccgggaagttaccttaggtagcgtagtttcctcttgctgaaaacagggtccggttttcacaaatgtgggaaatttggcttcttttgctaattgctccctcttggccgctcgc

SEQ ID NO: 18806 - DNA, 122 bp, Homo sapiens
gtctggggagcggagactcgttttgcctagtttcaggtgctcttgcaaggccaactgggtcgggaggcagctcctgaacaccgcccccggctatgcctgctgccgtttcggcccacttttcc

SEQ ID NO: 18807 - DNA, 122 bp, Homo sapiens
ctaacaaggcaactaaagaaacttaaggtcccaagctagaagcaaagacagtctctgagacgcccatctccttaatgtcctgtcagagctctctgtaccatgtcttacatgagaccatacat

SEQ ID NO: 18808 - DNA, 122 bp, Homo sapiens
gtttgtgtgtatttgtgtggggagggcgtttggagggaaggttaccgggagctccgaggccgctggggaacagggatcccggtgacaaagatggggatatttcctctgtcttccacttggaa

SEQ ID NO: 18809 - DNA, 122 bp, Homo sapiens
ggttgcagcctggcccgggtctgccctgggtgggggcagcacactggaggccgctgaactcggactgcctcctggccccaccgcagcctctgctccatttcaattaggtcaattccctctcc

SEQ ID NO: 18810 - DNA, 122 bp, Homo sapiens
acgagaaatgaaagagggcaggctccagcgagagccaggatagccttctcagcccgccttcgtcttaccctacaccacctagggcaataaatcacagggctttaaggtctaggcagcaagtc

SEQ ID NO: 18811 - DNA, 122 bp, Homo sapiens
gaagttaggaataccttacatccaatgcccacccgtgctccgcagggcaagggcagccgtcgcctcggccgcgtgcacccagctcaggctgttcccagggatttagtctggggggacaaccc

SEQ ID NO: 18812 - DNA, 122 bp, Homo sapiens
agggcggcaaacccagagcatgccacacatatttgggtcgtctgtccacccttgctgtgccgtgtgtcatcatgagacttggaaagcagcttcatgtccagtagtggggaggggctgagtgc

SEQ ID NO: 18813 - DNA, 122 bp, Homo sapiens
ctcagtcctgtaccgggactggcagagtaacagatgtgaatgtgccttcagtctgcacaacgcttttttgggacagttgagggcccactctgatgccttgaagactcttcagagcctcacga

SEQ ID NO: 18814 - DNA, 122 bp, Homo sapiens
caacgtgggagcactgagccgttatttggtgggatgcccttcaacgtgggagcactgagccgttattcggtgggatacccttcaacgtgggagcactaagccgttattcagtgggatgccct

SEQ ID NO: 18815 - DNA, 122 bp, Homo sapiens
ccctcccagggtgtctggtggcaggcctgtgcctatccctgctgtccccagggtgggccccgggggtcaggagctccagaagggccagctgggcatattctgagattggccatcagccccca

SEQ ID NO: 18816 - DNA, 122 bp, Homo sapiens
taggagagaggggcggagggggggcggggaagggaggggagaacagaagagggggaggggcggagaaagccaacggagcagccccaactcggaaccgcccctatcgcagcgaggtgccgagt

SEQ ID NO: 18817 - DNA, 122 bp, Homo sapiens
gatgggccaggcagcgttgctgtttgcatcttccccgtcgtcatggacagcggtcaaggccgtctccccttctccgtcgtcagggacagcggtcaaggccgtccccctggggcatctgcctc

SEQ ID NO: 18818 - DNA, 122 bp, Homo sapiens
gacaactccaggagcggacagaacatccgtgtctgcatgagagtccattcggatgcaggccggggttcttcagcccagggcccaccctccggaggtgaagaaacgcacagtgctgtgcccgc

SEQ ID NO: 18819 - DNA, 122 bp, Homo sapiens
taaataaccaacttggattaatatttttccagcctgtcaccttcactcactgccctagaccgaccaacacaagttaaaattaaatctcattttttattgttttactatcacaattaacatga

SEQ ID NO: 18820 - DNA, 122 bp, Homo sapiens
agggcaggaccctcacctctcccccaaggccactgcgctcttgggaccccagagaaaacccggagcaagcaggagtgtgcggtcaatatttatatcatccagaaaagaaaaacacgagaaac

SEQ ID NO: 18821 - DNA, 122 bp, Homo sapiens
tcttgtcccctgctctgctgtaacctggcagttgttgaaggatgggttatttctgatccacgttttcctgagggtgaagacttcagctcctatgaagactgcccacctgccccatcccccac

SEQ ID NO: 18822 - DNA, 122 bp, Homo sapiens
tgtggttccaatttaagcttgttttgaagtctaaaggcccaatatgtctcatagattcttcgctggacattagcactaatgtaatttgccgaggagcgcaggcctctatctagaaggcggcc

SEQ ID NO: 18823 - DNA, 122 bp, Homo sapiens
gtcgtgcctgttgtgtgctcagaatacagcagtgaacaaaacagacccccttcatgggggcgatcctacttgggggcgatggatgggaaacaaggaagtaagtgaaacctatttagaatttg

SEQ ID NO: 18824 - DNA, 122 bp, Homo sapiens
cttgattcgaatcttgattcaaatcttggcagtgccattcatcagttctgtggcattgagcgccatcagtggaccactctctgatccccaattgccttatctgtaaaatgagattagacacc

SEQ ID NO: 18825 - DNA, 122 bp, Homo sapiens
tcacattcccaaagcctctgtggatatattttaacactgtagacataggtgtgagcctctcgaaaccaaggtagattacatcactagcctactaaaacccccccaccaaatttctaacagca

SEQ ID NO: 18826 - DNA, 122 bp, Homo sapiens
gtctgcctaagattccttcatgttcactgtggcaagtgtagtcattgtatgaaaatatcacgatgaatgtcttcatactcctaatgaagaatatttactcatctcagaagagccaaaggtac

SEQ ID NO: 18827 - DNA, 122 bp, Homo sapiens
gcctctctccaactgctccgtgggcgcccgtgttttctcctcccgggctgcagcaccccacgccgcgctctccacgagctcccgtcacggaaacacctccgcgtcccgcagttcactccctg

SEQ ID NO: 18828 - DNA, 122 bp, Homo sapiens
ctctcttttttaaaacaagagtggaagagaaaggcgccaacttatgtccctcttgctcttcggggcttcatgaagggacctcctacccacacccacgcccaaacccgccacaaactccagag

SEQ ID NO: 18829 - DNA, 122 bp, Homo sapiens
tcccttgggtgcactttagggagggattaacttccacaacaatttctctctacttagacacgtccaggtctttctgctcctcctacaggaagagcttggataactctaccaatagatactcc

SEQ ID NO: 18830 - DNA, 122 bp, Homo sapiens
gtggcgcgcaggtcaccctccgttttcttcatggggacgcggtgctggcgcgcagtttcccgcagaaatcctgtggaggggtctgagtggcgctacagcttcagcttgcattcctctgtcag

SEQ ID NO: 18831 - DNA, 122 bp, Homo sapiens
tctggtatcatttctcttctgcctgaagaccattctttagcatttcttgtaattcctatccgctggtgagtaattctcttaggttttttttttttaatctgaatatgtctttattttgttta

SEQ ID NO: 18832 - DNA, 122 bp, Homo sapiens
ctccactaatcctggctccaggttttgtgctcagcttgcagcgtctcttgtcctagggggcgaatcctgagggtggcaggggcgggagaactagcaccctagacgcccaagggaaacccgaa

SEQ ID NO: 18833 - DNA, 122 bp, Homo sapiens
cactggtaggtttcactccacaggaccattcagttactgcaaggaagtccctgcttgggccgtttatttttttctttataagtaaccccaaaggagatggcatgatgacgtagaatccaaat

SEQ ID NO: 18834 - DNA, 122 bp, Homo sapiens
ggcgtgaggagtgatcaggtgtacccctcccctcctgcacttgaggcagagagatttgtgcggtttcatcttgtagagacagtgacaggcactcagagtgtctgggtgtggggctcacctgg

SEQ ID NO: 18835 - DNA, 122 bp, Homo sapiens
cccttgggtgtctttgacttagagcggccgcactgcctgggcttctgagacattgcaacgcgctcaggccttcctcacgcaggcccttgcttggatttgttccgatcgtctcctcgggacca

SEQ ID NO: 18836 - DNA, 122 bp, Homo sapiens
tgctggcgctcgccgtggtgtctgtggggctctggactctgtatctggaactggtggcgtcggcccaggtcggcgggaaccccctgaaccggagtaagtagcacccaggggaggcgaagggc

SEQ ID NO: 18837 - DNA, 122 bp, Homo sapiens
gccttaaaaaggaagggaattctgacacacgcctcaacacggatgaaccctgaagcattacgctaactaaactacagcagacacagaggacaaatattgtatgagtccgctcacacgagatg

SEQ ID NO: 18838 - DNA, 122 bp, Homo sapiens
ctctcttctgggttccaataaagttttcctcttcctctcctcgtacggagttcaagatggcggcctcctggtcgctcttggttaccctgcgccccttagcacagagcccgctgagagggaga

SEQ ID NO: 18839 - DNA, 122 bp, Homo sapiens
aggcttgtgggaaatgtagtcccgaacgtggatggtccacccctccgaggaccctgggaacggcccgcgcccctgtttctgcgcatgtgcagtgctgcgagcgcgccggtggccgcccttcc

SEQ ID NO: 18840 - DNA, 122 bp, Homo sapiens
ggtgagggggcgtgtctgcccgggccctgcccaccgccctctccgcccccgcgcggcgcccgaggcgcccccttcattgacgtcagtccccagggccagcgcggttttgctggcgcgggagc

SEQ ID NO: 18841 - DNA, 122 bp, Homo sapiens
aaccaaatcccactccttataagagaaagactacagaaaaaagcttatgcaatccacacacgaaaaggcatggagaagacaaaaataaaagtggcagtggccttttgaatcataaagaaact

SEQ ID NO: 18842 - DNA, 122 bp, Homo sapiens
tatccccaaacatgccacaacccctctagttatatgggagcggtaactgtgaaccaccatcgctggcttgatcctcccttttccgtggattggtgctcctgagtatgtttaccggtttcagt

SEQ ID NO: 18843 - DNA, 122 bp, Homo sapiens
aagtactatgaaagttttttatctttttaaatcaataaacaaagttttcaagtgtaatttcgaagcatgagatgtagtcaactcctgagtgaagaaaataagagtggggactaggtaagtag

SEQ ID NO: 18844 - DNA, 122 bp, Homo sapiens
aagaagcttcgttgtgagaggtgatgcctgcaacgcgaggctcgccctgcctgtcggggccggggctccatgcatgctcttcattgcagggaggagcttcccaccatctacaagtgtcctta

SEQ ID NO: 18845 - DNA, 122 bp, Homo sapiens
ctaagcctcttctccatgtgtgcacacagggtagatctctgaagggtggcgctgtaacttcgagggtaatggctgtgttgagttaaggcaggatgacagttcagcctcctcccaggctggtg

SEQ ID NO: 18846 - DNA, 122 bp, Homo sapiens
actttccccccagaaagaacatctgtcaaaccaaccaatatgaatctgtcagctcttcatcgaggcaggcaggcttgttaggaaagcccatgtgctgtccattgagacaggaaaaaaaatag

SEQ ID NO: 18847 - DNA, 122 bp, Homo sapiens
catcctccttccttctgtagtactgggtgaagcccgcggatttgtgataagcagttgccacgactcagaaggtggtccgcgtctccacgctggagcaatggccatgctagaaagtgcagttt

SEQ ID NO: 18848 - DNA, 122 bp, Homo sapiens
tcggacttcataaatgccttatctaattgtgtttgtcaaaagactgtaataggcaaaatacgccatcacctgctggctgttctttccagaattccatccaaagtgctagatgtgaggacagc

SEQ ID NO: 18849 - DNA, 122 bp, Homo sapiens
ttcagagaggacaatctacaggcgacaagctggccttgcagtgtgaagccgaggccacaccgtcagggaaggtggggagaccagggtcccaggctgcacctgagcctgcacgacctggggaa

SEQ ID NO: 18850 - DNA, 122 bp, Homo sapiens
agggcttggtgaaagggcacagcagtaaaccaggtacccatgagggaaaggtggttaccccgagactccaagcactactcaccagtcacgcccacggtggacaccgggcccacgcgccgccc

SEQ ID NO: 18851 - DNA, 122 bp, Homo sapiens
gggtggcatgctgtgagtcctcacctttgcagggagccagcagggtctgccccagttcttcgtgggagggactcctttgagcttggctaaccgaagtgggtgactcccaagggatctgactc

SEQ ID NO: 18852 - DNA, 122 bp, Homo sapiens
cctcccctcctaagctctaggggcacagtgggaaacgtagccctgctcagtggagcaaggcgataggcttctcttatttttctttggataaaggatccgctgagcttggaaaaagtggattc

SEQ ID NO: 18853 - DNA, 122 bp, Homo sapiens
tctgattttctcctcccctttgtgtacccgacgggtgttgctgtgagctcaggaccatcccggcgggctgcggatgggatcatcgtgtgtgtatggccacagccctccgcctcgctcgctcg

SEQ ID NO: 18854 - DNA, 122 bp, Homo sapiens
ataactttttaaagcttccatgagcaacttacatcactcacacatgctatgctaacactacgtatatgtacatatttatcacctaatcttctgaaaactcaattgatcataagattataaac

SEQ ID NO: 18855 - DNA, 122 bp, Homo sapiens
ccccaaggaagggcaggcactgagcacagcaatgcagtataatggctaagagtgggatcccggagccagcctgcttgggttcacatcagctccggcttttaccagttgtgtgaccttaagca

SEQ ID NO: 18856 - DNA, 122 bp, Homo sapiens
gcaattcaaggcaaaaagtcttgaaatgacagtgatgcttttttccaaagccagaaaaaccgatgtaataagagggatggagggattaaaaagtcccagagaacccagttgcacttggcctt

SEQ ID NO: 18857 - DNA, 122 bp, Homo sapiens
tttcagccacccgtgccctttcctgcttctcggagctggaaggctgtggactgaggcctgcgcgaccccgccagagatggggctgagtcccaatttagacaggttgggagtatttaaagcgc

SEQ ID NO: 18858 - DNA, 122 bp, Homo sapiens
gatggagacaggccagcttttgcacatgcagtactgctgtgcagaggaaataacttggctcgcagggtcaatctcagcccgtgcctcatgcctgcgctctccaaatcccacgggaatcccag

SEQ ID NO: 18859 - DNA, 122 bp, Homo sapiens
ccagggaggaaagacggagccagctccatgaggctggtttgccgcagcccgggctcatggcggggacctgggggcagaaagctccagctgcctagggaatctctgtgtgggtgcccatgtgg

SEQ ID NO: 18860 - DNA, 122 bp, Homo sapiens
tcttggccttcacccatggcacgcaccgataaatgattaaaccaccttcctcaaggaggacgaaaaaggcaggaacatacgtctgagcagctgagggtaatacagacgactgatggtttcct

SEQ ID NO: 18861 - DNA, 122 bp, Homo sapiens
tgaggaggactaagagggcattgggagctgcatcagaatgggccatgaagacggtctggccggtggaggggccttgtattcctggggaggggactttcaggggaagggcccactgccaccca

SEQ ID NO: 18862 - DNA, 122 bp, Homo sapiens
cctcttaagaggccgcaagctggcagggccctgaggaccgcgtggtcccccagccagaaacgcaggtcaccagggaagtgccaggcacccatctgccagctcagctgaagctgcctccaacc

SEQ ID NO: 18863 - DNA, 122 bp, Homo sapiens
cccagtcataaaaaataaagagaaaccaggagagtgcctaaatgactgcagtgtttcaagcgtaagcatttccacactcccttgtactgaaggcagccccaggtgaaggtggtcccactagc

SEQ ID NO: 18864 - DNA, 122 bp, Homo sapiens
ccatgttctaccctcagccagtgcctaagctgcttatggccttcacctggtggcatgactcgatccttcatttttaaggccccaggccctgcatggctgcccacacaggtgctgtggcctcc

SEQ ID NO: 18865 - DNA, 122 bp, Homo sapiens
ttccaggcccagatcagctctgccagccccaacagtcacgcctggctcagccctgccggccgcattgggcactcccaggtccctcctggcctcacggtcccttctggacccctgcctctact

SEQ ID NO: 18866 - DNA, 122 bp, Homo sapiens
gtctggggtcggggttaggagcccaggggctcagttacgtgatgcaacagtggatcgcctcgtcgcgcccctcttctgggaatgcgaaagaaaaaggacccctctcctgttccctttaaaat

SEQ ID NO: 18867 - DNA, 122 bp, Homo sapiens
ggccgcggacaaaggcgtcccctcccaagtacctgtaattggagcgtccatgtgcgcgggcgctgctgaaatgcaatggacaaaagggagaggaatggccgcatcttccggctgcccgttgc

SEQ ID NO: 18868 - DNA, 122 bp, Homo sapiens
tgttattttgtcttgttttgttttttgccagctcctactctcgggcttccaaatctggggcgatgtctccccaggttaaattaccctagctcctgctccagatcgcttccccgtgccccgcc

SEQ ID NO: 18869 - DNA, 122 bp, Homo sapiens
agtctgagcagtcatctccagttgttccctctctctccacacaggggcgctgtggaacagcgggcctgcacagtcctgtggcttctgaggcttggctaccttcactgcacaggctgcggtgg

SEQ ID NO: 18870 - DNA, 122 bp, Homo sapiens
gtacagcctggacttccagcatgggacggctgggaggatccacagactggcgtctgccggcgtggacaccaatgtcagggtaaactggggcagagatagacatccgggaacactgcttgaag

SEQ ID NO: 18871 - DNA, 122 bp, Homo sapiens
tatataatatatattatatatatgtatatacatattttcctcattagtgggatggagtaacgctgagctgggcaaaagaaaggtccgaatttgcctggtaatattgccacaacttgaaagtg

SEQ ID NO: 18872 - DNA, 122 bp, Homo sapiens
atagcccaagatcccagaaaatcacaacatagcatggttccaggagcctggactcagatgcgttcaaattctacctctgtcacttgttacatttctaacttcatacctcagataggggtggt

SEQ ID NO: 18873 - DNA, 122 bp, Homo sapiens
cgcgcgctgtgtatggtctatcgcaggcagctgacctttgaggaggaaatcgctgctctccgctccttcctgtagtaacagccgccgctgccgccgccgccaggaaccccggccgggagcga

SEQ ID NO: 18874 - DNA, 122 bp, Homo sapiens
ttacgcggggcagtggcctgcgccgctggcgcggaggagacgacccttggccccgaaacgcgggctcagctcctacgaaagaaaccatagaaaaaggcagaatcctaggaaaaaaggctttt

SEQ ID NO: 18875 - DNA, 122 bp, Homo sapiens
aaggggtgtgttgaaatcagactttggagccacaaagaaccattccaattctgggtcgtccgcttacacacggtgaacggagcacatttcttctctgagccttggttcctttcctgtaaatg

SEQ ID NO: 18876 - DNA, 122 bp, Homo sapiens
tgctccgatccccgtttcacctgccgggcgcacacactcccgggcccatacccacgcccacgcgcccagcaagttcctggggttttttgttttgttttgttttctggcttcatttgtttaat

SEQ ID NO: 18877 - DNA, 122 bp, Homo sapiens
agagaattaatttctaaaaatctatttcctgaaagctcttccaaagacatccaagtgggacgtgctgacgcagtcagatggaagcacagccccccaacactgacggcagcctcggtctgcag

SEQ ID NO: 18878 - DNA, 122 bp, Homo sapiens
tctcacctcgcctctcacagtgctgggattataggtatgtgcccagccctggctcctcaacgtaagacatagcactgtgccccaaccctcaactccaagaatggctacatttactttctgcc

SEQ ID NO: 18879 - DNA, 122 bp, Homo sapiens
aggcacttcttcccttgagtgggtggactactgaggtcccctgggcacggcgtcatggtgcggaacgtggatgacctggatttccacctgccctcgcatgcccaggacatgctggatggcct

SEQ ID NO: 18880 - DNA, 122 bp, Homo sapiens
gagggaggggaagaggaggaggagccatcactgtttctgctgcagggcttccttccttgccgcatcctgtagcaactgtgtgtcgacctcatctgctggcagctgcacgtatcggaccactg

SEQ ID NO: 18881 - DNA, 122 bp, Homo sapiens
ccgccgccgtggctttttgcccaacccggctttttgcccgactcggctttttaacccccccgccggtgccgcacttatttgcccgcagcggctttttgcacccccgccgccgcggctttttg

SEQ ID NO: 18882 - DNA, 122 bp, Homo sapiens
aggggccctggtagggtgggggctcctccccgtctgacagcgagatggtgggtggcaggtcgatctcgtgctgcaggtacggataggtgggctggaagcggtggaagcgctcccgctgggcg

SEQ ID NO: 18883 - DNA, 122 bp, Homo sapiens
ccaggagttctccaaacccgcgctgcggagtgagtgaccaagttccggccagttcgacctcgaggatccagaggtggagacggtactacctcccagctctgttttccatccccttcaggtcc

SEQ ID NO: 18884 - DNA, 122 bp, Homo sapiens
agcaaatgaataaattgaggtttaggggttccatcactagtaagggtcagggctggaatccgatgcggggtagccatgccccacagtcctgtactcttacccaccagcgtgtaacagtgtcg

SEQ ID NO: 18885 - DNA, 122 bp, Homo sapiens
gggctggcgatactggggacactgtccaatccgggcagggggcgaggccgggggaccgggcgggcctggggagcaggcacgtgtggagggcggacccgccgggggtcgaggcctgcctctcc

SEQ ID NO: 18886 - DNA, 122 bp, Homo sapiens
cagattattaccactttctgatcctatactgccatctggaccacacatttgattctaagccggggatgccctactcatctttttatgaagaaatctagtctcagctactagcttatacattc

SEQ ID NO: 18887 - DNA, 122 bp, Homo sapiens
tttgcattcagcaccaccaggcatccatcacgcgggaccagccgggagcggccggtgaggcggcgtgaatgcgccgctaattatcaccgaaatgaacaaacccagcagtattattatttcat

SEQ ID NO: 18888 - DNA, 122 bp, Homo sapiens
tacacacacactaacacacattcatacagatgcatacactcacatacacacacactgggccgttgaagatttcagaagaggcctctcattgccagtcccaagcacaagctgaacccctattt

SEQ ID NO: 18889 - DNA, 122 bp, Homo sapiens
tgtgttgtgatgaattgtttcaagcaaccagaagagtactgagaatatttaacccgcacccgtgcacccaccctgaattaagacgtgtgtcgcaactcagcatctttatcggcagcactgaa

SEQ ID NO: 18890 - DNA, 122 bp, Homo sapiens
aacgagtcccggagcggccccgcgcccgccgcacccggccctcgcccgcccgaagacaggcgccaagctgccccgccgtctccccagctagcgcccggccgccgccgcctcgcgggccccgg

SEQ ID NO: 18891 - DNA, 122 bp, Homo sapiens
cccgtgggtctggccgaccgtcctgactcggagatccctgagctgcgccgccgcttccttcgtcaacatccagcagctacttgatgagcgccctccagtgggccttaggtccctatgccggc

SEQ ID NO: 18892 - DNA, 122 bp, Homo sapiens
cgagggccacaggccccagcatctggaagtaatgtctgtttattgatagaaaacaggccacgtccagagaggcccagggccaaaacctccttctggaaggccgaagtcccacagtgccgggg

SEQ ID NO: 18893 - DNA, 122 bp, Homo sapiens
cgcgtagtgcctgttgcactcgccaaggaccggcctggcagagatagaaaactcgcagtacgtttgcctcagaaccgcctcaatccggaaacagaaactccccaggcccggcactgcgggag

SEQ ID NO: 18894 - DNA, 122 bp, Homo sapiens
actcttagacgttccggttcacgggggtgacataattgcggggaaacatgccggtctgcccgtggcaagctcctttccaccagttggggtctgagttatccatgacatggataaaatctccc

SEQ ID NO: 18895 - DNA, 122 bp, Homo sapiens
cctggttcccgaagatgctcattaacttggcgatcagctgtcccatggcacttcccgggccggacaggtgcaggagggctcagcggcctcaggagcggagtcggccctggtattcggagctc

SEQ ID NO: 18896 - DNA, 122 bp, Homo sapiens
cttgcagacacaatgctctcaaaagagtaatttttttttttttgtccttcaaaatacagccggctcagaaagtgtctgaagaagcagttttcctggctttttgataaagacggtggacaaga

SEQ ID NO: 18897 - DNA, 122 bp, Homo sapiens
gtggaaccccggggtgatgagccccgggggaagccagcatctcttgccctccagtgccggcgcccggcagagccccgggactcctagtttttgccgccgctgaggacgcggcgcgggctgct

SEQ ID NO: 18898 - DNA, 122 bp, Homo sapiens
tacattgaaatagatggcacaaaagataaaagtcaatagggtgttgactttgcctatcaacgccgcactgttttgctttgcaaagcatggctacttacatatgcatttacccggaggtttga

SEQ ID NO: 18899 - DNA, 122 bp, Homo sapiens
agccctgggaagctggtgaccccaggctcagggctaggagttgggctgtgcccctcagaccggctctgactctcctggcccccattcttccaccacctgtctccacagcctgtgagcttccc

SEQ ID NO: 18900 - DNA, 122 bp, Homo sapiens
catgcaccaaaatgcaagggcagcccagggcttggagaaagagctgtcccctcttgatggcgtcacagggtactaactcatgtcagggctaggggtcaagtcagggctagggggtcacctcg

SEQ ID NO: 18901 - DNA, 122 bp, Homo sapiens
gacttcctggcaggtggagtggccgcagccatctccaagacggcggtagcgcccatcgagcgggtcaagctgctgctgcaggtacgtcctgggatccaggagcccaaccaggaagtgggggg

SEQ ID NO: 18902 - DNA, 122 bp, Homo sapiens
gatggcggtgggggcgggcgcggagaggacggctggaggggagcccgaaggcgccccagccgtctcgcaccctcgctgacatccagcggcctcacacaccgtcctcagtctcccccacacac

SEQ ID NO: 18903 - DNA, 122 bp, Homo sapiens
tggaggggcccgggaaggcctcgctgcagaagcaggatgggagcaggatccgcagggatgcgcagcggggtccgcggagctcccggcgggggcgcgtttccaggccggggaccgcggtgcca

SEQ ID NO: 18904 - DNA, 122 bp, Homo sapiens
ggagggtggtggctgacatatgaagatagattaaacaaacgcagactctttagtctagaacgatgaaggctgggaagtgatgtgaccagagtgtataaaattatgcagagacggagagaagg

SEQ ID NO: 18905 - DNA, 122 bp, Homo sapiens
gccttcagtcctgttccccctcttgaatcctggtacctggatgcaagtgctgtgtcaatgcggtgcacccaggcaagcattccacggctgagccttttctgcatagagcgaagaacacctgt

SEQ ID NO: 18906 - DNA, 122 bp, Homo sapiens
gaactgcacggcactgagcgcatctaattaaagtgatggtttcattagatagcaacacagcgagaccccgtttctacaaaaaataaaaataaaaaataaaagattagctgggcgtggttgct

SEQ ID NO: 18907 - DNA, 122 bp, Homo sapiens
attctccaccccaagaccttagctgaacctgccggccccgccctctctcccaggaaggtacggcaggatttcccaccaggggaatccactttggtgcgcagctcccagcccagttagcgctc

SEQ ID NO: 18908 - DNA, 122 bp, Homo sapiens
gcgcccacacaggggcctcctggagggtccctgtgggaggctgtatgtggggcagaggttcggatgtggccggatacccactctcccataccgggggccctgcgctggccactccagccaca

SEQ ID NO: 18909 - DNA, 122 bp, Homo sapiens
attgcaccccattagcccctgtttttaaaaaatataggttagcaggacgtgggcacaggccgtgaaacatttatagggcgcctgtcacgtgtgagacatagtaatcagaggccaatggtgat

SEQ ID NO: 18910 - DNA, 122 bp, Homo sapiens
taatgtaacttagatattcacaaatcctacttgaggcaggaagtcagtcctcacttttaacgcttaaagaccacaatggacttttataagatatctcgatttttaaagtggagtttctgggc

SEQ ID NO: 18911 - DNA, 122 bp, Homo sapiens
tcacaaaggtatcacaggtatgacttacacctaacgggggccaaaagatgggttgcgaaacgaatgactgaattatccctaacaatcttgggaagaaaacaggattggccaggcccatcccg

SEQ ID NO: 18912 - DNA, 122 bp, Homo sapiens
gtggcttgacggcttcattgtgctaaccacccaggcaagcttgcgtgactaacggaggagcgtctccccttagattcttcccgcccggagccggggacagcaggttgtttatcacggaaggg

SEQ ID NO: 18913 - DNA, 122 bp, Homo sapiens
cgccgccgccatgcaggaaatcatcgccagcgtggaccacatcaagtttgacttggagatcgcggtggagcagcagctgggggcgcagccgctgcccttccccggcatggacagtgagcgcg

SEQ ID NO: 18914 - DNA, 122 bp, Homo sapiens
aaaaaccgaaataatcccagaatgcctcagggctccaggggaaggcgaaaaaagcgggtgcgtttataaacttaaaataatcagaggcagcatctccaaggactgtgagaatgccccaagtc

SEQ ID NO: 18915 - DNA, 122 bp, Homo sapiens
gccgccggtgtccctggagatgcttctctggtctggtgtgacacgtgtgtacacagtccccgccctctcgtgagcgcccgggtgcgtgtgctccctcccgaccaccctgaggagcgagggtg

SEQ ID NO: 18916 - DNA, 122 bp, Homo sapiens
gactcctgatgtaatccatcgtctgcggattagagaagtttgcttcctgtgtagggaaagcgcatggattttggtgtcaggcaacttgtattccaactccagctacacgagttactacttaa

SEQ ID NO: 18917 - DNA, 122 bp, Homo sapiens
agaggcaagcgtgtcccctccccgcaggctttacccccaaaagccgggcactcacacacacgcagacccagaggaggagaggtgggtataaggaagcaagccccagccgcagcagcccgagc

SEQ ID NO: 18918 - DNA, 122 bp, Homo sapiens
gactggcgttccgaggggtctcccgggggtctccgagccaggctggggggtcaccaggggcgtcccaaggggctccgggcccggcccgggtcccgaagggtgtccgaggcgccctggccggg

SEQ ID NO: 18919 - DNA, 122 bp, Homo sapiens
cctggacacaggcagaaggtgctgcagggaagagtaaggacagaactgcagagagaaaaccgctctggagaaggctgtaggccagtgtggctgcctctttgcatgctgctttcactacaata

SEQ ID NO: 18920 - DNA, 122 bp, Homo sapiens
ttcttacctcactcaacttcagccaggaggactgggtggtgcttgcaatgttggaatgaccggctcaaagacctcagctctgggctgtttcctgtcagcctggcaggagcctcaggactgtg

SEQ ID NO: 18921 - DNA, 122 bp, Homo sapiens
aatctgccaaaaatagtaaaataaggctacatttcattgctccatcatgtgtgagacattcgttagcatttcatgcaggcaggcagaaaattactggagaaaggaagaaatcacattccaag

SEQ ID NO: 18922 - DNA, 122 bp, Homo sapiens
cctggggtgggtggcttcccagaccagagttagatgtccccatgcacaaccatgggaatgcggggtccctgcattcaaaactccagtgacagaatatagtccccaaccagctgctagagaca

SEQ ID NO: 18923 - DNA, 122 bp, Homo sapiens
ggtcacaggctccagaaacaatatcaaaatgatgtgcaggctgcagaagcaagcattacacgggcagcatctctttgcctgaatccatgtccagaagccagggagcagggctcccgggcaga

SEQ ID NO: 18924 - DNA, 122 bp, Homo sapiens
aaggattactacagcacaaaagcctttggtagtttcactgactagtaaaccattggtaatcgtcacttgccagtggaagtcacatgggccctgggaaacactcccctatctcagggaaagca

SEQ ID NO: 18925 - DNA, 122 bp, Homo sapiens
tagagtgggtgtgtgtacatcaaacaacagaaagacagatataaactgcccccccaccaccgggcgctcattctgagccgcgacgccccctcaacaggctcccggcaccgcagagccagagg

SEQ ID NO: 18926 - DNA, 122 bp, Homo sapiens
gtgttttcctcttgggcccttgactctgtgtccaggtctgcgataactgcgattcgataccgaatcccagccggtgtcctttgtgggggagacagggggtaggtgtcattgtaccagttggc

SEQ ID NO: 18927 - DNA, 122 bp, Homo sapiens
ttcatctttcccacatagtatagaccagaatgaatcaaggtctaacttatgctgactgtccgtgttgcatcatcagtctttggggccccttctcagtttctgtggctgctcttgtgcctgct

SEQ ID NO: 18928 - DNA, 122 bp, Homo sapiens
ctccttgtggaaactcatcgtttggcttttctttcgttttctctttttttcccagttagccgtcttttcctcttcccgtacctctaacccctctggcgccctaagccatagtccgcccgcgg

SEQ ID NO: 18929 - DNA, 122 bp, Homo sapiens
gctgcggccgctgaggtgtcgggctgctgctgccgcggccgctgggactggggctggggccgccggcgaggcagggctcgggcccggccgggcagctccggagcggcgggggagaggggccg

SEQ ID NO: 18930 - DNA, 122 bp, Homo sapiens
aattaattgcgacataataacaaataatcgttgtttacatgaaattcaaatttaactgggcgccctgtattttatctggcaccactatgtggaaggcaggggttccccgttgcgcctggctt

SEQ ID NO: 18931 - DNA, 122 bp, Homo sapiens
ccaagtggaatgtcccatcagcacagagagtctgacagtgtagtgtgcagaatgaaaacccgaggaccttgatttaaatgcacctgaatagacccccaaccccagaaatttgtgtgaggtag

SEQ ID NO: 18932 - DNA, 122 bp, Homo sapiens
ggccatcttcacttctttgttttgagccctccttataatttgtctttatggcgtggttggcgtgctttacaacaaataccctgcttaaagccagaattcacaactttagattgtcatttgca

SEQ ID NO: 18933 - DNA, 122 bp, Homo sapiens
cagctggatggagagtgcacagctggggaaggcggaacgcgtcgggaagagccgcggctgcgggatccagcgggaggggcggggcgccgggcgaggcggggcctcgcgctcagccttaaagg

SEQ ID NO: 18934 - DNA, 122 bp, Homo sapiens
ggcagtgtgattgagttgagttggagatgatcactccacgttctctgcctttttccagcccgttgctagctgtgtcctttgccacttgttgtgctgttccaggagttgccattctgaccttg

SEQ ID NO: 18935 - DNA, 122 bp, Homo sapiens
ccaggcaagggttcagcagctgacgactcagcttctgcaggatgctggcagcatagccagcgagatagttggaagccgtcagggcacagggaaggggccgagggtgccctgagtgtgcatgg

SEQ ID NO: 18936 - DNA, 122 bp, Homo sapiens
aaaaataccgcccaatgggttcaccttacccactgcctacacagagccgatttctcaagacgggaatcacaatagagaaaggataattaatgcagagccggctgagcaggagactggagttt

SEQ ID NO: 18937 - DNA, 122 bp, Homo sapiens
agagctgaagagaccttcagatagatatttttcagatagaccttcagatagacattttgccgcactgctcagtctaggttaacgggaagctagggcaagaattcacttatggccctcccttc

SEQ ID NO: 18938 - DNA, 122 bp, Homo sapiens
ccgttgtctgccacgcgcagccccttgtgcgggatcaagcccgtgtgggcgaggtggggtcgggccgggcagggcttgggctgggcctccctgagggggtgaaactcgaaaacgaggatttc

SEQ ID NO: 18939 - DNA, 122 bp, Homo sapiens
ctaccttcaaatcagcatctggtttctgttcacaggagcaacgcgatgcacgacaacccccgcgccttcgtcagtggctctaactcctgtcacagccttgttccttctccctgtctcgctct

SEQ ID NO: 18940 - DNA, 122 bp, Homo sapiens
cccagcgaaggatttctaccgggcgcagagtcaggtgcagacttgctgtgtcagctacagcgattctgccagaaccctgcccaggggctgctgcacccacgggctactgtgccaaggggcag

SEQ ID NO: 18941 - DNA, 122 bp, Homo sapiens
taataggcaagcagtggtaatcagccccaaatccaatgcggagatcccagctagtccacccgatgaagatcccgagtcctgcgattctcgcctctggctggagggggtggggtgagaggcgg

SEQ ID NO: 18942 - DNA, 122 bp, Homo sapiens
accagacgctggtagcgcaggggagtgccctcctcctcgtaagcagggcccgggactgcgcggcacagctcccactcgccaggcggcagggggctctcagccaccaccacgtaccgccccgc

SEQ ID NO: 18943 - DNA, 122 bp, Homo sapiens
ccagcgcacctgagcccgtggtgggcacccctgacggtgggtctggcaggggcttcatcccgagagcaaggctagggaagtcggcgttgccgttttctctctgtttgctctgcctgttcccg

SEQ ID NO: 18944 - DNA, 122 bp, Homo sapiens
aaatgcatgctgtaattattgtggcacttgctataatatcgttattgttatagtattttccgttgttgttgtacaagtatcttctatagtattgttgctgtttatcttccaacttggaaggt

SEQ ID NO: 18945 - DNA, 122 bp, Homo sapiens
ctctccaggccccccagccctggccctcctctctcagtctctgctcactacaggaaatggcgacactttgattatcaattgcccaggctttggccagcacagggtggaccctgcagcctttc

SEQ ID NO: 18946 - DNA, 122 bp, Homo sapiens
ctcactctcccacggcaaaatagtgtgacctgctctatgtggtgatcactgctgacacatcgggttgttcctttccagcagcaatagaaaattcacctggggaatctgctgtataatttaaa

SEQ ID NO: 18947 - DNA, 122 bp, Homo sapiens
tccatttctcaaccccgtaggccagcaccgccccggcttttcccaggcgctcacgcgccgcggtggccctcaggggcttttgtcaccctgccagtgggggctctcgctctagccgcacagag

SEQ ID NO: 18948 - DNA, 122 bp, Homo sapiens
tccccaatacggtcctcagttatcccagctgaggagctgtagcattcggtcacagggaagcgctgctaaaaataaacgccggaccggattttcctctgcaaactagaaaatggattggacta

SEQ ID NO: 18949 - DNA, 122 bp, Homo sapiens
aaatattttcggctttgagggccagatggtctgttttgcaactactcaaagtcgctgttgcgcaaaagcagccaccgacaatgcataaataaatgagcatgactgtgctccaataaaacttt

SEQ ID NO: 18950 - DNA, 122 bp, Homo sapiens
cgcgcgctctcgcgttaccaagtctgcgcagccgcacacccccagtcccggcgggccccgcgcgccaggccccttcccgacaggccccaggagccccgctgcatgccggggcttgaggtctc

SEQ ID NO: 18951 - DNA, 122 bp, Homo sapiens
gggacgggcgcaggtgactgtatttgcgctggtgggaggagttgcccccttggttaaatccggaggacacagctgcatggtgcttgccctcagccgtttctctcttcttactttgagaataa

SEQ ID NO: 18952 - DNA, 122 bp, Homo sapiens
cgaggacttctgctcccggtaaaggggctccatcatccttttacacgctcaggtccacagcgtcgcagggccctcgcaatggcttgggaaaccgctgaccacacggctcctattcccagcag

SEQ ID NO: 18953 - DNA, 122 bp, Homo sapiens
ctctgttcacacatcagatgtcagattggcttggccttttatgacagaagctactttgagcgacactcttgctggtgtgtgtttgtgtgtgtgtgcatgcgtgcatgcatgcgtgcatccct

SEQ ID NO: 18954 - DNA, 122 bp, Homo sapiens
ctgcttccttagcctctgagggcttcagacctgccgcgcttgcagccacaccatctccaacggatgctcactagcaggaaattggggccaaattcacaggcactttccagaaactcccccac

SEQ ID NO: 18955 - DNA, 122 bp, Homo sapiens
agacagggtttctccacattgcccaggctggtcttgaactcttcttgggcccaggcgatccgcccgtcttgacctcccaaagtgctgggattacaggagtgagccacacaatgcctgactag

SEQ ID NO: 18956 - DNA, 122 bp, Homo sapiens
cctgtcagaaggtaacaaaggggcaagggacagcatttccagtctaagccctggaatgtgcgtggcatcaaactgttttgcatttgtgagcaggaatacaactgctggacaacagatattcc

SEQ ID NO: 18957 - DNA, 122 bp, Homo sapiens
aaatgaaggaaagcaagaagacaatttttaatacgtacatggcaccacacccctctaagacgcagcaatgggagaaaagcagattggcgacctgtgtgtgcaacatgaaccgagtgaaacca

SEQ ID NO: 18958 - DNA, 122 bp, Homo sapiens
atgggaaggcagggcagcgggagtgaggatggcagagaggattacacatgtcaaggcagccggggtcatggaaacaaaacatgactggcctgggagaaacactatgaaaggacatacaccta

SEQ ID NO: 18959 - DNA, 122 bp, Homo sapiens
gtgatcatgctagtgcattccagccagggcaacagacccttttagaaacagggtcttactcgggtgccctggctagagtgcagtggtgtgatcacagcttactgcagcctggaactcccggt

SEQ ID NO: 18960 - DNA, 122 bp, Homo sapiens
gaacaaacgagcccccgcacattgccgctgaggaggagcacagacacgcacttctgccaccggctgaggctggatgtcttcataaagccctcagtgacagacatattttttcttagtaagtt

SEQ ID NO: 18961 - DNA, 122 bp, Homo sapiens
tcagttcggcaaatttgcgtcaaagttcgtgcacagcgcacagagctgtggcaaatgacacgaggaacctgtggagtgcttagctcaccctgctatgcggggatgcacgcagccctacagca

SEQ ID NO: 18962 - DNA, 122 bp, Homo sapiens
gcgccgcgactcactagcttcaggcagccgtcacagtgtgtctggcaggcttacttactgcgcaggcgtcaggtggagcagaagccgggaggggaaaagtgagcgatgacgcctgcgtattg

SEQ ID NO: 18963 - DNA, 122 bp, Homo sapiens
aggaaactgaggcataagtttaaataaatttcttaaggtcacacagcaggtaaggggtgccggcaagatacaaactcaagctgtctggctccagactctctgcccacaactattatgctaaa

SEQ ID NO: 18964 - DNA, 122 bp, Homo sapiens
tgaaaacatttagccctgctaagacagccactctgatccaagcctccctgctagaggctacgcctggctgagagacaagagggaaggtgcagagatgaaatcccagtgccctggactgtcac

SEQ ID NO: 18965 - DNA, 122 bp, Homo sapiens
gtaaaaaattacctgtggtttcgcatttgttttctgtctttttctttcttgcttgatcttcgataatactgggaaatgtaaccaatgtgattgggcttgttaatttggtgccttgcttgttt

SEQ ID NO: 18966 - DNA, 122 bp, Homo sapiens
ctgattggccagaaggaggctcccatgccaggccaggtttgcactctgttttcactggggcgtcttctgttccccaagaggtggcctcattttcactaagggaaggacaggatctatttggt

SEQ ID NO: 18967 - DNA, 122 bp, Homo sapiens
cagcggtcatcctactcccggtgcggctatgcggccatgaaaaggagtcttggggccggtcgtgcccctccacgcaggctccctcatagggtcatcccatcaaccctcgccaaaaacgccgg

SEQ ID NO: 18968 - DNA, 122 bp, Homo sapiens
attgtttggatgagggcatccagggaaaatgcactgaagaacatagcagagagccaaagacggagttttggggtatatgaaacctgacaaagagtctctgtgagtaagagaaaaaccaggtg

SEQ ID NO: 18969 - DNA, 122 bp, Homo sapiens
tgcagaagaggatggcagccccttctgctttcagaatgacatcgacctttcaagcgtcaccgctgcattagttacctgtgaagcggatacggcttctcacaaaggttgaccagcacgtacaa

SEQ ID NO: 18970 - DNA, 122 bp, Homo sapiens
attgctagcagtgctacagggaagtggcaagcctccatgaaggaaaatgggtgcacatttcgcttaacacaatattttattttctagaaatgaggcatggaattaggagagaccggaaggga

SEQ ID NO: 18971 - DNA, 122 bp, Homo sapiens
agagatctgtaagaagagataagacctcaagggaagtacgaggcagagccttccgcggcccgcgccctggcggccccaagtcagcggcggagacagcgcccaccccgctccagcgtggagca

SEQ ID NO: 18972 - DNA, 122 bp, Homo sapiens
cggcaggagcagtctcggacatgttgagaatcaaaaactcgggtacaagtggcaaagcgccgatgaagcagcgcctgggcagggccgctgtatatatagagcgcaggcgcgctctgattggt

SEQ ID NO: 18973 - DNA, 122 bp, Homo sapiens
ggaaggtagagaattaagtttgtcctgccgttgtctgtgtttttattacaccgggggccgcggcttatttggtgctgtactttctcatgtattcctaatcatgtcttttcctgttttcctga

SEQ ID NO: 18974 - DNA, 122 bp, Homo sapiens
aagcccgctcctgcccgggcccgcccacaagcgaggccccgccccaaaccccgccccctgcgctccgggaaagcggagccttgcggctccaccccgactcccgagagaatcccgcccccaaa

SEQ ID NO: 18975 - DNA, 122 bp, Homo sapiens
agaatggatggacctcattctgtaagacctggcttggggtggggtgcgggtggaggtagtcgggttgacagaatcttaattagagccaggaggaatctcaaattcttcacagatcattctga

SEQ ID NO: 18976 - DNA, 122 bp, Homo sapiens
ggccacgcggatgtccccacctgaagcttctgcctgcgaggttcccatatcggcttaggacgttaactcctcaggcaacacccagacccctccccaccccgaccttccttccccgccgcgat

SEQ ID NO: 18977 - DNA, 122 bp, Homo sapiens
cccccacgccgggctggtagtggcgtggctacaccgtggcctcaaggagccagtcctgcccggatggggctcgccggatcggtttcggttttcacgcactcccatttctgtggccgctgtgc

SEQ ID NO: 18978 - DNA, 122 bp, Homo sapiens
tcaaactcctgggctcaagccatcgtcccacctcggcctaaaaatggggaaggatttgatcggacatttctccaaagaagatgcacaaatggccactcggccacgcaaaggcactcaacact

SEQ ID NO: 18979 - DNA, 122 bp, Homo sapiens
tccttgtgtgggaggtccccggcctctgagatgcagcagggactgtggtggtgggcatcacgcctggtcatgccaggcacctggacacaggcttggcagaggcgccaggttgtcaatggcct

SEQ ID NO: 18980 - DNA, 122 bp, Homo sapiens
tcattgctgctgtttccatttcttggcaaaaattaggaaacacaactaaataaatatccacggaataaaatggtgcatttattcaccaaagtcttatcacacgtggagatgaataagaactt

SEQ ID NO: 18981 - DNA, 122 bp, Homo sapiens
ctcgtcggtgggtttggtgatgctgtgcagttcagctttaccgtcttgctgcagcgggaacgtcctgctgtagaagaggcgccgccatcccagacagtgttcataaacaccgacggcaaagt

SEQ ID NO: 18982 - DNA, 122 bp, Homo sapiens
cacacttgggcagctgaagccctgccattctgcatgagctgatcagcctgtgccacacttcgctcttgaggagctcaacggtctggcagggcagcaggaggctttctgggctctggactcca

SEQ ID NO: 18983 - DNA, 122 bp, Homo sapiens
ttccctctgaagtctcacatttccaaatggaagcttcccagtttccttgctctggatacacgtggtacgaccggatgaaagtcgggctcacggtgctgatgacaacatcgtattcctccact

SEQ ID NO: 18984 - DNA, 122 bp, Homo sapiens
gcgccgcccctgcctctccgctgctggctggaacgctgatctatctagttgctggggagacgcccccagatgcccgggccccactcggacttcagcacacatcccgaaggatggggaaagaa

SEQ ID NO: 18985 - DNA, 122 bp, Homo sapiens
ccttacaaaataggaggtcaccataaagttaggcaacaagtgtcactgctatatgtaaggcggacagaagatatcttgttttggaactgaatattcctaacctcatccctacaagtatttaa

SEQ ID NO: 18986 - DNA, 122 bp, Homo sapiens
aaaatctttttcttattttttcccattttcattatcatgtgggccaggcatggtggctcacgcttataatcccagcactttgggaggccatttcgggtggattccctgagtttaggagtttg

SEQ ID NO: 18987 - DNA, 122 bp, Homo sapiens
gtttgcaaagagaaactcatttcctatagaaacaatgctgcggtggcatttaattttccacgtgatcttcctgaaatctgtttaacccagatggaagcttaacacaagtcagcctgagccct

SEQ ID NO: 18988 - DNA, 122 bp, Homo sapiens
tgattctggtgttcacctgcgtgtgttgaaggcttgggtattaattctctaacgtggaatcggtgtccatccatcctcttcctcagtcctgcccattctccaggaaccacctcaaacaataa

SEQ ID NO: 18989 - DNA, 122 bp, Homo sapiens
caggcgcccggggtggaggccgggggcctacaattcctcctttcggcgtcccaggaggcacggacccccagccccggccgagtggccagtggggagcggccctcttccgggccaggggccgg

SEQ ID NO: 18990 - DNA, 122 bp, Homo sapiens
aaggagggctgagtgaccctcttcctgtaattgtctgtggctcccatagtagcatttgtccgtgctctcctcttgcttgtctcccataaagaccatgcaaagtccttgcagtcaaggccact

SEQ ID NO: 18991 - DNA, 122 bp, Homo sapiens
gtgcggtggtgccaggtgtcctcttgctgctgtgcagtgccctgaggtcccttgggaagccgctgccactctgttttgtcatcactgacaaactgtcgcaggctgctggtggctgtggccgg

SEQ ID NO: 18992 - DNA, 122 bp, Homo sapiens
tgttatccccactgggggtttcaccctgtgtgcgcagccccggcccggggtcccgccgtgcgcccccagcccgctgcacgcactgtcccccacgcgccctccgcacacccgcggggctctcc

SEQ ID NO: 18993 - DNA, 122 bp, Homo sapiens
tttccagaaaaagagataaaagaaagatgatatggacagggacaaacagacaaaaaggctcggcctctgcctctgcctaaggaccttctaatattaccatgagacgtgcctgttcttcctgc

SEQ ID NO: 18994 - DNA, 122 bp, Homo sapiens
aattgggcctcacaggggagagtccagagacagggccaggaaaagaaggtgagggtgtaacgtcattcagagaccagctgcacccagggctcacctcctggaggcacctagagtgagcaggg

SEQ ID NO: 18995 - DNA, 122 bp, Homo sapiens
cagttggccagtctactgctgctctcagcctccaaacttcttcaggcaatgctattttatcggctgcttctctacatttacactgcagtccactttgaccttttgttccagggaagcagctg

SEQ ID NO: 18996 - DNA, 122 bp, Homo sapiens
tttcttttccggattgggcatcccggcatctgcacgtggttatgctgccggagtttgggccgccactgtaggaaaagtaacttcagctgcagccccaaagcgagtgagccgagccggagcca

SEQ ID NO: 18997 - DNA, 122 bp, Homo sapiens
ctccatggcagcctctgtccccgcggcgggagcgtgcagccatcgctccaggctccccggcgcccaccagcagcccggccactcagccaccttgctgatgctgccgcacggactccagcatc

SEQ ID NO: 18998 - DNA, 122 bp, Homo sapiens
cataaaaatactaccaaagactaaacacttacctcctcatgctggaagttgtccactaggcgtgcaaaacaaaggcaagtgctttctactgactttttatcctatttttttaataaaggaaa

SEQ ID NO: 18999 - DNA, 122 bp, Homo sapiens
gacgaaacgtgcatccgcacacgtatcctaacagctgcttcattctcatagcagcgacatcgccctgtcactcctaaaacgtttttacacacaaaatcccgtttactcagccagtcgttaca

SEQ ID NO: 19000 - DNA, 122 bp, Homo sapiens
ccgtctcaccctcggcgaggtaccgcttctccctcatccagctcgaccccccattggggccgaacacataatcatctctgtcctgggagatgctgaagccacttggagacctctccagctcc

SEQ ID NO: 19001 - DNA, 122 bp, Homo sapiens
cagtttaatcactgatgtgaaattcagagataactgggcacgtggtattttttctggcaccgctagccgtgaatgtgtatggaaaataaagagtctggaaccgcatgggagactcaggagcc

SEQ ID NO: 19002 - DNA, 122 bp, Homo sapiens
gggaggcggagcttgcagtgagcagagatggtgccactgcactccagcctggcgacagaacgagactccatctcaaaaaaaaggaaaaaagagaagtgtttgaggccaggctcggtggctca

SEQ ID NO: 19003 - DNA, 122 bp, Homo sapiens
cctcaaacaccctgacacacttccggctgggactcccaaataccagcgaggctgccaagccgcgcggataccgactgggtgccccttcctgcacccgcgcctggaagagggaagtggccgac

SEQ ID NO: 19004 - DNA, 122 bp, Homo sapiens
gccaagaaacggacagcccctcatcgagccccgggtggggaggccccccgcctccgcccccgccccagaacgagtcctctggaggtggaccctgggctttcctgaggggcagggtccacagc

SEQ ID NO: 19005 - DNA, 122 bp, Homo sapiens
cggcacgacggggccgcgccggctcttcggcgacagcaaggccggcatctaactccacaccgtccgcgcttgcaccgcgcacccaggcttcgtacccagctcccaggtggggaccgcgcccc

SEQ ID NO: 19006 - DNA, 122 bp, Homo sapiens
cttctcggcttccactcctcgcagtggcggctgctgaacctcccttctcccacccccgggcgtgttcttcccactgttactgaggggccagctccctggattctcaggtttcctctcctcca

SEQ ID NO: 19007 - DNA, 122 bp, Homo sapiens
ctaatttgaaatggttcctttcttttttttttttttgagacagggtcttactctgtcccccgagtgcagtggaactatcttggctcactgcaaagcaaaataaaaagctagaaaagttttct

SEQ ID NO: 19008 - DNA, 122 bp, Homo sapiens
accgactgactctgacaggatccggggctgagggaaggaggcggcggccatggagttgggcgagctgctctacaacaagtctgagtacatcgagacggtgcgcgggtccagatatgtatcct

SEQ ID NO: 19009 - DNA, 122 bp, Homo sapiens
tttcggtagccagaagccctaagttgtcacaggtcccaataggactgctgaccagctgagcgtccctgagccaggatctcacgattcagctagccgtgggacggggccgggggtctgcagct

SEQ ID NO: 19010 - DNA, 122 bp, Homo sapiens
ctccctcaaaccctctgccacacgagttctttgccctgctcccacttcccagccagtccccggccactgaccagaagggaggctgatgcggttgccatccttgagcttcagccggctcttcc

SEQ ID NO: 19011 - DNA, 122 bp, Homo sapiens
acccgattggtgaagcctctggcgtcggccaataggacgtggctttgttggcgtgtgccgcggccgcgcgagtcctggaaagcgttgttggcccggttgctctggagccgggtctcgggtct

SEQ ID NO: 19012 - DNA, 122 bp, Homo sapiens
aagactacaattcccatgaggctcagcaagggcgatttagggtccagggaagcaatgagacgtgttctttgttttcctatgggtgaggaatggttgtatgagcagttgggtttcgggacgct

SEQ ID NO: 19013 - DNA, 122 bp, Homo sapiens
caagccagcgcccgccggggaacccacgactgtgtcacctgccccctgagcgttctggagcgccaagcttcgcgatctttgccttccggactcgcagaccggctcaaagcctcccctcagcc

SEQ ID NO: 19014 - DNA, 122 bp, Homo sapiens
ttatcccacacggacccagaattagccatcccaatacacctcaatctcggacttccagcccggaccacccaaaatcgccagaaccacccagagccgggggagacatagaaccttctcccaca

SEQ ID NO: 19015 - DNA, 122 bp, Homo sapiens
caggttcccgcggccttgcgagggcacgcagggcaaacagtgctttatctttcgcagcggcgatgagctggtgacttttgggggtcatcctgagggacatagacgaaactggttgggaggta

SEQ ID NO: 19016 - DNA, 122 bp, Homo sapiens
aaggggcgtggtctcgggaggggccccgaggggtgggcggggccgggagtgcgagccggacggggcgcagcgaggggaccggttggtgaggtcctggaggctccccgccaccgaggggcgcc

SEQ ID NO: 19017 - DNA, 122 bp, Homo sapiens
ccatctcaaaaaaaaaaaaaaaaaaaaaacaaaaaaaaaaaaccacacagcgatgacctgcggcatacaacgactgagatctccgagatgaaccggaacatcagctggctccaggctgagat

SEQ ID NO: 19018 - DNA, 122 bp, Homo sapiens
tcaccttcggacttctcattggttcttagggctcattgttccaagggcgcgtccaattagcgcgcagcgttagcgggagagcggaagaccccgcctcctcgcggctctagggccggcgcggt

SEQ ID NO: 19019 - DNA, 122 bp, Homo sapiens
gtggtggctcacatctgtaatctcagcactccctgaactcctgacctcaagtgattctcccgccttggcctcccagaagtcaggagtttgagactagcctgcttagcatgataaaaccctgt

SEQ ID NO: 19020 - DNA, 122 bp, Homo sapiens
gcaggaaaagcgcacacgcagctgctttccacagagtggcatattgtccagctccactttcgcaatctccgctagggttcgtgtttccaagcggataaagccaaatccttaatccttatgaa

SEQ ID NO: 19021 - DNA, 122 bp, Homo sapiens
ttctttgaagttctgcagcataaggaatcctaacgcgaatccgtgaacagtctattccgacggcgcagagaaatctcacgcggggatccccacgatgtgccggcgcttaacgcagacgcccg

SEQ ID NO: 19022 - DNA, 122 bp, Homo sapiens
aattgagactaataacagaacctctccgtctattcttgtcttaaaggcctgttagaatctcgacagggaggaaagtttccctgctgatagagttgtagcatatcaaaaatgaatcatgagta

SEQ ID NO: 19023 - DNA, 122 bp, Homo sapiens
ttcggcgtctctaaggccgagcagtttcctagctgcgctcacgcaaaatacctgtgtctgcgtacttttttcatccgtcgctcggccagagtcggtggatcagactcagcagctggtgcccc

SEQ ID NO: 19024 - DNA, 122 bp, Homo sapiens
gcggcccccgggagtcccgccgacaagaaagggctttgcaacaagatggcgaggaggcaccgacacacacaacaagggaaggagccgcgctgcccccggccgccgcccccgctactacaccg

SEQ ID NO: 19025 - DNA, 122 bp, Homo sapiens
ccaggcctgggacaggtcagggatactgagccacaaagaggccagggagatgaacgtgggcgctcctgagctatgtggccttgggcaggtcccttagcttctctaagcctcattttgctcat

SEQ ID NO: 19026 - DNA, 122 bp, Homo sapiens
agcgcaagacgctgcgggagagcctggccaagtgctgcaggtagcggccgcgcgggcctgcgtagagagaagcggagcggggcgtccacgccttggggagggaagggcgtccccagcgggcg

SEQ ID NO: 19027 - DNA, 122 bp, Homo sapiens
ggcgctctgaggccctccatggctctctttccagagtctgaggtgaccggaaggagaatgcggccctgggaccgtcaaccttggaccagctgcagccgacgcctggcagggctggtcgcttt

SEQ ID NO: 19028 - DNA, 122 bp, Homo sapiens
agaaaaaaagacatgatatagttctatgccatcgtaggctgcactgtcaccgttctagaccggctgactgtaggtcacatgggagtgtccttacagaaattagtgacttaccagatctggtt

SEQ ID NO: 19029 - DNA, 122 bp, Homo sapiens
ctccatgctggcctcttggaatgccctgactcatccttgtccacttgacctgacaaggctcgaatgccttcaagaaaccttccctgggccgggcgcggtggctcacgcctgtaatcccagca

SEQ ID NO: 19030 - DNA, 122 bp, Homo sapiens
gtcctgcctccttttgagcccccttgctcagtgtcagaaccctccgctggctgtccccgccgtgcgccacggctccaatccctatatgagtgagcagtagaatcacataggaataaaaagcc

SEQ ID NO: 19031 - DNA, 122 bp, Homo sapiens
gtaatttacagccagtcacagtggctcacgcctgtattcccagggttttgagaggccaagcggggaggattgcttgagcctagcagttggagaccagcctgggcaagacagtgagaccccat

SEQ ID NO: 19032 - DNA, 122 bp, Homo sapiens
tccaccgcgtggcacgccatgagcagaggaactggctccttacggcttccatgagcacctcgggagggcaggcaggccacagccagcctctgggaaaaccccatacagaataaaagcaaagc

SEQ ID NO: 19033 - DNA, 122 bp, Homo sapiens
gagtccggggcaggaggctgggagctcggcgccaccgcgtggcgctgagtggctcagggacggcttcggaccggcgaactactggttcgctgaactactggagatcttggcatgcatgccga

SEQ ID NO: 19034 - DNA, 122 bp, Homo sapiens
tgcgctaccaagtgccatgctttacaaacagataagcgcttcaaatgcgctacaaactggcgcttcagatgcgctacaagcacgcttcacgcgggcgacaaactgatgggagctacaactgg

SEQ ID NO: 19035 - DNA, 122 bp, Homo sapiens
ctgggactacgggcagcgttggagcggagggctggccctgggcacagcctgcagatggcccgggttggcgggaaggggaccgaagtggcaggggcggcggggagctcgggcacctttaaaaa

SEQ ID NO: 19036 - DNA, 122 bp, Homo sapiens
tccttttttacctgctcaccaacatctcacctggtcataaagagctgggttgctacctgccgacgcatgcgcgctggcccaggaattcactccgccagctgcagtcccagcgccgcacagag

SEQ ID NO: 19037 - DNA, 122 bp, Homo sapiens
tacaacccccacagcaccgcgcgcgaagctgggcccccctgagggaagggtaaggtgtcccgaaggtgccttcagaaaaaaattacgtacgtttttcgtcgctttcccacgatcacacagat

SEQ ID NO: 19038 - DNA, 122 bp, Homo sapiens
cagagcccagtatttcccacggcctccccacacacaccccgcgtggatgcggcgagggcccgccttagtcctggcagtgcgcaccccagctcagactcccgcttcttgtggcagctccttct

SEQ ID NO: 19039 - DNA, 122 bp, Homo sapiens
aaaagagaaagagaatatccactcataggagaaatcctgcataggctctcagagctggaacgagacagtgaacaggcatacgagccaccagacacagagtgcgatgcctggcagggaaaatg

SEQ ID NO: 19040 - DNA, 122 bp, Homo sapiens
gctggcgggggacacctcagatggcctggccgcactacagctggatgggctgccctcaggcgacatcgacgggctggtgcccacgcgggatgagcgcggccagcccatcccagagtggaagc

SEQ ID NO: 19041 - DNA, 122 bp, Homo sapiens
gcatcttgttaacctgatttacacttggctccacccataaagttcccactgattatcacacggcatcctcattctccagtctcacctactctgtctttcaaaaattccccaacggcatggcc

SEQ ID NO: 19042 - DNA, 122 bp, Homo sapiens
cgcgaggcccgtgcattccagagagcccagcgagctagagcaacaaaggagccgggtcgccggcggggagagttcggggggctgcggcgcgctggggcgaaggtggctgctgggccgcgggc

SEQ ID NO: 19043 - DNA, 122 bp, Homo sapiens
tagtatattatacatacaaaggtgacttttgtgcatacccaatagcaaaagtgtctgatccgttcagtgccctgcactttgaagatatttttgttagataggtgtggtatcacatacttcca

SEQ ID NO: 19044 - DNA, 122 bp, Homo sapiens
tgagattaaccagagggccaagttcaggtgacatcaggcaggaggcccaacagaggctggcgccccctttcctcagtatagcagagcttaagcaacatctctttgtcaagacccaggtcaac

SEQ ID NO: 19045 - DNA, 122 bp, Homo sapiens
ttaagagctgtaacactcaccgcaaaggtctgcagcttcactcctgagccagcgagaccacgaacacaccaaaaggaagaaactcgcgacacatccaaacatcagaaggaacaaactccaga

SEQ ID NO: 19046 - DNA, 122 bp, Homo sapiens
tcgtttgtaaataaaagacaagatcataattaggtacatacaggtaacttcttctccagacgaaatctttccatagtaatatagaaatgccttgtttctgatgatgtaatgcagtaactccc

SEQ ID NO: 19047 - DNA, 122 bp, Homo sapiens
cgggctccggacccacctggctggcctggggacctgggaaacccggtgtggtggggagaccgcaagcctggtcaggggtcccgctcccaatggggcgggtctcctgtgaggaaggcggagct

SEQ ID NO: 19048 - DNA, 122 bp, Homo sapiens
gagcaagctcctggcaccctgtagtctctccctctccccttcctgtattcggccaacgaccgacatcaggccattctttattaacctttatcaagccaggccggtcagcggccatcctcaat

SEQ ID NO: 19049 - DNA, 122 bp, Homo sapiens
acacaaaaatgtcaaagtgtctgatgaatgttcagccaataaaaactgggaatactggagcggagttgttctgggaactgaatcatcctgaggttctcctaaaaaatgtaacaagtttcccc

SEQ ID NO: 19050 - DNA, 122 bp, Homo sapiens
ctaatggcaaccgggcggggtgagcccgctctgcaggaactcctcgacggcgaaaaactacgactcccagggtgccccagggcttagcccagctttcccgcccgcccactggctgccggtcc

SEQ ID NO: 19051 - DNA, 122 bp, Homo sapiens
ctataaagaaaatacaagtctcctacaaagtactaagacacataagataaccacacttcccgacagcttatcgaacattgtgcaaatgcaccaggtgcagttttctggcttaaaacaacttc

SEQ ID NO: 19052 - DNA, 122 bp, Homo sapiens
tagagagaaggaaaacgcagcacagacaagtccctatatacacacgtctatatcgatgaccgaaaatactgggaggaaatccacccaagaggtaatgggtgctttttttttaactttcctct

SEQ ID NO: 19053 - DNA, 122 bp, Homo sapiens
gcacgttagcctccatggcctggatcttggcggcgctgtcccagtacaaacgcttcatttcggcctggcgccgctcaccaggcctctcagctggggcctctaccgaccggcgggtgttgcag

SEQ ID NO: 19054 - DNA, 122 bp, Homo sapiens
agcccatttgtacataaccaccttcctgaaaatccttaaccctctcctaccttcccaaagcgtggggtttgtttacttatctagacagcctttaagctgaatcttcagtaccaagctctgtg

SEQ ID NO: 19055 - DNA, 122 bp, Homo sapiens
acagatacacaagactagtctggctgagggaagaaacactgaaacagcccaccctaagttcgagggtctgcataagactaaggctggaccaacacaacagagaaaactccttgcctctacca

SEQ ID NO: 19056 - DNA, 122 bp, Homo sapiens
gacagtgcccacccctcccctcccagccctgggagaagggtctgaagcctgacatcagcacgccacccccatgtccacacctgccccgcacctgtgccctcccaggaatccctacacaggcc

SEQ ID NO: 19057 - DNA, 122 bp, Homo sapiens
ctggactccaccgccccagagcttgggggagatcttgtcactcctctatgtttccattcccgaggggtaaatggcatatatttttttctttcaaaacgaatcatagtcaggcgcggcctgta

SEQ ID NO: 19058 - DNA, 122 bp, Homo sapiens
agcaatggccggagcagcagaagggaagctgggagagtcggtcaaggaagggtgagcagtcgtgcccagtccagccaagagggccagggaggtgggcactatgaaacctccttggctttgac

SEQ ID NO: 19059 - DNA, 122 bp, Homo sapiens
cactaaagtctccatgaagaagacgtcaccctttgctgtgtcagagaaatgtagtaaaagcgagtaagtatttaatcactgcacactgctgcttgagtaataaagcatgtataaaagattct

SEQ ID NO: 19060 - DNA, 122 bp, Homo sapiens
aattaagttctacagggaacttaattataacttcctaagggaaggggaagctgggtggagcgcagagcacacacctaacccaccccaaggtaaattaaaaggatatggtaccaccatatcct

SEQ ID NO: 19061 - DNA, 122 bp, Homo sapiens
gctctgggaagggggttgttcagaggggcctctgctcccactcgggtcatggccttcacacgcacctcggcccgcaggggccccttactggacacggcccgagcggatggacaagaagctgc

SEQ ID NO: 19062 - DNA, 122 bp, Homo sapiens
tgtatggatacctgtgcgtgtacacacggcagagtggctgagccaggctccatgcggctccgtgcgtgggatgctgttgactttcacagttctaacctgtttcccctggagctccctaactc

SEQ ID NO: 19063 - DNA, 122 bp, Homo sapiens
gtgcccagctctgttggcaataaaaccttgtttctggtttcactgcaagacgttatttaacgctagtggcaccagaggttccaacaagaacacatgagaggccttatccagttacgaaagag

SEQ ID NO: 19064 - DNA, 122 bp, Homo sapiens
tcgccgccgcaaccgcctggtccctgctccgcgcagcgcggggaacagctcttggccagccgggcctcattaacatagccccgcccccacaccataggccgatcgggtgggcggggcctggg

SEQ ID NO: 19065 - DNA, 122 bp, Homo sapiens
tgtccccacccgcttgcggaccccatcccggtgcctctgctgaccccttcccggggtccccggtaaccctctctgacccctctgggtcttggggctcagtcctgagctgggcatgcatggac

SEQ ID NO: 19066 - DNA, 122 bp, Homo sapiens
acactcaggcagtagaacacggtgtcgtggacgagcgaacgcgccatggctggagcgctgcgcccctgcacaaactccgtggcgtctgcagctggagtgggggttagagggtggagctagtt

SEQ ID NO: 19067 - DNA, 122 bp, Homo sapiens
cggggaggggtgccaactctgcattgccttccactccaggctgattgttaagttactcttcgtcccttagtaataggcttggggggaggggtttcattacagaaggacatatgaaatagaga

SEQ ID NO: 19068 - DNA, 122 bp, Homo sapiens
gaaatgggttctgcttgctgaccaccagcttctgatgctgatgcgatatgtagcctttgacgtgtccctgcggggcagaaagggaggaatgcgtttacatttttggatctgagtcatgtcaa

SEQ ID NO: 19069 - DNA, 122 bp, Homo sapiens
agaaaaaaaactcagtgaaccgtttctgagcgttccagctcatgacttgagggtgtttgccgctgactcatgctgaagccacttggtgtctgcgtttgaaacaggaagtgtgtgttagtggc

SEQ ID NO: 19070 - DNA, 122 bp, Homo sapiens
tcatgggctcagagaggtcacgcctgcccctgccgaggacagagcctgtcacaaagaaaacggcacgctctggaagtttcttccatccctttccacctcctccttcaaaacagagtctgcgt

SEQ ID NO: 19071 - DNA, 122 bp, Homo sapiens
tcagttccatcagttccctgagacccctgcaacacttggagaattgttctgcctggcctgcgggttactaggacctgatggtattgctgtattcatgtctaagcttccactggaatttttaa

SEQ ID NO: 19072 - DNA, 122 bp, Homo sapiens
acgctctcggaatacacgctaagtaagaaagctagctatgtcccagaactctgaagtaaacggaattcagcagggattagttcccttggatttctacagagccatgattgttgctgttactt

SEQ ID NO: 19073 - DNA, 122 bp, Homo sapiens
agtcagtttctcaggtgaggaaaccgagctgacgcggggctggcggcccggaggcaggctcgggaggtccgggcctggggactgggcgggcacgctgcgccgcggaacgctcgggtcgggcg

SEQ ID NO: 19074 - DNA, 122 bp, Homo sapiens
ggtgcccagcgcagcttcatgcatttctattctattcactgagcacctctatgtgtctggcgctgttctagggacttgtaatctttcattgaacaaaatgggcaaagatgcctgccctgctg

SEQ ID NO: 19075 - DNA, 122 bp, Homo sapiens
aggagtaccaagcccactgcactcatgcttgaaccactgctggggcctctggatggagctcgctcttgggactttcatatgcgggtgccctcacatccacccgtcatccatcttcccttctg

SEQ ID NO: 19076 - DNA, 122 bp, Homo sapiens
ccgacctctgactggcgggagaaccgggggagtggctgctcccgccggcccatggccaagcgcagacggctgccggcaggaaggagaggagggcacttttctgtaccgctgtcgcgagaagg

SEQ ID NO: 19077 - DNA, 122 bp, Homo sapiens
tcagctccctgtgctggacacagacccggagaacagctcagcacgaggttaccaggctgacgttgcacagactgtgctggaaattacagagtgccttggagggaaaaacaaactggggtttc

SEQ ID NO: 19078 - DNA, 122 bp, Homo sapiens
accttaggaccgagcaccagggcaggttgcgctgactctgcggccctccaggacggacaccgggtgaccccttagggcacccaggcaagatccctaagaggcacccaatgcccaggccaggg

SEQ ID NO: 19079 - DNA, 122 bp, Homo sapiens
tcgctttccttgcttgtctgactcattctccttttcttttctcctgcttccctggaactgcgttcttcaaaagatatagcatatatattttatctgagactctgctttctgaggaaccccat

SEQ ID NO: 19080 - DNA, 122 bp, Homo sapiens
ccactgcgggcgcagcaccatatccattcatctgtcccactgcggaggcaacaccatatccgttcatccatcccgctgcgagagcagcaccctagccagtcattcgtcccactgcgggcgca

SEQ ID NO: 19081 - DNA, 122 bp, Homo sapiens
aggtttggcttcttcgtggcatttgtagaaaactagcaaaatatgagctttgcattcccccggatccagaagccaaatgggcagactagactttgttggcactctggccctcccagcacacc

SEQ ID NO: 19082 - DNA, 122 bp, Homo sapiens
acgcatggaagggagtcaccatggcgactgggccaatgcctgatggtccttctcagaggccgcatagtgaggtgttcaagcagtttctgaagccaggtttactggctttcaatcctgacttc

SEQ ID NO: 19083 - DNA, 122 bp, Homo sapiens
gcttcagggcaaggtcctgaccttgcccaactgcagcatcttccgcttttgttgtctgagcgcggccgcgggacaagggatgctggcgggcggcaggggcgagcgccgcgggcgagaggcgg

SEQ ID NO: 19084 - DNA, 122 bp, Homo sapiens
cagagagtcctcctggagatttgggttctctctatagccattgaagcgcagcatgtgcaccgcagaccgccggcgggcaaggcgggccaggctctcttggagtgtctcctcatcggcgtccc

SEQ ID NO: 19085 - DNA, 122 bp, Homo sapiens
agtcccacctccgtgacttctagcaaattagcaaactttgctgctgctaagcctataaggcggacagaaatgccatctttaaagcttgttatgtaaagtgcctaggacctcgtaggcatcaa

SEQ ID NO: 19086 - DNA, 122 bp, Homo sapiens
gcctcctttgaaggactcgctcacttccccggcaggtgagtaagcagctcacagggaccccgtgagcaaagcctgcaaggggcagagccaggctgcaaacccaggccctgcacacggctctc

SEQ ID NO: 19087 - DNA, 122 bp, Homo sapiens
gccctttgcatcgtcccctcccccacccctgctgtgggttcccatcatttcctgtgtcagcgcctggcctacccagattgtatcatgtgctagattggagtggggaagtgtgtcaaatcaat

SEQ ID NO: 19088 - DNA, 122 bp, Homo sapiens
tttaaattttgctttaaatttaattgcttttctcctttttctctaataataggactatttcgcagtttccagtccttgattaattaaggcttcagagttcgttcttacatatgccatgtctt

SEQ ID NO: 19089 - DNA, 122 bp, Homo sapiens
ccaggggagcgttacagttcaaatccaggggctgtctactggcaggatcccttcttgctgcgggcaagtgagtcttcattctattaaggcttccaactgattggatgaggcccatccacatt

SEQ ID NO: 19090 - DNA, 122 bp, Homo sapiens
tgcccggcccgtggggggaggacccccccaatgaggctcaggaatttggggtgcaaggcccgctgcggggaggcgcggggggcggggctgcggccgggcctggagcctctcgcgctctcccc

SEQ ID NO: 19091 - DNA, 122 bp, Homo sapiens
taatttatttgtatgctcattttaggtttccctcaagtaaaacgtaaactaatccaggcacggtttttgttgttgttccattattttgagggctgggcacatagatgcgcaaggagtgccca

SEQ ID NO: 19092 - DNA, 122 bp, Homo sapiens
caggtgtttgctcagttgctgacccaaaagtgcttcatttttcgtgcccgccccgcgccccgggcaggccagtcatgtgttaagttgcgcttctttgctgtgatgtgggtgggggaggaaga

SEQ ID NO: 19093 - DNA, 122 bp, Homo sapiens
aggtttttctctggacaaaaaggggcctaccatttagactctcacactcagtcagccctgcgtcaaggtcacaccacatagggccatgagtcatggccaaatcaggcctgccctgcctcctg

SEQ ID NO: 19094 - DNA, 122 bp, Homo sapiens
tgccttacgtgtaccagtgcgtttgtaaacgttcctggctttcgtaggcattgaaggctgcgtctcagctttgctcccgtcctttgcagtaacctgtgtacgggaggctccgttgtttgcca

SEQ ID NO: 19095 - DNA, 122 bp, Homo sapiens
ttcatcagaagtgatatccaactccccaagttgcagtggttcctggagcccaggaccacccgcctggaaagggataagttaatgggagtagggtacggtgaaagacagaaagaaaaaatata

SEQ ID NO: 19096 - DNA, 122 bp, Homo sapiens
cagaggaaggggcactgagcaggtagcagggacgccctggctccttcccctctctgggtccgggactgcatgtgagtcaaatgacaaggtgacaccagctgatccccggcatctcccctccc

SEQ ID NO: 19097 - DNA, 122 bp, Homo sapiens
ctaaatctttcagggctttttgcgcctgatcaccaagaggttggagaggtgggaggggcgcgggggaaacagctcaaaagaaatgccaggtaagagctcaatattatgaagtattaaaaatc

SEQ ID NO: 19098 - DNA, 122 bp, Homo sapiens
ggaagagactggaggaattcccactccagccctgctgcctgctggctaaaggacttagtgcgagccatttccccttacccggcttcagttttctcatctataaaatggatgataccgacttc

SEQ ID NO: 19099 - DNA, 122 bp, Homo sapiens
taagaatacaaaaacatacattgcatagcccctagtactctctggtttcatggaccaaaacgtgcaggattgtattccttattcccatagtatatggtagcactttaattttttaatgtctt

SEQ ID NO: 19100 - DNA, 122 bp, Homo sapiens
cagttctagtcttcagtttaatttgcctccatacaaaatagtctgcaagtgcccgttcatcgggccctgtaggttgtacctgtttgtcactgaaactacaaattaactgacagtaaaggtat

SEQ ID NO: 19101 - DNA, 122 bp, Homo sapiens
tgtcattgtctgtgtttgttggctttgtccaataatggtctattgaggggtgaagatatacgtaattagctttctgcctattggcttgtacactccagggtatacttggcagatcagtctta

SEQ ID NO: 19102 - DNA, 122 bp, Homo sapiens
accacagagaggcccggagcaggaagctgcaacgtccacctcctcgacccggctccccgtcgccctgtggcctaaggtgtgatcatttcatgcctgatcggcctccctccagcctgttccct

SEQ ID NO: 19103 - DNA, 122 bp, Homo sapiens
acccgcaacatgatgcgatgctcgatgttgagaaggatcttcttcttctccctgtagtcccggatgagggcgtgcagtgtgtcacagtggggaacccagccaatgaggcccgagttggtcga

SEQ ID NO: 19104 - DNA, 122 bp, Homo sapiens
aaagtttgtgaaccgagattacaacatccaacctcaggaagtcaagtcctctgtccccagcgctcccacccccatcccactcccactgtgaacccactgtctccagaccggtgccctccccg

SEQ ID NO: 19105 - DNA, 122 bp, Homo sapiens
tcgtgggctgcagagcggccaggccacccttagaaccatcgttggtgttttccaggcaatcgtgaaggaacatcctccatcagaaacagaagagaagaacaaaatcactgctgcgatctttt

SEQ ID NO: 19106 - DNA, 122 bp, Homo sapiens
aaggagctctgggaacaactctcaaagccccattatttctctgggtcaggttaaactggacgacaaggatgggcgactgtcactggcctgcctctggagtctgagcttagagattcctcatg

SEQ ID NO: 19107 - DNA, 122 bp, Homo sapiens
tggacttgaggcacaagggaaatggacttgcgtgcccttggtaagctctggcggcactcccgaagttaaggacaccggccacaatggaatggagtctattgacgtttccttctccctttgaa

SEQ ID NO: 19108 - DNA, 122 bp, Homo sapiens
tgcaccagggctatagcctctcaggctgtctgcagacagacaccaggccatctgccctctcgccttccacccaaacacagctgctgggctccatcccagcttcagccatctggaggaggaac

SEQ ID NO: 19109 - DNA, 122 bp, Homo sapiens
catctacatggttacaattattagttttgcctttctaacacagtgcacataaagtctgctcggcttacaatttgggggatggaggttctattctgaaggtttttctggatgtaagttaataa

SEQ ID NO: 19110 - DNA, 122 bp, Homo sapiens
acctcattcccttcgactctctggggcgagatgctcccttttcagagcccccaggcccctcgggcttccacaagcagaggcggtccctggacacgccccagtccctggcatcgctgtcctcc

SEQ ID NO: 19111 - DNA, 122 bp, Homo sapiens
aggcgggcgctcggggttggagccgagggtctgggcaaaccggtgggtccctccccactgcgggagcggccagggtgggaaaaccgcggtcgggcgggcggggtagggccctcccgccgccg

SEQ ID NO: 19112 - DNA, 122 bp, Homo sapiens
aatgcatccaggaataaaggcccgagtctgggtccaaggagcctgcagttaagttaggggcgggggatgtggtgcctccacagtaacccagctccgctccaaggaccaccaggagagctggt

SEQ ID NO: 19113 - DNA, 122 bp, Homo sapiens
aaaggggacagcctcgcccctcgagcggctgctcccgcagctcgctcacccctgcgggtacgtcgtcactcccgcgtgcggccccgtcccgactcttggatcggactcttcagtcccttctt

SEQ ID NO: 19114 - DNA, 122 bp, Homo sapiens
gagagttgcggaactccggagttcttgggcttcctagaaggataagaagaggcgcagtgccggctttgcttttcaggggcaaattaagcaaaaggtctactctacccgggaagaaagatctc

SEQ ID NO: 19115 - DNA, 122 bp, Homo sapiens
tccttactattgctcacaacaaccagctaagacactgccaaagaaacactcacagctggccggtccacggcatccggaggggactcgggggacaggcctgtcctgcctctccccagcacctg

SEQ ID NO: 19116 - DNA, 122 bp, Homo sapiens
atggagggctgctgtggaggaaggagcctagaacttgctagaccttcatacacaccttcccgggagcctggcctccctgcagagcagtctctgacacagaaaaggaaggaattagcataatc

SEQ ID NO: 19117 - DNA, 122 bp, Homo sapiens
tactgcccctgccgctcccatccactctcaactgctgtcaacggccgggtatgggcccaacgctccagctccatccattctcaggagtagttgatttggcagctgagttgttacactcctta

SEQ ID NO: 19118 - DNA, 122 bp, Homo sapiens
gtacgcacaagagtaaacaatgcagaatgatcagcctcacagcgggtcacaggacacaaccgccgcgctctggttggacgcaggctgcatcctgtttcccggacacatttattcagcccaat

SEQ ID NO: 19119 - DNA, 122 bp, Homo sapiens
aatcttccagatggattgccacaaagacgagaaaggcaccatctatgactatgaggccatcgcacttaataagaatgaatatgtttccttcaagcagtatgtgggcaagcacatcctcttcg

SEQ ID NO: 19120 - DNA, 122 bp, Homo sapiens
aaccggcaccggcagcagcggcggcggaggcgacagctccagccggacatcgccgaccggcggcaggggcctcataggagctgcatgcgaccgctgtccagcagggcccagcagtcactacc

SEQ ID NO: 19121 - DNA, 122 bp, Homo sapiens
aatagaaatttctgtcttttccagatttgttcacattcccctgatttgtagtcattttgtcggcttgggaaagtggtttttgaaagatcgtctttataaaggtaggctctgataggatgctc

SEQ ID NO: 19122 - DNA, 122 bp, Homo sapiens
ctgagatcacaagtcgcttccaaaacacaagccagcgcggaatcggaagcgagtgcatttcgcaggcagccgtggacacgatcgggtttcctgtgccagtcaattacatgagtcattttaat

SEQ ID NO: 19123 - DNA, 122 bp, Homo sapiens
cggacaggtttcttgcgtacttgtttgccgtcttgaatgagagcgtttggctgctgagcacgtgctgtggcccactgtttggatttgtctacttcaccctgctctttgtctctcacttcttg

SEQ ID NO: 19124 - DNA, 122 bp, Homo sapiens
ggcgcccggcccctggctgcgcagacccctcttcagcctgaagctgtccgacacagaggacgtctttcctcgccgcgcggggccgctcgaggtcccggccgacagccgcgtgttcgtgcagg

SEQ ID NO: 19125 - DNA, 122 bp, Homo sapiens
ctcgtcccaggtcagagtgagggctcagcggactagaactcgggtctctggtgcaggtcccgcgcgatccagcccggctcaagaaggccaggcgacctggaatgcccgggagacacggagaa

SEQ ID NO: 19126 - DNA, 122 bp, Homo sapiens
cgacgaatctacttgtttgtcaagtttgaaacctgtgcattgagtgattccgaaacgccccgcaccccgccttgcctgcctcagaagccggcgcttccggagatgccgggatcgcgactcct

SEQ ID NO: 19127 - DNA, 122 bp, Homo sapiens
accgcagacctgctgtgtgtggccggccggccggaccttagcacgtcatcactgggctcacggtcctgcccctgagcacatctgaccggccgtggtcagggtccacgcagacgtccacctct

SEQ ID NO: 19128 - DNA, 122 bp, Homo sapiens
attattaattgcctaacatttggtcttctcatttgcctggggatcagagagaatccaggtcgtcaaggcaggaggaagctgttggctaatagctgcagagatttcactctctaagccttcta

SEQ ID NO: 19129 - DNA, 122 bp, Homo sapiens
aaacttcttccccccaaccctggtttgcgcatctgtattttctgatattcctacaagaaacgtattagtcgtgtacttttaaaaaggcaccaaatatttccatcacagggatagatggaaga

SEQ ID NO: 19130 - DNA, 122 bp, Homo sapiens
gccgaggagctcttctgtctcctgggcctgtggctccagggacactcagatatgcaaaggcgtcttgaacagccaacacgcccacccaaagctgggagagactgggctgcaaacaagcctca

SEQ ID NO: 19131 - DNA, 122 bp, Homo sapiens
cagctggcctggggctcgtgtctgggcttcggacgttggggcccggtggcccaccctttccgtagttgtcccaaatggagctggaattggatgctggtgaccaagacctgctggccttcctg

SEQ ID NO: 19132 - DNA, 122 bp, Homo sapiens
aggagtagaaagccctgagagctattctaccgtgtatgctgctgctcctctgggtctagccgtacagtggggctgccacacttcatgtggatgctccggaatgtctgcaagggatccagtga

SEQ ID NO: 19133 - DNA, 122 bp, Homo sapiens
accacgggctgcgggctgcctaggtgagccgtctcgtaccgattccttcagggcgaaaagcgtggggccgtgcggagggagtagcggcgcggccccagcatgcacctggcctgagggttgtt

SEQ ID NO: 19134 - DNA, 122 bp, Homo sapiens
caacagagattaggtctcaatgtttttagtctgctctgtactcctcagaatggacagacccgggctgattttggtgttctgtggctatgagatcagtggttgcctccatgtgttaggaacat

SEQ ID NO: 19135 - DNA, 122 bp, Homo sapiens
gagggagaaggagcagacagactctcataaataaggagttctggtgaaacagaatttctgcgagagattcaattatagcaaaactttatggaaccaaaaagcttaaaaaaaaatcagaagtt

SEQ ID NO: 19136 - DNA, 122 bp, Homo sapiens
tgaaaaaaatggcaaaagcccccctgagctgcaagttcaagtgcggacgtgacgtccctgcgaacttgaacgtcaggagtctggatggacagagacacacaaaacatgggcagggcgagcag

SEQ ID NO: 19137 - DNA, 122 bp, Homo sapiens
acagcaagagcagaacagcacggggaagttgtgcctgtcacacatgcgggcggtggccagcggcgtgaaggcccggcgccccagcgtgacacccctggtgtgggacgacatgctccgagacc

SEQ ID NO: 19138 - DNA, 122 bp, Homo sapiens
ggactgcgggccgcccgcgctgcagggccgcgggtcaccgcagggggcgccggggcgctacgggtcctcgggcctggtcttttccggtccctgcccgagcccgcgcctttcccgcctttcgg

SEQ ID NO: 19139 - DNA, 122 bp, Homo sapiens
catcccggacacccgcgtccactgctgcctctacttcatccccgccaccggccactcgtacgtccctgcagtgtcggcgtcctcatgccgggtgccctgggttccctctgtcccctgggact

SEQ ID NO: 19140 - DNA, 122 bp, Homo sapiens
atgtatgaagagcctctggcaggtcagtgggtgcgtgcaccgtgcaccagtgaagcagggcgaggcattgcctcactcgggaagcgcaaggggtcagggagttccctttcctagtcaaagaa

SEQ ID NO: 19141 - DNA, 122 bp, Homo sapiens
ggctccctgtttcttatcaggccaaattggaccctccatcctggcattcaagtcctcctgcgtgcccctggctaagcttgctcttccgaatgctctgtaacattcttcccacaccagtacac

SEQ ID NO: 19142 - DNA, 122 bp, Homo sapiens
gcaacagtccagcaccaacccggcttaactgcgcctgcgcactccaggagtttccccccacgcccctttccgaggactagcgcccgtcgcttagcaacgcgcgagtcacagtcgccgcgctt

SEQ ID NO: 19143 - DNA, 122 bp, Homo sapiens
caccgagtccaagaacctatcaccactggttagggctacttgtagctgtacacctgatctcgaagaaatgtaacttcgctgtttaaagcccttcctagtgcccttaaaataagacccaaaga

SEQ ID NO: 19144 - DNA, 122 bp, Homo sapiens
tgggctggggaaaagtttgccgagaccggctgggagcgcctggcagctctggaattccagcggccgccgcggggttggcgacgccaggcaggagcgcggagcggcgggtgcagccactggga

SEQ ID NO: 19145 - DNA, 122 bp, Homo sapiens
acgggcctggcgcgctgatgctcaagtgcgtggtggtcggcgacggagcggtgggcaagacgtgcccactcatgagctatgccaacgaagccttcccggaggagtacctgcccaccgtcttc

SEQ ID NO: 19146 - DNA, 122 bp, Homo sapiens
actgccagaacacactgctacaaggtcccagatggccacgtctctggtgagtgcctgggccgtggcaggacggctgggcgccggactccagtggctgagaggagggattccggggcggtctg

SEQ ID NO: 19147 - DNA, 122 bp, Homo sapiens
aagtaggcagccgagaagcgggcacacaccgtccgtgcctctgcaggtgcactcggggcgcgagggaacagcacctccctccagagcagccccaggctcccaggcctcacccacaagattcc

SEQ ID NO: 19148 - DNA, 122 bp, Homo sapiens
ggaccaggccaggtctatcctgtgacgttgcagccaagatccttctgcaagaaaacgtgtcggccgggcctctgcacgtgcggttccgtctgccgggaccttccctccaccatctgcttggt

SEQ ID NO: 19149 - DNA, 122 bp, Homo sapiens
caggcacacgccaccatgcccagctaatttttttgtatttttagtagagacggggtttcacgatgttggccagtgtggtctccgtctcctgaccttgtgatccgcccacctcagcctcccaa

SEQ ID NO: 19150 - DNA, 122 bp, Homo sapiens
ggcggagggaaactgaggaagcggtgcctgtctccccgaggaaataggcccttcaccttccgtggaagctgggcggacacgcgcggcccccggactcgccctcgtccctccctccgggcccc

SEQ ID NO: 19151 - DNA, 122 bp, Homo sapiens
cgctgtgctgcccgagggtagaggagcgtcaggcgtgcttcctgtctgtctgcagcagcccggctggcccaaagagactctagggacccaagctctgagtcatggcttcccaggccttagtc

SEQ ID NO: 19152 - DNA, 122 bp, Homo sapiens
aggggaggggcggccacaagatcgcggaccggcttctcgcgataacgggatcgggagccgcgatggaccccacccccagccgccgcgcctgcgcagcagcacaaggccgcctttcggagggg

SEQ ID NO: 19153 - DNA, 122 bp, Homo sapiens
ctgtagagtgctaattgtaattcacaattctcactgccaactttgttcaactagcgttcacgttaaaatttcaagtttagatgacaatgcaaaacttgctatatttcactaatctgagctaa

SEQ ID NO: 19154 - DNA, 122 bp, Homo sapiens
ggtgcctggaagctcaggtgggagctggagcccagtcatagcagatgttctggcctgtctcggaacactgcccccttgccacgcctggtctggtgggtattgggtgacagacatcagctcct

SEQ ID NO: 19155 - DNA, 122 bp, Homo sapiens
ctgacctgcttccccaacgcgccctcacgctttcctgggagagcacagcgctgccggagacgcggcgcttctgtcaattgtgcagagcaattactaagaaaatattgtgacgatgttgtagg

SEQ ID NO: 19156 - DNA, 122 bp, Homo sapiens
gccgggggccgccggtggagctgcgcggggtgagcggcgcggggaacggggactgcctgccgccctcgccctcgtcccccaccggcggaccccggcgggcattcgagagccgcgcggccagg

SEQ ID NO: 19157 - DNA, 122 bp, Homo sapiens
aaaaaaaaaaaaaaaaaaaaaaaaaaaagctagtcctacaatcagaaatggggcagttgacgagaggaaaggctgcaggccacaaagcagttcaaggtgaaggccaggcatggcttgttact

SEQ ID NO: 19158 - DNA, 122 bp, Homo sapiens
ctcacgcctccgctgaaatgacaggcacaagccaccaggcccaggtaatttgtgtagaggcgggggtttcaacatgttggtcagattggtctcaaactcctgacctcaagtgatccgcctgc

SEQ ID NO: 19159 - DNA, 122 bp, Homo sapiens
gctccgagaaggcgccggtcttgaagcgctgcaccacgcacgtcttgcccacgcttgcgtcgcccaccagcaccagcttgaacaggaaatcgtactgctcgtccgggtcccccgggcctggg

SEQ ID NO: 19160 - DNA, 122 bp, Homo sapiens
gtgctgagactgcaggcgtgagccaccgcgcctggcctaaatgtttactattattataaccggactcagaaactctgggtttgagtcctagctctaccaatggctgttaatgtttgggcaaa

SEQ ID NO: 19161 - DNA, 122 bp, Homo sapiens
gaagtacatgccaccatgcccggctttttcaaaattgtatgggttgggcgtggtggctcacgcctgtaatcccagcactttgggaggccgaggtgggcggataacttgtggtcaggagtttg

SEQ ID NO: 19162 - DNA, 122 bp, Homo sapiens
ggcgccgctgttggccaaagtggagagcttggcgctccagatctcctcgcgcagccgcagcgcgctttccagggcagccccagctcagactccccagcgccagcctttacaccgcttcctcc

SEQ ID NO: 19163 - DNA, 122 bp, Homo sapiens
tgacatgctggacatcctcagccacactcgtggggaggccgtcgtccgcgtggccatgtacgcacccccagagcccatcatcgactacaacatgctggtcatcttcatcctggctgtgggca

SEQ ID NO: 19164 - DNA, 122 bp, Homo sapiens
cctctgctctcttgtgagtgttggagtctgaggcggggcccgtggacaaggcagtttctgcgtctcttggccacagctgcttggggaagtgttttcattgcagcaacacaaggctgttggtg

SEQ ID NO: 19165 - DNA, 122 bp, Homo sapiens
gacagtgaaaccagcgatggctgcaattgtaaaaccagcatcttgtagttgctcactacacgttgactgttcttcactttcttaagaggttttgcagcccaggctcttggcttctgaatgtg

SEQ ID NO: 19166 - DNA, 122 bp, Homo sapiens
ggattgctctggctcaaaacagccagtcttaattctggtgcgatgaatggctttggtggtcgtcccagataagaacattcagcgtcagcaagaaaggctgtaggtatttggctgaatgtaat

SEQ ID NO: 19167 - DNA, 122 bp, Homo sapiens
ctgagtccttcctggaaatctgcttcaatacacagagtctggaccagtggagaagggcagcgccataaaatcacagggcctttgcttcaaaggcaaggccatctgccagccgctcactgtgg

SEQ ID NO: 19168 - DNA, 122 bp, Homo sapiens
tgaaacgagtctcccgtttatcctgaacaacctcagagagaacactgatagggtgtttttcgacccttttatcagctgtagggtctgggtctgggtttgtgtctgcctcctcctaccttctt

SEQ ID NO: 19169 - DNA, 122 bp, Homo sapiens
cctgcctagagtaagatggcgcttttcgtaagcacctctccaggacagagatttccataacgagagtcacgcacttgcaggccatctttgccattatccaagacggtgagccgtgcagcctc

SEQ ID NO: 19170 - DNA, 122 bp, Homo sapiens
cactgccgcctcgggcgccgccgcctcctcagcctcggccgccgccgcctcagccgccgccgcccccaataatggccagaataaaagtttggcggcggcggcgcccaatggcaacagcagca

SEQ ID NO: 19171 - DNA, 122 bp, Homo sapiens
aacaacacctgacttaaaatgttttctgtcttcgtaacagcctcattgttcttactgacacggcagtaaataaacttcatgaacgtaaacttcaaagagtttatcctagtaagatagcactt

SEQ ID NO: 19172 - DNA, 122 bp, Homo sapiens
cgctcacctggcggccgggcccgacggccggaccatcgaccgtttctctcccacctagagcgcccctcgccagcccgctctgtcgctgctgcgcggccctggcccgcaccccagggagcggc

SEQ ID NO: 19173 - DNA, 122 bp, Homo sapiens
tgggtaaatccccctgtagttccaggttaaagctgtttgtttaaaagatttgtcctttgccgattctcgtgaggatgggagggggtcttggagcccacccttccctcgatctctgtctgcag

SEQ ID NO: 19174 - DNA, 122 bp, Homo sapiens
cgtcttggccaactaccagaggcactccgtcgagcgatccagctgccgctgaggctggaacggaagtgaagcacagactctaatggcttccggttgttactcaaccgttagggtcccttccc

SEQ ID NO: 19175 - DNA, 122 bp, Homo sapiens
ggttgcagtgagctgagatcgcaccattgcactctagcctgggcaacaagagtgaaactccgtctcaaaaagagaaaagaagtctcacaaagggctgggcacagtggctcatgcatgtagtc

SEQ ID NO: 19176 - DNA, 122 bp, Homo sapiens
aaagtctacaaccttgagagatatcagagcatgggttgaaaatagcatgcaacaagacctcgctctcccttctcttccccctcaatctacaataaggttttctggagccacccataattcaa

SEQ ID NO: 19177 - DNA, 122 bp, Homo sapiens
cgtgcgtcggtcaagtttcccgggtcgcgtcaggcttctttctcagcaccgagcgagcgacgttcgtgaagctttcgttttgagcggccagactctgctgttctcaagcctgggaggcacag

SEQ ID NO: 19178 - DNA, 122 bp, Homo sapiens
cagagcagcccgctggccacacttacccagttcggcatccgtaaggggcaggtggttgtccgcccactcctccgacttccccagcaccgtgtcgaccccactcaacaccatctggcccaagc

SEQ ID NO: 19179 - DNA, 122 bp, Homo sapiens
tcagttcccgcgccatctggcagagggcgcagggcagacaaaaggtgagggccgcccagtcgtgcccgacggagccctagagggtaggagagagcggtcaggagccccgcggtgggtcccag

SEQ ID NO: 19180 - DNA, 122 bp, Homo sapiens
atagatacgtgtagagcatatgtataatgcactgtattcaggaattccaagcagttcgaacgtcatgacccctcagaagttgacccagaagctggtgaaggaggcccagagaaaggtaacaa

SEQ ID NO: 19181 - DNA, 122 bp, Homo sapiens
gttgtgcgtggggtactcttacactcacgggggtgccgggcccctggaacctgcaactcacgcaggatgctcttttaacttactctattatgtttcctgttttatacggtgctgtatcgttg

SEQ ID NO: 19182 - DNA, 122 bp, Homo sapiens
gggtggggtaagtcagggtccaactgcacttgtacttttatcctacatattttccttctacgtaagacagatgggaatgtgattagcccaccccgacagcacaccggcctaacacccccaag

SEQ ID NO: 19183 - DNA, 122 bp, Homo sapiens
ggagccggactgcgcacccagcgccccgctctgtggtgtggggtgtgtggtatctgagcccgggacgcggctcagtgactgtgatgggggctgttcagctgttgtgggactgagttacacgc

SEQ ID NO: 19184 - DNA, 122 bp, Homo sapiens
agagccccgctatgagtcagaacccagatgggccgcacccaaaggagctgagcagtatcacgcgaacaaagttctaaccctacaacatcaactactgcagtgctttgcaaagttactgaatg

SEQ ID NO: 19185 - DNA, 122 bp, Homo sapiens
tgggaagccaaggggccttgtggtccctccgccgcgaccctcgccctggcccccggcccacgcagccaggtggctgtccccaacccattccccggcccttctgttgggtttgagtatacagc

SEQ ID NO: 19186 - DNA, 122 bp, Homo sapiens
cggagggctgtaaccccgggcgcaggctgggtgtggtcctcaggtcaacaggcgggtgtgcgagcaggaggtgctgggccccgactgcgatgaactccgcaaggcctgcctggagatccgca

SEQ ID NO: 19187 - DNA, 122 bp, Homo sapiens
tgtgtgtatgcatgcacaggcacctgtcagcttgaacatgctcagagaccgtctaggccccgcgtgggtaccacccgctcaaaacatgaacttaatagttttcaaataaatagaggttaaaa

SEQ ID NO: 19188 - DNA, 122 bp, Homo sapiens
ccctcccagcgcaggatcttggagtcgccaatgtagcggctgaggcacaggtagctgtcgcggccggcacgaaagtgtttcacagcttgggcatcaggcacctgggtcacctcaccctgggc

SEQ ID NO: 19189 - DNA, 122 bp, Homo sapiens
acatccattagcgccggagcgcggggtcctcatcatgttggtatcattgggaccagcgcacgccactgcaagatggcatttccaccgcgcatcaacagatcatttcaccactgctcaaggca

SEQ ID NO: 19190 - DNA, 122 bp, Homo sapiens
cgccctggggccaggccaccgcggtcactgagagccacccccccggaaactggagaaaaacggagtagaagagacctaggggacagacttggccgggtcaagggaaaccagctcatatttgg

SEQ ID NO: 19191 - DNA, 122 bp, Homo sapiens
tggagtcccccactggtgacatgttcatgtagtcacctgtgcaaggtaagagcttaccaccgctgctctccactgggggtttggggtgaggcaagacatgagagtggtggccccctaccccg

SEQ ID NO: 19192 - DNA, 122 bp, Homo sapiens
aatgtgcccctgggggctgaaacagaacaggcttttatgtgggtagagaggacacagcttcgtcaagcccagacctggaccctgcccatcaacaacctgcagtgctccagcagtgtgaagta

SEQ ID NO: 19193 - DNA, 122 bp, Homo sapiens
acattttctttgtctaggactccaggtcacgtgggccccgctggagggcctggttggctgcgagcggcccggggagggggccggcgctccgacgctggcgctgggccagcccctcttctccg

SEQ ID NO: 19194 - DNA, 122 bp, Homo sapiens
cgccaccgtcaccccacagcgacccttcttctccttctcagccggaaaataagtttgttgcgctgcgaggcagccacaaaacaaggaaccgagagcccggaatgctgcgggaagccttcaag

SEQ ID NO: 19195 - DNA, 122 bp, Homo sapiens
gcttccgaaacgcagccggcagcaggtactcgagatgagtagtgtgagctcccgagcacccgtaggtcggattatctggtaaggcaccggaagtgaccgcctcgcggctgcttcctctcctg

SEQ ID NO: 19196 - DNA, 122 bp, Homo sapiens
gagtacgcggggtggctctggtctggaccgggtcgggaaccggaccctgggttcggagtccggcgccgccgcagaacctcagcgccctagtctgtgccgtgcggaccctgccgcgaaaacgg

SEQ ID NO: 19197 - DNA, 122 bp, Homo sapiens
gagcggtgtggcaggcagagtggttggttcctcatggtctggccagagaatcatcagtctcgatctgaacatgcccagataattggggtcattttcttcggaaggaaaaaaatcagcttttg

SEQ ID NO: 19198 - DNA, 122 bp, Homo sapiens
tgccgatgctgaagaaactctgggctgggaagggccctctgggcagatggcaaatgctgccggctttacctgcgaagtaaatccagaaaccagacccaccccggccatctctcagcctgaaa

SEQ ID NO: 19199 - DNA, 122 bp, Homo sapiens
agattatctctgcctgctgtcaaaactacttacaaatacagtttttgctccagagatccacgaacacaattaccagaagcaggctaagccaccgaagtagtttttccataccacccagaaga

SEQ ID NO: 19200 - DNA, 122 bp, Homo sapiens
gggctcacagtccctgcagggcctgcacagcccgggagaccagcgatagggcaggggctccgggagctgccagcttggctgggaggacagaatcacgttgctgatggacgtcttctgagaga

SEQ ID NO: 19201 - DNA, 122 bp, Homo sapiens
ggtggcacgaagacgcccgcggggactggagaggtcggctagggccaggctactcaggcacggagggccacctccccttcagggacgtgagcatctagctgcactgatttgttgttcaggaa

SEQ ID NO: 19202 - DNA, 122 bp, Homo sapiens
acaccatgaacctcctagaaggtgggcttgtggaagagggatgggaaacgagaccaaggtcgacaccaacacggagcttgggtctggctctggaagctcagcccccaccaaggaagccctcc

SEQ ID NO: 19203 - DNA, 122 bp, Homo sapiens
tgaaaagctaggcctgtcttttcatccctgtacctccagtgttcaaaactgctgaatacacgaatgaacaaatcaatgtaggacaaagtaggaaaggctgggcagggcacggctgggcacca

SEQ ID NO: 19204 - DNA, 122 bp, Homo sapiens
ctgccgggcgggtgaagtgcagcctccatcaaaaggcagcagacagacagcgccgggctgcgagtcccgcctgtgctgcgtgcatcaggctcacgctcccttagagaccacatcgctgcagc

SEQ ID NO: 19205 - DNA, 122 bp, Homo sapiens
gcaggagttctcaggagctagttttcttctaaagtccaggatcagagaggttggactttacgcaagttgctaacagtcatgcaacaagttaaggacaggacaaaaactgtaggaaacactga

SEQ ID NO: 19206 - DNA, 122 bp, Homo sapiens
tcccccgcggcctgcgatgacagcccagggccgctgagccggggccgcaggaaaggctggcgctggcaggcgcttccgtcggcagcactgtgtttgtgtttccacgtggaaacagcagcgca

SEQ ID NO: 19207 - DNA, 122 bp, Homo sapiens
attattttcacccaataaaaccctgggttaccattcaactcgtctgcgagtctgaatttccgtggctgtgggaagaaccctgcctttagcttgaactaaggaaaagtcctgcaacgcttttg

SEQ ID NO: 19208 - DNA, 122 bp, Homo sapiens
ggcgccgcgtgagtcccccactggctgctctgaaaagccatctttgcattgttcctcatccgcctccttgctcgccgcagccgcctccgccgcgcgcctcctccgccgccgcggactccggc

SEQ ID NO: 19209 - DNA, 122 bp, Homo sapiens
gctgggaggtggtgcgggctccttttcacagtcagttctcacgggagctaagagtgagcacgcactcactcccttgcaaaaggcactgagccacccaggagggatccgcccccaccatccag

SEQ ID NO: 19210 - DNA, 122 bp, Homo sapiens
ccttcgacttaagggtgttgcttggccgccgcctggtagtccggcgattcatttcttgctcggcctcctggagctgtggtctgtgtgggcttccacctcagacacctgcgctggctcagcgg

SEQ ID NO: 19211 - DNA, 122 bp, Homo sapiens
ggaatgttgcactgtagcggtgtcagccacattcccggttgagctgagcacactacatttcgtaatatattagtacacgacataaaagaagaaaaatgctttggctatgaagcacaccaggg

SEQ ID NO: 19212 - DNA, 122 bp, Homo sapiens
tgtgttctgtgatagagatctgacgaaatctggctgtttagagtgtggcccctcccgcttcgctctctcttcctcctgctccggctatgtaggatgtgcctgcttcccattcgcctcccacc

SEQ ID NO: 19213 - DNA, 122 bp, Homo sapiens
taataataataataacaacaacaacaactataattccacggtatttgcggctttgagtaccggtctcagcccctagtcctagccccgggatcgcccctcccctgaacagctgggtcccctca

SEQ ID NO: 19214 - DNA, 122 bp, Homo sapiens
actgcattcccccggcgcgtgtgggaccgaggtggacatggatccgcaggtgagtaggggcggcgcaggtgtcctgccctggggatggggacgaaggctgaccgctccgatgctgtcgcgcc

SEQ ID NO: 19215 - DNA, 122 bp, Homo sapiens
ttatatacatcagccacctggattcctgatcttttctgaacagcagtggcttttgcacaacgtcacacctttgcaaattgtgttatcctcactgaagcgtccttgacatgtcctcacagtca

SEQ ID NO: 19216 - DNA, 122 bp, Homo sapiens
gcagcagaaacacccatctagttttcctgctgtagggcggtgggattccatcgaacacctcggcgtccaaggcagcctggcctcgctgggccttgcggaccgcgggccctgcactgtcggct

SEQ ID NO: 19217 - DNA, 122 bp, Homo sapiens
tatgctgccagggggtggcctcgaactcctgggctaagcagtcctctgtcctctacctcccgacatgttcaaattgcaagtgtgaatcaccacacccaaccttagtgcttttaagattttct

SEQ ID NO: 19218 - DNA, 122 bp, Homo sapiens
tgtcctctcggtttttcttggtcacctcgacagacagacacatcttgtccaggggccactcgttcttcctggccatggactgcatgatggccgtgaggaacgactgggggttgaagaagccg

SEQ ID NO: 19219 - DNA, 122 bp, Homo sapiens
tgagcaggagttgcagctagggccagtggggcaggttgtgggagggcctgggccagtgcacgttccagggccacatccaccactttccctgctctgttacatgaggcccattcttcactctg

SEQ ID NO: 19220 - DNA, 122 bp, Homo sapiens
ggggcagaaatgacagacgcacgaacagcgtctctgtggctgtctgcagcgcgaggttcacgtctattgttttatgcctccgggagagctaccccgcgtgatagatcttttcagatccatca

SEQ ID NO: 19221 - DNA, 122 bp, Homo sapiens
ggagccgaggccgggccgcaccaccaggtgggtgagcatcatcttgcgcttggccacctgcgtgatgcgctcctccaccgaggcccgagtcacgaagcggtagatcatcaccttcttgttct

SEQ ID NO: 19222 - DNA, 122 bp, Homo sapiens
tgcccaatcttccccttctgtccaaacagggataacgcttgggggatcactgtgaggactcggagttatagaaacagctttttgcaagacccagcgagcactcatactcatctcagttgaag

SEQ ID NO: 19223 - DNA, 122 bp, Homo sapiens
gcgggcgggcggggagctgtgcgccaggagcgccaggggacccgagaataggaacaggcacgccggcccgagcccgggtgcagaaggctcccggccgggcgctccgcggggagaggctggga

SEQ ID NO: 19224 - DNA, 122 bp, Homo sapiens
cctgcactcagctgttgacgagtctttcttccagctctaccctgaaagtcctccaggcaccggtcttttttttctgccttttgtttccctcccggcgagtcggcgcgacagtgaatttccgt

SEQ ID NO: 19225 - DNA, 122 bp, Homo sapiens
cccgcgtgaacggccttgggggccccagaccgtggccctgcttgtgcgaagactgggaggcgccaggcgggccgcctgctgggggcttggcggcgggttccaggcagcgtctgtgagggagg

SEQ ID NO: 19226 - DNA, 122 bp, Homo sapiens
catgccactgcactccagcctggtgacagagcgactcaaaaaaaaaaacattttttttcccgtagatattatcatatcaaattacccctgaaaaaggttgtaaaaacggggcctctgcaaaa

SEQ ID NO: 19227 - DNA, 122 bp, Homo sapiens
ttttatttttaaaccatagaatgagggttgtcagcattacaggaagaaacagatgtttttcgctttttaccgccttccaaatgtagggagaaaatacaagtgaaaagggatttctatggcac

SEQ ID NO: 19228 - DNA, 122 bp, Homo sapiens
agaccccccagcctgctcagaggggaatgcggccgagggcagagcctgcacacgggggcacggccagccagggaggactggaccgagaggcggcatagcctgtcatcccttaaccaaaggtg

SEQ ID NO: 19229 - DNA, 122 bp, Homo sapiens
gggcagcactggcatcctcgggacaagacccgccccccaccctcggttgccgggcagccgcgggaactacaattcccagtgagtccccggccatttccggtatctggctggacgcaggcgag

SEQ ID NO: 19230 - DNA, 122 bp, Homo sapiens
tctcagctacccctgcggtgagtcccagcccactgggggcgcaggggtaaggggtgtgggcggccgcggctcctgcctgcagggggtgcaggcccagctcacgatgcagctctaaccccgca

SEQ ID NO: 19231 - DNA, 122 bp, Homo sapiens
cgggagctgctggaggcccagcgcaagctgcgtgagagccaggagggccgggaggtgcagcgccaggaggcaggcgagctgcgacgcagcctgggcgagggtgccaaggagcgcgaggccct

SEQ ID NO: 19232 - DNA, 122 bp, Homo sapiens
ctcccacaccgtccacctcacacccgtgagcagaaagctccaagcacgagtcctgctgctcgctgcagacgcttagccgctcccgcgctaactcaaggcttccttgggtttctggcttcctc

SEQ ID NO: 19233 - DNA, 122 bp, Homo sapiens
ctgcggctgcggctggagatgggttcgtgctgcagagcggatccgcctggtgtcgaacggcgccaattcctttcaccgagttcgcgagggagacgcggagactcgcctggcgcgagcgagca

SEQ ID NO: 19234 - DNA, 122 bp, Homo sapiens
aggaagcgaaggtgacgctacgcgagcgagtgggccccgccctctacgggggcactggcgcggaaactggccctgtgtcgaagaaggaacgtactttggcgttcttatgagctgcctagtac

SEQ ID NO: 19235 - DNA, 122 bp, Homo sapiens
tctgtggggctcatcgcgggcaccaccttcggggtctgcccagcggccgaagccaaggcccggggcccttgcagcatagcgagtaaggcgccccctacccaaaagggcttggcgcgcccgcg

SEQ ID NO: 19236 - DNA, 122 bp, Homo sapiens
cgccgcggggagatgctctgggcagctcggaaaccacggtggcctcgccgggaaagagagcgcctaacccagggccaggcaccgccacgatttccttcaccctgacacggcccccagcccag

SEQ ID NO: 19237 - DNA, 122 bp, Homo sapiens
gtaccatttagtactatgagaccagcttcttcacaggttccacgagtcatgtcaacgcagcgtgttgctaacacatcaacacagacagtgggtccacgtcctgcagctgctgctgctgctgc

SEQ ID NO: 19238 - DNA, 122 bp, Homo sapiens
agaacagagtcggggggcttaccgctagggcagcgtccccaccctggcagctcagaggtgcgcggtccgtgcttctccccaggaagctgacactctcagacccggggacgggacggggcgtg

SEQ ID NO: 19239 - DNA, 122 bp, Homo sapiens
aacgagaagtgatggggcgatgacagtcgcgagcgggcaccagggggcaaggctgaggagcgctgagtcgccagacccagagagccacccacctggagggacgtgccgccacccgcgccgcc

SEQ ID NO: 19240 - DNA, 122 bp, Homo sapiens
aagtcacctaatgagggtcacacagccttgctacagcggaggcagctgggattccggcctcgcacgcccgagctttagccactgtgcggcgctgtcggggcagcagcccaggcatccgctca

SEQ ID NO: 19241 - DNA, 122 bp, Homo sapiens
aagagccgcattgcaggagatgtactaggttcccaggttcctctaggctgggcatccatacgaggcattccagaatgttcagaggatgccctgagtgccaggccttagggagaataaagaca

SEQ ID NO: 19242 - DNA, 122 bp, Homo sapiens
ctggtcaagttaatggcagctaaaacgctcccagtccatttattggccacatgaggtggtcgtcaagaaacaagttagaaggttatgacaggaagtagtataataaatgcccggcagtacga

SEQ ID NO: 19243 - DNA, 122 bp, Homo sapiens
agcctggggccggtggggccagggggtggggtatccttgcacccgatgtcacttgacacccgtcccggcagcccgccaggctcggagagagaccgtagctaccaaaaataatcctcccagtg

SEQ ID NO: 19244 - DNA, 122 bp, Homo sapiens
atacactcttccagagatttacctttgcccagagatgcctgggaagctatgatgtttccccgggggtggcccatgcccaatgacaggctgatttgaggacaagctggccccttgcagcaagg

SEQ ID NO: 19245 - DNA, 122 bp, Homo sapiens
cctggccggaccgggagcccactggggtctcctccagttctccgctaaagtgtcggtggacggcaagcagctaataagtagcactggacttgcggaccccaggcaaactgccgaggcgcacc

SEQ ID NO: 19246 - DNA, 122 bp, Homo sapiens
aaaaaagcgtgttgagtacgttctggattactcataagaccttttttttttccttccgggcgcaaaaccgtgagctggatttataatcgccctataaagctccagaggcggtcaggcacctg

SEQ ID NO: 19247 - DNA, 122 bp, Homo sapiens
caagtctctcctgctccctcttccgtggacactcactcaggtcagcagtcagcacccagccgagcccacagacatggctggacttgtgatcagttgccaatgtggaaacattgggagacatt

SEQ ID NO: 19248 - DNA, 122 bp, Homo sapiens
acactctgcagggacgagatctccgcctgcgacgccttcagcttgctggtcagcgtcgtccgctccagctgcacctgctgaagctggctctgcaaggctgtcatctgctgtcgcaggtcgtg

SEQ ID NO: 19249 - DNA, 122 bp, Homo sapiens
tcagggtccctccttcacgcttcccactttcccgagttagccaatggcagcgcgagatcgcgcacaaaggcagtggtggccaataagacgcctacttttgacccacgctcgttcttgagaag

SEQ ID NO: 19250 - DNA, 122 bp, Homo sapiens
cccatgtgaccaggtggccgggcttctacatcctgcagtggaaattccacagcatgcctgcgtgcgccgccagcagccttccccgggtggacgacgtgcttgcgtccctgcaggtctcttcg

SEQ ID NO: 19251 - DNA, 122 bp, Homo sapiens
aaagaagcagggccgccctgggcgccaacccaccgtcatccggcaccacacgcagtgccgcgcggtgacactctggtagcacttgatacttttgtggcaccggtcacacttgacggaggagt

SEQ ID NO: 19252 - DNA, 122 bp, Homo sapiens
aagcgctgccctgtgagagccacgctggccttcgtctccatctctggttgacgggctgtccgtgtgcctcctgtgtgtctgcagacaagtcttgctgtgctttatttgtgaaactttaatga

SEQ ID NO: 19253 - DNA, 122 bp, Homo sapiens
ggaggcgccgagggcccgggagcccccaaagccgggaggggcgccccagagggaggtgagcggcgccgaggctcactataccgcagctcccacacacccgtctcccagggtgggtggtagcc

SEQ ID NO: 19254 - DNA, 122 bp, Homo sapiens
atttaatcaacccctaatttttagacatttgtattatttctaatgctgcattattcacagcgattcacaaaatgtaatcctcagacccacaaaggatccagagaccctttcagggggctcct

SEQ ID NO: 19255 - DNA, 122 bp, Homo sapiens
gcagaatatctgagtgaggattgcaccaggaggcacaggtgagctacactcagtaaagggcgtgcagcctttggctggacctaagctggggaaagtagccacataggaaggaaccttgggga

SEQ ID NO: 19256 - DNA, 122 bp, Homo sapiens
acggaagtgccttcccggcagcccctgtgggtggcccgggggatcgtcatatccctggcccgcagacacagtgtgccacaagcccacggggggcaccccaaagcgacaaaagtccccgaatt

SEQ ID NO: 19257 - DNA, 122 bp, Homo sapiens
ccctggggaggggctggggccgaatggatggtatctcaggctgtagggaggggcaaggatcggcttgaaacgtagattttcactcactccagaaagcagctggcaggtgccaagacccagct

SEQ ID NO: 19258 - DNA, 122 bp, Homo sapiens
gccgtgaggtcctaggcagtggggaggcttgtcagctaggggctgggcccatctgtgggacgcagctggcgctggcggcgcatggaaagctcacctcgggagtcatgcggctgatggtgggc

SEQ ID NO: 19259 - DNA, 122 bp, Homo sapiens
acatggttgttacagtaacagtcaggagctgaggtttggtgtgagtacctttgttttaggcgccatctctgctggctgtcaacaggtgattggtgggctgaggggcagcactgtagcgagtc

SEQ ID NO: 19260 - DNA, 122 bp, Homo sapiens
ccctgcttgcattttttaaaaactagacattgtggcttgagaatttatcaatcatctttccgaaatgaccacattgtgcttttagtttgtatgtttaagtggtcaagcaaggctctaggagg

SEQ ID NO: 19261 - DNA, 122 bp, Homo sapiens
ggagcctgaacattcactccttgtcctccatgctgtggctgtatcagctccctacaagttcgtttacacctggcagcacggcagccacacaccggtattccaaaccttaacaatgaaggggg

SEQ ID NO: 19262 - DNA, 122 bp, Homo sapiens
tatggcggtcggggataagttgagaccccaggctcggagccgcgggttctgggttgtggtcgtccttcccacgctcagccggctcctctgcccccagcactgcggaaggcgcggagggagca

SEQ ID NO: 19263 - DNA, 122 bp, Homo sapiens
ccgcagagagagcctctggtgtgctcaagacgcctggtcttcaccctgcttccttagttccggcctgggcgcccctgggtgtttttagccaaaagcggcctagggccgatccacccaatgca

SEQ ID NO: 19264 - DNA, 122 bp, Homo sapiens
gttgtgatatggagtgctgtggcggctgctgtgatcctctataaaagggtttttaatctccgtttagcagccagtggacagccaggagtggtataattagacatcattcaaatttgagggaa

SEQ ID NO: 19265 - DNA, 122 bp, Homo sapiens
caagaaaggacaaggaaggtgagaagagccccgccctccgcaaataccaagaccaagggacgccgagcgccgcctctcattgatgctgaggcctccaatatgagaagaacccattggaagaa

SEQ ID NO: 19266 - DNA, 122 bp, Homo sapiens
ctgtggaccaggagggagcagcttatctgggtggttccagctcagagtgtctcatgaggacgcagacaagctgttgcatatggctgcaatcttctgaaggtttcccaagtttaaaggattca

SEQ ID NO: 19267 - DNA, 122 bp, Homo sapiens
aagaggcttgaaagcagggcccaggtgtggaaaacaggttgaggtgaaccccaagccccacgcggagaggtgccgcaacccggcgcgcggacctggcaggaagaccggcacgaagtggctga

SEQ ID NO: 19268 - DNA, 122 bp, Homo sapiens
gagcaagaaaaatagtctataagtaggttgagggagggcatgtcaaatgtgtgtcatggccgagacacctccaaaaagccactgctgccgcctgagcagagcatgctgaaggctgtggttta

SEQ ID NO: 19269 - DNA, 122 bp, Homo sapiens
gcctcccctttcaagcctccctgctgccttggacggccccaggcgaggcccagcagctcccggagcacgaacctgggacccctctcatgcccagcagggagcagccagttgcccagaccctt

SEQ ID NO: 19270 - DNA, 122 bp, Homo sapiens
tgtcagaaatcacactcctgaccacatccctgaaatcatctcacacctaccaacaacctacgttctggactccctggaggactgcagggaagggagaagaaaagggtttcagagggtgagga

SEQ ID NO: 19271 - DNA, 122 bp, Homo sapiens
aataagcaaaataggatccaggcatgtgcaagggtacagggacggagaacataggctcaacgtcattactcttagggaaatgcaaatcacaccacaatcctaccagctaaccaccccccagg

SEQ ID NO: 19272 - DNA, 122 bp, Homo sapiens
ggatcctgtgggaaggcggtgcggtgatgagtgtccataggggatcctgtgggaaggcggcgtggtggtgagtgtctgcaggggatcctgtgggaaggcggcgcggtgatgagtgtccgcag

SEQ ID NO: 19273 - DNA, 122 bp, Homo sapiens
cctggatgcccgacaagtgacaggggaggggcgggccagaaggtccactggtaagcacctcggccttttccgtcaacaggtgccactgccccctgctgggccctgggccttcagcacacatg

SEQ ID NO: 19274 - DNA, 122 bp, Homo sapiens
tggaaggcaaaggcaacttcggggaaactgggaaaggcggccgggacctcggggacactgcgtaccacccggcgcacagcccctcccgcgcaaacccgagccaaaggggcggtcgagcggcg

SEQ ID NO: 19275 - DNA, 122 bp, Homo sapiens
tcctgggaatctacattgtgttcccccgcattccaggctcagggtctgaggaggctgtgacgccctatgaccgcagagatctagacagtcgtaacagtccccaggctccagctgggcaatcc

SEQ ID NO: 19276 - DNA, 122 bp, Homo sapiens
gttggccagcgccacctggtagttggtgtagcgcaggatgcggtggtggatgtccagctccgtcaggggccgcggctgcacgcacaggcccccgctccgctgcagtgccaagaggcgggact

SEQ ID NO: 19277 - DNA, 122 bp, Homo sapiens
gggcgtggccaggaaaaggatgcgctgggtcgctgaaccaccggcttgtggtaggtctctcggcgggcagttaaaggctgggataggctcccctagctcctagttgtggggcctgcgttagc

SEQ ID NO: 19278 - DNA, 122 bp, Homo sapiens
cagaaggtgcaagcttcctgcgtggaggagacaggctcgcaagcacacttacctaaaccccgggaagaataggatcagacagggttgaacctcaacttgatgtcttttgctgaatggttttg

SEQ ID NO: 19279 - DNA, 122 bp, Homo sapiens
tcccatattgcgatgttaaacctcttggtttcttgagcaataattcttaccttaacttcacgttaaaattagggcacataagaaacacaatgcctggttccatcccagaaaaatagaatttg

SEQ ID NO: 19280 - DNA, 122 bp, Homo sapiens
tgctctttggttttccactggagttcacagctacctccttggctgaggtcaagggtgccacgtgtgcagtgttctgtgtgaagtgtgccgtgtacagacccgttctcctctgtaacattcag

SEQ ID NO: 19281 - DNA, 122 bp, Homo sapiens
agtgattaagtggagaggctgttccaccctcagccctgcccaggcagctgggtgaccccgcgggccacatgccacaggggcacggactcagccctgagtggttttcgttctgctgagagtcc

SEQ ID NO: 19282 - DNA, 122 bp, Homo sapiens
tttccagacaggggcgcagggaaggagcgcccggcgagactgacgctccggctccacgcccgcctggctctgggctgtcggttaccctgtaattacctgacagctctgactgggcttaggaa

SEQ ID NO: 19283 - DNA, 122 bp, Homo sapiens
accctggcttggatcagcttaagagcagaggctctcagcctctcaggacagacaggagcacgagggagccctgtgaagtatgggggtgatttcagggccctcagaccacgctccaggggcca

SEQ ID NO: 19284 - DNA, 122 bp, Homo sapiens
accaagtgtgtttgaccttttgaaaagccgacaggcccagcctgcctgtgaaggcaggagcggtgtaggggcgcctggaaggtggaagccccctgtctttctcccttgccccgcttccccca

SEQ ID NO: 19285 - DNA, 122 bp, Homo sapiens
tgcaacgcggagccttacctggactccggggctcacctggggcgcgggggtgggggcgggcgccgggggagggggcagtcctcgcgggctgggcaggggcgcggggcgacacgcagccctga

SEQ ID NO: 19286 - DNA, 122 bp, Homo sapiens
atccatcccattcacccagtgacttctttttgcccaggcctggactttttgcatcagtcacgttaaccagatgactttgcctgttaccaaacctcatgcatccacgtttgcgtctggggagg

SEQ ID NO: 19287 - DNA, 122 bp, Homo sapiens
tctagtgtgttctgtcatttgtaggtccttatcaccagaagcatttgcttacaaataggacgcaaattcatttacaaattacaaatcatctgaggtgctagtcttaactctagaaaagaata

SEQ ID NO: 19288 - DNA, 122 bp, Homo sapiens
tgagtggtcagcaggctaattcatccattgcaatgtggctttgtgttagggttctgtttccgtgctgcctgcaagataatcacagatgtgactgcatcttagaagttcctgaatctttcaag

SEQ ID NO: 19289 - DNA, 122 bp, Homo sapiens
acctgcttaatagctgtgtgacttggggcaagttccttaatctctctgcgcctgttctctcgtgttaaatggatagaattatagtacccatctaatgccgtgaggattaatatggttaatag

SEQ ID NO: 19290 - DNA, 122 bp, Homo sapiens
cactcagcgtgcccagcccctgccagccccaggaagcacacctattgcaggaactacccacgacagattaggagcatagtgccctgggcagatttgtagctctttcccaagtcagatttagg

SEQ ID NO: 19291 - DNA, 122 bp, Homo sapiens
tgccctcgctcactccctaacacacacattcacaccctctccgcctcgctctcccgttctcgccaggtcctgatgggtacagtagattttgataaaaagacaaacgaagctatcagtggggc

SEQ ID NO: 19292 - DNA, 122 bp, Homo sapiens
gtgctccagcgcagtggggagctggtcgtactcgcagcagaggcggcagagggtgtgctccggggagggcccacccaagatggatctcatggcctttagccccagcctttcaccttgtccta

SEQ ID NO: 19293 - DNA, 122 bp, Homo sapiens
tgcccattaaagcctcacacccaaggtcctcagggacggcagggctctgaccagcatccacgtgccacaccctgtcccctagaaggctccaaacccactgactctgtgaacaaaggaagggg

SEQ ID NO: 19294 - DNA, 122 bp, Homo sapiens
gtgcccatgccattccaggaaaatgatggcccagctggtggtgtaaggcttggggggcagcgagtgggcatcgtggtgaaagcctcgggatcagggagctgcgtctgcaggcaggcctgctg

SEQ ID NO: 19295 - DNA, 122 bp, Homo sapiens
cctggagccgcctcaaatcaactttattgacagtaggcggtgaccgacaggcggggtgcacgctgggcacacgtgcctggtcggtgttacttgaagcgtggggactagaagtcagaccctga

SEQ ID NO: 19296 - DNA, 122 bp, Homo sapiens
cccagtcattcgctcggggctggctccgccccagaactgcgcaacctccccgcccacatccgcgtcctaaccaatgagcgctcgaaatttgggtccacacccccgtcacgccccgccccaga

SEQ ID NO: 19297 - DNA, 122 bp, Homo sapiens
atatctgtgtgtcctcccgctgaccacacttcctttagtgacccgattgcctcctcaagtcgcagacactatgctgcctcccatggccctgcccagtgtgtcctggatgctgctttcctgcc

SEQ ID NO: 19298 - DNA, 122 bp, Homo sapiens
ctctccgtctcacaccaacatccagtcatctggaagatctttccattcctccagttctctcgtaactaaaacgatttcagacttacccctcactcccacaggtaactcgcccttaactcttc

SEQ ID NO: 19299 - DNA, 122 bp, Homo sapiens
gcccatgctcggctctccctgtcgggccacaggaggggagctgccaggaccacctacattcggggcacacagcctcagggcctctacacaggccccacagacacagcagatccactctgccc

SEQ ID NO: 19300 - DNA, 122 bp, Homo sapiens
actgacaatggcccggcgccctgctttgggccaggatcggcctcgagccttcctcactagcggccaagagccggaaaccttgcgtctcagattccccgggtctgtgcacccccaccccaacc

SEQ ID NO: 19301 - DNA, 122 bp, Homo sapiens
ccaccacccagccccgcaggccacccaccttgcgggcaaactcgggcagcacaaaggcggcgcggtgcacgtcggagttgtagtacttcagctgcatctgcgccacctgctgctgtgtcagc

SEQ ID NO: 19302 - DNA, 122 bp, Homo sapiens
tcagctccgcaagtcgctggacagtcaatagcgctcacacggtgtctaccggatctggcacggtcaagacacaggaacagccgtactttcctgcgggtaagaggcttttcttttgtgcatca

SEQ ID NO: 19303 - DNA, 122 bp, Homo sapiens
agggctcctcagaacttgctctttctcctggggagctccttgaatgctggaggcagggggcgctggtgacacccccccccaccttggagactgtggagcccctcccctgggtgactcgatcc

SEQ ID NO: 19304 - DNA, 122 bp, Homo sapiens
agggtggtctcaggccaagatgcagaggcctccgcagaacagggtggagcaagggaccaacggcagctgtgagaaccaaacagcagggagtcaggggcctaactccaattccccatgccctt

SEQ ID NO: 19305 - DNA, 122 bp, Homo sapiens
gacgccgcccaacgcgcccaaacgtgctagtgaaacgcccttgtcgcgagacattatacgcgaggcgtgaactcattggtcaacccaaatgacaactcgccaactgattggctactctcact

SEQ ID NO: 19306 - DNA, 122 bp, Homo sapiens
ctgggggtgtcggggtgggtccgggtcgttccctggactgaatgggcaggacggcccagacgccacgaggccacagacagaagccgagggaggaggggctgagccaaggccaagccaaggcc

SEQ ID NO: 19307 - DNA, 122 bp, Homo sapiens
tggccgcggctgcggcaggccctagcagccgccgccgcgccgagagcggttctcagttcccgttgtctttcccgccgcgcagcgcttccgcctacagcctccgcccccgcagcaggaggggg

SEQ ID NO: 19308 - DNA, 122 bp, Homo sapiens
aattcacactgatttctcccacctgaggtttctgggttgggaaagttgaccctaggctgccgtgcagtgtcgattttctctgcagtgtccttcaaatccacccccttctccattcccatgcc

SEQ ID NO: 19309 - DNA, 122 bp, Homo sapiens
gcccctccttggtctgcagccgagatcttcagccacggtggggcagctatcccccgggaccgaccccctggggtggcctcgcttcttcagaggctgtgaatggcttcggttcagctgtccaa

SEQ ID NO: 19310 - DNA, 122 bp, Homo sapiens
ggtctatatttggcagttttaaaagaaaacaccaagaaacatgtttcacatggcggtcaccgtattactacaacccaagctggctctgcagttttgctgacagaagaaaatgatcgggttga

SEQ ID NO: 19311 - DNA, 122 bp, Homo sapiens
cctgggcccagtgcagaggagcttcgctctcctccgtccggattggtccagccgcgtcgccgaagttgtcaggccacgcccctccccgaaggaccccgctgtgattggctgtggctgaggtt

SEQ ID NO: 19312 - DNA, 122 bp, Homo sapiens
taaggacccttccctcgccctgcgcctctggacctgcaggtgctcgggcgcggcccaggccgccccctgtctgacctctgctccggccctgctcgggttcccgggagtgtggccctcctgtc

SEQ ID NO: 19313 - DNA, 122 bp, Homo sapiens
caataaatatacatgagcacttacacagttcctggtacaatgaacataaaagctaaaatccgtagcctgggccgggcgcggtggagctcacgcctgtaatcccagcactttgggaagccaag

SEQ ID NO: 19314 - DNA, 122 bp, Homo sapiens
tgcgtgagcatcttgtctggcggcgctgctggtgtgtgctgctcccctgtgccgcgggtgcgcggcggcggcgcgggctgcagggcgggtgctgccctccagtggagcccgcggccggcgcg

SEQ ID NO: 19315 - DNA, 122 bp, Homo sapiens
cgggatgtaggaaaacaccctttaccttgaggcccttcccaatctatccaagtccactgtcgaaattccttacccaccaccctcctgccaggagacactgtgatgcccatttccccaggacc

SEQ ID NO: 19316 - DNA, 122 bp, Homo sapiens
aaatggtcgcctgccttacagagctcacatacacaggaaagataagtatgctaacagtgtcgctaagtcaattaagttatttgttttctaaaattaaaaaaaatcatgatttaaaattagga

SEQ ID NO: 19317 - DNA, 122 bp, Homo sapiens
ctgcatgcatcaggccatttgcttacattttccctggtttcctgaaggatttattgagagcgcatggtaatggaaactaaaaaaagaaaaaaaaaaaagaaagaaagaactcagggttagaa

SEQ ID NO: 19318 - DNA, 122 bp, Homo sapiens
tcaggaccaggtagtctcgcccaactgggacagagcggtcgcccgaggaccggatctgcgcggcgcagtggcctaaaaaggaggccgagccagtccctagctccgccttcccgggccctgcg

SEQ ID NO: 19319 - DNA, 122 bp, Homo sapiens
aactgtcttatataggatggccaggaaaggcctcttggaagaggtgatattggagcagaacggatgatgtgggagagaggttgtcatgcaaaacctggggaagagcattcctggtggaccca

SEQ ID NO: 19320 - DNA, 122 bp, Homo sapiens
gtcctcgcactgcctgcccagaccactgtctagaacgcccactgctggggagctcaaactcgctctcatttctgggctgaaaatgtcccccttccgcggtcctgcagcgccgcagaaacgac

SEQ ID NO: 19321 - DNA, 122 bp, Homo sapiens
tgcagcgcaccgagcgtgagccgaagtagggcaaggcatcgtgtcacccgggaagtgcaacgggtcagggaattccctttcctagccaaggaaaggggtaacagacggcacctggaaaattg

SEQ ID NO: 19322 - DNA, 122 bp, Homo sapiens
gaagggccgggacccaggtcccctggatgggatgacggttgtcccagtagcagggctgaccgcggccctcagaagcgccatgctcacctttcgccgccgcttgccggcccccgcgccagccc

SEQ ID NO: 19323 - DNA, 122 bp, Homo sapiens
cctggccccgcaggtcctactccccccggagttttgaggattgcggaggcggctataccccggactgcagctccaatgagaacctcacctccagcgaggaggacttctcctctggccagtcc

SEQ ID NO: 19324 - DNA, 122 bp, Homo sapiens
ttcccaaaggtggaggtggggcctggtgggaggtgttggattatgagggcggatccctcacgaatggcccagagccatcccgagtgaggagtgttgttggaaagattctggaacctcaagtg

SEQ ID NO: 19325 - DNA, 122 bp, Homo sapiens
agacctcgttaagtcaaagttgctgcaggagaggaggtctcttgatggcgatgccagggtcgcgggccatcccctatgccactcaataagcaaagttaaaaccgagaaactcagcccacacc

SEQ ID NO: 19326 - DNA, 122 bp, Homo sapiens
ccagtcgaaaggaggccgcccacccacccgcggagagaaggggttagggccggcagcccccgcagaccctggctgagcctgtttccccagacccacggggcaccggccagcgcccgctgaca

SEQ ID NO: 19327 - DNA, 122 bp, Homo sapiens
tttcacaattcctttacaccctgattcccaaaacctctttgcctttacgtgggaaaaccccgacacccttggagtccctgcgtatgataaccagagaaaaacagtccttaaaggcaggagga

SEQ ID NO: 19328 - DNA, 122 bp, Homo sapiens
atgggtcgcttaatcctcacaacactttttcaagcttgaagcctgttttacagatgaggacgcgaaggctcagacaggctaagttgtccggtctcacctcagtgaagccgccactgcgcttg

SEQ ID NO: 19329 - DNA, 122 bp, Homo sapiens
gctctggaaacttctggggattttgggatgtcccttaagctctccgtgcctcagtttcttcgtcaaatgggaacagtaatggccatgaccgtgtagggtagttgggtggattatgtgagtta

SEQ ID NO: 19330 - DNA, 122 bp, Homo sapiens
cgggcagaggccgggctgggaggcggaggctccgctgctccccttttttcccgttggaggcgatgtgtcgggtccggacacgacgtggagaggccaccagtccggtcctggggcggcggcgg

SEQ ID NO: 19331 - DNA, 122 bp, Homo sapiens
tcaatgggctcctggctgggtggtgggacggccggcgtccgactcctcccatgtagtgatcggtttaggtaggtcggcctggtccccggcggaggttacgccttccctcatccccggtagag

SEQ ID NO: 19332 - DNA, 122 bp, Homo sapiens
tgggggccggagacagacttcgcccaggtgacgggtagtaggggcggcgccgcttggcctcgtggggtgtaagacccacttgctgttgcccccggaccttgccgccacaccagccctgtcct

SEQ ID NO: 19333 - DNA, 122 bp, Homo sapiens
acaggccttgggcgttgcaggctgtgctcagagcacctgccggcttgtgagggttctagacggcactgctgctcggggtctggggcacggctacagccacatccctgtcccctcggttcaag

SEQ ID NO: 19334 - DNA, 122 bp, Homo sapiens
gcagccacctcccttgccgccatcccctcaccagcagcagctggtggccctcacggaggccggctttctcggccagagagccaggcttgaccgagtgcacgaagctccctcgcgcgttgccc

SEQ ID NO: 19335 - DNA, 122 bp, Homo sapiens
cccacggacggggcaacttcataccataatccctaatctaaaaccttgggacaatgcgttcgaggattttctggcttacagacacactcctgcatctgcaggaaaggcgtgagaacccccag

SEQ ID NO: 19336 - DNA, 122 bp, Homo sapiens
ctgggcttgaatgtgactctgttgagacatggccagcaattctggcacttggctgtcattcggctggcctgcgcagagattggctgtgggcctcagtttccccattttataaagttttaaaa

SEQ ID NO: 19337 - DNA, 122 bp, Homo sapiens
gtagtccctgctctccagggggccccggggggcctgggtgacctctctcccccatagggccggtttctcctgctgctccctagacaaaagcagagagagttcctgctctcaggcccttcatc

SEQ ID NO: 19338 - DNA, 122 bp, Homo sapiens
ccggcctctcaccccgacctcaggtttccgccacagcccccagcccaggccctggacacgcgtccggcccctgcctccgtgcccggcccccacgccgcctcccgtccctcagatctccggcc

SEQ ID NO: 19339 - DNA, 122 bp, Homo sapiens
ggggctgtgcctggaaaaataccacctaaacccatcttcctgccctctggttagggctggcggggatgtgggggatgggggtggggtgggggagggttgggaaggaatatgtgtgtcatctc

SEQ ID NO: 19340 - DNA, 122 bp, Homo sapiens
tgtcagtcttgttcttgcgcggccccctctgcatccaccggcttgaactcaccaccatcccggaggtccaggagataacctggccactgcctggctcagcagctgcagcagaaactgccaga

SEQ ID NO: 19341 - DNA, 122 bp, Homo sapiens
tcacagggcgtgggggtggctagaggccccagtggcctctgatctcacagagcagatcagcgcgggtgtccagcgccccgatgtgggcagtcggggctagccgctggggcaggctgccccca

SEQ ID NO: 19342 - DNA, 122 bp, Homo sapiens
cggcaacacacccgccctgatccactaggaacaaaccgctccgagcccgggtggtgggaccgatcctggagcccagatcaagccaagtccggccaaagctgtgtcgcaaagtaagaatctga

SEQ ID NO: 19343 - DNA, 122 bp, Homo sapiens
ggaaatgcagcggtggaaggacacaggtggtctttgctaaggaatgccttaacagctccccgtcttctctacctagcaacttgatctgtgatgtttttgaaagcctgacctgtgtatctgct

SEQ ID NO: 19344 - DNA, 122 bp, Homo sapiens
gatttttctctcttgaatgaaggatgggaggggagaaagagagacggagagagagagagacgcacagatgtgcacggaggccacagacactgacatttggaattccttcagggtaaaaggac

SEQ ID NO: 19345 - DNA, 122 bp, Homo sapiens
taagcttcacaccaactatctgactcttaactctctgtagcttcacctgctaacattctccgactcctctctcccctgcaatcccattgttcatgttgctttctaaaatcacagttctctcc

SEQ ID NO: 19346 - DNA, 122 bp, Homo sapiens
aactttcatcctgtgacctggacctttcctcgaaagcgccctgccgggggctgaggacaccgagccccctcccagggtctggacagagtcctgtcccagggctgcccgactctgcttggggg

SEQ ID NO: 19347 - DNA, 122 bp, Homo sapiens
caataaacaagatggcttaagatggagaagataaaacagggtgatgtgctgggccagagtcggtgaatgaatgaatgggcaaatagcaagaatgcaattttcagtccaacaacacaatagga

SEQ ID NO: 19348 - DNA, 122 bp, Homo sapiens
cgaactcctgacctcaggtgatccacccgcctcggcctcccaaagtgctgagattacaggcgtgagccaccgcgcccgtcctaaactttttaagtactgtcattaacctcatttttacccat

SEQ ID NO: 19349 - DNA, 122 bp, Homo sapiens
caggcagcacggcttgcggggcgatgtcccggctccaaatttgcagcgaggcccggaaatcggtcccgttagagccgatttcacccgtcaggaatgcgttccgcccccgccgcctccccgcg

SEQ ID NO: 19350 - DNA, 122 bp, Homo sapiens
gcgcgaacaggaggcggggcctgccgccttcagtcgtacagggggtggtttctgcacatgcgctgtggctgtgcggcttcagctgccccctctctgcggccaatcagggcccgcggcgcgct

SEQ ID NO: 19351 - DNA, 122 bp, Homo sapiens
tggacagatctgggatgtgtcttagatatagcatcggcaagacttacactttaacctgagcgcagtggctcacacctgtaatctcagcactttgagaggcagaggcaggaggatggcttgag

SEQ ID NO: 19352 - DNA, 122 bp, Homo sapiens
gccgttgaaccccggcggcgggctctcggccagcggtaaggaccccggccactcaagcggcggattcaaacccgacctcttaccagggcgggcagaacaggactgagctagggacgcccagg

SEQ ID NO: 19353 - DNA, 122 bp, Homo sapiens
tccaggctcttatcatatacacagcttgggacaaagaaaatgagacacgaaaggttccaacgtccatatacatacaatctttttaggtcaagctgctctctactcgggtgcaaaacatgaca

SEQ ID NO: 19354 - DNA, 122 bp, Homo sapiens
cacactcctgtgaccccgtgcagaacgaaggagcggggaaaatcccttgagtgaggaagacgctagtgttctcttatatctgtagcaagtctggctgaaatgcaaatatccaataatcagag

SEQ ID NO: 19355 - DNA, 122 bp, Homo sapiens
aggcagccagcctccgcaggaccccgaccagcgacacaatggcttctgggcaatacggcacgtctacggtgaaagcttcagattactgaaggggaccagcggacagttccaggtcatgctga

SEQ ID NO: 19356 - DNA, 122 bp, Homo sapiens
gggctgttacccttaccagcgactggagggccaagctcccaaagaggcctacttcatgatcgccttaaatcaggaaatttcatgaaatcccacccctctaccgccccattcccatattgtat

SEQ ID NO: 19357 - DNA, 122 bp, Homo sapiens
ggctcccggcgggcggcaccctctagccggctctcaactttgaggagtttcaagcagccgcggcggcagcagcagccctggacgcagcagccaagctcttcgctggctcccgggggctctcc

SEQ ID NO: 19358 - DNA, 122 bp, Homo sapiens
aatgaatgagaaacaagcaggcagcctgggagattgtgaactccgacatccaagtccggtcgtttttcttgtggattcttgttttctccgtgtctctgtaacctcgcggtgttgcttaggag

SEQ ID NO: 19359 - DNA, 122 bp, Homo sapiens
tctggagacaacagctgcagtatctttctcagatcttctcacaaggtcttcagcaggccccgatgcgtcctcccccggcttaacccccatcagcatgccttccttctccctccctgggaccg

SEQ ID NO: 19360 - DNA, 122 bp, Homo sapiens
gctcatcctctgtctgtgtcccagacagtggccctgccccctcttctcagtgcttctacccgatctgctcttcctgcctgcagacctgcaggaacagagaccaaggaagggtggtgaggtca

SEQ ID NO: 19361 - DNA, 122 bp, Homo sapiens
ggccccccgggcgccccagaccaataggggcagtcaatggcccggaagaagccagtggagcgtagcatggtccgtcccgcggcggggccccggcccggagccgcccgggccccagggccccc

SEQ ID NO: 19362 - DNA, 122 bp, Homo sapiens
acaaagaacacgttatatgcctaacacagtacctgatctatagtaagaactcaacattttcgccccttctcctcctcttttctgtccttgtgcctttcttccactattcctcaaccccaggg

SEQ ID NO: 19363 - DNA, 122 bp, Homo sapiens
tggggggtttccccccactcaacagcgtgtctccgagcccgctgatgctactgcacccgccgccgcagctgtcgcctttcctgcagccccacggccagcaggtgccctactacctggagaac

SEQ ID NO: 19364 - DNA, 122 bp, Homo sapiens
gggacttggggaggtcacagtggcaggtgactgccaaatgaggtggcagaagccagcaagcgctggaaaaagtcggcccaaactgttcaccagcaccgccccccataactccccaccggctc

SEQ ID NO: 19365 - DNA, 122 bp, Homo sapiens
ttcccgtagtctgtcaggcaagctcacagccatttctcgggatccattcaaatgtcacctcgcttgggaggccttccagatcccccccagattttcttgggttccctcagcatcatgacctt

SEQ ID NO: 19366 - DNA, 122 bp, Homo sapiens
gtaattttcctcttttaagaacatttcgccgtggcccggattcccgcggagctggtgggacgcagagaccaccagtgaccatgaaaaaggcccactctggaactcctgtctggaaagtccat

SEQ ID NO: 19367 - DNA, 122 bp, Homo sapiens
tccaggttcaggggatttcaattaaaactcaaaaggagaaggagttcagctgtagcttcacgttcacacttgcactgaaacgttccacttggaacactcagcatgaggacgggagtggggag

SEQ ID NO: 19368 - DNA, 122 bp, Homo sapiens
gcaaggaaggagtgggttggcatcctactcagggcagtggagccaagagcagccccagaccgcgtcccgccctggaaacaattcctttcgctcaaaccctgccagtctctaagctaagggcg

SEQ ID NO: 19369 - DNA, 122 bp, Homo sapiens
accgacttgggtatgtttcttatgaatattacacgcggagcagcgtctggtccgggggtgcggtggggggtgttggggcgggcgggaggggagaccaaggcggctggggaagcgcgggctgg

SEQ ID NO: 19370 - DNA, 122 bp, Homo sapiens
ccctggcctgggcggcttccccttcctcccaaggccggagcttccctctctctgtctacacgggggagtttccctcagaaagagtcctaacgtcctgaagtatcacagcctcctatgctgcc

SEQ ID NO: 19371 - DNA, 122 bp, Homo sapiens
agggaccagttctgtcctggtcactgctgtatccccagctctagataaggcctgagacatcgtaggagtgccagggatctttggttactgagaaaacgagcagctagatcaaggttcccaac

SEQ ID NO: 19372 - DNA, 122 bp, Homo sapiens
ctcgttctctgcaccttggttccccagtaccccatattcatcagacacaaaaagtaaagtcgcttcctttttcaaagaaaaatgacccattctggatcacccacagctttaaatattgcatg

SEQ ID NO: 19373 - DNA, 122 bp, Homo sapiens
gcggatgaaggacagaaggcagtcccacagcgccccctggtgctcgctgcggaacacgtgcggctgcagcagctccagcaggcccagcacgtgcaggaagcagctcaggtggttctgctgcc

SEQ ID NO: 19374 - DNA, 122 bp, Homo sapiens
cccccaaagaaatgaacacagaaacccaaacagatacttccaagtgtaagttcattgcagcggttttcacaatagcaaaaatgtggaaaccacccacatgtccattaagagatgaatgaatt

SEQ ID NO: 19375 - DNA, 122 bp, Homo sapiens
tgacccgggagggacggcggggacccgggatgggggtctgcgaggggtgacagctgggagcgccgtggggcgaggggcgcggggagggaggaggggtccgcggggcgagcgggggcggggcc

SEQ ID NO: 19376 - DNA, 122 bp, Homo sapiens
tccaggacaccacactctcctcatttccctccaacctcactgactgttcttagtcttcctcgggtgacctctaaatgttggagcctcctagggcttagtccttggccattctctctttccac

SEQ ID NO: 19377 - DNA, 122 bp, Homo sapiens
agccccacagagggctggaccaggaagccggcgccggctgcctgtgctttcattctttctcgaatttgtctgctctgtaggtctcagcagtcacacgtggtcactgcttatgcacgcacaag

SEQ ID NO: 19378 - DNA, 122 bp, Homo sapiens
ccactcaccttggcccaggccagcttctcccggatggcggcattgccgggctccacgtggcgtgcaaacttgaggttgttgatggtgtactcgtggccacagtagactctctgaggagagag

SEQ ID NO: 19379 - DNA, 122 bp, Homo sapiens
aactcctgggctcaagcgatcctcccaactcggcctccaaaagtttacaggcgtgagccacggtgcccagcctcctgtgccttttaattcactgatgcaattgttgatccagccctgtcagc

SEQ ID NO: 19380 - DNA, 122 bp, Homo sapiens
tgcgtttcgaagagaagttggtttccaggtttcttttttgaacaaaaccaaagggaatcccgcgcggcccgacaaggcctgggaggacgtagtgcacgcgcgaggacccggcgtgggccaca

SEQ ID NO: 19381 - DNA, 122 bp, Homo sapiens
agggctggggacagggcttagttcgtggaatacacaggcagcaccaccaacccggctctccggaaaagagaaagtccagtgagaaaggtgaaaactgacaaggcaccgttctccgacttgct

SEQ ID NO: 19382 - DNA, 122 bp, Homo sapiens
ctggccaaggggagatggtggctctgtcgatggcctcggagcccttggcagtgcagtaatcggactccaggagcgtgttaaagagagtggatttgccggcgttggtggcgcccactaagtag

SEQ ID NO: 19383 - DNA, 122 bp, Homo sapiens
gggggggattgtttcttcttttccttgtctttgaacttccttggaggagagcttgggagacgtcccggggccaggctacggacttgcggacgagccccccagtcctgggagccggccgccct

SEQ ID NO: 19384 - DNA, 122 bp, Homo sapiens
tttatcacaaaccctcaaccacagcaacttcaagagcaggagagaagtaattggctttctcgagtccagtacacactgcagggcagaccagtgtacctcacagggagttgctaagcaggaag

SEQ ID NO: 19385 - DNA, 122 bp, Homo sapiens
atcaatcacaggaccaaagctgtgaaacctggcaaagggttctacctagagtgctgataacgggaatctgtctgtgttacaaagcaactagactcaccctattggcctaaggcctggaatga

SEQ ID NO: 19386 - DNA, 122 bp, Homo sapiens
ctctctggctcttggagccctggtggggcattcccagcagcttgcttcatttcctggacacgtgttcttggctgtggtttatattactctctgtatgtaaatgtcataggttttttttcttc

SEQ ID NO: 19387 - DNA, 122 bp, Homo sapiens
cgaggagaagatcacgttcatcaccagttttgggggcagcgatgaggaggcagccgcagccgctgctgccgcagcagcatcaggagtcaccacagggaagccccccgcacctccccagcctg

SEQ ID NO: 19388 - DNA, 122 bp, Homo sapiens
cgtgctcagctcgttgttcgcggtccaacggccgcaccacggacagcgctcctaggtgagcggtaaggcaggttggtggggaccccaacactccacatcagcaccttcctcgccctcactcc

SEQ ID NO: 19389 - DNA, 122 bp, Homo sapiens
acgtacctatcttccctcgggcaacctcgcaacagatctctgattggctgacccaggaagcggactttgcgaggcggcggcgacgataggctggcagccggccgacttccgcagaaggtgat

SEQ ID NO: 19390 - DNA, 122 bp, Homo sapiens
gaggcgccgccatgggatccgcggtgacctacgaggggcggctgggtggtggccattgggcgacggcgcagggtcaagggccgggctctgggatcgtggggagaccgggggtcccggagccc

SEQ ID NO: 19391 - DNA, 122 bp, Homo sapiens
cagctgcagtggaaatgcacgctcccctcccgggccccagccgcaggcagaggctcacagcgaggcccctctgggatccaggcctgtatgttgagagcagagactagccaggggcagagccg

SEQ ID NO: 19392 - DNA, 122 bp, Homo sapiens
gacctcccacgtcctgggggcctacgccgtagacaacacgtgtgtagtcaggagccgggacgtcagcactacaggcagcaccagcgaaggggccgtgacagccgttgccatctgctgccgga

SEQ ID NO: 19393 - DNA, 122 bp, Homo sapiens
ccaaactggctgaatgtcttcctcatgagcccagctctgccgttttgctgttctgaaggacgaacactgactgtgttatttttggctcccatgatgcctccctagcacacagatggccaaca

SEQ ID NO: 19394 - DNA, 122 bp, Homo sapiens
gccgacccgcccctcactccgtcacgagggtgggtgactcagcgtcctccttccccgcggcgccagaagccagttgcaaccggtttctgaagtaatgtgcaggactccttacatcagctcct

SEQ ID NO: 19395 - DNA, 122 bp, Homo sapiens
caagcacaggtactctcaccttgcccctgtggcgtccagtgaggatgatcagaatggtcccgggggtaatgctggctcgcagttttctcacgtgctgactgaagggttttttgccgtggctc

SEQ ID NO: 19396 - DNA, 122 bp, Homo sapiens
gcataagcagatgagcaagtagcttattcaacccatccgaagactcggtatttgaaagcccgtctgatggacgatgaggtgtttctttcaccgaacgaagatactcggttttcctcaaaatg

SEQ ID NO: 19397 - DNA, 122 bp, Homo sapiens
tggctgacttggccgcatccccaacgctggggtcctggtcagagcgggcggtggatggggcgtatgtgtgtgtgtgtgtgtgtgtgtgtgtgtgtgagagagagagagagaaggagagtgag

SEQ ID NO: 19398 - DNA, 122 bp, Homo sapiens
tagtgagagaaggcaggcctgtgaaatggatccacggccagcagtcaccgttcttattaccgcggaacaaattattgtctcccccgcacccccgccagttggcggcgtcccgcgggtcctag

SEQ ID NO: 19399 - DNA, 122 bp, Homo sapiens
ggcgctgcgatgggacgcgtacttcccagtgatgtggccctggccgtcgcacccggggaccggacacctgtaggcaggcagaggtgacacactttattgtctggccaccgtcgcctggtggc

SEQ ID NO: 19400 - DNA, 122 bp, Homo sapiens
tcacacccggctgggtagggaccttcgtcaccgtaaggcatgtgtggacgtgggtgtgaacgggacatccaggtggggagagaattctcctcaaccccagaaaagacgaaagatctcctcaa

SEQ ID NO: 19401 - DNA, 122 bp, Homo sapiens
ggatttatcttagcaccgattaaggcttacccacaaggcaaggctctttctgtgtcctcacgctgtcactcctaaaactttccagaactacaagtgacccagctctcagtcaggaagggctc

SEQ ID NO: 19402 - DNA, 122 bp, Homo sapiens
actgccacaagttttgaggattagtgagctctacataagggatgtcaggtacattataagcgttcaataaatggtggtgattattgttattagtccactatcattcttaaatatcttgtttc

SEQ ID NO: 19403 - DNA, 122 bp, Homo sapiens
cagctatgaagtctatgagtcctgggagaatcaggaaggcgtcctaggtgaggccttaggcgctggcgaagagctgctgcgcgatgagcccgtcctcgggcatgtagccggtaccaccgctg

SEQ ID NO: 19404 - DNA, 122 bp, Homo sapiens
tgggaggtgggcttttaggcagcaaaggaaagagacgaaagttgccattttgctgctgagcgccaagagagaaagagcacatatttctccgtgggacactccttgtattggcaagttttcct

SEQ ID NO: 19405 - DNA, 122 bp, Homo sapiens
ctgatgaaggatcactgatttatcagatgttaccctgcttaaacagaagcagcctattagcgcagctcacaccattcctagaatcaaacatatccaacccacccccctcattttacagagaa

SEQ ID NO: 19406 - DNA, 122 bp, Homo sapiens
aataaattcctatgttttcataaaaagtataggttaacctctaagagacttcccactaatcgcatttgatttttcacccagacttcattctaaacttcaaactggctctttaatgatctcta

SEQ ID NO: 19407 - DNA, 122 bp, Homo sapiens
tcatccaaccatgctccttgaatgtggggtgtttgccaggccccgttatgcactttacagcgtcatctcacttggtctttacgaatccctgtgctgaattatgatcactgtccccacttgac

SEQ ID NO: 19408 - DNA, 122 bp, Homo sapiens
taggataagcttatttaatatgacatcagttgaataaagccagctgtgagtaattatctccgatatttgatttccagctgttttgttgaactgttatgggctctcaaggtatttggatatta

SEQ ID NO: 19409 - DNA, 122 bp, Homo sapiens
tattgaaaacacctaccatctattgagtctcagttgcaagagctgaaggaaagacaaagacgagtctctggctttaaggaattttattgtgtaatcttggcatgtactggaatcacttctaa

SEQ ID NO: 19410 - DNA, 122 bp, Homo sapiens
ttcattgcccggtagatttggtcggtaatggtctggttgttgtagttgaagtcctccaggcgcacaccagaacggccgcctcctccagatgtcttgttcagggccagtgccaaggcccagat

SEQ ID NO: 19411 - DNA, 122 bp, Homo sapiens
ttctggtaaattacgtggatttgttttatctagaagggcagaaataaagccctctttccacgtgctgaatcggcctagcttctgagctgacattgtactcttagcgttgtttttgtaaaaaa

SEQ ID NO: 19412 - DNA, 122 bp, Homo sapiens
atggccacctcccacgtgactgcagccgtggctgtggctggaagtgcagggtagcctaaccggaagcatggcgtcgtggggggttctgggagttgtagtccctgggggagctgcttttacgc

SEQ ID NO: 19413 - DNA, 122 bp, Homo sapiens
tgaagctgggctgtaccattgcatacctgggggaggctgtggcaaaggtgacaagaaggccgaaggcacaaagggaagctgcacccattcctggaggagcttaaatagtgactcgagtgcaa

SEQ ID NO: 19414 - DNA, 122 bp, Homo sapiens
gaggcggcatccaagatggtgacatcatcgtcaaggtcaacgggcgtcctctagtggactcgagtgagctgcaggaggccgtgctgaccgagtctcctctcctactggaggtgcggcggggg

SEQ ID NO: 19415 - DNA, 122 bp, Homo sapiens
actcacccaggggccagggctgtccagtggctgtggggcccaactccatggggtgaacgccgcccagggggtggtccctgtgtgggccatctttggggctgagcaacgtgataagagtccag

SEQ ID NO: 19416 - DNA, 122 bp, Homo sapiens
caaggctaggaaaggggaagtaacttgcccaaggtcatgcaattaataagtggaagaagccgcctggagctcaggtctctggaacagcaaagacacaagctcactgcactgtaatgtaaacg

SEQ ID NO: 19417 - DNA, 122 bp, Homo sapiens
tatgtgctgaggcttatttatggattcccctatttaacactcctaagaattccatctagccgactgaggaaactgaggctcagggacatttaggtaagtgtccagatgtcactcagctgaag

SEQ ID NO: 19418 - DNA, 122 bp, Homo sapiens
cagctctacgggactgggaaatggtgggcgaacgcctaaggattaggcggggtcgggtcacgctctaagctgggggcccgcccctcggtatccccgcgctccgagcgccgcccacccaccgg

SEQ ID NO: 19419 - DNA, 122 bp, Homo sapiens
acaaaacccagcagatgggggctctgttgctggtgcagggtttctccctctggaggggcccgacactgaccactcacatgttgtctggatcttcaaaaggattgtcatcagtgaagaaatgc

SEQ ID NO: 19420 - DNA, 122 bp, Homo sapiens
gtgctgaccaacgtgtcactgcttcccatgaaagcagggacttgggacctgccctggtgccgcctccccaagctgctgaggactttccttgggcagccccagcttctcttttggtcctggtg

SEQ ID NO: 19421 - DNA, 122 bp, Homo sapiens
tgagctggcagggcctttgccgccctcagtgtcgcccctgctctgccatcccggctctgccgctcacagccccgcatggcaccccccaccagtccctgacatgatcgatccttcgcccttca

SEQ ID NO: 19422 - DNA, 122 bp, Homo sapiens
tggcgcctaacgggctgtccctctactgtggtcagagccgtgccccttgcaggtgggtagcgctgagagcagagcagcgcccgcgggactggcctgaggatcccgcaggcaggagggacccc

SEQ ID NO: 19423 - DNA, 122 bp, Homo sapiens
ctaaagagtgcctagggttgaacagtgcacgtctgtctcactgtacagggaagcccggaccgtcacaataaactgcaggcagcaagtctttttatttatttgctgagttaaaatgattccag

SEQ ID NO: 19424 - DNA, 122 bp, Homo sapiens
agggctagagtggaggccactgggaggggagggtcgctggggtcgctgggcgcgcgcgcgcggagcaaatttgcccgcgcgcacccagaaacgatgacataagtggcgctgatgagcgctgc

SEQ ID NO: 19425 - DNA, 122 bp, Homo sapiens
cctgacgtgtacgcaagtgtcacatgaatcgcgtgacgtgtatgcgagtgtcacatgaatcgcctgatgtgtacgtgtcacatggattgcgtgacatgaacgtgactgtcacatggatcgcc

SEQ ID NO: 19426 - DNA, 122 bp, Homo sapiens
cagagtggcggcggggtctggggaagagttgtcttgggggcagcgccagccaccagagcccgagtcagcgcggccaggactctgcaggggcaggtagcgacccttagagacgcaacgtggcg

SEQ ID NO: 19427 - DNA, 122 bp, Homo sapiens
ggcagctcccagctatgacatcctaatttagcagcaccagcagaaaacaaatttttctctcgcacattcatatattagttccagggaaagactgtaattgattctgctcagtgaaaacgctc

SEQ ID NO: 19428 - DNA, 122 bp, Homo sapiens
ctgggtatgaaatgcacacctgtccaccaggatcgcaggcaggggccacggaggctgccacggaaggacagctgtcacctcggacatcgcctgcggctccacagactctccttgaagcacag

SEQ ID NO: 19429 - DNA, 122 bp, Homo sapiens
aaaccctgagataggacattggcccggcgctgggctcgggtaacgatgcggggcggggagcgcgggcggccggggagggcggcggcccctttaagagcaggccacgccccctcccctcctcc

SEQ ID NO: 19430 - DNA, 122 bp, Homo sapiens
tggaccgacaatcaacctgagaaattgtacgctgcgttccgtgtcgctgcagtcaggctccggccacaggtcccgtcaggggcagcgaggccacggcgaggtgacttcagggggccaggtgg

SEQ ID NO: 19431 - DNA, 122 bp, Homo sapiens
ggcagggtctctgcagacggaaaagatggaaaggcgttcccggctgaaggagcagcgctgcggaaacagcaaggcctggagaccctctaaggctgccagccccctcgagggctgcagccaca

SEQ ID NO: 19432 - DNA, 122 bp, Homo sapiens
acctcgggtcatctgcccccctcgtcttcccaaagtgctgggattacaggagtgagccatcgtgcccggcctttcacatgtttctttaggtatatgaagctggcttacaagaaagctattat

SEQ ID NO: 19433 - DNA, 122 bp, Homo sapiens
cgcggcccgggaagcctgcaggtgtccttggccgctcggccgccgcccccggtacaccttcgccagtgcccagagcccggctccccagagcggccccgccccccaggctcggcgccgcgcag

SEQ ID NO: 19434 - DNA, 122 bp, Homo sapiens
ggttcactttcaggctctcctgatttttggcagaatttacctcctttcagtttgttggaccgagggcccttgaacaaaggcaccctcagttccctgccgggtgggcctccccagtatggctg

SEQ ID NO: 19435 - DNA, 122 bp, Homo sapiens
accctcactgtggcccagggtctgaagggaccgcgctccgggttcctaaacctgtgaaagcggcttatcccattcctttacttacattcgcgagggaaagatttcaattcggtctttgcccg

SEQ ID NO: 19436 - DNA, 122 bp, Homo sapiens
atcgctatggttaccgagcagaggcacggaggaagccccaagaggccacactgcaatgagcggagatcacaccactgcactccagcctggcaacagagtaagactctgtctcaaaaaataaa

SEQ ID NO: 19437 - DNA, 122 bp, Homo sapiens
ctgaaggttgccacaggaaagacttaacctattgcttcccaactgggtgctgcagtccaacggtcttaggtacatttggaaagggggagaggtgtttcactttggttgacaaaagggctggg

SEQ ID NO: 19438 - DNA, 122 bp, Homo sapiens
cgttagaattttaaaaaccgggtagaacgcagcgcaggaagcgagcgttccccgccgcagcgccggagcgtccagccagaatccccctgcatgcgcagcccctggcgtcttacgtcccacag

SEQ ID NO: 19439 - DNA, 122 bp, Homo sapiens
cgctgggcctcggttttcccatctgtgacatgggaacgtgggcctggaccaagagaactccggaggcccttcccgctcgggcccgggggttggggaggggtgaagttcgtagcgtgagcagg

SEQ ID NO: 19440 - DNA, 122 bp, Homo sapiens
gcgagctgttcggcaaagatcctgggagccctgctccactggaccggggggcagcggggtcggagagcgggaccagccgtgaggcgtcagccccagcccggtgggggtgaggacgaggggcg

SEQ ID NO: 19441 - DNA, 122 bp, Homo sapiens
gcgcaactttgccccgcctgcccccggggaagcggctgcaggtgcccgctgctttgtaggcgcctttgttggagagggaccaggaaagtaggggtaaaatagatgcagtgaccccagggttc

SEQ ID NO: 19442 - DNA, 122 bp, Homo sapiens
cgggggaggagagcccagaaaatgagattgaagagcagtgaaacctccccattgccagcacgtgaatgctcccttgttcccctctctccccatccctctggtgtgacagcagtcccagttca

SEQ ID NO: 19443 - DNA, 122 bp, Homo sapiens
gggcccaggcgactcgtcctgctctccggagtcggccctcggcctggctacgctctcccgcggaccccaccagggcaacgtcagctgggtcctctctgagctgaccctctttagaatacacg

SEQ ID NO: 19444 - DNA, 122 bp, Homo sapiens
agtcagccccgggggaaggtggccttgaaggcgggaggggcggccggcctgcagcagcaacgtgagaacagaagcaaccttcatctggctctaaaacttccagaaccagtagctttatagct

SEQ ID NO: 19445 - DNA, 122 bp, Homo sapiens
gaaagtttccttactgtctgcctccacagtaatttttttctctggtacaccctcctcctgcgcgtatagccctttgatgggctctggctttatttgaggtctgatcaggtctgtcctgctgt

SEQ ID NO: 19446 - DNA, 122 bp, Homo sapiens
atttgacaactcaagtctttaggtgatgctgaaaagcctgccctagcttctcatttcctccgtcccccagcgaatcgttctttgctgctgctgtcctcggtgtgaaaaggtgacccccccac

SEQ ID NO: 19447 - DNA, 122 bp, Homo sapiens
tgcccaagtgcctttgccacagatgttgaaacaaatgcttcaattggattacaaagtctgcgttagcttcatcagcttggaacttccatctactcattaatctcatctgcaggtccccaacc

SEQ ID NO: 19448 - DNA, 122 bp, Homo sapiens
tgctcccaccctcggccggggtcgcggggcgaagggcagaccacggagagggacgcagagcgcgcaagcagaaggcgcccccctcagccgtcggagccccgctgttgctgccccgcagggga

SEQ ID NO: 19449 - DNA, 122 bp, Homo sapiens
ggtgctcatatttgtggcccactgacatccaaaagatggatgacatctaccttatctggtcggtcatctctgtaacctccctaccaaggactaattggtctttaaaactcctcaatgcaccg

SEQ ID NO: 19450 - DNA, 122 bp, Homo sapiens
gacagctcccccgggagccagtgaaaactttgtgaagggagtgattactgcgggcgaaggcgcttggcacagccacaactgaagctcagccgtcggatgtgattattgttgctattgttacc

SEQ ID NO: 19451 - DNA, 122 bp, Homo sapiens
ggggaaaataaaacaaaacaaaactcaggctggacctggacagataaacaaacaggatcccgcacaggagttctttattctttgtctaattagcaagctcccaggaaaaaattttctccctt

SEQ ID NO: 19452 - DNA, 122 bp, Homo sapiens
gaagcatatggaggacaaagaggaatttcctagaatccagctaaaacacaggagtcccctcgagcaggaacttccaaggaggtgtacactttctagacctactggagtaatcctgattgctg

SEQ ID NO: 19453 - DNA, 122 bp, Homo sapiens
cagcagccgtcgggaaatgcactgagaccacaggcagagatcgccacacccccatcaggacggccagcacagaaccggtgatgccgcggtgtagacacagggcctggacctccagaaccagc

SEQ ID NO: 19454 - DNA, 122 bp, Homo sapiens
ccgcacacggtgtaagggacgtgtgccgggtctgcccaaccacgcgcgctggcggctgcccgggggagagtattttaggaaaaaagaacaaacaccaaaccacaaaaactttcctgctgcca

SEQ ID NO: 19455 - DNA, 122 bp, Homo sapiens
gcccctggcctctctgcctgtgcaggaagccctggtgtcgtaccccgagccgctgcagttcgcactctgcggcctcctcaggcactagagcttcccctgcgtccgcctttgggggaggggag

SEQ ID NO: 19456 - DNA, 122 bp, Homo sapiens
atgggcgccacggttcccaatcccgactgtggggcaatgtggaggctgagcagtgggcctcgtctccaccacctccccaccggctgccccctaacccctcttgggtccccgtggggcacagc

SEQ ID NO: 19457 - DNA, 122 bp, Homo sapiens
ggatgactgagatctgggaggtctccaccttggtggaggtggaagaggcggagggaagaacgttcctgggaaaagtggctgcatatgtccccctaaagtcaccaacttgcccagaggacact

SEQ ID NO: 19458 - DNA, 122 bp, Homo sapiens
tgagccacacaactcacttggcaaagcagctcggcgtctcagcctcatgctgcatggcctcgtgacccccagcctcccttagctgctaagcctgccttgcccaggggtgggatggcactgaa

SEQ ID NO: 19459 - DNA, 122 bp, Homo sapiens
ttgccatttgttttgcagattgtgggattagtgatatgcttttctaaagagtagaaaagtcgaagatgtctagacagaacttagtggctttgacagtgactacccttctgggtgtggctgta

SEQ ID NO: 19460 - DNA, 122 bp, Homo sapiens
ccaagttaagtattcccattgcttctggaccagaccccacctctccttctccagtcccaacgtctggtcaagtttgagatactgaagtctgcaagacccaagaaggaatggaaggaagaaaa

SEQ ID NO: 19461 - DNA, 122 bp, Homo sapiens
gtgatccttcactcgccagcccgcgctccagccctccgcccgccggcccgcccccctccccgggcccaatctgttttcaaagtgtgtctgtcctttattaaattgttttcttttccacatta

SEQ ID NO: 19462 - DNA, 122 bp, Homo sapiens
ttcccccactgaatatggattaatttgtaatcagaaaaacagacacactttacaaaagtccgacatcccaaactgacttcctcttccagatattaaaaatctaataaaggattggagcaaaa

SEQ ID NO: 19463 - DNA, 122 bp, Homo sapiens
ctgggttcctgacctgaatttcatggaagtctaaacaactccattactgtacacaggagtcgccccaaacaaacatcacacatctcacttctgcctcagcaacggcggcgaccctgggttcc

SEQ ID NO: 19464 - DNA, 122 bp, Homo sapiens
atagtcccttatactcagttaaaagtcaggagtgcccaacagtgaattaactgttacactcgggaccattccagtctaattagatttgactcaaggctcagataaagctttgggtttggttc

SEQ ID NO: 19465 - DNA, 122 bp, Homo sapiens
acaggagacaattgtgatcttggggtcatcggggtcagtacgggtggtgggactgaggcccgtggccagcatgccaattaccacaatgaccattttgagtaccgtgataaatgccatagaga

SEQ ID NO: 19466 - DNA, 122 bp, Homo sapiens
cctcggcgcccacagcaggtccacatctgacctgtccgcggtggcacagccaggaagttgcgcggggggaggccccgggggcgcgctttcaggtcctccactactcgaggcggcgggcaggg

SEQ ID NO: 19467 - DNA, 122 bp, Homo sapiens
tcctcgcggcgaaaagcacaaagcacagcgccctccgcctgcaggcagcccgcccgccgccggccccggcctcagctcgcacaccccccgccgccgccgcagcctcagccgccggagcgggg

SEQ ID NO: 19468 - DNA, 122 bp, Homo sapiens
caaagaacagcagcacgtaatttcgcagtcttctgtcctatcctcatgttacagcaccgacgctgaaactgctcgacatcggactcccagacccagacctcctttcaatcacatttgttcaa

SEQ ID NO: 19469 - DNA, 122 bp, Homo sapiens
cttccgcccccacccaaaaagggctttctggagccttctccgggtccttggaaaaaggagcgggtttgagccctaaggcgtaatgacagcagagggatgctgaaaagggcagggtgtaccgg

SEQ ID NO: 19470 - DNA, 122 bp, Homo sapiens
atccacaggaaaagctcccttgactctcccagtgaagtctggatttagagtgtatttcagcgcgttacaatcatctgtcattttttgcctctcccactagactgtgagctcctcatgagcag

SEQ ID NO: 19471 - DNA, 122 bp, Homo sapiens
cagacacttctctgacctgaggtatcggtagcactggaatgataatccccccgcccccctcgacttgcaacactgctttatttggggtcaaggaaacacacagccccagcttctctcccatc

SEQ ID NO: 19472 - DNA, 122 bp, Homo sapiens
acgtcacacaggatacggggaagtcagccatagcctgcaggcggggaatctgaaacctcgcgcaggagttccttgggagaggtggattacaaggactcttcctcccacccgctgtgcaagag

SEQ ID NO: 19473 - DNA, 122 bp, Homo sapiens
ggtggcttggtcaggacctgccattcagcccagtcgggctccggtgctcgccccggacggcgccccaagcgggtcccggccccgctgagcacctccagcagtggcacagcctctggaggggt

SEQ ID NO: 19474 - DNA, 122 bp, Homo sapiens
cattacaaggcggtaattaactcagctcagaggtcccgttcctccctcggtaactccaagcgttgccttttacaatcctccttccaacaacagcgcagtaggttgcagatgcagagcctcag

SEQ ID NO: 19475 - DNA, 122 bp, Homo sapiens
gaaatactgccaggattttaccacctctcgcccatttatttacttctcggtcaccgctttcgggggacagataaacaccacagatgcccatcaaaggggcgcacgggtctggaggcgcagct

SEQ ID NO: 19476 - DNA, 122 bp, Homo sapiens
cgcggcagctggcagcgtagccgcggttcttgagcgtgcgccggcgctgcttcagctggacgatctcctccttggacaggccccgcaggtgctggttcagctcccgcaccgacatggtcacc

SEQ ID NO: 19477 - DNA, 122 bp, Homo sapiens
caatctccagagagcctcttcctttccctttccctttcaccaatcaggcgctgggaggggcgggcgcgactttttttcccggcggccccgcggctctgcccctcgtgcggtcgcgttcccgg

SEQ ID NO: 19478 - DNA, 122 bp, Homo sapiens
cccgcccggcccggaggtgaggagacctcagccccggacgccgaggccccgccccgccggcgatgcaccccccgcccacctccgcgcccctttgttccgcgaccgcagtcccgccgagagcc

SEQ ID NO: 19479 - DNA, 122 bp, Homo sapiens
ccctttgtggtcacgggccgggcctaaatggaacatttggcacccccgtcccctccccaccggcttctactagggagcatggggttaaaagtcgctattgcaaaagtcgtgccactgctctt

SEQ ID NO: 19480 - DNA, 122 bp, Homo sapiens
gtcaaggttctgacggcacactggggagcgtcaagacgcctcctgcagtcgtagacaagccgggctgaggcattcactgtcgcttagaactgaaaacttagggtcgtccatgcccagaacgt

SEQ ID NO: 19481 - DNA, 122 bp, Homo sapiens
aaggttgggacccacaggtcaagcctagccccttagttttaccatgaagataactcaggccgtcggagaaagtggcctgcccaacgcaggtgctagagcgcgaaccaagagaagtcgatcct

SEQ ID NO: 19482 - DNA, 122 bp, Homo sapiens
ggtggcagcacaggtggagaccctgggacctggccaccccctgcctttctagggggccagcgtccccatttataaacagcagggctggacgcagtgggcgctgagatgatatgcttcagcgc

SEQ ID NO: 19483 - DNA, 122 bp, Homo sapiens
cggagagattaatttgcccacgtgcaagcggcagctaaggggcggacgcggaacttgaaccgtgtccctcctaaacctgccccttgtccgccgcaacgcgccctcgacgcgcacaaaaccct

SEQ ID NO: 19484 - DNA, 122 bp, Homo sapiens
ctcagaccccttcaaatcataggattctatagttctatgcaatggctacttccctgagaccgctggcacagcagaatgggtaagatagttgcactggtttcatgcagggctggattcaaggc

SEQ ID NO: 19485 - DNA, 122 bp, Homo sapiens
catttagagacacagagcgggtcaggggctgcacagggctggaggtggcagcgggagcttcggagaagtggagcgacccaaaaccggattgtgggggtcgctgcggaactctgtaaatttgc

SEQ ID NO: 19486 - DNA, 122 bp, Homo sapiens
ccgtgtccgcagcgatggaaagaatgactgtgggcgcctacccccggaggatgctgtcggcgcccagtctggcggctcccggcgcgcgcccgcgaggtcacgtccggggcgcgccggccgga

SEQ ID NO: 19487 - DNA, 122 bp, Homo sapiens
attcccaattcattaaaattaaatgtgtcacatcttacaagtgaaactacaattttcagacggaaaatgaaaacatttttccctcatattttgctattactgtccccacagtctcacagttg

SEQ ID NO: 19488 - DNA, 122 bp, Homo sapiens
agcccctcgtccgactcctcttcgctggaagacgggtccagcatggtgctcggggatccccgccgctcggcccgcggtccccaagcgcctcacccccggcggctgcgcccgcgggtctgagg

SEQ ID NO: 19489 - DNA, 122 bp, Homo sapiens
aaacagaatcagcaaaattaggagatgaacaccagaacctatagaactagtcataatggtcgaatgcagcaacacatggaaggcatgcctcccatattgtttacctactgctattattattc

SEQ ID NO: 19490 - DNA, 122 bp, Homo sapiens
tcgcagagccggagtcgtcttcactgcttcgccaatggggacactaaggtccaggtggcccgcggggactcgggtcccgcccgatttgcgagtgttatggcggggcaactttccagagaggg

SEQ ID NO: 19491 - DNA, 122 bp, Homo sapiens
ccgcccgcccgctgctgtcacttgggctgcttcagctgatcttgggctgctgcatggtggcgctcagcttcggggcgctgtcgctgagcagctccccgcaggtgaagaactcgtgcccgttc

SEQ ID NO: 19492 - DNA, 122 bp, Homo sapiens
cccacggacgggcctgagtatagccccacgcagttccaggagcagcggctggagcacttccgcctctttttcgtcaccaaggtccagtggccgccagctgagcagctgcaggtgctgctccc

SEQ ID NO: 19493 - DNA, 122 bp, Homo sapiens
gcctgccactcggggactttatttcaggtggggctattgaaagttcccccctttcacacccggtatgaaaaccctcaaaaatccaaaggggcactttccctggataaaaataaaacttggag

SEQ ID NO: 19494 - DNA, 122 bp, Homo sapiens
agaccctcctcaacgttgccgttccccagatttgggagggagtatctcctcgaccctgtccgtgttctgtcctggagttccccaggcctcagctgcctctgagatctcggggttcctgatga

SEQ ID NO: 19495 - DNA, 122 bp, Homo sapiens
agctaatgtcaggatgagtcaagcgctcaaaatgcaagtcaggttatgacaactaccaggcgattgtcaagtttcccctgtacctgccccttggctcgtgcggccggtcccaggtttatgag

SEQ ID NO: 19496 - DNA, 122 bp, Homo sapiens
gaaggccatcgggaatggctttaggaagctgattttcaagctttaagcggcagcaggtgccggcagcgcggggaccgatcgatggagagaaggcgggcaagacgccgggaagcgcattcctc

SEQ ID NO: 19497 - DNA, 122 bp, Homo sapiens
tgattttctcgttattgtcataacggtaatgggcgtttttactgtgttctggaaacgcctcgctttgcgtataaacttgtgggcgcctttcctttccaactgacttctcagtctgatatcac

SEQ ID NO: 19498 - DNA, 122 bp, Homo sapiens
taaaataggggttcataataagaacaagtatttggccagcttatgcacattttagcccaccgttcttttcagtagggagcactgcaaaaccaaccaagtgaatcatgccaagctttattcag

SEQ ID NO: 19499 - DNA, 122 bp, Homo sapiens
cagctctaaagagtgcctagggttgaacagtgcacgtctgtctcactgtacagggaagcccggaccgtcacaataaactgcaggcagcaagtctttttatttatttgctgagttaaaatgat

SEQ ID NO: 19500 - DNA, 122 bp, Homo sapiens
tgcgatggtctcttactccccactttacaagggaggaaagaggccgagggcagagtgggccgcctgaggtttggaggccagggctagtacaacctcaatttgaccctggaacctgccgcttc

SEQ ID NO: 19501 - DNA, 122 bp, Homo sapiens
acctcaagtccctggtggtgcatgacaacctgctcaacctggaccatgacatggtgagcccggccgtgttccgcctggtgctggacttcatctacaccggccgcctggctgacggcgcagag

SEQ ID NO: 19502 - DNA, 122 bp, Homo sapiens
ctctcagactagccagacaattgcaggaggactggggaaggaagaataagatagtatctccggaacttaaggagaagatctcttgagaagcaaatgccaataactagagggaaaccacctca

SEQ ID NO: 19503 - DNA, 122 bp, Homo sapiens
ccatgaagcagtgtcaggctggtacgaggatcagcagtgatttctttgaggaggagagcccgtttcttcactcacaggccgtgtctgagtggatcaagaagaacagagtgcccttttatgag

SEQ ID NO: 19504 - DNA, 122 bp, Homo sapiens
agagtccgcgaagagagtccggcccttaggcctttggtgttgaagaatctgctcctctgtcgggtcaagccccactagaagttaacacctgtggtctccaaacttgcctattttcctgtcac

SEQ ID NO: 19505 - DNA, 122 bp, Homo sapiens
ccctactttatcagtcctgtttgccagaactgcggttcttcactcagcgtgctcctttgccggagatgtgtcgcctccaggctgtaatccccagggcccacccaggtctctccaggtacccc

SEQ ID NO: 19506 - DNA, 122 bp, Homo sapiens
acacgccggatcataaagacactgttctcccttcaagttcctttggtgagtttatggacacgcatgaggtaagctgcgccgttcatgttctactgcgcgtgactttgtactgcccctgagtg

SEQ ID NO: 19507 - DNA, 122 bp, Homo sapiens
aaacaccgtagaaccaaaacgggctcccagaaagccttgctgggaagaccgagggtcctgcggaaaggattctgcaggctgaaggctaggcgcctcgccactctaggactacaattcccgag

SEQ ID NO: 19508 - DNA, 122 bp, Homo sapiens
cacctcccagaaccactggatcagcgatgcggaaggctcgatgcctttataggtggccaccgacttgagaaggtgcagcgggatgtcagggctgccacacacctgcgggaggatgtctgtca

SEQ ID NO: 19509 - DNA, 122 bp, Homo sapiens
tggcacttgtattaccccccgggtcagaggccagagcgacaattaggaagtcacttacaccgctggggggaaatggcgggatgcagcaggctccaggccctcccaacaaatctgtggatgta

SEQ ID NO: 19510 - DNA, 122 bp, Homo sapiens
aagaaaccaacagggttcacgctggtgcccatttctggaaatgccaatcgcgcccgactgcgggagccaggatcaggtccccagggcgcccttgcagacagcaccctgagcgaaggagctca

SEQ ID NO: 19511 - DNA, 122 bp, Homo sapiens
gacactgggtgacctcggactaatcactttgcccttgggcctcagtttcttccatctggacgatgaggaatcgggaatggatcatctccacggctccctgcaacctaacctagagccaagcc

SEQ ID NO: 19512 - DNA, 122 bp, Homo sapiens
tgagacctatttagccaattattgagaagatgaggtccctttcgtgagtctgcacggagccgccgtacaccatgaaagcgctcacttgtttaaagtttgctctaactttgtacattttttcc

SEQ ID NO: 19513 - DNA, 122 bp, Homo sapiens
tggtcagaggcccaaaacagttatacagatgacggtactggtcaagatgggtcaagcaagcggccacaagggactgaggcaagcacaatggtttcaaagaaagactgtaagctccatgatta

SEQ ID NO: 19514 - DNA, 122 bp, Homo sapiens
cattcctcctattctgcagtaacacgtaacgctattttgggtatttgttatcatttgaggcgagagccatgtggctgtgtaaaaaatgcgacgccttccacaccccagttaaaaaagaagca

SEQ ID NO: 19515 - DNA, 122 bp, Homo sapiens
agccaccgcgtggtggccgggatcgtgtggtggccagggcgtctgaccttggctctcacccggaggccatccaggtgctgaggatggctaacgctaaggccacacagccagggagaggaggt

SEQ ID NO: 19516 - DNA, 122 bp, Homo sapiens
tcactgctgtgtgtttacatgagtaatggagctgccgggggaggggagttgtaagcagagcgctgagcctcgcagctcgcattcggagggaagctgacatccacaccaagtcgagacttcca

SEQ ID NO: 19517 - DNA, 122 bp, Homo sapiens
tgcccctgctccccgagctcaccagaatcacgctgatggggctggtgttgtcccgcatcccgccgtggggccggggccgggggcggagggggccagaggaggacggagccggaggcggaggg

SEQ ID NO: 19518 - DNA, 122 bp, Homo sapiens
aaagagctgcagagtaaactcaactccgggaaagcgctgcactgactggcagattccacacgagacactggcctcccacgtgtctttcaggaaacatacaaaattcaagggataaaggaagc

SEQ ID NO: 19519 - DNA, 122 bp, Homo sapiens
tgtgccagagaatttaaatgtcgagcacctggattcccagatgtttaccagtttcagtcacgcaaaaccctctactaacctgtgctccctgaataataattttgaaggcattgggtagttat

SEQ ID NO: 19520 - DNA, 122 bp, Homo sapiens
catggagctaatatgtacttcatgagacagaaattattgtccccattttacagattaagacgactgaggctcagaaacagtaaaacagcttgccatacaaataactataaagtcagacttga

SEQ ID NO: 19521 - DNA, 122 bp, Homo sapiens
ggtgggccgggtcccccgcacccttcatggccctgactcggggctgcccatgaccttcagcgtcagagctcggtctggtccatgcctgccttggggaagctgcgccgcctctgcacccaccc

SEQ ID NO: 19522 - DNA, 122 bp, Homo sapiens
ttcgggagagagagtgacccctggctaggcagcttggggggcattggtgaccctggggcccgtgtgcctggcaaggtggctgaagggagcagctggtgaacacaggcacccagggctggctt

SEQ ID NO: 19523 - DNA, 122 bp, Homo sapiens
ctcagcgcgcgccatttcgtcgttgccaaacgaaatcaagccccgcgtgcgctccaggggcgaaggactctggactcaccccgaccaccgggagagctggcccctacccacctcgggacctc

SEQ ID NO: 19524 - DNA, 122 bp, Homo sapiens
ggccgcggcagccgcacgcagaggactctcggccggcactgccccttctgcggcgggccccgcccactgcagacactggccccgcccccgccgcggccccgcccacccctcctccctctgcg

SEQ ID NO: 19525 - DNA, 122 bp, Homo sapiens
cttgtacccaggaaagggtggcctgagccgcccacccgggagggcgtggctttagtagaccggtcttcactgggttgggggaacggaggtgggtaggaggtttgcttggggggtccccggcc

SEQ ID NO: 19526 - DNA, 122 bp, Homo sapiens
ttgctttcctctttatctagatctaggacctgcaaacttgttctgtaaaaagccagagagcgtgagcctcaggcttcctgggcagacaggtcggaggggagggagcgggcagcgtccagtga

SEQ ID NO: 19527 - DNA, 122 bp, Homo sapiens
aggatgggcccggctgtcccgtgaagggctccattgcccgggattttggcctggctgaatcgcctcaggtctgcccccttaacaagcatccacccccccggcccccacctccccacttctcg

SEQ ID NO: 19528 - DNA, 122 bp, Homo sapiens
cggcctggcgccccacctgcacggccagcgtctggaagagggcgatggctgtgcagatcacgcccatggccacgctgccgcccaccagcagcaggaagcagacgccaaagcccaggccgatc

SEQ ID NO: 19529 - DNA, 122 bp, Homo sapiens
catgctagaaagttgggagctcacacttaaaaaaactacagaactcaaaatttgccatgacgtgcaggtccttcttgggcctgtaaattaggcagttaacgccttatctgaaccctgggaag

SEQ ID NO: 19530 - DNA, 122 bp, Homo sapiens
tcggccctttgtggctctagtttattttccagttaatgaaatgggagactgagtccctgccgctgcccctggagacgccggagttctgaaggcatctcctccgcgagactccagcctgcttc

SEQ ID NO: 19531 - DNA, 122 bp, Homo sapiens
tgcttgagcgcggcccgctgtctgctgtcgcctacagctgaccaatagagggcttgggtccggaagtgatggactggaggcttgactaatgtgaaaggggcgtctgaaaggtacagccaatg

SEQ ID NO: 19532 - DNA, 122 bp, Homo sapiens
ggaagctacaggtggaagcgaggcggggatagtcaaggaagtgaccgtgtcctggagacgcggcaaccgtggtgaccgcagtcaacacagtaagccccagcattcgcattgtaattgagctc

SEQ ID NO: 19533 - DNA, 122 bp, Homo sapiens
cctgggcggcagctctaagagcctttcccgggaatcggcgtcagcgcctcgctcctccgccgccagcccgcggccgcacggtctccccagacttccgtggccctgccttggccagtcggggt

SEQ ID NO: 19534 - DNA, 122 bp, Homo sapiens
cattgagacgtttttaaaagttcccaggtgattcttgtgagcggccgaatttgagctccacggggctagaccactaacaccgcttcagtgggaaaacatgatcgggaggagttgtatgttta

SEQ ID NO: 19535 - DNA, 122 bp, Homo sapiens
gtgcgaccgcgacgtcacagtgacggccatcggcatcggggacatgttccacgagaagcacgagagtgaaaacctctactccatcgcctgcgacaagccacagcaggtgcgcaacatgacgc

SEQ ID NO: 19536 - DNA, 122 bp, Homo sapiens
gggtccgcggggtcggactggcctggggcagccagaggaggcccgagggaggagggcggccgtgcagcgcgccctgcacactcgcacccgcacacgcgcctcgcacacacgcactcacaccc

SEQ ID NO: 19537 - DNA, 122 bp, Homo sapiens
ggcaagcggtccggataacggctagcctgaggagctgctgcgacagtccactacctttttcgagagtgactcccgttgtcccaaggcttcccagagcgaacctgtgcggctgcaggcaccgg

SEQ ID NO: 19538 - DNA, 122 bp, Homo sapiens
gggaaggcctcgcggggctccaggctcctgcggctggacaggtcgcatgtggggcgaaggcggagatcagcagcccatcgcggggcccggccactcagcctggagacctggctgcccgtggt

SEQ ID NO: 19539 - DNA, 122 bp, Homo sapiens
taattcgccaccacgtggcgggcccatcaggccatctgcctggacgtccaccttgccgaccggctgtgtggtctctaaggtggatgcactccggttgcccgagctctgcacacgatgccgag

SEQ ID NO: 19540 - DNA, 122 bp, Homo sapiens
tcaccgtgctctaagttcgggagccctgcgagcagtgatgcgtggccacgtctacagcctcgctggcctgtcacgttcccaggtcaggctctcagctccagcgggaatctcccattccccta

SEQ ID NO: 19541 - DNA, 122 bp, Homo sapiens
acaggggactcaggaaaacttttccagaggtactagggcccatcatagtatctctcatttcgtttagcacccggcaggcgctcagctctcgcccttcccttccccaagagctgacagactct

SEQ ID NO: 19542 - DNA, 122 bp, Homo sapiens
gcactgtgcatcagccaggtttcattgtcgtggaaaccaattaccgactgtatgcctacacgggtgaggcgggacagagggcccctggaagaggaggttgggggtgagggaatgccagttta

SEQ ID NO: 19543 - DNA, 122 bp, Homo sapiens
gttcctctttggcctccggctctacccagcgacagcctccaccgcccgcgccacagcacccgcagccggggtcccaggcgctcccagcccccgcgctggctccggaccagctgcctcaaaac

SEQ ID NO: 19544 - DNA, 122 bp, Homo sapiens
ccactgtggggagaggaacgaagagcaggggaaagggacccaggagtggagcctgcctggcgtctcagcatgggggtgacactcaaggatctgcttccaggaaactaaaaaaggagaagtca

SEQ ID NO: 19545 - DNA, 122 bp, Homo sapiens
ccacatctccctaccacctcttatttcctacgaagtctttctgcctgaaactggaaaacccgaactattattgaggaagtgaagcccttccatttgaatcctgagaaagacgcgctcaaaga

SEQ ID NO: 19546 - DNA, 122 bp, Homo sapiens
aggcgctcctcggcaggacccccggtgcccagaggggccggaggactcggcgggttcctgcgctgttctgggcacccagtgacggggatccgaaggaagtcagctactgtaaggcaggggaa

SEQ ID NO: 19547 - DNA, 122 bp, Homo sapiens
gaaatgaacacactcatttttgttgtatatttttgctctaaaggctttccggcaaacaggcgatcaatgatttacagcctacatcagctaaggaagaccgtgattgtgatatcaaggtaaag

SEQ ID NO: 19548 - DNA, 122 bp, Homo sapiens
aaaagtctaatgatttgagtgagtaaaaggtaatggtgcatttgaacaagtaaatgctgtcgtggtcagcaagatccgtgatttgaacatgtgatgactggaaaaaggtttgggttatttgg

SEQ ID NO: 19549 - DNA, 122 bp, Homo sapiens
cggggcccgcctggtgtccggggccgaggtgacaccgtgggctgggggtgcggtggagcccggggccggcctggtgtccggggccgaggtgacaccgtgggctgggggggcggtggagcccg

SEQ ID NO: 19550 - DNA, 122 bp, Homo sapiens
cagatgctgtaaaaacgaaagaagcccacagttgggacgaggattccagttttgcgtcaccgtcaaggcgggaaagttcccggctgtcggttggagggtgggtcctcgccccgccccgcccc

SEQ ID NO: 19551 - DNA, 122 bp, Homo sapiens
atccgtcgactttttctccgcccatgttttcctccaatccttaccaaagatggtgcccttcgcttcctctctcggcagcacgcaggtcccgggagcctctacccgacctctctatgatacgt

SEQ ID NO: 19552 - DNA, 122 bp, Homo sapiens
aaaagtgcacatgttttgggaatgaggtgggcgaccatctttccttgcttcccactaccccgcccccgtgggctgcaccaaaggcgagtgtagaattaaacactgatactgaaatagggagt

SEQ ID NO: 19553 - DNA, 122 bp, Homo sapiens
accttagctgatttcatccctgcaacaaccctggaggtaaatgtattaatatcgccatttcgcagttgagtaaattgaggataaaaacagcaacaacttgctcgaggtcacaacggatgacg

SEQ ID NO: 19554 - DNA, 122 bp, Homo sapiens
caagcggtccaccccaggtaacacaggcaaagaggcttggcctgcaatggctgcaccagccgcccgagctgcctcctcctctggctgcatgctgccggcgatgccattgctgttggctgcca

SEQ ID NO: 19555 - DNA, 122 bp, Homo sapiens
aagaattgttccaagaaacataaatctggactcccctgagctggggctgttggcatccagcgccccattaccgtctgcaaacatgtcagcttaacctctggccgccagttcccggggggcgc

SEQ ID NO: 19556 - DNA, 122 bp, Homo sapiens
ttaaaactatgagtccggtggatcaagtgggcgtcaaactccccttgctctgctgggaggcggccaccgggggaaggacacagcgggccaggtgcagctgggaacacccagcatccacaaca

SEQ ID NO: 19557 - DNA, 122 bp, Homo sapiens
ttctgttctgccacttgtccttggtgactgagcctcagtctacttggttgggaaataggacggtcgggagtgaacccgcccagggtgggcttccagtcacccgcacatatgcggggcactgg

SEQ ID NO: 19558 - DNA, 122 bp, Homo sapiens
cctgggtccggactgctgcgtccgccggcgcttgaaggggtcaggctcattagcatagcgcgccgcctccgccaaccagcgcccggcgcgagtggggcggggccacgggggcggaactgagg

SEQ ID NO: 19559 - DNA, 122 bp, Homo sapiens
gtacaatacagtaagggaaatagaagtgacatgcgatggacagccaggccttaaattgcgcggtgctgattcctgtcccttaacccaacaatagaaagataggcgtgcctggagttgctggg

SEQ ID NO: 19560 - DNA, 122 bp, Homo sapiens
atgtccattcagcaagagaagacaaccgtgcggactcagaaacgtgcagacgggtaggcacgtgtagacgtaaaagtgtcgcccaccaatcccccgcgccagcccctcagcttttaccgccg

SEQ ID NO: 19561 - DNA, 122 bp, Homo sapiens
gtgggccgcgcctgccggccctctctgttgtcccacttggcacggactgggctaccgccacggtttgacttccgccaccagcaaccaagggaaccagatcccaagggaaccagcacccctgg

SEQ ID NO: 19562 - DNA, 122 bp, Homo sapiens
ccacagtgaagctccctcctgggattccaggacccatcacagggcctagctcggaagatgcgctgcttccgggcttgccagcgtgtggagcatttcaccggggatttctaagatcgtgtggc

SEQ ID NO: 19563 - DNA, 122 bp, Homo sapiens
tcggcccccaggaacagaagtctctctgccaccttctacctcgaattcctgagaattcttcgtaggtttcaaacattcccctgagagggagggttaagctctggagagctgggagtgagacc

SEQ ID NO: 19564 - DNA, 122 bp, Homo sapiens
gcccgggggcgcgctcgcctgtatataggcaggtgtcaagctggggctcttcttattggacgtgagggccgaggcgcggggggctggtccatcctacctaggacgcccggcgcagcctccat

SEQ ID NO: 19565 - DNA, 122 bp, Homo sapiens
agagaagggagactaagcgggacgcttcagtatgcgcccttggggctgaaggaacctccccgctaaacctcggtttccctgaccccaaagggcagcgctcactggggaagcggcgccgccag

SEQ ID NO: 19566 - DNA, 122 bp, Homo sapiens
tgtgtagtggctcggtgtgatttgttagctctttgaggcagggtaccctcctcaggatttcgatatgcaaaaaatcaaatctctcatgacccgacaggtaagtcgcggcggctgaagcaaag

SEQ ID NO: 19567 - DNA, 122 bp, Homo sapiens
agagccaagctctgcacaggaacctccagaaccggcctgagcttcacagctgcgtctgcccgctggccatgtctcacgtcctgaggacgtttcacaggagggccgcccttctgctgcccgca

SEQ ID NO: 19568 - DNA, 122 bp, Homo sapiens
ggcggcgggcagcaggcagcgggagcgcgccggccgggacccgctaacggccgccctgcgcggccccgcccgccgcccgcccccggccctccccgcgccgctgcccctccccccgccgccgc

SEQ ID NO: 19569 - DNA, 122 bp, Homo sapiens
gccatgtacaaactagacgtgtatttatggtgtgtctgaatgtacaacaatttcctgtttcggagaaaatagttccttcctggaagggctgttctgtatttgcacacttttcccatgtgatt

SEQ ID NO: 19570 - DNA, 122 bp, Homo sapiens
cgtggatctgccaggtgggggcgtggcctccattgaggggcgtggccctggtatgtggggcgtaacagggcacgagggggcgtagcttcgatggccggacgtgcaggctgcggatccccgta

SEQ ID NO: 19571 - DNA, 122 bp, Homo sapiens
ttgctcacctcttcctccggctcctcctcctccttctcccgcagccgccgccacagccgccgggagcgtcacttccgctccagcaggcccatctcttccgcattgcgccgcggccgggggcg

SEQ ID NO: 19572 - DNA, 122 bp, Homo sapiens
ctccaattccagtgggggagctgtggctactgaggcacccaacctgctggttgttcagagcggggcagctgaggagttgctcactggcccgggccccggggaggcgggggatggcgaggcca

SEQ ID NO: 19573 - DNA, 122 bp, Homo sapiens
ttcctgcccacacctctccctccacacctccctgcaagcagagggagccagctccagcctcggccagcacagagaagggctcccacagtgcagcagcaggctgaaacgctcctaaagcatgg

SEQ ID NO: 19574 - DNA, 122 bp, Homo sapiens
agggatagcagaggcctcggcttctggaatgttggagccacaagctgagcagggtgagggcgtcctgggccattccggtgtgtcactcacctgagctcttgggaacctggccttgtgccctc

SEQ ID NO: 19575 - DNA, 122 bp, Homo sapiens
ccgcttgtcacacgtctttcgggttctgaccagcacatcaaggggactctaagcaggccacgtggttagtgtttgctagaacttgtttagcttcagatccagtcatcgagcatgctaggctt

SEQ ID NO: 19576 - DNA, 122 bp, Homo sapiens
tgggggtctgctccagttccggcagaacatcctgggtggtcgtgcccccgaggtccttgccggtgtggctgcacgctgccaccaagtggctggcagggcctcaagcttcccgcaggcacgga

SEQ ID NO: 19577 - DNA, 122 bp, Homo sapiens
tggggaggggattccaagaggctggggtgaacgctggggctggggctgcaggtagacacccgcccaccggagcgggcgcggcaggcactaccgagggctgctctcggcggcgcgggcgcggg

SEQ ID NO: 19578 - DNA, 122 bp, Homo sapiens
ctcacgccctcctgcgcgtagcccgctagtgaggttccgaagggcggggccgggccgaaccggatatgccggttctggggctcaggtgacaaacccaggccttccgcccctcgcctctggtg

SEQ ID NO: 19579 - DNA, 122 bp, Homo sapiens
ggccgaggggcgcgccccgtccgctgccacccgcgggaggagcctcggaaggcggcgcaccgcgccgcacactcagtccaagaacccgcctcgcgtcactgtcgccgtcagggccgcggagc

SEQ ID NO: 19580 - DNA, 122 bp, Homo sapiens
agtgaaggggtaagactccggaacgttcggtctccgggtcccattcagccttcgttgaatcgcgcccttagactcacaacagttgcagatctaacgtaatttttaaagccacctttggcgcc

SEQ ID NO: 19581 - DNA, 122 bp, Homo sapiens
catcttagcaacatactgacttcctaacaatccttcccttccaaggcgatttggcccaaccggtcagctcacttgcaagagagattctagacttcgtagcaaatgagttaccgaagttttga

SEQ ID NO: 19582 - DNA, 122 bp, Homo sapiens
agctgtagatctccttttttgcagtggctccgttctgtttgctgtccccgatccagcccccgccctcctcgcaggcctctgctcagcaccatctgcccacccggagggtttcctcctattcc

SEQ ID NO: 19583 - DNA, 122 bp, Homo sapiens
ctggtgacgaatggacgttgagtgagtgctcaagctcagacagctgcctaacaaggttctcgaagtccccgccacacacacaccttttttttttttcctgtatagataaatacgtgagagac

SEQ ID NO: 19584 - DNA, 122 bp, Homo sapiens
cacaatttaaatccatagacaacagaagggggtttaaaatgacctttttttcagttgacccgaaagttgtggttagatgattaaaaagaaacatttgaggatggacttaattatttcagtaa

SEQ ID NO: 19585 - DNA, 122 bp, Homo sapiens
tggcgtggcctggattctcacgtcgggagtcggattgcaaagccttactgggcctcgccgcgccccatggctgtcagcgcattccatgctgacctggccgtgtatgcgtgcgtgtgtacgca

SEQ ID NO: 19586 - DNA, 122 bp, Homo sapiens
gaaacgtgctcgcggcgtcttctagtgcaggcctgagcccggctcccacggtttcatttccgctggttctgtgctctcctgggcactaactgtgctgccccagcctggcaggtctcctggga

SEQ ID NO: 19587 - DNA, 122 bp, Homo sapiens
tttgatgaaaaagagccaggcaaagtcatctacaggtcctggggataggtgaactggactcggataaaataaaagctgatgggcatcttaacctgtcccttgggctgacctgagccagtgat

SEQ ID NO: 19588 - DNA, 122 bp, Homo sapiens
gtccttcctgtgcaccaggcatggatggcaaggcacgattgataatgttccctcttatctcgaaatgtccactctctctcccatgcacggggagtcaagctgtgctcttcaaacacaaattc

SEQ ID NO: 19589 - DNA, 122 bp, Homo sapiens
cacaacgtcacaagagcagcggatacagacaagatggagacagcttctttctcgcctttccgagattatttactatctgcgagacacttccggacgcacagcgcaacccgcccctcagcctc

SEQ ID NO: 19590 - DNA, 122 bp, Homo sapiens
gggcgagcctggcagcctcctgagcggcaggactatgcaggcgccttattgagctgtcagcggctggcagctgctcccaggtagcaggaagaagggccgagctccacgtgggcatgaaaggc

SEQ ID NO: 19591 - DNA, 122 bp, Homo sapiens
tcatgctctccccagtgctgaaggaaggaaggaaaagccaccctgccgtgagactggggtcgtggaatcacagcggccttaagcagtatgctggagccaggctcctccctgggggatctgct

SEQ ID NO: 19592 - DNA, 122 bp, Homo sapiens
tccgccctcaccccccaccccagccaccccaattccctattccctccccttggacggcgccggggaaaacaagctgctcgagctttatttcttcggtgcaaccaactcagaatgaattcctc

SEQ ID NO: 19593 - DNA, 122 bp, Homo sapiens
agaaaattctaaaaacaaggcaatgcatcccggttgtaagtgaccatgatcagatagcatcgtccttcaactatacctaatactagcttacaaaacacacattagtgataacgctaattatg

SEQ ID NO: 19594 - DNA, 122 bp, Homo sapiens
accctaccgccccagtcacttcccctctgcagaccccgccagcccccgggtcgcagcccccggcccctcggcgtccgggtctgtcaccgcccgcttcccagccccaagaccccttttcctta

SEQ ID NO: 19595 - DNA, 122 bp, Homo sapiens
gctgcttcccaaaagcggtgccggcaggttaggggctgcgcagcctgaaggctggggctacggagaagcccactgcagtgtcactccagcccccgaaggcgtgtgcgcacacactcccgcac

SEQ ID NO: 19596 - DNA, 122 bp, Homo sapiens
ctacggggtccggccggcgccctcccgaggggggctcaggaggaggaaggaggacccgtgcgagaatgcctctgccctggagccttgcgctcccgctgctgctctcctgggtggcaggtggt

SEQ ID NO: 19597 - DNA, 122 bp, Homo sapiens
gaggagcgtctctgcccggccgccccgtctgggatgtgaggagaccctctgcctggcaaccgcccgtctgagaagtgagaagcccctccgcccggcagccacaccgtctgagaagtgaggag

SEQ ID NO: 19598 - DNA, 122 bp, Homo sapiens
tccatctgtgtggcaaggggccatgagcagagggaggtagggtgtggtgggggagggagccggggtcatcacagtggatgccaaggccagagttcccagagcatctggctctctggtttggg

SEQ ID NO: 19599 - DNA, 122 bp, Homo sapiens
acccccggagcctggtgacctgcccaccatcgaggaagctctgcagatcatccacagtgccgagccccggctcctcccagatggggcggccgacggcagcttctacctccactcccctgagg

SEQ ID NO: 19600 - DNA, 122 bp, Homo sapiens
tttaacatgtccaagcaataaggatctcaactaatgcagactctattgcagaacttcttgcgagtcctgaccataattctgctaagttctttctcttgctctttcactttttcttgtttttt

SEQ ID NO: 19601 - DNA, 122 bp, Homo sapiens
gtaacgggcgtcgagttcgaccaacgaatgcataggtagggcgggccgtagtgctgggcacgccccatccccacagagaccgtgggagcgaaggctggggaatgaatggtgaagggcgtagc

SEQ ID NO: 19602 - DNA, 122 bp, Homo sapiens
cggtcccaccgggcccgtggcgcgcccacgcctcctcccgggccccttacctcccgcgcgcggcgggcgcacgcaccacctgactcgcgttctcattggctgctgcctgttgctaacccacg

SEQ ID NO: 19603 - DNA, 122 bp, Homo sapiens
tttttcaacgttgataatactcaatttcatggctgaatacacatgtaaacacggttaggtcgtgtttttcgccacttgcaccaaacagaatgtcgcttgtctcggtgccatgggaggttaca

SEQ ID NO: 19604 - DNA, 122 bp, Homo sapiens
gcctgggccccaaacctcactgaatcctagtcatggaagtggctctccacagactatagtcgcacagcagctggagggttttgggtgggattgcttgtggagcctatagaaaaagcaagatg

SEQ ID NO: 19605 - DNA, 122 bp, Homo sapiens
taattagcagacatcagagattgttattctccaaggtaagaggcccccctagatccctggcggtgacagtgtcaagattctttttccctcctctgcggtgcccactccttttccagccttgt

SEQ ID NO: 19606 - DNA, 122 bp, Homo sapiens
cggagggtccgcgaaccgcgaccactggacgcccgccttggaaacgctgcagcccggcggcgtggtgcagatgggtggtcagtagaggcctcgccagtgcaccaggaaccagccaccaggcc

SEQ ID NO: 19607 - DNA, 122 bp, Homo sapiens
tggaacatggatttgaatctaagcagttgctcttccacactcttcaccaccatgctaacccgaacaacaaaaaaacctttttgggaggcatccccaggtcagaagtattaagtggttattac

SEQ ID NO: 19608 - DNA, 122 bp, Homo sapiens
ggcgagggaggcggggcccgggctctggaccagtaggactccaaatatttagtgtgggggcgtggccagagatcacgctccagccaatggaattgttgttgtcggggccgcgcgatcagggc

SEQ ID NO: 19609 - DNA, 122 bp, Homo sapiens
gcctctgcctcccgcatggcggcctctgcaggcccagctgttcctcctggctgcatctctcggcccacatcctgcctcacagcaagcaagctcttttggctcagctcccaccggcgtttgta

SEQ ID NO: 19610 - DNA, 122 bp, Homo sapiens
gatcgtattagagtcttgctgacattaaacacttacaactgcttccatctagcatggcagcgttcctgaatcacatctctaaagccgctcatggtatctgcatccttcgtccgtcacaaatt

SEQ ID NO: 19611 - DNA, 122 bp, Homo sapiens
ggaggcagggaggaagggccaaactctaggagcccctagcgcaggaacaagtacagggaacgcctgtccccataagggcccaacatgggagaggtggagatggggtgggcatctggagacgg

SEQ ID NO: 19612 - DNA, 122 bp, Homo sapiens
gccaccatagggtaactcttgcaaatgatttgaggcttcatggtttcccccaatgaagagcgtgagaactggagcctttttctctccagagtaatacctagaacataagagcaaagtcagtt

SEQ ID NO: 19613 - DNA, 122 bp, Homo sapiens
gttgtaagtcgctgacctggggcggactggagggtggggtggggtgggtgttgaggggcacgcccgggctggcatcagccctccaggccaccctgccactcacccagcacacggcaaaatgc

SEQ ID NO: 19614 - DNA, 122 bp, Homo sapiens
acacttacgtcgggagaataacacgttcaccaaaggacacagtggtattttttaaccaatcgcaactctgtacgttggtattattctaagggagcaaagctttgccccaacccccaccccca

SEQ ID NO: 19615 - DNA, 122 bp, Homo sapiens
agaatccattaaggcctggaggcctaaggagttagtattgtatgaaatccctacgaaacccggtgaaaagaaaggtaagtagaataagtaagaaggccttttctttcacatatgtgttgccc

SEQ ID NO: 19616 - DNA, 122 bp, Homo sapiens
tgaaattcactattgtgaataaaattcccaaggactctgagaaagcattttcatatattgcgagggatatgagttaaggagaaccagtttctaaagtcattctccattttttaagagaagcg

SEQ ID NO: 19617 - DNA, 122 bp, Homo sapiens
gaccaggccacaagaaagaggtttcaacaagcgttatcgtttcctggaactccaactcggcgacttccccgaagaccggctgtgcctggcgggcgggctgcgcacagcggggacaaggctgc

SEQ ID NO: 19618 - DNA, 122 bp, Homo sapiens
ccacaacatgcctactacagctgccagtggaatccagactggccaactctcttcctcatacgtgtctataccaacatgcttcaactggattagtgagtttctttgtgagtgcagtggacata

SEQ ID NO: 19619 - DNA, 122 bp, Homo sapiens
atttaagaaaatatgataaattacaaaaaaactttaaacaatctgcaatccatggccgagcgctgtggctcacacctgtaatcccagcactttgcgaggccgaggtgggcggatcatgaggt

SEQ ID NO: 19620 - DNA, 122 bp, Homo sapiens
aatttgaattaaaaagacctcccgagatcacctgtctttcaaattgctggtgcagctgggcgcagtggctcacacctgtaatcccagcactctgggaggccaaacgaggattgcttgaggcc

SEQ ID NO: 19621 - DNA, 122 bp, Homo sapiens
tgtttctttctgcatggaaagttcttctgcagacagtggggcctttgaaggcaggcggcacgtgttgttttgtatgccacaggcctagcatccacttggcaaggtgccctttcttaagcatc

SEQ ID NO: 19622 - DNA, 122 bp, Homo sapiens
gcattgttggggtctccagcctccctttttgcctttttgggagcatgccctacctgatcacgtgtaataatgtgtcttagcacttgctaccttagctaaaggaatgctcttaggacaccgcc

SEQ ID NO: 19623 - DNA, 122 bp, Homo sapiens
ccaggtccctacgcccgcagctccggcctccccgcctccgaccgaaccctgagaaacgcgcgaacctcccagccgctccggctgcaacccgtggtctaatgaggccgcgcttggctcgcttg

SEQ ID NO: 19624 - DNA, 122 bp, Homo sapiens
acagcacctatggagtctccaggctactgcagaccttgaatgaccacctaggattgaacacgtgaaagaaaacaaaacggtgccagtgaatgttaacactcagatccaagccctttattcta

SEQ ID NO: 19625 - DNA, 122 bp, Homo sapiens
gcttcatgctgaaaaggaaatgttggcaagttgttgctttgtaaagatcaacactatcaccgtaacagctgtcactcaaagtggaggaagtgaaatgcaaatttggtgagtaattagttttg

SEQ ID NO: 19626 - DNA, 122 bp, Homo sapiens
aaaaaaagcaatgtaaggtggccgtcataagctgcatacaaactgcttggtataagcccacgcccactgctagaggggcctcttttttttttttttgagatggagtctccctcttgttgccc

SEQ ID NO: 19627 - DNA, 122 bp, Homo sapiens
tctaataatattttcatttctatttaggaggcaccctgaaattatgggatgcttgaggggcgagcctgaagtacctagtaaattgttgacagaaccaatatcactcaagctgctgatccaca

SEQ ID NO: 19628 - DNA, 122 bp, Homo sapiens
ggtgtgagatggtatctctttgtggttctaatttgcatttgtctgatgattagaaatgggcgttttttcatgtttgtgggccacatgtacgtcttttgagaagtatctgttcatgtcctttg

SEQ ID NO: 19629 - DNA, 122 bp, Homo sapiens
tgccctgtcgccctttgtgccgcgagaccccgatcctgggggccagccgcgcttggtgctcgagcccctcgatcgtgcatgcgcctcggtcagcctcagttcaaggagtctggagccgtgga

SEQ ID NO: 19630 - DNA, 122 bp, Homo sapiens
gccttagcccccactttctgggccagccttatcactttgggcactgtgtcacagatgggccgagggcagggatggcaccggcatgtccgtgagtgcctggatgtgtggggcatatgttgcct

SEQ ID NO: 19631 - DNA, 122 bp, Homo sapiens
atacatttgcttattttccatttcacttttgcccactggatccttttgatttttgaggcacggtgggccatcatttgaactgttaacactatcacagttatttttcattttaatggtgacgc

SEQ ID NO: 19632 - DNA, 122 bp, Homo sapiens
aaggagaaaacaagtcacccagaaaagattccaagagcagccacagagttcacctccatccggactcaggctgggccgccctgagggcctgacgcaggccaccattcatctctctcagcaca

SEQ ID NO: 19633 - DNA, 122 bp, Homo sapiens
ctataacccatcgccgaaaccgggcggccgcgcccctattcctcggcatttctctctgtccgcggccctgctcagccaatcagcgagtgggctcctaggcaggtcctgagtgacagcgcggc

SEQ ID NO: 19634 - DNA, 122 bp, Homo sapiens
atgaaggttacttaggggaacaagagccccgctgttcccgagagaggtggggttggagagcggcacccaggaattccaagccagtctcctgggactctggcagcctgctccccggcgctgga

SEQ ID NO: 19635 - DNA, 122 bp, Homo sapiens
ctaagctgcctttgttcccacttctctgatccaggttaacttttaacattctgacaaactcggacaaaagtaacgttgggattacgtcaggaattcccacccttcaacaaatatttgttgcg

SEQ ID NO: 19636 - DNA, 122 bp, Homo sapiens
cgtcaggcgacgggacaggtcaggtgcagggccggagggagcctcctcctgggcgaggggcgctgagggccctggcgcgtcacggccgcgaggagccgagaagcccctaggccagggcctct

SEQ ID NO: 19637 - DNA, 122 bp, Homo sapiens
cgggccgtcagcttcggtcagagacgctgtgggacagcccccgagggaggtgggtgctgccgggctaccaggctccatggtgacaccaacgcgcttctgggtgccatgttctctccttttgg

SEQ ID NO: 19638 - DNA, 122 bp, Homo sapiens
gaggccccgcccccgccccgccttcaggccccgctccctcccagccccgccttcagaccccgcccccagccccgaacttccagcaagacgggccgcttcccgccctcgagccccgcccattt

SEQ ID NO: 19639 - DNA, 122 bp, Homo sapiens
tccccatctataaaacaaggagtaggcttgacggtccctgtctcactataatttcccaatcgaggttcagggagaaatccacaaaactaataaaacttcttcacggactgctaaatgtgaac

SEQ ID NO: 19640 - DNA, 122 bp, Homo sapiens
cccccatacctcctccggtaaattccatcttgtcttaagctaacccgacttggattctgccgcctgcgctagaggatccccgttcaaccatgccacttcccacttaactggtgcacgatgcc

SEQ ID NO: 19641 - DNA, 122 bp, Homo sapiens
gtttgagaaggtgatatttgcttgctgtgtcttcatgcttctcttcccattctccatcatcgtggcctcctatgctcacattctagggactgtgctgcaaatgcactctgctcaggcctgga

SEQ ID NO: 19642 - DNA, 122 bp, Homo sapiens
tgtcctgaagcccacccaccagaacttccctggtccttggtggcctccattgtttaggcccgttccagaggaatcctgggaccttaggagtcctgattaacctccctgcccctgtcatcccc

SEQ ID NO: 19643 - DNA, 122 bp, Homo sapiens
tcttagacctctccactccttggcacaactgacctctccactcttcgacaaactggcaagcgcttgccgccgttcgccaaaccttggtacgacagtcaatccagaaatgagcttctggaaca

SEQ ID NO: 19644 - DNA, 122 bp, Homo sapiens
atggtgagcagcagaaagagaagccttttggctgggttcggttcctcgactggcagctggcgccggacctaaggggagacaaaacaggagacaggtcaggtcgaggcctctggagtcgggtc

SEQ ID NO: 19645 - DNA, 122 bp, Homo sapiens
tgctgggctcagctctgcctcacaatacccacgtgccacccccagacaatggacaagggccggctgcagaggctgactcactctctgagggttagccaagccagtggggactaccccagacc

SEQ ID NO: 19646 - DNA, 122 bp, Homo sapiens
cgaactcctgacctcaggtgatccacacacctcggcctccgaaagtgctaggattacagtcgtgaaccaccgcgcttggccgcaacttgatttttaaattgctctctgagtgtagattcctt

SEQ ID NO: 19647 - DNA, 122 bp, Homo sapiens
acggcgccccctctagtcacctgcacgccacggcgccccctctagtcacctgcgccacagcgcctcctggcaatgaggggaaggccactcgcccaactcacaccaaggcagttacctccagt

SEQ ID NO: 19648 - DNA, 122 bp, Homo sapiens
aaaaccagctcaggcaccactagaagcagcttaaataagaatttctacctttatgcttttcgactcaaaaagtcagagaaatagaaaccaagagatagatttttccagtctgttcatttctg

SEQ ID NO: 19649 - DNA, 122 bp, Homo sapiens
gcacctgcagagcagccacacagctcgtccgatgcagcccaggcaccttgccccagggagcgctgcttgggaccgcccaccactccgggcccataccgcagcatctatttctcaagcccaaa

SEQ ID NO: 19650 - DNA, 122 bp, Homo sapiens
ctgtcagtcggggaagggcaagggtctcctctacctctttcccaccgcggccgggagaatcgcggcccagcctgtcctcgggtcggggcgctggactccggggcgggagcggagcccacgcc

SEQ ID NO: 19651 - DNA, 122 bp, Homo sapiens
accggctctgtttggggagggccctggccttcagctcagagggcaacacacagcagaagccgcggggcccggtgcaaccacaggtggctcgaatgtaaaacggttaaggaaaaagcctgcgc

SEQ ID NO: 19652 - DNA, 122 bp, Homo sapiens
actttaaattgtaatctaaattacctccaacaattcatggtccctgtaatgaactcccaccgttcccgctgtcatccgtcgatgatggagtgcgagccgggagctgcagccccgcggccgcc

SEQ ID NO: 19653 - DNA, 122 bp, Homo sapiens
cacctgaaatcctagcactttgggaggccaaggcaggaggatcgcttcagcccaggagttcgagaccaggctgggcaatacagggagacacagcgcccccactgcccctgtccgccccgact

SEQ ID NO: 19654 - DNA, 122 bp, Homo sapiens
cctgtctcctacctgcaaactttcaaagatggaagcactgggacagggttcctccttgtgcggaacttcaggaatgaaagaatctgtcctaatagggggtgaatgaaagtttatgtatacta

SEQ ID NO: 19655 - DNA, 122 bp, Homo sapiens
cagagtggggtattgacctttcacatgtttttcttcaagatttagtttctcttaaccgggcgcggtggctcacgcctgtaatcccagcactttgggaggctgaggtgggtggatcacctgag

SEQ ID NO: 19656 - DNA, 122 bp, Homo sapiens
tccaccaccgaagttatgggcacctactaacgtttcttgaatcattgctacaattaaaaccgataagatttaaaaaaaaaacaaatttaaaaactcctccaaagcactccttctgccgcata

SEQ ID NO: 19657 - DNA, 122 bp, Homo sapiens
cccgtaaatatggcagaacgccttcacctttcaccagatgacgcggggggaattgggccacggtccctgctgtcatcatggcatgctgcaagctctgtgggcgctggtggccaggatgcgga

SEQ ID NO: 19658 - DNA, 122 bp, Homo sapiens
gagggggtttccgggatctggcggggcctttgtcttgtgctccagctggagctttggtcccgtattctcggctatttatccccagctgcgggaggccctggtgactctgctgctgcagtgtc

SEQ ID NO: 19659 - DNA, 122 bp, Homo sapiens
cccacaggtgtcgaggggctggcccccttcaccctgtgatcgacaggacagagctgggcacgcaggctgggattcacggtgcaacctgcagccacggggtggagaaaggaagccacgtcgcc

SEQ ID NO: 19660 - DNA, 122 bp, Homo sapiens
tttaaaagtcaaacacacctcccgtccagcccggccactcccttctcctgggtgttcacacggggctgcggctgggatgtccatccctccaaacgcatgctcaaatctgatccccaattaat

SEQ ID NO: 19661 - DNA, 122 bp, Homo sapiens
ggtatctggtggatgcgctgaaaaattagctctcacctgcagagttactcaaccctcgtgcgcttctgctctgccgggaagggccagtctccgagggcggaataagtatgggtattgaaagg

SEQ ID NO: 19662 - DNA, 122 bp, Homo sapiens
aaagtccagcatagagaggggaatgaggcacccacctctgctaccctgtcttctccatcacgtttgactcagagccaagaaggactttcccatgtggagaaaagataggcagaagtaccctc

SEQ ID NO: 19663 - DNA, 122 bp, Homo sapiens
gacccgaggccgtttgttaggaggcaagacgtgttttctcttgttcctatccttcattcccgattattgcttcctctgattctggcagcggcgaggccacctcgaaaaggaagcgcccagct

SEQ ID NO: 19664 - DNA, 122 bp, Homo sapiens
ttcaaactatacattatcataagacttactattctcccagattcatgttgacttctcttccgattttctttggaagattttactggttgatttccatttgcctccacaaagatagaataatt

SEQ ID NO: 19665 - DNA, 122 bp, Homo sapiens
gcaggactgcgtttttgtaaagcccgtggtggtctccccaggtcctatgcgcgagcgccccggggattccccacctgccctggagccgagaggccaaaccaaccagcaatcacaacaccggc

SEQ ID NO: 19666 - DNA, 122 bp, Homo sapiens
caacctacttacattcatgtgtgaggaaacttggcagcgcaagtttatgcaatggaaacccgacaatctcatattcctacttaacttggcacatgttaaatgcattaagcgtttcattttta

SEQ ID NO: 19667 - DNA, 122 bp, Homo sapiens
ctcaggaaatcttacttcagctctatgccctcattagtactaataccatatttctttattcgaatgtctactggtaatttatctttaaaatcaaagaaacttctccctgaaccagtattttt

SEQ ID NO: 19668 - DNA, 122 bp, Homo sapiens
ccgttccaccacgagctcctccagcgcccggggctccggcgtaccctacgcctctgcgctcgcggccccgccccgggcctcccgtggggctttaatgacataagcaactttcctcgcgcacc

SEQ ID NO: 19669 - DNA, 122 bp, Homo sapiens
acgcaggcccggtggagatgctccagcggaagccaggacttgtctcctggtggagtccaccggtttcattcatcaaaagtttgttgggctctctgcacacacgttgtaaagagcactgcagg

SEQ ID NO: 19670 - DNA, 122 bp, Homo sapiens
gtgacgtcacagtaccgcgccggagctgatccgggaagccgatgtcagcctggcgcgcggcgcacagctggctgggagatttcttactggcttggagccggtggtccagatcagagagacct

SEQ ID NO: 19671 - DNA, 122 bp, Homo sapiens
gcgcccccttccggcagaggctgaccactccagcagaaactgcggacaggctttcatccccggcagagctacaggcttccagcagcctggggcctcgtgggtactgagctgcgtgtgggggt

SEQ ID NO: 19672 - DNA, 122 bp, Homo sapiens
agtgccccttagcgggtgggggaagctggtaggcacgggcggctccgcagtgaccggactcgggggaggtgagtgatttgcctaagtaaaagggaaagataattgagcgcccccggcagctg

SEQ ID NO: 19673 - DNA, 122 bp, Homo sapiens
tgcgggggggaggagcggctctttgatgggtgtgggggggtctgaactgcctaccgggctcggaagcgcagaccctacccgcgcggaagaatgcgcggaatgcggcggcgggaggcggaggc

SEQ ID NO: 19674 - DNA, 122 bp, Homo sapiens
caggagccagaaggtcagggtgtagagcaactgtgacaagcgcagggtgtcacagtcagccggggggcccagcacccctcccacagccgggggacccagcaccctcctatagcagggggcaa

SEQ ID NO: 19675 - DNA, 122 bp, Homo sapiens
tttttaatgatcactttgctgtgtggagagtgaagaatcacagaggaagaagagtagaggcgggagaccagttagaagctgctgaactgcatgtgagggcataggcatccaggatagtgtga

SEQ ID NO: 19676 - DNA, 122 bp, Homo sapiens
cctgtttctctcccctgcactcaccgtggggccccgttctccccgaggccctgacttccccgacaggccctggtgggaatgaagcagagagaacattacccagggtgagactccccacagac

SEQ ID NO: 19677 - DNA, 122 bp, Homo sapiens
ggttaacaaagaggagacactaggaaaggctaccactaaacttggccggtctgcagggcccgggaaggacagaaagtaagggagtgggaggagttagggcacaggcccacgctgggccgtac

SEQ ID NO: 19678 - DNA, 122 bp, Homo sapiens
cactatcttagatccagagactaaggaaaagtattttctttctgtctcatacttcctcctcgtttgtgacctgtgttaacagctaatgtaatcaacttccccacaggcaattgtttagttta

SEQ ID NO: 19679 - DNA, 122 bp, Homo sapiens
gtgagctacctgagatcacatcactagtaagaagcagattctgaaagccatgcacctaatcgctatcctaaaccagacagtgcctcactggtcacccaggagccctcagatgtgcatttgtc

SEQ ID NO: 19680 - DNA, 122 bp, Homo sapiens
cctgtgccaatcccatggacattctcctcccacccagccagcctctgaacacgcttctcacgtggcacacgccctgtcctcgcagccctcacaccgctgatcctcctcggcgacctcagcgc

SEQ ID NO: 19681 - DNA, 122 bp, Homo sapiens
cagtgagatatgtgggtaacagaaactctgacctgcagccatggtcagccaccacccacacgcccaccctgcgcttgcctgtgattcccagggagatgcagtgtctggcacccgttttgaag

SEQ ID NO: 19682 - DNA, 122 bp, Homo sapiens
accctccagcagaaaaaaccccgcaaactcagtgcactcaggacgctgtctgaaagaagccgaaagtgggcaaccgccggaagccgacaccctgagcccgcatttcctctctaggaatccgg

SEQ ID NO: 19683 - DNA, 122 bp, Homo sapiens
aaagtcttctaaaaccttccacatgactgtggaataagtcatgtggggcgcggggataagcgaatctctcaaattccaccacgtatgccctcattcaacctggatccttagagtggcctcca

SEQ ID NO: 19684 - DNA, 122 bp, Homo sapiens
gggtgttgacgattttgaaagtagttctcagttttccgaggcaaaggtgtctggggctgacgaatgacttttgagaagaaggaatgatgagaaatgtcctcattacagaactttcccggcca

SEQ ID NO: 19685 - DNA, 122 bp, Homo sapiens
agtgagcaaacagtgaaacagtatttcccagcccagaggccaccatggcctccctcctgccgagcccagagcagtgccctgtggtaatgcactgagggccactcctcatcctccctgtgaca

SEQ ID NO: 19686 - DNA, 122 bp, Homo sapiens
aagcaggcctattaaaggcagggctgacttcacaaacagccagcaaaagcacagaggggccgcacttgcaggcagcaggcctcaggctcattaaggagacccagaaagctgaggactccttg

SEQ ID NO: 19687 - DNA, 122 bp, Homo sapiens
ctgaggcctggttgctctctgccggcttcgccctgacctgtttctgacctgtgttccctccgctgtgccagaacaggccccatgctgctctggacggctgtgctgctctttggtaagtcaac

SEQ ID NO: 19688 - DNA, 122 bp, Homo sapiens
gcctcactccatttcccagcaagcctcctgccggctctgcggatgtgtccctggacaggacgggccctggctgtgacagaaaatgacactgacccattcccagtgtgcctgcgctccctaac

SEQ ID NO: 19689 - DNA, 122 bp, Homo sapiens
tgtgaagacatataatccaattatttcattttacagatgagaaagtgagacccaggaaaacgacagacttttcaaaggtcacagagctgattcagaacagagctgaaattactcattcactc

SEQ ID NO: 19690 - DNA, 122 bp, Homo sapiens
actcaagagtcttgagtttgaagaaaggaagccgggtcctcttcagtggcagccacgcggcgcccctcccgggagccccagagtagggatcagacgccgttcagccttctccccgcggcact

SEQ ID NO: 19691 - DNA, 122 bp, Homo sapiens
tgttcccgcggtgtcccgggctgaggccgggcgtgttcttcaggtgttccgggctgaggccgggcgtgttcccgcggtgtcccgggctgaggccgggcgtgttcccgcggtgtcccgggctg

SEQ ID NO: 19692 - DNA, 122 bp, Homo sapiens
atgccgagcgagatcaaagggctagagttctccgagggcttggcccagggcaagaagcagcgcctaagcaagaagctgcggaggaagttacagatgtggctgtggtcgcagacattctgccc

SEQ ID NO: 19693 - DNA, 122 bp, Homo sapiens
ggtgatttttaccaaggaaacgattgacttaatgcttaaaagtatatcatagttttcttacggaaaagatcagtagatgagattgggggacaatgtgcccttgcaatatttccattgccccc

SEQ ID NO: 19694 - DNA, 122 bp, Homo sapiens
ttgtgaaacagatgggtcataataggaaagataccaatcaaaggcatggggaaggctatccggttcaagaagcataccacagagtagctgaatatggcaacagggtacttgggcacctgaga

SEQ ID NO: 19695 - DNA, 122 bp, Homo sapiens
cacccatgcttccgccagggccttcgtgggggcgatgtccaccaccggcacccattcctccgccagggccttcatggggacgatggccactgccaccactgatgccaccgccagggccttcg

SEQ ID NO: 19696 - DNA, 122 bp, Homo sapiens
tgcaaggagaagcaagcagatacgggaagcatgcccacctgggacctcccatggcagggtcgagagaataatgctgccacagaaatagctgttcagaacttcctgcagtacaccctgtgtcc

SEQ ID NO: 19697 - DNA, 122 bp, Homo sapiens
cagtttggaaaagaaactcagttccctgtcccttctcttcggggagggtaaagaatgatacggctccctgaagtttgggaaggtgccctcgatcgcaggaaaccccagccctatcctcgacc

SEQ ID NO: 19698 - DNA, 122 bp, Homo sapiens
ggctgcctaagtctctggaagcccaagaatgtggagatggcgcgtctcggcccggggtctcgtggctggtctgggagaacttgcctttatttctaggcaggaggctgcactgcaagggagcg

SEQ ID NO: 19699 - DNA, 122 bp, Homo sapiens
aatagtcccaggaacaagccccgcacgtgcggagtcccagaccccaggacagctcccacacgtagatgaagatcacgtagatgggcacccgcttccaagtgccccaaccgcggctgtagtgg

SEQ ID NO: 19700 - DNA, 122 bp, Homo sapiens
ccgccgccgcgctagatggagtcagagctgtcgggctctggccctgaaactcagagcctccgcggctgcccggctgctccaagggtccgtgcttcgcttacactgtcgctcgccccggctgg

SEQ ID NO: 19701 - DNA, 122 bp, Homo sapiens
ggtctcgttgacactcgtgggtcatcgctgcttttacacaaggagaagtgctctgagactcgagctgcgcccgcaaattcagggtgggctacgcagggagggcctgcggctcgcccacaaca

SEQ ID NO: 19702 - DNA, 122 bp, Homo sapiens
gattttaccccatgtgactgaagaaagagctttaataatgtgctcacagtgagggacaagcgtgaataactatggctggtttccagactgccttgacttagttttgcacacatttgagtcca

SEQ ID NO: 19703 - DNA, 122 bp, Homo sapiens
aaaaccctgccgaccctcagctgatgatcaatccattccagctggatccagcgacagcagcggctttggcaccagggctcggttagtatttcctgcttttctgcactgttgttagtttctaa

SEQ ID NO: 19704 - DNA, 122 bp, Homo sapiens
gattacaagcgtgagccactgcaccgggccacagagaaagtacttctccaccctgctctccgaccagacaccttgacagggcacaccgggcactcagaagacactgatgggcaacccccagc

SEQ ID NO: 19705 - DNA, 122 bp, Homo sapiens
aataatcagctaacttcttttacatcttttatctccaaagtctgataactctgaacactacggtatttttacagtatacagacttacgaatcctagaatcaaccaacaaagtaccaagcatg

SEQ ID NO: 19706 - DNA, 122 bp, Homo sapiens
ggcagggccccagcagcctcgcatccagaggcccaagcgcagaagcagaagcaaactggacgccgcaaggggctgcaggaagggcagacggcagacgcaagtcctccagctgcctcccgcac

SEQ ID NO: 19707 - DNA, 122 bp, Homo sapiens
cgccgatatggctgcgctgacactgaggggtgtccgggagctgctgaagcgtgtggacctcgcgacggtcccgcggagacatcgatataagaagaaatgggtaaggtccggctgggggcgca

SEQ ID NO: 19708 - DNA, 122 bp, Homo sapiens
ctgggatctgacggtcctggacacctgtatggctgtgtgctgtggtctttgcctagcctgcggttcacttttgctctggccaccacctcccctcatgtacaaaccgcgtctctgctctgcca

SEQ ID NO: 19709 - DNA, 122 bp, Homo sapiens
agggaggggaaccagagccggagccgggctaagccagttcccacctcccatcttgcagcgcggaccagggctgaccgtggcacagcctgtggatcatccaccaggagtgcctgaggggacca

SEQ ID NO: 19710 - DNA, 122 bp, Homo sapiens
tccattcattgcagttcggtccctttcgaagccgcagggacccgggtggcagggctgaggcgagggggtgggactccctgccctgacaggtagtgccggcccccgctttgggaagccccttc

SEQ ID NO: 19711 - DNA, 122 bp, Homo sapiens
gacgattgtaaatgaccggaccttttttctattctcctgcccagcccccggcccggcctccgcctccggccctgctccagccccgccagcggcccaggacccgcccctggctccggccccgc

SEQ ID NO: 19712 - DNA, 122 bp, Homo sapiens
cgccaaggggaaacattcgttgttaattacgttgcttcttaatgatgagcgtctgccgggcggctcctctcagaagaaaggcaaagtgttcggaatcgcaacatttctggccctgagctctg

SEQ ID NO: 19713 - DNA, 122 bp, Homo sapiens
agaatgaacctgcagaccctgcgcggctactacaaccagagcgaggccagtgagtaactccggcccagggagcagatcacgacccccacctccatgccccacggacggcccgggtactcccg

SEQ ID NO: 19714 - DNA, 122 bp, Homo sapiens
ctatctctggagcaaaagggccaatttatttattccttctgggaacccattgtaagagcacgtgtgagtcatgattcaagtaactgactgggccaaaaggtccttgagcaagttattttctg

SEQ ID NO: 19715 - DNA, 122 bp, Homo sapiens
gaatagaataaaggcaaaaagtcaattcaaagagcaatgctgggatcaacttcctgtttacggtatttaaatatgaaatgaattggcaagctcttctaataaataaccccaatcacattttt

SEQ ID NO: 19716 - DNA, 122 bp, Homo sapiens
atgtgttccttaataaatgtcacatcagaaaatgactgttccaggacagtaaccacctcccgatggtaagtatcctagatagtttgtcatttctcagcagcaggaaaaagagaagtaggcca

SEQ ID NO: 19717 - DNA, 122 bp, Homo sapiens
cggcaccaccgcactcaggacggcagtggggggctggggctggggctgggcctggcccagcgtgggttggggcgggggacgcgccagcagcgcccgcagctcgctccgcaggggtcgcagcc

SEQ ID NO: 19718 - DNA, 122 bp, Homo sapiens
cttaaggcaaaataaaaaacaaaactgcaaaataataacccaaggaaccattaaaccctgcgtgcctttgaagatcaagagtaaaagcctaggacaggatttttttttttcttacttttttc

SEQ ID NO: 19719 - DNA, 122 bp, Homo sapiens
gggaccaccaagacagcgagctgttggctgcgaggtgggcgtgcgtgtgctccatgagcgcgcccctcgctccccttgccgcttcgcgcccggcctgccagcccgactctggtcgccggctc

SEQ ID NO: 19720 - DNA, 122 bp, Homo sapiens
aggagacaagaaagagctgagtgctgcctcccacgtgcaagcagttattcttttaaaatgcggaatttatcttaggactgcatttctaactctgggattttcctgcacacatgaaaataaac

SEQ ID NO: 19721 - DNA, 122 bp, Homo sapiens
tgctgcagatacagcaaatgcagatttcaacagggcatttgacaattcacatcttagatgcgaaagtgaaatcaatgctggatgatagcactgaggcttattaaagactagcccagaggtgg

SEQ ID NO: 19722 - DNA, 122 bp, Homo sapiens
gcgggtgtataatcagaaatggaatatgccctcataaaaaatggcggcggcgcgggtactcgacctttgcccctacgcagtcgtgcccaagacaacgcccccggtatctccagtccgcgttc

SEQ ID NO: 19723 - DNA, 122 bp, Homo sapiens
gggcagcatagaaggacctagaagggccccctccaagcccagctgggcgtgcagggccagcgattcgatgccttcccctgactcaggtggcgctgtcctaaaggtgtgtgtgttttctgttc

SEQ ID NO: 19724 - DNA, 122 bp, Homo sapiens
ccaggacccgtgcacttctcattggctagtttgagggaggcctgagcaacctgcagacagcgaaggtggatacagtcgcctgtgctcggattctattggcccacagagtcggtattcttcgc

SEQ ID NO: 19725 - DNA, 122 bp, Homo sapiens
gtggctctgaatccagttgtctccaggtgtctgttaaattgaatacaccacagtggtagccgaaagcaattattttagtacgatttctcatttctcaaatccacctgtttgatttgcaggtt

SEQ ID NO: 19726 - DNA, 122 bp, Homo sapiens
agagcatcctcgcgaccacccggaggcttctgggggccactctgcggatgaggaagctgacgcctgggtgcagaaccccggacccccggattcagagcccaggtccagccgcgcttccgcac

SEQ ID NO: 19727 - DNA, 122 bp, Homo sapiens
tggctgcaccgcaggtgtggggacagcagagcagatgggaggtcacggtcgcactgctgccgcctgtcacacgaagacgtgcacgtctgagtgccagatggaaatggctgatggagatggct

SEQ ID NO: 19728 - DNA, 122 bp, Homo sapiens
tacccacccctaccccagtcagagcctccagagcaagggcctgggaacctgaatttttaccgagtgtgtttggtgagtcttatgaacaagccacatcaacctggtcctcttgatgcctgctg

SEQ ID NO: 19729 - DNA, 122 bp, Homo sapiens
ccagcctgtagtcatttaatcaaggcctttaaattgtctcatacaataatatgactcacccggagccttactgtttagtaagaccacagtcctttatttgtgatttactcttgggaccgtaa

SEQ ID NO: 19730 - DNA, 122 bp, Homo sapiens
gggcgggggggcggtttcccttcaccagactcagctgttgccttatctaaaatgccttagcgatctaaaactgaaagagaaagataaacaaaacaacaaaacgctccggatttagatctcct

SEQ ID NO: 19731 - DNA, 122 bp, Homo sapiens
cagctgggccggcctccccaggcccctgttgccggtcatccttggagtctaggacccccacggtgacctgatggacccctgcctggcaggtgtacccggaagggccagtgcgggcgggcagg

SEQ ID NO: 19732 - DNA, 122 bp, Homo sapiens
gccccctctgaggttcgaactcaggaccttcagattatgagactgacgcgctgcctactgcgctaaggaggcagacaactagtgctcctcagcaggtgttttcaacactgatttttacctta

SEQ ID NO: 19733 - DNA, 122 bp, Homo sapiens
tagggattccctctccagccaatccagtcagagcagcggagctgccccgaacaaagatggcgcgggaagcgtctgtgagggcagactgatccgagcacccaaaccctcggcggacagcggag

SEQ ID NO: 19734 - DNA, 122 bp, Homo sapiens
aggccaggtggttgcggggaggaagcctcaggtcgctcccctccggtgccggggtgggcgcgtcgggacccactggcctcccagtcccaggagaggaaggaccagggaaaccagctgtctgc

SEQ ID NO: 19735 - DNA, 122 bp, Homo sapiens
gcacctttgctaccttccagaagccccttcagagcctgaatctcttattatgacagcgggcggggggaaagggagaggggcgcggacagggaggagaaggggcctaggatgaaaaaatcaaa

SEQ ID NO: 19736 - DNA, 122 bp, Homo sapiens
aaagcaggctccgtatatagaggagttctcccctaattttctctcagcacaggcccagtccgccgttccttcctggttcccatccctccctcaccgccgcccgtgagcagggccgggcacgc

SEQ ID NO: 19737 - DNA, 122 bp, Homo sapiens
atatcggtcctcaccgctacaaagtgcggggctatggagtgagataagcactacctgcggcgtcaggaacgatggacctgaactccgccttcgccgatgatcagcaacggctggggatgaga

SEQ ID NO: 19738 - DNA, 122 bp, Homo sapiens
ccctaaagtctatgtaatctaagcatgagggaagcaaagacacagaatatacatcgtatacggggagagcttgagcagagacatggaagctaaaatgaacttggcatatagatattgagata

SEQ ID NO: 19739 - DNA, 122 bp, Homo sapiens
ctggttatgtttccttagtgaccctaggcctcttgcaggagagtccctggtcccagccagcgggagcggcttctccagtttgtggctctcggagagttcgcctcgtccctccctctcagata

SEQ ID NO: 19740 - DNA, 122 bp, Homo sapiens
ctcaatacgcaggcagggagcgggatcttcccgccactcattcttttctttttagagatgcggtctcagtctgtctcctaggctggagggcagtgacgtgaacatagctcactgcaatttcg

SEQ ID NO: 19741 - DNA, 122 bp, Homo sapiens
gggtaactaggtgacaagaaaacaaagatcttattcaaaagaggtcttacagcaacccaacgtctcatcttcccatagtaaagatgacggcgccttgaggtaagctacaggcaacaccactt

SEQ ID NO: 19742 - DNA, 122 bp, Homo sapiens
aaaacagatcagttgagctcctctagctggaggaaatgacgagtttaactcctggacttccgcttccggggtgcccaggctcccagaaatcctcgcggcaaaggttaaacacgtgactactc

SEQ ID NO: 19743 - DNA, 122 bp, Homo sapiens
ctgcgaggagccaccagcgcccccctggaggcggccgcccggagcgggatggagcggggccggtgtgcgttttagctgaaagcccaggttttttcttgaatggaatttgaggaggcgcagag

SEQ ID NO: 19744 - DNA, 122 bp, Homo sapiens
ggccccagcacgctctgtccgagggggaagacaccagtcacagccacacagctcagggcacggccactcgccccgctgccgtaattacctgctgtgatctgaattctcattggttgggaggg

SEQ ID NO: 19745 - DNA, 122 bp, Homo sapiens
tggagcttaaataagttaataaactaagagtaagaaaattatcatcgtaagtaacactaacgctatgcactgagacttactatcacattttttaaaggagagtttgtcaaggctcagaaagg

SEQ ID NO: 19746 - DNA, 122 bp, Homo sapiens
gcggggcacgggggagggctgacgcgcgcggattggccggaagttgtgccgggggcgggtcgggggtccgggctcggcgctcgctccgggagagttgacaaagccccgcagggaaggacgcc

SEQ ID NO: 19747 - DNA, 122 bp, Homo sapiens
ctgggattacaggcgtgagccaccatgcccagcctaccaagggttcttaacaaggctgtccgggatgtgcagcagagggtcagtgtaaccaccccatgggttcattttgcccgtttcccaga

SEQ ID NO: 19748 - DNA, 122 bp, Homo sapiens
gtagccagagtgggcaggcagcaggcctgctctgtgcagcgtttgacttgggggttaagccgggtgcctcagggcgggacctggaaggagaagctgagcgcagtccaccattcagttctggg

SEQ ID NO: 19749 - DNA, 122 bp, Homo sapiens
aaaaaaaaaaggaaaagaaaaatatttttctttggaatccaataaggttcttgtaagagccggttttaatttgaggcaaagtaacagagtaaaattggctcaatctctatccactaattggc

SEQ ID NO: 19750 - DNA, 122 bp, Homo sapiens
cagccgctgccgctgccgtccggcgcgctacagactcccgagaacagccctggctgtcagcgagcaccagccgcttcctgtccccatcgcggagactggaggggcgcaccacggccatggag

SEQ ID NO: 19751 - DNA, 122 bp, Homo sapiens
cacaatatccactgcctaatgggagtctggtcttgaatctcttctaagcttttccattttcgccagtcatcttttaaagaccagaactcatcttttttagtcctctaataaaaatcctccaa

SEQ ID NO: 19752 - DNA, 122 bp, Homo sapiens
gcactgaagcactttactgatattcattccattattccatatgacagttgttttgagtttcgtaccaccttattgtccccttatacagataaggaaactggggtgcagaaaggtgaattaac

SEQ ID NO: 19753 - DNA, 122 bp, Homo sapiens
gtttttccatctaccggttctcctggtttttccgcgggcgggggtgtgtgtgtgtgaaagcggttgcccccgacaacgccggcagtccgctcacccgcattggcccggcccgggggtgggag

SEQ ID NO: 19754 - DNA, 122 bp, Homo sapiens
gagtcgctcctctctctgtatcgactccaagccggccccacccccggctcctctgaaccccgcctggaaaccttgcccaagccgctcattgctcaaggcccccgtacaaaatggcggcgagg

SEQ ID NO: 19755 - DNA, 122 bp, Homo sapiens
caggtggctctcttaacctctctagacctcagtttccccatctgtaaaattgggaagagccggtgggcagggatgtgtgcacagcccctggcatgaaggccctgctcctgtccctgctccga

SEQ ID NO: 19756 - DNA, 122 bp, Homo sapiens
ccgcaccctcaaggaaagccaccacacgcccacccccaaagcccacactcccaccccccacgccctctgcacacactgaatccaaactcttaaatgagatggcgatcaaagagcgcgtggag

SEQ ID NO: 19757 - DNA, 122 bp, Homo sapiens
aaaccaaggaggaaggggtgaggaagcctgcagagggggctgcaggacacgttagagactcgggccactgtcctgaatacagcaaggagccaccaagaagattggtttttggaaaacattac

SEQ ID NO: 19758 - DNA, 122 bp, Homo sapiens
agggccgcgcaggttcatgaggttcagggcctggtggcgcctctgggtctcactggcgtccgagggcgctgtcctaaccttccaaacccctctctaccctagttgtgctccaaacagaacca

SEQ ID NO: 19759 - DNA, 122 bp, Homo sapiens
tagtgctcggttctcaaaaagtacacagcacttaagcagagggaaactgcataggtgtatcggtgtgaggccaattggtagcccatgatgaaatgtggcagaggtaatgtaatgtgatttaa

SEQ ID NO: 19760 - DNA, 122 bp, Homo sapiens
acctccttctcccgggtggggtgggtggggtcaggctctcagggaaagagggcgtttgcgcgtgcctcgccagtctctaagactgcgcagaggagagggcgggcctcaaatgggaactttgg

SEQ ID NO: 19761 - DNA, 122 bp, Homo sapiens
tacctggccgctgagtcacggccgcctgggggcgcgggccgagggtggcggggttgggtgcgcggggcccgagaccctcatgcggcccgcggcgcggcccgggcacctgcccaggtgggccc

SEQ ID NO: 19762 - DNA, 122 bp, Homo sapiens
aaactcctgacctcaggtgatccaccggccttggcctccccaaagtgctgggattacaggcgtgagctactggtgcccagcccaagatggcttcttcatgtacctgttgagggatgcctcag

SEQ ID NO: 19763 - DNA, 122 bp, Homo sapiens
ctttgtcacaccctcttgccacaaacaggacctccaacagttggctttttccacagggtccggatcccttccgagccccacctagctttcctctcttttttccccaccctctgctcctcatg

SEQ ID NO: 19764 - DNA, 122 bp, Homo sapiens
tctccgcctcagcccccggaaagctgggcctgcaaactcagggtcctctggaaggggcagcgcccttccttgccggccctcccgggtcctctggcagtgctgcgcagcccgctctgcgctgt

SEQ ID NO: 19765 - DNA, 122 bp, Homo sapiens
tcaggaattctatgagcatgccaaggctctgtgggaggatgaaggagtgcgtgcctgctacgaacgctccaacgagtaccagctgattgactgtgcccagtagtaagtaaccgccacccaac

SEQ ID NO: 19766 - DNA, 122 bp, Homo sapiens
ggggaacccagcttttctaggccctccaccctttgggcaggaggaactgggtgtgtggggcggggggaagccatctctgggtggttggtcagctggggcctaaccacaggaggcagatagac

SEQ ID NO: 19767 - DNA, 122 bp, Homo sapiens
ggtcaggggactaacttttaccaccaacattggctgggaacattcagagggcttcttctccggggccgccaatgaatacgaagcccgcagcccgcatggaagtccacatgcccatcattagc

SEQ ID NO: 19768 - DNA, 122 bp, Homo sapiens
gagggagtgtgggtgtccttgtctagtaactgaactggtgtgtgggccgggggctgacctcggggctgtcagtgaacacacgtggtattgaggctgccgcgtttctccctgtagtggactgc

SEQ ID NO: 19769 - DNA, 122 bp, Homo sapiens
agctcatggcatcagtgcctggcatacagtaggcacccaataactagtaactgttattcccgcttctgatatggcttccccagatcagctgtggctctggaaagcaacccaacgactctgtg

SEQ ID NO: 19770 - DNA, 122 bp, Homo sapiens
cgagcgggggcggcgcgggggagttgccaagtgtcggagcggcgccccgggccccccgagcgcccagccatcccggggcgagcctgggctgcgttaccttgcaggttctgcactcggatgtc

SEQ ID NO: 19771 - DNA, 122 bp, Homo sapiens
agggctcggtgagtccaatcaggagcccaggctgcagttttccggcagagcagtaagaggcgcctcctctctcctttttattcaccagcagcgcggcgcagaccccggactcgcgctcgccc

SEQ ID NO: 19772 - DNA, 122 bp, Homo sapiens
atccacagaaaaccctggacgcggaaggtgcctttctaaggccgggacagcggcaaaggacgtgcctgtcttccatctgcagaggatggacctgcactgtcctggccgttacccctattttc

SEQ ID NO: 19773 - DNA, 122 bp, Homo sapiens
ctttccaggctgccccgcgattcccaggctagaaggattgacaaggcgatgataaactaacgtgccccctcagctctgggtgtgcgccattgttcctgcagctgagaccctctgctgctatt

SEQ ID NO: 19774 - DNA, 122 bp, Homo sapiens
cgcggcccctgacgtcagagggccgtgacgtcaaagatgtcccagagggggcacttccggcgggggcgtgggggcggggcgggacctgggaggccccgcccccccggtcctgagaggacagc

SEQ ID NO: 19775 - DNA, 122 bp, Homo sapiens
gctctgcccccaggtctctgcatcctcgtctcggtggaggtcatgcggcagtcggtgaagcgcatgattgacagtgaggacaccgtctggatcgagtactattactcctggtcctttgcctg

SEQ ID NO: 19776 - DNA, 122 bp, Homo sapiens
aaacacattttgctaggatgtcaaatagtcacagttctaagtagttggaaacaaaattgacgcatgttaatctatgcaaagagaaaggaaaggatgaggtgatgtattgactcaaggttcat

SEQ ID NO: 19777 - DNA, 122 bp, Homo sapiens
ctctttccactacccaggctatctctccattaatggactattgattggatgacagagtagcgatagcaccgtcttaggagacgcccaatcataggtcataggtcatttttgcagcttattgt

SEQ ID NO: 19778 - DNA, 122 bp, Homo sapiens
tcacctgctgggccgggtcctgtctcctcagcattgtgtggccaggcacacgcgcctctgcgtctcaggtccctcacctggaagccaggtcagaggatggctgtggtggccctgggtgagct

SEQ ID NO: 19779 - DNA, 122 bp, Homo sapiens
actgcctcatggggcagtctggaggtcagctggcttctggtgtctctcatcacaccactgcggacgctgtctgtagagcagccttggtgtgggtgactctgaagctggagtgatgggacccc

SEQ ID NO: 19780 - DNA, 122 bp, Homo sapiens
tgcatgtggaaaccaagggcttggattttgctgtactgggtttaccggttctctcacaagcgcctgtgatggaaactcatcgacaattgttcttggttggaagaaggggctgagagattgac

SEQ ID NO: 19781 - DNA, 122 bp, Homo sapiens
atccatgatgcagagataattgaagagaagtgcaaagggaaatgcagccccctggtaaaacgatataggatggagaaagaacagccaaagccactccattaggaaccagaacaaaagagcct

SEQ ID NO: 19782 - DNA, 122 bp, Homo sapiens
tttatgtatctataaagtgtgggtttggacagcagattttatcaggttgagggctcaggccgagagcatgtagaagcagttagctcactctttctagatgtggcggctgacaaggacaaaga

SEQ ID NO: 19783 - DNA, 122 bp, Homo sapiens
ggcactcaaaggccaggcgtgcctttaggtatcttccgggacccaactgtaccagggtcacggacattcaactctcagctacccacaccggcgcgagcgcgtcatcccggtggccctgggca

SEQ ID NO: 19784 - DNA, 122 bp, Homo sapiens
gcaggaggggcagtgagcagtggtggccgcgttgccgacagagggtgagggagctgggcgcgtggtgtgggcgccgaggtcccgagctgaagagctttaaaacctctcaaaacacagaacta

SEQ ID NO: 19785 - DNA, 122 bp, Homo sapiens
tgttaagtttactggtaagttctttgttaacccaaaagccttattgtttttctaacccctcgttttgctttctaatatgaatatattatgaaccattaggctgaacaatctgtatttttgta

SEQ ID NO: 19786 - DNA, 122 bp, Homo sapiens
agaggctttcgtctttaaacagaaaatacagaattaccttgagtggcaagattgcttttccgagtgaaaacagagaatgactgttacggagatttttttccactgaaaggaaaaggctcata

SEQ ID NO: 19787 - DNA, 122 bp, Homo sapiens
ggcgattatctgcggggcgctgagtgttgtgtgtcctgcgggcagggccggagttacaagcgccaggaatccagacggtgtttggagagggggggcggcgggggagcccggtaattagtgta

SEQ ID NO: 19788 - DNA, 122 bp, Homo sapiens
caaaaactatttctggctgaatagcacagaaaagtattttaacctacctgtagagatcctcgtcatggaaaggtgccaaactgttttgaatggaaggacaagtaagagtgaggccacagttc

SEQ ID NO: 19789 - DNA, 122 bp, Homo sapiens
gtgagctccctcatcttcctctgcaagtttccaacttggagcccacagaaatgaagaccccgttttcaggcccggggctccctggaggcggtggttgaggagtctgatgagtcacactgaac

SEQ ID NO: 19790 - DNA, 122 bp, Homo sapiens
gcttccctagaaatatcagttgtaaaatatggtcctccagcagtagatgtttgcatctgccgattaagaaagaaggcaaccagcagccttctcacgttcaggttcaggtccttgtgggtgtg

SEQ ID NO: 19791 - DNA, 122 bp, Homo sapiens
agggtcccccacagcagcacggagggcattctggcactgggtctcacctcgcccgcctcccggcagccagagcgctgccgtctgggaatcaggacacacactcgaagaaccggagtcccctg

SEQ ID NO: 19792 - DNA, 122 bp, Homo sapiens
gggagaattactgaattagcataccagttcctccctgattttccaagggcctgaagaaaccggctcctttcccactcagcctgtgaccacaactgccctcctccacccacacctggcctggg

SEQ ID NO: 19793 - DNA, 122 bp, Homo sapiens
aagccgggaggggcgggagcagacgggggacggtgtcaggacggggggctccgttaccctcgcgggctcccggggcaaggccctaggccggggcggagcgcggggcccggccgcctctcttc

SEQ ID NO: 19794 - DNA, 122 bp, Homo sapiens
ctccagccccgagctgctctaaccaaacagttcagctttataatctgctgcctgtgctgtcgactgactaatccatcagtgtccttttctcctccccactgtattctagtgggaaggaccca

SEQ ID NO: 19795 - DNA, 122 bp, Homo sapiens
tgcaccccacgagcccgggcggctctcgcgcgtgaggctctccttgcacgtgggccttcgcggtttgcactacggaagctggactgtcattctcaccgcaaatgcccttccctcctttccct

SEQ ID NO: 19796 - DNA, 122 bp, Homo sapiens
aactcgtgatccgcccgcctcggcctcccaaagtgctgggattacaggcgtgagccaatgcgtccggcagtaaataaagttttaatggaacacagccatgcccatttgtttagctattgtat

SEQ ID NO: 19797 - DNA, 122 bp, Homo sapiens
atctataaaacatgccttgctttaagttagcaaacctctataaaaaggaatgttaaaagccggagaggccatagaggagaaagcagcatttactgcacctctgctggaagctcatgtatgtt

SEQ ID NO: 19798 - DNA, 122 bp, Homo sapiens
tattttgatcctgttagctcatggtgtcaaacagaaacagagcctggaatttgttagaggcggcaagacagattttattcaggccactgcagtagaggagagagacttctgatgaacagatc

SEQ ID NO: 19799 - DNA, 122 bp, Homo sapiens
ccggtgaagagaacgtcagtgccatccagcgtcgcgttctcgtctcctatttccacaattcggagccccaggtcttgcagggctttgcggactccatcgaccttaggataggagaagagggc

SEQ ID NO: 19800 - DNA, 122 bp, Homo sapiens
cacggtggcgggggcaaaaagccacggctgcaaaaagccacagtggtgggtccaaaaagccgcggcagtggggataaaaagctgtgactgcaaaaagccacggtggagggcccaaaaagcca

SEQ ID NO: 19801 - DNA, 122 bp, Homo sapiens
ccctggagagcagaggacaacgacgcatgcgcgcgggttgtcccaccctttgcgttagggcgcgagtgacggaaacagatccctctatttgtaggtttgtcggtatcctctttctaatgctg

SEQ ID NO: 19802 - DNA, 122 bp, Homo sapiens
tgctcccaaaggaaggacaatgtagtccagattcgctgggtaacctggccaggacctgaccgcggacacccctgccgagggagggaggcctcgggatgacaggcgcgccgtctcccctcacc

SEQ ID NO: 19803 - DNA, 122 bp, Homo sapiens
gatcaggagctcatcttacgatatgtatttgaggtgctgctgggacattcttgtggaatgcgggctcaagagaagcggtaggagtgaaagaaatgcatccaggctcattcgtcattgtgctc

SEQ ID NO: 19804 - DNA, 122 bp, Homo sapiens
cacaagctgccaatcgcggccgcctcctggcccagccctgcagctcggccagccttgttccggctcacagcagcagaaacgaacattatttaatttcccgccagcgggcagtgaaagccgga

SEQ ID NO: 19805 - DNA, 122 bp, Homo sapiens
acccctgacttgtggctaaagacgacttgagccttacagggtgggaggccgttggcatctcggcccagggcagcccagtctcggacattccctctcttcccctatggtctggaccgaggtcc

SEQ ID NO: 19806 - DNA, 122 bp, Homo sapiens
tttctttcgtcagttccgcgtgtgtgttggagaagggacttcttgcatagtgtattactccgttttcctgctgctgataaggacatacctgagactgggcaatttacagaagaaagaggttt

SEQ ID NO: 19807 - DNA, 122 bp, Homo sapiens
cagcgccattttgcccatagccccgctgacagagatgaggtggtccaggcaccttctgcccgacccgaagagagtgagcttttgctacccacagaacctgactctggctttcccagggagga

SEQ ID NO: 19808 - DNA, 122 bp, Homo sapiens
ggcgacgacgacgaggacgacggtggcggcccccggctgcgcggggccgcggaggagacgcgagactccgacctgtcggagctgtcggacaccgaccccctttccgagcccgacccgcccgc

SEQ ID NO: 19809 - DNA, 122 bp, Homo sapiens
ggacgacctgggcaggggaggggcgtgtccaattccaacgtgtttggaacatggggctcgcgagactggcgggggagtgggagagccaggagaggctgcaccgcgccctgaaggacggcacg

SEQ ID NO: 19810 - DNA, 122 bp, Homo sapiens
ctcaagcgatctgcctgcctcagcctcccaaagtgttgggagattacaggcgtgagtcaccgcaactgggcagctgtgtttatcttgagagttatagggagccagggaagggactataaggt

SEQ ID NO: 19811 - DNA, 122 bp, Homo sapiens
ggatttgattttgagttttccttgggcgtgatcctgcctacagccacgtaggggcgctcccgtgctgccgcttcctcccgggtgggccgggatcttgcgtggagccccagtttgtatgttgg

SEQ ID NO: 19812 - DNA, 122 bp, Homo sapiens
cagtaggaattttgtagctctgttaatcttctggcaccactgttgcatatgcttactgtgcgtgtcaccacgcctggctgtccttgaccaaagtgttatgtggtgcttgactgcataatcat

SEQ ID NO: 19813 - DNA, 122 bp, Homo sapiens
ctcaggcccccccggactgcgggtatccccggggagggcacagctggccctggcagggcccggacacctggggcccgacccacccctgcgcaccccgcggtgtcgccttcccgggaggctcg

SEQ ID NO: 19814 - DNA, 122 bp, Homo sapiens
tcctatgtcatagaattgttgtgatgattaaatgagttattacatttaagtgattagaaccgtgcttagcacagaggaagcactcaaaagttaactactattagtgatgtctaaactttttt

SEQ ID NO: 19815 - DNA, 122 bp, Homo sapiens
ggaactggggttccgtggagcaggtggggcgcagaggaaccgagctgtggaatggggttccgtggagcaggttgagtgtgccggtcgtggacgggtcgtgggcgggactccccagtgtgtca

SEQ ID NO: 19816 - DNA, 122 bp, Homo sapiens
taaagtccaagccggcgcagtggggctcccctgtaatcccagctactctggatgctgaggcgggaagatcctttgagcccaagtttaagaccagcttggggaacaaagcaaaagtaaaataa

SEQ ID NO: 19817 - DNA, 122 bp, Homo sapiens
tagccacgtccaggtagaaccaaacctgttgcttttgtatgttgggtcaacttggcctgacgtttcagaggtagacacgagatagggagtttgttgcgggggtggggagaagtggtagacat

SEQ ID NO: 19818 - DNA, 122 bp, Homo sapiens
acgatctccgtgcacttcttgcacttgacgtagcagcaccagtggaacttgcagtggcagcgctccgtctgcacggtcttgaactggtcgtagccacggccgcagcacatgagctcgcagcc

SEQ ID NO: 19819 - DNA, 122 bp, Homo sapiens
cagctaattttttctatttttagtagagatggggtttcaccatgtttgccaggatggtctcgatctcttgatcatgtgatccgcctgccttggccttcccaaagtcctgggattacaggcgt

SEQ ID NO: 19820 - DNA, 122 bp, Homo sapiens
ctcactatgctgagggcattagggccactcgcatggtatttatacaggcctattacagtccgttgtgatctggaagcactacatgcatgcctgccctgaaggaaatggtaaggctctttaca

SEQ ID NO: 19821 - DNA, 122 bp, Homo sapiens
tcagcccagccttcttcacatccatggctggctcccggccctgcctgctccccacataggcgtggtgcgtgtcaggtgtgaatttcctgaaggtactaagtgcccgggtcagcattgttggg

SEQ ID NO: 19822 - DNA, 122 bp, Homo sapiens
ggtcagtggagacaagcagcaggcagaggtcagtgtcaggctctaggtaagagatgtgtgcgtggaagaagccggctgcgttgaatttgggcaggcacacgggcgtccaggcctcgccctcg

SEQ ID NO: 19823 - DNA, 122 bp, Homo sapiens
cgctgtgctttgtaactgtttcgtgaattaaccagagttgtcacagtttagcattgggggcgggtcatgcctatatctgagtaagaaatgaaagtaattggtgatcaagagccaggctgttg

SEQ ID NO: 19824 - DNA, 122 bp, Homo sapiens
gttattcccaatatagcactgggtgtgcatccacccgttgattttgctcctaatattcaccgaagaagagaatgctgttactcccaaaatagcaggaagtgtacacccccgagtgagatggt

SEQ ID NO: 19825 - DNA, 122 bp, Homo sapiens
tgtcttgtcatcgtctcctgttacacagctttcaggctgcttttttggggaagttagactcgcctgctcttttttggggaagttccacctcactgcagccgggtatggtggtttgctcctgt

SEQ ID NO: 19826 - DNA, 122 bp, Homo sapiens
ataagtaaagtagcactgattataacccaaagtgtaaaataaacatctatgagtccatgccgatataaataaataataaattaacaagctggggagaacagacatatttcgcattgaaaatt

SEQ ID NO: 19827 - DNA, 122 bp, Homo sapiens
cccgggccgcccgccgcccccgcgcgcgtccatggcgaggcggcgcccggcagtgcggagcggagcccccgaccagttcaagtctttacatggccgttaccccagacatctgcctgaagcct

SEQ ID NO: 19828 - DNA, 122 bp, Homo sapiens
gggccaggacacgggggagcgcctgggagctgctcccttccttccctgcttccctcaaatcgatgtcctctggttcctacggccttgggggctttgagggaagcgactctgcacacggatgg

SEQ ID NO: 19829 - DNA, 122 bp, Homo sapiens
gcttaggggatagggtgggccgctcagagctgagacgtactcacactgtggatagatagacgtccgtctccaaaaccgccaactttgcttcttccactaccgcttggctccctgtagtcaat

SEQ ID NO: 19830 - DNA, 122 bp, Homo sapiens
tgtgcccctgctgtgtgacctcaggccagtcccttggcttctctgggcctcagcaactcacgctttttttttctttagggacagagacttgcttgttgcctaggctggagtatagtggtgca

SEQ ID NO: 19831 - DNA, 122 bp, Homo sapiens
agcatttctaggcagcccgtttccacagccctgctgcccatgccttttgttttagaagaccggtctctgcagctcactgctgctggaaggaaaactcacatgatcacattttgtgtacacat

SEQ ID NO: 19832 - DNA, 122 bp, Homo sapiens
ctcctggagccggagccagctcggcactggaaccggcgtcctctggtggcagagagagagcgctactggcgattttcggaccgaatcggcacgctcgtcagatccaagcaggcgggactggc

SEQ ID NO: 19833 - DNA, 122 bp, Homo sapiens
gcccggatgcgtccctctttctccaccccgccgagcctaaactagtgacggggagggagacgggatagtgtttctgtttcgtggtctttgaatccacaacctctagtctgaacacagagaac

SEQ ID NO: 19834 - DNA, 122 bp, Homo sapiens
cttagggcttcttcacgcagttgccctcagacctgagttcagcagcatcctccccagttgcggtccagcccccattggccatttctcggggtgactaacactgtccctaggcagcttttctc

SEQ ID NO: 19835 - DNA, 122 bp, Homo sapiens
tcatattctgttaatcaacttatatgcaaggaggcccaagaatggggttaaagggaggtgcgcacacagctgctcacatctggggcattggtggttcagtggtagaattctcgcctgccacg

SEQ ID NO: 19836 - DNA, 122 bp, Homo sapiens
ctcagccttccgatcatgggagcgcgcccagagcctggtggcgcagctctggcggggaggcggggagcaagcgatagggccgcgagtgggagtccgcgtctcctccccgccagccgccgccg

SEQ ID NO: 19837 - DNA, 122 bp, Homo sapiens
tcactcagcacagttggtgtctagcccgggggtctgccagcgaggcctgggggccaaatccggtgccacctgctttcataaataacattttgttagaacacaaccacgtcattcatgtatgt

SEQ ID NO: 19838 - DNA, 122 bp, Homo sapiens
aacccaaaggccagcctggcgagggcgtcggaggactcggtggccacaaggggctcttgccgcccaagcctccagagcgaacgtttctcctagggcaggaggcaaacgtcctcccgggggtt

SEQ ID NO: 19839 - DNA, 122 bp, Homo sapiens
agctttgtagcaggcatactttgggttgtagataggctgttgtctctcaaggcaacctcccggtgggtgagagttcctctctggagcttctaagcacatagttagatgaacctgccccatag

SEQ ID NO: 19840 - DNA, 122 bp, Homo sapiens
agtggcatccaagggagcgtcctggttgcttaagggttaagggagcggttcgaaccggcccgagcgttgggggattcggaggagggcgcgggaggcaggaggcgccgccaagcgcgcgcaca

SEQ ID NO: 19841 - DNA, 122 bp, Homo sapiens
gttaaatgtgcttttccaagaatagccaagataaatccgaaaaagaaaaacaagcagggacgacttgccctaccagagttcagaacttgtcatgaaactgcagtaatcaagacaatgtgtca

SEQ ID NO: 19842 - DNA, 122 bp, Homo sapiens
acttcctttgtgaacttgccattgtgctggggactttggagggacaaggagagtgtgcttcggttctgagggcagccccagcactcccactctgcaggtttcctggcgttgacttgatgggc

SEQ ID NO: 19843 - DNA, 122 bp, Homo sapiens
gcaacttttttgagaatagggcatggggtatggaggcagagaagaaggacagaagtaagacgatgatcaggaggctcttgggaaatccagatgagagataaaggtggctttgaccaagttgg

SEQ ID NO: 19844 - DNA, 122 bp, Homo sapiens
gacctgagcccctcggctctggacgctgctgccgctggtgtgccctcccctgacctcctgcggcaggaacaacacaaaacggtgcttccccagaggcaagcagcggaggacgaggagatggg

SEQ ID NO: 19845 - DNA, 122 bp, Homo sapiens
gtcctgccgcctggaccggttggttgcggcacgccaggcctagcctccggccgccaatcccgcccagaaatgtcctcacgtccaggccatgccgccacccaccccggcgctcacctgctgca

SEQ ID NO: 19846 - DNA, 122 bp, Homo sapiens
tgccggcggggcatgcgacccgccaggcaggtgtcggagccctcacaatggtgcacctggcgtgggcgtcaggcctgcccattcagcccggaacaatcactgctctgcagccgccggcccag

SEQ ID NO: 19847 - DNA, 122 bp, Homo sapiens
aaaaaaaacagaggtgagttcagcagaagaaacaaaggtggattattagtcttaagtgtgcgtgcctacttcaggaagggagtgaaagcaaaaaactgaggagctaagggtgggagggggaa

SEQ ID NO: 19848 - DNA, 122 bp, Homo sapiens
acaaactccaggtcgcctaggcgctgcgcaggaagcgcttgccagccccggacttctgcgcgcgctgcatgcccattggatgtgctcattcccaccccagccaatcccgaaactcgctcgga

SEQ ID NO: 19849 - DNA, 122 bp, Homo sapiens
gggtcgctccgcctgcttctgccggggatggagactgggaactggggatgcggccctctgcgctccgagctctcccgccgctgtgctgccccgcgcgggacggtggcctctctgggcctcgt

SEQ ID NO: 19850 - DNA, 122 bp, Homo sapiens
aacaacctgacatcatcatctacaattttctgagtgcttgctttgtgctaggtgtggccacgttgcctctccacaattaatctgaataattccagggctctccatttttctagataaagaca

SEQ ID NO: 19851 - DNA, 122 bp, Homo sapiens
ttgtctttgttcaagtaatttagtatatttcgaaactgaaatctgaaactttgtacacagcgttttccatcttcacgctggtgatagcgaaccccataccatgttgaggattgtcagttttg

SEQ ID NO: 19852 - DNA, 122 bp, Homo sapiens
cccatcaactctgatcttggggagagcagaagccatgttttcccttgtccctattgcatccgtgcatgtgacttagcacatcactggtgcccaagacatatgagaatgagttgcagggaggc

SEQ ID NO: 19853 - DNA, 122 bp, Homo sapiens
aaaggaccacagtgagtatttctaatgctgaaacaagagggtgcagctctgcagcccagacggctgggcctcagggtaggtaaccaagacagctcaatgcatctctccctcagccgtcccta

SEQ ID NO: 19854 - DNA, 122 bp, Homo sapiens
agccgcatggccccgtcagaagaccccagggactggagagccaacctcaaaggcaccatccgtgagacaggcctggagaccagctccggtaagaggcggcaaagggaccccagccccacaga

SEQ ID NO: 19855 - DNA, 122 bp, Homo sapiens
ctgcaaattgtgtcagcaccttggagcctccgaatctctcagcaggcagtggcatgtgtgcgtcttcatgggtgcgtgcatgtacatgcagcaagtttcgctgaagattcaagttagtgaag

SEQ ID NO: 19856 - DNA, 122 bp, Homo sapiens
tcgggtgcgcatcacgtgaagacagcaggcagcgcgcaagcggggccctggttggggaggcgggcccaggaggtgccctccgccgtagtacctaccgacactcgcgtgctggagaggggagg

SEQ ID NO: 19857 - DNA, 122 bp, Homo sapiens
actttaagcctgctgataatacaaaacattaagaagttaaaatttctcaacacaagctaccggaacacccacccaaatggaagaatggaaagaggaagtggcagaagtcaaacaaagctaca

SEQ ID NO: 19858 - DNA, 122 bp, Homo sapiens
agcgcgttcgcgcccgcccgcctgccgccccatccagctgaacatcctgccgccagtccacgctcggatgggaccctgctccgggttcgactctccccggctcgcactgagccgccccggcc

SEQ ID NO: 19859 - DNA, 122 bp, Homo sapiens
gagcgtaaggacaaacagaaacagacccacacaggtaggtcagttgatttctgacaaaggcgccaaattaggagaaaaaagcctatgcagcaaataatctgaaagttaagggagaaatggat

SEQ ID NO: 19860 - DNA, 122 bp, Homo sapiens
cgggtgggtggggttgggaagacactcacctgtgccaaggacacctcctttaaagcctcacggcgcccccatgagggaggatcgtgtcacacatacctttaccagggctccaagagccaggg

SEQ ID NO: 19861 - DNA, 122 bp, Homo sapiens
cggggaaagtttgtggggagttgctgcggggggtgaagcgcctgcctctccaggaggagccgccgccactgccgccggcgcggcggagctggggctggtggcgctgtggtgccgccggctcg

SEQ ID NO: 19862 - DNA, 122 bp, Homo sapiens
aggaggctccagacttgacccagctggtgaacggtcgacttggccaaggctgagttctaccgcacatttttaacgtggctccgcctcactttaaggaagcctggtactttactccccagaaa

SEQ ID NO: 19863 - DNA, 122 bp, Homo sapiens
caggtgtaccccgggacccggcacccaggtgtagagtgaacataggtgtaccccaggacccggcacccacgcatagagtgaacgtaggtgtaccctgtgacccagcacccacacgtagagtg

SEQ ID NO: 19864 - DNA, 122 bp, Homo sapiens
aaagtgtagcaaggatgatactagtattgtggtgagaacacagaaaccaggttcttctggcgactgcttttgtggtgtggtggttggtttgatttgtttctgtgaggtcaattttgcttctg

SEQ ID NO: 19865 - DNA, 122 bp, Homo sapiens
tcatgtagcactggagattctagaactagaacccagcgccgaggccaccagtacagtccccgcaggccgcctcatgactcaccccatctttcactgcttccgtccccactcccagcggcttc

SEQ ID NO: 19866 - DNA, 122 bp, Homo sapiens
acgaagcaaagaagcagggacctgcctgcgtttgggtagaggcgagtaaaaaaattaaagcgtgtacatttcggcccgatgcaggagaaaggggtaaagtgcaaatgctccagaagcgggag

SEQ ID NO: 19867 - DNA, 122 bp, Homo sapiens
tgcacgggccctgcccaccaccccgcccgcgttcgccgccgccccactgtcctcatcccgcgggctgaccccaggattggcagaaatcagtggtctaatctagcatggtgggtaaagggatc

SEQ ID NO: 19868 - DNA, 122 bp, Homo sapiens
cgcagggagaggtgcacaagcgcaggagtgcaccggaagtccgcctcccgggacacccaccgcgggtcccaggacaagtaacggactctatttcccaggagcctacgcgctcccccagtttt

SEQ ID NO: 19869 - DNA, 122 bp, Homo sapiens
agccagctgctgcagcaggtgtggccggcccagccaggcaagtcctgctgccgggagggtcgcccaccagctgctggagggtgtggggcggccgggctggccactcgccggcagcaaagcca

SEQ ID NO: 19870 - DNA, 122 bp, Homo sapiens
gcgcgggcggagaggtgcgggcgccctgggacgaccagccgaggacgcctggtgtttggacggctgcccccgcgctgtccccccgtgcgaggcgtgttggcctccgtggcctcgcgagggac

SEQ ID NO: 19871 - DNA, 122 bp, Homo sapiens
ctcagactcaccatgtctcaacctgagattggccttgagtttccaagtcggctccactcccggaattcctcagggctgggttgcaccactgctcagccccaggacaaggccaccttgactcc

SEQ ID NO: 19872 - DNA, 122 bp, Homo sapiens
cttcacattttccagagatttacggccagttacaatgagacaattaaacattcacccccccgccaagctgcacttggagatgtgtaagcagtaatgtagtcatgcgctccccatgatgtgag

SEQ ID NO: 19873 - DNA, 122 bp, Homo sapiens
agggggcgtcactcttgggaggggccgcatggggcccgggcgcactcactttcacaaagacggcgccgcagcttgccccggatcttgtcgatggcattgaagtcggacacgtggaagacgtg

SEQ ID NO: 19874 - DNA, 122 bp, Homo sapiens
tgggattacagacgtgagccaccgcgcccggccatgtttccttttagcaatggagcataacgggatctgaggaacaatataactcaggaagagctgatggaacattaagacgtgttacaact

SEQ ID NO: 19875 - DNA, 122 bp, Homo sapiens
agaagcattatttcccatatggctattgtaagggcttcttaaattaaagaaagaagctttcgtttctgcagtaggaagtaactcttctttggctgtgacctgtgagacactttcagcagatg

SEQ ID NO: 19876 - DNA, 122 bp, Homo sapiens
cgggcttcctcctgcagggagcagtgctggcccgccaggtgccccaggctgtggtgcgcacggccaacatcctggagtttgctgccaaccacgcctcagtctggatcgccatcctgctcacg

SEQ ID NO: 19877 - DNA, 122 bp, Homo sapiens
aggtttctattgcatttcctctttagactgtgcacccagacattttcccagagcaaccgccgcaattcaaagattcagaagagccagagactccttcagcaaaagctaggggaagagacttc

SEQ ID NO: 19878 - DNA, 122 bp, Homo sapiens
ctgactcccttcattatggcctcagctttatctctgggcaataagtgtgatcccttccttcgctgcgtcctttgcaggggcggtggcgctctgcaaggcccaagggggcgtggtccagatga

SEQ ID NO: 19879 - DNA, 122 bp, Homo sapiens
gtgctgaatccgcgtggttctttcctcttcagcgcagagaacggaggtggagatgggctccggtgctcccgctgaacagggacggtgcgcagtcattccccgcctgcaccacgcggtggcag

SEQ ID NO: 19880 - DNA, 122 bp, Homo sapiens
agggaaaaaaccaggatttgtgccacgacaaacctatatccacgctgtatgcactcgccccgcctcagatgtccaccctggggtgattacttccctggtcttatattagttatctgttgctc

SEQ ID NO: 19881 - DNA, 122 bp, Homo sapiens
tgcacgcggggtggtgcggtcggtgctccagccgaaagccccacgtccttggggcccaggcgagccattaccctggtttagggttagtgcctcacctaggagttgtgaacagtgtgcgtatt

SEQ ID NO: 19882 - DNA, 122 bp, Homo sapiens
aggaaactggagtagggggacacagcagaacaaaatcgcaacactactacaggaaaacctcgtcattccgttacttgtcctttgctatgttggaatacttatagattagtttcaacaatcag

SEQ ID NO: 19883 - DNA, 122 bp, Homo sapiens
gggccgcgcccggaagggctcatgggagggtgccggggctggccccgagcgctggggacgcggcgggagggaccgggtccgccgtgccccggggaggctgctgctgcccggcggcgggaggc

SEQ ID NO: 19884 - DNA, 122 bp, Homo sapiens
cgcgagcgtgcagggtgttgggggtgcctgcatcctgtctcggagcacctcggccaggcgcgagcgcgcgggtccccgtccccacccccgggcgccttcccggcgcgcccaccgcccagtcc

SEQ ID NO: 19885 - DNA, 122 bp, Homo sapiens
tgcggccaccacgccaagaatcacccgctccaacagcatccccacccacgaggcggccttcgagctgtacagcggctcccaaatggggagcaccctgtccctggccgagagacccaagggaa

SEQ ID NO: 19886 - DNA, 122 bp, Homo sapiens
gccaggcgtagacccagtgcacaccaggtctcacttatttcctgtttccacccagtgggtcggggtggacccagaacggccatatcctgactggggcccagaggacggagagcaccccccat

SEQ ID NO: 19887 - DNA, 122 bp, Homo sapiens
ggtactcctcctccagggggttgtcggtgcaggctcggccgttgttgggagggagcacagcgtggaggcggctccagtcccccttgcacaggatccagggcgtcgtgtcgaacttgaagtgc

SEQ ID NO: 19888 - DNA, 122 bp, Homo sapiens
gttttgggtgcacaggagccccactgctgatgacgaactatctctaactggtcttgaccacgagctagttctgaattgcaggggcctcaaagcagcacctaaaccttgagggggagggtgct

SEQ ID NO: 19889 - DNA, 122 bp, Homo sapiens
tgggagaacccgaggtggacagaggtctgctagtgtcagccgcttggcccaggagcctggcgtgtccagtgtcagctccttgtaagcccatcagggccgcttcattaaagttgaatttaaag

SEQ ID NO: 19890 - DNA, 122 bp, Homo sapiens
atgtccaaggcgccatagttcaagaactgccatttgcacttaggatgggccccaccccaccgtcagcccttcctgcgccagcccggggtctttggtaggcgccggtgagtgactatccccga

SEQ ID NO: 19891 - DNA, 122 bp, Homo sapiens
ctttaaacgctaagggacaaagtggtgcgtaggccaggcctggacgcccagggacctggccggcctgcagcgttcggacggccctcaaagccacgctcgtggctcagttcgtcccaagatcg

SEQ ID NO: 19892 - DNA, 122 bp, Homo sapiens
taacatacacgactgtcctaatcttccaccaaataggagaggtgggcaaggcattgtttccgacatttggtagctgactggtcaaatggagacatagggatgaagggatatgtttacaatca

SEQ ID NO: 19893 - DNA, 122 bp, Homo sapiens
tatgttccactcattcacattctcaacagagtcttttagtagcgaacagaactctcctctcgtaaagaaacagtgcgatttctatcataattccagtggttaatcttttgcttgaaatttcc

SEQ ID NO: 19894 - DNA, 122 bp, Homo sapiens
tcgcagcctttggcgcaggcaggcagcgcatccccgaagtacttggcaatggcggcatggcggcacctggagcaggcagcaccgcagaggtgaggggcggagagcccagtcggccagcgtct

SEQ ID NO: 19895 - DNA, 122 bp, Homo sapiens
caaacctaggaagggaaaggggaggagaggtggccagcctcagagctcccatgttcccctcgccacagctgggaacactaaggttcccttaggagcagcggctggggcacatgccacacagt

SEQ ID NO: 19896 - DNA, 122 bp, Homo sapiens
agcctacagaaaactggtcccttcctcctaccccgcagtcatccccaggccttggcccagcgggaaacatcccttgactgaaccgccactgaacacccacactgcacaatcgaggcgcagcc

SEQ ID NO: 19897 - DNA, 122 bp, Homo sapiens
atgtaaaacagggagaacagtatacctgccatgcaaagtttctgccaggttcatgaaaagcgcctgtttagaaacacgccttatttttgataggaagcctaggagatacgggtaactggatt

SEQ ID NO: 19898 - DNA, 122 bp, Homo sapiens
aagccctctcaggcaggcagacccagggcctccccgccacaccttgttcatggattttgtcgctggagccatcggaggtaacagacaggatggtgggctgtgcagacactgctgctcctggg

SEQ ID NO: 19899 - DNA, 122 bp, Homo sapiens
gggcgcgtctttgaggcttgcctctgaggtccgctgtccccgcatgagcggacggcagagcgcgcctgcctgggagcccaggaggctgccgggccagggaccccgggaaccccgggaacccc

SEQ ID NO: 19900 - DNA, 122 bp, Homo sapiens
actctaggaaagcaagtaattcgaagagttccaccatatacgaaatgatgtacaagagcacggaaataaagaggccagtgtctaactgcttaagtagacatagagttcaactggaatgacag

SEQ ID NO: 19901 - DNA, 122 bp, Homo sapiens
ctttttggtaaatgctaaatgaccagtctggtgattgcttttggtgcccccataaatcctcgtagaccaagtctcactttccggaacccattccttatggagatagattggctttctttcca

SEQ ID NO: 19902 - DNA, 122 bp, Homo sapiens
agaggccacgtggatgcccgtttgtgggtctctgcacacacggtggccggacggcagatccggggctgccctcagagcgctcgccacccccacccgcctttagctgtcgttcctccaacccc

SEQ ID NO: 19903 - DNA, 122 bp, Homo sapiens
ggcgtggatatgcacgtgagcgaagtaaaagtcgctggagatgagttggctccacttgtccgccctggggagcaatcctggggcaaaatccagtgctaattgatcccaaccagccacattat

SEQ ID NO: 19904 - DNA, 122 bp, Homo sapiens
cgaacagaaaggcaaaccaatgagattggacgcctcgcagacgaaagccaataaaaatatcgcccgcgagcaagggaggcgggccactgggaaggacagcaaaattagctaataaggtgaag

SEQ ID NO: 19905 - DNA, 122 bp, Homo sapiens
tcaaatatggtgatatcagtggagttgaagatatgcagattggctaaaatgttgtagagacggtttccattcttacaggctgggtgggaggattctagtgattgtagttctctgattctgac

SEQ ID NO: 19906 - DNA, 122 bp, Homo sapiens
ttgttcgtgggccttcttgcagagaaaggctgcccaaccttgacggggccatgggcgctgcgggagggcaaaagaccacagagatctgcgaagccaaagtaaacaacggggttggggcggcg

SEQ ID NO: 19907 - DNA, 122 bp, Homo sapiens
gtaccagaccggaagcggtatgtcttcactgcaagaggaattttattttgctcccctcggcgggtggcagcttgattgtagtcatccagtgaactgaaaatgcgattttaagtatattttta

SEQ ID NO: 19908 - DNA, 122 bp, Homo sapiens
gggggttggggctgggactctggaggctcctccccttctttctcttccttccgcctcccccgtgcccccagctgctcttgtcactgtctctgatgggtatttgcctggctttgttgcttctc

SEQ ID NO: 19909 - DNA, 122 bp, Homo sapiens
ggtcctggcccaggttctggtccagcacactgggttgaaagccctgcatcaccacccagccgagcttgagccatcacccacaaaggggtctgtgtgtctgaaaagctgtttggcccaaaaga

SEQ ID NO: 19910 - DNA, 122 bp, Homo sapiens
tcctagcgtggggggttgaaggggcttctccctggggctgcagctgcacccctgcaggggcgcctttcctactacgctgcagggagacggcgttccccggagttggggagggaagtgcgttg

SEQ ID NO: 19911 - DNA, 122 bp, Homo sapiens
gcaggacagttgcactgcgattcttttttcgttaggttacagcccttatgtgttgtactccgcgggcgcaggctgagagccgtctgcacctttgttactgcggcccgacgccctcttgccag

SEQ ID NO: 19912 - DNA, 122 bp, Homo sapiens
caactggatgactgaggaatgcggtcctaagtgaccccgggctggctgtggggccaacagcgtgcgggatctgactaacagcgtgtggcagccgagcgactgcagcagcggcggggacccca

SEQ ID NO: 19913 - DNA, 122 bp, Homo sapiens
ccaacagccccgccggccactggcccaggactcagcgtgccgttcctccaggacgcagaccggggctccctaccagccttgagtgagagaccacaagcagcctctgaagtcatcttcctctc

SEQ ID NO: 19914 - DNA, 122 bp, Homo sapiens
acttgctcatctgtcttaggtgggagggtgctggccagccaggggcaggaggtgacacagcggaggtgagaagtaggagctgggctctaacagacaagcatctcaggcctccgagagccatg

SEQ ID NO: 19915 - DNA, 122 bp, Homo sapiens
tgcagactagactacctctgagtcagggcctgcagatcccccagcctaggtcagagcatgcggatacctccatccctaggtcagagtctgcagtccctccagagcccgtcccccaggtcggg

SEQ ID NO: 19916 - DNA, 122 bp, Homo sapiens
cgcccagcagggtgggttcgggtgccgtgagggcccacaggcggccgccgcggccctccacggcccacacggcccccgcagggcacagccttacgcagcccttgcgttgcactgattccccg

SEQ ID NO: 19917 - DNA, 122 bp, Homo sapiens
agtccaggttgggtgaaccaagcttgcccgggagaggccaaggagcccttgggccccagccgagtccaggttgggtgagccaagctcgccctgtgcagagacaggaacgtcggattctcacg

SEQ ID NO: 19918 - DNA, 122 bp, Homo sapiens
gcccgcagagcccacgcccacccggaactcgcgctggcctgccagcgcggcacgcagccccggttcccgcccgcgcctctctgtccacacctccccacaagccgaggaagccggctccagcc

SEQ ID NO: 19919 - DNA, 122 bp, Homo sapiens
tcagaatccaccagctccatcagtagccacagagctgctgcctgaaggggattttgagcgcgtcacactttcctccccactgtctgggaagagacaacccacaaatccctcagcaggtggac

SEQ ID NO: 19920 - DNA, 122 bp, Homo sapiens
gaagggaaataaagaggcattttaaaaatgcggactcaccagttctcaacctccccgggccggtgtgtgggaaagggcgggcggccgggctggctggggctggggcggggcgagccatcccc

SEQ ID NO: 19921 - DNA, 122 bp, Homo sapiens
acaaactgattatcatgcaatgacgtgtggcaccaaaaaagatgtcatccaggccatgcgcggtggctcactcttgtaatgccagcactttagaaggctgaggtaggtggatcacttgaggc

SEQ ID NO: 19922 - DNA, 122 bp, Homo sapiens
ggcaatccgcctgcctcaccctcccaaagtgctaggattacaggcatgagccaccacgcccggccaatattttttattgttagcgaggtctatgttgcccaggctggtctcaaactcctggc

SEQ ID NO: 19923 - DNA, 122 bp, Homo sapiens
tttccacatttgacagctttcatggagcctagtcaccgcctgagaccgggacccacctggcgtctcagctgcctgtgccacttagttggagatggcttccgatgctaacctctgctgcgagg

SEQ ID NO: 19924 - DNA, 122 bp, Homo sapiens
aattttcctgaaggagaaccaaaatggaagcgtttacatatgctgcaagtactttgtgtgcgcaggggccacaagaaagatatagtttaataaaaacatttatggattttgaaagcaaacac

SEQ ID NO: 19925 - DNA, 122 bp, Homo sapiens
ctcggcgggacctagaaactgcgcggaaccaaagctcgagggcggctcgagtttgcggaccgcggggaggaagcgcccgccggaagcagtcgcaagacctgagcatggcggccaccaggtgc

SEQ ID NO: 19926 - DNA, 122 bp, Homo sapiens
acccccgaaaggagagcgacgcccgctggaagcgcttgcagagctgccggcaacgttgaccgctagcaagcttggtcttccgctgggaggctggtttgcccattctgtaaatggccgtggag

SEQ ID NO: 19927 - DNA, 122 bp, Homo sapiens
ctggttaacactcagcctgggtgtcaggaagcttagtgcattgttccccatcactggcatcgatgctctctgtgaccactggcaagcgaattaacctctgcaagtgtcatccttccatgtgt

SEQ ID NO: 19928 - DNA, 122 bp, Homo sapiens
caacaccctctccctcccttcctcccttgccaccaccaccaaaggactgggggaaggcagcggggaaaggagttggcactgcctgggccgtgcctattgcctccacaatccagccctggacc

SEQ ID NO: 19929 - DNA, 122 bp, Homo sapiens
cccagccccgaaaacaaggccggctgcttcctcttctcccagggcgggtagtgtggggggcgggcgggggtggcctctgacccggccctctgcaggcgcagcggaagcagctgtgggtggcc

SEQ ID NO: 19930 - DNA, 122 bp, Homo sapiens
ccgcgcgcgacgagcgcgacttagccttggcgcgcgccttgccaccctgcttaccacgaccggacatttccgagtcaaggaaaaaagacaacggcaaccgaaaagcgagactaaaaacaaga

SEQ ID NO: 19931 - DNA, 122 bp, Homo sapiens
tcaggccccgcctgtgcagagtgcgcggaggccaaggagttattggcagaaaagcaagagcggaatgagcttgcgtacttgaagtctgtggccgtctgccaacatctccttcaaatatgaac

SEQ ID NO: 19932 - DNA, 122 bp, Homo sapiens
ctcccaagagttgtcggtgttgcatcttttttgttgtttatttttttttaagccaacggacgaagacatccaacggtgctgcatcttaatggagggacatccagctaaagggaatcttggag

SEQ ID NO: 19933 - DNA, 122 bp, Homo sapiens
acttgtcaatttccttcacgtctacgtctagaaaaaaagtgagaaaactggatgcagcttcgagtgctaagccatgggggatggactttggtccccaagcaaagcattaatgaaggtgttgc

SEQ ID NO: 19934 - DNA, 122 bp, Homo sapiens
cagatagagtggggatgacatggggaaaaggaggtgggaggagtaataataacagcccaacgtattgagcatctactgtgcaccaggcactctatgaagtagctatggtcattaaccccatt

SEQ ID NO: 19935 - DNA, 122 bp, Homo sapiens
ctgacggcagaggggcaatgacggagatcccaagagcaagcaggatctgaacgctgctcccggctgtgaggatggaggcaccatgtgtgaggaccaaaaagtaaccgcaggagctgagagtg

SEQ ID NO: 19936 - DNA, 122 bp, Homo sapiens
cacagtcacccgtcagcagcctcgagggctgacgtgtccttatcaagccggcgcgccccgcgattctatagccgccatgcctgagacctttttcctgaagggagaagcctgctctcgaacta

SEQ ID NO: 19937 - DNA, 122 bp, Homo sapiens
ttctgatataactatatttgaaggaaaaattgatcagaagagtgtctgtggaggtgtttacggtgaggaagagaagtgaatcttctatttgtgtaatgggaaatcaatggaaaatactaagc

SEQ ID NO: 19938 - DNA, 122 bp, Homo sapiens
aaaaaaggacagaatggaggacagttgtcttctttatctggtgaagccagccttcttgcacgcgggtcttcaccccgccccattagctcttgcctgtcttgtttgctaacctttaactgcag

SEQ ID NO: 19939 - DNA, 122 bp, Homo sapiens
acagactccaagatgccaccccgagactcaccggatactcactacctcaactctccaccccgcacccatcggtgaggaagagcaggcacctcagggggacagtccatacatcccccttcgtg

SEQ ID NO: 19940 - DNA, 122 bp, Homo sapiens
gcccgactcgatgggaatttgggggcaaacccagtctttttctgtgggcagtgggctcctcgtccctctgaaagccctggtgcccggatgcacgctctcccaccaacccacagaatcggaga

SEQ ID NO: 19941 - DNA, 122 bp, Homo sapiens
agcgaggccgtgcccccaaggtgtgtgctgagaaagctgctccgcgtttttggtgtcccccgggtctgtgttaagcagaacgcagctctgcccccgcaaaggcaccccgcgccggcgcgggc

SEQ ID NO: 19942 - DNA, 122 bp, Homo sapiens
agcacatccccatagtcagggaaggtatcaggccctggcttgttgatgagccgctcaatgcgcctgttaacctctgggtagcgggtgccacggtaggggatgcgctgctctatgacacggcc

SEQ ID NO: 19943 - DNA, 122 bp, Homo sapiens
gcggcaaagcaaggcgaggagccatttccgcccgtggcctaggcggggcttccttctggacgccacctcacaacgtgtgttgctttccgctcctcggaacatccgggagagttgacttccgg

SEQ ID NO: 19944 - DNA, 122 bp, Homo sapiens
agcttgaagaatagaaagcccttgtaggacaaagacgattgggagaaatgtgaagtctggcgtggactctgtcagaagacagaactgaaccaatggatggacttagaagagagagacttcgg

SEQ ID NO: 19945 - DNA, 122 bp, Homo sapiens
atttcctcaaataacggagtagaaattgcagttacctgtctctgaagcagccggcccttccgaagctcttaccttttagggtggctttcttaaggaccttcatggcgtagagctgcccagcg

SEQ ID NO: 19946 - DNA, 122 bp, Homo sapiens
ccaagccctgtggccatcaaagcttcactctgacactctcctacacaaccaagccctcaccgtcctgggtgtgacccctgcacccctcatgtggacccagttcccacagccagggccctgat

SEQ ID NO: 19947 - DNA, 122 bp, Homo sapiens
tgctctgtgggctgtgctctcatgtgcacgtggaatgctgaccgcacagcttactaagggcgtcctacgtgcggtgctctcatgcacatgcacaatgccgatggcacagcttactaagtgtg

SEQ ID NO: 19948 - DNA, 122 bp, Homo sapiens
tcttcctcaggagcagagaggagtctggtgtggcctgtggtcagctcaatccagccccagcgctgatcaaagttccaggcagtggttcctcccctcacgtggccccagcgtcccagaatgtc

SEQ ID NO: 19949 - DNA, 122 bp, Homo sapiens
ctctgaacatacagtgtttttatccctgaactattccaactccagtccggagtggttttacgcagtcgacactagagggcaggccattaaaacgttcccgttcaaacgagttgctctgcaaa

SEQ ID NO: 19950 - DNA, 122 bp, Homo sapiens
tatcgatacctttggaatttttttttccaagtgactcaggcttacttgaagccattacctcggagttagtcagggactgcatgacgccaggccccaactgtttaaagcagagcgcggcttag

SEQ ID NO: 19951 - DNA, 122 bp, Homo sapiens
gggagctcgcgccctcgcccagccgagctcccacccccgcttttttccgaaggcgctgggcggcgccaccctccggccggagcccggcactgcacaaccccctccgactttcaatgttccac

SEQ ID NO: 19952 - DNA, 122 bp, Homo sapiens
gagcagagacagaggaggcttgagacctgtgtggagggacaggaagggagctcggaagcccgttttgtagcagatcccaaattgtgaaagttgatagttgtggagcacacatatgcagagta

SEQ ID NO: 19953 - DNA, 122 bp, Homo sapiens
ccggggaggatatttgcatttaagcagaaagtgtttcaggctctgcagaggtgacactggcgtgtttctgcactcagggtgcccttcctgccttttcctcccggacacagagtcacaagtgt

SEQ ID NO: 19954 - DNA, 122 bp, Homo sapiens
cctccccacacatgaagggatcagtgtacctactctatttcttttatcaaataaacacagcgctgagcaaagaaagcaacaaatatttaaccagcttttaacttatccactgacatctgtga

SEQ ID NO: 19955 - DNA, 122 bp, Homo sapiens
ggagggcgtgccccgcggcctctccctgtcggccgccggccccgcagtttgtggcgcccgcggctctgcccctcacactcacgccagggctgccccgcgactgttcctaacccagaatagtc

SEQ ID NO: 19956 - DNA, 122 bp, Homo sapiens
aagggtttcacttcaggggagtggaactgggatgggaattttacaatgctagttccagcacgtggtctaatggccccaggggctggaaaagggaggtctgctccaactttaagatgcgccct

SEQ ID NO: 19957 - DNA, 122 bp, Homo sapiens
aatctgatacacagttgtgccggcattatctctaggatccaaagggtggtctctaagtatcggaaatcccttcctctctctcttctcaaattgaatttacaattcaccaggaatcaggggat

SEQ ID NO: 19958 - DNA, 122 bp, Homo sapiens
gtgttccatagtctaggacagtgcaggaactgcagacttgtcaagaactggggagtggtccgggcgtggtggccgaggtgggtggatcatctgagtcaggagtccgagaccagcctggccaa

SEQ ID NO: 19959 - DNA, 122 bp, Homo sapiens
gctgccttaaggtttaaaacgtgcacatttggaaaagtggaaatgggtttagactccttccgtcatggaggagggtactatttcccatcaaaggtactcctaagaaatgtgtagttgtgagt

SEQ ID NO: 19960 - DNA, 122 bp, Homo sapiens
gagcacccctcggaaggcgcgcgcgcggcctggccggttcctcgccgggctctgggcagccgggcggagtggctagattatgtaagtagcagccctccatgtgctcaccaccatctgttaat

SEQ ID NO: 19961 - DNA, 122 bp, Homo sapiens
taaaacaatgacgccagaccaattcttgtgctccatcggcttggtgcgttataccagaagcgtattgtgacgcctaagtgcttgctcttttcattattttttgaacttctcaccactgatca

SEQ ID NO: 19962 - DNA, 122 bp, Homo sapiens
cagacacagccaagcctcaggaggactcaacccacaggaatgtgggcaatgagcaggctgcgctcggaggaccccgctatcccagccctgggctctgccgccctctggtggctgggctggga

SEQ ID NO: 19963 - DNA, 122 bp, Homo sapiens
aggagtgggtacacaccatggggggcgtgatggggaggcgtgggcgtacaccggggggcgcgatggggaggggtgggcgcacaccgggggacgcgatggaggcggtgggtgcacacggggcg

SEQ ID NO: 19964 - DNA, 122 bp, Homo sapiens
ctagttagtcatttatgtcaggatactgagagttaatgctaagccccagcaatgggggaacggagacacccaccaggccagtgggtagagcagagctggagtccactattgagagcttccag

SEQ ID NO: 19965 - DNA, 122 bp, Homo sapiens
cgtgcttcctgctcttttcaagaagtcacttgatggcccacacctgttatcccagtgcttcgggaagccaaagtaggaggactgcttgagcccaggagttcgaggccagcctaggcaacaca

SEQ ID NO: 19966 - DNA, 122 bp, Homo sapiens
ttccggcggcaggcactgaatcttccctcatttgattcagtgacctctcaagtgcatcctcgccccgagggctctgggccgtccggcaactgtgaagccccttgggttgataatcttctccc

SEQ ID NO: 19967 - DNA, 122 bp, Homo sapiens
cacatttacctgcaaggaagacacaggatctttggaatcaacatacacatcttttagaaacgacagcagcttttcatctttacgagcaatctctcctttaacttctggatagactaaggaaa

SEQ ID NO: 19968 - DNA, 122 bp, Homo sapiens
ctgtgaaaataatatcagggttttccgtcagaacgagctttgccctgcactcaggcgtggcgtgatctgacccgacacctccaaccatctgtgctatctatctgccttctgatttaccagat

SEQ ID NO: 19969 - DNA, 122 bp, Homo sapiens
ccagtcctgttactgcttgaggataaagttcagtctttaaaggacaaagaagcttcttgccgggagttggccagacagctcaggacacagctctgcagcccattctgattgtccaatgtttc

SEQ ID NO: 19970 - DNA, 122 bp, Homo sapiens
ggaagggaggcatctagaaaggcgcatacacagctaaatgcatgatgggaagtgacaaagcgcaggcttcgggcattgccacgggaggcgggcattcgggggctgaagcggtggggctcagc

SEQ ID NO: 19971 - DNA, 122 bp, Homo sapiens
gatcccggcggggaaggccacgtgggttactggggaggatgaaggatgaacacggggccgcgtctcacatgcaacccaccttcgaagacgccaaccagaggcacctacggcacatcccgaga

SEQ ID NO: 19972 - DNA, 122 bp, Homo sapiens
gtacctgaatgagcactggaccagagccggggcgagcccggaaggtgccacctccgcccccgccccgccccgcaccccgccccgcaccccgccccttggcgcccagttacctcccagaggct

SEQ ID NO: 19973 - DNA, 122 bp, Homo sapiens
accaccgtgtgtctcacccggcctgtgacaagaaggagcagggccagaggtcagttccgacgcagaagggtcctccagggcccagggggatggacagccaggcagacacaaggctcaaaggc

SEQ ID NO: 19974 - DNA, 122 bp, Homo sapiens
ggaacggggacaggcgcagcgtggactcactttttcggatgtttctctcttttcggcctccgctttcgggcctgaatggccagcactggggaagagaagacacacattaacggtcgggccgc

SEQ ID NO: 19975 - DNA, 122 bp, Homo sapiens
gtgctaagtctctcattgctcggggccggcagggccggctggctgctccgagtgcaggcccgccaagcccacgcccaccctgcactccagctggaaccgcccgcagcccaggttcccgctcg

SEQ ID NO: 19976 - DNA, 122 bp, Homo sapiens
aggacggtatgcgtgcaatggcttcttctaaaatctaggttaatcagcttcaatgaaattcgtgttggagtcaaggcggaacatgctaaagagagggtggtttcctttagcctgcagcctcc

SEQ ID NO: 19977 - DNA, 122 bp, Homo sapiens
aagcactgaagagcgtttaagcgacttctctaacctccattcataaatatgagccaagcacgagagcagctcgacttccagtccagagggatggcagagttcaagagcatccaggaaacaag

SEQ ID NO: 19978 - DNA, 122 bp, Homo sapiens
tggggacccgggctccacgaagccgtctccgcgaccccttcccgcccagctcctcactcacgccttcccggcaaatcttccagcctgctgtgtcccgccggtactggagcatcttctcggcc

SEQ ID NO: 19979 - DNA, 122 bp, Homo sapiens
gtggccctccctgcagtcagcggcaggccggagccagctctggccttggcagggcggacacggtgagagtcagctccacctgtgccgtgtcaaggccgggagcgggcttgtggctgccgttc

SEQ ID NO: 19980 - DNA, 122 bp, Homo sapiens
agccagggggctaattaggcatctggtcagtttccctttgcttcagattcttaatgcagccgaaaggaagtgactcatctggatcacttccctttagggagggtactaatggggacttagag

SEQ ID NO: 19981 - DNA, 122 bp, Homo sapiens
gagctgctagataagggtggtttctttgccctcctagaatcgtctgcgtcacacttgtcccgggacccaataagggatcgggaccgtcctatccactcccatatcctcagctcctggcacat

SEQ ID NO: 19982 - DNA, 122 bp, Homo sapiens
gcacgcaatctcgagttgcggggagacactgcctgggggtcctgcaggggtgctgggcagcgtcttggcgagggcagagccgcagggcgactccggagcccggcaagtttgtagcgggcacc

SEQ ID NO: 19983 - DNA, 122 bp, Homo sapiens
aatccagacgaagacctcggtccacgagccagtccattgtgtcgctgttgacgggcactgcgggtgaggatgagaagtcagcatcgccgaggtccaacgtcgcccttcctgctaacagcgaa

SEQ ID NO: 19984 - DNA, 122 bp, Homo sapiens
gcataagctgaaaatatcctaaatagaaagtgcatttgacataatagtttcgacttacaacgggttcatccagaggcagcccatctcggcccaaacgatgcaatgagtgtgactagttcacg

SEQ ID NO: 19985 - DNA, 122 bp, Homo sapiens
gagccggccggcctggcgcacctggactattaccacggcggcaaggtaggcgggggcgggcgggggtccccggcgggcggggccggagtcacctggcagctcgggactcaggcgctcccggg

SEQ ID NO: 19986 - DNA, 122 bp, Homo sapiens
cggggcctggcagagcttgcgcgcgatgcgggcgtacatgaccacgatgagcgccagcggcgccaggtagatgtgcgagaagagcacagtggtgtagaccctgcgcatgcccttctcgggcc

SEQ ID NO: 19987 - DNA, 122 bp, Homo sapiens
cagcctacctcggtagtggccccaggtgtttccaactttttggccaggacccaacatgtccgcctccgaggaggtatacgatctagctctgcatgtctatggtagcacagcgcccgccccac

SEQ ID NO: 19988 - DNA, 122 bp, Homo sapiens
taatcccaaaatttattaaacactgactatgtcctaggcatagtctatgtgctttacatgcgttagttcattcaactctcccaaaaaccccattaggtaagtgctattattatcccccagtg

SEQ ID NO: 19989 - DNA, 122 bp, Homo sapiens
cgtcgcggtggagcagctgctgggacgatgaggcagcccctcctcccagtgcctccgccgcgtaatgagaccacttgtcaaaacagagagagacacccattttcaaggcctaaaaaattgat

SEQ ID NO: 19990 - DNA, 122 bp, Homo sapiens
tgccggccgctgcgctaagtgctctgaatccagaagcactgaagtcctgagcattggccccgaaggcctaaagtctggaaacagttgcagttgaagagctcgtcagccatggcacacctgct

SEQ ID NO: 19991 - DNA, 122 bp, Homo sapiens
tatgctttagagaaactaaaccagagggactctggactcagacacactgtgtgtagtgaacggacaagggtctagatagaacaggatgcaatgagaatcaacatatctgactgtgaagcact

SEQ ID NO: 19992 - DNA, 122 bp, Homo sapiens
gcctctaagcctcgcatgtgcagttcccactgcctgaaaagcttttccttcagcttcgtgcgtggctgactcctaggtgctcgttcaggtctcaacatgcctgttggtccccacagagccct

SEQ ID NO: 19993 - DNA, 122 bp, Homo sapiens
gacattgcactggcctaccgcctgactgacctgggaagccgcctgctgagccaacttgagcggcccctcaccttcacccgcacaggaggaggagcggaggtcagtccccaaacccagcagga

SEQ ID NO: 19994 - DNA, 122 bp, Homo sapiens
attaatgagggcccagatctgggatatctgggacaagacttgggccttcctggtaaaacacgaaaacaaaacaataaacacggcccctcccccctctccaaaaacaaaaacaaaaacttcaa

SEQ ID NO: 19995 - DNA, 122 bp, Homo sapiens
tctcttgtgaaacagacggagggttttcattcaccacaagggcagcagcagccaacagggcgagtttgggcggcaccaccgtgagtctggaagcccgtggagggtgcctgcagccctccctg

SEQ ID NO: 19996 - DNA, 122 bp, Homo sapiens
attggcctttatgttttctattgtagtgaatggcactatttcctcctcacttcttaaactcgcttaaatactctttctcttcccactgccactaggagttcaaactccgaatttcttctcca

SEQ ID NO: 19997 - DNA, 122 bp, Homo sapiens
ctgtttttaaaattgtgtttcaaaacaacatggtgacttttggacaagatttttctatttcgcccacaccacaatagagatgcaatgaatgctgctggtgaaatgtttggctgtgtcaaatt

SEQ ID NO: 19998 - DNA, 122 bp, Homo sapiens
caggccagactgccctagaaggaagtcaggggcctcaaggggtggcactcttccttaactcgtaactcttggaggcaagcttggaaggtgctttatttcccgctatgattataccaaccctg

SEQ ID NO: 19999 - DNA, 122 bp, Homo sapiens
gaaaagaaatctgggggctgtgaggcgctcactgggagccctgaagacaaagtgggggcacggggtgagatgagagggttgtcagccagagaaacagctttcctggacccagcatgggggtg

SEQ ID NO: 20000 - DNA, 122 bp, Homo sapiens
gcacgatcgcccgggcattgtcatagcagctgacccagccaagcagatgttcaggccccacgtgcttacgacccggaagtccgtgggctcagcggcggcttttgcagggaccccagagcagg

SEQ ID NO: 20001 - DNA, 122 bp, Homo sapiens
cgtggggatcgggtgggtgaggcctggggtcagaggcccacagaggtgacagctgccccacgtgcccaccccaggctcgggcggaggagctggaagaggagctggaggcagagcgggcagcc

SEQ ID NO: 20002 - DNA, 122 bp, Homo sapiens
gtgttcacttcctgaggccacttggaatggacgtcttagaagatttgctcgggagcaaagcgggtaaccagggaagggggtggggcgggaggtggggcgggcaaggcccaggagggaggagg

SEQ ID NO: 20003 - DNA, 122 bp, Homo sapiens
cgcgcgccggcaggacacccccctagacgccggaagagacgcaggactgttgggcgtctacgtccctagcgccgcgccgcccaacgtcactcgcaaaatccccggggggcgggcctttccgc

SEQ ID NO: 20004 - DNA, 122 bp, Homo sapiens
ggcggctccggcagccttggggaggggaggcgaggcggcgtgctccggccattttcagcacgggtagagttaagtttaatctgtaacctggaggggaatctgctctgatgacccagcacaaa

SEQ ID NO: 20005 - DNA, 122 bp, Homo sapiens
gaaggaggggcagcgggagccaagaaacagcccaggacccaaaaccaggccagccctggacgcagaataggctccagctgggacatggaacaactgcacctgtcaaggagtgaaccctccat

SEQ ID NO: 20006 - DNA, 122 bp, Homo sapiens
cttcctctcctccggccacaccaggcctgatggggcccctgccctggagagtcctcgcatcgagataacctcgtgcttgggcctgtaccacaacaataaccagtttttccacgatgtggagg

SEQ ID NO: 20007 - DNA, 122 bp, Homo sapiens
gtccaaacagcaagaaaagatggacccatcccacccaagtcaagaaagcactgccatccccgaagtcatggcccattatccaagagaaaaccccctcaaactaaggttaagaaaagtttaac

SEQ ID NO: 20008 - DNA, 122 bp, Homo sapiens
cctttccaaagttagataacaggctgggctctctgtcagaggattggcgcgacagctccacgtgctgcagctggcgcagggccaggcccgccctgccaagcagcgggaagggaaggcctggc

SEQ ID NO: 20009 - DNA, 122 bp, Homo sapiens
ctggtttctcctcatgctggccagtgttcaggttcaccactgcatctgtctgggccacatcgcctgtgtttccctggtggcgtggtgacctttccgcggcacacctgcggctgcccctctgt

SEQ ID NO: 20010 - DNA, 122 bp, Homo sapiens
cgagagctggctcccctcaatagttcggaagcctctgagccttcagtgccctggggcactcgtggttcctttccagtcccaagtcgacagccctgtggttctcgggctccctggccagctcc

SEQ ID NO: 20011 - DNA, 122 bp, Homo sapiens
gttccacgttcttggccttccttccctgtcattatgcaggttttcaagaagaaccacaaccgtttcccatttcccagcccgttcttcctcacccatcctccgccgggacccccttccctata

SEQ ID NO: 20012 - DNA, 122 bp, Homo sapiens
ctgaccacagagatgcaaggaggcccttgcgtcctagtagcaggcggagcagatgcctcccgtctggactgtcccaggctgggtggaactcaaagaccatgctttggagagccacggtaagc

SEQ ID NO: 20013 - DNA, 122 bp, Homo sapiens
cagacattttgggagctggggccaggtgctctgtgtggacagtgccggagctccaccaagcgctgctctgggcagggacctgcgacagggaagatgaccggcctcttcaccaaggtgccccc

SEQ ID NO: 20014 - DNA, 122 bp, Homo sapiens
atcttcactccaagtgttatttttaaagttctctcctctcctttaaataaaaagaccacgcgctcctttgcatggtcaggatctttctgtgtgtgagcaggatttcttctgttctctttgaa

SEQ ID NO: 20015 - DNA, 122 bp, Homo sapiens
tctcattataacaattagaacaacaattattgaacacactatgcaccaggcactgttctacgtgattcaattaagtgtattaactcatttaatttcataacagccatgaggtgggggggagg

SEQ ID NO: 20016 - DNA, 122 bp, Homo sapiens
atctattttctggcgtcaggcggtgatttattcaagccatttttccggtggaggctcccacgctgttaaatcaagcgccttgccaattaagtgctgacttgggaagtggacgcaatcttagc

SEQ ID NO: 20017 - DNA, 122 bp, Homo sapiens
aacccatggcggtggtgtttaatacgtcagcaccacagggcgcggcgctgtgtcctcagccgcccactatgagacttaatccaacagcaccacctagtggacaaggtagcacactgcacgcg

SEQ ID NO: 20018 - DNA, 122 bp, Homo sapiens
gccctgctgtgcagacacctctgtggccccccaggagtgtgagtggcctggggagggggccgtggcactgaggccgaaagtgcctgccagacggcacggtctgggtgcgggtgttccctgtg

SEQ ID NO: 20019 - DNA, 122 bp, Homo sapiens
ctggaacttactgcagctgccgcgccggcctccgcctttattagtgctgaccacgcctcccggataacggtgacaaccccgcggcccaatccatgcccaggacggtcgcccagcgctacagg

SEQ ID NO: 20020 - DNA, 122 bp, Homo sapiens
gtaattatcagtattgctgttattctatacctcccttgtagcattcctgcattcaatatgcgtttactgagcacctactttgttcctggtgctgctgtaggttctggagatacagtgataaa

SEQ ID NO: 20021 - DNA, 122 bp, Homo sapiens
agagaaaacgcaggcctagttccaggaaggcagagttggggtctctgcaacgtgatttaccggggcatcttgcaaaggagttgctgtgacagtaagctcttccactttgagaccgtcacctc

SEQ ID NO: 20022 - DNA, 122 bp, Homo sapiens
tgccagaagccccgcctctgctgccaaattcacacatcctatctgcagacggctgtaaagcgataaccaagctgggccgaaataagtgtacaggctatgactgggtcgccacacccctgccg

SEQ ID NO: 20023 - DNA, 122 bp, Homo sapiens
caattcttctctctctccatgtccagccaaatttcttttttcagtcacttacagggcttccggtcaaaattcactaggtaggagggtcatcagctgggaagaaccggcgcctgggaaacctg

SEQ ID NO: 20024 - DNA, 122 bp, Homo sapiens
cctgaggagacctgggtagtggagatgctgtgtgggctcaagatgaagctgaagcaacagcgagtgtcacccatcctccctgagcaccacaagggcttcaacagtcagcttggtaggaggac

SEQ ID NO: 20025 - DNA, 122 bp, Homo sapiens
gcgggcccacgtggttggggccctgccctggcagggtcatcctgtgctcggaggccatctcgggcacaggcccaccccgccccacccctccagaacacggctcacgcttacctcaaccatcc

SEQ ID NO: 20026 - DNA, 122 bp, Homo sapiens
cgccagacgccatttccccagtcgcgaggcggggtcctccgccccgcgccgcccacaccccggccactcccgggtcgcagacggcggaagctcgcggggtggccggagggtcgcgagacgcg

SEQ ID NO: 20027 - DNA, 122 bp, Homo sapiens
ccccagcccctcccgcagcaccgttgcatgaggggcggggtctgcgggtgggcggggcctcggtgcccgccccctcctcagccgagccgggggtcgaaggcgggccgcgcgccaagccccgc

SEQ ID NO: 20028 - DNA, 122 bp, Homo sapiens
agtgtggacacatcattaataacaacaagagcagaggtaatgacccccgtgtcccggccccgccgcgtgccaggcacttcgctacacactctaactcgtatatcctcgcaccatccggaggc

SEQ ID NO: 20029 - DNA, 122 bp, Homo sapiens
aagcgcagagcggggacccggtggatggctccttgtatgttgaggacacactcatagcctcgctggccggactgcggctggggcagatttcgcgccttaagggtgattggctttacctcccc

SEQ ID NO: 20030 - DNA, 122 bp, Homo sapiens
gcacggggaacgtgttccacctggacgactgaatcagaagtctctcccccatcaattgaacgcctcattatttttctttctgtcttttctttctttttaaggtaaatgaattgcttcttttt

SEQ ID NO: 20031 - DNA, 122 bp, Homo sapiens
ccggcgccggtccgggacgtgcaagagggggaaagggggagatcccagacctcggtttcccgagggcttccctggggagccactcgcacctctgtgtctccgctcccggcggcagacctcgc

SEQ ID NO: 20032 - DNA, 122 bp, Homo sapiens
ataaaagctgataatgtgaagtcagacctgaagcactgcaactcaaaaaattctttagcccgagggagttcaagagtggtgttttgttctcaggccaagacattgttttaaaatcagaaaca

SEQ ID NO: 20033 - DNA, 122 bp, Homo sapiens
ctcctgtgggggaatcatcgctctgaaccccgcggctcccactccccagtatctttcctccgcgggcccaccgggcccccgtccccgtcacacccacttccgctcttggtcccgccccggga

SEQ ID NO: 20034 - DNA, 122 bp, Homo sapiens
ctggtgctcgtgtgtggcagcttagggctgcatggagattttacgacggccatcacgccacgagggcaggaggcacatggctctccaagggacaggcaccgtgtgcgtctgggctgccagca

SEQ ID NO: 20035 - DNA, 122 bp, Homo sapiens
caacccccaccccaatttgttggggtcctgactattgctgggcccctgaccctagggcagcgccagatccctaaagcccccaggtcccatccagtcttctagtcccagaacccctccccaca

SEQ ID NO: 20036 - DNA, 122 bp, Homo sapiens
cgcgagtcccggggcggcgagtcccggcgctgtccgcgtctgtgtcggtcccggcgaccgcgcctcttaaaggcccccgacccgacccgccccgccccgcctctggccccgcgcccggccgc

SEQ ID NO: 20037 - DNA, 122 bp, Homo sapiens
gcagggcagcggctgccgccaagcacaccactcatcagagcctgccccgttccacccccgcgtttcagtcatgctttccagaaatggggtcactcactcagtaactattacacacacgcagc

SEQ ID NO: 20038 - DNA, 122 bp, Homo sapiens
acagctgcaagggacagggggcacgtttgggttcctgcccctctcacttcccatctcttccgtccccactcctgggttgtgctgaagtgaatcagaacccgagatccacgagcagcactggt

SEQ ID NO: 20039 - DNA, 122 bp, Homo sapiens
ctgggggcgactggggtggggcgtctcctagagcgaggattgctgcagagtgcgcgtgcacgcccgcacatccacacccacggctacacatcatatctgcacacgcacaaaaccacacaccc

SEQ ID NO: 20040 - DNA, 122 bp, Homo sapiens
ctaagatttggccggtggagccccagtgggccgaggcttctgggaagcaagttgcagccacgcaaaaggaaaagctttctaattacctgaactgtcaaagcagagaggggtgtgaggtagtg

SEQ ID NO: 20041 - DNA, 122 bp, Homo sapiens
tcattatctctaatcagctgcttcttctcatcttcaaacttttgtctaacatcctggagccgcctttctgcagcaagctgctgctggctgttctcttctttcagagaggaaatggttgtctg

SEQ ID NO: 20042 - DNA, 122 bp, Homo sapiens
ccctacttgatctacaaggccaacgacgagagcccagaccaggattccaaacacactgcacgagaatattgtggatccgctgtcaggtaagtgtccgtcactgacccagacgctgttacgtg

SEQ ID NO: 20043 - DNA, 122 bp, Homo sapiens
attcagccagtggcagaatggagctccacgtttgattttcagcaattgcaggagccctgtcgttgcaggagataaaggtctcctttaaggcacatatgaaagttcttacattatttacatga

SEQ ID NO: 20044 - DNA, 122 bp, Homo sapiens
gcctgcccctaatctgggcatatcactccctcggttttctgagactcgggactccttgcccgctggagcgcaggccatgaatctgggtcccgcactgcggcgctgcacgccgcagcccaggg

SEQ ID NO: 20045 - DNA, 122 bp, Homo sapiens
agcaccagaatcacacatacagccacagactcaatatctccactttattgtctcccacctcgtacatggccaaacccagggccataggcataagctaagggaaacatgctgctgcataagtg

SEQ ID NO: 20046 - DNA, 122 bp, Homo sapiens
tctgggcattagcggaaggcttcaccacaaggagacaggagcgagtattccataggcatgcgctcctagtggcacgagtggcttgggtcaggatcaaagagtgaaggattcggaagtcagct

SEQ ID NO: 20047 - DNA, 122 bp, Homo sapiens
gagccgctgacccaccagaggcgccaccaaaccctggagtgttacagttgcctttcctctcgagtagcacaccacaaacagcacagacacaccgcacactgatatttttacagttcagttag

SEQ ID NO: 20048 - DNA, 122 bp, Homo sapiens
aatctgaaggaaatctgctagcaggaatatccttcaggaacagcgcttcacaatgttaaccgctactgaaaagtgttgcaggttcagtccaccagggggcagtgttgtctaactattaacag

SEQ ID NO: 20049 - DNA, 122 bp, Homo sapiens
agggtcgcccgcccctcctcaccgaggaaggccggtaagtggggcgctgggctgggggctcggtcagggtgggggagggccgcccgggcggcggcagtggcgggacggggagggcgcggaag

SEQ ID NO: 20050 - DNA, 122 bp, Homo sapiens
tctccaaggcgtcgacctcccctccattctcctgggcgtcgcgcttccctctttgtttcccgcccttgcggttctgtcggaacctaacgagcttccttccaccgcaaaagagctggagaaca

SEQ ID NO: 20051 - DNA, 122 bp, Homo sapiens
cggcaacaaggaacaatcgcgcccctcctcgccgtagctgcgaacagggctgaccgcccgcgaccgtgccctcagctcatgtccaaacagatatggggagaaaagggtgagacacgcggaga

SEQ ID NO: 20052 - DNA, 122 bp, Homo sapiens
gggagcactttctcctgaattgacattattaattaatctctatgttatgctcccttccatcggggacagaaggtgtattagtctaaagcaatggcttactagatcacagtttagaagctaca

SEQ ID NO: 20053 - DNA, 122 bp, Homo sapiens
cattgttcgcaggcgtaccgagtcccccgcgctcgcccgggagggaggcggggcttcccgcgtcccccaagctccagatcctggggtggctgccacgtctccctgccacgcgcctgggggga

SEQ ID NO: 20054 - DNA, 122 bp, Homo sapiens
agagatgagacaagattaggaacaactataatacagaacagcatgtaatatattagcatgcgagtagtagtattgaaatgttaaagttagccattgcaagaagagaccttttttagctttga

SEQ ID NO: 20055 - DNA, 122 bp, Homo sapiens
acgacgcctgtcagaggccacccctccccagcccaacaggccatggtgttagcctctccacgctacctcccacaagcagaaatgactcggggatggatgagaacgaaccctcatccctgcct

SEQ ID NO: 20056 - DNA, 122 bp, Homo sapiens
gagtcagggtgggggcacaaagcagcccgacagcagctgcccccggcattcccgcggccccgcccccacccatgtccttatcaagtcctggactgtgctcagcctcagtttcctcatctcta

SEQ ID NO: 20057 - DNA, 122 bp, Homo sapiens
tcacagaaaattcaggttcggtaggaagcagccgaagtcactcaggtagttctagacaaccgaaatgcagatttttttgcctggctccaatctccagacttttccattaggcagtgtttata

SEQ ID NO: 20058 - DNA, 122 bp, Homo sapiens
cacagaacagcttcccgcccgccagcccgcctcaacccacctcctctggagctggctttccgcttatcttaatttattgatgaaaacttgttttacggtccagagcacagacggcagcagct

SEQ ID NO: 20059 - DNA, 122 bp, Homo sapiens
gatacccccggccagcggcaccgggaccctccagatctatctcattgacatcaacgacaacgcccctgagctgctgcccaaggaggcgcagatctgcgagaagcccaacctgaacgccatca

SEQ ID NO: 20060 - DNA, 122 bp, Homo sapiens
caaaggatggaaagagccacggagaaagtatctttccggtttttgctttcctctgtgttccgtttccttcccatttacacaggtgcctttagcacgtagatattcacagctctctagagtca

SEQ ID NO: 20061 - DNA, 122 bp, Homo sapiens
gagaaaggaacaagcaaagggaaactgcctgtcctgtagaaattgacatccaggtaagcccgggtcaacacagaatcacaatctcctgcaaagataacaggagctggggaacatacttacac

SEQ ID NO: 20062 - DNA, 122 bp, Homo sapiens
cctttcctggtcaaagaaaggggtgacagacggcacctggaaaatcgggtcactcccacccgaatactgcgcttttccgacgggcttaaaaaacagcgcaccatgtgattatatcccgcacc

SEQ ID NO: 20063 - DNA, 122 bp, Homo sapiens
cctgatctcctggtctggaaggcgtggaatcagagtttgggtgggagtggtgggagtggacgccctcgctcctgatctcctgatctcctgatctggaaggcgtggaatcagagtttgggtgg

SEQ ID NO: 20064 - DNA, 122 bp, Homo sapiens
ccccattacgagctgcccaccagccggctagaaaggggctggagctacgcagctgggggccgtcatgccccagcccacagccctggagcaccggccggggaggactcctcctaaaggataag

SEQ ID NO: 20065 - DNA, 122 bp, Homo sapiens
tccttgtggccaactttattattgtcttattttaagaaattggcacagccggctgggcaccgtggctcacacctataatcccagcactttgggaggctgaggctggtggatcacctgaggtc

SEQ ID NO: 20066 - DNA, 122 bp, Homo sapiens
gatacaaacagaaagtgcatgtattgtaagtgtaccctccatacatccccatgaagtgaacgcacccatgtaaccataatgaagaccaaaaaccaggacactatcagcacccagaaacacca

SEQ ID NO: 20067 - DNA, 122 bp, Homo sapiens
gggatcaataaagtgacaggggatccgtaagtggagaggcccctcctcaggaaatgcgcccgtggaatgctctaccctcttccgcagccagtcgcccctggccttcccaacctcgcggctgc

SEQ ID NO: 20068 - DNA, 122 bp, Homo sapiens
agtagagcacgtaggagttggtgaggtaggggtcggtggtgttctgccccgagaactcctcgtaccaacaggggctcttactgtttggaaggaatttgttggggatgactgaaaacatctgc

SEQ ID NO: 20069 - DNA, 122 bp, Homo sapiens
cccacttttccagattgctctgaatgtcctagtgagctgctcccgttgggtaggctcctgcgcctcaaccgcgctcggtactcgacgtttattatcagggaattctcggctgcaagatggga

SEQ ID NO: 20070 - DNA, 122 bp, Homo sapiens
agggagatggcccgggagcgccggcgccagtaactgggagctgatgagagtcgccgagggcgcgccgggcccaggtgccggggctgcccgccgcccgccgccgccgccgcctgcgcgcccgc

SEQ ID NO: 20071 - DNA, 122 bp, Homo sapiens
cttccttccttcatctggccttggacagagtgaggctgaaaaagcccccggcctagcatccgcggacgaactcgcccaggcaggcccctgcggcctctccggcaaggaccctcccgcctcgc

SEQ ID NO: 20072 - DNA, 122 bp, Homo sapiens
agggagagagaggtgggcagatctgggtagagtcaacagattttgttggatgcttggatgcggagtctgacctaaaaagagaagtcaagagtaaattcctagaattccggcctacttgaatg

SEQ ID NO: 20073 - DNA, 122 bp, Homo sapiens
ttggaaataaacacgaaggttcacttgaagacttgggggagaatcacggtcaacttgtgacgcttggtttttcagatattcagctgctctggagagccttggagttccagctgctctagagg

SEQ ID NO: 20074 - DNA, 122 bp, Homo sapiens
cggcagcgccgcgaggcggggcaccgtcagggcatagagggcgctcattggccgcgcggccgcaccccgtgaacttggccccatgggagctgcagtcccagctccgggctcccgggggcgca

SEQ ID NO: 20075 - DNA, 122 bp, Homo sapiens
agcagctgggttcggcgttccaagcctctcctctttgctttgcctgccaccagatctgagcgccaggctggccagcacccagagagcccagagccgcaggaaaaaatgtgaaaagtaccagg

SEQ ID NO: 20076 - DNA, 122 bp, Homo sapiens
tttgttctacagaaaatcatgtggacaaaaccattgtcatgtgtagagatgatcaaagaccgactatgcaaccaaaaaatgtagaaaaagattatagatgaggatgatgataaaggtatatt

SEQ ID NO: 20077 - DNA, 122 bp, Homo sapiens
ttgggatattatatagattccatagtatacccttaagagtcctgatatcacttttgaaaacgttggattccaaatagtgtttctctattgatgtttcagagcctctggagattcagcgatcg

SEQ ID NO: 20078 - DNA, 122 bp, Homo sapiens
ttccctggagccgtgtcctgggagagggactaagcctgtgttggggaggtccctgtgcagcgtctctcagctgagcaaagggcattgcaggggggcctcctgtgccaaagctgtggagtgac

SEQ ID NO: 20079 - DNA, 122 bp, Homo sapiens
aagatgggcgggtgtgggaacagtggtacgcccccattcctgccttccagagagaacgtgcgacagcgttcctgctacacccggcagccggccgtaggggcgcgctggaaaggctgctgcgc

SEQ ID NO: 20080 - DNA, 122 bp, Homo sapiens
agagcaaattagattttagaaaagttaagtcactagctcaaggttactggctccagttgccgcccttctatcatcatccttttctaatgtttttgggccagaggggacactattcccttccc

SEQ ID NO: 20081 - DNA, 122 bp, Homo sapiens
aaataacaataacaaacaacacagggcttagcttgagccagagtccgagaccaacccccacgacgctacggggaggtttggatatgccccaaccccttgctcccttcctccatcctcttgtc

SEQ ID NO: 20082 - DNA, 122 bp, Homo sapiens
tggcgccgccgttaggagggtgtgaacgtatctattttcaaagatacccgagcccctcaccgcctgcagcagggagatagtgcccgggctatccccgcgggcgggccggctgggctgggaag

SEQ ID NO: 20083 - DNA, 122 bp, Homo sapiens
gtaaaatagagattcacccacaaaatgtaatagtaaagtttcaagaatgagaatggcagacgaagttttaggagaatgtctgttgctcaagtgaggcattcagtagaaagtagtggaaaatt

SEQ ID NO: 20084 - DNA, 122 bp, Homo sapiens
gaggcgggcgcgggggccggggcgggcccgggaggtctgcacagctcggtggtgggcacccgatggcgcgcttcggccgtcgccgcgtcgcggccctttaagtctctcgcggcgccgccccc

SEQ ID NO: 20085 - DNA, 122 bp, Homo sapiens
ctgtacagccatgccacgctacccctgagagtctagaaagctggtcactaactttgcagacggatgagccttgagcacccagaggagactggggctgtcaacgctgccccttgtcctgccgg

SEQ ID NO: 20086 - DNA, 122 bp, Homo sapiens
tgggattacaggcgtgagccaccgtgcccggcctttcagtttaatttttattggatttaacggaaataagaaggaaagcagaaaaaattgctaaacctcagaaaaaggttttttacaagaaa

SEQ ID NO: 20087 - DNA, 122 bp, Homo sapiens
ctcttacaatgtgataattactgctatcatgcccattttataaatgagaaatctgagactcggaggttaagtgacttgcccaaggtcaccagtctggagctggcacagtccttggagcaaca

SEQ ID NO: 20088 - DNA, 122 bp, Homo sapiens
acagcgagtgaagaagccccggagggcggggttagtggtgggcactggagggcggccgtccgggacctaacccgggggcaagtgcagagcactttgcagaacacgggacgcccccacccggg

SEQ ID NO: 20089 - DNA, 122 bp, Homo sapiens
gggataaccgtgtccgtgtctgtctgtgcatcagatcagagggaacgaagcgcgctcccccgcctaattcctccccttccctggaatgtccacgagttcctgctaatgctattgtttgcttt

SEQ ID NO: 20090 - DNA, 122 bp, Homo sapiens
tcggccccacaaggtcaagaaaagggactcctctccgcccaccttagaaagggcctttcgcgtggagcccagacgggagacagaagctcagtctgggcatgaggaaaaagagttaataacgg

SEQ ID NO: 20091 - DNA, 122 bp, Homo sapiens
ttccttttctctccccgggtctgagctccctggcccgccactcacggcagtcgtcctcgtcgctgtggtctaagcagtcatcgtcctcgtcgcatctccacacagaggggatgcagcgctcg

SEQ ID NO: 20092 - DNA, 122 bp, Homo sapiens
ctcaggcaatccacccgccttggcctcccaaagtgccagggttataggtatgagccactgcgcctggcctaatttgcctttcttaaggtccagtctaatttcttagtgcccctggatgtgtg

SEQ ID NO: 20093 - DNA, 122 bp, Homo sapiens
tgcaggtactctacatgtccagagtgagacacagatgggcagcattatcttagagaaaaccgggaacattcttaactgaataatgtaaccatgccatggaatattatatgtctgtcaaaatg

SEQ ID NO: 20094 - DNA, 122 bp, Homo sapiens
atcttgacagaagcaaggcagatttacaggtgaacttgagtatttatgtgaagttaaacacgagaatgttgatgatcccaactttgaaatgtttatgtttgtgaagaatgaatgaagtcatg

SEQ ID NO: 20095 - DNA, 122 bp, Homo sapiens
aagaccttacagcgcgaagaagcgggctttagttaatcgatttcaaacacgcctgtggtgcggctcagtgaccccctccgctcggctgagtccgcttggacttccgctccggcgcttgagtc

SEQ ID NO: 20096 - DNA, 122 bp, Homo sapiens
ctatcgtaggtcaggtctggcctgtcttaaacgggtaacaagtggcccctctgggacaggcggtgcagggccccagctgtgaggcgtgcgtcccttcttcttaatttcaccgacacggctgg

SEQ ID NO: 20097 - DNA, 122 bp, Homo sapiens
gtgccacctcctagaacacacggagcaggccaaacatgtcagtgtaggatacacactgtacggcctccctgcttctggccaaaaaggtcaaaatggggctgatgggataagagacttgctgg

SEQ ID NO: 20098 - DNA, 122 bp, Homo sapiens
aaagcaaaaagggcttctgtcgtgagtggcacacgtagggcaactcgattgctctgcgtgcggaatcgacatcaagagatttcggaagcataattttttggtatttgggcagctggtgatcg

SEQ ID NO: 20099 - DNA, 122 bp, Homo sapiens
aggggaaggttgtgaagacttcggttgtgttccaccaactggggacagccatgcctatgtcggtggaggaagggcctgagtgccagggacctgtggtaagctaatgagatcaagaactggct

SEQ ID NO: 20100 - DNA, 122 bp, Homo sapiens
ctgggctggtgatgaaggtcaagcaggagaagccggagcggctgctgcagacgctggcgccgcaggccatgcttgtggagaaggacaaggagaacatatttcagcagcaccggggcctcccg

SEQ ID NO: 20101 - DNA, 122 bp, Homo sapiens
aagcagtcctcccaccctaacttcccaaagaactgggattacattatttcatttaagccacgcaacatccctatgaagtagaaattattattcctgttttatcgataggaaagggaggccaa

SEQ ID NO: 20102 - DNA, 122 bp, Homo sapiens
aaagagactgctttcgtgccggccaggcagggggtttgtcgcctggaggcccaagaggaacggcctccccccaacttagcgggttatgctggaccgggcggtgaggggaaccgaggccaccc

SEQ ID NO: 20103 - DNA, 122 bp, Homo sapiens
gcctgtaatcccagcacttactttgggcgccgaggtgggtggatcacgaggtcaggaattcgataccagcctggccaatatggtgaaaccccgtctctactaaaaatacaaaaattagctgg

SEQ ID NO: 20104 - DNA, 122 bp, Homo sapiens
gacgcctatggcatggtttctcttctatctcttctaccttcagccaactctggtgtgtgtcgctggaataatatcaggccccctgaggtggggcaggagataatgggggaggcttggggagt

SEQ ID NO: 20105 - DNA, 122 bp, Homo sapiens
tttagcaatcaattagcacagtccccaggctccgggcctgcacactcggcagaaagaatgcgtcctgctgcactgattagaaacagatgcgctggcaaacagagctggccgagcagggccgg

SEQ ID NO: 20106 - DNA, 122 bp, Homo sapiens
ggacggtgggggggtcttcctcgagatcgggggtcgcgggaggctctgcctggcgcgtggcgtctggcatccccatctgtcctcccaaagggcccgggcctgctggattagcactgccaggc

SEQ ID NO: 20107 - DNA, 122 bp, Homo sapiens
gaaagggagggaaaatgggaaagatctgagcagggcatgttgctgcaacgctgacccactcgctggccatcagggtcctgccccagtagacctctgagattctaatgcagggctgcagctct

SEQ ID NO: 20108 - DNA, 122 bp, Homo sapiens
ggtatagtagctctagactctattatagtttcctgagctgctgtaccaaaataccacaaacgggctggcttaaaacaactgaaatttattctcaatagttgaggaggctgtaagtctgaaat

SEQ ID NO: 20109 - DNA, 122 bp, Homo sapiens
gctggcgagcacacctgcagtgtctgtgagggtgctgccatctgtcactgagggccaggccgggacaggtgccacacgtgcaatgtgagggctcaacacacagccatttccaaggctgtgct

SEQ ID NO: 20110 - DNA, 122 bp, Homo sapiens
tggcaggtttcttggcccctcgacaccggcctctgttgcagccctcactggaccccctgccgccgtacatcctggctgaggcccagctccgcacacagaggtactggggcccacactgccgt

SEQ ID NO: 20111 - DNA, 122 bp, Homo sapiens
aaacaaccatggccctggcccacccgccacataactaccactcgtccctctgattaagaacgtcaagcacggaatgggccatgcccagaagatctggaataatcagcatcagcgttttgcct

SEQ ID NO: 20112 - DNA, 122 bp, Homo sapiens
tgaggatggagagactcttgtcactcagcttcaaggtgtaggccaagcaggtgatgaccacgccgaaaagcaggatggcaccgcccactgacatgataacgatgggcttgcggtagatttcc

SEQ ID NO: 20113 - DNA, 122 bp, Homo sapiens
tcaggtgtgtaccggctcaggtgtgcactggctcaggtgtgtaccgtgcactggctcaggcgttcactggctcaggtgtgtaccggctcaggtgtgcaccggctcagctgtgcaccggctca

SEQ ID NO: 20114 - DNA, 122 bp, Homo sapiens
ccgaggcgggggctgggatcgggagtctcgcggaaggagcctgttggctttgtttggaaccggggttaaagtcaccagccgctgctaatacccttgtgtctgtctctgagcatccgtgtctc

SEQ ID NO: 20115 - DNA, 122 bp, Homo sapiens
ggctccaccggggacacggagcggcccaggcggcggctgcggtggcggctgcagggagagcgcggccccgcctaccggggggcgggcgagttggaggccgcagcgctccctggcggccgtcc

SEQ ID NO: 20116 - DNA, 122 bp, Homo sapiens
gaataataacggtactcagattcctctacagtttattgttatagcagaagttgtgggagacgggagggcaccctccacacatactacagtgtggtcagagccccagggtagccctttccacc

SEQ ID NO: 20117 - DNA, 122 bp, Homo sapiens
acttctctggggattgagggggagtttgctgtaccgggcctgccggggctctctgggccccgccctggtagctgaggccctggggtgctgcggcctccaggttatctccccactgcaggcac

SEQ ID NO: 20118 - DNA, 122 bp, Homo sapiens
tccttgcccggctgggcccctcctcttctcacacagaggcctgggcactgggctatgttccggaaattccctgcacaaagccccattcagtgggaggagggccaatgcgtgtgctttggggg

SEQ ID NO: 20119 - DNA, 122 bp, Homo sapiens
ggccaccacaggctggggcgggggcagcaaatacgatttgctgtataattagtttccaatcggatggactagccctgggtttgtgtgccaggataggcctctggtttcttaaaggaagtgtg

SEQ ID NO: 20120 - DNA, 122 bp, Homo sapiens
gtctgcgcccctggcttgaacgatcttagcagcgccttcctgggctcaggatggacgcaccggccctctggagcgcgcggcaccgataacggcgtcgtattctggggctttccctcttctgg

SEQ ID NO: 20121 - DNA, 122 bp, Homo sapiens
tcttttagaataatctaaggatgagggatgaggtagcagagaaagaaaggcagacatcaacgtgacattagtgtttcaaggctatgagaatacaccaataatcgtgtgtgtgtgtgtgtgtg

SEQ ID NO: 20122 - DNA, 122 bp, Homo sapiens
tctgagcctgcccccttccctcccaatgcctctggaacacagccactatcttgcggtccccgtccctagcttgctccattctgaggccctggagggagggcataccacaccactcttctctc

SEQ ID NO: 20123 - DNA, 122 bp, Homo sapiens
tgaaaccactgtaataagagactgacataaactcaaaccccagtataaacacagtctgagcgaaggttgcggccttattatcactcttaacaaacaataatgaataatcataccgatcgccc

SEQ ID NO: 20124 - DNA, 122 bp, Homo sapiens
aacttcaaaaacaacatatatgtaatcctacatttatgtcattatattatagctaaggcacgtattttagcagtagcaagaccttaggagaaaacatgatagacggtggtttttcgttttta

SEQ ID NO: 20125 - DNA, 122 bp, Homo sapiens
gcgccaagagctggctgagagcgagagcatgcctggattcttctgaggcatcaggaaaagcgttttgcatatttttcattgcctttctttttttttttttttttttaacttttgcctcagaa

SEQ ID NO: 20126 - DNA, 122 bp, Homo sapiens
cttgagaagggcaagcaccaaaactgttttccaagaaagatttgtcatggtctatatagacgtctagttgtccctcttgtgacagtaccattaggcaaggttacaggggctttatgggaccc

SEQ ID NO: 20127 - DNA, 122 bp, Homo sapiens
agtctcctttctcaccctaatccctataatgtgaggtgtgctagttacttctaggggcatcggagactgtgaaggagagccaggagggagggttgggggtctcctcaggagttgtgagcctt

SEQ ID NO: 20128 - DNA, 122 bp, Homo sapiens
ggacgcagcggggctgcgctcagacgctcagggcgcgccctcggggtcggggctccctggcgaagggagtctgtctgtcccaagccgctttcgttccagaaaacgtgccagagggcaggccg

SEQ ID NO: 20129 - DNA, 122 bp, Homo sapiens
cgccccatgatcgagtgtaatgagtgccacacctggattcacctgtcctgtgcgaaaatccggaaatccaatgttccagaagtgtttgtctgccaaaagtgccgggactccaagtttgacat

SEQ ID NO: 20130 - DNA, 122 bp, Homo sapiens
gagcttccccactgacttgcccggtgtggtaaattcatagacacagaagttccttggaaacgttctgcctcggtttcatctgtaaaatgagggcaaaaatccctgccttatgggattattgg

SEQ ID NO: 20131 - DNA, 122 bp, Homo sapiens
taaatgtatgtctaaaaacatctataaatgtgacttcactggttagctgtctcgttgatacggtgatgtgggtcttcagcctggctttctttgtatctcggtacatcaggtctcaatggcaa

SEQ ID NO: 20132 - DNA, 122 bp, Homo sapiens
ctcagccgcgacaccacctcgagccacccccacagggctcctacctccctgcaatgcgagcggagggatgcacagcctagccctccctgcctgtcaagggcacgcctgtcgtcacttcctcg

SEQ ID NO: 20133 - DNA, 122 bp, Homo sapiens
gttcttccccgcgttccctctgtggaactctcggtgtccagagtttggggtgtagaagggcggatgaggagcgacgcgactctgaagagttgcagttgggctgtgagctgcaggatttccgc

SEQ ID NO: 20134 - DNA, 122 bp, Homo sapiens
ggctcaggctcagagctggctgcatccacgcagctcccgggtgcctactttctctcccatcgcaccccggtgtatttttaaaaggtccaggaaggtggcaggggccaagcaaagacaaatca

SEQ ID NO: 20135 - DNA, 122 bp, Homo sapiens
ttgtgctcgttttgcaggcccagagctcctgctgctggttttctcctttctctccttcatcgcctcttccttcgccactttccttctggaccctccgggctggctcctgcccctctgccccg

SEQ ID NO: 20136 - DNA, 122 bp, Homo sapiens
gcagccttttgtccctgcaccagcgcacaggctgctgccccgcccctcctctcctcgccccgccccgctccaccgagatgggggctcccctgtcttaaggctctgaacaatctgcagccagg

SEQ ID NO: 20137 - DNA, 122 bp, Homo sapiens
aggcctggcgacttcagacaggaaacgctgtccagttccccttctttcccgcctcgctcccgggctggcgctaacgcccacctcccaacagcgccacccgctggcggatatcctgcaccgcg

SEQ ID NO: 20138 - DNA, 122 bp, Homo sapiens
aagagaggcagcaagaggcactttcttctcgtttctctcttattaaaatctgcccccagccgagtttccctaacattttgcttgctagagcttggtctcatgcccaccctagaccaagaaga

SEQ ID NO: 20139 - DNA, 122 bp, Homo sapiens
gggaccttgccagtgcgtctgggactcggggaccacacccgccaggtgagcggggagcagcggctgagaggttagctacaaataataaaggtaatagcgatccttgactgcgtgctgtactt

SEQ ID NO: 20140 - DNA, 122 bp, Homo sapiens
cagcgcgcgcatcccagggattgtgggctttgtagtttcgctagggctcagggggtccgccgtgcaggaggggagacggagggggatgggaagtcttcattctcagaaggccgggctccagc

SEQ ID NO: 20141 - DNA, 122 bp, Homo sapiens
gctaaggagtatctgcccaaggtcgcggccacccagatgttcggtccccactccttcctccgctgaaaagtcgcaccgatgactaacgttgcctgccggcctggtggtttgaaaacgaatgc

SEQ ID NO: 20142 - DNA, 122 bp, Homo sapiens
cctcacaggactctggtgaattgcataagtgaatggggtggcccccggaacagagtcatgcgtgatgagtaagcagatatgcagacccaacctaccatggggccattgctcagggagctcag

SEQ ID NO: 20143 - DNA, 122 bp, Homo sapiens
cctcgagctcacattggtcctggcagccttcccgccacaccaaccaaccaatagacagggcgattctgcgctcccggccctgctgcaggctgtctcgcacttgtcattggtcactgcagccg

SEQ ID NO: 20144 - DNA, 122 bp, Homo sapiens
aaagagcctttgctgttaggctgattttgtctgctgacagaaaaacagcagtgcatgaagcgttaactcttcactttcccttggccttatgatggctctcagttttcttaggcagcagcacc

SEQ ID NO: 20145 - DNA, 122 bp, Homo sapiens
cacgcaagggcagtcatttgttcctatccttgctgcccactgaatccagggcctatagctcgctgacctactaggtgcgcgcctaaaggcatgcctggagggcctgggtgcgggcacgtgga

SEQ ID NO: 20146 - DNA, 122 bp, Homo sapiens
ctggctgcaaggcaggtcctcttctatcttactgggcactgctaaactgcgaagtcggggcgacacggcagcaactttaaaatcaaaccgcatccccaagggctcggcgtgttttttggcct

SEQ ID NO: 20147 - DNA, 122 bp, Homo sapiens
agaatgtgcaaaggccctgaggctcagaggtccacagcactaaaaggtggccagtgtggccggagctctcagagcaagggccaaggtggtgggaggtggggctgaggacacagccaggggct

SEQ ID NO: 20148 - DNA, 122 bp, Homo sapiens
cagaggcagagcgacgcctctggctctggtctagtggtgcagcgtctctagccctcgccccgcccaccgtccccgcgaggcgtccactcgccgagccccgccctcacccagcacccaccccg

SEQ ID NO: 20149 - DNA, 122 bp, Homo sapiens
gcaagggattcaggatgagacaatcacatcttgtgccccattaaaagatgataggccaggcgtggtggctcatgtctgtaatcccagcacctgggagaccaaggcaggaggatcacttgagg

SEQ ID NO: 20150 - DNA, 122 bp, Homo sapiens
ccacccgcatccacccctccaacaaccctttcgtagccctcgcccctagtccatagcaggcgctgccctacccagtccttgccggacacaccgcgacccctttcgtgctcccttgacaaccc

SEQ ID NO: 20151 - DNA, 122 bp, Homo sapiens
gtgggtaagagccaatgccggcaaggtgaaggctgcgcggggtgggggcgacgcgactgccgcccgcccacccgcaggccacggcggagttgcaccgcggggcggggctcgggtaggtgtgg

SEQ ID NO: 20152 - DNA, 122 bp, Homo sapiens
ggtgaaggctccgatgtcttatcgggacaaatgagcatgacagtcccctctagccaacgccggttgctccaaggggtgcaggtgacatctcagaagagtctttgtctctgctgcctggaggc

SEQ ID NO: 20153 - DNA, 122 bp, Homo sapiens
aacctgccgtatttcactgcctcttaagtgtactctcagtctgtatcctactagctcagtcgtatatcctacactatttctactatgccaaacttcattacccttaacagacctttgcagtg

SEQ ID NO: 20154 - DNA, 122 bp, Homo sapiens
atcccattgctccattggatggagcaaactgctccgcagtttgcttatccattcaccagccgatggacatttaggttactcataggcttttgctattacaaataaacccgctataaatattt

SEQ ID NO: 20155 - DNA, 122 bp, Homo sapiens
caatgtggatgaaccgtgaagacacggctcccagtgagaggagccaggcgagaagggccacgcggtgggattcccttgatgtgaagtctccggaacaggcccttctttagagacggagagcc

SEQ ID NO: 20156 - DNA, 122 bp, Homo sapiens
gcacatccatccggggcgcgaggggaggggacccggcccggccccttccttctcctcctccgccaactggagtgagggtcaggcacttgtaaccgcgagtgacgccttctccctgtaaggcc

SEQ ID NO: 20157 - DNA, 122 bp, Homo sapiens
ggtctccaggctgagtggagccccagcccttcccagccagaatggaaatgagtgtttacacgtcaaatcgacgaaagccatctcttgacgtcagatctacctggactaagatccgaatggta

SEQ ID NO: 20158 - DNA, 122 bp, Homo sapiens
aaaccttatctcaggcctctctgccgccactcatccctgcttgtaaatgtgtcctccacacggttgtcagcaccatatttctaaaatgcaaatctggcaagtcattttcttgctttccctgc

SEQ ID NO: 20159 - DNA, 122 bp, Homo sapiens
tggaatcatacaatccgtggtcttttgtgaatggcttccttcacttatcgtgatggttcccgggttcattcatgctgtcctatcggcacttcattcctttctatggccaaataactacctca

SEQ ID NO: 20160 - DNA, 122 bp, Homo sapiens
caagagaggggaaagtgaggtatggtagatgtcaaccttccatgtggattttcttcagttcgctcaatagtaactagagtgacactctatcacctgtctgtccccagatactgcaggaaaga

SEQ ID NO: 20161 - DNA, 122 bp, Homo sapiens
cctgcgggcgcggcggggcactgtggggccgggatgggctcccacctgcatgcctgtccccgcaggtgtgacgggcagcttcgcggagtgcagtacagcaccgaatcgctcatggaggagat

SEQ ID NO: 20162 - DNA, 122 bp, Homo sapiens
gaagggaacccttgggcagcggctgctgcagagctgctctgggagtgggccaggaggccccggcagggtgcggcgcctccgctggggcctgggaagccgcgtcccggcctccgccctccacc

SEQ ID NO: 20163 - DNA, 122 bp, Homo sapiens
aaataatacattcatactttaatggcgaagctgattccccatggctcagccacccactgccgctctgtaatatttcagcctctccttaggcgaaagaagccattgttctgagcttggcacga

SEQ ID NO: 20164 - DNA, 122 bp, Homo sapiens
tattcccttcatttataacccccctggaaaggtacatccccagttttccaaggatttccacgtcgtttactcttcttttttccaaaatagtttcaagtttattcagaatccgtttttattga

SEQ ID NO: 20165 - DNA, 122 bp, Homo sapiens
aacttatcatttaaccgagagaatcaagttgttgagactggcttttcttccaaccggatacgtgatgggtggagcaggcgccccctgttctgtcccagcaacctactaagacttccgaacag

SEQ ID NO: 20166 - DNA, 122 bp, Homo sapiens
cgtcgccgccgcgtgccgggaactgtcacgcgagtccagccaggttgcatcagctgggctcggcgctccgcttactcggcctggacccctccggcagcggccggaaaaagtgaggagcagca

SEQ ID NO: 20167 - DNA, 122 bp, Homo sapiens
aaattggacatcagcaatatttaaaacttttttgcttcagaagacactgtcagccaagtgcggtggctcacaagtgccaaaggtggcaacaacccaaatacccacatactgatgaatggata

SEQ ID NO: 20168 - DNA, 122 bp, Homo sapiens
tagattttagtggggcaattagatactgaaaagggacacacacaggacagctgaagatagcgttacattctacaaaacaaacaataacacaccgtgtactggttgggatagcgtcctcccca

SEQ ID NO: 20169 - DNA, 122 bp, Homo sapiens
ggattttttattcaaacagtgatgtgggaaaatgtaaaatgagatgggggtggagggccgcgtacaccccagggtgggtggatacagggagagcaagcaggcttcccaaatgcctaatgtaa

SEQ ID NO: 20170 - DNA, 122 bp, Homo sapiens
tgaggtagaaattccaggcatacagttaacctactagttcttgccctgttgtgtgttcagcggcgttgtccgggcgggctacctcagactccgcaggaaaggttccggacaagtcctgctaa

SEQ ID NO: 20171 - DNA, 122 bp, Homo sapiens
gctttagggggcggggcacaagagggggctcccgctctgggaggacacggctggggatcacgctttgtagacccccaggagtagccaggcgaacggggacagagccctgtggatccagggca

SEQ ID NO: 20172 - DNA, 122 bp, Homo sapiens
ctaataggaacatgaaaggagaaactagaaaaggattccacccctgtgatatgcacggaccggcccagccacccatgtggacgctctgtctctccgtgtctgcttctctttctctcttctct

SEQ ID NO: 20173 - DNA, 122 bp, Homo sapiens
gagagccaaaaaaaacatgcctgtgggctgactgggcacatgagcctcttcactggtctgcgaatgtgcagggcctgctctcacttcagggcctctactgggaatccccatcctgggatccc

SEQ ID NO: 20174 - DNA, 122 bp, Homo sapiens
attcgcccctctcggctcgaaccaggaagcgcttcccttccgatctcccaccccgccccccgccccccacccgcccagccccgccgacccccgccctgcgcacacgcccttggcgggccctg

SEQ ID NO: 20175 - DNA, 122 bp, Homo sapiens
agctctaaggggcacgctctgcagttgagctatttgcagagctccatgatcgctcaaagccgagcacgcgcacgggtttgctactggcaccagcacaaggctttagacaggcacttcccacg

SEQ ID NO: 20176 - DNA, 122 bp, Homo sapiens
ggccagcacagaaccggtgatgccgcggtgtagacacagggcctggacctccagaaccagcgatgccccagtgtagacacagggcctggacctccagaaccagcgatgtcgtggggtagaca

SEQ ID NO: 20177 - DNA, 122 bp, Homo sapiens
aaagcgcttggtgagcgtcgggactgcgcaggttcctcgggaggtggctaaactggccaccgcctctggggccgcctaaagcaagtccgttaaccactagtcagggaggaatactgtgtttg

SEQ ID NO: 20178 - DNA, 122 bp, Homo sapiens
agttcaaaagttaagaaggtttgtgtctagtggtcttggctgaagaggagtggaagagaccgggtcagttttacagcccgcccccagaggacagttggttacaaaggaggggccagcgcttg

SEQ ID NO: 20179 - DNA, 122 bp, Homo sapiens
ttccgcgcgccttcgacacccgtgtcgagccttctcattggtcccccctccaccaaccagcgccccctttgttgggtgaagcctctgggctttaaccaatagggacacaggctcttggtttg

SEQ ID NO: 20180 - DNA, 122 bp, Homo sapiens
gtccacgcctttccgcaggcggcggaaagacgcggctggttctgttgggtcctacaaactcgcgtcctccggaattcccgagggcaagcccggcacgcgcgagcgtgctcctgcccgtggaa

SEQ ID NO: 20181 - DNA, 122 bp, Homo sapiens
agacagcgacccggtagccaagtcccgtgagaatccagccaccggcggcccgagtacatgcgaataagcctctgagcttgagccaacccccttaccgagatgacgcagcagcaggtgcgggt

SEQ ID NO: 20182 - DNA, 122 bp, Homo sapiens
caactggtggcagtgcgaggctctggggagagtgcattcggtgccctctccttgcccgcccgggcagcagccaggttgggctcggctttgtgtccacagctcttagggttagagaatgacgg

SEQ ID NO: 20183 - DNA, 122 bp, Homo sapiens
caacctgagcctgccctctgatctctgcctgttcctctgtcccacagggggcaaaggctacgggtcagagagcggggaggaggactttgctgcctttcgagcctggctgcgctgctatggca

SEQ ID NO: 20184 - DNA, 122 bp, Homo sapiens
cacagcactgggtgcccctctccctgtagagtctggggcggggctcagtaagaaggcctgcggttggtggctccccacctcatagctgcaagtaggggcgaaagctggagtgtctcctccca

SEQ ID NO: 20185 - DNA, 122 bp, Homo sapiens
gttaaacgactgcgtctccctcactgcaaaggacagtgtcgcttgatcccacgtgttaaacgactgcgtctccctcactgcaaaggacagtgtcgctggatcccacctgtgctcttaaacga

SEQ ID NO: 20186 - DNA, 122 bp, Homo sapiens
acctccgcgcgcagcactcaccatagctcgcgtgctccgccccggcttcgcgcagctccccgcgcccggctcccgattcccagctccgggttccctgctcccagcccagctgctcggacggc

SEQ ID NO: 20187 - DNA, 122 bp, Homo sapiens
cgacacgctgccgagcaccttggtgtccgtgccgcccagggactccggatccgagtgcgccgagctgggatggtccgaatctgctgcttggtccggactcagcatcattttggaggctgagg

SEQ ID NO: 20188 - DNA, 122 bp, Homo sapiens
cttcgtgaaaacccttaccggcaagaccatcacccttgaggtggagcccagtgacaccatcgaaaatgtgaaggccaagatccaggataaggaaggcattccccccgaccagcagaggctca

SEQ ID NO: 20189 - DNA, 122 bp, Homo sapiens
tccgctcgtggggctgctttcagggccagacgcacggcgagctgtgcacggacgtttttgcggcgattcaggggaaacgcacgcggacccggtagccaaggccaaagtcggcgcagcgccca

SEQ ID NO: 20190 - DNA, 122 bp, Homo sapiens
cacaggaccggaagtgaccctctttatttcccttcctcacgtggtgcaggcaggaagtgacgcgcctggcccgggagctgcggtcgcagaggccgacggagccggagtcgcggacgccgcgg

SEQ ID NO: 20191 - DNA, 122 bp, Homo sapiens
gccagaggtggggacgaccctggtgcgttctgggagccggcagtgcatcctgggctgcagcggagcgagagagaggagcccagagccggcagcaggagtttccgtttccctccgagtgcatg

SEQ ID NO: 20192 - DNA, 122 bp, Homo sapiens
agtcaggttctagccgcagaccactgtcaatcaataactaaggggtgtggtgggagtcgtcggaggtgactggggagccccgcaaaggaatagccaggccctccttagactcgttctgccag

SEQ ID NO: 20193 - DNA, 122 bp, Homo sapiens
tttcaatccaaccctgggtcctgggcacctcatagttccaaatccctgctatgcacatcccggctgtgatgcctgggacaggtcctgtcctggctgtgatgcctgggacaggtcgtgtcacc

SEQ ID NO: 20194 - DNA, 122 bp, Homo sapiens
tttgggcggagggttgggggcttatgctgccaccctccagcagtgtggacagagttgatgcggagaaaaaagttagctcaggcaagcagtagtttagctgggataatgatgatggtgttaga

SEQ ID NO: 20195 - DNA, 122 bp, Homo sapiens
agaagtttggcattttaaggaagcccgatttgtcggtttcttttgtgtgctgtgtgtgtccggtttggacatcctctgcccctccgagggcgtgaagttgccccctctgtgtcgctcagatg

SEQ ID NO: 20196 - DNA, 122 bp, Homo sapiens
agaagagaggcacagaggtggccaccacccagggggccacgagcgaaatctgcagcaggtcggtgacgaggaggttaaagataaaacggttggtcacctgcagcagctgcggcttgcgctgc

SEQ ID NO: 20197 - DNA, 122 bp, Homo sapiens
tgcaaaatgcagaatttggaagtgcctgagtgggttttggagggtggcagggttccaggccgaggccacagagtctagagttacaggacttgggttgtggtgaggaacttcagagtcactta

SEQ ID NO: 20198 - DNA, 122 bp, Homo sapiens
tggcctttctccctgggcttccacgccggcttcggccatcgatacgggccgtgttggtctcgttcaggagctgaggaaccctccatcactcctgtttcgaccccagggtttggacctcttcc

SEQ ID NO: 20199 - DNA, 122 bp, Homo sapiens
gtgccgacgggagcacggctgatctggaacacaggtgattcacctgtcactacagcaacgcggtctagaaagattcacgctatgtcacaggcaatgccatctggacacccacgtttcccctc

SEQ ID NO: 20200 - DNA, 122 bp, Homo sapiens
ttcagaccatccatggacgtgtcattgccgtgaaagcagaaagtggtgaggttggagcagcggctcagggcaggcaggatgaccctgagtttggagtccccaatcccacagtccactaagaa

SEQ ID NO: 20201 - DNA, 122 bp, Homo sapiens
gggcggtggcggtgccagcgcgcgtgcgtcgaacggctagggcgggtggctagaattctgcggtgaatcagaaaagctgtcctgatttcctctcgctgtatacctggagccggcgagcgcct

SEQ ID NO: 20202 - DNA, 122 bp, Homo sapiens
cacctgccaggtgcagcagctgcagctgcccaccctggcctccgaggagcaggggctgcacgcagctgggccggggcggaggcagcagtcgggccagcaggagcggggaggggaggccatgg

SEQ ID NO: 20203 - DNA, 122 bp, Homo sapiens
gttttagggcaaaaagggggagctgttattccctttgtggttaccatggcttcccaaggtcgctggggctctcagaaggccatgattccaaattagatcagtggtctggactaggccatgac

SEQ ID NO: 20204 - DNA, 122 bp, Homo sapiens
ctggtcctgttttagaaggctgttgtatcttggcctctgctagcttcaaaaactaaggcccgatgaggtagctcgtgcctgtaatccctgtttacaggagaggctgaaagggcagggattcc

SEQ ID NO: 20205 - DNA, 122 bp, Homo sapiens
tcccaatttcactttgtggctctattacatcaataaccctactgtgcagtactcatttggcggccttcaaatcttcctagccaggccacatactcattaagcccaggaatgtgtctatttac

SEQ ID NO: 20206 - DNA, 122 bp, Homo sapiens
tggcgtccctcccggggccccgctctggatgggtcccgcgggtgaccaggcgcgacatcccggcgtagagccgagtccagccagcgccccagctccatggtgtctcccgagcgaggacaccg

SEQ ID NO: 20207 - DNA, 122 bp, Homo sapiens
aattcacatggaggactgtatggagcgtttacacccggatagttcctccggatattccagcgtgcacccgaggccatgctggaaccaccgaaagctgtgtactctcactatactgctttgct

SEQ ID NO: 20208 - DNA, 122 bp, Homo sapiens
taaaggaaaaaaaaaaagtgtgcatacaatgcatttccaatcgttacctgtgtctcctgacgcaaactggtatcttcacattctttctcaatttcttccttacttggagtcttagatataaa

SEQ ID NO: 20209 - DNA, 122 bp, Homo sapiens
ctggggggagggtgtttgtccccacgcaggggctgagaagactcctgacagatcaaatgacgattctcagggatatgttttagctacaaacctatgagaaccatctgaatgcctgccccatg

SEQ ID NO: 20210 - DNA, 122 bp, Homo sapiens
gaacccaccgcaaggaacgaacaactccagacatgccgccttaagagctgcaacactcaccgcaaaggtccgcagcttcactcctgagccaacgagaccacgaacctaccagaaggaagaaa

SEQ ID NO: 20211 - DNA, 122 bp, Homo sapiens
aaaaaagggaatgtggtgtttagtagccaggaggtctctagttgcattagaccttgccatcgtttggtgagggaggtagtattatcttgttttacagaaacttaaccaagtttacctgctag

SEQ ID NO: 20212 - DNA, 122 bp, Homo sapiens
agccccgggtgctgggtgaccccctcagctccaggtgtggctgcaggactgtcagcctcccgggggtgacatggaaaggtgaatgtatttgcactgcgcctttcattctgtaacatctgtgt

SEQ ID NO: 20213 - DNA, 122 bp, Homo sapiens
ggcgcccgaaggagaccctggagcacggaggattgctgcgggatctggcagtccccttgacgctacagctctttttctctctctgctttctttcccagactgacagggagagtggattctgc

SEQ ID NO: 20214 - DNA, 122 bp, Homo sapiens
ggcagcccccaaacccaccccaactctgggccggccctgtcctccccaccccattagatccggagaggaaagacaggagccacgtgaatctacagtacatcatggcagggcacattcccctt

SEQ ID NO: 20215 - DNA, 122 bp, Homo sapiens
tttgatgtcatctcaggccctccctccacccacagtcactcagaaggtagaattttttgccgcaggctcaaaagcaagcatgaagtaaactaagtggaaagtccttttggcgactatgctca

SEQ ID NO: 20216 - DNA, 122 bp, Homo sapiens
ctccaggaactggcaggactgtggcccttcctgtttcactccccagagtcatgaaagactcgctgcttctgggctcccctgaacatggctgacctcagagtcttgttaggacccgggctcgg

SEQ ID NO: 20217 - DNA, 122 bp, Homo sapiens
gctgcaactcgccacgttcagcgagcctcccctggaccgggctgacacaggcctgaggtgcgagccacaccgagcccgcggccatgtggccaagaggcattttctgagccttcatcaggagc

SEQ ID NO: 20218 - DNA, 122 bp, Homo sapiens
gaagcgccccaccccacaccccaccacaaggacttgtccgggccgggccgggctagatgccgagatgtaattcaccagatttgtgaaaagacgagaaatctgctctcattttgaagcgcagc

SEQ ID NO: 20219 - DNA, 122 bp, Homo sapiens
tgatggcttttttgttcccattatcttttagaggatggttgcatagcaaacagcctccaacgatagcgtctccctctagtggagagcagttctgtttgctgtccagtataataaagatatgt

SEQ ID NO: 20220 - DNA, 122 bp, Homo sapiens
ctctgccgggctcccaggcccaagtttgggacaggcaaaccggtggatatcaacacccaacgtctagaccactcacagcctctccccggggcactccacacactgtaacagcatagcgcctg

SEQ ID NO: 20221 - DNA, 122 bp, Homo sapiens
tactcgaaagacctccctccccaattccttttctttgtattagttgaaaagcagtgcttacgctggtttgaggcgtaaaactacagggcctcttgctcaggttgctggtagcttctaagtgg

SEQ ID NO: 20222 - DNA, 122 bp, Homo sapiens
agaggtcgcgctgagagctcctgcccttgccgcggcccacaggttgccaacaggtttgctcgcacgacccctccgccagagcttccctaagtcaccccacattttcctcggctagccactct

SEQ ID NO: 20223 - DNA, 122 bp, Homo sapiens
gtccttacaccgataacgtacacccattggttgtctagcacagaatagcgaggttctgcacggcgagtctacctaacaacactcttcagagcaaaccccgtttcggcgatggctacccggaa

SEQ ID NO: 20224 - DNA, 122 bp, Homo sapiens
gtccagctagaaaaagaaaggttttgagctgaataggataaccccgcgcctgcggctatccggaaggggtggaaccagattgggggaaggcggggaagagcgcttgactgagggaagatgct

SEQ ID NO: 20225 - DNA, 122 bp, Homo sapiens
tatttgaagtatggacaccttttcattgcaagaggaaagcaaaagcaggcaggagcatttcgttagtaaataatagtagggccatgtccaggtgtgaagttaacaatgagagagattttttt

SEQ ID NO: 20226 - DNA, 122 bp, Homo sapiens
gtggtggtgcactggtgacttcatggccacgccagctgcggggacgcacttgggactcctcgagaggggactcgcggccgcgatggcaaggcatcctgtgaattcatgcgctgcgagtggcg

SEQ ID NO: 20227 - DNA, 122 bp, Homo sapiens
tggatgtcttaagaaaaagatgccaagccattttgttgaaacattaatataggaataggacgacctgaaaaaaatgctcatgcaaatccaggtctataaatattgagtctttttggtgctgt

SEQ ID NO: 20228 - DNA, 122 bp, Homo sapiens
ggccgaggacacagagaaatatcaggcaaggctcctgcccccttagggtggccctgacaacggatcataacctcccagggagctgatggggtgtgacaggcacaccataggctggaggcaca

SEQ ID NO: 20229 - DNA, 122 bp, Homo sapiens
aaaaaatcagggtaaggagttaggacagagaggcagcaatggggctgagcctcactggggcgcagagggactttaaacttggccccaagaagacaggctccagatgttttgcctcggaggaa

SEQ ID NO: 20230 - DNA, 122 bp, Homo sapiens
agccagggacgctagggtctccggggcccagtgtagggctgatgggtagggacgttggtccgtgggggacccaggcgccacttctgggcgccgcagttttttatttttttttctctgcccca

SEQ ID NO: 20231 - DNA, 122 bp, Homo sapiens
gcttgaagagcggcaatataaagcagctccacagcacacagccaggtccccagccccaagcgcagagggagcccactgaggcaggactccagccaaccagcctccagcctttacctgtggct

SEQ ID NO: 20232 - DNA, 122 bp, Homo sapiens
gtattcagaaaggaccctcattgcccctttagcacatttccgttgccctccaagtcctcacgcgttgctgtctgctggttgggtagactgtggtcggccactaattggtagggaaacgtaat

SEQ ID NO: 20233 - DNA, 122 bp, Homo sapiens
ggtagattccagcaggtaatcatccagttttttacaatctaacaggtgtgtggagaaatgcgctatcagctgaataaaaccaacatggagaaggatgaggcagaaaaggagcacagagagtt

SEQ ID NO: 20234 - DNA, 122 bp, Homo sapiens
ccctccgtgacctggggatgccactgtctgcagtcctctccaccgcacacttgcaggcgccgacgctggaccgatggcacagccagtcccaggtgtaagcgcagctccaaccttgctccttc

SEQ ID NO: 20235 - DNA, 122 bp, Homo sapiens
gcttgacgactccttttgagccacctgacaattcagtccagcacagcaactgaaggaaggcgttccccaacctgctgtcctatgaaggcctctaggtcaccggtgctaaagccctcctttct

SEQ ID NO: 20236 - DNA, 122 bp, Homo sapiens
ttgttcaatcttgcataagaaatctgctagtgtgcttaagtgggagggagcacctggagccggctgtaaatgtaaatcaatatgtaatgatatgcgcccaggctgcacggcctgtcacttgc

SEQ ID NO: 20237 - DNA, 122 bp, Homo sapiens
gaacaacaatccaccactgggggggtaagggagataggaaaaatggaaagagaaaatcagcgcatgcgtactctgattttggaagaatctaaagagaaaatcagagcatgcgtactctgaac

SEQ ID NO: 20238 - DNA, 122 bp, Homo sapiens
acacacacacagagagaaatcaaactcttctttttcaaggatgcctcttcacactaacaacgacagaagtgtacacttaaacatcctttctattaagaggacaaattctaaaaatttgttat

SEQ ID NO: 20239 - DNA, 122 bp, Homo sapiens
caaaaaggcagcggagctaagcaggggtgtttggaaggcgcccgttgcgctgtttgactgcgtggcttcacttggcccgcgtgcatcagcctctctggcgggggattctccccggactccgg

SEQ ID NO: 20240 - DNA, 122 bp, Homo sapiens
ttggctgtgaattttgccaaggacttattcatatttcagctaatcaagatctttaataatcgtctgacttctaaaccacttattctgaggccttctgcagcaacccacgggaaacaaaagcc

SEQ ID NO: 20241 - DNA, 122 bp, Homo sapiens
gcacttggctttcatcaacctaatttgatatgccccaagcacagcaataggacagttttgcgtggccctttggaaacgcttttctttacatttccaggacctaccatagttggagaaccacg

SEQ ID NO: 20242 - DNA, 122 bp, Homo sapiens
gcccttgggtccctgtctgacgagctctaggcaatctgccctcgttcgggacacaaccatcggtctcacccctcagtttctgccagagaaaaaggaaaagtcaccgagaggcctgaccctga

SEQ ID NO: 20243 - DNA, 122 bp, Homo sapiens
tggaaaatgcaacaatatctgttcatggacttgagaaccccagagtgggaacagcaggtgcggatgtggggagaagaaaggaggagggtctggagagcggccataggggaggcaagtgtgag

SEQ ID NO: 20244 - DNA, 122 bp, Homo sapiens
cggcgcaggccccgcacccccgactctgcccgccctctgttacggacacccgctgggccacgtggtcgcgactggcttctcccagcggccagcctggccaccccgactcccagggaggggga

SEQ ID NO: 20245 - DNA, 122 bp, Homo sapiens
agagggctgtgcaagccaacacggctgggggctgcagaaagcaccacagcaactgtctgacgccaggttggggccagcagccgcacgctggaaaacgcaacacacagcccacacagccctgt

SEQ ID NO: 20246 - DNA, 122 bp, Homo sapiens
ttgggagtgacgcggggtgggctggagaggtttcctgccgtctgggaagcgtaaacggaccgcccacctgtcgggcctcggccgcccgcacctgcttgtgagaagcctgcggctggggcacc

SEQ ID NO: 20247 - DNA, 122 bp, Homo sapiens
cgcgggcctgtcccaggggcgcagcggtgtgcgcatagtagggtgggaacccgatggcaacggcgggcggccgggagctggggggcaggggcgggggatcggctgtccccagcggggcctcg

SEQ ID NO: 20248 - DNA, 122 bp, Homo sapiens
acgcctgcttaatatgcatgaggcccgcagccaatggccaggcgaggaggctgttttaaacggcagagcccgctggccaatcaggcggctctcgtggaggcagctagcgcgaggctggggag

SEQ ID NO: 20249 - DNA, 122 bp, Homo sapiens
ctccccttagaggccccattcttcctgccatgtaattagcacccccagcacagagagtctcgttagggaggggatgaccccattggcccttctctgtcttgtgcttctcctgtattggggtt

SEQ ID NO: 20250 - DNA, 122 bp, Homo sapiens
tcatcagaggagtcctacatcttccatgaacgtgccaccaccaacaccccgtgctgtgcccgctcactgactgggagtagtgccagagaagcatggcttcagtgcaaacccagcagtgtatg

SEQ ID NO: 20251 - DNA, 122 bp, Homo sapiens
cgctccgcctccgctctggatagtccctgcctcttcagttgcgccttttgagcagaaccccgccttatgctgagattttgcccagtacgttagacgtgggctggtttccctctccgaatcct

SEQ ID NO: 20252 - DNA, 122 bp, Homo sapiens
gcttgtctttttgctgtccccacttgaagggatcagcatctcccaacctattgtagaaaacgtcttagatcaactctgacatccagggtcaaaaacctgtgatgggtcaaaataaggggaag

SEQ ID NO: 20253 - DNA, 122 bp, Homo sapiens
atgtgctcaggacacttcgatatcccgcagctaggcaagatcatctggtgaaggggtacacggcagagtatcaattgtttgcccctgtgatcacgtggctgactggtgttgcggctcactgc

SEQ ID NO: 20254 - DNA, 122 bp, Homo sapiens
ggtgccgggaccagggctgcgtggtccctgaacgcgatgttcacttcctccccgcatccccgggtgccgggaccagggctgcgtgctccctgaacgcaatgttcactttctccccgcatccc

SEQ ID NO: 20255 - DNA, 122 bp, Homo sapiens
ccctgcccactggggagtcagctgaggcccagcgagaattcgagcgtagcgctggcgggccggcactgctgggggacccggcgcaccctctgcagctgctggcctgggtgctaagcccctca

SEQ ID NO: 20256 - DNA, 122 bp, Homo sapiens
tttgtgccacaattttctcattcacaaaatgggaatcataagagttgttataaaaataaacgagttaatgcatttcaagtgctcagaacagtggttggcacatagtatgtgctcaaccaatg

SEQ ID NO: 20257 - DNA, 122 bp, Homo sapiens
gtgtcacactaaactgtggtgatgtcacactagctgggatgacattttacagttggatcccgtaccaccgccaggcacctttaaatcaccgcagagtctgcagtgcggagggggcgggaagt

SEQ ID NO: 20258 - DNA, 122 bp, Homo sapiens
gagccgggccgcagggcgaaagcggtgcggtccgaggcctcagaaagggacacgcagcagcggaagtggcgctgactcagcccggcctccctgcagtcccctggcagcggtagcagccacag

SEQ ID NO: 20259 - DNA, 122 bp, Homo sapiens
aggctttgggtggcggctacaagaacgacggtatgcttttcaccttctcaagtctgcatccggcagcaggactaaggaattctgccccagagttcgcacaacttgcagcacagtcgagagac

SEQ ID NO: 20260 - DNA, 122 bp, Homo sapiens
agactctcagttaatttgggaaaggattctgcggaaggtagagaattaagtttgtcctgccgttgtctgtgtttttattacaccgggggccgcggcttatttggtgctgtactttctcatgt

SEQ ID NO: 20261 - DNA, 122 bp, Homo sapiens
tggtgattcccgcgctcccctgaggagcatatgaagtacgtcggttctgccaggttggaacgcgctgctggacactcggccgtaaggcggatcccggatcccctcccactccgacccttccc

SEQ ID NO: 20262 - DNA, 122 bp, Homo sapiens
tattgatctccccactccatctaacatctccacatgatgaaacctcggctcacttcttggcgcctgcctaaccattcaaatgatcacaggactattcctagccatacactaatcaccagatg

SEQ ID NO: 20263 - DNA, 122 bp, Homo sapiens
aattgagggaagctggcagtgcaaagagctgccagttaaggcaatcaatacatccaaacacgtgcaaagtttccacattcactgtagccttatctcttctgaatgtcttgggttgcagtttc

SEQ ID NO: 20264 - DNA, 122 bp, Homo sapiens
tgcgcgccggaccccccaaaccacagaagcagcagtaggaggccaagcaggcagaggaggcggcgggcccagctgctcgacagcagtcccggcagccccttgagcccctgctgtagccacat

SEQ ID NO: 20265 - DNA, 122 bp, Homo sapiens
ccctgcgatgggggtcgtcataccccggagtcgagagggtggtgatatgactcctcgtatcgcggagtgcgcccgcccccctgcaatgtggatcgtcatatccagggtgggagattggggtg

SEQ ID NO: 20266 - DNA, 122 bp, Homo sapiens
gcggctgtagcaggcacggcccggcccccaggtcttcctctgcccccgcccatactgagccgcctttgtccccaggaaggacatacactctcatctaccggagagtcctggcggaagatgca

SEQ ID NO: 20267 - DNA, 122 bp, Homo sapiens
accctgctagggcctagccaatgagggacaaccggaagtcttaccctccagcccccaccccggagaccacctgtgtaggacccccaggggttgccaggatcctccccacaaacggcaaagca

SEQ ID NO: 20268 - DNA, 122 bp, Homo sapiens
gcccactgcaccatgcctcctgtccctaataaggcatcaaacagaaacagtgacagggaacgttgtgaaaaccttcactttgtcctgcctttttaatgagtttattaatgttaatgacaaac

SEQ ID NO: 20269 - DNA, 122 bp, Homo sapiens
tgcgtcctccggcctagcctggcaggcgattcccaggcccgcgtggtcctcgaaggcccccgtcctcctgcgccatggagaccccggcctcgcgacctacccccccggcgcccgcgtcatcc

SEQ ID NO: 20270 - DNA, 122 bp, Homo sapiens
tgtggaagacggagcgggaatcccttctgcggagcctccccagccgggtcgtaggaggcgcgcggggcctctcctcacgcaggcccgagtcctgagcatccccactcctggccgcggggttc

SEQ ID NO: 20271 - DNA, 122 bp, Homo sapiens
gggagggggctgattaatcaaggttgggggaaatctttctcaccggccagaccttacactcggaaagcaaacaaggaaaaaacgggaactccaaaactggacaaaagggaaaggtcggcggc

SEQ ID NO: 20272 - DNA, 122 bp, Homo sapiens
ccagttcatacccattagaatggctgtcatcaaaaaaatggggccaagcacagtggcttacgcctgtaatcccagcactctaggaggccaaggcaggtggatcacctaaggtcaggagttca

SEQ ID NO: 20273 - DNA, 122 bp, Homo sapiens
cgatgccccgggagatcatcaccctgcagctgggccagtgcggcaaccagagtgagcaagcgagcgccggccccgccggtctctggttctgccccttcgggtcccacccaagtgcctggctt

SEQ ID NO: 20274 - DNA, 122 bp, Homo sapiens
ctcccgagccccggagctccagcagccagcacccggagcagacgggcaggacccggaggtcgggacccatcaagaaaccagtcctgaaagccctcaaggtggaagacaaggagaaggagctt

SEQ ID NO: 20275 - DNA, 122 bp, Homo sapiens
tgatcttaggattgggggcaaaataagggttttcatttacgtcaataactgtaacagacacggttgcagttgactgaggggggtgctgaattcccttggctaatggcacttgattttctgca

SEQ ID NO: 20276 - DNA, 122 bp, Homo sapiens
ttaagttgtagggagaaattagccttgacgggcagaatcaaactacaaatacacaggcctcgccttcaggaggccaagcggcggcactcgggaggaggcagccggagtcggtgttttcttaa

SEQ ID NO: 20277 - DNA, 122 bp, Homo sapiens
ccctggttcctctcaggccgcagggtggggctgcgacggcagccgagacccctagccgtccggtccagtccctgtgcaactgactgtggccccaggcccagcgccctctctggtcagctccg

SEQ ID NO: 20278 - DNA, 122 bp, Homo sapiens
gtgggcgagcggtgttctgcaaaatgggctctccggcagcggatctgcgcagaagcgttccgtgcgtgcaagtgctgcgaaccacgtgggtcccgggcgcgtttcgggtgctggcggctgca

SEQ ID NO: 20279 - DNA, 122 bp, Homo sapiens
cttggggtaaggggaaattcaggcaggagtgaaacttgccatttggtaacacatgaaaatcgctattaagaaaaagagcggggcgatgtaatagagaataatgggatccgggtgcggtggct

SEQ ID NO: 20280 - DNA, 122 bp, Homo sapiens
cctggactgacccccaccggcctaacccgcggtgcggggccagggccggaactgcccgcccggctccttgcccggctccttgtggctgctggggacccccgacaccagccactttcccttcc

SEQ ID NO: 20281 - DNA, 122 bp, Homo sapiens
gtgaagggaagggtggaagattggacttgggtggatgtggaggcattggcaataactcctcgctaggttttagccttgagtaaatgaaagggtaaaagattccttgaccaagacaataaagc

SEQ ID NO: 20282 - DNA, 122 bp, Homo sapiens
cccacccctgccatccagcctctatttagcagtcagagggatctcccagaaatgcaaatccggccctggcacctcccctgcttcaacccgtcccagggctgcccctcaccctccacacagcc

SEQ ID NO: 20283 - DNA, 122 bp, Homo sapiens
gtcacgaatacggaacgcttgatgggcacctcagtcccagggaggagaccgcgggagaggcggcgggaccagggtcccggccttcagcggcttgctccgcacactcagggttccccggccct

SEQ ID NO: 20284 - DNA, 122 bp, Homo sapiens
ctgactctcacaacatcctcaacgtcctgttcccatttactagatgatgaaactgaggcacggagaggtgaagtaaggagccagggtcatcggcctcaagggccccagccaggagtaagact

SEQ ID NO: 20285 - DNA, 122 bp, Homo sapiens
gtctgcccgagggaggtaggtgtggaccgcggccggcaaggctgtggggggctgggagcccgcgctgcaggcctgtgcgcccgggtgcagctggcgtctggagcgtgctgggtctgggcttg

SEQ ID NO: 20286 - DNA, 122 bp, Homo sapiens
ctgatccaatccttatttacaaatactttcctattttatggcagggatttccacatatttcgtcacatccacagtaaaatagaggaatgaagaaacagacaacatacttacctggggtttgg

SEQ ID NO: 20287 - DNA, 122 bp, Homo sapiens
aacacacacacacatattttaacgccctattcaggcctgggcttcgtctgaccaagttctcggggtcagataaccggttcctttgcggatgctgaccacggggtcagttagcaatcgggcct

SEQ ID NO: 20288 - DNA, 122 bp, Homo sapiens
ctcagggtttttacttttaggatcgttgggctgtgcgttaggggaggaggtggtcctcagcgtcctggaacgacaccacctgctccaatttcccgtctggaggttctggtcgaggctccgaa

SEQ ID NO: 20289 - DNA, 122 bp, Homo sapiens
cagacccacaccagaatatcattttaaacataacaacttctggtttcagtctcacaacttcgggcaaaatcattgcaaaaaactgcagctccccataatttcacaatattggttgggatccc

SEQ ID NO: 20290 - DNA, 122 bp, Homo sapiens
cccaggctcccagctggtggtgactcaacgccgcttccccaccatggaggccttcctctgcgaggtgacatcagctgtgcaggccccactggctgtgcgtgccctctacacaccttgtcatg

SEQ ID NO: 20291 - DNA, 122 bp, Homo sapiens
ggcccagggccaccgggtgagaaacctccccggagggcagacggggagaccgaagcacaccgcactaggcatccagactgggcttgggagccgcgcaccctccctacccagatccaggatgg

SEQ ID NO: 20292 - DNA, 122 bp, Homo sapiens
gtccctttatccctaaatacttcagagaagccaaaccaaggacattctttttcataaccacgtttcaatgatccaattcaggaaatttaacattgatacaatattactgttatataatccac

SEQ ID NO: 20293 - DNA, 122 bp, Homo sapiens
cacctgagtgaaaaattaagtcttttcatccgtgaggacttcagtcctagagtaacgacccgggccgctggactcccgagggggcttccgtctgctccatcactcaggaccccaatcccaga

SEQ ID NO: 20294 - DNA, 122 bp, Homo sapiens
ttaagcaaccgtttatttaagaaaaaagggtgaaattcaagttaatattacttgacagtacgtttcagaaaaaaaaatactctgcagagctgggtgtggttgcccaagactagtcccagcta

SEQ ID NO: 20295 - DNA, 122 bp, Homo sapiens
ttaagctggtcggaaaagcgcagtattcgggtgggattgacctgattttccaggtgcgtccgtcacccctttctttgactcggaaagggaactccctgaccccttgcgctcccaagtgaggc

SEQ ID NO: 20296 - DNA, 122 bp, Homo sapiens
cgtgggtgtggatgtgggtgcgacatacaagtgccactaaaccatccctgaagggaaccacgcgctggaaatgaagacgacctcgggcaggcctcccgcgcctacctgtctgcgggggacgc

SEQ ID NO: 20297 - DNA, 122 bp, Homo sapiens
gtacacacacacacatgcacacacacatatgttttgaattggagtcttgctctgtcgccccggctggagtgcagtggtatagtcatgacttgctgcagcgtcagattactgggctcaagcaa

SEQ ID NO: 20298 - DNA, 122 bp, Homo sapiens
cgggatcctgggcctccgggctccacgcctccacttctccttccacccacgagataaaagcgggtttgggaactgaaaatcctgcgaaggagaaacaatgggctcggctgagcgcacgggag

SEQ ID NO: 20299 - DNA, 122 bp, Homo sapiens
tttctgatctccctcgaggcccaacacccaaaggctcacccctaggccatccgcgctccccgaccacctccctcataggactccttgggattcctcaggccgcgtccagccgagggggttcc

SEQ ID NO: 20300 - DNA, 122 bp, Homo sapiens
ggagagcagctgagagggtcctgtgggtcactctgtactagaatggactgcagctaggggcgccctgagccctttccctggagctgagtgacagcttgagctcaggggaccagcatgtagag

SEQ ID NO: 20301 - DNA, 122 bp, Homo sapiens
ggagtcgtccaaaaaagtaaataagataaatattttcaaacaatattagaaaattcaaatcggaaactaccgaccgggtgaggagttgtttttgtaaataaggtcttattcctaataagttt

SEQ ID NO: 20302 - DNA, 122 bp, Homo sapiens
agggttattagaatgattacacaagttaatatttataaagtgcttagaacattaccttggcgtatgtaatgggtaagctgttactatcaccacagatataggattatttatttaattgatga

SEQ ID NO: 20303 - DNA, 122 bp, Homo sapiens
tcttgctcttgctgccaggaggcaacatttacggttaaatctggagttgtacaaagcggccgcccgtctcttcgacaattttatgttcacgacttctgcaaaagtaagttgtttcaaaaact

SEQ ID NO: 20304 - DNA, 122 bp, Homo sapiens
cttctcagcagttgcacatgccagctctgctgaaggcatcaatgaaaacagcagtaggggcggccgggctcctgcgaacaacaacaaaacaaacaaacaaaaaaccacgtcgcgtgcggggc

SEQ ID NO: 20305 - DNA, 122 bp, Homo sapiens
attccgtcccagactccggaggccatcggggaccatgaaatcacgctgacctcgggaggccggagacaagcagccatgtgacctaggcaagttcatgcactctctgggccttactttcttca

SEQ ID NO: 20306 - DNA, 122 bp, Homo sapiens
ttaactcccatttgttcctagtgccttgagggactgactttgatttttagcccagtgccccgaagacagtaggatatcctagggaaaaacagcaaggcctcccaggcccctgtggagtacag

SEQ ID NO: 20307 - DNA, 122 bp, Homo sapiens
tgaacgcctccagccgaagaaggcaaggcgtagaggtgtcttaccactagggaaggtatccgagtcactgcaccatttgagagatccaagtgccctgttcagcccttgacttggggttttat

SEQ ID NO: 20308 - DNA, 122 bp, Homo sapiens
ggcccagggagccaggtacagtcaacctgttggaaaagtgcctccttctcagggaagcctcgggcatgggaaaaagctaggatgctcagaaccaaacaggaactgaaagtcagcccagccaa

SEQ ID NO: 20309 - DNA, 122 bp, Homo sapiens
acacccttaaggcttactcacctcttcattcactcattcacccagcaaatatttaatttgcgcctaccagatgcaaaatatccatcagaaaacaaggctcccttctttgtaaaaggacgggg

SEQ ID NO: 20310 - DNA, 122 bp, Homo sapiens
tgagggcagcgtgcaagcaggcaaggaaggctgcaggtgggtggcacctgggagcctgctcgggctatgggactaatgagcctgatagctagcctggaagcatggagctgcaatggccaggg

SEQ ID NO: 20311 - DNA, 122 bp, Homo sapiens
ctcctccggggcccccttacctggaggcggctgcgaaggcaaaggcggaggcggcaaaaccggcgagcggctcctcccgcccggcccggcccggcccctcccctccccgccgcgtcccggcc

SEQ ID NO: 20312 - DNA, 122 bp, Homo sapiens
agaaagtttttacattgcctttctgcatctgcttcacagctgtggggtgagtgcacctcacgctggacacctttgactaagataatctccacacagatatgaaccttggaagttttagatca

SEQ ID NO: 20313 - DNA, 122 bp, Homo sapiens
cagacccccagggggctccctcgccaagccctgcggctccactgctgggcgtctgccctgcgcctgtccctgccacctagggcagaaaggccaggccgagtaggaccaggggccagggggtg

SEQ ID NO: 20314 - DNA, 122 bp, Homo sapiens
cctaggtcaggcctccccacgcctctctctgactcccactaactcacccctacatctggccggcctgccttgggacccaggtcagcccctcaaaccacacagctgccatggactgtgcctgg

SEQ ID NO: 20315 - DNA, 122 bp, Homo sapiens
acggccctgaccgcccgcggggtgaggggccctttctgggcaggacccgccccttggtcccgcagagccttggtacttggacctgaaccttgctccgagagggagtcctcgcggacgtcagc

SEQ ID NO: 20316 - DNA, 122 bp, Homo sapiens
gtggagcaggtgtctctgcctttctcggagccagcatccctgtgaaggaagatggagaaccggcaggatgtccctgacctgcacatgctctgaaaaacggccagcccagggagtcacactga

SEQ ID NO: 20317 - DNA, 122 bp, Homo sapiens
gagtcctatacttttttttggtgggggtcttaccctcgcccaggccggagtgcagtgacgcgaccgtagctcactgcagcctcgacctcctgggctcaagcgatcctcccgcctttgcctcc

SEQ ID NO: 20318 - DNA, 122 bp, Homo sapiens
ttcaaagcgtaccctgtttacatcattttgccaatttcgcgtactgcaaccggcgggccacgcccccgtgaaaagaaggttgttttctccacatttcggggttctggacgtttcccggctgc

SEQ ID NO: 20319 - DNA, 122 bp, Homo sapiens
gcttaaaacacggaagccggggagcgctgggcggctgcgtgtcagagaatgagtgtttcccgatggaacggcgggacagaaatggccgcagactctccctgcttccaaccaatttcgctttg

SEQ ID NO: 20320 - DNA, 122 bp, Homo sapiens
gggggatattccaggaagccttccctgaccaccctcatgacgatgacttcctaagggtgacggtgacaagtgccagcaggccatctgcacagtgaaagacaccagtgcttctccccatctgc

SEQ ID NO: 20321 - DNA, 122 bp, Homo sapiens
tgtggactccgggttcagcacctcctccagaagcacaggacgtgcgaccttcagcctttgcgcccacctccgcgccaccagcccagcagtagctgggaacggagctgtccccctccagtctc

SEQ ID NO: 20322 - DNA, 122 bp, Homo sapiens
tcttaatcgctcttctcattggttacttaagccatggggttgaagcaataaaaagaatcacgcccagtacaactatacgcatgccaagccaaacttggggagactatagtaagagaatctgt

SEQ ID NO: 20323 - DNA, 122 bp, Homo sapiens
ggaagcaaaggcgcggtagcaggtgctagtcaactgcggttgggtttagcagcctgcaagcgcccagactgagcggccgctgctttaaatcccctcggaggagcggggcggggctgggcact

SEQ ID NO: 20324 - DNA, 122 bp, Homo sapiens
attggtactccagccccaggcaggtagaagcccgcgctgctgccagcgtcagggggagctcgggtgacttgggctgggccacccatctgactgcaaggttacagagcttgagcaaatttccc

SEQ ID NO: 20325 - DNA, 122 bp, Homo sapiens
ctaaacacagtactgcttcttgtgagtgatttcctgttgtgaaatccaaagaaggagctccgttttatggcaggatcgacatggtctaggagcagaaggcagccctgagcaggccacgcccc

SEQ ID NO: 20326 - DNA, 122 bp, Homo sapiens
tcaggaagctccgcacctatccggccgccaccctcagcacagccacggcagccgactcggcgttcctactgccccggaagtgctccttcagcgcagaggcgtgccggtgtgtccgagaaaac

SEQ ID NO: 20327 - DNA, 122 bp, Homo sapiens
cacggttttcaacaggtggtcgcctcactaagtgggagtcacagggtttcaggggaggagcgttccaggccgcggtaacagcaggtgcaaaggccctgaggcaggacggggcagggaggtcc

SEQ ID NO: 20328 - DNA, 122 bp, Homo sapiens
gaaaggtggtacgtcataaagaatgagttgctactttaattgtcaatcgcagcattcacacggggtgttagtggtgtcaggcagtgttctggatgcttcctgggcaatctcattcttccctc

SEQ ID NO: 20329 - DNA, 122 bp, Homo sapiens
acgcacgtccagcttgcttggcgccgtggctaacactttgcgcgctcctgcggagggcgtcgcacggcacagcacagcaaagctgcggcccaacctgtccccgctgagccttccgcccaggc

SEQ ID NO: 20330 - DNA, 122 bp, Homo sapiens
tcattcccccaagaatcccctggtaaagtagtgtcaggtaagcctttatgtacagtcatgcgccacataacaacgtgtctatcaacgatgaaccacatatatgacagtggtcccttaagatt

SEQ ID NO: 20331 - DNA, 122 bp, Homo sapiens
taaaacatattcttctgtgtggaaaatgtccgtccctaagtcaaaagtggttgaagcactcggtaattcccagcaatcaaattctttaacagacacaagattgaatccaaaggaatcagcaa

SEQ ID NO: 20332 - DNA, 122 bp, Homo sapiens
acccacctgccttggcttcccaaagtgctaggattacaggcgtgagccactgcgtttggccgtaattttattttttgtagagacaaggtctcactgtgttgctgaggctggtctcgaggtag

SEQ ID NO: 20333 - DNA, 122 bp, Homo sapiens
tttgacttgctgatcagagttttgtgctaacactttgtacctcttgacactgataggccccgcttgacaaaaggaaggaatgctgtattgtgcagttttaatgtgacttttgctcccagcac

SEQ ID NO: 20334 - DNA, 122 bp, Homo sapiens
aaaagtatcagatgatgaaacaaaggcactgcaaggtccagaaactagcctggggtctcacgacagcttttctcatttgaaattatcacaggtccatttcccggtgtcaccgtagcacatgc

SEQ ID NO: 20335 - DNA, 122 bp, Homo sapiens
gaggggttggaattaggcgtggaggaaggaggagaaaaggagaggaagttgatgacgccccggctttagaagtcaaggccgacctgcaggttgtgctgctaggggagcaagctagacggcga

SEQ ID NO: 20336 - DNA, 122 bp, Homo sapiens
agctgccttcacaaagttcttttaagtcttttcaaactcctgtattccaagagggtctgtcgctctcttcatactcattctcgcttacttgaggttgattcccatagtccctttgacgaact

SEQ ID NO: 20337 - DNA, 122 bp, Homo sapiens
catgtggggtttgccaaacaacaacaaacaaaaccacccaatttttataaaaccccgtggcgtgcgagctttgatggcagagtgttacaatatgttcaagccctaaatcccaggacctcaga

SEQ ID NO: 20338 - DNA, 122 bp, Homo sapiens
atttaatgagttgtggcagtttctagccttagtttgggctttcagctttcctaatttattcgtgtttggcctagaatgactatggaatgtttctatggctttcactgtagtcacatcagtta

SEQ ID NO: 20339 - DNA, 122 bp, Homo sapiens
gttccgcctgtatgccgatcagaaaagctgtgatcagagtgtagaacaacatggacattacgctatgcacctggaatgaaaaagaaatgagggtgacttcatggagtactaaatgcagtcaa

SEQ ID NO: 20340 - DNA, 122 bp, Homo sapiens
gactgagatgcggcaggacagggtgagcgggccacagatggagaccccacatgagcaatgcgtcagccaccctcccgtggtactctactcacaccagacgccgccccctgccttctagagtg

SEQ ID NO: 20341 - DNA, 122 bp, Homo sapiens
tgggtctaaaggtgatgtgcagattgtaactggcacccgtggcattggctgggccttcctcggagggtagcaacttgataacttcaaaatgtctgggggccgctgggaaggccagagggcct

SEQ ID NO: 20342 - DNA, 122 bp, Homo sapiens
cgcgccgcgtccccgccgccgccgcctccggccgctgcccgctccctcgcgctcctgggacgggatacccgggctgggcaggcaccgccgcctctcccgcgcctccctactgtgagggggcg

SEQ ID NO: 20343 - DNA, 122 bp, Homo sapiens
ggcttgaggcctgagtggagcgtaaaccctgattggctgtacggaaggcggcgacgtggccgaaggatgcccgtttgtgtctaaacggaggctcggccacaacgccactggattggtggtag

SEQ ID NO: 20344 - DNA, 122 bp, Homo sapiens
aacttttacatgtcttgtgcacagttacccgggggcaggattaccgggtcacgtggctcgcgcatgtttaacttcgtaagaaagcaccaaacggtcccaccaggtggccgtgccatgggcat

SEQ ID NO: 20345 - DNA, 122 bp, Homo sapiens
tgtcagccaataaggagcgggagacgcgtcgggcctgcgctcaatgggccgcgctggtcccgccccactgtgatcgtgagactgcagacccgctaataaaatccaccccaacaatcgctgtg

SEQ ID NO: 20346 - DNA, 122 bp, Homo sapiens
gaagcgcaggaagtgaggacatcagggagcccgggcctaagcctggaggcccgccctctccggcgttcacagttgcgcagtcagaattgtgtgcgtcccaccgcctcagcccccagttctcc

SEQ ID NO: 20347 - DNA, 122 bp, Homo sapiens
cacactcaggaaacttcagcccactttcaaagtcctcacccaccactgccctggagaagtcgttctccatcaaggcctggggccaggcccacctccccaaacaaggagttttcagccaaagt

SEQ ID NO: 20348 - DNA, 122 bp, Homo sapiens
ttcaagctgccgcagatctcatgcagtgcagacgccgtgacatcacgtcacacttgagggcgtcccctccgcggcctgcacctgcgcctgcgcctgcgaggcgccgcagccctgcatctggc

SEQ ID NO: 20349 - DNA, 122 bp, Homo sapiens
cacataggccccagagcaaggggtgataggtagggctataggctcccgactcccgactcccggcagtgcctctctccaaccccccacgaggctgggacagctccctccatctcagcagtcgc

SEQ ID NO: 20350 - DNA, 122 bp, Homo sapiens
tgccttcctcaagctcttccctgctgagatcaggcagcgcgatctctcatgtcaatgtgtcgaaacagcctaaggaaagctgttttttctttctctctaaatcctattatgaggcattcatc

SEQ ID NO: 20351 - DNA, 122 bp, Homo sapiens
aggagaaactccaaaacagcaaccgggcacgcgctccaatgctgtggtaccgcagcactgcgtggcacacagagcccactgcacaggaggaatgcacgccccgacccagccggctggacggc

SEQ ID NO: 20352 - DNA, 122 bp, Homo sapiens
gtggagggatgggagggtggaggggctgcatggcctgtgcttattctccctctggctctccggctctatctcctctcattttctcaccctctctcattccctggcctctccttcctgagcct

SEQ ID NO: 20353 - DNA, 122 bp, Homo sapiens
taataaaccatacatatatgagaacaatagaaacccaatagaaaaatggtcaactcgggccgccgccgctgccgctgaatcatttgagctgcagcgggcggtttcggctcttggccaggagc

SEQ ID NO: 20354 - DNA, 122 bp, Homo sapiens
gaaaagacctgagaggcggacgacacctgtgctccgcagagcagaacgtgggaggaacggcgggatgttaaggtaggtaggtgtctttccatgctgcatcagcctgaaaactaatttctcag

SEQ ID NO: 20355 - DNA, 122 bp, Homo sapiens
ttttatatggaattaagttccaaattgcttaaacacagatattgtacttgatcctcacaccggccacagaggggattatcatcttctgttttaaagatgtggaaactgtaaaccagtgagac

SEQ ID NO: 20356 - DNA, 122 bp, Homo sapiens
gaaagcaatatgatgtatttcccttatcgtattgatcaaaagaacgttgtggatggagtccgtggcccaggactggtttcgaaatctcagttcccaaaaaggtgctttcggcttttgccggg

SEQ ID NO: 20357 - DNA, 122 bp, Homo sapiens
ggtcaggcccgggggcgtctgcacttcagcagcatctgaggctgctcgccccacacagggcgttcaaggatgacccctgggcaggtggggcccgcactggcctccacccacacttgcctgtc

SEQ ID NO: 20358 - DNA, 122 bp, Homo sapiens
tgccaggcactgggctcagcgctgtgagggatgagaaagaagtggtaccttccttccaggcgattgtagtctagactacaaactggtaagtagtatactcagatttagtcaatatttactga

SEQ ID NO: 20359 - DNA, 122 bp, Homo sapiens
gacagaaacctcctcctgctcctgacaggacagaacgtagagccctttgacacggagttccgggagctgtacgccatctccgaggaggtggacttgtaccggcagctgagcctggcgggcag

SEQ ID NO: 20360 - DNA, 122 bp, Homo sapiens
caactcaagaaagccttgtagatgctgcccactgggaccaaacaagtggctggggaaggccgggcagcttcccctctcccatggtaaacgggggctggaaaagggacagctgtcttggccaa

SEQ ID NO: 20361 - DNA, 122 bp, Homo sapiens
tattggattttaaaaagcttataggtttagcaaggtggcggctggctggtttgtttacaccggtctgagacacaattaggaacttcttccaagagaagggttcccacatctggacttaacta

SEQ ID NO: 20362 - DNA, 122 bp, Homo sapiens
caaaacacaggcctaaccaaaaaaggcttatattccaatgttatctccgatgtggaatcacgcctgagtcagagttactcattgtatcagctattgctgcatgacaaacttttcaaacactc

SEQ ID NO: 20363 - DNA, 122 bp, Homo sapiens
atacagaaacactctggtatttgtctgcctctcttgttccagcgccgttttccctatatccggaattcgtccctgcgcattccaatacctgaagcggccacagggtacaggacagggagccc

SEQ ID NO: 20364 - DNA, 122 bp, Homo sapiens
ttaccggaacctttgccaggactagtacaggaccacgggtgaggatggtggggaagcctgcgtggggcagggaacggtgaggcaggaagagggaagggcagcagaggcctgagtggttgcag

SEQ ID NO: 20365 - DNA, 122 bp, Homo sapiens
ggccaccagcagcagcggggaggcccctgacagcatcacatggaagccatatgatgcagccgacctggaccccaccgagaaccccttcgacctgcttgacttcaaccagacgcagcctgaga

SEQ ID NO: 20366 - DNA, 122 bp, Homo sapiens
tgcagctccggtctgcagaccagaaacgcactgttggaggagtcagcctgcagtggtcctcgatgcctccaaatgggcaaagcaggaagggcagaaatatccaactgcatgtgaaatcagat

SEQ ID NO: 20367 - DNA, 122 bp, Homo sapiens
tgttttgtgaacatgctatatggtcatttaaagcccaagaaagctgcagtaggtatgcaacgcttatttccctaaagcattgtaagattacaacgaaagccccatctgtaattatttatcta

SEQ ID NO: 20368 - DNA, 122 bp, Homo sapiens
gggcctcacctccctgcattggaccagaaattctaaaggaagcaacttcttatggcacagcggatctcatgcatggcatcactgccccttccctaggagaccgcacaaagccactcagcttc

SEQ ID NO: 20369 - DNA, 122 bp, Homo sapiens
aactgattcaccttaaaacataaacacaaaaaggtggcagtaattttgaaggaagatggccgaagtgaagtttattgggtttgactaccatctagtgaccaacctgaattattggttgaact

SEQ ID NO: 20370 - DNA, 122 bp, Homo sapiens
ccactccaggtgcacgggcccggagcccagagccccacgccctgccccgttcctcctgggcgcacagacgcggcctctcgggggaccagtgcctgagcccctcgaccccctccgcttcgcac

SEQ ID NO: 20371 - DNA, 122 bp, Homo sapiens
ggtctcaccccagggtgcaccgggcgctcctgtccaccccacccccgcagcccactgggccgggtgaacccctgagccccgctgcagtgtgtccgcactagagccaagcaggagagggaaag

SEQ ID NO: 20372 - DNA, 122 bp, Homo sapiens
ccactcacacttgcggtggggaactgataatctgtggagggaagccccgcctctgctcggcgttgagatctgcagcaatttgttttaccccttggagcctacctttcctcagccaaaatatt

SEQ ID NO: 20373 - DNA, 122 bp, Homo sapiens
attcctatggggagtctgcctcttaaggaaacatcaatacagaggacactaactttgtaacgcatcctagggctttaatcctcacagtacagtatgtaaatcaataaacgtaccaattacat

SEQ ID NO: 20374 - DNA, 122 bp, Homo sapiens
ctttatcaacgactccatcgtctacctgcactgcaaactccgcgtctgcatggaatcccccggagccacgtgcaaaatcgtaagtgttttttggttttctaaacgtttggttggattcacgt

SEQ ID NO: 20375 - DNA, 122 bp, Homo sapiens
gtaacatttccactgccctctcactctgatccctctagtctaggccacatggcttgcatccgccaatagtgtatcagcaaacataacataggcagagacttgaaaggcacttgtgcagttga

SEQ ID NO: 20376 - DNA, 122 bp, Homo sapiens
aggaggaactcaatccatactggaccctttcacatagaacagaatagaatacggtgttgtcgtggaccaaagaaagaggacgcacacgactccggctatgggctgtttcagaccctgtgaag

SEQ ID NO: 20377 - DNA, 122 bp, Homo sapiens
aagacctacaaggggtgcccgagcagctgctggggacggcggggaccgaagagaataagtcgatcagggattttgatgaaaagcaacaggaagcaaatgaaatgctggcagggatggaggag

SEQ ID NO: 20378 - DNA, 122 bp, Homo sapiens
gccccgggactgtgatgggcgattggccacttctcctcgataacattactgtttttcttccgccttctggttgactttagccagaaccagtgcttctataactccagttacctgaatgtcca

SEQ ID NO: 20379 - DNA, 122 bp, Homo sapiens
ccattagcagggttccattaaatgttttgattctgtggaggagtccttgaaaaccactgacgtcaatcacagttggcaagagctggaaggaccttagcagtcaatagaatccagcctcctcg

SEQ ID NO: 20380 - DNA, 122 bp, Homo sapiens
agctcttgagaccaccacccacttcagtgctttgggctgaggtcattggcaacaatttcccggactttactcccagcatttgtgtaagctcgcgattatattatcattgcatacctagagta

SEQ ID NO: 20381 - DNA, 122 bp, Homo sapiens
actcaagtaaatcacaaatatagctgagaggcaagtggagtctccccgctggaggcccggcgttgcaggcgcccctggcacgtctggaagccaggactctggcggctcccatggccctgggc

SEQ ID NO: 20382 - DNA, 122 bp, Homo sapiens
gggcacctgccgagccccccaagaccatgggcatgggggtgctcgtggaaggcaggtgtgcgtgtcctgtgctacggaccaggaccagggcgctcacaccatccctgcctgggagggacggc

SEQ ID NO: 20383 - DNA, 122 bp, Homo sapiens
gtgggctaaattccagaggtggaatttaagatagggcttcttcacatttcatttccaggccgggcatggcggctctcacctgtaatcccagcactttgggaggctgaggcagatggatcacc

SEQ ID NO: 20384 - DNA, 122 bp, Homo sapiens
tttcggtcttcagctgcaataaagagaaaaatatatatataaacttggcatttgtctcggcgcacagggcaaggccacatgaccctatggaaggactttgttgaaacatttggggtgaaact

SEQ ID NO: 20385 - DNA, 122 bp, Homo sapiens
tctcctgttgccgccatcatgtcccggccctccacggtgttgggtgccatggagatggggcgccgtagtcacccgcgccttcctggagcacggccacaccaagatagacacggccttcgtgt

SEQ ID NO: 20386 - DNA, 122 bp, Homo sapiens
ttgggacctgcagcccgccatgcccgagcctccccctcctccttggactcctgtgaggcccgagactccccgacgagcgccgccccctgctccagggcacccagtcccatcgaccacccaag

SEQ ID NO: 20387 - DNA, 122 bp, Homo sapiens
agtggggagctggaagtctctgaaacaagagttttccgagaaaacgaaagatccctaatgcgagcgaggtaacttctaatgggttcccaggttctaagggggagcagacgtggcggggagcc

SEQ ID NO: 20388 - DNA, 122 bp, Homo sapiens
agggggatggggtcaccagaaagctgacgacacgagagtggctgggccggggctgtccggcggccacggagaagctgaagtgctgcagcagggaggtgaagaagaggaagagctccatgcgg

SEQ ID NO: 20389 - DNA, 122 bp, Homo sapiens
gaggggcgggtctgcggccgcggacagtcctccgggactctgaggtgcttgtgtgggagccgcctccaaggtggcccccctgtgtcattggatgaaccccaagtagctgctgcctctacgcc

SEQ ID NO: 20390 - DNA, 122 bp, Homo sapiens
cgacactctcgggttaccgcgccctcccgtccctgctcctggcggggggtacccatcagccgatgactgggcgcttatttcttgtgtccctgcagcccccgggaaggggttcccagagcgac

SEQ ID NO: 20391 - DNA, 122 bp, Homo sapiens
cccacaactcctctgccgcctcccctcatgcctcaccgtgtctcaggagagaggggtgcacgtttcatggactgttaccaacaaagaaaagtcagtattatgttgttctcagacactttggc

SEQ ID NO: 20392 - DNA, 122 bp, Homo sapiens
tgccaggcccagcgtcttttctgcataggacccgggggaagccgggaagccgttagggggcggggcaagcgggcgggcgtgcgtcggtcaagtttcccgggtcgcgtcaggcttctttctca

SEQ ID NO: 20393 - DNA, 122 bp, Homo sapiens
gcccatggagggagtggacatcagccccaaacaggacgaaggcgtgctgaaggtgaggggcggcggggcctgcggaggcgtcggaacccggggccccgcgggccgcccttccgccgcgcccg

SEQ ID NO: 20394 - DNA, 122 bp, Homo sapiens
gtcactgggtcatcgagtaagcagtgggggccacagggtgcagtttcctcccttcctccccgcccagcccacctacggctctcctcctactctctgcccccgctactttcctgtgctctgat

SEQ ID NO: 20395 - DNA, 122 bp, Homo sapiens
gtcctacgccttcaacatgaagagcgccgtggaggatgaggggctcaagggcaagatcagcgaggcggacaagaagaaggttctggacaagtgtcaagaggtcatctcgtggctggacgcca

SEQ ID NO: 20396 - DNA, 122 bp, Homo sapiens
gaccacagtgggagcccccgaagggcttcatgtgagtcccgaaaccagagtttagaggcgcggcctggttctcgtttatcttttccagacagcatttaggccaataaggtctttgaaaggag

SEQ ID NO: 20397 - DNA, 122 bp, Homo sapiens
gtctacgcactacacgaaggcttagttggtcttctttcgtctagtgggcgcactcaggtgcgtcaccattctgccgtttccctcgcccttgtcctgtccgaaagaaccgtccgcaagctgcc

SEQ ID NO: 20398 - DNA, 122 bp, Homo sapiens
aaaaagaggatggatgggcggaacggaaagatcaatatcctccccaaactcctggtattccggagtgttccttaaagactgtgaacccaaactgctttcaggggtgaagtaagtgacgagaa

SEQ ID NO: 20399 - DNA, 122 bp, Homo sapiens
ccctctcccctctctgccagcacagggccggctgggggcgacgacggtgcgtgcggaggacgcgagctccatctgccgcctgcaggggtgggagggaagcaggctggaccactttgggactg

SEQ ID NO: 20400 - DNA, 122 bp, Homo sapiens
ttgcatgaccacagtgtgtgtgagccacacacagcacttgccttggaaaggctgtgcacacgctaactttgtgggatccttggcccttggctcaaccaggatgagggtggggtgtgtgtggg

SEQ ID NO: 20401 - DNA, 122 bp, Homo sapiens
ttctttggttcgcgtctccgcccgtgttgttttctgggtttccttctcgcccgcctacctcgctccctgctgctggtccccgcccgcactgatggtgcattctccaacttgtccccacccat

SEQ ID NO: 20402 - DNA, 122 bp, Homo sapiens
ggctgcccttcgggggctcctgctactatttctctgtgccgaagaccacgtgggcagaggcgcagggccactgcgccgatgccagcgcacatctggcgatgtagggggcctgggggagcagg

SEQ ID NO: 20403 - DNA, 122 bp, Homo sapiens
gccgccgtcggagggggctgggaagtcgcctgggcacacacgtgccgcctccgttggggccgcggagctgcgggggagatgcgggccgctgccggcgccgcctcggggcgctccgcctcgcc

SEQ ID NO: 20404 - DNA, 122 bp, Homo sapiens
aactgaggaggtcggagggcagtgtcaccgggctactcagctacagaaacgggacctcagcgacctccgatcccggccctcccagcccatccactcatcccccctattcctttccaggatgc

SEQ ID NO: 20405 - DNA, 122 bp, Homo sapiens
ggtcttcaaaaaatatgactaactggaaagtttctagtcacgggtcagcaaactatagcccgtggaccaaattcggtctatcacctgtgttgtatcatctgtcatatatcagctcatgatat

SEQ ID NO: 20406 - DNA, 122 bp, Homo sapiens
tgtctaccttctcccaagtcccagcccactgtgagcacccgccaaggcaagggcaggcatcgcacaaacaggcatcactggactctccccagaaaccatggggctctggagcacaggagccc

SEQ ID NO: 20407 - DNA, 122 bp, Homo sapiens
cgtgtaatcccagaagtaatatgtataaaggcaattggcgactgggcacggtggtctatgcgtgtaatcccagaagtaatatgtataaaggcatttgacggctggcacggtggcttatgcgt

SEQ ID NO: 20408 - DNA, 122 bp, Homo sapiens
gcagccggggaactggttaaatactctcctggcgtggaaagtggtgcagggccaagtgatcggcaaaaagagacattgagagaatcaaagatgcagccagattctaccctgtggttccacag

SEQ ID NO: 20409 - DNA, 122 bp, Homo sapiens
ttacagagaaggagagcaagggccagaggattgagtgatttcacctaggcagccgctgagcggctgggattcaaactcatggccatgactccatgcctgaggtttgacaatggagtcagcca

SEQ ID NO: 20410 - DNA, 122 bp, Homo sapiens
gctccaggccacccctgcccgccccccagagctgttgtcctcatccgccctcctcctcctcgccggcctgagtgaggttctactctgtgacctagtgccttcttgttacagcggaagccatc

SEQ ID NO: 20411 - DNA, 122 bp, Homo sapiens
gaatggggagagctgcaaagaaagcaacaagtggccccgggcggagccggggggtgggggcgccagcctcctcccgccggctgcgctgctgcgcctggcccccgcccccgcaggcatgcggg

SEQ ID NO: 20412 - DNA, 122 bp, Homo sapiens
gcctttcccttccaagagccaaggtcattgcccatctccctgaccagggccatcactttgcgcctgtcagcgatggcacccctgacccgtcttatccgctggggcgagtctcagagactcta

SEQ ID NO: 20413 - DNA, 122 bp, Homo sapiens
atcctggatctggagagagagctctccaagcaaatcaacgtgtgcctctgagccagatgacggggtgggaccccggttagtaaggaccgggcgcccagtggctaaggcggtgccctggtgac

SEQ ID NO: 20414 - DNA, 122 bp, Homo sapiens
tggcttacttaaaaaataagcattgatttcttgcagttccagacactggaagtcctagatcgaagtgctaggagatttactgtctagtgaggacccactttccggttccatggaccactgtt

SEQ ID NO: 20415 - DNA, 122 bp, Homo sapiens
agagcacccaccttcttatcccagccacagatcatactgcccatagagaggcccatgccccggtactggcacatcatgttggacagcagcttggaggctgccgacactgaaatacgttctcc

SEQ ID NO: 20416 - DNA, 122 bp, Homo sapiens
gaaccttcatctccaaggaccaggtgtccaaatcccaaatcagggcacatggtctctgggcgcatggtctggcaattgctttctcctgaactctgtttgtttttatgaaactcttaacaaag

SEQ ID NO: 20417 - DNA, 122 bp, Homo sapiens
tgatctgcaaggattcggagttgtgctaaaaggactttgatttttttccccctttacgaacgctggcaattgacatcactacagacagcctggttagagaacaaactgcctcatcccaagtg

SEQ ID NO: 20418 - DNA, 122 bp, Homo sapiens
gccctttgcctcgttgttcactgtggcctggcagggacagcgggagaggtgagccccggccgagagccagtacttatcagtgccaattctgccccagatgctgagctaccactttgccaaaa

SEQ ID NO: 20419 - DNA, 122 bp, Homo sapiens
gaagtttgaccgaggtaagtaaggtatgtaggggcggtttggaggaagaggctaacctcgcggacatgcccctgggccccgtgtccacccagctcttgtggcctgcccctaccagcaggtcc

SEQ ID NO: 20420 - DNA, 122 bp, Homo sapiens
cgtgccactacactctagcctgggtgatagagcaagaccccaactcctaaagaagcaaaccgttaacaaagaaaaagaaggcaagaaaagccagcagaatcttgaagggtctttgatgccac

SEQ ID NO: 20421 - DNA, 122 bp, Homo sapiens
gatggacacaaataaacagccactgtgggcccccagtggccccacccactcctatggatgcggacaggccagctcaattagctcacagcaggtggagaagtttccagggtcagaagagcaaa

SEQ ID NO: 20422 - DNA, 122 bp, Homo sapiens
ttgcattaaacttgccctatcaatttaagctcagtataaacaccatttcccagagcccctcgtgaagtcagcagtgagaagaagctgactaagcctaaacattttttaacagcaatcttgtc

SEQ ID NO: 20423 - DNA, 122 bp, Homo sapiens
cgggcccggggccacgcagcggagcccagtgtccagtgaagcgtctgaggacccgccgcccgtgccgccgccatggtgatgtcccagggcacctacacgttcctcacgtgcttcgccggctt

SEQ ID NO: 20424 - DNA, 122 bp, Homo sapiens
aagtggctaagtcagggggcttctttggaagctggaatttgaagcggaccggaaggcattcgtaagattcaggtgatcagataagaaagcataaacaaaaaaaggtgaaagcctgaggttgg

SEQ ID NO: 20425 - DNA, 122 bp, Homo sapiens
ctgggacacggggatccacattgccgtccgaatcccatcgccaaagcctgtatgtgcagccgagtgggagagtggcttaggtactgagttttagggcaagcataccccagaccacgagaaga

SEQ ID NO: 20426 - DNA, 122 bp, Homo sapiens
gggctgagagcaggctggcctgggagtggaggagcccaagcagtggccatcacccccctccgacccccacccccgccagcctatgtctggtgtgtagggatgacagaggggtgctggtgggc

SEQ ID NO: 20427 - DNA, 122 bp, Homo sapiens
tagtagtagatatcgaagataagcgagagcggcaggaggaagaggcacacgaacacccagcgctggtggatgagcacgaactccagccccttcaggcgcacccacagcaggaagagcagcgc

SEQ ID NO: 20428 - DNA, 122 bp, Homo sapiens
tacctccactgccttggaggctgaactcttactttaatttctgtctttcttcctttcctgcgtttgaggagggggtgcaggaatgaaggtgtgtgtggggagggagtgcgtggtggggacgg

SEQ ID NO: 20429 - DNA, 122 bp, Homo sapiens
accattcattcacccaggaaaaacttactgcacacctaccttctcctcagaactagaaaacgatgatgaatcagacctggttcctccactgtagtgaacagaaaggcccatctgtctcccgc

SEQ ID NO: 20430 - DNA, 122 bp, Homo sapiens
tcaccacgccccccaccctgggcgagtttgcataaataaacaaatccaagccgtcggccccgcgggaggtggaggaggagtgacgaggaggaggaggaggagggaggggggagggagagatt

SEQ ID NO: 20431 - DNA, 122 bp, Homo sapiens
cgatattgggagtaatattattttctacccccatggatgttgagaacgatatcacaagggcggtgtacaccatctgcgataatgggagtaatatcatcgtcactccccctggatattagaaa

SEQ ID NO: 20432 - DNA, 122 bp, Homo sapiens
ggtaagggcggacccttcacctagaaggctgccgccccttccccggcctcacgcctaccccgcttaggcagaatcctcgggaatgttggccgcagccgcagatccacagctctggaaccact

SEQ ID NO: 20433 - DNA, 122 bp, Homo sapiens
tgaatctgaattctctgaaagatcagggaaaatcctacacttcagctccctctatcccaccgcgaggaatcacacagggcacccctttcttcttaaattgctctttcttaaatttcattgcc

SEQ ID NO: 20434 - DNA, 122 bp, Homo sapiens
gcgggcccggggaaaaccgcccgcggccagaccggcagtggaagctgagacgcagtgctgcggcccctccccgtcacgtcagggcacttacctcctcgcagctgggacgctccggtgatgcg

SEQ ID NO: 20435 - DNA, 122 bp, Homo sapiens
gtgatcgcaagtaacaaaaagggaccaacgggaagaagtaggtaaatttcaaggcgaaagcggggacacttggaccactgcaggctttttttgtttgttttggtgcttctgctaggcgaaga

SEQ ID NO: 20436 - DNA, 122 bp, Homo sapiens
attctaatttccagcctgaagacccttctccctatcccaggaggagcccaggaacgcaagcgagagcctctgcaagtcaccccagctgccgcgtttccacccaggaggaagacgcacgtggg

SEQ ID NO: 20437 - DNA, 122 bp, Homo sapiens
atccaactggtctggtgcttttgagatatgtgttaagagaccctcaaatgccgggctagtcgcattcaccacagtaacaggctctggtacagagaagggcttggatcgttttttaaggattt

SEQ ID NO: 20438 - DNA, 122 bp, Homo sapiens
aggcagggaccactctagctgacaagtggggtttcaccaatgcctacgataagtgatgcacgggactggggaaatggtgccatcagacactttaagacttgtggcatgtcactttggggatg

SEQ ID NO: 20439 - DNA, 122 bp, Homo sapiens
cgccacgtgacccgtagtgttgtggtctggcccgcgtgggtggcgggagcgccgagagggcgggggcggcgatggggcgggtcacgtgatggggtttaaatctcccgcagccggagccgcgg

SEQ ID NO: 20440 - DNA, 122 bp, Homo sapiens
ctcgcccgctgcgcggctcgcggggaactgcggaagcgccgacggtcacaccccctggcccgcctccttgcgtgctgcgccccgggacccccagacttgtgctccccatccgggcgcgggca

SEQ ID NO: 20441 - DNA, 122 bp, Homo sapiens
gatggattgtgcagcttcagggggcacaggctcctggccgggtgccagcaagcgcgactgcgcacctcggatcagtgaggcttgcttctgccagatttctcgcggctgtgtgaagtattgca

SEQ ID NO: 20442 - DNA, 122 bp, Homo sapiens
cttcctgcctccctcacgctctccttgccctactctccaggacagcctgtgccagtacttcgcccaactcaggcacatgccccctggctgctcctgcaggccaaggaccggcatgcgctgca

SEQ ID NO: 20443 - DNA, 122 bp, Homo sapiens
gggacagggggaagtagcgcagccagtggtccaggtgctgggcgtacaggccgatgcggacggcgctccaggctgtgtccacggggcccaggccgtggcggaaggccagggcgcggaagctg

SEQ ID NO: 20444 - DNA, 122 bp, Homo sapiens
tctgtccgcaatgaagctcttcggccttctcggcacccatacgtttgggaacggcagtttcgaggtttgtgagacgtcggcttccgaccggaagtgagaagaggaggaagttggctggttgc

SEQ ID NO: 20445 - DNA, 122 bp, Homo sapiens
gcatgattagctaagcaaagttgaatagctttcttacaatgctttttggagtttcagtaacggggtgcatactgagaatctccaatagcatgagggcattttgcaaactcatttgctcagag

SEQ ID NO: 20446 - DNA, 122 bp, Homo sapiens
ggacagcacggggaatcaactatcaagccacagaaggggatcaggactgccagtacccagcgcacaaggaggactcaaggaggcgggacaatggcgccggacgagggaaaactacaattgtc

SEQ ID NO: 20447 - DNA, 122 bp, Homo sapiens
ggtttcagtttccacctagccgcgtgctctccgggttctgcgtgctcctcccagggcgcccgctgtgccccagttctggacctgggtcctacccagtggaaaccaacgagtgggtgccccgc

SEQ ID NO: 20448 - DNA, 122 bp, Homo sapiens
tgagacgagaggatggggcagcaggggaccgggacctgcgggcagctgtggtgatcaggacgctgaggagccaggaggcctgcctggaggcggtgctacgtcgactacagggacagtgtcgg

SEQ ID NO: 20449 - DNA, 122 bp, Homo sapiens
tcccgcagagtttgtggagataaacagaagcttgacaaacacaactgagcagaaaacgcccgcaggtggtcagtaggcgcttccagtgttatcacaagaccacacgccgcacgtcagcacat

SEQ ID NO: 20450 - DNA, 122 bp, Homo sapiens
tccaccctccccacgggcgagttaaaactgttcccccgccgtgggaaactgccgaatgaccgtggaataaaggatttcccatcaggctttgtagccatttccaactccaatgacatgaagaa

SEQ ID NO: 20451 - DNA, 122 bp, Homo sapiens
caggacgtcccaagtgccttggggtgacagttgagggttgagactcgggcatagagatcacggcctggtcccagtgatcttgaaccccaaaggccagaactggagcctcagtccagagaatt

SEQ ID NO: 20452 - DNA, 122 bp, Homo sapiens
agccaagggctgggctcctgtcattgggacttccggaaccggccacaccccttcagagcacggatcacctactgggggcagaggctgcgcgtgagtcacccttcctgcttctgacagggctc

SEQ ID NO: 20453 - DNA, 122 bp, Homo sapiens
gcgctccccctggccactcatgttggagccctaggctatcaggaatgcacatagggctgccggctcctgtgagccttacttcttcccagaatctaggtatctctcatttctggacctttgca

SEQ ID NO: 20454 - DNA, 122 bp, Homo sapiens
ccgtagccgtcggccggcccctccagatcagcccagctcacgttctcgggtagccagaagcgctcgctccacagccagccccacagcaagcttaggggtccctgcgctgctgtcgccatctt

SEQ ID NO: 20455 - DNA, 122 bp, Homo sapiens
aaaaatagctgatatttactaaacatctactctgtgccattttaagtgctttacatatatcggctcattaaattttaacaaccacataaggtaggtactattgatagttcccagtttataca

SEQ ID NO: 20456 - DNA, 122 bp, Homo sapiens
cgaggtaaaatatacttataaaattttaccatcttaaccatttatttatatcaattgaggcggctctcgtggaggcagctagcgcgaggctggggagcgctgagccgtgcgtcgtgccctgc

SEQ ID NO: 20457 - DNA, 122 bp, Homo sapiens
agacacagccaagagccatgagcggcgcctcctcgcctgccaatcctggcacctgtgcgccgagccactgcaccgaggaggaccctactccgggtgaacaccgggcttgaagccacggacac

SEQ ID NO: 20458 - DNA, 122 bp, Homo sapiens
tcacacactccaggctgcgggttggccagagcctggaaatcgcagatttcaccaggaaatcgccgaggtacccgaataggtgttgcctcccaaaactaattcctacttccccaagcactttg

SEQ ID NO: 20459 - DNA, 122 bp, Homo sapiens
taagggcatgcgctggaaaggactgcggggactcgagggaccgcacccaggacacagttacgcgacaaaagagagctccggatacggcggagggcagcccgagccccccatcccttccagag

SEQ ID NO: 20460 - DNA, 122 bp, Homo sapiens
gtggatgtcctgggcccccgagggggcggcaggcagaggtgcggcgcgagcatgcgagagcgccaggcggccaccagggggcagcaccggcctccgccccgccccccgcacccagccatacc

SEQ ID NO: 20461 - DNA, 122 bp, Homo sapiens
aatcaatagtatttcttttaaatcaagaatccattgtgtttaatatatttgagttggtagcgtgacaactcatttgtttgggataagattttacatgagttgaacaatgacaactaatggct

SEQ ID NO: 20462 - DNA, 122 bp, Homo sapiens
gcctccccggcgctcgccgcccgacctgcccaggccgccacgcaggcggtgacccccactcggtggctttgggtcctctgccagcgctcggacccaaggacagggtcctcaggagccgctct

SEQ ID NO: 20463 - DNA, 122 bp, Homo sapiens
tcttgcctcaagaggaaggaactccagctgcagcaggtacaatccatgctccagagcccccggtggactggctgaagcaggtctccagctgagaccacatctcagctcatctccttccctac

SEQ ID NO: 20464 - DNA, 122 bp, Homo sapiens
gcagcctccctgccagcacgcctggcttcccggcctcggaacttgatctgctccctcttccggacactggggctcctgccaagtcctgggctgggcagcaactgctgaacattctaagaaat

SEQ ID NO: 20465 - DNA, 122 bp, Homo sapiens
agatacacggccccccgtgttacccacagatacacggcccccgtgtcacccacagatacacggccccccgtgttacccacagatacacggccccccgtgtcacccgcgtgtcacccacagat

SEQ ID NO: 20466 - DNA, 122 bp, Homo sapiens
gtgtgctggtgctgagcataatgagaaactcagccaccaaacacttctcaggtgggggagcgtaaggcaggaaggacttcacgcagtgacacatgaatacagtttagaagaacctcttaatt

SEQ ID NO: 20467 - DNA, 122 bp, Homo sapiens
gcggcgcagactgttcacgagcccttggacctttcctagttcttctgaagtgttctacaccgcgttcgctcttccttttctggcgctggtggctggcctaacttcggtctcagagtctttgt

SEQ ID NO: 20468 - DNA, 122 bp, Homo sapiens
gacagtggagagtcagcagcccaagctcagcactttgggcatgagtcagtcccccacaggcgtgtagacttcatagccctctgaccctcacctggtgctgtagaattccaggatgcagtctg

SEQ ID NO: 20469 - DNA, 122 bp, Homo sapiens
tcttctcagtttggttgtgtttgtgactacttttaagcgggcttattaagaaattttgagcggacttatcatcgtattccattttagcgttagagagagcccaaatcccacgttagacgtaa

SEQ ID NO: 20470 - DNA, 122 bp, Homo sapiens
ggttggaatgatctaaggacacaaaagcatggggcctcggggctggggcggtgcgactaccggaggcgcaagttgcgcacggggtcccgggagcgatacactgcctccccggtgtcagtgct

SEQ ID NO: 20471 - DNA, 122 bp, Homo sapiens
ctgtgtatggtcagttactctgttctcactgccactgcagagccaaaattacctcatacccggactattattacagaagcttcccagccagtctcccaaccttcagtctcttaattgtccca

SEQ ID NO: 20472 - DNA, 122 bp, Homo sapiens
tgagcgcgctgggaggccggaaacaaaggtggatgcgcgtgaacagacgccctcgcaggccgccggaagcaaaggcgtgagcgcgcgtgcgtgcgtgtgcgggtgcgtgagcgtgagcgcgc

SEQ ID NO: 20473 - DNA, 122 bp, Homo sapiens
ggcagtggaaggataactaagaaaataataataacaaatgaaagcatctctgtggagcttcgagatggttttgtggttttgacatccttggtttattgtgtctgctatgcttgtcattacaa

SEQ ID NO: 20474 - DNA, 122 bp, Homo sapiens
gacaccatattcctacaaaggaggcctgagaccaacaaaaaggacaagacttccaggtcccggtgtgaatctgctgagctttataacctaggctgtgacctcccccaatccaggtccttaag

SEQ ID NO: 20475 - DNA, 122 bp, Homo sapiens
tgggtcttcgcgtaggatctgccagcctgggttccccggcaggtcagagaagctttggggcggggccaaggttggcccctgcttgggaggagccgggatgcctctctcacagtgatgcagag

SEQ ID NO: 20476 - DNA, 122 bp, Homo sapiens
cggggaccccaaggggaggttcgcaaacaagatgaaggttcatctgtctggccggggctgcgttaagtggaagtcttcaggggactgtgccccaggtttcttgggaattcttgtgataggag

SEQ ID NO: 20477 - DNA, 122 bp, Homo sapiens
gtcgctgacttgccctcagaagcctatcttgggaggccacacaccagtgtacctaaggttcgtttacccggaccggaagcgacagcaccgatacctttggcacacttccgcctggtacacta

SEQ ID NO: 20478 - DNA, 122 bp, Homo sapiens
ctgcagacataaggcttctcccctgtgtgtgtcctctggtgactgaggaggtctgacttccggctaaagccctcccacactctctgcagacgtagggcttcccccctgtgtgtgtcctttgg

SEQ ID NO: 20479 - DNA, 122 bp, Homo sapiens
catgacaggtttctgattttctagctttttaacagtaaaggtaactttatttccagcattcgaccaaaatgcagggatttgggccacatttacttggctccgggggagtttttcaatcctgt

SEQ ID NO: 20480 - DNA, 122 bp, Homo sapiens
gaaggctccgacatggaggtcggctttggaactcgggctctgggctcctgggctggacaccggcaccgtctaggttggggaggctctgggaaagaccagaatgccgaacccacccccgagga

SEQ ID NO: 20481 - DNA, 122 bp, Homo sapiens
tttggcgctgtctacaccatgctccagggctgcctcaacgagatggctgaggacgcccagcgtgtccgcatcaaggccctggaggatgacgagccgcagccggaggtcagcttggaagtggc

SEQ ID NO: 20482 - DNA, 122 bp, Homo sapiens
ggcggcagggaagacggagaagaaaccacccgtgggccctggctctgtgtccagttgttccgtcacagatcaaatctgcctgcactaagaggatgggttcctctgcaaggcctttcggaatt

SEQ ID NO: 20483 - DNA, 122 bp, Homo sapiens
tgggagggacatggttcagcccctaggagagggcagcatctcccatacagtggctcctcacgtgctcctggctgtgcatcggcccccctggtttccagagctccaggcctgggcaggtccct

SEQ ID NO: 20484 - DNA, 122 bp, Homo sapiens
caaaatgcccaaataaatatatacctacatatacacttacagtatatacatgcatgtgcacgcacacacacacacacacacacacacacacacaagcactgcacatgctcagggtcacattg

SEQ ID NO: 20485 - DNA, 122 bp, Homo sapiens
ccgggaagctgtgtgtggcggtcagcgggtcagccgtcctggctccaccccagtgtgtaccgtctccgctgggagaccctgtctttctgactgtgcctttccccttcagatttgagtatctg

SEQ ID NO: 20486 - DNA, 122 bp, Homo sapiens
ccatggatgtaagagacatccccaaggaggatgcaaaccatgcagcccttttgccgggcgcggtggctcacacctataatctcagtattttgggaggctgcggcgggcagattacttgaggt

SEQ ID NO: 20487 - DNA, 122 bp, Homo sapiens
cctccgccccgccccgcctcactcctccccgccccgttccttccctttagagcacctctccggcttcctgggtgcgtccccgccgctgccgtctggagcattcctagccaatcagacacctt

SEQ ID NO: 20488 - DNA, 122 bp, Homo sapiens
ctctgtcacctgccagtttccttttcttgaaacttcatctgatttctcaatctgaagtctcgcaatggagccccaccatagaacaggaataggaaggaaagagcctggaggcaaggtgggtg

SEQ ID NO: 20489 - DNA, 122 bp, Homo sapiens
agagagagagagtgagaggagcagatctcagagcagccaactgaagcaaacggacacaagcgaggagggctccccgcgggagaatccccgagaggcagagggcgagctccccgagagcggtg

SEQ ID NO: 20490 - DNA, 122 bp, Homo sapiens
ggggcgcccactgtggtcccgggccttgtccactgtgcggagctcgcagtgcgggcagtgcgcgccggggctggagggaggggaccaccttgtcgccgggttgggatgagcacagggcggga

SEQ ID NO: 20491 - DNA, 122 bp, Homo sapiens
ggattattgccaagttcccactctacatgctccttgtagtcaagctagtgtcacgcccctcgcatttttaagaaggtaacattacagttgtgagtcatagttacccagcaggaagccacatt

SEQ ID NO: 20492 - DNA, 122 bp, Homo sapiens
gagcaaagggagactacagacaataatgctgccctactgatcacaaacacttcagtgtcacgctctcagcatagtattttaaatggaatcctgagtcaggattcctgacaaatccattagaa

SEQ ID NO: 20493 - DNA, 122 bp, Homo sapiens
ctggtctcagctccactgccccatccccaggttgccaccgcctaacggaccactgcctcccgctgttccgccgctgccctcgtctacgccgcctagacctgcgctcctgccgccagctctca

SEQ ID NO: 20494 - DNA, 122 bp, Homo sapiens
aggtggtcagccccagggctcacctgccctttgccagggtcatgagctaggcccaggctgcgcactccacaaaaccatcaaggggacgactgcctgccaggctgggacaactgcaccaggcc

SEQ ID NO: 20495 - DNA, 122 bp, Homo sapiens
tctgaagcaggaaagacaacaaagtaacttgcaaatctgaatttaggtctgaaatagtgacgctgaagtgggatctgaggcccacactttagcttcccaacgaattttcagtcttttggctt

SEQ ID NO: 20496 - DNA, 122 bp, Homo sapiens
ttacgattaatgatagaatggagaagaaatcaaatagagcaaatttatagagaaggcaatcggatgcatttgcaaaagcaactatgcggttttctgatcctaatagttttgttcaaagccca

SEQ ID NO: 20497 - DNA, 122 bp, Homo sapiens
ggcgctcgggctgggcgccctctctagggcctgggagcagcgtgagtcccgggggcggcccggcatgggcctcccaccccaggagacgcccttctggcctggccctcccagtcgcctgggca

SEQ ID NO: 20498 - DNA, 122 bp, Homo sapiens
tgatacgaatattaagtagttcctaacttagtggtcccaaacccctggtggcttctagaacgactgccatgggctcatgaattatcatatagctaccgtgcacagaccacagaataaataag

SEQ ID NO: 20499 - DNA, 122 bp, Homo sapiens
ccaaagtgcctctcgtcctatgccctaggcacaccggagaccagccgccaggttggccgtcgatatcctgcgtgcacacaattgtgcgctgccttgcagacctagaggctcccgcacgtgca

SEQ ID NO: 20500 - DNA, 122 bp, Homo sapiens
caacagagcaagaattcgtctccaaaaaaaaacaaaacaaaacaaaacaaaaccacaaggcgggggagctggagcatacatgtttgaagtagaatctttgacaagctgttctgcatccactc

SEQ ID NO: 20501 - DNA, 122 bp, Homo sapiens
aaaaaggaggctgggcgcagtggctcacacctgtaatcccagcactttgggaggccgaagcggatggatcacctgaggtcaacagtttgaggccagcttaatatggtgaaactctgtctcta

SEQ ID NO: 20502 - DNA, 122 bp, Homo sapiens
ctcacccttcaccaaagttgagaggacctttgtgcacattgcggagaaaacccacctcaacgtcatgtcttccggtggacaagccttgcggtctgaggagttcagcgctgggggcgagctgg

SEQ ID NO: 20503 - DNA, 122 bp, Homo sapiens
tgagctgcccctccaggtaccctcttgcgaggagacaggagccagaatgtgggaacagggcggtcataaccaaactggctgcgaggtcccaaggtactctaggaaacccctgagctcaggtg

SEQ ID NO: 20504 - DNA, 122 bp, Homo sapiens
agatttaaaacatgaatggagtttaaacaagcagaatgaagaagaggaaggagaactgggcgaaagaggatttgagtcagagagaggaacacatgcagaggtcttggtttgtgaagaaatcc

SEQ ID NO: 20505 - DNA, 122 bp, Homo sapiens
gaggtacagaatgttagaactgtaaaagcactttggaatctgttgtctctgtgagtgagccgctatgcatcagacaccagtatgagtgggattatggaaccatgggctcagaactgggggaa

SEQ ID NO: 20506 - DNA, 122 bp, Homo sapiens
aagctgcgacgcgagctccgcgcgcgggatctccgcaaaaggtccgcccgatgcgttgggcgggaatcgagcccgggtcaactgcttggaaggcaactatgctcaccactataccaccaacg

SEQ ID NO: 20507 - DNA, 122 bp, Homo sapiens
atagagcaaaagggccaatcctagatcagtgatgactactgttggtgtatgagtcatatacgatgaatacatgtctgaaattctgaggtccaatgtgaaagagatgtagctcatttactctg

SEQ ID NO: 20508 - DNA, 122 bp, Homo sapiens
caggctctggcctcactgcacgggcggggctggacgtcagtgccgggcggggagtagggccgggagaggagcggctgcaggctggagagggctcgcagccgggctcggagctggggccgtct

SEQ ID NO: 20509 - DNA, 122 bp, Homo sapiens
gccgagctgcagctcttctgtgccaggcggaagcaggaagccctgggacagggggtagcccgcctggtacttcccaagcttgaaggacacacctgtgagaaggtatgtagcacccctccccc

SEQ ID NO: 20510 - DNA, 122 bp, Homo sapiens
ctatgttatctaggctggtctcaaattcctggccttgagtgatcctcccacctctgcctccgaaagtgctggaattgcaggcctgagccacggcacctggccaacagaatttattgagtaaa

SEQ ID NO: 20511 - DNA, 122 bp, Homo sapiens
tgaaatttagcaagaagacatacattcatgctggttttctaggatttacttctatacacacgtgccttgaaatgaaaacaatgatttctatctatagactgaattaaacccactcaaacaca

SEQ ID NO: 20512 - DNA, 122 bp, Homo sapiens
ggccgtcggcctcctctggggaccccagccccgagtgggctgggtctggagctccgaggccgcacctccggtgggcgcgtcctccgcccgggctcacctcggacccgagctgcccggtccgc

SEQ ID NO: 20513 - DNA, 122 bp, Homo sapiens
aaattttttttaattcttaaaaatctattgcttaatccccagcgcctagaacagatcatgcgcataggaggtgctcaatgaatctttcttgaatgagtaaccgaactctgcacccgaggagc

SEQ ID NO: 20514 - DNA, 122 bp, Homo sapiens
acaagtccttaggaaggcaccatggcagagccgcggaggagtgcaccgcggggatgctggcgccgcccttttcacctcgaggggtctctgttcctctgttcaccgctttctgtgacagcgca

SEQ ID NO: 20515 - DNA, 122 bp, Homo sapiens
ccctcggtgggtcctgggccttttgaactcccgtagacgttcaggggagcctgcattccccgtgagaaacgctgagagaggaccacgggtgtgtcgagccttgaaggagggaaaaggcggtg

SEQ ID NO: 20516 - DNA, 122 bp, Homo sapiens
accctgacagcggcagcgggcgagcgaggctccccagaggggcggaggccaggaccgagacgtcccctaactagacctaagccttgagggccgcccctccccaggttagcgctaccatcccc

SEQ ID NO: 20517 - DNA, 122 bp, Homo sapiens
tccacaccggcctcccacaccttccctcagatgctggtctttttggggtcctgtgtgggtcgcaggcaggagctgtttcctcatctgccccctgtctggcgtcccctcccacctctgctctg

SEQ ID NO: 20518 - DNA, 122 bp, Homo sapiens
agaggacacactctagctgagcaaaggctgcattcggcaactagggtggtgtaaacacctcggatctcactgcagccggaaggaagtcacggcatagtcccttttcaggagtctgagggata

SEQ ID NO: 20519 - DNA, 122 bp, Homo sapiens
ggagggaccctgtctgcccacagggttgcaggcctgccagctggcgctgagcaccaggaccgtgtgggcccgctgtccaaacggagacctcgcccggcggtacggcgtcacagacaagaacc

SEQ ID NO: 20520 - DNA, 122 bp, Homo sapiens
ccgcgccagacactcaccaaagagagtgcagaacatgccccccaggatggggtcagggagcgaggagaagagggccgtgaacttgccgatggtgcccaggaccagcatgatagccgcaccat

SEQ ID NO: 20521 - DNA, 122 bp, Homo sapiens
gatgcccctggagcccgggaggccccaccctgggcttctgcggcccaggcgcgacccagccgcccggggcgctgtccgccccttagagtgctgaaactctcttcattatgggtctcccgatc

SEQ ID NO: 20522 - DNA, 122 bp, Homo sapiens
gctccgggttagggtgttgggcaaatgggcgtgcaaaggacgggcagctccctggaaggtcggggtaactgctccgggaccgcggggcccaaggccggtctcctcccagaaggattaaatgc

SEQ ID NO: 20523 - DNA, 122 bp, Homo sapiens
tggagaggaaatctgaggcttcgcccctctctggccctgattcccatgggaagaggagcccgaccaggcaggatccagtgaggcctcggttctgtggccaggtgtcccatggaggagaatca

SEQ ID NO: 20524 - DNA, 122 bp, Homo sapiens
tccccggccccgcccccttatgcgtctcccaggcaacgcgccgcgcggggctccaggttccgcccagggactaactccaggtctgcgcgcgtccaacgagcacggctctcaaccggcctcct

SEQ ID NO: 20525 - DNA, 122 bp, Homo sapiens
ttaactggcggaggtggtggaatacattaatcacatctcttattcttctaggtgcttcttcgatttttgatgcaagattaatacaagccatagcaacaatctgaaagaacccatgagccaca

SEQ ID NO: 20526 - DNA, 122 bp, Homo sapiens
ccggagcttgggacttctgaagacgcggggcctcgtttggggtcgcaagtctgagcgctccggctctggttggcgctaggtggcgcccgagagcgcgccaggctcaccctggggagacctgg

SEQ ID NO: 20527 - DNA, 122 bp, Homo sapiens
ctacccgccgggaagtggagtctgggcccacccctgccccgctgagcctggaaatagtggcgggccgggccgctgcgctgtggcttctgggatctctaggtccgcggctccggacacctcct

SEQ ID NO: 20528 - DNA, 122 bp, Homo sapiens
gtggagggcaggacgtggggacagaaatgttgccggtctccagcatcaggagggtgtgtgcgggctgtgctcagatgatggatgatggcgggaaagctgagcggatataggagctgtggcct

SEQ ID NO: 20529 - DNA, 122 bp, Homo sapiens
acacgaggacacacagggcaggggctcttccctgggtgaggtttgtgtttggatttcaggcgtcgctgatggtgaagtgtgcttagggttttctttgtaattcacattcctgtgtctacctc

SEQ ID NO: 20530 - DNA, 122 bp, Homo sapiens
acaaatgattcactttttcttataacttgtcctatgcattcttagctgtgtctacacagacggaacagcaggtttctagttaggttcacatttccaaatacttctctctattcagaacacac

SEQ ID NO: 20531 - DNA, 122 bp, Homo sapiens
ctgaacaatagtggtgcagctcgggacgtggtgcgagggcccacactccactggagcacgcgcggaccaccgtgcctcagctgccacaaagggagcctcgccacacgcccgcggccgcctcg

SEQ ID NO: 20532 - DNA, 122 bp, Homo sapiens
tcctgccttcccaggcagaccaagtcaggaatgctggcagccccttctgaaaaggatgcacgtggcatcccaactcatgacctctgccctctttcccccttctggtgcactttgggttgctt

SEQ ID NO: 20533 - DNA, 122 bp, Homo sapiens
cggcaacgcggagaccaactgtccgaaacaaacaagaccaggaggtttgagggtagccaacgaggagtgcgaacagagcccccttgagaggaggctgggaaaaggaacctgtctgggatagc

SEQ ID NO: 20534 - DNA, 122 bp, Homo sapiens
ccccgctgggccacgctgactctggggaggcgggcggggcgagaccacttctggggaggacgcccaatctggggactttctctaggtgcccggggagaaggcggcgcagcagcaaagccctg

SEQ ID NO: 20535 - DNA, 122 bp, Homo sapiens
tgcttttcagtgtctctttcaactgctgtcattgtgtcttgaagtttttagtctgttacgcgattttgtattcaggataattgtggaggattggagatggccccactgtgtttttcttaaag

SEQ ID NO: 20536 - DNA, 122 bp, Homo sapiens
ctgaagatcgggcccttcctggtgccctggtctcctgcattgagctgtggtgagcacatccggatcctgctggatgcgtgtgcggggaagggggtgccctgggttgggtcaatgagaacctt

SEQ ID NO: 20537 - DNA, 122 bp, Homo sapiens
gcaagagtgactattcattcccatgccccattgcattttctgcagcaaatcaatatatatcggcgaagggatcttttcttttcctttctttttgtaaagtggagcagggctccccattgccc

SEQ ID NO: 20538 - DNA, 122 bp, Homo sapiens
tgtctgttcggtttaacaaatggaatagaacacttcttagttttctcatccactctgtaacgacaaaaaaaaatgtttttaagttagaaccagcaataattattttttcaagcacaaaacta

SEQ ID NO: 20539 - DNA, 122 bp, Homo sapiens
cacttcacaggcaaagaaactgaggctttgcagaaggcatgtggcttggacaaggtcccacgagggaattcaacccccttgtccactcaaaggccctcggctgcaccgcacagcctggactg

SEQ ID NO: 20540 - DNA, 122 bp, Homo sapiens
ctgcagggaaagctactcacggcggccgtggggagcctctgcgtgcaggccacgggaagccgcagcttccagtccgtctccccatccagctgatccgtccgcaagaagcatgaccctgtgga

SEQ ID NO: 20541 - DNA, 122 bp, Homo sapiens
gggcagccttaaggaagggtgtgacccagaggctgggccagggggcggaaccatgaaggacgagcgtaatgcctggctccttccacctctgttcatcaccactctttttgctgtgattccaa

SEQ ID NO: 20542 - DNA, 122 bp, Homo sapiens
ccacggggatgaagaaaacacatttactgcgggcgggggtctgagggcctgcaaacaactcgagctggagcctcggccaggaccggcgcgagaggcggtaggtctccagggaggcccccggg

SEQ ID NO: 20543 - DNA, 122 bp, Homo sapiens
ccagggccctcaggggcctccttcccccaggggcaaggcctggatcttgctcggggggcccgtcttgcagggcgctttcggtccgacgccgctgtaccgtgcagcctttgggggccacctgg

SEQ ID NO: 20544 - DNA, 122 bp, Homo sapiens
cagtttgtagaaaatgggcacaattctaggaatagctgtcctaatgtgttagctcaatgccgtggatgcgtcaacaatggctggtagctgccaccagttgacctgaactttatgtggttttt

SEQ ID NO: 20545 - DNA, 122 bp, Homo sapiens
cgctacccgcggacccggcccgactcggctcctctttgttagcgctgcccccatctctcccggcccctaccccaaagccaggagccaagcatcccgtagctgggccaggtgaagctgcgccc

SEQ ID NO: 20546 - DNA, 122 bp, Homo sapiens
ggacctccggcctggggagaccacgggtgctaactctgctggcgggccaacttcagacgccggcgctgccgcggcgcccaacccaggtccccgaagcaagcctcctgatttaaaggtgagcg

SEQ ID NO: 20547 - DNA, 122 bp, Homo sapiens
aactagatcagtccgtaagaagtacggcttccactcgcagtgtcctgaacactcgctgggcgtcctgtgcgttctagccggttttctttggagccgcgggtttctgcaccgcgcccgggttg

SEQ ID NO: 20548 - DNA, 122 bp, Homo sapiens
gaaaaggccactgggaagggatggacaaacgaggaatcaaatagggactttagacaacatcgccttgtcattgccagcacacaggactcctctgtttgcacttaagctatttcaacattgct

SEQ ID NO: 20549 - DNA, 122 bp, Homo sapiens
ttgcattttctgatataactgagcctccaggtatgctcattagtctttggggtttcttctcgttaaattgcttattcatgagctttacgcattttttactagtgtttctgtctttttcttgc

SEQ ID NO: 20550 - DNA, 122 bp, Homo sapiens
taccgctgtgacatctgtggcaagagcttcagccagagtgccacgctagctgtgcatcaccggacccacctggagccagcaccctacatctgctgtgagtgtgggaagagcttcagcaacag

SEQ ID NO: 20551 - DNA, 122 bp, Homo sapiens
caacccacaggagagaaaactgctccctggccacagactgaaccaccaattctggccaaccgcctcataaacacaggcccaggtcataatgggatccagatggaggagtgtggacagtcaca

SEQ ID NO: 20552 - DNA, 122 bp, Homo sapiens
ttaagtgtgttgctcaaaaacaaataacaaatgaaatattagaagtcaggttacccaagccgagggtgcccacatgacacttctcgagagactgaggaattttcttcagttaagattgtacc

SEQ ID NO: 20553 - DNA, 122 bp, Homo sapiens
gctgtgatgacctgcagttctccagaaagatgcttcaaagacaaaacaagattgagcacacggcctcccatctctcttgcctgagtcactctactccttaaaagataagcaataatagtcct

SEQ ID NO: 20554 - DNA, 122 bp, Homo sapiens
acaattccctctcatcttcctctgatgcccagaagctggttttgtagaaagaaaaggttgcgcttacacttgtttttagggtgaacatgcttagtttgctctttttacaacagaatcacagg

SEQ ID NO: 20555 - DNA, 122 bp, Homo sapiens
ccatctgtctttgccctgtcttttggtcccttggtcctcacatttgtctttctttctctacgtatctctgtcttcactctctggttgactttgtgcagctgtggaaggtgaggctctgcctt

SEQ ID NO: 20556 - DNA, 122 bp, Homo sapiens
ttcaggtgatccgcctgcctcagcctcccagagtgctgggattacaggcgtgagccaacgcgctcagctgagtccagaaatagaccaaatagtaattgttttaggtttttgcaggccacaca

SEQ ID NO: 20557 - DNA, 122 bp, Homo sapiens
gtgtggatttgtgtgtctgggcatgtgtgtgttcctgtatacctgcgtgttgctcgtgcacgtgcctgcatgagtgtgtatctgtgcctgtgtgtgaatttccacgtgtgtgaatgtgcctg

SEQ ID NO: 20558 - DNA, 122 bp, Homo sapiens
cgtccaggaccatggccagccccctctctcggccaccgtcacactcactgtggctgtggccgacagcatcccagatgtcctggctgacttgggcagcctcaagccttcagcagacccagacg

SEQ ID NO: 20559 - DNA, 122 bp, Homo sapiens
tgctcactgaagggacgtccctgagccgtgcgctctccttttgcactcattcctggaggacggattccgctagacaccctccagcatcgctgactttataaagcggaaaaacggaaaacgtg

SEQ ID NO: 20560 - DNA, 122 bp, Homo sapiens
gtcagccacctctcccagtcctcttctgctttagagctcttgccctactattcaaatccacgctttggcatttctttgcctactttggtaaattggcatatctagtggaagcctcttgacct

SEQ ID NO: 20561 - DNA, 122 bp, Homo sapiens
gcgaaaataacttccataccagagccccagaatccattcgtgcctttctctaaagcaaaccgattatattttaacatttaattaacagcgctcaaaaaaaaaatcagtgttaagtattcctc

SEQ ID NO: 20562 - DNA, 122 bp, Homo sapiens
ctactgtaagctcttttgcccccttgcctttttgtcacatggatttggtaagaataccaacgctgtgtgaatccaaatgcaccttttctctttgttagctcccaaacagccaagcacagctg

SEQ ID NO: 20563 - DNA, 122 bp, Homo sapiens
ctgctttaggagtaaagtttaccctgcagttccttctgtggtgaagttttctctttctctcggagaccagattctgcctttctgctggagggaagtgttttcacaggttctcctccttttat

SEQ ID NO: 20564 - DNA, 122 bp, Homo sapiens
ggtttcccgcatcccgaggaaatacgggcgtccgagccggtggccgagctccggcaagggcgggaaccttcaggattaaatagacagggtctggctctgtcgcccaggctggactgcagtgg

SEQ ID NO: 20565 - DNA, 122 bp, Homo sapiens
ggccaggactagcattgggactggccttggatgggccacttcccgccctttgccctctgccgtggcagctggcactgctcatcctgtgtctcccacttgcctataaatagccgggctggcag

SEQ ID NO: 20566 - DNA, 122 bp, Homo sapiens
gtacctcctaataccttgagaaaaaaaggctccaggttctcatctctgtcttgctgtccccggcacagtgcctggcccggctgtggcagctgaggtctttgcccctgatccgtggttttgat

SEQ ID NO: 20567 - DNA, 122 bp, Homo sapiens
acttctgtttactgatccaaagactacttgtctgtattagacagtaaaatatctaggagtcgtgataatacataagctgtgcacgacacaaaactgcagcagtgtttgggggaaaaaatcaa

SEQ ID NO: 20568 - DNA, 122 bp, Homo sapiens
aaattatttcctcaacttgtcttcaataaaaattaacccagagaattcactttaagctcacgctcataactttttggaacaactgaaaaatattggccttttaacatcccaagcctccataa

SEQ ID NO: 20569 - DNA, 122 bp, Homo sapiens
ttcatagaacaattcctcaagtccactctgagtagaggctgcatcacaaggggattgccccgtctccttccagggctcttaatacaaactcttcaactagtaactgagatgtcaccataggg

SEQ ID NO: 20570 - DNA, 122 bp, Homo sapiens
gggcttctgtatgccagccagggataaggggctcagaatttcagttcagtgcaagggaatcggctagagggttgggacaggagaatgatgggctctgatttgccttttcaaagaatgctcac

SEQ ID NO: 20571 - DNA, 122 bp, Homo sapiens
tggcgatggggggatgggtacaggatctttgtagccaaaatcatcaggaattttccatgtcgtctccagggactagccctgcccccagcctcacccctgcaggcccagccgctcccgcagct

SEQ ID NO: 20572 - DNA, 122 bp, Homo sapiens
taggaaaggcgtcaactctctggtctaggcgttcccttaaactctccgccctcctcctcgcggctcagccttctaggagtttgcgtgcgtttatggcctgtgcaaaggggttgcagaaatat

SEQ ID NO: 20573 - DNA, 122 bp, Homo sapiens
caagatcacacagccaaagagagacacacactgaatttgaacacatgctgcctccatctccgcaacaaatgatctgttgtttacaatcccctctgcgtttcataaaataatcccaagaagtg

SEQ ID NO: 20574 - DNA, 122 bp, Homo sapiens
cttctccgcctgcgacgtcgaagggggcgtggcctgcgcagaggctggtgggggtgcgggcgccgcgggacttgggtgacgcgtccctttccagctcagcggtgtgtgaggtgtcgcggccc

SEQ ID NO: 20575 - DNA, 122 bp, Homo sapiens
tcctggagcgcggtgtacactgctccggagtccctccgcaggagttgaggcagcgagttccgagggcggggtggggcggaatccggaggcacgcggacccggtggaacgcactgcgcagacg

SEQ ID NO: 20576 - DNA, 122 bp, Homo sapiens
cgagcatgcggcccccacccgccccgctcacttgaacacgtcggggtcgataccgccgcccgccgcctgagccagctcgtacagctccatctcctcggtgctcagcaccttcttgcgccgca

SEQ ID NO: 20577 - DNA, 122 bp, Homo sapiens
cctttgagagaggatcccctagccaggtgctgtttgtgcacccaggcttctcaccagaaacgtaggcatcccaccaggaggggagagtgtggcccaacactagctttgaaccctgctcggct

SEQ ID NO: 20578 - DNA, 122 bp, Homo sapiens
aggccacagtcggcaattcctacaagtgcaacgcggaggagcacgtccgtgtcacgaaggcgttttcagtcaatatattcaaagtgtgggtccaggctttcaaggtggaaggtggccagttt

SEQ ID NO: 20579 - DNA, 122 bp, Homo sapiens
tgcaggtgtaggtaggatccccgcagaactttagagcggcggtctcattccgccccctagcgtccatccatcagaagctgagcgcagcctcaccggaagctgtggatgaaaccggtgcccag

SEQ ID NO: 20580 - DNA, 122 bp, Homo sapiens
acggaaagacaaaaagcctttctggattatgaaaaaacatgatatccaacagatcttgatcgcccatgtaatgtttaacttgtacattttaagccatgtcataagtatatctcctcattgta

SEQ ID NO: 20581 - DNA, 122 bp, Homo sapiens
caaagtccctgtggctggcccagagggcctggtaagctggagaagctgcgaatggcgaagcgtaggtaccagctttcaccattaggacagcgccctctgctggcagtatcctgaagggtcag

SEQ ID NO: 20582 - DNA, 122 bp, Homo sapiens
cggcagagagggaccttgtgcccagctctgtctcctagatggaggctggctagcagagagcggggacctgcagccgggatggggcagctggacgggcagctgggggacctggagcctggcag

SEQ ID NO: 20583 - DNA, 122 bp, Homo sapiens
tagcattttttaatctctatatttgagtacagatacacagtcatacgccttggcctcctccgtgcccttcgcagagccccggccagagaacctgtccatcccctcctgcctctgatgtccag

SEQ ID NO: 20584 - DNA, 122 bp, Homo sapiens
agttttggtcaataaacaggtttagtgagacaaaatctttttgtctacgtgggaatggctcggagaaactggttctcaagggggaatcaaaagattaaattcagctgcgttgccaatttatt

SEQ ID NO: 20585 - DNA, 122 bp, Homo sapiens
gcatactgacaagtctttcagtttcatgaaggctaagtgattgaacaggaactactatctcggcagttatatatataaattctttgaagaaattctacaattgaagggcctagatttccaca

SEQ ID NO: 20586 - DNA, 122 bp, Homo sapiens
gataagcacggccctggaccgggagaccagatccgaatacaacatcaccatcaccgtcaccgacttcgggacacccaggctgaaaaccgagcacaacataaccgtgctggtctccgacgtca

SEQ ID NO: 20587 - DNA, 122 bp, Homo sapiens
gggttctcatatgtttactgccattttaaagatggataaactgaggcactatttgttctccggaagatcacacagcaaattgtaagtagaggcaaccctacaaggctgcctttgctcctcat

SEQ ID NO: 20588 - DNA, 122 bp, Homo sapiens
ttttgaggtggtccccagcccagatctaccttagacctgctttgtgtgtcttcagaaggccgcgcttgtggggtctcagtgttcctgatgtagggggctggtgagggttactcagggagtgg

SEQ ID NO: 20589 - DNA, 122 bp, Homo sapiens
ggcgcgtgctcattggctggtgtatggcttgcagccacccttgaattggttgactctgtacggctgcgcagatgccgactttagaggaggcggagtttcggccttcgcctgctggaaaagca

SEQ ID NO: 20590 - DNA, 122 bp, Homo sapiens
agcgcccggggagcagcgctgggcatcccggaccaggcttcctgacgcacgtgttctgcgcgctctcgtgggaacccagcgtttccgactcccagatcccattctgatggcgccgggtatcc

SEQ ID NO: 20591 - DNA, 122 bp, Homo sapiens
tgttacgggaattgaagctgccgattaggcctaatcaagatgacaaccttccaaaagcaccgagagttcgtggcagagcccatgggggaagagccagtggggagcctggccgggtgaagtcc

SEQ ID NO: 20592 - DNA, 122 bp, Homo sapiens
tccgagctgcccagcaaggtgtctgggtagcggtccagcgtattcttccaagtctcaaagcgccgtccgctcacgttcaccaccagaacctcatctcctcgagatgccttcacccccggtgc

SEQ ID NO: 20593 - DNA, 122 bp, Homo sapiens
gccggcgcggagctgcagttaagcaagccgggtctggctttgggccctgggccttccagccggggactctgcgcctgcgcccgcctggccgccgcccgctctcccggcgcggcagctgtctg

SEQ ID NO: 20594 - DNA, 122 bp, Homo sapiens
gcaccatgacaggatactggatttggaggatccgtttcctccgccttgaaacacagctttcggggttgactgttgctcccaggagtcatgagcatccggcatgagcacgagcgtgaacccgc

SEQ ID NO: 20595 - DNA, 122 bp, Homo sapiens
tcaggatgagagagtaggggaggggccgagctccttctaccctgggacgcctcgtcccaccgcctcctcctggacagctgcaggacctgggcctctgggagcctccttagagggagcccagg

SEQ ID NO: 20596 - DNA, 122 bp, Homo sapiens
ctgggggcgctcgcggcccgcgaccccggccccgcccaggccctgcccgacccccgtcctcgccggccttcgcccaaccccggcctcccgaccctgaccccggcccggtcttccgggcaccc

SEQ ID NO: 20597 - DNA, 122 bp, Homo sapiens
gaggcgaggaggccgggcctggggggagggggggccccggcctagagactcctccgggagcgcccggtccctaccgccgtgggtcccccactctgcccggacccccttttccgcccctggcg

SEQ ID NO: 20598 - DNA, 122 bp, Homo sapiens
acgagcggccgggagccccgggccggtagaggggaagcggcgccgctcacgtgagcgccgcggcctcggagctatttttaaagaacaaagttgaggtcagcatcctcggagcttccccaaac

SEQ ID NO: 20599 - DNA, 122 bp, Homo sapiens
tctttggctctaacaacgaaagacaaagtggaaaaaattgcttctgcagggaagggaatgcgtgtggactatcagcttcagaaagccaacccattattataaaaacaagttaatacgggggg

SEQ ID NO: 20600 - DNA, 122 bp, Homo sapiens
agagaaaaaggagtaattggggctaccagccatcacattctgctaccagccagcaagagacggaaagggagctgaacagggacagagtgtttccacaccaagaggctccccacccaagaaag

SEQ ID NO: 20601 - DNA, 122 bp, Homo sapiens
tgaagagtgtgagtcttgcctctagcttcctgggatggaggctggggaaattggggagaacgtgcaccctcagctcccacctgcctggggccctggcacatgcactgttcctccccattatg

SEQ ID NO: 20602 - DNA, 122 bp, Homo sapiens
ggccggtccgacccttgcgttctgcctcccgccccgcctgcctgcggcgacccaggctgccgactgtacttgtgcacagccccgtcctgaggcccccatgtggtcggagcccacgagacacc

SEQ ID NO: 20603 - DNA, 122 bp, Homo sapiens
ccctccttctattcttatctttctctctcctaggggacggtgatagttatccaaaggtcccgatgttgggctgtggtggtgtggaggggtctcagttgaggagtggtgcttgtagctgctcc

SEQ ID NO: 20604 - DNA, 122 bp, Homo sapiens
tttccagagcgcggggccttgccgcaccactaaggaacgtctggccgcgccgtgtgaggccgggaagaggccttggtgtaaggctgtccacccctgtcgttgaacctagggggaaactgagg

SEQ ID NO: 20605 - DNA, 122 bp, Homo sapiens
gaactgcagtaacttgcatggtttgagttaagggaaatcatcctctttgtgtgtgggtgccgtcctagggaggagaagacaagaaagtggatgtgttaggctgtaaatctttaagggatgtg

SEQ ID NO: 20606 - DNA, 122 bp, Homo sapiens
caccaaggtgctgggagggctccctgtccgcctgtaattcccccaactccccagcatgtacgagctatgagtcactaggccacactggttgccatggagacactcatcgtcctagtctactg

SEQ ID NO: 20607 - DNA, 122 bp, Homo sapiens
cggcgccgaagaagttgttggtgtcctgcaggcggcaggagaagatctggcccacgtcgccgccgtcgccgtaggggctcagcttctcgtcgccgtagggcagcacctccgacatggtcgcg

SEQ ID NO: 20608 - DNA, 122 bp, Homo sapiens
ctggaccgacgacggcctccgctgtggaaatggccgtcggctgcgttcgcagagaaaccccgctggcctgtgcctcggcagattttctgcatggtgttccttagcgtagttttttcctcatc

SEQ ID NO: 20609 - DNA, 122 bp, Homo sapiens
acttgaagccgtcctcctaacaataggaaagagcactcccattttcctggctcaaacttgcgggaccccgcgaggctggatcctcccagccgccctctcggaacccgctttacctttctccc

SEQ ID NO: 20610 - DNA, 122 bp, Homo sapiens
gcagcagcagcagcagccccccctccaggaaccccgggcgcttctgccctgcacggccggcgctctccaccatccccactgggccttcggacttccccatcagcagggctctggacgggaga

SEQ ID NO: 20611 - DNA, 122 bp, Homo sapiens
gtgttgccatagcgaccattttgcattaactggttggtagcttctatcctgggggctgagcgactgcgggccagctcttcccctactccctctcggctccttgtggcccaaaggcctaaccg

SEQ ID NO: 20612 - DNA, 122 bp, Homo sapiens
gccctttgatagtctcgcagcactgatgagtgatcagctctcccctctttctctggaactcggtagcttcatgttggcacctatcacagacgctgaaggcatttaaattttattttaaatca

SEQ ID NO: 20613 - DNA, 122 bp, Homo sapiens
ggctgggaatgttcatgcacttgaggtcagctgcaggttggctaggtggctttgttactgcggttgactgattgttaacccaggtacctcagctgtcctctatgtggtctctcatcttccag

SEQ ID NO: 20614 - DNA, 122 bp, Homo sapiens
ggcggagacgtcatcagagggggcgggcctggggaagctaggagcccggcagcgccttcccgtcaaccctaggggcgtcctggtttccggtttgggtgtggccgcatggcgtgctgtggtgc

SEQ ID NO: 20615 - DNA, 122 bp, Homo sapiens
cctcctggcggagcttaacaggctgaggcagcttcctgagcagcctgtggttgctccagccgggtagagacagccacattccaagctccggggtggcagggaagctgggtagggagttccta

SEQ ID NO: 20616 - DNA, 122 bp, Homo sapiens
agagccactaaaaaaattccaccacggggacaggagctctctgagcttgccccataaacacgcttttctcccacagaaagcctccacagaagcaatgaaaaagtcagttgatttggggagag

SEQ ID NO: 20617 - DNA, 122 bp, Homo sapiens
gatgaaattgagcatgtagaggttaagtaacttgcccaaggccacacagctagtaagcatcggagacaggatgcacacagaggcagtctagtcccagagtccacactctttatttgccactg

SEQ ID NO: 20618 - DNA, 122 bp, Homo sapiens
ccaatcttgatttgctgtagttccgcagaacatctgtctccaggtatttagggtgtctgccgtttaattgcccttcatagtggtacttgagcattcctaacccaaaagaataccaaccagtg

SEQ ID NO: 20619 - DNA, 122 bp, Homo sapiens
gggcctccggcagtggccactggacagtttttgacgtagctattctgacagtggtggttccggttatacccgctgtgactcggggctgttcggaatccgacggggcgccctgagctctgggg

SEQ ID NO: 20620 - DNA, 122 bp, Homo sapiens
ggctcaggtgatcctcctgccttagccacccaagtagctaggaccacaggcacatgccaccgtgcttggctaatttttgaaattatctgtagagacagtgtctttctatgttgcccaggctg

SEQ ID NO: 20621 - DNA, 122 bp, Homo sapiens
agaccagagttgagacaaaaagaaataagattattttctgctttgtagttctgtacttttcgagagaagggaatagggaagacagcaaagaaagattcagatttctaaccctgcaacttttg

SEQ ID NO: 20622 - DNA, 122 bp, Homo sapiens
catttgacctcttgatccttcagtttcctcgtttataaatggggatgcaaagtcttgtatcgaaggactttcatgaagatgaaaagaacctgatgtacagcagacactcaaacattagcttt

SEQ ID NO: 20623 - DNA, 122 bp, Homo sapiens
gcctttttcggtccatactcttcgaagagtggatgaactgtgtgaaggtcctcacagaaacgttgcttgcaattcccagattcagagacacttcttaaggcgattcaaagacccaagttaag

SEQ ID NO: 20624 - DNA, 122 bp, Homo sapiens
ctgccgcatcggctgttttctatttttgctgtgctgctgccccacagtcctctggtatgacggatctccatatcctatccaccctccactcccctgtcccttggtgactcatccctgagctt

SEQ ID NO: 20625 - DNA, 122 bp, Homo sapiens
tcatagagagtctttctttattttgttacttatccttgtactgccagaagtctacaaagacggggctcctgcatgtccccattcacatcagtgggatgtgagcacaattcaaagcctatcct

SEQ ID NO: 20626 - DNA, 122 bp, Homo sapiens
gtaaaattttatctgaagcatcactcacaactccactttctttacttaaataaggatttccgccccatttctgccaggcatactgagcttcacagtccctgtttctttttcctggtgcctag

SEQ ID NO: 20627 - DNA, 122 bp, Homo sapiens
aggtggagagaccactgatggctgcaatttgggaggattctgtgctgaacgcggacactccgtggctgcagtgggctgggggtgggggctgctctgcctcgacctcggaagctccgagacgc

SEQ ID NO: 20628 - DNA, 122 bp, Homo sapiens
tatcagagcccacaggttcagttttctttcatgctacctgaatgtcctgataaactggctcgctctcttctttaccttccataatggcattaccatttaccacgccacccaagatacttact

SEQ ID NO: 20629 - DNA, 122 bp, Homo sapiens
agaggaccctgtcctccgcacgtcagctgccggagagtcagctggtgccagatggccggccggcctgcctgcctctgggaggcctcagtgcctgttggattccctgccatgcagggcgcacc

SEQ ID NO: 20630 - DNA, 122 bp, Homo sapiens
gtgtctctccttagcacataagaccctgtccgaggactgtggcatgacgtgctggagtcacgattctgtcacccagtcaggtcatcagtgtcagagagctaggtggccaggttggagttgat

SEQ ID NO: 20631 - DNA, 122 bp, Homo sapiens
gggtgcggttctgccgtgtccgtccccactgcggggctgctctgctggctgaattctccacgtcttatgtatccaccctcatcttgcgaggcaccggggtcccggcttttggccacagacat

SEQ ID NO: 20632 - DNA, 122 bp, Homo sapiens
tttcccaccgccgggcctggggcggggcgttcaggaggctctgggaaaggcggcggtggccggcgcggggggcgcgcaggcgcagagcggcgggccgggcgtccgcaaggtggcgcccgcgg

SEQ ID NO: 20633 - DNA, 122 bp, Homo sapiens
agcttaagaaagacagaatggcttaaaaatcaaagatgagatgaagtggactgggggtctcgggaacaccaagtcacaaaatcagcttacagtcagagggaacttgcaaatgatctgattca

SEQ ID NO: 20634 - DNA, 122 bp, Homo sapiens
acctccacctacctttagggggtaaccctgcctctcaatttccattagttctgttactttcggcttcctagcaatgagaacatttgcaattgctctgcaactttatttttccagatgttgtc

SEQ ID NO: 20635 - DNA, 122 bp, Homo sapiens
caggagctggtgcctgtgcttcctgcaaggaggggggacaagaaggcccccggggtcactcgaggccagcagaggagtccagactccgatcccagctccactgctgcctcccgcacgcctgg

SEQ ID NO: 20636 - DNA, 122 bp, Homo sapiens
ctgacacctgggcggccgcaggactccctgcactgccccacagcaagctgcccatgggcccggggtcaagccaccacccacatgtcccaggagtccggccagcccaccacatccgctcccta

SEQ ID NO: 20637 - DNA, 122 bp, Homo sapiens
tccaaagaggctgtgaccaacagagtttactgttcatgaaactcagatcgcagacaggcacgtgtctgtcacagccggtgccggccgctcctttccatggacagtaacgtccatgcaggctt

SEQ ID NO: 20638 - DNA, 122 bp, Homo sapiens
agtgagtcgaacccgccggatgcgcgcgcgcctgcgcctccgcccaaaaggatcagtttccggctgtggactacatttcccagaagccccttgggcagtgttgcctggaccccaagggccct

SEQ ID NO: 20639 - DNA, 122 bp, Homo sapiens
ctaccaatggttggcctgctggtcctaagcccattgctctgaaggaagcttttctctaaccgtgcagatctcaaatttattattatttattaaacagattttctacgaatttctgaattcca

SEQ ID NO: 20640 - DNA, 122 bp, Homo sapiens
ttcaaagcagggagtgtgatgaataggtcaactctgtcctcgcagccgtccctgagagggcgctgttcccaaatcgaagccccagaggcggagactgagacaccggcactctcccactggac

SEQ ID NO: 20641 - DNA, 122 bp, Homo sapiens
ccgcctccgtcgccaccgccccggaagcactcgccgcaggcccggaaaaagaatccgcctcgcagcgtcctcttcaggcacccccgggtggccttgttgtctgtttcctggccgagtttgtg

SEQ ID NO: 20642 - DNA, 122 bp, Homo sapiens
cagccgaggagactctctggaaaatgggctactcgaagagagatgctccgttgcctcaggcggagggcggggacgccgggcctgcgacacttcatcttttcctggccccgaggtggctggga

SEQ ID NO: 20643 - DNA, 122 bp, Homo sapiens
cattttctcaatatcactatcttcggcagaagcagcaaagttgcccaccctggagcctgacgttgccccagctgaggggccttggtttcagaggcctactcaatgcattatttcatccgagc

SEQ ID NO: 20644 - DNA, 122 bp, Homo sapiens
aggagggaacagggagggtgagccccaggtgctgacggtggccactccgcagatgatgttcggcgtgggcctctacgaggggactggcctgcagggatcgctgcctgtgcatgtctttgagg

SEQ ID NO: 20645 - DNA, 122 bp, Homo sapiens
catcagaattgtctatttcagagaaatgggattcatcaaatgaatctttggccaactgttcgttaacgatgttaacgtcgcacataggaatgctatgttttctaggatttgacattttcagc

SEQ ID NO: 20646 - DNA, 122 bp, Homo sapiens
accacccgtcgtccgagacctgtgtcgccacccactgaggaacgggtacgacctgtcatccgagacgtgtgtcaccacccacgcactctgcactccaaggctccacacagagaaacaagggc

SEQ ID NO: 20647 - DNA, 122 bp, Homo sapiens
agcgagtaaacaaacaaccaaacaaccttagaaacgaaaggctgcaccaaactttgatgacgccagccccctttttttccgaatgtctcgacacccgggagaaggtgactaataggtgttcg

SEQ ID NO: 20648 - DNA, 122 bp, Homo sapiens
ggttggtgatccctggaccaatcggaggagccgtgatttggcgggagtcttgaccgccgccgggctcttggtacctcagcgcgagcgccaggcgtccggccgccgtggctatgttcgtgtcc

SEQ ID NO: 20649 - DNA, 122 bp, Homo sapiens
gaaagcgcccctcgcggcgccccgggattacgcatgctccttggggcccgccgccttggccgtgcaagtgccaccgtaactggtgagagccgctggcaacccacccggagttgacaaccgcg

SEQ ID NO: 20650 - DNA, 122 bp, Homo sapiens
ccatgagcttgtaggtcagagagcagacaccattcacctcccccaggcctggcacacaaacgtgctccgtcactaagcgtgggctgatgactcattctcctgggccctttcacatgccccag

SEQ ID NO: 20651 - DNA, 122 bp, Homo sapiens
ctgtaaataggaacgacaggccggggcgcgcgccgaggcgggcgcacggcttggagcgggcgtataaattaaccgggggccgcagagtgaatacattgcacgcggtatttattatgcggccg

SEQ ID NO: 20652 - DNA, 122 bp, Homo sapiens
gagggcaccctggacttagcctagattgtggctggagacactgtctcctaattaagaacccgtgggactcaggaaaggagcactagctccaggctgaattgcaggctgggtggctgcatctg

SEQ ID NO: 20653 - DNA, 122 bp, Homo sapiens
ctagctgggagtggaagggccagacctggtgtttccctgggttcttggcctttgtcttctcgacattcagtaggagtgaccgtgctgggccccagacctctgtgaggattcctttttagacc

SEQ ID NO: 20654 - DNA, 122 bp, Homo sapiens
aatcctatagccacaatgtatcttgtttatactgtattattattttatctttatataaagcggtttgaaacagaaattaaattgtaaaaggggatgttctggccaggtgtggtgactcacac

SEQ ID NO: 20655 - DNA, 122 bp, Homo sapiens
cggcaggccgagttgtgccaggctgagccggaagtggtggcagagctagctcggggcgcccggctcggggtgcgagagtgccagttccagttccgcttccgccgctggaattgctccagcca

SEQ ID NO: 20656 - DNA, 122 bp, Homo sapiens
ctttggcgatgtccaggttcacatccttgagtgtagtcatttctgtactcatcaatgtagcgtcgactatgataatctttctcatttatagacctgctttccaaataatggctagagaaata

SEQ ID NO: 20657 - DNA, 122 bp, Homo sapiens
gttggtctgcagaaagaagaacagatttaggaggaaggcggtcataggaaactgaaagtgcgtcacgcccactcccgtcacggaaactggtctctgaaaggtggggtaaagataaagccttt

SEQ ID NO: 20658 - DNA, 122 bp, Homo sapiens
gtgctgcagcacccgctgctcctggccgggctggagcctctcttcagaagggcagcagctcgcttgtcacagaccctggactgcagaaaagctgattcagggatttccgggcggctcctcct

SEQ ID NO: 20659 - DNA, 122 bp, Homo sapiens
tgtgtgtgtaagagaggaagagagatgaggagacagaaagtgggggaggggtggattccgcgtgcccgtgtgtttatatgtgaaggaaagccctgactgatttatttgggattcgttgccgt

SEQ ID NO: 20660 - DNA, 122 bp, Homo sapiens
ggctcggcgggcgccagagagacatgatgcagcatcctctgacgggggccacctgcgtggcgctccccaacgtgggcatgtgtccccagctttcgtgtgccttgacttttatgtacttacag

SEQ ID NO: 20661 - DNA, 122 bp, Homo sapiens
ggttggaccaacgaaaactctagggcggatttgccgggatttctgggaaagtgacactcccggaagctaccgcctcttataagccacacatgggcggagttagccttccggcccgcagtccc

SEQ ID NO: 20662 - DNA, 122 bp, Homo sapiens
tatgcttccgttaacagcctggaatcctttgacagagttggtttacaggccatttgccctcgaaattacccactctgggaatactttccccatctgcgtatttgaagatggaagctaatact

SEQ ID NO: 20663 - DNA, 122 bp, Homo sapiens
ccgcagccacgggcaggctcctgcttctgctgctggtggggctcacggcgcctgccttggcgctggccggctacatcgaggtggggaccgggcgaacgccggagagtcgtctccttcgcccg

SEQ ID NO: 20664 - DNA, 122 bp, Homo sapiens
tcctttaaaagataatttctctccttcctctctaaatacttttgggaagtgggtttcaaacgttatcctcctaaactctagggtttctctatagggtcttaggagtgaatcggtgagactca

SEQ ID NO: 20665 - DNA, 122 bp, Homo sapiens
cggttgtcccgcggcccaaccaaggggcccgggcctcctctctgccagggctcacagcgacgccctcacggcggaatctcaagcacttccgcttggcacccaggtccagtgtctgcctcggc

SEQ ID NO: 20666 - DNA, 122 bp, Homo sapiens
atctccctctccaacaagaacgggaagaacgtggagctgaagtttgtcgactccattcggcgtcagtttgagttcagtgtggactctttccaaatcatcctggattctttgcttttcttcta

SEQ ID NO: 20667 - DNA, 122 bp, Homo sapiens
acctcgagatctagcatctattttgcaaacgaagacagcaggaacgggcgggctaaccgtcgcagtcactgcctcggcgctcctccccctccaaggccagcaagttgcggcactgggggaaa

SEQ ID NO: 20668 - DNA, 122 bp, Homo sapiens
tgcaaaagcctggcacactgggggtaaggaatgtcagtgctttttccgccaacgtggccgcgcgagtcagttgtaacccggcatccagaaccttctccgtaggggccttgcctgggactaca

SEQ ID NO: 20669 - DNA, 122 bp, Homo sapiens
gtggtcaaggagtcttcttgggttcctgggttctttagtctcgaaatatataagacttttcgttcttcgctagtcttctgagctcgagatgaagcacagaaggctaaaacaatgagggacag

SEQ ID NO: 20670 - DNA, 122 bp, Homo sapiens
tcttccccccaacatctggtcccactggaaggtctgcaggggcaatgacacgcacagagccgtcacctcctgtgatgacaatgccttcttctggacacctcccacaggacctgcctgcagct

SEQ ID NO: 20671 - DNA, 122 bp, Homo sapiens
tgtttcgttgcaatacctgtgtgttaaaggcttcaaacagataagaatcatagcttcctgcgaattacatctgggcaagagaggcctggggccttgcgggtgcccactcaggccctactcct

SEQ ID NO: 20672 - DNA, 122 bp, Homo sapiens
aggtggatgtgtttgaatttgtgtctcgaatccgtaatcagcgccctcagatggttcaaacggatgtgagtcatgccttcctcttgccctgatctagcttcccaaagcaaacccgatgcctt

SEQ ID NO: 20673 - DNA, 122 bp, Homo sapiens
cagggacacaacagttggactggcagcaacagggcttgcagcagctggactggcagcacacggggacacagcagctggactggcagcagcagggcttgcagcagctggactggcagcaggat

SEQ ID NO: 20674 - DNA, 122 bp, Homo sapiens
ctcggagggtgagcgtcatggcggcttcttgccctctcccggtgaccccggacctgcccacgctgcgtgccaagttgcagggactgctgcagttcctgagggatgccctgtccatttccaat

SEQ ID NO: 20675 - DNA, 122 bp, Homo sapiens
tcaacccccagcgcagtttcagaggccgaagtcttcggggccaacatttgtcgttgatcgcgtccccagacccttgactggtcagacttagccaggccagggctgggagttcaggctccggc

SEQ ID NO: 20676 - DNA, 122 bp, Homo sapiens
ccagtggctgcggagggtgtactgggtcctccagcagtgccagcccactggcgctgcgctcgatttcttgccaggccttggctgccttcctacggggcagggttcgggacctgcagcccgcc

SEQ ID NO: 20677 - DNA, 122 bp, Homo sapiens
tcacaagtattttagagaagacaagaattcggaagggtgtgcacagatgatatggaaatacgacaccattttatacggtataaggtacttgagcgtccttggatttcaatatctgcaggagg

SEQ ID NO: 20678 - DNA, 122 bp, Homo sapiens
gagggctccttggaccgcgaggcagagcgtgtacggggtgaggcaggggtcgccttgcgccgggagctggggagcctgaactcttacctggagcagctgcggcagatggagaaggtcctgga

SEQ ID NO: 20679 - DNA, 122 bp, Homo sapiens
gcatgagccactgcacccagtcacgagatcttaaagtagaagtaactatggtatttttttcgagaattctgttagggcgagaagcccattcgtactgtgctggaaccatcctgaccctgtct

SEQ ID NO: 20680 - DNA, 122 bp, Homo sapiens
acacattcttctgggaagctaactctaaaagctgttacctggccagggctgaaattataacggacaatgaagtgtgcacaaaaagttcggtgcacactctggggctttcctttctcatctgc

SEQ ID NO: 20681 - DNA, 122 bp, Homo sapiens
ctgctcagctctctccaggcactagctaaaccagcatccacttggccttgaaaataagcccgagtggcagccggtgtagcagacagagcgcagggagtggagttgaaaggcttctaggtgca

SEQ ID NO: 20682 - DNA, 122 bp, Homo sapiens
cgcaaggaagcattgtgcctaatcgtggcactcgtccggatatcgtaggaaaattatgaccgaaaatacctcctgaagacagaatgaccacacggcctgcggcagactggcggtgtcaaggt

SEQ ID NO: 20683 - DNA, 122 bp, Homo sapiens
atagctccaggggtccaggtagcccgtggagaagaggaggacagaagaaaatgagggattcgtggggaccattagccggttaggaggctcagaaaaaacaaacacggtcagagtttacccag

SEQ ID NO: 20684 - DNA, 122 bp, Homo sapiens
gcggggcgtcttctggccgggctgcagtcctgggacagttcccttgacttacacatgggccgacttcgccctccggcctgggcgagcattgttttgaagctctcaaggaggagctcagggca

SEQ ID NO: 20685 - DNA, 122 bp, Homo sapiens
tgggtttctgtgcggtgaaggttgctcaaaggtctgggagcctggggggccccagagtctcgtgaggatggtggctttagagctaaaaatagccaaatgtagggaaaaggtcaccgatgtgt

SEQ ID NO: 20686 - DNA, 122 bp, Homo sapiens
ccgcgcgtctcgggcgtccgaccacgaccggcgcagccgggatgcggggattgccggagccgcccccagttggtagtgcaattagctaacccctttagctcgcctgtttgctctcgggaagc

SEQ ID NO: 20687 - DNA, 122 bp, Homo sapiens
agctcacagcccgtcattcacagaccaagctcccctggcttgactcactgccatgtcacacgtccccaggatgtgctgtgcctttgctgggacctacagttctgttgggagtctctttggtg

SEQ ID NO: 20688 - DNA, 122 bp, Homo sapiens
cccgccaccggggaggccccgccccccgcggccggcacgcacctgtaggaccggctgcagcgaggcgagggtgctgttgccagcgccccagtcctcgcagttacgatacacgcccttctcca

SEQ ID NO: 20689 - DNA, 122 bp, Homo sapiens
agatgatgccgcctgcagatatgcaatttcaccctaagtaatttcattcaggattgatggcgtttcactggagtgatgccttcaaagtgagtgcctagcttgcttccctgtagagcacaaat

SEQ ID NO: 20690 - DNA, 122 bp, Homo sapiens
gctatttcgacttctactaataatgagaaaacggaggtggaaagagggagagtgacctgccgagccacagttacccaaccagcaccaatgtagtcagtgctgcctggagcgagacctgacca

SEQ ID NO: 20691 - DNA, 122 bp, Homo sapiens
gaggctgaccagggtaggtcactggtggctgcccagggtaggcccctgggggctgctgtccggggggtggcatgggctggcccggcacaggggcccctgggtatggcggatatgagggcatc

SEQ ID NO: 20692 - DNA, 122 bp, Homo sapiens
gaatttgaaattaccagacagatgtaacaatcaataaactaggaacataggaattggaggcgaggcaagggttggtaaaagataaatgatattatcccaggttttctaagcttggatagggg

SEQ ID NO: 20693 - DNA, 122 bp, Homo sapiens
cccatgggccctgaaccatgccaggcctggaaccccgggggtggcccgggtgggcctcggcggatgctgctgcctgaggactcctgccagcccccagctgctcccgatgagagcctgggagt

SEQ ID NO: 20694 - DNA, 122 bp, Homo sapiens
tgcaggagcagggatggaaggcgagccagaagagccaatgcggcgccggcgggacagagccgaccaatcaggcggctcggcagcggggcagaggtcagggggcgggccgaggggaagccaat

SEQ ID NO: 20695 - DNA, 122 bp, Homo sapiens
atttggtaccaattgagttgtatatcaagccccccttgggaaatggcttctttcactcaacggtatgtctgtgtgacttatccgtgttattcatcctcatggctgaagagcatcccactgat

SEQ ID NO: 20696 - DNA, 122 bp, Homo sapiens
gcacccgccctgcgcgcacccgctgtaagcgcgatcccggccgccgccacgcagcacgagcgctccgagggacttttgaatggagacggagtcttgctctgtcgccaggctggagtgcaatg

SEQ ID NO: 20697 - DNA, 122 bp, Homo sapiens
ccctgcctccacctgtcttctccactcccacctgtgtggcaggcacattaacatttcaatcgcttatcccctgcccctgtgacctgcccttcctatgttgatcttttcccctgtcaagtttg

SEQ ID NO: 20698 - DNA, 122 bp, Homo sapiens
cctgggggagggcggtgggcccagggcttccccttggagtgagcctggagccttctgtgacgggcagggccgggtctgacctgggtttgaggcggatgctagctcctctcgggggacctctc

SEQ ID NO: 20699 - DNA, 122 bp, Homo sapiens
ggcaggaggagggcccaggtggggtggagggggggcgccccaagatttcagggtgaggaccgcggagggtcctggacccgcagtcgcctaactcctgccctgcgtctccagtgcttgaagtc

SEQ ID NO: 20700 - DNA, 122 bp, Homo sapiens
tgctcgagttctccctccgggccgtgtccacgctgctgtccctgggcaaggtgaggcctccgggaaggcagtgggtggatcactccccagcccagggcccgggctcacccccggaatgtggg

SEQ ID NO: 20701 - DNA, 122 bp, Homo sapiens
cggcccgctcgcccgcggcagctccaggccccgccccaccccgccccgcccgacccacggcggccccaaaagccctcccgtccaaactggtggcagcccaaagctccgcccacccccccctc

SEQ ID NO: 20702 - DNA, 122 bp, Homo sapiens
aactactgaaaagagcctcctgtgagcacagggctcgcagtaagtgggggtgacggtggtcgcgccggcagcgccgccttgggcctgcgggaggcgcccgagaggcaggggcgaccacggcg

SEQ ID NO: 20703 - DNA, 122 bp, Homo sapiens
tcccttctcccccgcccctccgcggccgcccgcccctgcccagccgcccagccgcccagccgcccagccgcccagccgcccagccgcccagccttccggtctccgcgcccagtccgcggtcc

SEQ ID NO: 20704 - DNA, 122 bp, Homo sapiens
ggaaggggctgctgcagtgggtgggtggccccggccaagtctgtgccgctccctgctccccgcgagaccttgcgccccctccgagacccgctcttccatctgcacagagggagtcgtggtga

SEQ ID NO: 20705 - DNA, 122 bp, Homo sapiens
gagggcgactcggagtcgggcgaggaggaggagctgggcgccgagcggcgcggcctgaagcggagcctgagcgagatggagatcggtatggtggtcggtgggcccgaggcgtcggcagcggc

SEQ ID NO: 20706 - DNA, 122 bp, Homo sapiens
tcccctctcctgctcatgaccctccgcggctccccgctgccatcagggtcaggcctggcccgggccacaaggaaggtctgaggtggtcactgcctgtgctctggcctcaccatcctaccacc

SEQ ID NO: 20707 - DNA, 122 bp, Homo sapiens
aggccttaaatgaatgccggccagacaagttcaccagaagcagggttactacagaaatcccggggaatgacacacgtgccgaagtccctacactaccagagccggaaacggccttcagtccc

SEQ ID NO: 20708 - DNA, 122 bp, Homo sapiens
ggtggcggcgggtgcctttttgggggtgcgcggccatgcaattggtggatttttttaaaccgttttggaggggggagcgcggcgttgggggcgggagagcgctcctggctgtgagctgctcc

SEQ ID NO: 20709 - DNA, 122 bp, Homo sapiens
ccagagggtttactctgaagggtggtcagggcttaagcagattgggaggaaggacaagggcgtttcagggctattaggctagtgaagaaggctggagagggcagaacttgctctcagcatca

SEQ ID NO: 20710 - DNA, 122 bp, Homo sapiens
tccatttttcttttcttttctttttttgagacggagtttagctcttgttgcccagactggcgtgcagtggcgcaatctcagctcactgcaacctccgcctcctgggttcaagcgattctcct

SEQ ID NO: 20711 - DNA, 122 bp, Homo sapiens
gacctaaataaatggaaagatacttcatattcatggactgaaagacccacattgtaaagacgttaattctcccccaagttgagctactgaatcttaaccaaaatcctgaaagtttttgtttc

SEQ ID NO: 20712 - DNA, 122 bp, Homo sapiens
cggcattagtccccgcaatcttgactccagcatacaagcaggcccggtaatgggcctccacgatgtccctgccataggctctgtctgctcccacaccacagtaatatggacctacagaagca

SEQ ID NO: 20713 - DNA, 122 bp, Homo sapiens
caggcgcctccctctcagcgctagagcccaggccactgccagggaagtgtccctaccaggcgagtggccctgccaggccctcctgctgctgctcgcggtcgctcgccaggaaaattttatgt

SEQ ID NO: 20714 - DNA, 122 bp, Homo sapiens
gcctcctctgccaggattctgagccgtctcgctgttgtcatcttgtctgatctctcagaccgtgcagaaagccacactgtcactgttccccttgccttcagcctccccagaccccctgggat

SEQ ID NO: 20715 - DNA, 122 bp, Homo sapiens
gccggtgcattccctgtgcccaccgggggtggcggggagggcgacggggtgtccgcagtgcggcgctctggacccccagcgcgcccgcccccgccgcccttgctcctgcccacccccagctg

SEQ ID NO: 20716 - DNA, 122 bp, Homo sapiens
tcgagcaacagttctggccctgccatcttcactgaaagctggttcccagtctggaatgggcgagcttctcttctccggggcacagttgcttctcttcggcttcgcctccgggccttctcaag

SEQ ID NO: 20717 - DNA, 122 bp, Homo sapiens
ttacaactccagcgtatttttaacggcgcagccagtatcacctccttggtataaagcctgcgctgtcctggaccttcttaggagtgcaggcttaggaacaggagctatgctgttctattatt

SEQ ID NO: 20718 - DNA, 122 bp, Homo sapiens
acgtgtgttctaaatcggcctttagtaatggtgcaggtggcctggtgccctcagcctcaccgcaccacccttttgccttttggtgatgaggctaagtacatgcttgccatatgttgaggtgg

SEQ ID NO: 20719 - DNA, 122 bp, Homo sapiens
cgccgtcgggcggggcggtccctccagctggcttggaccctggcggggcgggctgtgggccgagcggcggagcccaggcgccagcccgtggccgagaagaaaggtggcggtggcggcggcgg

SEQ ID NO: 20720 - DNA, 122 bp, Homo sapiens
gcgagggccctggagacccctgtggcgcaacagatcccttactgggtcccttccaagtggcgtcacatagcaagcgtccagaaggaggcgggacttccgggccaagcgagccaattccggcc

SEQ ID NO: 20721 - DNA, 122 bp, Homo sapiens
gaccgggccttggagatcctgctgcaccccagtggtgagagactgggacacaccgtgggccggctctgacctgcttctacatgaatgggggaagcatttcttaagtgcaggtttctgggccc

SEQ ID NO: 20722 - DNA, 122 bp, Homo sapiens
atcctcttctgggatcctgaggtgaggggtgccccaaggacctgggtctcagacatcaatcgcaacttggcagaagcccatccttctcatcttactctttagcattggaactcaaacctttc

SEQ ID NO: 20723 - DNA, 122 bp, Homo sapiens
cgttgtgagtgtgtgagtcgtgagtgggggtgggtgagatcccgggctgcaggcacatgtcgaggcatgtggcacctggagaggggctcactttagccacaggatccctcacaggccttttt

SEQ ID NO: 20724 - DNA, 122 bp, Homo sapiens
attataaagaagatgaagtgaaacagtggatgtaggagtctaatttggtgcttagcatttcgtagatggtcaaggaaaggtagataatgctactattgttagcagccactctctctacctta

SEQ ID NO: 20725 - DNA, 122 bp, Homo sapiens
attcctctggaccctgcctgatgtcatttccccttactgatccacctgtgtatccttctacgtcagtgtaataagtcttagccctaagaacgactatatgctgagtgctacaggtcctagta

SEQ ID NO: 20726 - DNA, 122 bp, Homo sapiens
cctgggttcatattaaaatagtctaagcatattattaaaaatgttcctacctgtatactccgtttctttgaatgcttcaaatactgtcactagtttttgcatcaatacttcctcttgtatat

SEQ ID NO: 20727 - DNA, 122 bp, Homo sapiens
gatgagctgctttggctttccagagcactcactggctacatgaccttgggtattccacctcgttttaaaaatggggcagataatcctcaggagattgcaagaagaatcagaaaagctgtgca

SEQ ID NO: 20728 - DNA, 122 bp, Homo sapiens
tttaggtcttctgcaggtcaaggtcaatcgctgaccttcagagtgtcagcctcacatccccggggtccgggtttccaagtctgggtctccgtgcagccttaggcctccgtgcgctgggcgca

SEQ ID NO: 20729 - DNA, 122 bp, Homo sapiens
gagtgaaggggcgtgggcactcataggctattgggggagaggttaagaaacgtagaatttcgcagccagaatgggtacgtctcagcgatcctgaaagcagccttgacagccagaggcgagtc

SEQ ID NO: 20730 - DNA, 122 bp, Homo sapiens
atgtctgtgttgacgccatctgtgacgcagtccccatgagtctcgtccacatgctctagtcgcatggcacatggtctcctaaacagaaaatacttcatgggtcaatacctcagagctggaaa

SEQ ID NO: 20731 - DNA, 122 bp, Homo sapiens
tcaagcaccagctgcctcgatggcaccaactggcagagaactgtcatgcaattaccccttcgcccccagcttgagaaactcctgtttatgttcttaaaatacatttgcaaaaggaaccaggg

SEQ ID NO: 20732 - DNA, 122 bp, Homo sapiens
atgcctccccagggtcacaagtgggacatagcagggctagaattacaaggccctgggtctcgggcaagggctgaggggaattagttgagctaattagtcatgctaagcagcattcggctctc

SEQ ID NO: 20733 - DNA, 122 bp, Homo sapiens
caagtagcccaaccgcaagaggtttcatgaagtgtgatgcaactttcatttcataattttcggacaatcccagatatacatcacaagatctttgtttaccatgacagagtgtctccttagac

SEQ ID NO: 20734 - DNA, 122 bp, Homo sapiens
agggctgggctcagcccaagccagacggcgagagtcgcaccgaggtggaagctgggggcgcggcctcgccggggccaggaaaggggcggggccgggtggggcccggggaggagcctgtgcgc

SEQ ID NO: 20735 - DNA, 122 bp, Homo sapiens
aactgggtttctctgcatgcattagagtgattaacagcagagaccagaggctgaactgaccggggagtgtggaggcagagacacggggctgagaaggccgccaagagggggctatggggctc

SEQ ID NO: 20736 - DNA, 122 bp, Homo sapiens
gccatctgcatgctggagaacaagaaaagatggtggtgtaactcagtttgaatctaaaggcgtgagacccaggagggacctctggtataagtcccagagtccaaagacccaagaaccagtag

SEQ ID NO: 20737 - DNA, 122 bp, Homo sapiens
tcatcaaccagaaagctgaatgagatgatgaatcggctacaagctaattaacgggaaaagcgctcctggaaaacagtacgggtcccagtccctacgtttaaagattggactacactctcaac

SEQ ID NO: 20738 - DNA, 122 bp, Homo sapiens
gtaatcggttctccggagtgaagcaatctcatgtaatctatcagtggctatcaggcccatcggagggccgggagtggccgggcccagagatggcgccaaccttcagcgtcgataaagtttcc

SEQ ID NO: 20739 - DNA, 122 bp, Homo sapiens
ctttcccctctgcgacagtttcccgaggtacctagtgtctgagcggcacagacgagatctcgatcgaaggcgagatggcggacgtgctagatcttcacgaggctgggggcgaagatttcgcc

SEQ ID NO: 20740 - DNA, 122 bp, Homo sapiens
agccctggactgctaggagggcagatcatatgtcttcctcagtggggagaggtgggccctcgctggcagtttctgtaaagcctcgtgctgtggtgtaattcagggagcccagaagctggtat

SEQ ID NO: 20741 - DNA, 122 bp, Homo sapiens
atactgtagtaggactgtgcagtgatcctttgggggatgatgctttcacttttgtatcctcgtcaaggttaaggggcaggttcaaaagtgatcatacttccaggattagcgtaagtggccaa

SEQ ID NO: 20742 - DNA, 122 bp, Homo sapiens
aaccctggtgtgcctggctccagcacggcactcttcgaccattaaatggtctctctgttccgacaagctgcggtggcttcgtgacccctgaggccctgcttgtggtcaagagatgagcacgt

SEQ ID NO: 20743 - DNA, 122 bp, Homo sapiens
ggaaagggtgagacctttcaaagctgccaagtgggcaagcttccagcagcagtctgggagcgagcgacagagccaccaagctgggcggcagggcattgagcctcgcgtttcaatttctgttc

SEQ ID NO: 20744 - DNA, 122 bp, Homo sapiens
ggataccgatgaggtactccatggtggcggaaggccaggggctgcaggtccgacacagcacgagactcgcccgcttccaggtctcaccggtgagacagcacctcagagcgaagattggcgcg

SEQ ID NO: 20745 - DNA, 122 bp, Homo sapiens
ctggctgaaccaaaaggagtttctgcttagctaggcagggccgggggacaacagcttctgcgagtctgcgattgtggcggccggtatattcggcggtttacggtaatgggcgggccccaaat

SEQ ID NO: 20746 - DNA, 122 bp, Homo sapiens
gtgcggtagtaattgagcacataggcgaagacgcccgggtgccggtcgaagaagaactcgcggccgccaccgggatggtcgctggccctgccgccgcgggaactgcagttgcccgcgccgcc

SEQ ID NO: 20747 - DNA, 122 bp, Homo sapiens
accaaggagcgcatggcactggagggcatcggcattggcagtgggcagctgggcttcagccgccgctacggcgaggactacagccgctcccggggctccccgtcctcctacaactgtgagta

SEQ ID NO: 20748 - DNA, 122 bp, Homo sapiens
ggcctgagcatctgctctgcccccagctcccagctccagttcaggctgcattggtctgctcgcttcctggctgatgcccttaccagccaagaccaagctgggcaccacccttgcttgcctcc

SEQ ID NO: 20749 - DNA, 122 bp, Homo sapiens
aggtccggacgtcctaggtatcccaggtgggagtccacgcaggggtaagggcacactctccgggacacccctgcctccctcacttccacgcgcacggtggtgacatctgggaggaaactctc

SEQ ID NO: 20750 - DNA, 122 bp, Homo sapiens
acggggctgaagaggggtctgtagggtcctcagccccactgcctccctgggggcctgcggcgtctccagggacccaaacacctggctcccagggggagctgcgccctgtgctggcagcggga

SEQ ID NO: 20751 - DNA, 122 bp, Homo sapiens
ccgcacccccacccccgctgcctaggggttttgggaaagccgcgggagtgggagggaatgcgggaggtgattcttccaaagccaagtctgcagctcgagcctcagtttccccatctggaatt

SEQ ID NO: 20752 - DNA, 122 bp, Homo sapiens
aagactggacaaccttgagggtcaggagtcaaagtcatcaggacgcagggcatggagggtcgttctggggagtgggctcttagagtctgcagcagttccagagacccaggccgggaaaagtc

SEQ ID NO: 20753 - DNA, 122 bp, Homo sapiens
ctggctggagattggggttagcgggcagggttgcccccactcagtcatcctccttcggaccgcttggccctggcaactcctgggacctccgccccgcgagcccttctagcgtggggaggggc

SEQ ID NO: 20754 - DNA, 122 bp, Homo sapiens
ccctttggtgccctggcttgggcctgggttctccagggctgctggggtgaggctggcacccgagaggccactggggcccctgctgagacagtagcccacacccctgcgcagggcacgccagc

SEQ ID NO: 20755 - DNA, 122 bp, Homo sapiens
cagtgcccagacctcagctgcccaatttggtttttgttttttattgagttgagtttcattcggcaaacactagccacatgagtgtcttactgggcctcaatgctcaccaccttccagaaccg

SEQ ID NO: 20756 - DNA, 122 bp, Homo sapiens
ccctccggggggccgagaaggggctttcccggccctgagccctgctggcaggcgaggtgtcgcgaccggtcccaggtgggtcgggcgcggagagaagccgcaaccagagccgccgccacggt

SEQ ID NO: 20757 - DNA, 122 bp, Homo sapiens
ggagcactggagcaggccaatcattcacaacaggggctagggctgagcggctgagaggcccggattaaatggactgaatgctgatggataaatgacatgagccacgctgaaagcctcatgaa

SEQ ID NO: 20758 - DNA, 122 bp, Homo sapiens
gaacacagcacgtggtgggacagaaagaagagtgcgttaggccggggaggaaagagggggcgtgtgagtctcagcccaccgtgccttgcttctgccttaacacacggaaagatcagatgtga

SEQ ID NO: 20759 - DNA, 122 bp, Homo sapiens
agcacctctccaggcagcccctacctggcccctgggcctcattaggccctggctgtcctccgtagagactagtacagctcctgccttctgcacttggaactttacatgtgactggttatttt

SEQ ID NO: 20760 - DNA, 122 bp, Homo sapiens
gacggggtttcaccacgttggccaggctggtcttgaactcctgacctcaagtgatccgcccgccttggggcctcccaaagtgccagaagccaccatgcccggcctacaacaatcttttggct

SEQ ID NO: 20761 - DNA, 122 bp, Homo sapiens
gactcaatgttttcttccccatttcatgacatctcactcctctgtcggtgtaaagtgaggcgttatttactgttgctggaattaaatgggagaaagttaactgttagccttcaatccttacg

SEQ ID NO: 20762 - DNA, 122 bp, Homo sapiens
aggataaattataagagtttacagagtgttttgctaaaatctagctgtagtatatccactcggcttgtcattctttatcgttccattctcttcaactacaaactttatacaatgcttcatgc

SEQ ID NO: 20763 - DNA, 122 bp, Homo sapiens
ggagttgcgctggcagagaggggcggccccagaaaccacttccagatgtgctcggctggccggctcggatgcgccagacttcctctggctaagtgcaaaacatgcaaaaaacaacgctgttc

SEQ ID NO: 20764 - DNA, 122 bp, Homo sapiens
ccttctctggttccctgacctcagtgagacagcagccggcctggggacctgggggagacacggaggaccccctggctggagctgacccacagagtagggaatcatggctggagaattggata

SEQ ID NO: 20765 - DNA, 122 bp, Homo sapiens
caatctcttaagtctccttcccagggtaatagacactgttgacttataagtttatttaaacgtgtaggccttatcatatgcttcatcctaacagcacaaagttaaacaaagcagctttcaag

SEQ ID NO: 20766 - DNA, 122 bp, Homo sapiens
tgaaggcccccgacagccctcctgcaatagccactgtagctctgcctgcacctgggccttcgctctgctgtcgtcccaccggcaggagtctggctaaaggggcatccctcagccctactccc

SEQ ID NO: 20767 - DNA, 122 bp, Homo sapiens
ggcctcggatggactgaaccactgtgaaagcccgaatggggggaaacaggcagtgacggccgctagggaaggactgggggtaagcgattaaagaaacttccatacatttttgtatcgcgcca

SEQ ID NO: 20768 - DNA, 122 bp, Homo sapiens
gcataaacaagagcggggacgggatgaggcggcggttgatcccagggtggcgagtggcggcgaccgaggcggcgagcggggcccggcgccgaccctgagtgcagcctgacccgccctcgcgc

SEQ ID NO: 20769 - DNA, 122 bp, Homo sapiens
agctgaagactgacggtgcccgggattgcttgtacccatgccatgtgagtctccagaacccggggtaattgggatggcatctggtaagccagtctccttcttattggatactggggcaagtt

SEQ ID NO: 20770 - DNA, 122 bp, Homo sapiens
ttgtcgtatctggtgatggattaacatatagcctttgttttctaataaaatagtcgccttcgttttctgtaagaatgattcctaagtgtaaaggcattcgaatattggtactatttcttgct

SEQ ID NO: 20771 - DNA, 122 bp, Homo sapiens
tggacgatagccagcctccttccaggacaggctcatgcttggggctgccactgtggaggtcggggcccatggtctccaggagcatttgtgaaatctccattttgcctgtaaactgatggtag

SEQ ID NO: 20772 - DNA, 122 bp, Homo sapiens
ggctggagaacattcctttctgtcttctggaactgtacacatctgcttacctcctccacacgttaaaggtttctaacactacaaattccccggccccttcactcataagcctaagtaacctt

SEQ ID NO: 20773 - DNA, 122 bp, Homo sapiens
tgatgccgctctaatccctggaagtttggaactaatgaactgactgctgagctgccgccacggagcttggtcccaaactatactgtacttcacactcgatttattctccagatggcgagact

SEQ ID NO: 20774 - DNA, 122 bp, Homo sapiens
cagcttcctggcctgtgtgtaagtggacgggggagggcaacgaggtctggggcaggaagtcgtagcagcaaggcaggtcccgggcctgggggtctggagcttatcttcttcctgtgagctgt

SEQ ID NO: 20775 - DNA, 122 bp, Homo sapiens
gaactcacacactctgaactccacctgcatcaggtggcctttctgctcccataactaggacgtttccaaatgcacccccaaataaggtacaattccccaacatcctagttacggggttctgg

SEQ ID NO: 20776 - DNA, 122 bp, Homo sapiens
cgccgtggggcgctgcaggtaggggcgcgctccaggtgggggcgcgcttccccggggtggcgtgttgacttgagacgccggcccgctcgctggctgctggctcgccagccgcttgtccctgc

SEQ ID NO: 20777 - DNA, 122 bp, Homo sapiens
cagcaggacacaatcagccccacccaagaagacaaagaaaaacatctgggtgccacatcccgtgatggaaacaggagttttgcccattgaaaggaggtttgccaaggccaatggggtgatgg

SEQ ID NO: 20778 - DNA, 122 bp, Homo sapiens
ctatttgttccacacttttaatttttttcctcttttctgccttctcttctgctaattgaacgttttacgattttattggatctcttctgttgacttagtatttagatttctttaaattgttt

SEQ ID NO: 20779 - DNA, 122 bp, Homo sapiens
ttaaaaggatggcaagttgcatcagaaagctttattttgagatgtaaaaagattcccaaacgtggttacattagccattcatgtatgtcagaagtgcagaattggggcacttaatggtcacc

SEQ ID NO: 20780 - DNA, 122 bp, Homo sapiens
caagcgggaatctgaggctcagtaaaagtttgtaagagttgagatctagctatcagaaagcggcagcggcatccttagagaccctggggacaaaataaatgggtctcccaccagttgaatga

SEQ ID NO: 20781 - DNA, 122 bp, Homo sapiens
ccggtggcttgtagctagatttctgcatcacagagcctctggatccattcattcattctccgcgggtttcttaagtactgcagtgccaggctttggggacacagctgtttttgtttttgttt

SEQ ID NO: 20782 - DNA, 122 bp, Homo sapiens
tcagaaccatcggtccctcttcttcctgggtcatcctgagctcggcagtgagagcacctacgactagggagcggccgagcagagggaacaaggccgtgcccgctaaggttctcccgggacgg

SEQ ID NO: 20783 - DNA, 122 bp, Homo sapiens
aggcctcttgcttcccaaagccacattccttccctccaattccctagcaagggcggctcccgaaccaccattttgtcttctgccagggcgggtgtctggctgcctgtcagtcaccggcctag

SEQ ID NO: 20784 - DNA, 122 bp, Homo sapiens
tgctcagacccaggcttgtccaatgcctccgccttcgctaggtgtaaactggctcctgggcgcagtgactaatacctcctgctctaggcggcccccaccccctttccctcaagggtcagctg

SEQ ID NO: 20785 - DNA, 122 bp, Homo sapiens
acaggagatggggtggacgaggcggcacagggggagggccacgaggaggggcaggcgcggcgggcaggcggcaccacctctgcaaggctaacaaggtgctgcgcccggctccctcctcttgc

SEQ ID NO: 20786 - DNA, 122 bp, Homo sapiens
cagactcaaaacccggcagctcggaggctgccccctcttccaaggagacccccgcagccacggaagcgcctagttccacacccaaggcccagggccccgcagcctctgcagaagagcccaag

SEQ ID NO: 20787 - DNA, 122 bp, Homo sapiens
gatctgattaagtttgttaccttctttgtacctcagcttctggggccaggccccagactacgtccttcagatgctgtaaaagtgataaaaattatatttatctcgtggattacacatataag

SEQ ID NO: 20788 - DNA, 122 bp, Homo sapiens
tgacagctagtaattgatttgcatggcccggtttatggggagccctaatcttagttttttcgtttctagtccacagtgtctacgtaatgcctagcacatcataggcgcctaggagacacctg

SEQ ID NO: 20789 - DNA, 122 bp, Homo sapiens
aattctgtacagatgcaaattttctccccaaaacaacagctttgcagggctatttctgttcgctggtcttaaactgccatctcaaaatatatatgtaaaagaaatatattttggggtaaaat

SEQ ID NO: 20790 - DNA, 122 bp, Homo sapiens
acagagacacctacccatgaagggtgcttacaacactgtctggaacacagtaagtctacacgtgtttgctatagttacacctaacttagcataccccaagtcaacagcatctctgcaacatt

SEQ ID NO: 20791 - DNA, 122 bp, Homo sapiens
gccatgtcccctcaaagaatataaaccagcctctgtccagagaagcatccagaaagagcccgccaggagccacggggacaagggcacctgctctcacccctgctccatggaaagtgcagtca

SEQ ID NO: 20792 - DNA, 122 bp, Homo sapiens
ccaccgcctttcctggagaaagctgctctgccattttagagtcctgagctccgaaacagccgtggctgcctgggttgcacttggcccctgcacgtcactccacgttgcgcgctccgccggga

SEQ ID NO: 20793 - DNA, 122 bp, Homo sapiens
ttgcaaacatgaagtgtcatatgagttatgtatgttctaattatccctcagaagaccccccgctggaatggaattctcacatcaagtgtctgtgcctcgctgctgaaggataacccagagtg

SEQ ID NO: 20794 - DNA, 122 bp, Homo sapiens
ctgaatgggagggtcccaagcattcggtagttcctagtaaaagccagatgaccacctcgtcggagtctctgcaaagctttgcctttggctccctctccataagcagcaaggagacagaagag

SEQ ID NO: 20795 - DNA, 122 bp, Homo sapiens
gaagagtttcttttcagatgttcctacgaacatctgtttgtggctgaaattcgacccagccggcctgcgcctgccccgcgccccctttgtccccggccattgtttctgatttcatgctatca

SEQ ID NO: 20796 - DNA, 122 bp, Homo sapiens
cattagacaggctatttgacaagatgggccactttaagggatataccttatgccgcctttcgctcttctacaattcagctccataaggatgaccttcagacatttttacacccaattccccc

SEQ ID NO: 20797 - DNA, 122 bp, Homo sapiens
gagaaagatcaatctgaacgtgccccaaacctatgagttaccccactaagtagatatacacgcagcaatcacaggtttcccatctttaaaatcagacatttgaattaaattttttgtagaga

SEQ ID NO: 20798 - DNA, 122 bp, Homo sapiens
gtcgccgcccacggcctccggcaccgggtcctcagtgcagtgcaggcggcccatggcgcgcgccccagccccgcaggttccaccgccgccgccgccctgctcagcttcctcctccgctgccg

SEQ ID NO: 20799 - DNA, 122 bp, Homo sapiens
ttttgaaacgcacgtgtttctgttgtaggaccctcactacgtccagcaggcgctgaccaacgtcttgctgatggacgccgtcgtgggcacactgcagtcaccaggcgccatctacgctgcct

SEQ ID NO: 20800 - DNA, 122 bp, Homo sapiens
tttggtgagagtgtgctctgtagagctcaaagcaagggaggtgttgtcctaggtgagtggcgggagagtcagaaaggcgtctctgaggaggtgatctgctcagggctctcactcccctctct

SEQ ID NO: 20801 - DNA, 122 bp, Homo sapiens
aagggggcgggacggcgggcggcctctagtgcgcatgcgcgccgtgcggccttggccaagcgtgatagtcactgcgcctgcgtcaggttttccagcctgaagaaattgatgatgcagacctg

SEQ ID NO: 20802 - DNA, 122 bp, Homo sapiens
gaggcgagggctgtcgcaaggatggggtcagccccctgatagggtggtgccacctctctgcggggagccgcaaagttgggacagtcaccgggggtataggtggagctggaggtgaaggtgga

SEQ ID NO: 20803 - DNA, 122 bp, Homo sapiens
acgcgccctgcgccgcaaagcattgtgggagctcgggcccgctagtgtcgtggttggaggcgaggtggggcggccgtttgttttctcgtggtctcgagctcgcgcgctctcatcccctcccc

SEQ ID NO: 20804 - DNA, 122 bp, Homo sapiens
gcctgcgtgtggatttctgcttctgtttaattcctctgttaggataatgcccaggagtggcgttatggagtggtcaataccatccggcccctggtcacctctccagtgcctcccccatccct

SEQ ID NO: 20805 - DNA, 122 bp, Homo sapiens
tagccgggcatggtggagcatgtctgtaatctgttactcatggagctgaggcaggacaatcgctcgaagcttggaggtggaggttgcagtgaaccgagatcacaccactgcactccagcctg

SEQ ID NO: 20806 - DNA, 122 bp, Homo sapiens
ggaagcccgatgggaggtgagagatgacacagggctccgagactctcccatctccattgccggtcccttcttctgcctgccccctcccaaaccggctccccacaccctactttgcttgcgtc

SEQ ID NO: 20807 - DNA, 122 bp, Homo sapiens
actccaagccaagccagcgggagccccggtttttgcagtagtgggaagcgagggagccaccggcaggtctgggggcctgggactcaggactgtgggtatccataacctccttctgcctccct

SEQ ID NO: 20808 - DNA, 122 bp, Homo sapiens
ttgcctttacgagctatttctgtcattttatataaaagcacaaagacacagtggtcagcacgacaagactacagcctgggggaagcgtaatcactgtcagaggacatcaaatccaacacact

SEQ ID NO: 20809 - DNA, 122 bp, Homo sapiens
catctcgcccgagcctcatctgtagctcaccgtcctgtgcgccctgtgctgttggcagggcgtgtgggatttagagggttttctatactgagtcttcctcggagcaggtgaattctgcatag

SEQ ID NO: 20810 - DNA, 122 bp, Homo sapiens
cccccacccctgttcccgggcttgtctcaaccccacccagtggctgctgctgtctgcgcccgaggacctcatctcctcgcagaggctggctccccgcgccccgcatcccacgctgggacacg

SEQ ID NO: 20811 - DNA, 122 bp, Homo sapiens
tgcccgagcgcccggggctggcccgcgagcgggaggagccggcagccgcgctccgccccgcgctgagattcgtgccacctgcctcgaacaccacggaggcgagaggaacccagagagctcgg

SEQ ID NO: 20812 - DNA, 122 bp, Homo sapiens
actttcggcctcgaagggcttcctggaggagttgccagttttggggatgagccactgcttcgagcattcatgtcaacccccgaccatgaagacgagactcctggcctgtgtgtgcttgtcgc

SEQ ID NO: 20813 - DNA, 122 bp, Homo sapiens
aagcatgaatcccgccttgtctcgggtgaggtatgctaaagggttcgctctcgcttggtgcgagcattcttctgtgaatccattacgggtctcaaagtcctaatgcagggaacacacgctcc

SEQ ID NO: 20814 - DNA, 122 bp, Homo sapiens
caaactcctgacctcaggtgatccacccacattggcctcgcaaaatgttggaattacaggcgtgagccaccgccaggatctggtctctaaggagttattctctagccaccacgcccagccag

SEQ ID NO: 20815 - DNA, 122 bp, Homo sapiens
aggcggggccatgcggggcggggccggagcggaggaggggctctcccgtgcggccagccccgcccctcacccgggtacccggcggcgatctccagctccccaagcccatttacatctcccca

SEQ ID NO: 20816 - DNA, 122 bp, Homo sapiens
tacccacctttgctcaatctgtccaccagaagcggacgtccctccgaaccaagtccgcagcgaagatcacccgtcgctaccacgctcctcgacgtcttagccaaggggcgcctggctctacc

SEQ ID NO: 20817 - DNA, 122 bp, Homo sapiens
taatgggaactagaatagtcaacagcttccaagtgcaaaactctcacttttcccaaaatacgtttgtaaagaatactgtaccaccaaatacttctacaaatgaagaaataatacaaaaagtt

SEQ ID NO: 20818 - DNA, 122 bp, Homo sapiens
cacgcgagcccacaggacaccggcccctagattccagccaccaagcggaagcatgagacccgcccacactagcctctgtgttcccgttagggacatcacaccctgtctcacgtcgcagtgcc

SEQ ID NO: 20819 - DNA, 122 bp, Homo sapiens
aagtccatcatcatcagctttcatgggcctttaagttctccctgacctcctgaggttgcacgccagagggaagtgcgatttgagtaggctgcgagccctactcacactgcagtaagaacacg

SEQ ID NO: 20820 - DNA, 122 bp, Homo sapiens
aaggcggccagaggcatgggtctgagggctttgcttgaagagcgggcggtgtgcgtgtctcgcagcgcccccacctcggtgtctcagggccttgctgtcttccgcctttttcccagcgtctc

SEQ ID NO: 20821 - DNA, 122 bp, Homo sapiens
gggtggtgaggggggctctctggctctctgggtttgtgggctgcagcggattggggattgcgaaaatgatgttcttcgcaggcgctgcagggcgcggagacaggagaggcctgacaactttt

SEQ ID NO: 20822 - DNA, 122 bp, Homo sapiens
aaaatgcctacacgctctttaaaatgcaaggctttctcttaaattagcctaactgaactgcgttgagctgcttcaactttggaatatatgtttgccaatctccttgttttctaatgaataaa

SEQ ID NO: 20823 - DNA, 122 bp, Homo sapiens
cgcccaacgcgcccaaacgtgctagtgaaacgcccttgtcgcgagacattatacgcgaggcgtgaactcattggtcaacccaaatgacaactcgccaactgattggctactctcacttcacc

SEQ ID NO: 20824 - DNA, 122 bp, Homo sapiens
tctgtgaccacaaatgaacctaagtcctaactgatatatcagctgccaactagacatctccgtttgttcatctcaagcactctcagttcagtttgtcccccagctcatcttcccccattgcc

SEQ ID NO: 20825 - DNA, 122 bp, Homo sapiens
catgctgcagtgcagtggcgggatcacggctcactgcagtctctactgtctgggctcaagcgatcctcccatctcagcctctcaagtagttgggacttcaggcgggtgccatgccaggctag

SEQ ID NO: 20826 - DNA, 122 bp, Homo sapiens
cagatttcagaccctgcggggggccctcggagctgcaggggagtcccccgcccttggtcccgtgtggcgccctcacctcatggatggcaagtgcctcatgaccacgtccagggcctggatcg

SEQ ID NO: 20827 - DNA, 122 bp, Homo sapiens
cgcgtgagtgggttgaggccaagcggcgcgagctccagagctggtgaggcagctggtttgcgctggagccccagccacgaggaggcccctgcccaacccttccgcctcaaaactaactctta

SEQ ID NO: 20828 - DNA, 122 bp, Homo sapiens
ggtggaaagaaagctggggcaactgccagaaggatggcggtgccctgggaggaatatttccgactggctttgcaagagaaactgtctacgtgagtgggacgtagagggagggagggctagaa

SEQ ID NO: 20829 - DNA, 122 bp, Homo sapiens
aagggtctcctgggcccagaggggctgcagagggagccctgggcaaacagcaccccaccccggcagggctgccctgcctgagctgcccccagccttggggcaaggctgccggccctggatct

SEQ ID NO: 20830 - DNA, 122 bp, Homo sapiens
tcttcctgattctgacctcccgccctctgctagccccagcctccctcaaccccgcccctgcggctcaaactcttaaagggaaacacaacttttggttctgctcctgctgagccacaggaccc

SEQ ID NO: 20831 - DNA, 122 bp, Homo sapiens
caaccacggccgccgcgtggatgccgctgcattcggagtcgttttgccacttggtcccagcgccaggcttctcggtcgggagttgacctcagcctttctgtgacccagttcctggcacccag

SEQ ID NO: 20832 - DNA, 122 bp, Homo sapiens
aagaaatcgcttgaggacactcgagacgtcatgaggcgagttccccgacagctccaccaacgctcggccattctcgaaagcctggcacagccgctccacacggacccgggacccgctgaccc

SEQ ID NO: 20833 - DNA, 122 bp, Homo sapiens
tgcacgtggctcatctgtcaaggaaccacatactgtgtcagattttgttaaagcaaaaaccggtttttatagtctttataaaatgtaaaaacttggaataaatgtaacaatatctaaattcc

SEQ ID NO: 20834 - DNA, 122 bp, Homo sapiens
gccccattacatgtctaaaatccaagctataagttcagggtcacaggtctgttttctcctcgaaggaagtacagcgaatgcaggcctgaacattccttagagggtttcaggactttaattac

SEQ ID NO: 20835 - DNA, 122 bp, Homo sapiens
gaactaaagtgcggggatcaatgagtgtcgagcaaagtttctgagtgctgctccagctcgcggtcttccctccccctctgtttgtgtttcggcgacgcgctgtgtgtgtgtgtgtgcgtgtg

SEQ ID NO: 20836 - DNA, 122 bp, Homo sapiens
gacttctgggctcacccgcagagatgcagagtcaacaggtctggattttcaatgaaccgacgaatgactgccacactttgagattcactggcctcaggcagtgaggggtcccagggaagggc

SEQ ID NO: 20837 - DNA, 122 bp, Homo sapiens
ggggcagcacagcttcccgattcccacgtgcctctgcgtctcggcgccacgggtgactttcggtccagatgccagcaaagacatctctctgtctaccaggcaaccacctccatcctcacctc

SEQ ID NO: 20838 - DNA, 122 bp, Homo sapiens
ggaaccgggtcgcgcgccttctgcccggcgttccgcgcgcccccgcgccgccggcccgagcgccccgcccccgccccgccccttcgcgctcgcgccacttggagctcgcccccgtcgttccc

SEQ ID NO: 20839 - DNA, 122 bp, Homo sapiens
caatatcaagcacgtagtaggtactcagaacctgtcacccagcgcgaaacgtccgcaaagcgtgtaaacagacgcccagaagctgggaagcttgcagccctcatagacgccggtatcgccac

SEQ ID NO: 20840 - DNA, 122 bp, Homo sapiens
gctgcctctacatcagcactgtctagaactttctgtgatggtggaaaccatctacagccacgctgaccaacttatgactactgagcacctgaaatgtggctaatttgactcagaaattgaat

SEQ ID NO: 20841 - DNA, 122 bp, Homo sapiens
agggatgcatgaggtgtgtgtgtgtgtgtgtgtgtgtgtgtgtgtgtgtgtgtgtgtacacgtgtgcatgtgctcagtgctctcctggaactgcttagccctgagacagcaaggggttaagg

SEQ ID NO: 20842 - DNA, 122 bp, Homo sapiens
agcagaaagcagctcagctcaaagagcaagtcagcctgccggcagcggcacaactcaaagcgcatgcaagccagcaggcagcagggcctgttcacaagtcaaagccaaagaagaatgacccc

SEQ ID NO: 20843 - DNA, 122 bp, Homo sapiens
gaaaagaagaaaagggaaggaaggaaggaaggaaggaaggggaaataagaaagggagggacggaaggaaggactcaccaaaggctttaaagtaggttatactgtatatccacacctcttttt

SEQ ID NO: 20844 - DNA, 122 bp, Homo sapiens
gccgtgcctcagtttcctcctctgcgaagggcgggaggagtcggacgcgccctagagccccgcgcgttcctggtgtagcctgctgggcccgtgttctttaagttcctcttcctcggagccgc

SEQ ID NO: 20845 - DNA, 122 bp, Homo sapiens
cctctctctccctttgcgtggacagggaagagaccccccaaaataatgtccccatccacccgtatggaatgggcatactcctggctgtgagttctttgcatcattgtgaggatccagtagaa

SEQ ID NO: 20846 - DNA, 122 bp, Homo sapiens
cccagagcgaggtgctttacacagagcgggacagaagggcatgtgctcccgtgggctttccgttgacccctcagaggcaccttgggagaagggctgcagaccctccagaactggtttatgtc

SEQ ID NO: 20847 - DNA, 122 bp, Homo sapiens
ggcgccgcccctaccccaaagcaaacgctggagaacccggaaattgcccagaacgggaaccgactttcgcgccaaccgcgcggccgcgcttgccttttccggtggaagtgacgccatcggca

SEQ ID NO: 20848 - DNA, 122 bp, Homo sapiens
ttggcccaaccctcacacacttccagttccatcagccattcagaattaaaagtttaccaacgtttcggcccctccccttaagtccaagccactcagaagcaagttgtcactgtaagtcccgc

SEQ ID NO: 20849 - DNA, 122 bp, Homo sapiens
gtgactattcattgaccatgtttgtgaattatcagaaagcagaattcttgccaggcatagcggctcatccctgtaatcccagcactttgggaagccaaggtgggaggatcacttgagcccag

SEQ ID NO: 20850 - DNA, 122 bp, Homo sapiens
gttggccaggatggtcttgatctcttgacattgtgatccgcctggcttggcctcccaaagcgctgggattacaggcatgagccaccgtgccaggccaacagagtgtgttctaaatacccagc

SEQ ID NO: 20851 - DNA, 122 bp, Homo sapiens
gcgcaggcgttgcgagcttggatgggagagatgctgggagcgcgccagtacccaacctttcggacagtcttccagcccaccctgccctctaaccaaaggggagggagacagcgctgaaggga

SEQ ID NO: 20852 - DNA, 122 bp, Homo sapiens
atggcctcagagctcatcagccaacccccaccaggctacgctgcctcttctgggagcctccggtctccccagaacatctatccactggggttagatttgtccaatgcccccaccacaatcac

SEQ ID NO: 20853 - DNA, 122 bp, Homo sapiens
gaagatggatgctgtggcaactgaacctggagtcagactcagaatcccagcttcctcactcgggaggaggccttgcatggctgttcatgggctccctaagaaggcagtgtcctgaggcgggc

SEQ ID NO: 20854 - DNA, 122 bp, Homo sapiens
tgtgcgcgcccgtccccgcgggctcggggatgtctgtggatggctgtcgtctagacagggcgcagccccctccctgcgtccccggtgagcccgcgggccgcggggggagcgggggatgggag

SEQ ID NO: 20855 - DNA, 122 bp, Homo sapiens
cccgtccctcgccaagagacaagtcttctgctccgtgtactgcgtggagagcgacctgcccgaggcccccgcctcggagcagctctcgccgcccgcgtcgccacctggggctccgccagtgt

SEQ ID NO: 20856 - DNA, 122 bp, Homo sapiens
tcctccaaccccagcccaaatgactccggggtcgcacttgctcaacgccccaacgaccgacgcgtaccttaataggcagggagaagagatagatctcctccagggacttgatcttcatgtcc

SEQ ID NO: 20857 - DNA, 122 bp, Homo sapiens
gaaatgatgactggcttctccaagtgcccctggggtggtggtggacagtattgctacatccgcctgcaaaggttgcttctcacccttcaccccgatggtcaagacatgcaatcttcaccctg

SEQ ID NO: 20858 - DNA, 122 bp, Homo sapiens
caccgcctcgtgtccctcataccgcgcctccgcggagcgcaggctgccttggtccggtcccgccttggaccctcgccttcgctccagaagaatcagtgtcctccgggcggccacgggcccgc

SEQ ID NO: 20859 - DNA, 122 bp, Homo sapiens
agaggaagccggctgagatttgtgaagcagctcttgctaccgcgggtaggagagggcgcgcgggacccaagagcctccgtgcggagccaggcctcaggagcagccgccttggtcctggaagg

SEQ ID NO: 20860 - DNA, 122 bp, Homo sapiens
gctgatccctgcccccacccaccctcagtgggaaagccaattgcttactgattacgacagcgacatcacttggcaaacattttggcctgagctcaatgtgtgacatcagtctcctttagggt

SEQ ID NO: 20861 - DNA, 122 bp, Homo sapiens
accatccctatccccatgctagccaccacacccaccagctctgccacctccctgctgcatcgaccacttagctctggcagtataggcagcagggcaggctggggcatgctgatacccgcctc

SEQ ID NO: 20862 - DNA, 122 bp, Homo sapiens
aggcagcgactctgtagacagaaaacgtgggagtagcctgtttctccacggctgccaccacgtcagaggcgctacaggctctcccatctcactgggtaagacaacatgctttctaagactac

SEQ ID NO: 20863 - DNA, 122 bp, Homo sapiens
ggtggtggaggaagccagtgataagtatcaagatgaaggcttctgtctggctgctacagacgtgtcctggggggataaaagacaaagggttatgggaggctggaggagaggcccctcactca

SEQ ID NO: 20864 - DNA, 122 bp, Homo sapiens
tctgcagagagcctgtagaacctccgggaagcagctgttcccaacacaaaaccacactgccggagagccgggtgagccccccaagatcacgaaaatcagccgtaacggccttcagcagatgt

SEQ ID NO: 20865 - DNA, 122 bp, Homo sapiens
ggccgccttgtcgttctggtcagagctcagcttggcgctgtccagctgtggggagacgggcgggtgagtgcgggcgcggggcggggcggggttcccaccggccgcccccgcccacccgcctg

SEQ ID NO: 20866 - DNA, 122 bp, Homo sapiens
tgccttcttgactcattcttatttccggggttggggcggggcggggcgggcggggcaccccggggcaggggcggggccgcggggcggggaggccggggcgggcgggtcctccggacgccgct

SEQ ID NO: 20867 - DNA, 122 bp, Homo sapiens
agaagcggattctgagttaattaagcagaaaagaatggattggcagtcagagaatcaatgcgaaggctggggcctatcctctggaaagcactggagtaagtaggatgctctggggggtctcg

SEQ ID NO: 20868 - DNA, 122 bp, Homo sapiens
gggagggggttcagatctagctgaggacacacgcgcgttctgcagttgtaaaagatttcccggtgggcaggatcgtttcccctcccatcgcccaggtttccgagcggccaagagactggccc

SEQ ID NO: 20869 - DNA, 122 bp, Homo sapiens
tggttcacgcagccaccaaaggcgtaggcccagaacagcagccagcgccaggccagcccgcgcaccagccagcaggccagcatctgcaccagcaccagcaccagcaccgcccacttgaggcg

SEQ ID NO: 20870 - DNA, 122 bp, Homo sapiens
tacttggcctgagactgacctctccctaggtccaaatgccctagtcacatggcagacccacggcctggcccactgtataaaataaacctgtttgcttcttagtttgaaaagtagaaagccac

SEQ ID NO: 20871 - DNA, 122 bp, Homo sapiens
ccgcccgccccccgtctccccggccccctcacatgaagtgactggatttgggagacctagcggaaaccttcaggtcacccagggaactgctcctctctctggtcctgcagcggcgaggcggg

SEQ ID NO: 20872 - DNA, 122 bp, Homo sapiens
catgattcttcattgcaacaactcaagtcagacttgaggctaccaggccttgcgctctcccggttgtgtttcctgtttaaactaaggctgtagcaggctgcccatctctttcttcccgggga

SEQ ID NO: 20873 - DNA, 122 bp, Homo sapiens
atgtgtggaaagacttaggataccttaggtacctcatctgagtcagcagtgtgatgtggccgccaggaaagctaaagtgctcctggtctgtgctgttagaagaaagactagaatgaggcagg

SEQ ID NO: 20874 - DNA, 122 bp, Homo sapiens
cggccactccttgtgcaagcgcaggcctccaaagggtttgggcttcttgcccaaccgccgcgcttatctccgagtctgcccccagtctgccctctcgcaggccgagaaaggaccagaacacg

SEQ ID NO: 20875 - DNA, 122 bp, Homo sapiens
gcgtgaccaccacacctggcctcactttttttgtttgtttgtttgtttgagacggagtttcgctgtttttcccaaagctggaatgcaatggcatgatctccgctcaccgcaacctccgcctc

SEQ ID NO: 20876 - DNA, 122 bp, Homo sapiens
ttttttttttttttttggtctttcacttttgaaagaattctgacactgaagtaggtcttccgaatcctgcttgaatggtgcttaacagaaacctgggttatagctaagaatctctgaatgtc

SEQ ID NO: 20877 - DNA, 122 bp, Homo sapiens
tccaccaactccctgtatttatccagcagtgctggtggtgtttatccaccaatgccttaccggagagcagcttccaggtgcattgatccctggaacttctggcttgctttgcatgcagtcct

SEQ ID NO: 20878 - DNA, 122 bp, Homo sapiens
aggacacttggggcggagttagcctcgctcagggcgcggctaaggcgcccagatggcctgcgggcgccaccacgtccctggtcccagctcgggagcacatcagaggcttagaggcgagtggg

SEQ ID NO: 20879 - DNA, 122 bp, Homo sapiens
tagcgcggcggagcagggaactcaggctgcgggactggggtctggccctgcccagctcctcgcccacgcccaggcttccgttaggccagcagggggaccccgagccccggacaacagccctg

SEQ ID NO: 20880 - DNA, 122 bp, Homo sapiens
caggaaaagtgcagactctgagtgttccagggaaacacatgctggacatcccttgtaacccggtatgggcgcccctgcattgctgggatgtttctgcccacggttttgtttgtgcaataacg

SEQ ID NO: 20881 - DNA, 122 bp, Homo sapiens
agtgagactaagaaactagatgaccgctagggtctatatgtgtgtgtcccctcccaaattcgtatgtccagacctaatcctcagtatgatggcattaggaggtggggcctttggaaagtgat

SEQ ID NO: 20882 - DNA, 122 bp, Homo sapiens
cgtctgactgccccggccaaagtccacatcgttccgccagtcgatggcctgctggcatgccgtcttctgtcctgtgctcttctgccagcgcgttccccttgacgtcctctcaatattcagcc

SEQ ID NO: 20883 - DNA, 122 bp, Homo sapiens
tgtaaatacgagcttccagaacaaatgctacaacacaaaacagaaacacatgtgcggccgcgcggcaagcgagcgcgcggcggggcgggaggcgcggggcgcggggcgcgcgcgccccctgc

SEQ ID NO: 20884 - DNA, 122 bp, Homo sapiens
aaaatgttggctgtgtgttgaacaatcacgaaaatagagccttctctcagaaatcacagccgggatcagcgtggatttaaccatttcctcattacgggagacccggcagcattctctttcac

SEQ ID NO: 20885 - DNA, 122 bp, Homo sapiens
taaattaatgtcctctggatggatagaaaggacggtccccccaggggatacagtcccggccgcatggcatcaatgtggtgaaactgaggctcagagaggtttaggcccttgcctaaggtcac

SEQ ID NO: 20886 - DNA, 122 bp, Homo sapiens
atgtcttcctttcttctcttggtaacagtttaatgctggaagcatcccgtgtgaaggagacgggcagaagaggctgaggccattcttctctgggagccagtgggtacccggggtgcacgcgc

SEQ ID NO: 20887 - DNA, 122 bp, Homo sapiens
ggaaaagccacatgaagtggagaaacagccggattcaggattcacccccgaatcaaaacccgatttttgaaaggcaggaccttccaattcgggcaatcgctaggttctgcttgtaaaataac

SEQ ID NO: 20888 - DNA, 122 bp, Homo sapiens
tgggccgttcacctttgacaggggccgtcacctcacactccagtgtaatggaccacactgcggctgcatttaatttattggggtgagaagttgctgcgggaggtttccaaagggggtctttg

SEQ ID NO: 20889 - DNA, 122 bp, Homo sapiens
agccccgtggtggtacaacgcgaaggtgtgggaaggccgcgataaaccggaactgcagcccgccggacacctccggcttcacttccgtaagaggagaggagtgtacggcaaggggcgggaac

SEQ ID NO: 20890 - DNA, 122 bp, Homo sapiens
ttcccgagttagccaatggcagcgcgagatcgcgcacaaaggcagtggtggccaataagacgcctacttttgacccacgctcgttcttgagaagcgtgagaactgccctccaataaggatcc

SEQ ID NO: 20891 - DNA, 122 bp, Homo sapiens
agggtttcatttctgtccttctgtttccaacttctgtttggaaatgctgtttacttggggcgtcttgcccgggatcttgggccagggaagtgccggcctgaagtgaccccctcttcctgtac

SEQ ID NO: 20892 - DNA, 122 bp, Homo sapiens
taaggtggcggaaggggcatggggaggcacgttcaggagtcgcgctttgcgtttccaccccgacaccagcggagcgcggagcggatgggttcacagcataggccactttgagaactctgcgt

SEQ ID NO: 20893 - DNA, 122 bp, Homo sapiens
gacaccttccactctccttcctcccgccgtggtctcgagaacagaaggatctctccttaacgcctttcaccattaagaggaaagcgatggaggagctgagcgctgatgaggtgaggaggttg

SEQ ID NO: 20894 - DNA, 122 bp, Homo sapiens
gtggcctgcatgggaggggtcctgccctgtgtgtcagagtgatgcgtcatccagccaggccgcagccagcactgaggcttaaacaaataagaggagcttgctgtctagggagcaacctttaa

SEQ ID NO: 20895 - DNA, 122 bp, Homo sapiens
tttagtcacataccacagcaacctactggcttgtcattttatgatctggcacggagccgacggcgcacacggtgtcttgggcagccttgggagcccgtgacagtgctgtgaccagcgggggc

SEQ ID NO: 20896 - DNA, 122 bp, Homo sapiens
gaatttgatttaatagtgtgacaccaaccaagaaaacaaggccgtaaaaataaaggcagacgccgctcccctaacttatgtcactggagggatgagaataaatggatgagaaaagaagaagg

SEQ ID NO: 20897 - DNA, 122 bp, Homo sapiens
tggtggagctgtgcctggccctgtaggcccagggttggctggaaggtgacatctgtgtttcgttttagctgaggttggcagaaacgttcccaaactcccccagccctggaccccagcagatg

SEQ ID NO: 20898 - DNA, 122 bp, Homo sapiens
gatgcagaatcagtcactttgaaagacccacagagggtccagctagagccctctgtggaccgcagagtcccaccagctacagcccacttctattaccatcagaattcctcctaaaagttgcc

SEQ ID NO: 20899 - DNA, 122 bp, Homo sapiens
ccagtgggttcagattagactccgggtgccatcgcccctgcgggatcctgcgcacacattcgagtgggtttagttcagattccgatgccatcacccctgcagggtcctgtccacgcactcca

SEQ ID NO: 20900 - DNA, 122 bp, Homo sapiens
tcccattggcctgttcaatatgagggccgggccaatggggagggccagccctctccttcccgccaatggggtggcgggagctggcccggggacggcggcgtgctgacgttcccgggagcccg

SEQ ID NO: 20901 - DNA, 122 bp, Homo sapiens
cttcccattggaggagtctgagggctgggggcgggcggggagcgccggtccagccgctttcggtcaatcgcagaagcccaacgcccggagggagggaggcaggggaaggagaggggcggact

SEQ ID NO: 20902 - DNA, 122 bp, Homo sapiens
gccaggcccctggccggctgcgctccgatgatctccaggacttaaggcgagtgagctcagcgactgctgaggaatgaatgactgaatgaacgcatgcatgaatggaaggagggagggaaagt

SEQ ID NO: 20903 - DNA, 122 bp, Homo sapiens
atgtccttaatgcccaacaggttaaagacaacaataacaactaagggatccgcccccacccgcttaaaggttctcagcccctccgaggcccctaaggaactctccttgccctcctcccctca

SEQ ID NO: 20904 - DNA, 122 bp, Homo sapiens
cttgaactcctgacctcgtgatccacccgccttggcctcccaaagtgctggcattacaggcgtgagccactgcgcctggtcaaaaataaattttttaaaaagaataagaaaaggttgcatgt

SEQ ID NO: 20905 - DNA, 122 bp, Homo sapiens
ctgccgtatgggggaggggaacgctttccaacagtcatctcttcctcttcaggccgccaacgccgaccgcaccacagtctcctccgcccaagccctgtcccctcccccgccccggcctgggt

SEQ ID NO: 20906 - DNA, 122 bp, Homo sapiens
ctatggctgtgaacgctgagcacacgattttatcgcgcctatcatatcttggtgcataaacgcacctcacctcggtcaacccttgctccgtcttatgagacaggctttattatccgcatttt

SEQ ID NO: 20907 - DNA, 122 bp, Homo sapiens
ctgcatttcaacttctccttctgacgctcacttactggtatcacttggctgcactgtgcacggaacatgaatgaaactgttgaaatgctaaaggaataccacttcaaaccacaaaggatttc

SEQ ID NO: 20908 - DNA, 122 bp, Homo sapiens
atacttttctgttaactgtggaaaagccagatgtctcactttaggcaatagtttcaacttcgtttcttcccatgtagtttgacagatcgacctcaaccctgacccagacaactactaatctg

SEQ ID NO: 20909 - DNA, 122 bp, Homo sapiens
agactgaatgccctttttcctcagaattttgttttctgtcttatatagcatctgacactccgatttggagagagagaatgctattttgagtcttgcttatttttctgtttgtttaaggctga

SEQ ID NO: 20910 - DNA, 122 bp, Homo sapiens
aagaggtatcaaaattaaaagcaaaaattacagggtaagacttaacaaaactactaggagcgtcaaaggaagtgaaaatgggactaggcgcggggcaatatgaattaatgaacatgggaagg

SEQ ID NO: 20911 - DNA, 122 bp, Homo sapiens
acattttcataactaagaagagttcttctccagaccttatagcccaaattgactgaaattcgcattttatatactcacataggcagaataacttcctaggataaacaatctgctcctcctta

SEQ ID NO: 20912 - DNA, 122 bp, Homo sapiens
ctcaccccaaactaggtctgccatgggcctctccagccctgcttgcattttaaaatcaaccgcaacttgagattttactctttatcggcataaaaacaagtcatctgcctcccaagtctcat

SEQ ID NO: 20913 - DNA, 122 bp, Homo sapiens
acttttaaaatttagtttctctgccatggactctgaggtttttgaaactctttgagctggcgatgggccatcagttgttggatgctggccatggttctttgtctgtaaccccagatgaaatt

SEQ ID NO: 20914 - DNA, 122 bp, Homo sapiens
tgtgtgccggggggggggccccagggctggcgagctgctctgccacatcacaggcaggaccgggagggaggctgctcagagccggcttgggccctgctccgggcctccaaggcaggaagaag

SEQ ID NO: 20915 - DNA, 122 bp, Homo sapiens
tttgtagagtgccaatcaatggggatttgtctgacgttgttctcatgcttggcctgaggccgtgggttttaaaaggaagggcacggaggtaaagtgccttcccgcccgtgtggtggggtcgc

SEQ ID NO: 20916 - DNA, 122 bp, Homo sapiens
cattgacatcagagctgccatgtgtggctcctgggtgcctggaatgtgcttggtctgaaccgcgatatgctagaaaggtaaaacacagagttattttcaaaaatttagttgcaaatatttat

SEQ ID NO: 20917 - DNA, 122 bp, Homo sapiens
accctgcccagccttagggcagcgcctggccctggaggagcagcctagcagggaacgcctcgctggggtgggcggccctttctggaaagggtgggtgggaggagcctgacatgcctttcccc

SEQ ID NO: 20918 - DNA, 122 bp, Homo sapiens
gtgtggataggccgtggttacagtgtgtggataggccgtggttgcagcgtgtggatgggccgtggttacagcgtgtggataggccgtggttacagcgtgtggatgggccgtggttacagcgt

SEQ ID NO: 20919 - DNA, 122 bp, Homo sapiens
tggaaacgtgtgtctatattttcatatctgtatatatataatggtaaagaaagacaccttcgtaacccgcattttccaaagagagaaatcacagggagatgtacagcaatggggccatttaa

SEQ ID NO: 20920 - DNA, 122 bp, Homo sapiens
cgctttatagtggccccttgacgtccagaagttccccccagcgccggtcataagcactcccgccgcctgggccccgccctgcctgccaggcgccctccagcctcagctcccggacgcccggc

SEQ ID NO: 20921 - DNA, 122 bp, Homo sapiens
gcagggtctgtttgtgcaggaataagtaacgcgttcatcttccaatgacaggagtgtgtgcgccggagctcccgcatctcagtcccacctggatttacccacgatcttcgtgtcttaaaatg

SEQ ID NO: 20922 - DNA, 122 bp, Homo sapiens
gcagctggagcgctacattcaggtcagggggcatcaggggcttcacagagctcaccactgcgccagaccacaggtctgaggacctctgaaatgctgcacctgtggggatgtgcgctctctcc

SEQ ID NO: 20923 - DNA, 122 bp, Homo sapiens
atgggtcactccctagaagatctcggggagagtctcctatacgtgttgctgtgtagcttccgtaccgcaaaatggcgccattctaatcagaagagttgacacaatcaaatagccacacggca

SEQ ID NO: 20924 - DNA, 122 bp, Homo sapiens
aaaggctggtctccacccgccttggcctcccaaagtgctgggattacaggtgtgagccaccgcgcccagccaccccaagcctttctggtgaaccagccaggcctctgggctgggctctggag

SEQ ID NO: 20925 - DNA, 122 bp, Homo sapiens
agtggttaaggattgaggaggtgatatttacttacatgcagccggtttctcctctcggcccgctgttccatagacacccataatgtcctgaaacgctggcccgaggagggtcccggctgtct

SEQ ID NO: 20926 - DNA, 122 bp, Homo sapiens
cgccccctacagccccctgcccctgggttcttttccacatcccccaccactcctccatttcgcatccaagacttcatgaaaggctttcccagaaaagaaaaaatgaggagtcttgcgacttg

SEQ ID NO: 20927 - DNA, 122 bp, Homo sapiens
gctgggccggtggctgaggggtggctgttgtgtgaggctgggcccagatggagagctgaccggaagtagagtatctgtgtccctcgggaaagttcctttcctcttcctctcccgtggccctt

SEQ ID NO: 20928 - DNA, 122 bp, Homo sapiens
tttccctttttctgagtgtgtgtctgtgtccgtgtgtgtgcatgtgtgtgtgcacgcacgcgcacacaggcagacgctaggggtagagtgtgatggttcaaaaagaaaaggaaacgcttaaa

SEQ ID NO: 20929 - DNA, 122 bp, Homo sapiens
gtggatgccgctgcattcggagtcgttttgccacttggtcccagcgccaggcttctcggtcgggagttgacctcagcctttctgtgacccagttcctggcacccagcaggcgctcggtggac

SEQ ID NO: 20930 - DNA, 122 bp, Homo sapiens
actttttattttttttgagacagagtctctctctgtcatggaggctggagttcagtggcgcgatctcagctcattgcaacctccacctcccggggttcaaccgattctcctgcctcagcctc

SEQ ID NO: 20931 - DNA, 122 bp, Homo sapiens
gcttggcatattactggcactctgaatctaccctaaatctgccacacatatctcctgttacgtccctataaacactgctctagccagcctggtctaactgttctcttgcacagacaccttga

SEQ ID NO: 20932 - DNA, 122 bp, Homo sapiens
cttccttctcggggaaggcgacggtatcttcgatgaagctcaggtccgccatgggaaggccgcggggcccctcggcgctctcggcagcagtgcctgcgccttcgctgggcgcggggctggag

SEQ ID NO: 20933 - DNA, 122 bp, Homo sapiens
ctgccacccacccccatcccatccccaactggttggcttgagggagggtccaagatgtgtcgggaggggccaagggctcagggatcccatcatttaccttcttcacgttgcttatgtctcaa

SEQ ID NO: 20934 - DNA, 122 bp, Homo sapiens
caacgcctcgctcatcttgcctgggctcagcgcggtggaaggcggcgtgaagcggcggctcgtgctggcatctacggggatacgcatcacaacaagccgattgagttaggaccctgcaaaca

SEQ ID NO: 20935 - DNA, 122 bp, Homo sapiens
ctttctgcattgttgttcctcagatttcatttaaataaaaacctgtagtctgggcaacatcgggagaccccaactctacaaaaaatacaaaaattagctgggcgtggtggtgcgtgcctgtg

SEQ ID NO: 20936 - DNA, 122 bp, Homo sapiens
agcgccgcccgcctccttgcctgcccggtgcatggagtagacgacgaacagcaccgggggcgccgagagcagcaggatgtggaagagccagaagcggtagtgggagaccgggaaggcgcggt

SEQ ID NO: 20937 - DNA, 122 bp, Homo sapiens
ctctggggcggggcggctccccgtcagggttcactttcgcaccttgttccctccgagctccggaaaacttgggaagcagcaaaacaaaattcaggaggaaagagaaagcattcatgcttacg

SEQ ID NO: 20938 - DNA, 122 bp, Homo sapiens
gtcccgtgtggacgggacgtggcgagtgtcgctgagtccacactggtgtacagagcacttcggggccagcacgtggccacatgtccttagctgttgggctttgaaagtgtcccttgggtgtc

SEQ ID NO: 20939 - DNA, 122 bp, Homo sapiens
gcgaaagttttctcagcaacgcaatttacttctgcagaagcgtgctgctcgcatcaatcacgatcgcaagagcacactgaacagaggaaagcaggggtttttattcctaacgcagtccctac

SEQ ID NO: 20940 - DNA, 122 bp, Homo sapiens
gcccctgtccagccacggggcttggggtgtggtgggcggtgcctgctgcccaggcagaaccgtcctgggtagtgggaggtggaggctgagggtgccccacgggcctgtgcctaccgccctga

SEQ ID NO: 20941 - DNA, 122 bp, Homo sapiens
cagtgcggaccagcctgggcagcgtggaccagcctgggcagcgtggaccagcttgggcagcgtggctagaccccatccctacaaaaattacaaaaagtagtccggcgtggtgggctcctgtg

SEQ ID NO: 20942 - DNA, 122 bp, Homo sapiens
tcttgcagttaattgggactctcttattccaggtggtatctccagtctccatacataccacgttagaaccatacttatgtaccaagcaaagagggtatattttaatttttaaatgccaatgt

SEQ ID NO: 20943 - DNA, 122 bp, Homo sapiens
cacctgggctcaagcgatcctcccacgtcatcctcccgagcagctgggaccacaggcatgcgccactatgtctgactaatttctagattttttgtagagatgagatctctctgttgtctaga

SEQ ID NO: 20944 - DNA, 122 bp, Homo sapiens
atttcaaagtgcttcaagcagttttataaaagcaaaaagcaagcagctgatttcatttggcgacacagagggctaaattaggtcatattatgttaggtcattcccagggctaattaactgat

SEQ ID NO: 20945 - DNA, 122 bp, Homo sapiens
ggagatgctgaaaccaggagtgactggatcagggcagcttctgaaattcccccagctacacgtggccaagaatggtcactgtgtactctgtacttttatgtgttactaaagatgttgctggg

SEQ ID NO: 20946 - DNA, 122 bp, Homo sapiens
ttatctcctccaaggctcagtgtacggtaggcatgtttgtgagacagccaagtaaaaacgcgtcccgggaaaacctctgaccagcctgcgcactgggaggagtctgcaattgggtggagcct

SEQ ID NO: 20947 - DNA, 122 bp, Homo sapiens
ccgcagaggaggggcccagtgggagaggacttgcgtcctcatgccaaacacgcggggtagcgggcgagtctctcagacagcgcacacccacctaggtttgcgcaggggtcggcgccgaccat

SEQ ID NO: 20948 - DNA, 122 bp, Homo sapiens
tctccgggtagcataatgaagtgcccaggaaggagaaaacttgtacatgacctcagctatcgccattgcctgtaacaagcgggctgactaggaagttctgagtgtccatttgaccagttcat

SEQ ID NO: 20949 - DNA, 122 bp, Homo sapiens
ggctgctgagcagaggggcttcctggtccgcctccgtgctgcccccggggctcgtctgcccgacggcctccccagccagcagcacccaggctcctccgacaccccgggactcaacaaagtct

SEQ ID NO: 20950 - DNA, 122 bp, Homo sapiens
gccgccggaacccagtttctctcgaggtcttcgccccgagcgaggcccggcggggactcccggaggcctcaagggccctcagctaggcgccaccacctccaggcctgcggtccgcgaacgtg

SEQ ID NO: 20951 - DNA, 122 bp, Homo sapiens
atgcatcccttgtcactggggacctcagggttttctctttgggcctaacagtgctcatcacgtattaccctgcatcgcttgatgtcttttgttgcttggtttaatcttgcctgcaatgagtt

SEQ ID NO: 20952 - DNA, 122 bp, Homo sapiens
agtgctgcacacctgggtttccttgcctagagctgtgtgttcggggtcctttggtccagtcggaggctgcggagcggcgggggttgcctgcgctgtccgcccgggcatcctcccggtgatgg

SEQ ID NO: 20953 - DNA, 122 bp, Homo sapiens
ggaagcagagtcacagccagcgccttggggtggggatgaaaggagatgacctggtggctgcgtgacagccactgtaggactttgatctcagggggacaagctgacacaggcagctgggaatt

SEQ ID NO: 20954 - DNA, 122 bp, Homo sapiens
acgttctttgttttctgatcctgaagcctttgcggcctcatttcgagaacaaggtgctggcggctgggaaccagttggctgggttctgccggggagacccctggagctgtgcagccctctct

SEQ ID NO: 20955 - DNA, 122 bp, Homo sapiens
aaatggattgttaaaggcgttcgggccctgctgctttagtgaatagttcacacccgttttcgcagcggagatgtcggccactgggaagaatcaaggaccaagtttctgattgggattagcag

SEQ ID NO: 20956 - DNA, 122 bp, Homo sapiens
ttgggcgtgcccagatttcagagcccagggtggtgctgtggtgggctgtctggaggctggcggggggagagcctgctgtctgtggaggggcggggaggggagagcccgctctctgtggaggg

SEQ ID NO: 20957 - DNA, 122 bp, Homo sapiens
cgagagggggcggggagcccgtgaggctggttacgccgagggaagccccgactccgtagtcgctgcacagtctgtctcttcgccggttcccggccccgtggatcctacttctctgtcgcccg

SEQ ID NO: 20958 - DNA, 122 bp, Homo sapiens
atatgtgtacactcaggcccatagcagcactatacccaatatccaaaaggtggaagcaaccgagtgtccatcagaggatgactggataaacaacccacggtgcacataagcatggaatatta

SEQ ID NO: 20959 - DNA, 122 bp, Homo sapiens
atgcagtttccatgtgatccccaatacctttgccgtcttctgtacccaggcagccaaaaacgcaggcccgttatctgagcccatccttaagggcagtcaaaatctaggaatcatacctcaaa

SEQ ID NO: 20960 - DNA, 122 bp, Homo sapiens
gatttcccacccggccatgattcatgtagagcagtgtcaaaaccagatcctttccttacacgctcattcgccgaaagacccatgctatgctgacggggttccaacctgggcttcaccgactc

SEQ ID NO: 20961 - DNA, 122 bp, Homo sapiens
ccatttagtacgtaggcaatcccatgtaacttagcaaagctagcaagtccctaaactcggcgcagcgactgtaggggtggcctcccagtagcatcattaacatcaattgtaattggtaggca

SEQ ID NO: 20962 - DNA, 122 bp, Homo sapiens
cacggaggacgctggagaatgagggcggctcccgtcccgttcctgagcacgctcgagtcccgcctccacctcacagcagctcttccgtgcggtaagcgggagactcccattttcaaggccaa

SEQ ID NO: 20963 - DNA, 122 bp, Homo sapiens
ccccacattgattacacaatggggcttcagacgggtggcttttttgagtcagccacgcagcggctgcacttgcattttctaacccaaattgggaaagggcttcttccttcaatcctctgaag

SEQ ID NO: 20964 - DNA, 122 bp, Homo sapiens
acgctgactacttacgcctcttttctataacaaagctgcattgtcatttctgaaagcatacgcatttagatgccaacatgttcaccagttacactccaaagccagaaacactcaaaacatta

SEQ ID NO: 20965 - DNA, 122 bp, Homo sapiens
agcgtccgcgcgcgggacaatggctgctcttgtggccgaacccggaagtgcacttgggctcggagagccagaactacaattcccagaagcctccgcggcgcggacggtcagtaggcggggtt

SEQ ID NO: 20966 - DNA, 122 bp, Homo sapiens
gtcccctctcagactccttcagcgggctggagtcctccctcgctcgatttcgcccgagagcgttaggggtttctaaatgcaggcgcctttgtgttgtaacgaaacttttagtttaagggaaa

SEQ ID NO: 20967 - DNA, 122 bp, Homo sapiens
gctgagaatgtccaaagggaaatcaaccaggcggaatgacaatgtcatctctgagagtggcggagggcactgggaaagcccagctaagcccatggggaactggattctgctgggagcacagg

SEQ ID NO: 20968 - DNA, 122 bp, Homo sapiens
cctcccatcgccccaccagcgcccaggacgtggcaggaggaaggaggctggagggaggggcgcgggtggcacgagcacctgtcacctgaccggctcgggccctcacttctccagccccggcc

SEQ ID NO: 20969 - DNA, 122 bp, Homo sapiens
ctgtccaatgttttcccaatttctttttgttgtatttctctaggtcatggtgtccatttacggtgaatgaaacgccagaggacagacacatgtttattttattgattattaattcatgcatg

SEQ ID NO: 20970 - DNA, 122 bp, Homo sapiens
ggccctcgaggttcttgcctagggaagacccgagccctagggccgtacttaagctgcctgcgtgcaggacccgggttttgcttttgctaatttcctccccaccccaggtatgtgggaataga

SEQ ID NO: 20971 - DNA, 122 bp, Homo sapiens
gggccaggaggctgtagaggacggtttggtcggggctaaagcagctactccgcaccgacgcgggccgcgaaagcccccaagttccgcatggcgaaactccggagatcaactacaaccgcgct

SEQ ID NO: 20972 - DNA, 122 bp, Homo sapiens
tctaaatacaggcactgtgggcgataatgcagggtagcagcagagagaagagaggaaagtcgccatagaggatgagtgaaagatgttgaagtggctgacttgggtctccgacgcatttcctg

SEQ ID NO: 20973 - DNA, 122 bp, Homo sapiens
agagagtgggctgcatcgcaccagctccgcgtggcccctcagaacaaacctgcctccggccgccacgccactgcagttctggacccaaggctgggaccttctcaaggctgaggctgtggttt

SEQ ID NO: 20974 - DNA, 122 bp, Homo sapiens
caggtggttgaggagtggaaggagttcgtgtggaacccgaggacgcaccagtttatgggccgcaccgggaccagctggggtacgcagggccggcacgcaaggggcgggggaaagccgcgggg

SEQ ID NO: 20975 - DNA, 122 bp, Homo sapiens
gagaatctctctgcagtggctcacgcctgtaatcccagcactttgggaggccgaggcgcgcggattacttgaggtcaggatcgaaaattgcttgaaccccggaggcagaggttgcaatgagc

SEQ ID NO: 20976 - DNA, 122 bp, Homo sapiens
cagccccactgaaaactcgattttagaccagtgagccggcattatagacttctgacttaacggaactgtaagataatacatttgtgtcacttaaagacactaagtttgtggtaatttgttac

SEQ ID NO: 20977 - DNA, 122 bp, Homo sapiens
gtaaaaaaaaaaaaatgctcatgccttccggcttcaagggccctggtaaccgggcatctccggagctcgccccacacaaagcctggggtcgagagcccgctcacacatacggcacggcccac

SEQ ID NO: 20978 - DNA, 122 bp, Homo sapiens
tttcccatcttatgcctttattttccttgtcttgctgcatcagctgtatgtattcctttacgttctttttgttgttgttcaacattatttatgtaattcattttcactgttcatgttgctgt

SEQ ID NO: 20979 - DNA, 122 bp, Homo sapiens
atttgtgcacttcatccatccatccatccatccatccattcgttcattcattcattcattcgcccatccctgagggctggcctgaccctgccatgccagactctggaggccatggccatact

SEQ ID NO: 20980 - DNA, 122 bp, Homo sapiens
tgtgtgccaccagaggaagcagcagcaagaggcaggagcatcgatccgaaggagacagcgcggggagagggacgctaggggcagacaccctccctcctgcgcgcacacacgcgcgcgcgcac

SEQ ID NO: 20981 - DNA, 122 bp, Homo sapiens
aagagctcttttgagaccgatgttagaattaaatggtataacacaattaacatacacgggcgctgaataggagaggacgcctataaataatagatagataaataaatgagcgatcaggcgaa

SEQ ID NO: 20982 - DNA, 122 bp, Homo sapiens
agcaaacaaaacagatgtatagattagagtgtggagaaaacagaggaaaacttgcagttacgaagactggcaacttggctttactaagttttcagactggcaggaagtcaaacctattaggc

SEQ ID NO: 20983 - DNA, 122 bp, Homo sapiens
gacggctgaggcctttggtgagagcccagaacagccatccagacactcgaaggaggttcacgctgattcagagtcatcagggtaaaaccaattcagacccaacttacaagctggacaggaat

SEQ ID NO: 20984 - DNA, 122 bp, Homo sapiens
ctgggcgcccaggaagtcgtggcgccgagccccctggtggtgagtggctgccagcgcggccgcccactctgtcctgggcaccgctgccagcccagctccgtccccgtgtgtcccttggggtc

SEQ ID NO: 20985 - DNA, 122 bp, Homo sapiens
acacaggaagggaaagtactttggcttttactgttgtaaataggactaaaagtagctcttcgggggtgatctttgtttaccactgcctaaggccactgtccttggagaaaggtcaggaggtg

SEQ ID NO: 20986 - DNA, 122 bp, Homo sapiens
gaaatgtcatttttttttcaaataccttaatatttcaacatttaaaaaaattgggccaggcgcagtggctcaggcctgtaatcccagcactttgggaggcaggcagatcaactgaggtcagg

SEQ ID NO: 20987 - DNA, 122 bp, Homo sapiens
ctggacatttcaaccaatgttgactgaaatgaactgaatttctccagattgtcaactgggcgtgagaactatgtctgagaacaccacagatataagaagaagaacataagactattatttat

SEQ ID NO: 20988 - DNA, 122 bp, Homo sapiens
gggcgaaggcggggcgtgaggcgtggaggtgtggcctgactggggcggggcggggcggggcggaacagcctagaagcagggcctggaactgcaggatacactcccctcctgctacctaggca

SEQ ID NO: 20989 - DNA, 122 bp, Homo sapiens
tgctgctggaagctgcatgggccactcattaatacatcagaggtcagatgcatgccggggcggcagctgggacactaatgatttcatatggctttgtatgaccgctggccgcctgtggtgct

SEQ ID NO: 20990 - DNA, 122 bp, Homo sapiens
tgccatcgtagcgcccctggaagttgttgagccacgaggctagggcacacacgttgcgcccgcaatcccacaggttcccggccagggtgatgcttgtcagggacttccaagagttgaggatc

SEQ ID NO: 20991 - DNA, 122 bp, Homo sapiens
ttttacaaagggaaccattcaaacctgagaggtgagtttgcaacatcagtatttgtacaacgttcttccctgagtgtgatctcattttgccttgatgaccaccctggaacatgggaataatt

SEQ ID NO: 20992 - DNA, 122 bp, Homo sapiens
gcaaaagacgcgccggggagcgcctgaagccggaagactatagcttcccggcatgcagcacgcttccccctattagatttgaggcgcggccggcgcgttgcccactgggagttgtagtcagt

SEQ ID NO: 20993 - DNA, 122 bp, Homo sapiens
gcctggtagtaatcatgagccatcaaaaaggaggagtaggggggcggacgcggtggctcacgcctattatcctagcactttgggatgccgaggtgagcagatcaggtcaggagttcgagacc

SEQ ID NO: 20994 - DNA, 122 bp, Homo sapiens
ttgattggaatagtttcagaaggactagtaccagctcttccttgtacctctggtagaattcggctgtgaatccttctggtcctggacttttttggttggtaggctattaattattggctcaa

SEQ ID NO: 20995 - DNA, 122 bp, Homo sapiens
tacttatgttcttacattgactggttactcaccagctcttcagaacaattgtggctgaaacgtggcagctggcagacttctacgtatatgaagttaatccatggggcataagagcacagtgg

SEQ ID NO: 20996 - DNA, 122 bp, Homo sapiens
cacagagacctatggggttcaggaggatatttattaattatttaggtgcaccggcccagtcggattaacatccaaaggactgagcactgaacaaagagttaagttaacttttaagcatttcg

SEQ ID NO: 20997 - DNA, 122 bp, Homo sapiens
ccatttcatttatctgtcacaaatagagtgtaagacagagtgaaataatgcctaaacattcgggttcccttcagaggccaattttaagaaaaataattgagggaaggttatttcagcttcct

SEQ ID NO: 20998 - DNA, 122 bp, Homo sapiens
cttttccggtccctgtctgagtcgcccgaccccgcggggagcgcggagcattgcggcgtgcggcgggcttcgggctctcagcccgcgcagcaagttgtgttgcttttccccgggtgcgacgc

SEQ ID NO: 20999 - DNA, 122 bp, Homo sapiens
tccctgccacggccctgtccctgccacggtgttgcctccttgggtttcaagggctgcacccgtgttacagcccagggaaggggtacctgatggcagcatagggggctgctgagtgggcacac

SEQ ID NO: 21000 - DNA, 122 bp, Homo sapiens
ctcaggtgcccaacaggtctctaagttaacaggttcaaaaccaaattcccagtcttctcccgcaagcctgctgctcccatttcagtcttcccactgcagtgaatggcaacttcatcctccta

SEQ ID NO: 21001 - DNA, 122 bp, Homo sapiens
gtctacctcaatttttaagatgagctccttaactgagttgcttcccttgtccacaggctccgttaaataattcagagtagcaccttttccttatagtgactcaggccacctgaccttgggaa

SEQ ID NO: 21002 - DNA, 122 bp, Homo sapiens
actgcttcctcaaaaagtgtctgtacaagccacatccacctagggcaggtggcaccaccccgcgtgagagagctgggcggaggatggacagggcttcatcgcgggaactagctcctgggcca

SEQ ID NO: 21003 - DNA, 122 bp, Homo sapiens
gtgcttctccgatcacgtgccgtgccatcagctacatctcaaagcagttttcaaaggtagcgccgcgctgcgtcaccttaaatgtgttttgacgcagcttccggaagattaaagagacatcc

SEQ ID NO: 21004 - DNA, 122 bp, Homo sapiens
agcagtaccagagcgcgcagtaaagcacagcattccaagttgttataaacgccctgagcccgaggccctggacacgccccccggcgcccattggcctgctcgacggcggcgcgtgaccacgg

SEQ ID NO: 21005 - DNA, 122 bp, Homo sapiens
ctgacaggatagttgctgttttgaaagcgcccaagtccagtaagccaattggaagctaagcgtggcgctggtatagtaggggcagggggcgtgcctgacccaaggttgggtcctggagcatg

SEQ ID NO: 21006 - DNA, 122 bp, Homo sapiens
tcccgtccccactcacctgccgcgtccggagggcgcccccgggtccgcccgccacgtctacgcctaggcgcccccgacattgtgatcccagcccggcgtcccgcccccaactcaccgccacc

SEQ ID NO: 21007 - DNA, 122 bp, Homo sapiens
acccggctgctcacccccaaggggtcctctccagccctctagggtcagttccaacctcagcgccaacctttctgcagggagatctgactgaaggactgatgactccctttaaacttttgcaa

SEQ ID NO: 21008 - DNA, 122 bp, Homo sapiens
gaggagccggtggcaaaggcgcctcaggcaggccctgggctccatgggcggcttgtgctccgcgattttgaggccatttgcagcagctccgccagcccaccgctctgagctgcagccgctgc

SEQ ID NO: 21009 - DNA, 122 bp, Homo sapiens
cggggtccgcgcggcggacgaggcgggggcggaggcgcaggcagagcgagcgcgggaggtcgccgcagccagggacaccgcgcgccgccgctcaacatggtcgctgcgcacgctgcccattc

SEQ ID NO: 21010 - DNA, 122 bp, Homo sapiens
tagcagggcaataggtcgtaataaccttaaaacaaaaggatgatgatcatgtatagaaaacgtaatcccttttgaagtaagggaatagaccaaacggggaagaaaaacaagagaggaaaaaa

SEQ ID NO: 21011 - DNA, 122 bp, Homo sapiens
caccctcaggggtctcgggctggacagtgagaaagtagacaaagcccccactagcaaagccgtagatgtagaagatgtcaaagtgggagaccagggccagggtgtctgaagggatcttgatg

SEQ ID NO: 21012 - DNA, 122 bp, Homo sapiens
atcacacgaaaacagtcatttcccctttaaggacctcagtgggccgggagccagccttcccgcaccttttccaaaatttccaatccccgcttggcattttctgcccgaaggtctccgattgg

SEQ ID NO: 21013 - DNA, 122 bp, Homo sapiens
ggttggccttagaaacttgaaccgtgggcagctgctaggtcatgagaagaattttgagcccgtggaaaggaaacttttgtttaaggcagacaatactagagacagacctttgatatggtact

SEQ ID NO: 21014 - DNA, 122 bp, Homo sapiens
ttgtagcgtgtgtccatgttgtagcgtgtgtccatgttgtagcgtgtgtccctgttgtagcgtgtgtccatgttgtagcgtgtgcccatgttgtagcgtgtgcccatgttgtagcgtgtgtc

SEQ ID NO: 21015 - DNA, 122 bp, Homo sapiens
atgcccctacgaaaagccagctgagtcaactcaactaatggctctccttgcttctcctgccgtcctggggcctgcaggcatccgcacagcagtcagcccctagaacaccttctctgctgact

SEQ ID NO: 21016 - DNA, 122 bp, Homo sapiens
gtcttgactcactgtaacctccgcctcccgggttcaagcgattctccctcctcagcctcccgagtagctcggattacaggcacgtgcccggctaatttttgtaattttagtagagacggggt

SEQ ID NO: 21017 - DNA, 122 bp, Homo sapiens
ttcttgttagcctgcatttaaaatgtaatggaggctagtttttcctactcctttaaatctcgaagtattattcctacttgatattaaatgagagaagaaaccaagtacagagctacagctat

SEQ ID NO: 21018 - DNA, 122 bp, Homo sapiens
gtagaaaacttttatctggaagatcttgtagtgaagctaagttttagagggtgtgccttgcggattagtccactaagcaaatggctacacatctagtactaggaagaagcagaattctgaga

SEQ ID NO: 21019 - DNA, 122 bp, Homo sapiens
caagtcagtgaagttggccattaaaattctgaagtttctttggtgtcacttgacagtgaccgacatcagactggaatgtcttgggccaacattaagccaatatggaccattaaaaatttgtt

SEQ ID NO: 21020 - DNA, 122 bp, Homo sapiens
cctcgggctccagaaataaatagcacggtcccggcactctctactttaaactctccactccggccacggtgagcagcccctcacgccccacccgtgactctttcttcacctccgttcctgtg

SEQ ID NO: 21021 - DNA, 122 bp, Homo sapiens
ctctgtccctagagggtggttgtcccttcgcccgctctgggtttgttatgacgtactggtcggcagccccaggccgcagaggttgcccaagacaatcatgcttttctgagaggcaggctgtg

SEQ ID NO: 21022 - DNA, 122 bp, Homo sapiens
agtgggacctacagcttggtgggactctgccatgcaggtgtgccaggctgcgtgtgtaggcgaggacaagccaggttccagccagcaggtgcacactcaggtgtgtgcagaggtggtccctt

SEQ ID NO: 21023 - DNA, 122 bp, Homo sapiens
cgaatctggaacagaggatgctctgtgccagctccagacagggtctgctgggaaagcaagcgcggaaacagcatctgcctgggctggcgacgcccgccatagaccagggtgccagaggcccc

SEQ ID NO: 21024 - DNA, 122 bp, Homo sapiens
agccctccaggggcagagtgagctggagggaggcgcgatccctgaaacggtgaagccccccgtgccatcctacaaaaaaggcaacaatgtgtcgatgcataatttatgtccctctcataatt

SEQ ID NO: 21025 - DNA, 122 bp, Homo sapiens
gaaggagtggaggagggagagacgctggcccgggacccgaggggcgtgggcatcgggaggcgggcccgggttaggggcgggaccgccgcctggttaaaggcgcttatttcccaggcagccgc

SEQ ID NO: 21026 - DNA, 122 bp, Homo sapiens
cgccgccgctgccgccgccgccgccgccggtcccggagccagagaagaaacagcaaccggcgcgcgccaaaagtatcgtcacttcctgtattggcgcgtaatgatgatataatagccgacct

SEQ ID NO: 21027 - DNA, 122 bp, Homo sapiens
cttttttgtcagaaccctcaaatccttagcctgggtgggcagattaccccctcctctgtgcgccctgctgtgcccaccgcagtcgccctgcggtggcaggagagctactcattcagcagtag

SEQ ID NO: 21028 - DNA, 122 bp, Homo sapiens
cttacagcaacaaataggaactcctggccaatgagagctcttgaccagtgaatcaccagccgatacgaacgtcttgccaacaaaaatgtgtggcaaatagaagtatatcaagcaataatctc

SEQ ID NO: 21029 - DNA, 122 bp, Homo sapiens
attcgcacagccctccagtcgcccaggctcccattgtttgctgagcaacaatggagatttcgcagggaaagtaaagctcttttcagattcctctctgatgttttgcatttagggaaacaccg

SEQ ID NO: 21030 - DNA, 122 bp, Homo sapiens
tttttatctccaggtaatctcaaacctacaggaagttgcaaggagagcataaagaactctcgtagaactgttattcatgtttagcagtggtttaggcttgcctgatttactcaatcatttgt

SEQ ID NO: 21031 - DNA, 122 bp, Homo sapiens
cctcctgacggtctctttacttattgatggactaatcctgctcgttaattccccagccctcgttaaaaatgaaaaggagccgtttgtgcttgtacaaacccaagagccaggatggatgtgcg

SEQ ID NO: 21032 - DNA, 122 bp, Homo sapiens
gctgcggctgcgctgaccgtagtactcctccaaggagtcgtcctggtagaagccgctgtgcgcccgcgactccgagcgctcgaagcggctcccgccccgcgcctcgtgactgttgccgtctg

SEQ ID NO: 21033 - DNA, 122 bp, Homo sapiens
gagctgggatagccccagaagttgagcgtttcctatgctggaaggacttccagcttggagcggaaatcggggccggggcaaggacgcaggggcgtgtcgcccacgtttctggcccggctagc

SEQ ID NO: 21034 - DNA, 122 bp, Homo sapiens
gcattctaccttccgtctctaccatacataagtgtgaggcgtttaaggcggaacactctacgtacacattggatactgacttgcagaaggcaaggccctgtctggcaggatggggaggtgcc

SEQ ID NO: 21035 - DNA, 122 bp, Homo sapiens
cctgtagtctctgacactcagttgtttctctatttgctcctcagccacttgtattattgacgctcagccacttatatcactgatgctcagctgcttgtgttgccatgccagctgaagtcttt

SEQ ID NO: 21036 - DNA, 122 bp, Homo sapiens
tgcctgtgagtcccccggagcagcaaacactggcattctaactgcgacaggactttcgagcgagtgcgaggaaagcccctttcgacagttctgaggttttatccgaccctgcccgggactcc

SEQ ID NO: 21037 - DNA, 122 bp, Homo sapiens
tcttttgggtatatacctagaagtgggattgctggactatacactaattccacgctgaaccgtcataccggtttttcagattctgaacgttttattcatttaaaatattgttgggccaggtg

SEQ ID NO: 21038 - DNA, 122 bp, Homo sapiens
ggctgaggagacacttggatgtagctcaagtgctgcttaggcagtcctgatctctcctctcgtctcttcccagggagctgaaaagccaggtaggagatgcttggggtagaaagaagggaaga

SEQ ID NO: 21039 - DNA, 122 bp, Homo sapiens
atcggcgcgcctgcgctacctgtgcggccagttgtgagcccttccgccccaacgctgcggcggcatggggcttccctagatcctgcactcccagctggcactttagggactagcaggaggcg

SEQ ID NO: 21040 - DNA, 122 bp, Homo sapiens
agacgcgcccccgcgcctccgcttgcttcaaatttggctccgcagcacgacttcctggagcgggccggaagtgacaacacaaaactttgggcggagcgtgaatacttcgcctggattggaca

SEQ ID NO: 21041 - DNA, 122 bp, Homo sapiens
cgaggcttcattctgaagcctacagccccttccagccactccccagaactcctctcccgccgcccccaggctgtggtaactgcttccagctaggagtggggcagatggaagagaggactttg

SEQ ID NO: 21042 - DNA, 122 bp, Homo sapiens
ccgctgtcagctccctcagcgtccggccgaggcgcggtgtatgctgagccgctgccgcagcgggctgctccacgtcctgggccttagcttcctgctgcagacccgccggccgattctcctct

SEQ ID NO: 21043 - DNA, 122 bp, Homo sapiens
ttcagcatctatgcctccccgaatgtcatgctaaagccaaagtccatgatttttatattgcgttcctcattgagtagcatgttttgtgtgtggatgtgtgatgttcttcaagtggcagtagt

SEQ ID NO: 21044 - DNA, 122 bp, Homo sapiens
gcggccccggggtggagggggcaggggcgggggctgcgttccctctcgggcgcctggtcacgcgggtgctgctcccccagccatgagccacctgaacgggcacaagctgcacgggaagccca

SEQ ID NO: 21045 - DNA, 122 bp, Homo sapiens
gccgtctgggctgtaattggtgcctgggctgaggcagccgtctatttgccgtgtgtcatccgatctgtggagggcgaccccattagtgggctcgcctcccacccggctgtctgcatggcggc

SEQ ID NO: 21046 - DNA, 122 bp, Homo sapiens
gtcttatgtgaagagttttcacctgtaaaacagtggaaattaaaggaccactgttattatcgggtggcgttaaatttccccttgaagtagaaatggcatactatgtcaaccaaactccagct

SEQ ID NO: 21047 - DNA, 122 bp, Homo sapiens
atataaagatagctagtccatgagtgccactctgcctatgggatagctctgctctgtctacggagcagccattttcctgtacatgttgctcaaataaacttgctttcttttactgttggctc

SEQ ID NO: 21048 - DNA, 122 bp, Homo sapiens
tcagcatgcgggtccgaggaagaggcccccagcaggtccagggctgcagcgtcagcgcgtcggtggcttgggagcggggtcttgaagactggttactccacttaaagaccctctcgggccgg

SEQ ID NO: 21049 - DNA, 122 bp, Homo sapiens
taatactcactgcgaaggtctgcagcttcactcctgaagccagcgagaccacgaacccaccgggagaaatgaacaactccacacgcgcggccttaagagctgtaacactcacggcaaaggtc

SEQ ID NO: 21050 - DNA, 122 bp, Homo sapiens
caaccgtgccagagagggcaggtcgcagacgccggggctgcggggaatagaggccctcaccgcagatgccacctgccgtgccctgctctgcggccaacgccagcgctggacccggagctacc

SEQ ID NO: 21051 - DNA, 122 bp, Homo sapiens
ctcaaaagcaagtgcagggaagaggaattctgtgaaggttttgaaacacctgtcatgggccgtgggttcatttgtgccctgcctatggcagggtctgttttgcccactggcaggaggctgct

SEQ ID NO: 21052 - DNA, 122 bp, Homo sapiens
cccgcctccctgcaggaagccggctggcggcgcctgctgcgtgaccttgggctgcaaagtcgggcgtttgcaaagtcaaagcgagtcacttcctcccccaggcctcccccgagcgggcagcc

SEQ ID NO: 21053 - DNA, 122 bp, Homo sapiens
tcttaaagaatttcatctggatgggcagacagatgtgtaaacatggactcaaaggccgggcgagctgagatcagacaacaggcgctggacgcatcctaactacggctgggtggcggggctga

SEQ ID NO: 21054 - DNA, 122 bp, Homo sapiens
ttcctcaaatcgatttctagctctgtggtaaagtagaggggtgagcgactagagattagacgtcccacacaatcatcagtttgccaggtgcacgccaccaaaattgggtattagggattaga

SEQ ID NO: 21055 - DNA, 122 bp, Homo sapiens
cggaagaaaagaactcttctccattgatcaggaaagtgggcccaactctggcctggagagcgcacccggaaaagtgcagagtcgaaacagagagagaggggtgtccgcgtcccggccacaga

SEQ ID NO: 21056 - DNA, 122 bp, Homo sapiens
cgcacaggatataatctcctggtgcgctgttttttaagcccatcggaaaatcgcagtattcgggtgggagtgactcgattttccaggtgtcgtctgtcaccactttctttgactaggaaagg

SEQ ID NO: 21057 - DNA, 122 bp, Homo sapiens
ggcctgcacgggcgggcacccggcatggactgggaggggccggggtggggtgcgcggggccggcggcgcggagatgacccaggcaccgtcccctctcccggctgggtcggagccctgcgtgg

SEQ ID NO: 21058 - DNA, 122 bp, Homo sapiens
ccagttaagaagccatcataacccagaaggtgatgcctaataacatctctctgggagcagcggagagatgataagggtttgccttctgaatatgttttttgacaattaatgtaaacatttca

SEQ ID NO: 21059 - DNA, 122 bp, Homo sapiens
gaggccacccatggcgtctgtgggctctcttctgtccagtagagggaagcaggcgcccagcggcaggaagaggaagtagatcagggggtaaggccttaccatctgacccagaggaaagagag

SEQ ID NO: 21060 - DNA, 122 bp, Homo sapiens
cggcgcctagagaggaggcgcaggagtaaggcgctcccggtggcggtggcggtggcgggtcggtacctgtgtgcccaccgggccctccagcccctccactcccgccccggcctccccgaatg

SEQ ID NO: 21061 - DNA, 122 bp, Homo sapiens
ccgtccggctccagggtctggcctcagaacacacacagggcctgtggaggttctgtgctgcgtgcgggaaagattgtcattacacccagtgatggcagggctttgggcttccgtgcgtcttt

SEQ ID NO: 21062 - DNA, 122 bp, Homo sapiens
aacttgatgagcagagttccgatcattttaggtaggcaaaagatagctctgctggccaggcgcagtggctcacgcctgtaaacccagcactttgcgaggctgaggtgggcagatcacttgag

SEQ ID NO: 21063 - DNA, 122 bp, Homo sapiens
gtcctcctcgtcccgggctccgcccaccgggagttcgcgccactcaccccaccccggacccgcccacttcgcttgggctccaccctcccaggaactggcgccgcttgccccgagctccgcct

SEQ ID NO: 21064 - DNA, 122 bp, Homo sapiens
gcccccactactcttaatggatttcctctttatggattcagctctgtctggggggaaacccgcccgcccccacctgttcccttccccgccgctcccctacaggcccggtccacttgttggtg

SEQ ID NO: 21065 - DNA, 122 bp, Homo sapiens
tatttccgggtagtttctgctctatgtatttccgggtagtttggtcactactgtgtctttcggtgcactaaatggtatgaatgtgtacaacatgggggcagtgttatatgcaccctggaatg

SEQ ID NO: 21066 - DNA, 122 bp, Homo sapiens
cggcccggccccctccgggcgccgcgcagccgggctagccctggcgagggggctggggggcgaggcccgcgcctggccacccacccgacacaggtaccagccgtggagaacggacgcggccc

SEQ ID NO: 21067 - DNA, 122 bp, Homo sapiens
gcgcgcccgagggctggtgtttggctggagctgtgggcctggcgggtggacccttctgcgcgaggacccgagcctcggctcctgccagccccggaggcgcctgcagcctgttccgggttggc

SEQ ID NO: 21068 - DNA, 122 bp, Homo sapiens
cggctcctcgcgttaaccccaggaggctcctgccagtgatccaagcaagtgggcatgacccgtgcgagggcccacaggcttgcccgagtgtgacctcggtactagctcaacatctcgaggtc

SEQ ID NO: 21069 - DNA, 122 bp, Homo sapiens
cgcctttactcttcctgctcctgcctttcaccccttaatctggctcaccatcctttggggcggatgagggatggggttcaggatagaaatccacttaggtttagttctgaagcctgaggtcc

SEQ ID NO: 21070 - DNA, 122 bp, Homo sapiens
ccaagccacagaggaagtggctgagctaagggcccgggaggcagccagcctacggcaacacgagaaaactcggggttcgctggtggcccaggctcaggcttggggccaggagctaaaggctc

SEQ ID NO: 21071 - DNA, 122 bp, Homo sapiens
cgctccgggctggggatgccccttttcagagaagggcccgggaccacggtgaccaggagtcgtaggagcaagatggcggtcttcgacaggaagctgggctcagaacattcccaagccccggg

SEQ ID NO: 21072 - DNA, 122 bp, Homo sapiens
aggagtgttcagagaaggcctctctgagaaagtgacatttacatagagatctaaaaaggacgaaggagtgagctgttcactggggaaaaagcattctaggcaaagtaaagtgcaaagcccta

SEQ ID NO: 21073 - DNA, 122 bp, Homo sapiens
atgtcggccacggttcaacccaggggccagcccgcctcggaaagtcctggggcggaagggcgaactaatcgtccccctaaaacacagcgtagacccacgcggcgcctgctctaaagctggcc

SEQ ID NO: 21074 - DNA, 122 bp, Homo sapiens
ttcagggacccggggagggtcgtcaggggagaatcctgactcgggttgcgggttcatgaacgggaagagctttggtctgtggggttcccaggccctcttttttcccattaaaaatttatggg

SEQ ID NO: 21075 - DNA, 122 bp, Homo sapiens
cctcagactccgctcactgacaattcagtctgggaaccggaagcggatgctccgcagggtcgaaaagaggccgggccagggtgcaacgagctgaccctccccttcccaccgcgccggcctgc

SEQ ID NO: 21076 - DNA, 122 bp, Homo sapiens
gacagggatccagggagggcttcccatgagaaagcatgagaaactacatctgcggggctccgaggctcccctgccagcctggagggtccgtgcagagggacttgggtgggcctcacacccta

SEQ ID NO: 21077 - DNA, 122 bp, Homo sapiens
tgccatgacatcggcagagggcagcttcgccagcactgaaatattcatgccctgagcgcccggcggggctcggcgccgctcccgggggtccgggcggggccgggcgggagctcgggggtcct

SEQ ID NO: 21078 - DNA, 122 bp, Homo sapiens
gttcagtggctgaggtgctgcctttccctgttaagaggcctcccgacacctacctacctgcgcttccacactggcattcaggatttcccattgtcttgtttcaccagcctgtcaccaggctt

SEQ ID NO: 21079 - DNA, 122 bp, Homo sapiens
cagtgacctggagccacaggcgctgtgattctaggtgtccttgagcgcacagtgcgccttcgaccaagagcagccgcgagccttcaagctcacgctgcaggcccgcgaccaggactagctcg

SEQ ID NO: 21080 - DNA, 122 bp, Homo sapiens
acggctatcgcagagctgtgcaatctgagagctggaaggcttcggttctgtcccagtacacgcggtgcaggaccacggttgagcagaaggtgcatctgcgtggcaccgtggcgctgaagtcc

SEQ ID NO: 21081 - DNA, 122 bp, Homo sapiens
tgaccaacgtgattagcacagcacagcagctgagactgaagacagaacaggacggccccacgtggctgctactgtctccgggcctcacaggaaactcgcagccaagtcagtcttatttgact

SEQ ID NO: 21082 - DNA, 122 bp, Homo sapiens
ttccacaagattgatggagtgcccactatgtgcagagcactgagctagatgctggagattcggcataaccagacaacagctctgcccttgtggagcatcagagcacccagcacagggcaagt

SEQ ID NO: 21083 - DNA, 122 bp, Homo sapiens
ctcggcggccgctcggtcatcctgtgggcagacagacagacaagcggatgcccgctctgacgaccgcccctgacccaccgacgtgggctggggtaaaggggagaagggcagagagaggaact

SEQ ID NO: 21084 - DNA, 122 bp, Homo sapiens
tgagaagcagcaatagtgattgaaagtactctggatttaaacttaaatagctttgagagtcgaaattagctgtggcctctcttgggcatatcacttaacttcttgtgcctcagtttccatat

SEQ ID NO: 21085 - DNA, 122 bp, Homo sapiens
tcttcaaggggcagaggcatcagtgtctaaaacgctagctgtcagggtccccaccagttccgctccagtttcagcagaagcagaacagaagagggagctgctcagctccgggagaagtgaac

SEQ ID NO: 21086 - DNA, 122 bp, Homo sapiens
cgcactctgacacttggacctaaaaccttctaaaataaatgctgctaagattcaattcctcggatgggtagttaaagagtctgtggtccctgagtcccaggacaaggaactgggagtctgca

SEQ ID NO: 21087 - DNA, 122 bp, Homo sapiens
ttagaggccattcttcacggagaccggctgcccgctggcgtcgcgtgcccttggacagagcgagcgcctatgcgagataactccggggaagctcaaagtcaggtcagccgggctcagccttc

SEQ ID NO: 21088 - DNA, 122 bp, Homo sapiens
agccataatgatcacaatagaaatagatgtttgatccatgcaggagatgacaggataggacgatgagagcacagtaacagtttggggactcataaaactgttaacatacatttaaatctagt

SEQ ID NO: 21089 - DNA, 122 bp, Homo sapiens
cggcgcgcaggcggagagcaggagggacgcgagggtgaggggctgagccgggggccagggcgtcttcaaggcagcgctttaaggaaagggccatggagttccagctggggcaggacaggagg

SEQ ID NO: 21090 - DNA, 122 bp, Homo sapiens
tctgatgaccgagttcaagggctaggggggcgtggggtcgggctgccttcctccctccctcgccgcggggcgcgagccgaaagggcatcttaccagagcccgggcgggcagtgccccccggc

SEQ ID NO: 21091 - DNA, 122 bp, Homo sapiens
ctccccgccccgccgctggcgtcaagttcagctccacgtgtgccatcagtggatccgatccgtccagccatggcttcctattccaagatggtgtgaccagacatgcttcctgctccccgctt

SEQ ID NO: 21092 - DNA, 122 bp, Homo sapiens
tctttttctcccttcttgagtatttgtgccgccgtctctgttcccacccctctgagtctccgacccctcgtttgtaaatctgccctcctgggtctctgattctgtccccctccttctgagtc

SEQ ID NO: 21093 - DNA, 122 bp, Homo sapiens
tggctaacactctttacactcttctgccttcccttgagataattaaaatagactgtacaccggccctagtcggtgcccattccccctaactcttcactcaactacgtgtgtagtccgaggga

SEQ ID NO: 21094 - DNA, 122 bp, Homo sapiens
tttctatgaaacaactctgtcttctcagtttgctaaggccccagaatagagttattgctgcgctccttggagccttgcagccgcctcctgctacgccaagtacagtactggagggtttgttc

SEQ ID NO: 21095 - DNA, 122 bp, Homo sapiens
ctggctctgtgtcctcaccctgcgtgaggacagccggcagagacagaaatgatgcttggacgctatggtggccaaagcccagcgcggcaggtccttctgagatgtctgcctgccggggcctg

SEQ ID NO: 21096 - DNA, 122 bp, Homo sapiens
cccacgcctgggggtctggctttgtgtgcgaagacccctttcctgcagtctaggcgtggacgggggcgggagagtgggcggagggtgtggggccccactccacagccccaggtttgctgctg

SEQ ID NO: 21097 - DNA, 122 bp, Homo sapiens
gtcctggatatgctgcccagagagctggcagcctacctgttgggcaggtgtttgctgctccgaggtcggcgccgtctatctcgcatgtcagctaaagaacttcccagaccaccgccacttcg

SEQ ID NO: 21098 - DNA, 122 bp, Homo sapiens
accagataggcagcaagaaggccctcacaacatggcagcaggtagataagaaattccccacggagaaaactgctcagtagatttctatgaacaagaacatctgaatggaattggaagtggtt

SEQ ID NO: 21099 - DNA, 122 bp, Homo sapiens
tgttgtttctatctcagccaatctggattagtatgagatgcggtcaaaaaactcaaagaccgagcacaaaaattaagggacagtcaatccacatggcctcagtggttcagtaactcctgggc

SEQ ID NO: 21100 - DNA, 122 bp, Homo sapiens
tgtcttgtcgcttccctttaaatttgtcttcttgtctaaatggtataaaaacctccaaaccgagccttttcattgggggttttctttctacgagatatcccccactattccaacccacccct

SEQ ID NO: 21101 - DNA, 122 bp, Homo sapiens
ctgtgtgtgctggagcacggcttcaatgctgcacctctgtgtgtgccgctctgtgtgtgccggagcacggcttcaatgctgcacctctgtgtgcgccggagcacggcttcaatccacctgtg

SEQ ID NO: 21102 - DNA, 122 bp, Homo sapiens
gacatcccggggccctgtggcttctccctagagcgcccaaacagcggcgtaggtctgggacgcccccggcccccggctttggaagaggctggcgcggagcaggcgccttggagcagggtctc

SEQ ID NO: 21103 - DNA, 122 bp, Homo sapiens
aatgaagaagataaagaaaatcaaggagatgagacccaaggtcagcagccacctcaacgtcggtaccgccgcaacttcaattaccgacgcagacgcccagaaaaccctaaaccacaagatgg

SEQ ID NO: 21104 - DNA, 122 bp, Homo sapiens
gctccttgcccaatgccaagtgctggggatttctgtcagcaagccctgtggctccagtgacggtatttctaaagccaaacttagttacctagaattagcgccatgttggaaacactgtcgca

SEQ ID NO: 21105 - DNA, 122 bp, Homo sapiens
gggtgcttgattttaaagtagccagaatatgtatatacatcccaaagcctatgacagtaccgtcttttagaataaatgtgttacataacttcttacctatatttgatttatctagattgtct

SEQ ID NO: 21106 - DNA, 122 bp, Homo sapiens
gtggccggggcgcgagagccgccgactgccctccttcactcgctgggaagaggaaagtgccgctcggcgtccccgaaaccctcgattacccccatcaggccgacccggcgcactcgccctcc

SEQ ID NO: 21107 - DNA, 122 bp, Homo sapiens
gccgggttggtgtactgctcggagcaatgggtgagtggcggcgggggactctgtcagagccgggaagggagggagggagcgagcgggcaagggagggagggagggagggagcgcgagggcgc

SEQ ID NO: 21108 - DNA, 122 bp, Homo sapiens
aagggcggggagaagtggctgcaaaggtgaactgccacacagatggtcaagggcttgccacgcgagggacacggactgtgttccgtgggcaatggggaggaggcacaaacaaggtcaacttg

SEQ ID NO: 21109 - DNA, 122 bp, Homo sapiens
tttcggctccctctctccccagcagcccccgcccgccgcctctccgggggctggggcggccgctgccaatgaggctcggctgatgcgctgttccggcccagtcattgtatcgggagggaagg

SEQ ID NO: 21110 - DNA, 122 bp, Homo sapiens
tgagcggcctctccaggatggggcagaattgcttcggggtggggacccccatcctctccccgcaccccccggcaggcaacacagctgccacggcttgcgggtggcgcccgggctcggtcccg

SEQ ID NO: 21111 - DNA, 122 bp, Homo sapiens
tgtggataacggcagtggtcccatgccgtgtggtcttcctcttggcttatccccctagctcgctgttgtcctagtggccatgtactatgtgcaggacactttcatagtccgttcatccacag

SEQ ID NO: 21112 - DNA, 122 bp, Homo sapiens
ttttcagggcgggcttcccgcctgaattcccaatcaccaccggacttgggtcagtccccgcgctgggcactcactgccccggcaccagcatctctgcagcaagcacccataacaaccataaa

SEQ ID NO: 21113 - DNA, 122 bp, Homo sapiens
ggccaccgcgcggcggcggagcgggccgcggcccggcgctccttccccaccgcggcccgacgcaccccggccgccgccatgagcggctcctcaggcaccccgtatctgggcagcaagatcag

SEQ ID NO: 21114 - DNA, 122 bp, Homo sapiens
tagtttaatatcttcatgatttgttcatttattctttggacccaaagaaatgtatctccccgcatttgcctgggagcttctgcaatgaagttaccacaatttaaatcatctctacagtgact

SEQ ID NO: 21115 - DNA, 122 bp, Homo sapiens
agactggggctggtcctggctgggagggcctgccccgcccctggcctagctgggcaaatccgctttggccagctcagcggctccgcccctaccgcgagcggcgctgggcggggctgcgtgcg

SEQ ID NO: 21116 - DNA, 122 bp, Homo sapiens
aaaaaaaaaaaaaaaaaggataagaagtggaaaataccagtgcatcctggctagaactgtcgtaagggcttctgtaactgtgtagaggtgacaggacttcaggtatgtatgatgaaggctcc

SEQ ID NO: 21117 - DNA, 122 bp, Homo sapiens
gagcccagcgcgcccgggacgagtaccgacaccactcgctccgtgctatccagaagggcacggtcgctggcctcagctccatgttccgggagcttggccagagccatgagcaggaggcaaga

SEQ ID NO: 21118 - DNA, 122 bp, Homo sapiens
actctcccgacggggagcagtgagttgtcatcccgggtagacggcgaactcccggagccacgcggccgcaggtgggcgagggcggcgagatccctcgccggcgtgagagcggccgtggctct

SEQ ID NO: 21119 - DNA, 122 bp, Homo sapiens
cagcgctgaagtaacgggaccatgcccagtcccaggccccggagcaggaaggctcgagggcgcccccaccccacccgcccaccctccccgcttctcgctaggtccctattggctggcgcgct

SEQ ID NO: 21120 - DNA, 122 bp, Homo sapiens
agtcatctgtgggatgagacatcaaagcactgtgaacatcttattccccggcaaccttcacgagctggtttcagcgtcattgctgaagcctcttggaaacattgattacacccgtggttcca

SEQ ID NO: 21121 - DNA, 122 bp, Homo sapiens
aggggcaggtgcgcggcgctggactctgcgggggaagtttccgaaactagagcaagaacccgcaagactagattgcaggaagccatctctcaattcccatgattcggctgggttgtgtattc

SEQ ID NO: 21122 - DNA, 122 bp, Homo sapiens
ctgctgccagccactgcctcccagtcctcggagggcacagggagtttccaccaacacactcggtcccagtggcctgactccaagagaggcctcagggccaggcaaagcacgaccccgttccc

SEQ ID NO: 21123 - DNA, 122 bp, Homo sapiens
cttctgcattcagtctgttgctatatgtagctttggttaagtatataatgaaaatctagtcggaaaagggagaagtattttaataaccttttcagataactgtgtttggtaaatactaaaac

SEQ ID NO: 21124 - DNA, 122 bp, Homo sapiens
caagaatactaaaacctaaaatttggatggaaccttaacccatattatgtccctagagcccgcgaagtaattagtttgttcatctccatctccgctttacaaaaaaagaagcaggattaggg

SEQ ID NO: 21125 - DNA, 122 bp, Homo sapiens
gtttgggggcttcctgaagtaattggggttatgttgctatgacaaatccccatctctttccggtccagtgaattttccacctccacctaggaactatttatttatttagtataaatattcaa

SEQ ID NO: 21126 - DNA, 122 bp, Homo sapiens
cctccccggacgagaatcgccgggcaggaggtgggggaggctctggtacaggttcaagttcgctgagctttcttgatcttgttctgcctcctagcgaccgaatggctcattcagcccacata

SEQ ID NO: 21127 - DNA, 122 bp, Homo sapiens
ccactgtgttttatgtatgccttggccaccctgggtaacctgaccattgtcctcatcattcgtgtggagaggcgactgcatgagcccatgtacctcttcctggccatgctttccactattga

SEQ ID NO: 21128 - DNA, 122 bp, Homo sapiens
ccgtggttggtgatctcccagcaggagagcaggcgcagcgtgtgcgtgctgtggccctggcgcgccgtgaagtaggccagcgccgtgtccgtcacgtggtaggcctgcaggctcagctccgc

SEQ ID NO: 21129 - DNA, 122 bp, Homo sapiens
cgcttccttaccagctttttttccctagaaaagaagccagagaaactggaacggagggggcgagggaaaccaaaaagtctcacctaactttctgatttagaggctacgacctgccattcacg

SEQ ID NO: 21130 - DNA, 122 bp, Homo sapiens
gactaataccagaggatccaaagctgcacccacttgttaattttgaggaatttttaaatgcgggatttaaaaaagatttaatttcacgcataggtatgaacagcccctcatcatcccaggta

SEQ ID NO: 21131 - DNA, 122 bp, Homo sapiens
ttggcctatttcaatctgcccttcagtatgtccatcctggtggaggtgaccttggactggcgtttgactccccacagccagtctctgctaagccctgtcaccacatcaaaggggccacctag

SEQ ID NO: 21132 - DNA, 122 bp, Homo sapiens
agtgcttttatacaaattcttccctctatcatcatcttcattttacaagcttgtccaacccgcggccggcatatggctcagaacggctttgaatgcggcccaacacaaattcggaaactttc

SEQ ID NO: 21133 - DNA, 122 bp, Homo sapiens
ccatttttgcagatgcaggaacaggcttagagaggttatataacttgcccaagaccacatcgcatttaagtggcagagccaggattgcaacccaggtatgtatgattccaaatcaagtgctc

SEQ ID NO: 21134 - DNA, 122 bp, Homo sapiens
ccccagtaaagagtgttgtgggggtgggatggaggtggatagagaaaaattatagcaaaacgagcgcaaaaagttaaggcccggttactcctctgaggtcgctccggagggactttgcactg

SEQ ID NO: 21135 - DNA, 122 bp, Homo sapiens
gaaggtcctcctaatccggcgtcggcgtggctgatctcatatcagtttctcggcaggaagcgggtgcgcctgcgtgaatttggagtccccagggtaaatgttagtcccgtgacggcaaagtg

SEQ ID NO: 21136 - DNA, 122 bp, Homo sapiens
acttccttcattataacagaaggacaaggtgaggtttgtatgtgggttagtttgatgggtcggtttgaaaatgatcatgaatcagtctcatggtttctgtctttaaaagtttttattctttc

SEQ ID NO: 21137 - DNA, 122 bp, Homo sapiens
gggaacccaagttacgtcctggtgaaagcagaaaggaggagacaggatggctgtcaacaacgtcagcatgggcatggctcccaggcatggaggtaattgggtcttggcttcaatgccaccct

SEQ ID NO: 21138 - DNA, 122 bp, Homo sapiens
acgcgcaagcgctgaatctgcagctcgcatgcgtcccggcagttcccggcgggaggctgacgagacgcaacgcgtctgcgcacatccccgcgttgttctcactgcgcatgtgcagttgcaac

SEQ ID NO: 21139 - DNA, 122 bp, Homo sapiens
acgctgatcaacatcccaatggactaaaaacaccttgaaggcacttaaacccacatttcccgcacaagtccccaagccttggacccccctcatcaggacctccggcacaggcgcccgtttcc

SEQ ID NO: 21140 - DNA, 122 bp, Homo sapiens
agtgcagcgaggtttggagccccccggcggcagggtgcagcgagccgggcagcgcagccgcgctgttcgggttctgcacgtcgatccagccggcccccacgtcccaccagctggaggcgccg

SEQ ID NO: 21141 - DNA, 122 bp, Homo sapiens
gcccatcttcctctttcttgtggctactctgagggttaagtgaagtcatcgatgaaaatacgctttagaaatgaggtttgtacagcgagtgtaaaggcaggctgtttttctaactggtgtcc

SEQ ID NO: 21142 - DNA, 122 bp, Homo sapiens
atgcccagatccaagtccaggcaccagctggaggtcccttgggcctgccttcccatgtgccgtgttcctgaccggttgaacaataatcagagaaggccacaggaaaagccgcatcatgccca

SEQ ID NO: 21143 - DNA, 122 bp, Homo sapiens
gtctccatgggcaccatggccaactttggtacctacttccaccaggaatggcatagaccacgaatttctgggtggtctctttcccatctctagcacacccttccatcaggggatacaggagc

SEQ ID NO: 21144 - DNA, 122 bp, Homo sapiens
aacgcttccggggaaggtcgcgggtgtgggcgcctaggtcggcgcagccttgggagccgccgtgggtcgcggactggcgtggccagtgtggaaacttgggactgtttgcgatttctgggcgt

SEQ ID NO: 21145 - DNA, 122 bp, Homo sapiens
gcctttaattctggggcgggcggggggcggcgggaatttctgctccggttccctctgcatcgcgggggcagctgtcacctgtaaggcgagcgcggcgcgggggatggaagcaggcgcccatt

SEQ ID NO: 21146 - DNA, 122 bp, Homo sapiens
gtctcctaatgtcttaagctgcctgtccacagaggcactggctttgcttgtgtgcccctccgggcaggccacaggagggaggaggcagtaaggacctggcaaaactgcaagccccagggcta

SEQ ID NO: 21147 - DNA, 122 bp, Homo sapiens
ccctcccagcggctctcgcaactgcaggtggctcagcagtgccaggaaaaaggggaggggcggggcatacattttcttcagtggtttccttagacaatctgagatcctctgcagagttactt

SEQ ID NO: 21148 - DNA, 122 bp, Homo sapiens
agccaccgcacccggccaaaactagcctgaactcttaaaaatgccaatgtccagcaagaccgaaacaaaataaaagactcagcaacagctccaaatttaaagatgctaaagaagcatgacgg

SEQ ID NO: 21149 - DNA, 122 bp, Homo sapiens
atcagccatgtgttaaggaactctacttccctgtagaggtgtattgtattagagaccttgcgatcattgtttccttaaattccacttttttattaaggttgcagcctcagctttcatttggt

SEQ ID NO: 21150 - DNA, 122 bp, Homo sapiens
ttatgggtatacgatcttgtgggtgggatatccaatcagagcagccaaagagttgcgtaacgatttgattcaggtgtgtttggaataagatttttgcaataatcttgatattttcatagttc

SEQ ID NO: 21151 - DNA, 122 bp, Homo sapiens
ttattgtgtcaaagtcaagccattgagcagccaggtacggatgggccaactgccgagccacggtggagaaggtggagaagagcgatggagttctcagcgaaatcagagctgcctcggtgggt

SEQ ID NO: 21152 - DNA, 122 bp, Homo sapiens
aaatcagaatacctgaatttcagtctcacctccatcacatattagccatgtgaccttgggcgagttgtttaacctctctttgcctcagtttcatcactggcaaaatgtcgaaactaacagta

SEQ ID NO: 21153 - DNA, 122 bp, Homo sapiens
aggatccgggggccaccccacctccaccctgggccaggtcggttagctagacccgcccagcggtccagacataccttaggtaatgagcagcctgctctgggctcaaggcctcggcttccgga

SEQ ID NO: 21154 - DNA, 122 bp, Homo sapiens
ctagaaggggaatcaggggacccacagcagttaccggtccctggggactctaaaatgccccgggactggctgcagcgtcagcctgggctgcggtaggaatgccggttcttcgccctgggagg

SEQ ID NO: 21155 - DNA, 122 bp, Homo sapiens
tgcccacgcctgtccctctgcactgcctccaccttggcgccagtcgtagatgtctgccaccggcacccccacagtggctggcttttgaacccactcccagcaacttttctctcctgtcctcc

SEQ ID NO: 21156 - DNA, 122 bp, Homo sapiens
aattgacaaagcatatgttgaagcaaccaaggaaactgtaatagcttcttaacactcttgcgtagatcagatgtagaaagtgttattttggacaggagcagtagctcatgcctgtaatccta

SEQ ID NO: 21157 - DNA, 122 bp, Homo sapiens
ctgaagcaagccaaaacctacatcaatgtctggccatcacacacagcatttccaagtgcgcgtccagagtctgtctatgggggcttgccccaggcttggcttctcctatccaacacattcct

SEQ ID NO: 21158 - DNA, 122 bp, Homo sapiens
catctcagaacctcattttcggtggaggaagtgcaggctctgagaggtgaagtgtgtggccgaggatctaccccccaccccagaagcaggtccacagccatgactcaggtcttcaggccgca

SEQ ID NO: 21159 - DNA, 122 bp, Homo sapiens
cggggtaggatgggagcgtttcatttgcaattgggattgcacatttcaagaacgggagctcggcaacagaacgcatgcatgtgaacacacacggctcataattaattcatttcacttcctcc

SEQ ID NO: 21160 - DNA, 122 bp, Homo sapiens
aggtaggcgttattgttattaaatacaggcccagagagattaggcgacgaatccaaaggtcgcacagacactaagcagttgagcagattcaaccactggtgaaacgccaagcccaagtttca

SEQ ID NO: 21161 - DNA, 122 bp, Homo sapiens
agcaggaggttttaagtccataggctgggtgtcttgggtataggcctgaagaaaccatagcggcatggaccaggtgcccaagtcaggtgtgaaaaatcacatacagagaatggagtggtcta

SEQ ID NO: 21162 - DNA, 122 bp, Homo sapiens
caaatggcttctgtgcccttcccattgccaaccaggaaaccactgggcctgctatcatgccgggccataaattctcagatgcaggtgccataaaccttgggctgtgtcccgaggaaaggcag

SEQ ID NO: 21163 - DNA, 122 bp, Homo sapiens
agcgaattccggcggcagttcgcgggtaccttcccagcccatcctatctgctccggaccgcgggtgacattcagatttccaacaccgccccgagcttgctttaccagacaccctcaaacgac

SEQ ID NO: 21164 - DNA, 122 bp, Homo sapiens
gtgcggcaaaggtttcgcggacagctccgcccgagtcaaacacctccgcacccacagtggcgagaggccccatgcctgcccggaatgcgaccgtaccttcagcctcagctccacccttcttc

SEQ ID NO: 21165 - DNA, 122 bp, Homo sapiens
tatgggagctgtcaagcatgtatttttgtcaattaccagaaagataacaggacgagatgacggtgttattccaagggaatattgccaatgctacagtaataaatgaatgtcacttctggata

SEQ ID NO: 21166 - DNA, 122 bp, Homo sapiens
ttttttttttttttttctttttggtttcacaaacattttttgccagtagcttgtgctcaccgcagggaggctggactggatggtgactgcaagattttgttgttccttgacaaataatctca

SEQ ID NO: 21167 - DNA, 122 bp, Homo sapiens
aggaaccccaggagggtggaggtgcttggggatccggtgcctagctcccttgcttaggcccgggtccagggctggcgcggggccgctgcaatctctgggaagcgggggcttctgggtcgcgc

SEQ ID NO: 21168 - DNA, 122 bp, Homo sapiens
aggatgtagacaggctgtgcaggacggaaacgcgcaggcgggcagggctgtctgcggcatcgggcgggaggcaggggacatgggtgcaggggccaaggaaatggcagcaggacatggtccca

SEQ ID NO: 21169 - DNA, 122 bp, Homo sapiens
cacggtccagcaaggcaggagctgctcttaaccttggctcccagcctagaagatggaggccggggccgcccaccgctagcgagagcggctcacgctgcgcctcagctgccccatctctgcaa

SEQ ID NO: 21170 - DNA, 122 bp, Homo sapiens
tgggtgtgtcaaggagtcaaggctctgataatctttacttgggccattttttgggggtagcgtttgcagggaacaaccctgaggatagggataatatctctctctggataaagaacaggccc

SEQ ID NO: 21171 - DNA, 122 bp, Homo sapiens
cctgggcgttggatctactggaatgagcagcagccgcttcctcggcagccttgggaagcacgggcgactggacagcagccgccgggcacggttatgggggcggggtgggcggggaggctaga

SEQ ID NO: 21172 - DNA, 122 bp, Homo sapiens
tgtgcgccaggaagatgactccagggtgcctttagctggggctgtagtggttgggacgggcggctgtatatcaggggtgagttccagggagacttgggggcttagaaaacttagaaaacttc

SEQ ID NO: 21173 - DNA, 122 bp, Homo sapiens
gacggacagcgcgtacatgggctccgagagcacctacagtgagtgtgagaccttcacggacgaggacaccagcaccctggtgcaccctgagctgcaacctgaaggggacgcagacagtgccg

SEQ ID NO: 21174 - DNA, 122 bp, Homo sapiens
tgaagtagctctttttttttttttttttttttttttgcagtaactgttttttaagtctctcgtagtgttaagttatagtgaatactgctacagcaatttctaatttttaagaattgagtaat

SEQ ID NO: 21175 - DNA, 122 bp, Homo sapiens
acactgaaaaggcttggctgcactggggccctgacacgctctcatctaaagcctggccctcggccaagttcatctgttaatggacaaccacaaccagggcctgcacctcccccacctcccac

SEQ ID NO: 21176 - DNA, 122 bp, Homo sapiens
tttataaacacataacatttttgtctatttcccatttaaattcagaagtatgagttcccgcgtccctctctagacctgctcttcctgttagtttctttgtatgtcctggaggcgaggccagc

SEQ ID NO: 21177 - DNA, 122 bp, Homo sapiens
gtctgtgtgggagcccccactgtaacactctaataaatcagtttgttcagatgtgcctagcgatctcttgcctatttcctcttcctggagggtcacggaactactgagaacaatcttcccca

SEQ ID NO: 21178 - DNA, 122 bp, Homo sapiens
tcacgtccatacagtgaagacatcataacctgtcctacctacttcacaagcttcctctaccgatcaactagatcaatatatgtaagattttttttgacaactgtaaagtactataaaatgac

SEQ ID NO: 21179 - DNA, 122 bp, Homo sapiens
ttcgggcgctcccctgccttgctggggttttgcaaggccaccagcagagaagcccaggcacggttgtgcaccctttccttgtcccttcggcaggtcagcatcgggagggttggggaggggtg

SEQ ID NO: 21180 - DNA, 122 bp, Homo sapiens
cccgttccgcaagcccacctttactccccatatcggctccgagtgagaggctggggacaccgctgcttctcggggattttgcccacttcagtagaacccggaggacaggagtagggggggtg

SEQ ID NO: 21181 - DNA, 122 bp, Homo sapiens
tttcccggattatccgcccgctcccgtgacctgcttcgagaacgggaagaactccggctccgagacttgtgtggcttctgggggtacttgcagtccttggacttccgggagccccgaatctc

SEQ ID NO: 21182 - DNA, 122 bp, Homo sapiens
ctgtctagcatttattatgattagaggtgaagatgaacaagggaattctatccatgaacccgtagcagaaaaagagactgacttaaacattactccaggaggtgtgatagcacattacagtg

SEQ ID NO: 21183 - DNA, 122 bp, Homo sapiens
agcgggcgcgtctgcgactgggagggggtcggagagaagccacaaagcccgggctgcagacgcggttctgcagggttggcctgtatttcttttagagacagggtctcactctgtcgcccagg

SEQ ID NO: 21184 - DNA, 122 bp, Homo sapiens
agcagcaggagcagcgggtcctccaggactggatgggggcatctccccactcctggtggacggacaggctcaggtgattccttcaggcaggccctctggctctccagacgcatctcagcgcc

SEQ ID NO: 21185 - DNA, 122 bp, Homo sapiens
tgcgccctcgccgggagggcccctcgctcctctccgcagaggccgcttccctcccaaccccgcactcacaggcccaggtctcggtcagggccaggcctcccgagagcagcaggaggagggct

SEQ ID NO: 21186 - DNA, 122 bp, Homo sapiens
cccggcgtcttggccggctgggttgggggatggtgccgtgggcacgcagctctcctccatcgggaaaccaagcctgctgcccgcctggggtgcggcgccctgaggagaagcaggcagatgga

SEQ ID NO: 21187 - DNA, 122 bp, Homo sapiens
ggaaaagaataaaaattaaaaatttaaaaaacaagctaaggccaagcttctaaaagcaaccgtagtggctctccaggcctggccaggctatgcagcaacgcggccggcagatggcactgctg

SEQ ID NO: 21188 - DNA, 122 bp, Homo sapiens
tgttggtcgtggccaccagagctggcaccagcattgtgaagggttgatgcgggtaggccgcggtggtggggatcatctctctccagcacaagcttcctcatgtcttctcagcgctcctcttc

SEQ ID NO: 21189 - DNA, 122 bp, Homo sapiens
tgtgtttgggttcaaggagtaggtctggaaatgtttcttttcttctttcagatggagtctcgctctgtcgcccaggcgggagtgcagtggcgtgatctcggctcactgcaacctcggcctcc

SEQ ID NO: 21190 - DNA, 122 bp, Homo sapiens
ttcacgcaattcttgttccttagcctcctgagtagctgagataacaggcgcccgataccacgcccggctaggtttttttttgtatttttagtagagatggagtttcatcatgttgcccaggc

SEQ ID NO: 21191 - DNA, 122 bp, Homo sapiens
gcgctcttccggaggttgagggtggttcgctaaacttccggtgggctccaagagagtttccggcggacttcctgtgcgatcgggcggggttccggtcagtatgcgagtcctgtgagcatcat

SEQ ID NO: 21192 - DNA, 122 bp, Homo sapiens
tctgggctcacccccatcgtgcccatgatctgggcccgcccccatcgtgcccatgtccagcgcgtggctgccattgtgcctgtgtccagcacatggccccatcgtgccgatgtccagcacat

SEQ ID NO: 21193 - DNA, 122 bp, Homo sapiens
ctcttggcaggtagaagtggacccaatgtctacatacaaaaaatctttgcttcatgttggcgactgcaaggtacttgccggccaaaatgtctaaaaaacgaacaatatcgtattttgtgtga

SEQ ID NO: 21194 - DNA, 122 bp, Homo sapiens
ccctgcggggtggcgggcgcggagaggatctcaagcgttgcaggctccgggagtgctgcgcggcagtagctgccgcagtatttatccccgcagccggccgcagctctttgttgccggaagag

SEQ ID NO: 21195 - DNA, 122 bp, Homo sapiens
tgaagagcctccccgaagcgctgtcgggaagcgctctcctcagggtcctgtgggccaggccgggtgtttcggtccacgagcaccagcttcttccaccgggccgctaagtctctggcaaagtc

SEQ ID NO: 21196 - DNA, 122 bp, Homo sapiens
ggactggggagtcagagcccaactaggaagagagggacatcttagcaggtgggagattgacgacatccaggagattgatcaaataaggaataagtgaaagacaatgaaagcaggtttcttag

SEQ ID NO: 21197 - DNA, 122 bp, Homo sapiens
ccagtggcattgcgcctgttgtgattggttgccgtggatccagtgacgttgcacctgttgcgattggttgccgtggatccagtgacgttgtgcctgttgggattggttgccatggatccagt

SEQ ID NO: 21198 - DNA, 122 bp, Homo sapiens
cctccggtgcccactgctgcgacgcctcgcaggccgtgtcccagtgggccctgggcacagcggtcactcaccttcctgcacagcctggaatgggttgttggcctcgatgaccttgatggagt

SEQ ID NO: 21199 - DNA, 122 bp, Homo sapiens
taggaaagtgtacactcccaggtcaaggccctagtttttccaagaagtacatacattggccgggcacctgttttcaatattcaaacacaacttcccggggcgaggtgggcggggtattgggg

SEQ ID NO: 21200 - DNA, 122 bp, Homo sapiens
ctacaccatccgttgcaaggtgacgggctgctgcggctccgtgctcgtgcgcctcatccgcgtgcccagaggcaccggtatcgtctcggcgcctgtgcccaagaagttgctcatgatggctg

SEQ ID NO: 21201 - DNA, 122 bp, Homo sapiens
gaatgcgctggctgcccgggagccttcagggtgggctctgggggccaggtgcggcctcagcgccgtcccttcccgggaagcctcctccctggggtccacgccggctcctgctggctccccca

SEQ ID NO: 21202 - DNA, 122 bp, Homo sapiens
gggggctgccccagtggctcaagggaaattaacaagcctttgtgaagtgccagctgcatacggagccctagacaaagcacccggaggctagtcccccaaattaggacggttttgtgtccagc

SEQ ID NO: 21203 - DNA, 122 bp, Homo sapiens
actgtgactttgaattgtagtcagtattaggcccgttgcggctcctgtgaaacggcttcccggggaagcacgtgcgttgccacctcacaattcgttgtatcacattctggtaactgctgtgt

SEQ ID NO: 21204 - DNA, 122 bp, Homo sapiens
ctgcgccgcggcaggggtggcccatggacctgcccgagggcccggtgggtggccccactgcggaaagtaagtggctggaaccctatttgccccggggagggtgaggagggagccatgggtga

SEQ ID NO: 21205 - DNA, 122 bp, Homo sapiens
cgaggcccagagagaccgaaagtcccaccagagggtacagagctagctcagccctaatgccggccccgcggtgcctttccgagctcacggcctcccctcagcatccgggtttcggcctcgga

SEQ ID NO: 21206 - DNA, 122 bp, Homo sapiens
gctccagtcctagccttgaccccagcctcccacacccatcctgggcctccctctaactctcgggccctgcactgccctagggacccccagccaggccctccccagctgaggcagtgctctct

SEQ ID NO: 21207 - DNA, 122 bp, Homo sapiens
tgcccagctctaggtccgctaatgtgctacgcgataactgaaagacagcacaagccagagcggacggccgcgggatcccgttggggcgcatgcgcgagagcgaacgcggcgccgtgcgcatg

SEQ ID NO: 21208 - DNA, 122 bp, Homo sapiens
ccaggtcgaccaagttcttcaaagtgacaaacatctctgttcctttgaaaattatagagacgctggtgtgccctatcattaaatgaattgtcaaaggccctggatcctatggtttggatata

SEQ ID NO: 21209 - DNA, 122 bp, Homo sapiens
taaccctcagtttgctagtttgtaaaatgggctaataacatatagtctgtgaaattgtggcgaaggtcttttgagatgcacataaaccacttagaactattaacacattacttggcatgaag

SEQ ID NO: 21210 - DNA, 122 bp, Homo sapiens
cggagcttggaggaggcagggagattccaaataaatccactaattctgggctgagcgctccggcgtgcgagcccgcctgcctgccaaatgtaactgtgaagtgatgtggaaaagtgagccgg

SEQ ID NO: 21211 - DNA, 122 bp, Homo sapiens
gaggtgatgatgatggtgatggtgctaataaggattattgtggtgatggtgatgttgtgtcggggcttaatcacggaagtggaagcactgagaaatatagaacaagggacttgttataggta

SEQ ID NO: 21212 - DNA, 122 bp, Homo sapiens
gggccttggctgtgtcctttctttcctcagggaagaccacaagtttgggctagatgcctccgcacccccccacccacaccccctgagcctctagtcctccctcccaggatgcatcaggctgg

SEQ ID NO: 21213 - DNA, 122 bp, Homo sapiens
caaaaagcagggagattttgcagtgagaggttccatcgactaccgggtttcggcctcccccggattccgtggatcgcgctttacagccctggggccaagggttatgggtgtgggtgtaggtg

SEQ ID NO: 21214 - DNA, 122 bp, Homo sapiens
tgctagaaaactatgcatttacatatggggagttgtactgggcataatcattccagttaccgtatactactcagtcatagaggctacagaaggagaagagagcctatgctacaatcggcaga

SEQ ID NO: 21215 - DNA, 122 bp, Homo sapiens
cagagaccacttcatttgcagcttcctctcctcccgagctaaatggcgcgcgacgagccccgccctgccctccaggacattcatggctcgtgccaggcagtgccctgggtctcctgcatgcc

SEQ ID NO: 21216 - DNA, 122 bp, Homo sapiens
atcacgtggaggatttccatagaagggggaagccgtctttcttgtctgccaacccgaccacgaccacttgattagagatcacttcggctgcttgagtaactgtctcgacttccaccatatcc

SEQ ID NO: 21217 - DNA, 122 bp, Homo sapiens
cgagggatacgggacaggttaaacctcagagagcccacggctgcagctcgccggcctcctcgcccgcccacctggattttccctggcatttgttcccagctcagagaaatggcgcagggaga

SEQ ID NO: 21218 - DNA, 122 bp, Homo sapiens
taagacaaaaaacagaatttattgttgattgcagtaatggagaacaacacttcgacggagcgttggcaccttcacagagcaaagtgtcaaggcaaggttggaactgattgagaactggatgt

SEQ ID NO: 21219 - DNA, 122 bp, Homo sapiens
cacttcctctttatctgcaaagcgagggcatctgtgcatgaacagggtaggcaagcctgacgttgagggagtcgttgtgctgaaccaaggatgtctgctggtaatggagcactagctccttc

SEQ ID NO: 21220 - DNA, 122 bp, Homo sapiens
gtttgatcacgaccgatggggtcaggatgctagagtgtcggagtgggaagcagatagccacgtagcagtccagggccatagccatgagcaccccagactccacagaagaaaaggcatggatg

SEQ ID NO: 21221 - DNA, 122 bp, Homo sapiens
gaggaggaaggggactttgtgaacagtgggcggggagacgcagaggcagaggccctggcacgcagcgccaacgccctggttcgggcccagcaggggcgcggcacaggaggagggccgggtgg

SEQ ID NO: 21222 - DNA, 122 bp, Homo sapiens
aacgtctctgaagaactggaccgaaccccacccgaagtgtccaagaaactcgaggatatccggacccgctacgccttctgagccctcctttcccggtggggcttgccagagactgtgtgttt

SEQ ID NO: 21223 - DNA, 122 bp, Homo sapiens
gacctgccccgctggaaagaagcagcaggcttggcactccgtctcacagagctggccacccggacacatggctcccagcaccctgtctcagctgaatcatcagtgacttctgtgcaggatcc

SEQ ID NO: 21224 - DNA, 122 bp, Homo sapiens
tagagatggggtttcaccatgttgtccaggctggttgtgaacttctggtctgaagtgattcgccctcctcggcctcccagagtgctgggattacaggcgtgagccactgtgcccggccccag

SEQ ID NO: 21225 - DNA, 122 bp, Homo sapiens
actccagtgaacattcccgtgcctgtgctccggctgccccggggccctgatggcttcagccgtggctttgcccctgatggacgcagagcccccttgaggccagaggttcctgaaatccagga

SEQ ID NO: 21226 - DNA, 122 bp, Homo sapiens
atttcaggatgaagactaatcatcagaaaaactaacttcatgattagaaagttgaaacttcgagccagcccaatcaatctccaagtatgaaagaggggctggagattgagttcaatcacaca

SEQ ID NO: 21227 - DNA, 122 bp, Homo sapiens
tgggggcaaataaggcccccagccagtccaagtggagacatcccaagcctggcagctgggcgggtgtgccccgcacactgcaggagggctggaatgcaccccccatgctctgaggctgggcc

SEQ ID NO: 21228 - DNA, 122 bp, Homo sapiens
agatcaaaagaggcatgtagaacaaggtaaagaaaaagaaaaaaaaagctaacatatgtacgattggagttccaaaaggaaaagagagaactgaatagaagtactatttgaaaagaaccaag

SEQ ID NO: 21229 - DNA, 122 bp, Homo sapiens
cccgtcccttcactgtgggccccacgtcctgtgagcacggggtgggctcagcacagttctcggtgggtgagtgagtgatcggagaatgaaaaggaacgcgatatccctgtcctgcggcttaa

SEQ ID NO: 21230 - DNA, 122 bp, Homo sapiens
ctaacttccagggtctcagcaaactgctgtttttcacgagtatcaactttcatactgacgcgtctgtaatctgttcttatgctcattttgtattttcctttcaactccaggaatatccttga

SEQ ID NO: 21231 - DNA, 122 bp, Homo sapiens
aaaacaactccctgtttttcatggcacatgacaactaaatagacacattgaatgtaaattcggaggctaaataataaatccactagagtgattgtcaagggtaggacaggagttaagagcgg

SEQ ID NO: 21232 - DNA, 122 bp, Homo sapiens
ctcatccagtcctcctatctcatttcctggtggggaaacaggcctggcaaggaaataggccgaaatcacgatttaaaaaatgttgtgtttaagtactctggaaccctgtgttcagaggaaat

SEQ ID NO: 21233 - DNA, 122 bp, Homo sapiens
tgcccaaggtcaaggtgctcaaggctgaggatgacgcctacaccaccttcatcagtgaaacgggcaagatcgagccggacatgatgggtgtggagcatggcttcgagaccgccagccacgag

SEQ ID NO: 21234 - DNA, 122 bp, Homo sapiens
aggaacagggacacaggctcaaatctgaccttccccagccttgaggcttggaccccttcacgccccctctctggaccccttcacgccccctctctgggcctcagttttctcatctgtcaaag

SEQ ID NO: 21235 - DNA, 122 bp, Homo sapiens
aagcacaccctgacaataaggcagaatttccaagttatttgttggggggcaggtctggtgcgttgaaaaattttgtcattccgaaaatcaagagggataaagatggcaatgttactcaggag

SEQ ID NO: 21236 - DNA, 122 bp, Homo sapiens
accctgcaagcgaccccagcccgcgcccgtcgcgacgtcggacgcccagggcctcgaggccggggaagcccaccccctaaaaagatgagttggccgcactgcagaaaagttggactaacttc

SEQ ID NO: 21237 - DNA, 122 bp, Homo sapiens
tccggcccagcccgtcccgccccgtaccgtaccaggccccgcccccgcccgggccgcccccgcccccgtccccgcccccacagcccgcagacccccaacggtcggcgggcttctaggcctcg

SEQ ID NO: 21238 - DNA, 122 bp, Homo sapiens
tgtttgttctgcaagggaggcagtgacaggcctgttgaggaaggatgcagtcagaggggacgtctctgccttccaggtgttaagtcaggttcagacagagatggtctaaagtgttggcgaaa

SEQ ID NO: 21239 - DNA, 122 bp, Homo sapiens
attgggccatgccccaggacttgagccatctctggcacaaaaggagttaatggcagggaccgcgcccccccgtgtccgggaacgcgcagcgcgccccctcggtgcgcgggcacagcagccag

SEQ ID NO: 21240 - DNA, 122 bp, Homo sapiens
gggaggcgagtcttagtgagttccctttaagctctgagacaacagaggccgcctctctcacggccttccagccctgcagagggacctcttcctaacttccacccccaggaattcccctaacc

SEQ ID NO: 21241 - DNA, 122 bp, Homo sapiens
ccctattaattatgactaaaactctggaatgaatatatacacacaccaaataagaaactccgaaaggtgagaagagggcagacccagtagggactttagaccctaggaatgacacagtggtg

SEQ ID NO: 21242 - DNA, 122 bp, Homo sapiens
ggtggctctggtggcggcgcgggcggagcgcggcgcacggctgccgagtccagggtcgtgcgggctgctgacgctggccctctgctcgctggcactcagcctgctcgcccactttcggacgg

SEQ ID NO: 21243 - DNA, 122 bp, Homo sapiens
ccaggcccgtgtaccccttcttcgacgtgtgctggcacgacaagggcaagaatgcccagccgctgctgctcgtgggtcccgaaggcgccgaggcctgagccgccggacgggtagtggagggg

SEQ ID NO: 21244 - DNA, 122 bp, Homo sapiens
agcggctgggctttggcgttggctcccccgggcgagaccattgtgactcctcgggaggggcgcacgccggggagggggcggagcggccattgtccggtcagcgcagcctccgggggagggga

SEQ ID NO: 21245 - DNA, 122 bp, Homo sapiens
caagacttctttaacagttgctaggaagctgtttgcaaatctagtctgcaaatcacacgccgggaccaggcacagaccttctgataaaacaggaggccctagctccccggctgtctgttctc

SEQ ID NO: 21246 - DNA, 122 bp, Homo sapiens
gaagagggctcggcaggcgcccggggtcctcagcgctgcagactcctgacctgccgactgcggatcccgagtccccggatcccggacccatcctgtggagcccactcctggcaggtaaccgc

SEQ ID NO: 21247 - DNA, 122 bp, Homo sapiens
cgtagctccagaggtttaaccataggatagagaaaccaggtaagtcctacattggcttcccgtcgtcctttctcctggagggggtcttctgtgctgtcagtttgtactacgagtgtggtgag

SEQ ID NO: 21248 - DNA, 122 bp, Homo sapiens
tttccccgttctcttttaaatgactgcggaaaaacagattccgagccgcaaaagggaagacggattctcagacaaggcttgcaaatgccccgcagccatcatttaactgcacccgcagaata

SEQ ID NO: 21249 - DNA, 122 bp, Homo sapiens
cgcacttccgcttccggggcatagcaccggaaaggctcgtatcggagaacggtgtggccacgagagtctagaggaaaccaacccgcaactcactggagctgaagggctggtagtcaggccga

SEQ ID NO: 21250 - DNA, 122 bp, Homo sapiens
gaatatgctggactcgctggatgaagccttgagccgagagtcctgccctgtgccctggagcggagctgagtgactcaccccctgttctctgctgggagtggagggtccatgcggctttcctc

SEQ ID NO: 21251 - DNA, 122 bp, Homo sapiens
ggcagctggtgctgcggctgaaggagcggtgtgagcagcagaccagacagctgggcgttgcgcaaggggagctgaagagggccatctgcggctttgatgccctcgccgtggccacgcagcat

SEQ ID NO: 21252 - DNA, 122 bp, Homo sapiens
tttaaggaatagtttcacacaattttaggggctgggaagtccaacttctgcagggcaggtcgtcaggctgggcaacctgggaatcactgattttgcagtttgagtttgaagacaagtctgga

SEQ ID NO: 21253 - DNA, 122 bp, Homo sapiens
gctccttttaattagggatccgggtgaggtatcacccaatcccctagaattcccgcagcccgggaggaagcttgcagcccttcaccgaatgtggcccccagtcctctctcggaaggggcaga

SEQ ID NO: 21254 - DNA, 122 bp, Homo sapiens
taagaggaatggggttggggagggagtagtgagagaaataaaaccctgggaaaaagaaaacgcggaatccggttgctcttctcacagtagccagaaggaagggcagagctgatctctggcaa

SEQ ID NO: 21255 - DNA, 122 bp, Homo sapiens
acccggcatccaaggcgcgccatgggggagcttcacctggatggagactggctctccccgcgtcccagtgccctgcccggcagcgcaacagaaccggagactgggctgcaggacgataccag

SEQ ID NO: 21256 - DNA, 122 bp, Homo sapiens
ggacacctgggggcccccacttggggagcctgcctggccgctccccccggcacctcgcggcggactgcgcttcactcaggtctcagtgcaaacgtccccgtgtccttgaggacccccgactc

SEQ ID NO: 21257 - DNA, 122 bp, Homo sapiens
agggaaagactggctcccacgtggtccccaggcagtgtggtcgcagtgaggcagcagtgtcgagcacaaatgcagcagcctgtggggcacggcaggtgcaggctctggctcaagccatggtg

SEQ ID NO: 21258 - DNA, 122 bp, Homo sapiens
ggagaaaagccggaggcttgccgagaggagcactgagaggcgactgctgggtgagaccttcgggcagggaaggcatgggatctggggagacacagagcctgatgatactcagagggctgggt

SEQ ID NO: 21259 - DNA, 122 bp, Homo sapiens
caccgctcgccccgcccaggcccgtgggccccgcccatcccgtgcgcgggcccagagagccgggagaccgcaactggaggccacgcccccccatcacgtcaggagagtttgacccgccgaga

SEQ ID NO: 21260 - DNA, 122 bp, Homo sapiens
gggagtgagcaaagctgccctttcgctcccagggctttgaaatgtttctctggccaccttcgttattccgtgcgcgtgatgattgagaagggcctcccggaagttttcctttggtcctccta

SEQ ID NO: 21261 - DNA, 122 bp, Homo sapiens
ttctggaaaggaaccagagaagtttacacatacacaaataatgtgtccttgggttacagacgatggtcaacatcttggtcaatcattttatcctggtcataaagaagaggcaaaggagtgtg

SEQ ID NO: 21262 - DNA, 122 bp, Homo sapiens
agtttgatttacggcaattaattacagcaaggagactctttcggggttttgtttaggatccggtggccagtatttaatattcagccactgaactatgcgctcatttgtaggtacttacggta

SEQ ID NO: 21263 - DNA, 122 bp, Homo sapiens
cgcctacccccgcaacgagagtagagggcgcatgcgcaatgacgttcgcccttaatttctcgccccttaccccgcagcttacctccggcatctcgcaggggaggcacgcctgcgcagtcacg

SEQ ID NO: 21264 - DNA, 122 bp, Homo sapiens
aaaagcaggtttcctggaaaattaggcttttcttcattatatatgttgattcagccctatcgaataagaatttctatttccttatttgagttgtcaagttgtccatactgaacttattccca

SEQ ID NO: 21265 - DNA, 122 bp, Homo sapiens
gctcattggcctaggccgccctgactgacggctcagcgccgcctcccattggccctcccgcgaccttcccgcgccactataggctctcagcctcgggacacgcaccgcggactctcggccat

SEQ ID NO: 21266 - DNA, 122 bp, Homo sapiens
cttagcccggggcccagcactgagaaatctgggaaggaacgttgctcaccgcacatgggccgtggccccatccttcgggccctttaggtggggaatcgggctagcagctccagccacggcac

SEQ ID NO: 21267 - DNA, 122 bp, Homo sapiens
ggagcaggctatgccacttcagggtctgcaggggcacctggcatatgggccagcctccttcgttggctgtgacctgggtggtggcctgtgcttgtgcccagtggtcccagggtagccctggg

SEQ ID NO: 21268 - DNA, 122 bp, Homo sapiens
gcatgccaggctggggttgcatgccgggctgggactggaggccaggctggggctgcatgccgggctgattggccacgtacttggctgtgcgctgtttgatgaaagctgccattagctgcggg

SEQ ID NO: 21269 - DNA, 122 bp, Homo sapiens
gtcatgctggttggcgccactgcagcagacaccttggggagaagtccgcgaaatgaagaacgggccaagataagcctgaggggaatggtctcagacccagcgatcagctttcaccatgggcg

SEQ ID NO: 21270 - DNA, 122 bp, Homo sapiens
tccagccccgaaggcatcctggctagaggagacccgccctaatccttttgcagcccttaccggggggagtaatggcttctgcgaaaagaaattccctcggctctagaagatctgtctgtgtt

SEQ ID NO: 21271 - DNA, 122 bp, Homo sapiens
gccagcatgaacatggggcggcgcacagtcctgaagaggaaagccgggctgtgttgacctcgctgtgcatgctgggagttgtagtctcttcactgctcccgcccgttgtttcaggcacttcg

SEQ ID NO: 21272 - DNA, 122 bp, Homo sapiens
tttaagacctccctgggacccacaggggcacgtgtggccgtaagcctgtggcagcccaatcgttagcctttttcttctttgagcctctctaagtacatctgcagggacttctggatggagtc

SEQ ID NO: 21273 - DNA, 122 bp, Homo sapiens
ccttgaagtctggctgtcacgtcacaaccccggctcacaggctgaaatccggccctgggccgctgtgagagttgagtaggcaaaattccatacatatttaagcttatctataatttattcca

SEQ ID NO: 21274 - DNA, 122 bp, Homo sapiens
ggcccagctcgtcacaccgccgaggccgtgtgccctgtgagtgctgccctgagccagagccgtggaagccgcctcgcgcttccgtacatatctcacacacgccacgacacgggcaccagcct

SEQ ID NO: 21275 - DNA, 122 bp, Homo sapiens
atttccacgttgggagagattagtgacttttttagagaagcaatgtctctgatatctgttcgagtcattgtaatgaggtttccggagtgccctcctcagttctcaggcaaacccagatcctt

SEQ ID NO: 21276 - DNA, 122 bp, Homo sapiens
tgcatcttgcatgatgattgatcatggtagataatctctgggttttgtttatgtatgtcacgcccccctcggtgccatctttagggattcaggactggggcagatcacatggctattcaccc

SEQ ID NO: 21277 - DNA, 122 bp, Homo sapiens
cccagctgctgggcccaacgggcaggggtctgacatctggacggagtgggaaagcagcctcgcatcctgccctggggagtcgggaggagcccagttccatccagctgtgcaaacaggaggag

SEQ ID NO: 21278 - DNA, 122 bp, Homo sapiens
ccccaccgcttcccggaagggcccgcgtgccatctggcctccttcattgacagaagggaacgagggtctgagtggagaaggcacctgcttgggatcaaagccccaggcagagtcctgcactt

SEQ ID NO: 21279 - DNA, 122 bp, Homo sapiens
ctcactgctaacagagacagaactcatttacttactcttctgactgtacctttgctttcacgagggctctttcctggaatgatatgtccatacaactattgttgttgttcttacttttagct

SEQ ID NO: 21280 - DNA, 122 bp, Homo sapiens
acagctggtggcctcggcttctcctgaaaaatgcttcattcactccggcagctgtgccctcgggggctgccacgtgcctgaaactgaggcatggagagcccatctctgcagcagaaccagca

SEQ ID NO: 21281 - DNA, 122 bp, Homo sapiens
tcttggggctggcaccaagctgctatcgcttaaggcaggctggaagggagacaacttcaccgtactgttgtccagttcctagagagtggtcccacagctgtgttgcttggccttagtgatat

SEQ ID NO: 21282 - DNA, 122 bp, Homo sapiens
aaggcccttcccgggagggtggtcaatggctggtaatcttgaccctttccctcgcccccacgattctcgtggagcgttccgctctgtgagccccatccgggcccagtggttcagcccttcgg

SEQ ID NO: 21283 - DNA, 122 bp, Homo sapiens
atcggcgtgagtctccgccctcagagcctacgacaactctccagactccgccggagcaggcgcagggggcgtggccttggtggcaccacccccaacagagcctggtcagtgctgaagactgc

SEQ ID NO: 21284 - DNA, 122 bp, Homo sapiens
cggccccaaacgggaccccagatccagccactgccaaggctgcaggaggagcccccctgccgccgcacagccgcggccttatttaaaggggactcagccccactgccaggaccagagcatta

SEQ ID NO: 21285 - DNA, 122 bp, Homo sapiens
ggggggggagcggctctggccccctctgcgttctggtgacgttcctccgcgggggtggctcggcctccaagcccagacaactttctcgcaccagctgcaggcagccccggctgcgttgcggg

SEQ ID NO: 21286 - DNA, 122 bp, Homo sapiens
ataagggtcagatcacactcagcgatgcttaaagatgcttgtgaacattgctaactattgcgatataaacgtaaagtggaattactattagtttaggttgtgacctggtgcttttgatggga

SEQ ID NO: 21287 - DNA, 122 bp, Homo sapiens
ctggcctccctcggtgttgcttaagcttggggcacttcagtgttgctcaccctgtgtttacggccgcctccaccagcagggacggcagaacctgaggcacaggctgtgcctgactcagccgc

SEQ ID NO: 21288 - DNA, 122 bp, Homo sapiens
ggggaaaagcgttttccctacttccgtaggagttaactcgccaaggcttttaggagacgccgcacagctgtgctcccgctcgttgaaaaaaagatgccaaaagtgtagaatttgaccacaaa

SEQ ID NO: 21289 - DNA, 122 bp, Homo sapiens
tcgagtgagcagcgaggcttggacacgggtctggcggcgcagccaatggcgggggagggccgaggaggccgagggggggccaatagggacaggcggtgggggcgggacgacggcggagctaa

SEQ ID NO: 21290 - DNA, 122 bp, Homo sapiens
caggtcacaaagaactgaggaactcaaggactcacactcaccaggttctccaaagcagatcggtgctagagtaccaggagtttaagagttgtgcagcagggaacctctttataggacgttct

SEQ ID NO: 21291 - DNA, 122 bp, Homo sapiens
tctgcgcctgcgtgttctcctctgtggagctgagcctaggatccagaaacttcctgagcacggctgtaggctgtgctgtccttcctccttctgtgctgagcctctctccagggcaggagcac

SEQ ID NO: 21292 - DNA, 122 bp, Homo sapiens
ttggagatgataatgcccaacccttactctccagcctcccttgaacccagcgctgacctacggctgaccccagcttggcatggtggcagctcctggcagggagaccctcagccagctcacag

SEQ ID NO: 21293 - DNA, 122 bp, Homo sapiens
tccggtccttcctgggccctgtgccattctcattcccagttctcctgactcacacatggccgctgaaaaagacctcctgtgttgagcgggaaggccttggctgcagctggtccaggtcctgg

SEQ ID NO: 21294 - DNA, 122 bp, Homo sapiens
ccacagccgagtggacgccaccctgggaaccagggccaggcctgtctgctctagcagaaccggctggcaggtcagttgggttgaaacaaatagacacagctctccagactggaagtgttttg

SEQ ID NO: 21295 - DNA, 122 bp, Homo sapiens
gggcgggaggagaggagaagcagcttttcgctctattcaacggggacgcgagagcgcggacgatttccgctccttttgtgaggcggagcccgggggcggccgtgaatggggggtctgtggag

SEQ ID NO: 21296 - DNA, 122 bp, Homo sapiens
ggggaggaaaaagagttgctgtctctatccgacatttccagcttttcagagggctgcctgcgggtctggcttctgtttcatccgttttgggtacttgtgggttgcagcatattttagatgcc

SEQ ID NO: 21297 - DNA, 122 bp, Homo sapiens
aactaaaaacaatggagagtccttctacattaggacgcatcagctggtcctgaggggagacggaagtccttgggctctgggaacagcgttctacagcacaagagtgccacctactgaggccc

SEQ ID NO: 21298 - DNA, 122 bp, Homo sapiens
cctcctgaaggaaggtttcgcacgctgtgtggactggtcgattgcagtttacacccggggcgcagaaaagctgagggcggcagagaggtaaggtctgtccaagaggccttccagctgtggat

SEQ ID NO: 21299 - DNA, 122 bp, Homo sapiens
ttttgactcatgcctcagccttcccggccagtctcccttccaaaacccgaaaaacggaggcgctgggctcaagactgactctgtcccgccccggccccgccctctgccggttctaaagggca

SEQ ID NO: 21300 - DNA, 122 bp, Homo sapiens
gcatcatgtttcataaaactcaaaaaagatgcatgaccatcctttgtgtgcgagacgcagcgggcgcgcctggtggtcctgggatagcgacaacagagcatttcttcctcctccacacgcct

SEQ ID NO: 21301 - DNA, 122 bp, Homo sapiens
cgggcctgggggtgggacctccgtgaccttggatcgcgttgtcaagggcgacgggccttgcgcgcggaggtgggggaggtggccccgccgcccccggcccacgctggccggctgcgcctagc

SEQ ID NO: 21302 - DNA, 122 bp, Homo sapiens
gtgcggcgcaaaaggtaaaaaccagcctagagttttaacatgtttcatctaacttcccaacgcgtgaacaactaccagcggacacagacacgttcagtctgtattaccccgtccttgggcag

SEQ ID NO: 21303 - DNA, 122 bp, Homo sapiens
tattaggcttacaattcacttcgtgcacactgttttcggaagcaaaattcttaaatgtttcgttaattttaaattacaacccaagtatgggctagaagcaaggttgaattcaggctttgtgg

SEQ ID NO: 21304 - DNA, 122 bp, Homo sapiens
caagtgctctgctgccgctgacgcagagagctcagctccactaatcacattcagaagttccgagcccaccacctagagtttcagaaactgtgcgctgagaatgaaagagaccggggagcgct

SEQ ID NO: 21305 - DNA, 122 bp, Homo sapiens
agcgacgcctgggtgctacagttcggggaggcggagaaccgcctgctgatgggcggctgccgaaacaagtgcctctcagtgctgaagactctgcgggaccgccacctggagctacccggcca

SEQ ID NO: 21306 - DNA, 122 bp, Homo sapiens
cgctgactgtggagtgtcaaagacggaacagggtttagtgatcttgtccaaccccctccccgcttttcacagactggggaaatggacgcctggagaacggaaatccagttatcaaaattgac

SEQ ID NO: 21307 - DNA, 122 bp, Homo sapiens
ttccgtttgctcatcccttccaaggccattcttactccaaagactcccagactgcagctgcgcgccagctcgcacttccgggttccgggcacttccgctctctggccacgccccctcccctc

SEQ ID NO: 21308 - DNA, 122 bp, Homo sapiens
gacaaccacagtcctttcacctgctctgctagcgacaggcctgggcaggggccagtgtcacgattccacaaagacataatgtcgtaatgtcaagggtactgtgggctcctaggggaggtttg

SEQ ID NO: 21309 - DNA, 122 bp, Homo sapiens
tccctccatggccagtgagatggaactgtgttgactggttatttacagttctcctttgcccgttcagattccttgctgcatttccagatgagttgtcttacaactagacacatttgcttttt

SEQ ID NO: 21310 - DNA, 122 bp, Homo sapiens
acatcacggcactttctcagaggtgcaggggccctctggatggaagaggtggccacacaccggggtgctgggcacttacaagggctgctgcctcagggtctgaagcttgttccagtacttct

SEQ ID NO: 21311 - DNA, 122 bp, Homo sapiens
taaaataagggttccttgaacaccggcactgcgataccatgacagtcgatcactgacggccggtggtgtctccagcatggatacgcgggacagagggatgattcacctcctgagcaggatgg

SEQ ID NO: 21312 - DNA, 122 bp, Homo sapiens
agtgacagaggcgatgagctcatagtaaaataaagcggaggggagtccagcctgcaagagcggcaccgagtcctctaatacttactcgcagccaggagcccgtaaggacacagagaagcaag

SEQ ID NO: 21313 - DNA, 122 bp, Homo sapiens
cagttatgaccaaatcaaggttctccacaaagggagagaagactgtagacactggagaggcgaccaacaaatgcctaataagaaaagaactctgaggagctcagcacttgtcctgtccccgt

SEQ ID NO: 21314 - DNA, 122 bp, Homo sapiens
tgttctccaaaccttcttacaacccatagtgtagctcaacctgagctatttccatattaacgagatgtcaagatgtcagtgaaggagacacacaggcctcagcctctctcccgctgtcgaca

SEQ ID NO: 21315 - DNA, 122 bp, Homo sapiens
catcctttctgggctgccctttccagaaattctcactgcaagttctttttttgtttgtttcgttttgttttgttttgttttgtttttgagacggagtctcgctctgttgcccaggctggagt

SEQ ID NO: 21316 - DNA, 122 bp, Homo sapiens
gcagaacacgggccagacatcaaccccacgacgatgctctcttgctgccactggggcctgcgcacactgtgctaacacagtcgccatccaccggcctgctgtcctgagggctaattgggctt

SEQ ID NO: 21317 - DNA, 122 bp, Homo sapiens
acggacataggacattttatttataaagtcatcggtgctgggtaaggtgtcagagccccgcgtcgaatagtggttgactcgccgctcgcaatggctcacacctgtaatcccagcactttggg

SEQ ID NO: 21318 - DNA, 122 bp, Homo sapiens
caggaggaggggacgcagccgtgcaccctcgtggctggggagacgccgtgtccacccacccgcccctgaatgctgggttcccctgacaccaggaggccccggctggtcccttacctgcagct

SEQ ID NO: 21319 - DNA, 122 bp, Homo sapiens
tcagtaatttgatttcagagagaagctgaaaacctcgtaatggcaggagcagctcagtctcgtggtgaaaaggaaaagccttaaatggggctattaagcttttgcccgggacggatctgccc

SEQ ID NO: 21320 - DNA, 122 bp, Homo sapiens
taagagcccaagggagactggaaactctacagccatgaactaaaagcagcgtgtgtcagccgcagaatcggataacacaaccaaaccacaaatgtgcctgccgctcaggctttaaagttcta

SEQ ID NO: 21321 - DNA, 122 bp, Homo sapiens
tgtcctgttacctaaaaaaagatagaaataaagcccatctttagggcagaattcaactgccggacttgggactggacgccaccaagtggataaaatatggagctcggaaaagattggattcc

SEQ ID NO: 21322 - DNA, 122 bp, Homo sapiens
ctcagcacggcaattttacttctatagaagggtgcgtctggcaggtggagcccagcgccgcgctgcggggcctgctgggacttgtagttcacaggctcagggtgcgcaggcgcaatgccgag

SEQ ID NO: 21323 - DNA, 122 bp, Homo sapiens
cctcatctctgcaatgggatcgttagctctgcccctcccacttcacacaggtagtcgtgacgatcagctccgccgcactttgtaaagcgccaagccttcaaggttattattattctctccaa

SEQ ID NO: 21324 - DNA, 122 bp, Homo sapiens
aaacaagttgatacagtacttcctagcacatcagatgcttaggacagctaaatgagtaagcgacagtctctgcagcagattattttggttgcctatcctaacctctagttgtcaaccccttc

SEQ ID NO: 21325 - DNA, 122 bp, Homo sapiens
gccgcgcgagggggcgctgggatcggccagaccccgcggttgcgcccgggctggggctcccgggctccttttgtggaaaagagcggaaagcagggccctctccgggtctctgaaaatggtca

SEQ ID NO: 21326 - DNA, 122 bp, Homo sapiens
cagccccacgcgccacggcccagcccgggagctccggatgcagacaggaagtgggcagggcgacacgagcggctctccggtggtctcgcccaaccgtctgcctacatgtggagtgctgacaa

SEQ ID NO: 21327 - DNA, 122 bp, Homo sapiens
tgaaattcaagaaggaaagagctatattcctacaaaattgtcaaatagagagaggtctgccgtcatattagagtttagaagcaggtttcaactcaggttttgtgcagagtcactttgacctt

SEQ ID NO: 21328 - DNA, 122 bp, Homo sapiens
tggcaaatgacacagcaaaaaatgtttaaaaccaggattctcggtcgccgtcccgcccagcgccaacgctccgtcccgcctcgcatcaacgcctcgctcctccccgcccagcgccaatgccc

SEQ ID NO: 21329 - DNA, 122 bp, Homo sapiens
gcccgaggccggagaaagggcgagactgtcgctccctcgggtccccagcctgcagaagggcgcagtactcaccgagtgcgcggcgcaggcgagcagcaccggcagtagtagctgctgcagcg

SEQ ID NO: 21330 - DNA, 122 bp, Homo sapiens
acattgtacgggggtgagggaagggcctcagctggaaatgccctgatttagaaccgggcccgggacgggcacctcatggcatttcccgaaattgggtttccagctttatcaaacttagagtg

SEQ ID NO: 21331 - DNA, 122 bp, Homo sapiens
cttaaaggggccgcggtcctaaagatggttttgagaagcaggaagccaaaataccgagagcggaggtttagaaagaggaagattggtttccggaagaagtctgttctttaatacccaaatgt

SEQ ID NO: 21332 - DNA, 122 bp, Homo sapiens
cggcgctaaggacagtgggagtcgtagtctacattgtttagggaaggagattggcgtacccgcagccacttccgccggaaatgctccaatcccggaaggcgcactaaattagccctaaagat

SEQ ID NO: 21333 - DNA, 122 bp, Homo sapiens
gccaaagtgggagcccaggcagaggaggtgcggagagcgagcgagggctgtgaggactgccggcacgctgtcacctctcaccaacaagtggccttcaagtgataacgaaaaggactattctg

SEQ ID NO: 21334 - DNA, 122 bp, Homo sapiens
gcacttgtagtcccagctacttgggaggctgaggcaggagaatcacttgagactgggaggcggaggttgcagtgtgacgagatctcgacactggattccagcctggcgacagagcaagtttc

SEQ ID NO: 21335 - DNA, 122 bp, Homo sapiens
caaacacatcaaacctgtgtttttctttacttgctgctcttcctgccttcagctcccttccgcagacctccgcttggctgaatactttctccaatgccccacccctcccaatcctcgtggca

SEQ ID NO: 21336 - DNA, 122 bp, Homo sapiens
ccgagttggcctatcactacgggcagcctgcggagaggcgggaggcggcgccaatcggggcgagcagctggagcccggcggagcagttggctgagttgttgcaacttttttcgaaagctggg

SEQ ID NO: 21337 - DNA, 122 bp, Homo sapiens
ggggaggacaccaatgccggcaccttctcccgggccctccacgcccagacacggaggctacgcaaatctgccccaagcgcagaggcgagcgggtgcccacaggagacagaggacctcgcgcc

SEQ ID NO: 21338 - DNA, 122 bp, Homo sapiens
aagcggaggccagagtttcctcgccgagagaggccgtggtgggaagccggtggggcgaggcgggggaggggaggcgggggccggggagagggtcggggtgaggggggccggggaggcgggga

SEQ ID NO: 21339 - DNA, 122 bp, Homo sapiens
ctgctttctgtcctttcagaatgatgcactttttatgatttgagaattccttcatggtcacgtgctctgtttttatcatggttgggagcctgcagagcaatgtgagtagtaatcaacattct

SEQ ID NO: 21340 - DNA, 122 bp, Homo sapiens
ccaggcgcccccaccccgtgcccggaggaatcaggtgtcctcccgggcatccagcccccgcgggtcccagacacttacttcagggacagacaatgggaaaacttgcagccagtgccttgagc

SEQ ID NO: 21341 - DNA, 122 bp, Homo sapiens
ttcttgttcctgtttccactttctacctcccacctcattaataaactgaggtgaagtgagcgggctggccaggaaatattataaccatcccataagcacagtaccaaattcagaagagctat

SEQ ID NO: 21342 - DNA, 122 bp, Homo sapiens
gctccagtgggtgctccggagctcgtgggcccagcacacctccttaagcgggggatggagcgctgggagggggtggactgtggcccatgcgacccccagagccattaggaggagttctgtgg

SEQ ID NO: 21343 - DNA, 122 bp, Homo sapiens
gctgcttgcccgggtgctaagctcctcactgcccgggcccggtggggccggccggcccctcggggtgcggggcccgccaagcccacgcccacccagaactctagttggcaggtgcgcagccc

SEQ ID NO: 21344 - DNA, 122 bp, Homo sapiens
acgagagcttggcgggccagaaaagcgggagatgcctgaggctgtgacgacaggcaaaggcgcccatgtctgcgggggaaggagtgccaggcctggccccacaccaagtgcacaggcgccgg

SEQ ID NO: 21345 - DNA, 122 bp, Homo sapiens
aagacccttggaagaggggacgatcgccccaagttagaaatccttctgccagctcataagcgtggttcaatttaaactagggttttggccccttgaccccaaccaagccccgccccttcctg

SEQ ID NO: 21346 - DNA, 122 bp, Homo sapiens
gacttggatataacagtggaaaccaacattattccaaaaagcctcctgctaatgaagaaacgcttcacatcctctctttccctttttccacaacgaaaagcaggtttttaccgctctatctg

SEQ ID NO: 21347 - DNA, 122 bp, Homo sapiens
ttgtgaaatgatgcactttctctgctcagctgacaactcttcttcccaagctgtctgatccgtcccagaggctaacatatttccctctttacaaaaaagaggaggaaaagagaaccactttt

SEQ ID NO: 21348 - DNA, 122 bp, Homo sapiens
aacttttctctcttatttccaggcaagctgccaaattaaatccctttcttttcctgctggcgtctgccaacgtgatgtcagagactgaaaactagcttctaagtaaataggaaaaaagaaaa

SEQ ID NO: 21349 - DNA, 122 bp, Homo sapiens
tcatctgtggggtcacggctgccacgaacatcaggaattacgggacagaggacgaggacacggcgtagtgagtaccgggcacccagaaccgggagctgggagcagcgggtgggctctgcctg

SEQ ID NO: 21350 - DNA, 122 bp, Homo sapiens
tagaattttccgctatgggtcattctcggtgtccgcggggaagggcgtgacaacgacgggcgtgacggcgaagcaacagtgtctcgagagcgctgccgcccggagggcgccaggagaagtgc

SEQ ID NO: 21351 - DNA, 122 bp, Homo sapiens
tgcttttttaaattaaaaaatcagttttaaaattgcacctgcagtacaaaatcagggtggcgaccgggttgctgccattccctcccctcgggtctgtggcttctcagctccagctcgggtca

SEQ ID NO: 21352 - DNA, 122 bp, Homo sapiens
tatgtggtgtgtatctgtgatgtgtgtggtatatgtgttatgtatgggtgatgtataatgcgtgtgtatctatggtgtgtgttcaatgtatgtgtgatatgtggtatgtggggtgtgtatgg

SEQ ID NO: 21353 - DNA, 122 bp, Homo sapiens
gcgcgcgtgtgtgcccaggtgcgagggttcgcgcgtgtgctggcggggagggaaccgacccgaaagagagccccacgctggcaaagtggctcgcccatctcacagccggttggcgctcgcgg

SEQ ID NO: 21354 - DNA, 122 bp, Homo sapiens
ccactcctccacaggtaaccacagtcagcggggtgctgtcctccacgatttctcctgcctcgtacagacacaccgcacatgtgtagtcggaggaggttttgctcgttcttgattgttttgcc

SEQ ID NO: 21355 - DNA, 122 bp, Homo sapiens
ggtcgcttacccggctgggtaggtcggcggcctggttgccatggcagcggggtcgcgggccggcgccagggaaggccccgaggctgcgggcggccagggctgcccgcggattcccagacccg

SEQ ID NO: 21356 - DNA, 122 bp, Homo sapiens
acgcagagccaatcagaactcgcggtgggggctgctggttcttccaggagcgcgcatgagcggacgctgcctactggtggccgggcgggatgtaaccggctgctgagctggcagttctgtgt

SEQ ID NO: 21357 - DNA, 122 bp, Homo sapiens
atgctcctacttctaaagaactcttttttaaaaataaataaataaaaaataatcaagcggcgaaagttgacgtccgcccacgtgaatgtattatataaagcagctacaggaccagctggctt

SEQ ID NO: 21358 - DNA, 122 bp, Homo sapiens
gcgatggacccccaagctcctccgtaactacggaaagcttcggtgaggggccggcttccccgcacctcagtccatgcgctcacccgccaaggaatccggcgggaaggcaacagcctcccagg

SEQ ID NO: 21359 - DNA, 122 bp, Homo sapiens
tgagcacccggcctcagcatgcaggtgtccttcgtttgctcggagcacagcctcaagggccggggccctgaggatcggctgggccgaccggcggccagcagtcccagcctgggctcccgagg

SEQ ID NO: 21360 - DNA, 122 bp, Homo sapiens
taggactctggccctgccaggcaggtgccggggccttccctcacctggcaggtgtccctgcggccctctgggtagccagcacacagcatccctggcaatatctggagagtgaggttgaaggg

SEQ ID NO: 21361 - DNA, 122 bp, Homo sapiens
tcctctcctgtagaccgctggctcatgaaataatcagggagagaatgtgtaaatgatgatcgtgaggtccacttggacaggcagcctgtgcctgaattttcctgagggcttcagagcctgtc

SEQ ID NO: 21362 - DNA, 122 bp, Homo sapiens
tttattaaagagatcattccgcatttctgtcaattctgtcggtgacagctgagaagctgacgatgttgctataaatcctgtggagaagttacaataaatatgaagactgaaaaaatgattaa

SEQ ID NO: 21363 - DNA, 122 bp, Homo sapiens
gggccgcagcgtcctcaccgtgcgcaacgcctcgctgtcggcggccgggacccgcgtgtgcgtgggctcctgcgggggccgcaccttccagcacaccgtgcagctccttgtgtacggtgagg

SEQ ID NO: 21364 - DNA, 122 bp, Homo sapiens
ttattttggctattgctggtatgaacacaatagcaaagaccacaccacataccaaatttacgaagaaatctgaggaaagagagatgccaaagggtctaaagccatccagtggcccacctcca

SEQ ID NO: 21365 - DNA, 122 bp, Homo sapiens
aaaaggaaaggggatatttcaggcaggggaaaagtttcttcagtggcacagaagaacaaacgtatcatggtatgttagtcactttgctgggatgataattcatgaaggggaatagtgtatgg

SEQ ID NO: 21366 - DNA, 122 bp, Homo sapiens
actggcttcttcctacttgtgaccaaaacctgcgccgccgcggagcatgcccagtctttgcgtccgctagctcgccgctcctgggcgcgatcctgcgctccaggttttatagactacgggcg

SEQ ID NO: 21367 - DNA, 122 bp, Homo sapiens
agaagaggaaggagcccgggggtccctgggaccaggtgcctcatgaggctccgtgtgggccgtggaccctgcaggccacgccggcttccctgactgataaacccagagccaggccttgccgg

SEQ ID NO: 21368 - DNA, 122 bp, Homo sapiens
aaatgatgggggagatgagctgaaggagaaggcccagccaagaaggggtaaagcgaaggccgcaggtgtggcaactggttaaaattcttgagcaggtggaagaagactgagcaaacaaaatt

SEQ ID NO: 21369 - DNA, 122 bp, Homo sapiens
tcccttacttgttgtttccaaataaaagatttttgattccccattgatgttggatgagaacgctgagtgtgcaagcaaaatatcattttttaactaagggcccaatagtgtcttaaatatgc

SEQ ID NO: 21370 - DNA, 122 bp, Homo sapiens
cgcagaacccgggagtaggagactcagaatcgaatctcttctccctccccttcttgttttcggctttgtgagaaaccttaccatcaaacacaatggccagcaacgttaccaacaagacagat

SEQ ID NO: 21371 - DNA, 122 bp, Homo sapiens
gctgggaaaagggggaaataggcactatttagaaggtatttgggatagatggagttaccacgaatgaatcttcattgggatgggagtttagacctgttgaatgaataaaaatgagccatcct

SEQ ID NO: 21372 - DNA, 122 bp, Homo sapiens
ctgctatgggaaggaactgctgcttcagggaggaagaggtgttgctggagcaaagctcaccggatgcacaagaagacaggaagccaaacaagaagcaacgagaaaacagacaggaaggatca

SEQ ID NO: 21373 - DNA, 122 bp, Homo sapiens
caagctgggggttggggttggcgctagcgcagcggctcgcctggtactgtgggagagcggcggctgctcctggaagttgtggtgtcgggagcccagccggtgccgccgcagccgccgcctag

SEQ ID NO: 21374 - DNA, 122 bp, Homo sapiens
cgtggagggagggagcccagtgaccccaggggccacggcacccacggcagccacggcacccgtgctttccacagcaggccccagcagctttcggcctgcgctttgctgtcaaacttgtctgt

SEQ ID NO: 21375 - DNA, 122 bp, Homo sapiens
cccggcccagcgctcgccgcctgctcttcgccctgcaagtttcaagaggcagttatttctcgcagcctccgcgcttgcaactgcctcctggcgggggagtgggtgtccaaaaagccagcagc

SEQ ID NO: 21376 - DNA, 122 bp, Homo sapiens
gtattcgataacttatgggacgtctcaatttgtgctttaagggcgcacggcgcagagaggcgcagcagaggttttccaggttccggatgccaggggccggatggtgaactcctccctgcagc

SEQ ID NO: 21377 - DNA, 122 bp, Homo sapiens
gactcaccacaggaaaactgtcaggggagcctgcagcatgctgctttgaaggagccccaacgaatgacagtaataatggtggtcgtttttgaaacgactgcactgagttggtttacttatta

SEQ ID NO: 21378 - DNA, 122 bp, Homo sapiens
aatctcccacccggacgttaactgtgggcttcacttactttcagttcctgggggaaggctcgacagagcaagctttagtccccctcaaaaaagaaatggtgtaaaatcagtgaaagccgtct

SEQ ID NO: 21379 - DNA, 122 bp, Homo sapiens
agcctgcaggtccctgatgaaaacttctcttccctctaattaggagccaccaatggggttcgtcctgggagccgacaggtggactggccacctctggggcagctcccactctctgttggctc

SEQ ID NO: 21380 - DNA, 122 bp, Homo sapiens
ccgcctccccaacgagtggaaacttgaaactcccgctggtgccagcaaactcactgagggcgttgccgtcgcccccagaggaggaattcttcccagagggagccggggaccaaatgaagcgt

SEQ ID NO: 21381 - DNA, 122 bp, Homo sapiens
caaggcccaggaccccgggtctggtcgcctgacctccaaggaagttcaggtcctacagcccgccccgccctccgggtcccatggaggaggcctggcttcctgtctctagcaaaccggaacta

SEQ ID NO: 21382 - DNA, 122 bp, Homo sapiens
aaaagtcaaagtagggggagacagatggggcccgagccctgggatggaagggaaggcaggcgccccctcggctgcccacctgtcttttctgcaggggctacctgccccactcccagcccgcc

SEQ ID NO: 21383 - DNA, 122 bp, Homo sapiens
ctgggagttgtagttgcggggacctgggaggccgggctctttcctccttggcctgccttccgctggctgcgtggggcagccaagaacaaagcctgcgagcttccatcaattgtaaagcaaag

SEQ ID NO: 21384 - DNA, 122 bp, Homo sapiens
tctggatgatgcccactctgatccttggttttctcttctataaaatgaaggcttgaactacgtggtctctaaaatcctacctagctctcaaatttctcttggttctaggaaaatattgatgt

SEQ ID NO: 21385 - DNA, 122 bp, Homo sapiens
ggtataaatacaatttaaagctcaaacaagattctgaactggccaaagcaaatgtctcaacggctcattcagttttaaatctcagaaactggaaaaatcccaccagtcaatcagacacctgg

SEQ ID NO: 21386 - DNA, 122 bp, Homo sapiens
tgtcctgtttttgctgccaaagggctgcaaggccaagtctgacaggtgagagggctggtacgtccctctgctctcacaacccaggcaaaaaaaactcgcttaaagggtagcgacactggggc

SEQ ID NO: 21387 - DNA, 122 bp, Homo sapiens
ccctgccctgctcccatcctctcagtcctttactctctccacccccagctccaggaacaacgcccaactggcctcctactcagctgacaggaatctggttggagttgttgtgtcccagcctt

SEQ ID NO: 21388 - DNA, 122 bp, Homo sapiens
acaacaaaacaaaacaaaacagagtaacatgagaataagtgtgaagtgtgtccttttcgccggcactgcttcagatagggtggtcacagaaatcctctcagaatagtaacatttaagttgag

SEQ ID NO: 21389 - DNA, 122 bp, Homo sapiens
tgctctctaccacctcggtaaccgagctccctgcaagttgagttatgcaaataacttccgcgtgtttgacactttgttctcccttgctcctgaaaacccgccgcaaagcttgccatgcgccc

SEQ ID NO: 21390 - DNA, 122 bp, Homo sapiens
ctgcggcttccgaatggggaacgcgtcttgccctaaagtagcacagcaaggctgagatcgcgctggggtcccgttgaggaaaatgggtgtgtgtggcccatctgaccccccgcccgccttgt

SEQ ID NO: 21391 - DNA, 122 bp, Homo sapiens
gcctccggcagggagatgacccagggggaggggaattgatgggtcagctccccagctccccgctccgggatggtgcaaggtgcacctgacatggtctccggggctcccctgtgctcgtccac

SEQ ID NO: 21392 - DNA, 122 bp, Homo sapiens
caggcagggacacagccaaggtgctccaggtcgctcagagagtcttcaggattcctgagtcgccgagtctatggcatgcgctccgggccctgactacaagctggttttcaaaggaagtttgt

SEQ ID NO: 21393 - DNA, 122 bp, Homo sapiens
tcgttcctggggaacccccactctgacctgttattaaagttcacattttgaatgccctctcgggccccgtgtgtggggagggcaggtgaacttttgtttctgcccccattcaggttcactga

SEQ ID NO: 21394 - DNA, 122 bp, Homo sapiens
gtgcctctcagctgtttccccgacgtcggctgggtcctccggcggccccttggtcccgtccgcgccttccgccgagtccccacccctgcccggtacctgcggtcgcttttcccggaggccgc

SEQ ID NO: 21395 - DNA, 122 bp, Homo sapiens
tgctgggccaggtggctccactgagcaaaacgcttggagcaaaggtcgcaggcatagggccgctcgcccgagtgcacgcgccggtggctggccagcagtgaggggtaggcaaagcggcgacc

SEQ ID NO: 21396 - DNA, 122 bp, Homo sapiens
aggcgggaccgcgggtcacgtgcaaccccgggccggcggggcggggcccgggaaacgtcccgccccctccttgggcggggccaggctcagcccgccccggacccctaaaccccgccctcccg

SEQ ID NO: 21397 - DNA, 122 bp, Homo sapiens
ggcgcccgcagccccggcgccgccatggtggaggcggcgccccccgggcccgggccgctgcggaggacctttctagtgcccgagatcaagtcgctggaccagtacgatttctcgcgggccaa

SEQ ID NO: 21398 - DNA, 122 bp, Homo sapiens
aagggcggttggcgggaaggaagtccaggtgagacaggcccgcgttgggactatcgtgcgcggtatgtcggccggcaggtggggctggtccgggcgcaggaggcggtagagcaggagcagca

SEQ ID NO: 21399 - DNA, 122 bp, Homo sapiens
ggcagcagaggcggctggccaggaacgcgggccgaggctggaccctttgggcagctagcccgtgatctctgccgtcaccgatcgcgattcctaccccctcgccttcccccggcgccgacggc

SEQ ID NO: 21400 - DNA, 122 bp, Homo sapiens
gccggaaacaaatttggggacgccggattcaggaagctggcaggactacatttcccagagcgccccgcgccctccccggaggcagattcctgggcgctctagagggggtgggttggcggcct

SEQ ID NO: 21401 - DNA, 122 bp, Homo sapiens
accgaatccatgccgtgaagacttttaaacgccaaactgaggcgtcggaactttgctccgcgggcatcgaggagccatcgaaggttctcagcaggtgagtggcctaactggattggtcactg

SEQ ID NO: 21402 - DNA, 122 bp, Homo sapiens
atccacactgttttcctgtctgtttcagagacgagttgtactgctgtcacaggaaatggacgctggattacaagcatggcagctcaggcagcagaagttgcaggaagaacaaaggaagcagg

SEQ ID NO: 21403 - DNA, 122 bp, Homo sapiens
aatgtgggggctcagcagcagcatcgggcagaagccaggcggggagggaggcacagcagccgggcacccatatctgccgtcctcaccgtccttgtcaaggtaagagctgagccatctgcagt

SEQ ID NO: 21404 - DNA, 122 bp, Homo sapiens
ccttgcccacgaatctccagcgcaaaaggcagcagctttttcctccccagctcctttctgcgtcggcggcgaagagagagctctgctccctgcttttttagaaaatggatttgacgtggccg

SEQ ID NO: 21405 - DNA, 122 bp, Homo sapiens
ccaggctcagaaggggcctgcactctccctctggagggctcacaggtgtgtcccaccggacgtgcagcaggggcccagctgctcctccagtcctgggaagcagctcctccaccctcccctgg

SEQ ID NO: 21406 - DNA, 122 bp, Homo sapiens
ggcctcctggtcagatattgagcctttaagcaggaaaagaaaagattcttctctgggagtcgaaacagcccctaggaaaggcttgatgcagatgcaggagttccccagtgtcagatctgtca

SEQ ID NO: 21407 - DNA, 122 bp, Homo sapiens
tggtatttatctgtgggttcagtgcgcacagcgttgtccagtctcgaaaccaccctaaaccggcattaaaccccaaccaaaatcccctttaacccttccctagaacagcaggacctgcgaaa

SEQ ID NO: 21408 - DNA, 122 bp, Homo sapiens
tggcagagcctcagacaaagtcagctggcaaaggataaacgccacccagcctcaggaagccgatgacaataggatgggtttagactcgacagcctatgttttaataagcagcacaccatgtt

SEQ ID NO: 21409 - DNA, 122 bp, Homo sapiens
ggtgtatcggggcggtaaaccctacagactctacctgtgcttatgcggggctggggaggacgagtcattacagatgaagaattaagtaaggtcagaccactcagggccttagatggatgtca

SEQ ID NO: 21410 - DNA, 122 bp, Homo sapiens
accccgcgctgtttccgggccggggtgctgcgcatgcgcactgggtgtgccccgcccacccggccggccctgcagtcctgcgcctagcggtccagtccagcctcaggtctatgacacagcaa

SEQ ID NO: 21411 - DNA, 122 bp, Homo sapiens
gcatgggttttgtggccgtttctggtgtcttcctggtgtgtttggatttgtgcttcgccacgtccgcacgtcacttctgagcccagtgcggtggcccctgagctcctgccggtcacgggctg

SEQ ID NO: 21412 - DNA, 122 bp, Homo sapiens
ctgccctgcctttctgcctgtcacagagcaggaagagctgaccatccagatgtccctcagcgagaaaccctgactgcacagatccatcctgggacagcaccgtgaggttgtaacaaagactg

SEQ ID NO: 21413 - DNA, 122 bp, Homo sapiens
gtcctcaacgcaccctggcgttctgatcgccccctgtaggtcctgagctatcctttgtgtcgtgtgcgctcctggaggtcctgagcaccccccggtgtcctgagcacagcctggtgattctg

SEQ ID NO: 21414 - DNA, 122 bp, Homo sapiens
ctggaatgaggtgcctaagggtagagctgactcctagcatagcccgaccagcaatattagcgccagtgcaggtacaaatgttggctgattgggcagggagtggagaggcggtgagcgtgcaa

SEQ ID NO: 21415 - DNA, 122 bp, Homo sapiens
ccactgccccaggcttggtaattaagcagtctgagtgattgcagaattctcgcatgttcccggcagcctgtgcttggagttaccatgaaagcaagtcaggacaagtcccagagaaacttagc

SEQ ID NO: 21416 - DNA, 122 bp, Homo sapiens
cccggccccgcctcgcggcgcttctcccctcccctcgcctcccctccccaccggcgaggccgcccggggctcccattggctcctcgaccttttgaatcatccccggcgctgtcgattggtcg

SEQ ID NO: 21417 - DNA, 122 bp, Homo sapiens
gcataatgtgtaggaatcctgcttaaaccccgccagaggagaagttcgcattcaggatggcgtcccccaggggagggcgcgtggatgggagcggggctggggctttggggccggtgaggcag

SEQ ID NO: 21418 - DNA, 122 bp, Homo sapiens
ggtgacccagccccggcagctctgggcagcaagaggctgcagaggggggagtgacatcaccgccggaggaggggcagcaccgctcccccaacccaggggcttcaagctccgcctttatggcg

SEQ ID NO: 21419 - DNA, 122 bp, Homo sapiens
atttgtgttggcagcagccagtggaaacacaaagatagacaaagagtgaatcatcccagccgcagccccgccccccatatctcaggtgaccttttctccacggtctccgcactcacaaatgc

SEQ ID NO: 21420 - DNA, 122 bp, Homo sapiens
agaacctacgcccactgccgacgagacgctgtctgccacccgcctgcagaacccagaacccgcgcccactttccacgagacgctgtctgccacccgcctgcagaacccagaacccgcgccca

SEQ ID NO: 21421 - DNA, 122 bp, Homo sapiens
gtgtcgccagtggagggggctgctggttccgggtctccaccccgccatgggcagaggctccgggaggcccacgggtgccctctggcgctgaagaggtaatgtagtcacagtgacaaagttag

SEQ ID NO: 21422 - DNA, 122 bp, Homo sapiens
ctgctcagagagtagttgttttcattattaatccaaaggtgtcctaagaaatgccatcatcgcagccatactttcccccaccaagggcttgctttcccttttatcttccagtaactacagca

SEQ ID NO: 21423 - DNA, 122 bp, Homo sapiens
taaggagaaagacttggtcagagaaaacgtgagacggcgccggggcagggaccctcctcccgcagcacacatcccaccctccttgctcagacacaggctttttctggctgcttgtgcttcta

SEQ ID NO: 21424 - DNA, 122 bp, Homo sapiens
tctggtacctcctgctgtcatcctacttagtagattgatgtttattttgccagcacacatcgactgccatcaatagcactgctaacttgtctactgttatgttgtcctcagaagcagtaaat

SEQ ID NO: 21425 - DNA, 122 bp, Homo sapiens
taatccttttgacctagtggaagcctcacctgagccagggacaggctgcatcacaaatgtcggccagcacagcgctgcccctccaagggtggcaaggggacatcctctgcctgggcagccct

SEQ ID NO: 21426 - DNA, 122 bp, Homo sapiens
tgtgaaccatctctgagcctttgcatacactggtctctctgcctggaacgtccttcaactcgtgctgtcaaaatgggtcccaaacacgagcgcccccactgttctagatacaggggcctgag

SEQ ID NO: 21427 - DNA, 122 bp, Homo sapiens
gtagtgttcagactagcccacgctccggttctgagccgcgacggcggtctccgcacgcaacgaaatcaggcaggaccgaaccttgcgtcctccagtgcagcgagttcggaagcgaccggccg

SEQ ID NO: 21428 - DNA, 122 bp, Homo sapiens
tttgcaagtattctctcgcattcgtaggctgtctgccctgctgagagctgctttgctgggcggaagctccttggctcacttggtctcacttgtcagtttgttaccgttgcgattgcgtttgt

SEQ ID NO: 21429 - DNA, 122 bp, Homo sapiens
atgactaattgctaattttccacatttccatttgtggatccttaataggacagtggaactcggggcactggaaggagaatgcccaccaaattcccatatgaagaaattcccatatgaagtca

SEQ ID NO: 21430 - DNA, 122 bp, Homo sapiens
acccgtccccagcggctcgacgctgtggatcccgccgccctccagccccggctccggcgccgactcctgctcaggctcctgctcctgcccccggccccgcccccggccccggccccggcccc

SEQ ID NO: 21431 - DNA, 122 bp, Homo sapiens
gtggcccacctcagggatccgtcagtccttcgtgccaaggtcaggctcaactccagcctgcggtgccgctcagccgcactcctcgaagatgtctgggtagtgccggaagagcacaggcgggt

SEQ ID NO: 21432 - DNA, 122 bp, Homo sapiens
tgatttttcaaccttctccatgccctcttgagggtagggaagatgagtatcttttttctccgtacagaccctaccgcacaagattttcctaaacagaccgaactcaaggagtctttctggtt

SEQ ID NO: 21433 - DNA, 122 bp, Homo sapiens
agggttgggccagaggaggcggtcctggtagggagtgcgtagcagggtggagtcgctgtccggtcgcgcttcacttctgctccgccctccctgctccccataacagacccctccctccacta

SEQ ID NO: 21434 - DNA, 122 bp, Homo sapiens
gcccatagtctgagctggaaacaacaataggttgaccatggtggtcagctcaaggtggggcgttcccaggtcgcctcctcccctctacctccccaccatccttaattaaatcctcacccagt

SEQ ID NO: 21435 - DNA, 122 bp, Homo sapiens
ggacggaagactatcctgaggctacggctgtgattggtaaagaagcagcaatcactctttcgagagatgtgcctggttatttttgtagtttggacaatattcatgttttgtctgggtgcaga

SEQ ID NO: 21436 - DNA, 122 bp, Homo sapiens
acactcttccatggcattaattttgcttacaatggtttcaccaaactttcagatcgtgaacgtcatcttggagagtaagatgctcagacttctccctcctctcagggctcttctacaacagc

SEQ ID NO: 21437 - DNA, 122 bp, Homo sapiens
ctagaacggaggcgacgggcactggaatttagaactcagcatttgaaaacactttgtttccgtgccataaaagagcgccaaaatggggctacaacggctaaagaatttccaaaaagttcctt

SEQ ID NO: 21438 - DNA, 122 bp, Homo sapiens
tctgacagcaaatcttccagagatgtgcagcctctctgcatgcttctgttattcctaagtcgcctaaatgctttctgagcagaattctattttggcccatacactgaaggtttgtatgtctc

SEQ ID NO: 21439 - DNA, 122 bp, Homo sapiens
atggcactgaagagtgtctgggggaggctgtatgcgtctgtgcgcgcgtctgcagctgtgcgcgcgtgcgcagctgtgcgcttgtgtgtagctgtgcgtctgtgggtgtgtagctgtgcatg

SEQ ID NO: 21440 - DNA, 122 bp, Homo sapiens
gtacccccatcctaagccaggacagtgagtgcctcttttgtgcttgtttccggtagttcccggccttttccatccttgagccactggacaagagtcctgatgtctttgatgagtcccgcaca

SEQ ID NO: 21441 - DNA, 122 bp, Homo sapiens
cctggatgcgagcaaggtgtgtttgttatcctcattttacagacaaacaagagcaaccaccgccgccgccgccaccaccaccaccgccaccaccaccaccgaggcatgcagtgggcaagtcc

SEQ ID NO: 21442 - DNA, 122 bp, Homo sapiens
gtgtggcgcgtgctgcagatggcagcggtcagctcgtgtcatctcctagcatccctggaccgcaaaacaggcttgcactgggtggcaggcaaccttcaatgggtgaatagacgttccttcag

SEQ ID NO: 21443 - DNA, 122 bp, Homo sapiens
tggcgcccgccaccacgcccggctaatttttttgtatttttagtagacacggggttttcccgtgttagccaggatggtctcgatcacctgaccgtgtgatcctcccgccttagacttccgaa

SEQ ID NO: 21444 - DNA, 122 bp, Homo sapiens
ctcagtcctaaggagccctaaagagagttgtggaggtaaccatcacagtcttgaaatagacgtctagggccccttacacccgatccgactaagcgctgcaggagtccactggcccgttataa

SEQ ID NO: 21445 - DNA, 122 bp, Homo sapiens
tctccacactgttgtggtggatgcagccgtgggagccgccgacggcatagatgtggccatcgatgacccccaccccgatgcggttacggggcacgctcatgggggcgcagggcgaccactga

SEQ ID NO: 21446 - DNA, 122 bp, Homo sapiens
tgagatgtggctgtagtccaggaatagtcagggaggcagaaaatttagttaaaatatctccgcataataaggggactgggcaggtggggataactaggaaagagtgcaaaaaggagtgttgc

SEQ ID NO: 21447 - DNA, 122 bp, Homo sapiens
atgggtttggcctgtgcttctgcttattcagtccttcagctcacggaagggatgctagtccgtgaaggtgacctcacagtactggttaattaaactttattgctcactgtccacttttgtgc

SEQ ID NO: 21448 - DNA, 122 bp, Homo sapiens
cgtccggtcccgtcccgttccgtcccgtcgggtcccagccccgccaactctcaccctgcccggcccttccagcggatccacttgcagcccccgacccctgacttggtccccgaggtcggggc

SEQ ID NO: 21449 - DNA, 122 bp, Homo sapiens
ccggcgccccggtgcctggggccggaggttggctgcctcagcctctctccacggacacggcgggcgcattggtttcccaacttttaaattgtgcctctcattagcaaaatagtttgacaatg

SEQ ID NO: 21450 - DNA, 122 bp, Homo sapiens
ttgttccgttcctcacagatccaagtgtaagggcggcattcccaggtctcagcaaaagtacgtgtgctcagaattgcccttggaagccccactcccacggcggggcagccaccccatagagt

SEQ ID NO: 21451 - DNA, 122 bp, Homo sapiens
ctccgggaggggcggaactgcggtgggaggggcggggcctcactgggcgatcgtagtggacgagaacctagactggaaccggtccgaagaaaaaaaggcagccctcattgggctgtcgcctg

SEQ ID NO: 21452 - DNA, 122 bp, Homo sapiens
tctccctttctgtctttcacattaggcttagagcctatcagaaatccaggataatctcatcgtgatatatttaatttgattatacttacaaatcacatcaaatgtaattacaaaataattta

SEQ ID NO: 21453 - DNA, 122 bp, Homo sapiens
atgtatctggaaatcctgagtttgacaagtgaggtgtgggggagggcatctcaatggcctcggctccctggagagcttgccctaggccatccccatctgagtttagatgggtccaggcaccc

SEQ ID NO: 21454 - DNA, 122 bp, Homo sapiens
cgtggcagctgggaccacagctcctcctgcccctgcaggatctctttttcagcttctctacgtcctgggaaaagctcatgtacagccccatggtgaagggcaccagcttctgcaggacatgt

SEQ ID NO: 21455 - DNA, 122 bp, Homo sapiens
aaattactctgtagcccatagataattaagtagaaacagatcttttagttatagtcacctcgattctcaagaagataactggactagtatcaaaagatctggctttggtttggcaatatcaa

SEQ ID NO: 21456 - DNA, 122 bp, Homo sapiens
gcagtgagccgagatcgtgccactgcactctagcctgggtgacggagggaggccctgtctcgagagagagcaagacagatgcgaaccatatttgcaattttatattttctagtagccacatt

SEQ ID NO: 21457 - DNA, 122 bp, Homo sapiens
ctcataggggcatgacactggaagtctttttctgcctcattctccacatggtcttgatctcgcttatttttgtcctcttcaattctgctttctccccttttcttcccccagaactggcttct

SEQ ID NO: 21458 - DNA, 122 bp, Homo sapiens
gcaactgcagatgtgacctgagccctggccagcacactgagtacagccttgcagagggcacggcttacctacaacagaaactgttatataacatgagttcacttcagctgctcaatttgtga

SEQ ID NO: 21459 - DNA, 122 bp, Homo sapiens
acgtccctccccgacgcgtcgccgggctgcgctggagccgctcaccgtccgggtccttctcgtggtagcagtggtagttgcactccacctccatgttctccaaaaaggacttgacctgctcc

SEQ ID NO: 21460 - DNA, 122 bp, Homo sapiens
ggcaccaatagtggtgccagctcacagaaggctggagtggtggtcctgaggcttggggctcggccttcatcagaggtttcactctgcagggaagcagctgtagacaaagaagccttgttctt

SEQ ID NO: 21461 - DNA, 122 bp, Homo sapiens
atacaacacatatttattgacttcttaccataaactgtttaaggagcctggtggggataccgcataaacaaacaagcaaaaatagacaaaaatctttgtctagaaatatataaatatagaac

SEQ ID NO: 21462 - DNA, 122 bp, Homo sapiens
aggttcctcactgcggggcgctgcggccatggcccgggtttagttcgcggagctgcggggcgggactgggaatgccgcactttcccatgcccggtgggtggaattcacagaattcttcctgt

SEQ ID NO: 21463 - DNA, 122 bp, Homo sapiens
tggaggcgcacggcttcatccaccgcgctcccagatggggtcccagcccagatccggccacgaagacacaggcaaccccggcctgggtttcctgttccatgagctccaggaaggcgacagtc

SEQ ID NO: 21464 - DNA, 122 bp, Homo sapiens
tgaccttgtgatccacctgcctcagcctcccaaagtgctgggattacaggtgtgagccaccgcacccagctgattttgaattcttagtggtgttctttgcagcctccatcacagtgtgtaat

SEQ ID NO: 21465 - DNA, 122 bp, Homo sapiens
cggcggctgctcctccctcacccactcctggcaggcaaatgatcccaggatgactcactccgtcctatagggaacagcctctggggcttcaaggctggcagttccaaccagaagcaacagct

SEQ ID NO: 21466 - DNA, 122 bp, Homo sapiens
ggtgggggggcgggggggctcagatatggaggcaaatgggagccaaggcacctcgggcagcgccaacgactcccagcacgaccccgggtaagtttccagccgctgcccaccgcgccgccttg

SEQ ID NO: 21467 - DNA, 122 bp, Homo sapiens
gagggattcggagagaagaaaaagcggatggaccaaggctgtcattcaacacacattcaccgaaggctcagcatgtgtggggcactactgttcctgaaaattcagcagacgaaaaagacttg

SEQ ID NO: 21468 - DNA, 122 bp, Homo sapiens
gcgcccaggaggggccggggggccaggggcagccccgcagccgccctgcctggcaggtcccgagtcctatcatacaggtgcagtttgtctttgttggagtggagcatcttgacatcctccaa

SEQ ID NO: 21469 - DNA, 122 bp, Homo sapiens
acggccagcagccgcgggaggggcacccagccttggtctgccagccacccgcagaccagccgggcgcccgcatcccccatcgcagccacggccaccaccagcgctgctccgtatccccccag

SEQ ID NO: 21470 - DNA, 122 bp, Homo sapiens
agtctctgaagggccgcctggcaattgggagcagaagccagtttcccgccatctgctctccgtggaggcagtgctctcgcggctgctgcccgttggggtccagctgaggaaggagcgcggat

SEQ ID NO: 21471 - DNA, 122 bp, Homo sapiens
gtgcgtgtgcgctcctctgtgttgcttccgtgatagacgcgtggggggagtgtgtgggggcggcaaaaggggaaagaagaaggctggggatgctcccgcaatctcttttcttatcgccgaca

SEQ ID NO: 21472 - DNA, 122 bp, Homo sapiens
cgcctatggtggctgtttggttcacctttacaactcccatgccctgggatccactgagtgcgtcctcccggctgtgatgtcctgtgaccgctatgtggctgtctgccgtcctctccattaca

SEQ ID NO: 21473 - DNA, 122 bp, Homo sapiens
tggtgaacccaggaggaggaaatccccacaagtcgacagaacaccaacggctcgtcggctcgtcggctcttcccggctgaacccaagggtgcttggcttgactcacttccataccaatttcc

SEQ ID NO: 21474 - DNA, 122 bp, Homo sapiens
gtgctggctgcgaaggagaaccgcttaattcaatacagatcagttaagaggatggatttacggttgagaggcaatacattgataagaaactagtcattatgggatgaaaaccactgacatga

SEQ ID NO: 21475 - DNA, 122 bp, Homo sapiens
ccacacctccgggcctcactcgcgcctccccgccaggccgtgcgccccgcgtgcccagggcgggtgggaagtacctgccgccatcttgctcaccagcctccaaaatgcggctggggctcctg

SEQ ID NO: 21476 - DNA, 122 bp, Homo sapiens
cctcctgcttgcttggaatgtgaattcagactttagtcagcaggctaatgcaagggacaccgctggtgcacaggctgcagattaagggcggggagacatcccattattgggtgcacattctc

SEQ ID NO: 21477 - DNA, 122 bp, Homo sapiens
aaaaagaagctgacggccctctttgttgtccatgcctacaccctttcactttcgtttcttcggggcactgcagcagcccttgtccacagaccccatgacaatcgcagaactgaccatgctga

SEQ ID NO: 21478 - DNA, 122 bp, Homo sapiens
ggcacccgcactcccatcaatgatgccagctgaggttccctggaggcttctactgccacccgggtgctccttctccctgagactgaggccacacaggctggtgggccccgaatgccctatcc

SEQ ID NO: 21479 - DNA, 122 bp, Homo sapiens
aattgttatatcattaataataaattgtgctctgcaagaaacctgcgttgcagacatgagcgctacagtgttaagacagctctactacagggtgaatttcacagacagtagtaaaaggggtc

SEQ ID NO: 21480 - DNA, 122 bp, Homo sapiens
cagttcccaggctgcccagagcccccgtcgcgacccacccccaccccggccttacctgtgcgcccccacgcgccctcacccccactgcgcctgcgcctgcgcctcccgggcctagcgagcag

SEQ ID NO: 21481 - DNA, 122 bp, Homo sapiens
aaacacccccctggccaggtgatggagttaaagatgaccttgctcgttgaccgccaaggtcggaagagagctggcggcctcaggtgtaggttccacctgacgccctggctgcaatcatagtc

SEQ ID NO: 21482 - DNA, 122 bp, Homo sapiens
ggagggtgtgcggaaggctggctgtgggacctctggccaagccagcccgcctgccccagccggatactgcctccagaatgtatttctgtaataaggctctctaatgaccccatgcatttttt

SEQ ID NO: 21483 - DNA, 122 bp, Homo sapiens
agaaaattaacttagatctgtacagtgaaggatgcagcccctgaagagaacattaataagcgaaggaaaggaagtcattctgggtaggagaccatcctgaaaaaaagctgtacaaatggaag

SEQ ID NO: 21484 - DNA, 122 bp, Homo sapiens
tgcagactgaaggtgccgttgggagggtagtacttgacctgcagcggctggccgagctcgcggggctggtcctggggaggagaggccactgcctgagtcaggcgggagctggtgtgtgccgg

SEQ ID NO: 21485 - DNA, 122 bp, Homo sapiens
gcagcagaaatcggagtgtgagaggcggtggagtccctcccgaggggaccgggactctcccggtccaggaaagcacgaggacagcttccgacagaccaaatgcaaagagagctggatcctgg

SEQ ID NO: 21486 - DNA, 122 bp, Homo sapiens
ctgtgggacctcaagcaacttgtagcccctctgaagctgttttctcaactgtgaagtggacgcaccctacttcattgattctaagaggcacgcatttccaccttgtgacttctctgaaactg

SEQ ID NO: 21487 - DNA, 122 bp, Homo sapiens
tctgatgtttggatggatgagtttcaaggcttgtccatgtagtgggcactgaggtccagtcgtgtagctgcccaggcagaggaggagacttggctcggcaggagccctgaccccttccaacc

SEQ ID NO: 21488 - DNA, 122 bp, Homo sapiens
aaacctcaagtccaagttctagaagttgggtgatggggtggagccccttagtgggcgcggcggctgtgtgtacagtttatttattttttggattttctgccttgaactaagcattaaacatc

SEQ ID NO: 21489 - DNA, 122 bp, Homo sapiens
cctccagccgggccttgacgtccagtaacacctggtactcctggttctgccgctccaggtcgcagcggatctcagacagctgggcctccacgttgctgatcaggcactgcatctgggccagc

SEQ ID NO: 21490 - DNA, 122 bp, Homo sapiens
attgtttaaaaaggcactttgcagtttacagaatgtttctgcctaggttgtctcaggccccgggatagaaaatggcccacccacttccatgctcagaaactcctgtatttaaaaaggcaaca

SEQ ID NO: 21491 - DNA, 122 bp, Homo sapiens
gcctgcggcggcgcctaggcgcgcggtgcaatgtgggccagcaaaaggcgaggctggccccgccccttgcaccgcccacgtggccagcgccacctgcctcattgtgcccaggagttctccaa

SEQ ID NO: 21492 - DNA, 122 bp, Homo sapiens
cccctctgaggcatccccgctgtgggctctggacagaggtccctcctagggctctatcagcgcaacagctaagcactcaggtgtggtgttgagtgctgccatgcaggcaggaattgatccct

SEQ ID NO: 21493 - DNA, 122 bp, Homo sapiens
aacggagtctccaatggcccgaggaagggagcattgacgccagcgctggggaaagaggaacgccgttagttaagcaaacgtaacgctgggctttgcttgtataaagaaaagccagtcaagct

SEQ ID NO: 21494 - DNA, 122 bp, Homo sapiens
gaggccccatatgagaggaaaagtcatggtaatgtcccagctggttgggtgagtggggggcgcagcggtggtgttcaaaaccagggaagcatatgtgcaatggataggatataagtggcatg

SEQ ID NO: 21495 - DNA, 122 bp, Homo sapiens
cataatctttccgaagcgctgatagaaatggtaattggatgggtcagggaataatacaaccgaagcaggggcaaagcagaatatcgctaaaaaatcaaggtcaaaaagaaaagaacagaccc

SEQ ID NO: 21496 - DNA, 122 bp, Homo sapiens
cgcgaggagacgacctcagggcgtaatccgacgccgtgggttaagacatcagacctcaggcgcagtgcagccggcccctggggagtcaaggaccttgatcgccgataacaagttgccgttgg

SEQ ID NO: 21497 - DNA, 122 bp, Homo sapiens
atcaccccacttttagcacattcagtagatggggccaagctgaggtcacttgctgtgtgacgtccattggagtggcagcagttgaggggcacaaactcagctctgcagcatctagcactacc

SEQ ID NO: 21498 - DNA, 122 bp, Homo sapiens
cggggatcccgggccctcagctcccgcagccgctgcgcccgccccggccccggccgccgccgccgcctcaccctcggccgcctgcaaagtctgcaagagctggcgcgcttcctcctcctcct

SEQ ID NO: 21499 - DNA, 122 bp, Homo sapiens
aaacacttactctagggctgcagcttccgcctctgtctccgctgcctccatctttccaggcgccgagttcagctgccttcccacaatccctaagattactttgaagtcacagtcgacttcgc

SEQ ID NO: 21500 - DNA, 122 bp, Homo sapiens
cttggggcccctagtgaggaggccccaggcgatgggagcacggcctggtgagtctggtgccgctgcctccccactggccctgcaccaggtctcaggatgggatcatgcctttgctcctcttg

SEQ ID NO: 21501 - DNA, 122 bp, Homo sapiens
gccacctgccggccgaacggcaggccgccggctcgggcgcgggcctgggtcccggaggcccgacctctgcagttgctgagcggcctcaacttcaagtccccttcggagaaagtagtccttct

SEQ ID NO: 21502 - DNA, 122 bp, Homo sapiens
tctatttacttaaagacggactgccagacttccataaacacttgtgagagaaagacagtccggttcgttgttctctgcccagccattatccacggtgtttcaagccttctgtattttggcct

SEQ ID NO: 21503 - DNA, 122 bp, Homo sapiens
aattctggtatatgctcttcagctctactggactgtggtcaatgttgcctttgtgaacaccgcaagtcttccttgacttgagatttttcttggtctgtaagatttgagatttttgtaatgag

SEQ ID NO: 21504 - DNA, 122 bp, Homo sapiens
taccagtcctcgaagcccttcctgactctcatggtgagccagctgacagtcttcagaatccggagggcacacatgttcttcctgtgcccggcctgatcggggcactcctgggcttgcaggtc

SEQ ID NO: 21505 - DNA, 122 bp, Homo sapiens
catcttcagccccgctctggtttcctctctcaggacacacttccctcttcatggtgattgcgttctcactctatcaatgaggtattgtccctctttttactttctcctccttcccaaacagg

SEQ ID NO: 21506 - DNA, 122 bp, Homo sapiens
ctcacctcctacctttaccctcccgccccgccgccctccgcacgtgcgcccagcggcgtgcgcatgcgtagtcgaaccacattcgcgtctcccgttcgccctctggtggacaccggagggaa

SEQ ID NO: 21507 - DNA, 122 bp, Homo sapiens
ctcaccacccggaggcggcgttagcagcagcagcaacagcaacggcaacaggatccgcggcgcggggaccggcgcagtcatggctgggcgggcggacgggcggacggacgcgagcgccgggc

SEQ ID NO: 21508 - DNA, 122 bp, Homo sapiens
caaggttctctaccgcctcaagtgagtcgcgccgcctcactggactcatggactcgcccacgcctcgcccctcctgccgctgcctgccattgacaatgttgctgggacctctgcctccccac

SEQ ID NO: 21509 - DNA, 122 bp, Homo sapiens
ttggtcataggaagcccccagtggtaccttaatagttgtgagcatgtctaagtgagcccacgtggtggagatgtgatgtcagagatgggaaatgagggagtcagaagtggtctcaccatgtc

SEQ ID NO: 21510 - DNA, 122 bp, Homo sapiens
ccccgacgaagccgggcagatacctggtccagcagtgctgcaaggcgcaaatgaggcgggcgcggtcccctccccgaggcgccaagtgcttctctacccacccgcagcggtggtttctctct

SEQ ID NO: 21511 - DNA, 122 bp, Homo sapiens
aataaaaagaaacaaactgttgatacacacaataacctagatgacttcagataattatgccgagtgaaaaaaggccaacctctacatgttaaatattgttgggtgtggtggttcacacctgt

SEQ ID NO: 21512 - DNA, 122 bp, Homo sapiens
tctggcgcgcgcgccccaccccgccccgggtgagggaagagggagcgggcaccccgcgcccgcgccgccgccgtggaccaaggttgtttactactttccactccgaataacacgccaatcac

SEQ ID NO: 21513 - DNA, 122 bp, Homo sapiens
cctcgtaagccgcattttactgctgctattgattcggcctgttcattcctccctcgcacacgccgccgtcttctggccttgcgtcgctgaagtgcagcgcactgatgtttctgatctcgctg

SEQ ID NO: 21514 - DNA, 122 bp, Homo sapiens
cgcagccgggatgcgctcggcagccaacgtgacggggctgggcgcgggcggctccgcgagcgcccagcgcccgcgaggatttgccggttctcctcacacccgagcgctccgctcagaagtcg

SEQ ID NO: 21515 - DNA, 122 bp, Homo sapiens
cccagttcagtgacaactaaatcataaaccaaccattgattgtttcagcctagttcaaaacgaggaggtgggtgaatcagatttctttgggaacttcaatgaaagaaaacaagaaccttctg

SEQ ID NO: 21516 - DNA, 122 bp, Homo sapiens
agggtacaggggctgcccttgtcccccagctgccagagactggatcctcacatggagccccgcccggtttgtccccaccagggcaggacttggataaaaagtctcaggagaacaaagaccac

SEQ ID NO: 21517 - DNA, 122 bp, Homo sapiens
ctccccacgttcccagctgcgcactggacacacccaagtcacactggacccttcctgatgcgccaccgccacggagggtccaaaccacttccggctttagatggctttctgcttggcccacg

SEQ ID NO: 21518 - DNA, 122 bp, Homo sapiens
tttaagtttgcttcattcccagaaggaggtggataggctttcctgggcaattagggatgtcggggtgggtggggagcatctgcttaactcccagtttccaggcagcttgcttcaaaatgttt

SEQ ID NO: 21519 - DNA, 122 bp, Homo sapiens
agttgttgagaaagcagaattcaataccagctttagctagatattgttgatctctgagtacgtatgtagagcacttgttgctagctaatacatgacttccttgggtttcttgttagttgcaa

SEQ ID NO: 21520 - DNA, 122 bp, Homo sapiens
gtcacagttacccatttaaacccgcacagagaaggctgcctcaatctggggctgactgagcgggaagatgcagggcaactcgaggatggcccggggcagccgccctgggtcgcggaagccca

SEQ ID NO: 21521 - DNA, 122 bp, Homo sapiens
aggaaggaaacgcacatttcacacgttagcctggcgggacctacagccggcgctgtaaggcggcagctccgtgcggcacccaccttggagccccgctcgttaaaaatgatctccacgtctaa

SEQ ID NO: 21522 - DNA, 122 bp, Homo sapiens
acatatgcacacataccagatacttctgagtagaagctcagtgatttcacggtggaagtccgagcctggaaggggactgttggagagatgaaacacaagtgactaaccaacaaccaccaaag

SEQ ID NO: 21523 - DNA, 122 bp, Homo sapiens
aaaaggctggcatgggttttgaaaagaggtgaaatatttagtgaaacaaaagggagtgtacgaaggaggagggccccaagctccgcgtcctgattccctgtatcctcccacaggcccgaggt

SEQ ID NO: 21524 - DNA, 122 bp, Homo sapiens
gtaactggaaggccccgaagccagcttccagcaggcagggctgggaggttgaacttgagccggtttgggagccaggagcgagtgggtgacaggtcattcctgactgggaaggttgcttgaca

SEQ ID NO: 21525 - DNA, 122 bp, Homo sapiens
agctcagtgcgcaggttgaaggttcggggcagccagggtgggccctcggggccacctgcccggcgcgcgatggaggccaggcagtccttgacagtcagcaggttctcgcaggggaactggtt

SEQ ID NO: 21526 - DNA, 122 bp, Homo sapiens
cccttttgttgcaaaaggtttaaaagaaaaaaatctgaccaaccctgtggagagaaacagcggaccttagttttggttctgggaagttgggctcagaacagcttctgggtgtccagggacag

SEQ ID NO: 21527 - DNA, 122 bp, Homo sapiens
gggaaagatagggggacaccgggaaaggggtgcctgacgaacagggcggcggcacacggacgccctggtagtaacagaggaagggccgggcaggaagttccttgaggtagggtactgggaag

SEQ ID NO: 21528 - DNA, 122 bp, Homo sapiens
ccagcagagggggcaggaggctggccagcccagtcctccctccaggagctggaaccatcccgcagacacagtccactcctgcccactccgaaacacctctgagggtattctctcagcagtag

SEQ ID NO: 21529 - DNA, 122 bp, Homo sapiens
gtccaggggcttccttggaacgtggagacgtgctggttaaacgtggagccccgggccagccgggcactgggggctgcaggtggagggaggtggatgctctccctcgtgggggcgtgtctttt

SEQ ID NO: 21530 - DNA, 122 bp, Homo sapiens
acccagtgaaagacgaaaagtttgagtggctgctgggctcgcgggcggctcgcctgactccggagcagctggaggaacccgcctcgaggttagggtctcgccgcgcccccacgacggctgtg

SEQ ID NO: 21531 - DNA, 122 bp, Homo sapiens
tccaagttagaggggactggcaaagcggttaggctttccattgaagctgcagaagggctgcgcctcggggataaagaacagtcccaggactaagggattttccttagatctcagggcaaaag

SEQ ID NO: 21532 - DNA, 122 bp, Homo sapiens
tcaagaggcagcccctctagaaaacttccttcccctcctcccctgccccggtacatattgcgcggcccttactgttgctgtgtctgtcctgtcatctggaggtgcacaactaccccatgctt

SEQ ID NO: 21533 - DNA, 122 bp, Homo sapiens
tggcggtttcctgtccgggctggcggggccgccagtcggcgtggggtgcggcaaggggagcggggcgctgggtcagccgagggccgggcctcgggggcgcagccggactggacggcggctcc

SEQ ID NO: 21534 - DNA, 122 bp, Homo sapiens
agtgtgagcgcctccgcctgtccactgtcccccaaagtcagttcaatccccgacgtcctccgctaggctccaccccaccggcccgggcagggcctccaaggcacctcccacctacgggtcac

SEQ ID NO: 21535 - DNA, 122 bp, Homo sapiens
ggtttaaaataaatttcccttcaaaccccgggcttgcagttaggctaacctgaaagccagcggccgccgagattcactggggttgtagttcccccctctccccttcacccgcctacccctca

SEQ ID NO: 21536 - DNA, 122 bp, Homo sapiens
tggtgcagggaaaggccagaaggtggccaggcgcacctgagaagggggacccagaagccccgggacccaggagccctgggcaagccaccagaaaccttgttcttgcaactctctgcagtgtg

SEQ ID NO: 21537 - DNA, 122 bp, Homo sapiens
aggagcccacggtggtaggaaagtggcgaggctcataggtggccaagttgaccaccagcacgtatagggcccctggggacaggaagaagggctggatcacctcataactttcatccccagct

SEQ ID NO: 21538 - DNA, 122 bp, Homo sapiens
ggtctgagacacactccctataggagacagcgacagaggtggggtcagcacacaagtccccgaaagcaataacacaaagccagcaggtcagggagagggcaagtgagtgaccgtctacatgg

SEQ ID NO: 21539 - DNA, 122 bp, Homo sapiens
ttaattaagatcacacattaattagcaagtggtgggaacaggatttaaaccccagaaacccggttcccaacatgagttgttaacactgtgttgtactgctcttgagttgaaaacatgtctct

SEQ ID NO: 21540 - DNA, 122 bp, Homo sapiens
gattcctttaccggggcctgctaggctccggcccacgaggcaggactggcggcgttctcacgtcctggaagtcaaggccccaaggggaccgaggcgctgcccaggctcccctgactgccagc

SEQ ID NO: 21541 - DNA, 122 bp, Homo sapiens
ccctggaggtcaggggatggagctgaaagtcccaatgctctaatcctgccttattctttccggggaccagctcctatcctgaagctctagaggctgccagccctcagtcaactcattagtgt

SEQ ID NO: 21542 - DNA, 122 bp, Homo sapiens
aaactgtggggactccgccctattccatcttgggccgctccatcacactacagggagaggcggtatagtatagtggttgagagcctggactctggtgctttgggttccagtccaagctctgt

SEQ ID NO: 21543 - DNA, 122 bp, Homo sapiens
caggagagtcttctgggccacagctcaggtggtgccatggagttagggccagacaccgggcgtgaggcatgggtgtgggggctgaggctgctgggccaggtcagcctgaggtttggctctcc

SEQ ID NO: 21544 - DNA, 122 bp, Homo sapiens
ggggccctgggctggtgactcagccaatgtgcacagcatcaaaacccaggttcctcagtgcgctccctctgcagttcaggagagcgctacaactcaccccataaatcactgattaaaaaaaa

SEQ ID NO: 21545 - DNA, 122 bp, Homo sapiens
cagtagttctcagaaaccgcttctaaataccagctccaacaggcttgtagcgtccgagtgcggataaggcaagagcaaaaacgagcatagtttgggccgttggggccaaatctgcacttctg

SEQ ID NO: 21546 - DNA, 122 bp, Homo sapiens
acctggacaaacatgatcccttggaggccagcaaagagcagagcaggagggcctgggcagcgccagctggcggtccctccccctgggctggaggaagacactatttatagttcccccttggc

SEQ ID NO: 21547 - DNA, 122 bp, Homo sapiens
ccatcacaaagctctaaagttccaggagcagcaaaatccaaattctctttgtgaggtgggcgaaggaaatagccgggaggcttcactcattgatagtccaggtgttattccaccagcaatca

SEQ ID NO: 21548 - DNA, 122 bp, Homo sapiens
gggctctcggcggtactcctgggtctcagaggagccgctgaactacgtgggctggcaggacggggagccgcagcagccggggggctgtacctacgtagatgtggacggggcctggcgcacca

SEQ ID NO: 21549 - DNA, 122 bp, Homo sapiens
acctggggcgcgggaaggagcccgctgccgtctaggcccgcgaagggccccggcagccgccgacttctgaggaaaagcagaacggtgtttggtttactaaagtagccgcctcctaccactct

SEQ ID NO: 21550 - DNA, 122 bp, Homo sapiens
ctgcgggcttaactgagataatctgtaaactttaacacatggtgggaacttaaatattaacgccagtattaccactggtagggtgcatgagatcgcacgatggtgccaaaggtgtctctcca

SEQ ID NO: 21551 - DNA, 122 bp, Homo sapiens
gcctcactgtgccctgctctccgcacacgccctgctctccagctacccctggattctcctcgaaggcctccaggccatcacacatgcagggccatctgcccagaatcctttcctctcactaa

SEQ ID NO: 21552 - DNA, 122 bp, Homo sapiens
cgcggagttgaagagcgattcaggttcaagtaacactagtggagtgccaaaccaggacaccgaatcctaaacccatattcccaggccccgtcccggaagtgccctgcgcgttactattgacg

SEQ ID NO: 21553 - DNA, 122 bp, Homo sapiens
cgcctgcgccttgtgtcacgggccgaaggaagtcagctgtggggtagatttgtacgagatcgctggaccctaaggaacccagaaaatgcaagcaaggttatgtgttacaagacattcttgtg

SEQ ID NO: 21554 - DNA, 122 bp, Homo sapiens
cccccgcagaggcaggtgcggctggctgggcctcgcggggaagggctctctgggcggagtcggggcactcggggcctggggcgtggtcgccgggctgccgtgcgctcgggatcagtcttttt

SEQ ID NO: 21555 - DNA, 122 bp, Homo sapiens
cttccctcccatcaccacgctctccgtctcccgtctgccggtccctccctcgttccctttcggaaaaccgaactatttccaacttgtgaactgcagctgcacttcccggggcagaacccggg

SEQ ID NO: 21556 - DNA, 122 bp, Homo sapiens
tgctaccaccagggccttcatgggggcgatgcccacttcccatgccaccgccagggccttcgtggggacgatgtccactgctgttgcccatgcccccaccagggccttcgtgaggacgatgc

SEQ ID NO: 21557 - DNA, 122 bp, Homo sapiens
ggcgctactgcaggcacagcaggcctaggtcctcccacacctgccccctaataaagtgggcgcgagaggaggctgctgtgtgtttcctgccccagcctggctccctcgttgctgggctttcg

SEQ ID NO: 21558 - DNA, 122 bp, Homo sapiens
gagcgcagtacgggagcggcaccagaggggctggagttgggggggagtgctgtggatgagcgggagaacaatgacacaccaactcctgcactggctgtttccagaaatacgagttggacagc

SEQ ID NO: 21559 - DNA, 122 bp, Homo sapiens
tcttctccccagtacacacacacacacacacacacacacacacacacacacacacacacacgaggagcccagccgttttccaccagctgtggatgttatttttaaaagggaagctggaactt

SEQ ID NO: 21560 - DNA, 122 bp, Homo sapiens
tgcctgccccacccccgccagactccggcctttgctccgcacctggccccggccccgccccgcccctcgaaactcacctttgagtcgcatcgagtcccagccccgccccggccccgcccctc

SEQ ID NO: 21561 - DNA, 122 bp, Homo sapiens
ttcggccgccgcagcttttctgcctccgcattcgggcactaaccaacctcccggcgggagcgcccagcccgagtttacctgcaaaaatgcggtccctgggatgccttcgcgtcttctcttcc

SEQ ID NO: 21562 - DNA, 122 bp, Homo sapiens
ccataatgcctggcctctgctagttctgtattctctagagttgtctttactttgtgctagcgtgtccctcattgtgctaatcctctgtaaaaattaatacctttttttcttttcgagatgga

SEQ ID NO: 21563 - DNA, 122 bp, Homo sapiens
tggcagcccctgtgacagccagaccgctgccctggcccctgatccggccgtggggccactcggctcccaggcctctgccgtgtttatgaatccagctgatggatgagcaggacgtgtaaaca

SEQ ID NO: 21564 - DNA, 122 bp, Homo sapiens
ctgacagtagacagatatttatagatggaggtgggtatagaggaagacaaaatgaattaacgtacttgacatctgagaactgtctaaggatcctaaaaacaagaccctcacagggaagcaac

SEQ ID NO: 21565 - DNA, 122 bp, Homo sapiens
cgtttgagttcagagtacagctattctctctcctcgtaatgtaaacacaggttcccacggcggcaatgggagactcccctaaggggctcttgacgtacagggagacttccagatatggtaca

SEQ ID NO: 21566 - DNA, 122 bp, Homo sapiens
gctcactggggtcactgattgctgcatgcaggagcttcctgtggagtttcatcactctggcgggcagcactcttaataggatttttacagtgtaacttagcttgaacccacaagaaaaacat

SEQ ID NO: 21567 - DNA, 122 bp, Homo sapiens
gtccatgatattattgaccttgaatatctttcttgacaggagcagagtcctcctggccttcgaggcttcccatttcgcactccactaaagaaaaatcaaaatgcttctctttacaaagactg

SEQ ID NO: 21568 - DNA, 122 bp, Homo sapiens
tgctcgagtcccccgcccccctgtgtttctggccgtgccgcacctgcatagcgctgatgtcggcgttctgcttgtcctccagctcctgcagctgcttctccagcgcttcattcatgccccgg

SEQ ID NO: 21569 - DNA, 122 bp, Homo sapiens
gggggcggccaggacttaggacagggctggggaaagccgccaaggtggcgcccatctgagcgacaggagggagcggccctggcaggacggacgtgggaactgcaggggcacaggccctacgt

SEQ ID NO: 21570 - DNA, 122 bp, Homo sapiens
ggctggtgtaccgcacggtgtcgtccatgctgcagctgatgagctgccccgactcatccacggtcatcctggacacctggttcgtgtggcctttcccagcgaaggagtcgttctcccccgtc

SEQ ID NO: 21571 - DNA, 122 bp, Homo sapiens
aataaatgtctggtccatgcgtgtgttggggggcgacggggacttttcttcaaccaagcccggtgtgccccctctcattttctagcacgttcttctcccccatctttgcacttatctcagac

SEQ ID NO: 21572 - DNA, 122 bp, Homo sapiens
cttatctcttgtctctccatcactctctgtgtctcgctgtctctgtgcatttccatgtctcgaatatgtgtgtgtttcaatctgtctctctgcctctttccattttctcctctctatccatc

SEQ ID NO: 21573 - DNA, 122 bp, Homo sapiens
ttgagacagagttttgctcttgttgcccaggctggagtgcaatggtgcaatctcggctcacggcaacctccgcctctcatgttcaagctattatcctgactcagctgggattacaggcaccc

SEQ ID NO: 21574 - DNA, 122 bp, Homo sapiens
ttgtctttaacttacaagaattgccccagtgtattgttcctgtagtcatgctgcctaagtcggccagaattctagagggtccccatccctgagcaaaaaacaaacaaacaaaaaacaagaaa

SEQ ID NO: 21575 - DNA, 122 bp, Homo sapiens
gcgggtaggaccgaggagcaaagcattatcgcgagatcagggccactatttgagcgcatgcgcaagacatgctagtctcttttccggttagcgcggcgtgagaagccatgaggtgagttggt

SEQ ID NO: 21576 - DNA, 122 bp, Homo sapiens
gctccgtgtattgcagagtgcctcgggcccgggcctggccttcgtcgtcttcacggagaccgacctccacatgccgggggctcctgtgtgggccatgctcttcttcgggatgctgttcacct

SEQ ID NO: 21577 - DNA, 122 bp, Homo sapiens
tttaatccagattaaagatagcaatttagagatgggtagagcaggtcattagaaatgatacgggtatcctacctggaacagagtgaagaaattttagtcttgggacatttagggtggtggca

SEQ ID NO: 21578 - DNA, 122 bp, Homo sapiens
tggggagaggtggctgctgggaccgaggccacatacgctccgcttgggactctggctttccgtctgaagcacagattcccagagagacggggagggcgggctggagccaggtcagcggagag

SEQ ID NO: 21579 - DNA, 122 bp, Homo sapiens
gtcgggaaggcgtcagggctcccggttgctgtcagtcgcccgtgagacccgagcagcagtcgctctgttcttgtgatcatggctgagtgggatccagtgtgagtctccacccggcctgttac

SEQ ID NO: 21580 - DNA, 122 bp, Homo sapiens
attttacatctttccttaatgaatcgtgctgtttcttccctacggcgatatacagacatacgcttttcttctaaaagtttagagttttgtttgtcacattttggatcattatttcatttgga

SEQ ID NO: 21581 - DNA, 122 bp, Homo sapiens
tttgctgatcccggcccgggcctccggagccccaggttccattctgatttcctcagctcccggcttcttgcattcagtagcaataataccaggtacacgcatgtactctgtagtggacgcct

SEQ ID NO: 21582 - DNA, 122 bp, Homo sapiens
aaaatagggacagtgactgcaatcaaaccgcagatcacagcgtgcatggacagttaactccgcattttacaagtaaatatagtgggaagaaattcttggtaaagatatttagcaaagaaaat

SEQ ID NO: 21583 - DNA, 122 bp, Homo sapiens
gcccgcaggcaccgcggcctcgggcctcccctgacgacgccctcggccccgcagcccgggcgcccgcgccaccctgtcctgctctgcgcccgcctgtccagccccactcaccgcctgccccg

SEQ ID NO: 21584 - DNA, 122 bp, Homo sapiens
gctttaacagtggtactacaaaagatcatctcttttacttttaagaattctagagtaggccgggcacagtggctcacgcctgtaatcccagcactttgggaggccgaggcgggcggatcacg

SEQ ID NO: 21585 - DNA, 122 bp, Homo sapiens
tgctgcagacccgcactcggcccctgctcggcccctgctcctgcagagggctggggacgccgccacgtttgttcctagacagacagttgtgacagtagtatttttatattctgcttaaccac

SEQ ID NO: 21586 - DNA, 122 bp, Homo sapiens
ctcttgtgtctaaaactatgcatgaaaagtagcaatcaggccctacccgctggtgactttcgcatgggagtgaaaaacagcgctcctcagatcaggaattaaccgaaagacatataataaat

SEQ ID NO: 21587 - DNA, 122 bp, Homo sapiens
aagtcggggccaaatccagagacaagagggctgtgcctgaaactgagcagtttcaccactcggcactcctggcggaaacttccctttaaaaaaaagaaaagaaaagaaaagcaacagcactt

SEQ ID NO: 21588 - DNA, 122 bp, Homo sapiens
gccgccgcctccgccgctgccgccgccgccaaggagagaaccctgccatcgcgcctggcccggcccagcccagcccctaggcaacctgcgcccgccagtgcaacagagtgccccaggcggcc

SEQ ID NO: 21589 - DNA, 122 bp, Homo sapiens
ggtgatgttggccatgaggtttcacctaggccaccaaggagagttttggagtcagtgtaacgcgtccctttgtaatgagtgtttagtgagtactcacatttgtgtatgctcattgtgctaac

SEQ ID NO: 21590 - DNA, 122 bp, Homo sapiens
ccacggggattccgtcccagactccggaggccatcggggaccatgaaatcacgctgacctcgggaggccggagacaagcagccatgtgacctaggcaagttcatgcactctctgggccttac

SEQ ID NO: 21591 - DNA, 122 bp, Homo sapiens
gctccggtagattgcaaataacctgctttctttctgttcccgagctgcgttcggacccgtcggatcgtaaatcccacgtaaggtcggaagatttgaactttctacttggacacctaacaccc

SEQ ID NO: 21592 - DNA, 122 bp, Homo sapiens
ggtggataagagcagatggaagtcaccgtcttaaaggggaaagataggcaaaggtagagacgtataaattcatatgatgtgaggaagcccatgatgaaatcagcttgacaaatagagggcat

SEQ ID NO: 21593 - DNA, 122 bp, Homo sapiens
ttgaaggaaagaccccaggaaagtgggatttgggtgttcgggtcacgagtgggctgaaggcgcctctactcacctgcacgtagtccaccgaatctccgagcgccttgaaggctgtgtacatg

SEQ ID NO: 21594 - DNA, 122 bp, Homo sapiens
atgatgggcacccgagtcatgagttacagtcagagcccccaacgttggcagggacgaggacgggcctggagacacagcgtcagcctcagcgcttcctcagcgacgcccctgggaggggacgc

SEQ ID NO: 21595 - DNA, 122 bp, Homo sapiens
ggggtttttgtgaaggtgagcacagcagacagggcaacctgccacagagcataatgttagcgtgtgcctctctggggagggaaccccaggggacaggtgttcatttttcatttcattttcaa

SEQ ID NO: 21596 - DNA, 122 bp, Homo sapiens
tttccatgctggccatgttatttctagtcgcagatcctctggagggtgtggggggggtgccgccccaactcttggagattccaagcaaagcagctctgagaataatgaggtttctgaccccc

SEQ ID NO: 21597 - DNA, 122 bp, Homo sapiens
ttcctcccggattcagtgagcccatctctcttatgccaatttatcctggcctagcagctccgttcatgcacaactttattcttcattgtgtttgtttccacctggacacacagaagtgacca

SEQ ID NO: 21598 - DNA, 122 bp, Homo sapiens
agtttaaaggcaagaaggctagggtcacggagcaactgctatgggaaaggtgagccagcgcgacagcccccaccccagaagaggcccggggcaaggggatgcctgcagcttggctggtattc

SEQ ID NO: 21599 - DNA, 122 bp, Homo sapiens
gggagcgcccacagctcggagccaccaggcgctgacgaggagcccggctgagggaggatgcgccgctgacgcctgcgggagccgcgcgcctggggcgggaggatgctccagaggggcctctg

SEQ ID NO: 21600 - DNA, 122 bp, Homo sapiens
catgtgccgccagctcaccagggtgatatcactgggctccagcaagggcaaggccagcttcgcaggtgacgatgccccgtaggccgccttcccctccatcttggggcgcccgcgacaccagg

SEQ ID NO: 21601 - DNA, 122 bp, Homo sapiens
ggggggcaaagctgtggggaacggttgaggggaaggaacaaaggaggtcagtactgggaacgctgaagatgggaggccatttcataacatttcttgttgatgaaactgccatggacagcttc

SEQ ID NO: 21602 - DNA, 122 bp, Homo sapiens
gaacctggtcctgcacaggaaccttggtcttagaccggacatgttctttgatttttttcacgctgtcatatgggttggcatcaaaggtcattaaatcccattcctcggaacggacatgcacc

SEQ ID NO: 21603 - DNA, 122 bp, Homo sapiens
tcgcttcctaaaattttgcaaccacatcttaattcttcttcaacttgtaaaattataaaacggtgggggctggttttaaaaaagaatctccctttaaagtattctccaagtttatctctcta

SEQ ID NO: 21604 - DNA, 122 bp, Homo sapiens
tctgtttgctgctgaattcgtactacgaaagggtcggtcgatggggggatttcaagtgggcgccaaggcccatcagtctttctccgctgtcagtgataagaagccaacaggagagcaacggg

SEQ ID NO: 21605 - DNA, 122 bp, Homo sapiens
atcacgtgatctgcccgtcttggcctcccaaagtgctgggattacaagcctgagccaccgcgcccagcctggtctaaggaatcttatagttaaggtaaccctgttttccaaaccaaacacca

SEQ ID NO: 21606 - DNA, 122 bp, Homo sapiens
agggcggaaagcagtagcgcacagaactagtgtctgcggggtcccgggcgctctcgccttcgccctgggctcctctaattagagaggggatgcagggtggcattagttcccaaacgttttaa

SEQ ID NO: 21607 - DNA, 122 bp, Homo sapiens
gcctgtttctcggccaggggagcaaggccacgcggcctacgcagccgagtcggaaccaaccggttgtttggtgaaacctaccccagagcctcccgcggcccacagagcacaggtgaggcagc

SEQ ID NO: 21608 - DNA, 122 bp, Homo sapiens
cgagatcccgggaaagctggttcggcgggtcggtcacaccttcctcttctttttagtgttcgttcctggaagaatcatggaagaaatggtcttggtggcttcctgcgccctcctcagcgctc

SEQ ID NO: 21609 - DNA, 122 bp, Homo sapiens
gtgaggccgtgggtgatgagggagaagtaagcgggagaaggtggtaataaaggtggtgggcgacatccttgtcactgtttcttccaggacgcgcccagtgtccccagccgtctgctgctttt

SEQ ID NO: 21610 - DNA, 122 bp, Homo sapiens
tcagggggattccaaatcagggaccagttaatcctgagaggataatcagggtggcgtagacgtggtggcatttgagttgggccatgaaaggtaggtcagggctgattacgaagtgagctaat

SEQ ID NO: 21611 - DNA, 122 bp, Homo sapiens
gggtccgggccggaactcggcagaaggacgagcagctccttggggccggcagtctcccatcgcactgagattgacacggcaatgtttcggatactctgggtaaaaattaaatgtcttacgaa

SEQ ID NO: 21612 - DNA, 122 bp, Homo sapiens
cttaccctcccaccaatcacctcttgggctgagcagaagcacatggaatcagactgggcacgagaacaacagagagaccctggctttgcatggtggagaccccctggatgagacttaccctc

SEQ ID NO: 21613 - DNA, 122 bp, Homo sapiens
acaagcactgaccagtggctttgtcgcactggcagtcagagccgttacagtgctcttgcacggtgcccaggtaattacagacacactctgcaaaagaacatcacatttacttattgtcacac

SEQ ID NO: 21614 - DNA, 122 bp, Homo sapiens
agaagacccaatcacagtgactataggtaacctgcagtgtaagagaaatgctttattgggcggaagcttctgttctcagttgtgtcgctcagaagtgtgggtccctagacaccttattttcc

SEQ ID NO: 21615 - DNA, 122 bp, Homo sapiens
gaagtgccgaggaatgcctagcacaaccaagagcttgttgaacttgtcacgctttactgtcgataatgtgcattaagcaaacgctagttttatttgtttatttcatcttctaagtataagaa

SEQ ID NO: 21616 - DNA, 122 bp, Homo sapiens
cagcactcccgcgcccatccacagcaggagccagggcagggcttgggccatggtgggccccggccttcgggccctctgggctcgcactggcccacgtccgtccctggcgcctgcccccaagt

SEQ ID NO: 21617 - DNA, 122 bp, Homo sapiens
catccctctcaactcgccccttgcttcgtggacagacgactggggccggagacgtccgtccgaggagacctttcagagtgtcagcctactactgtcccgccgaagccaccaaccgaagttcc

SEQ ID NO: 21618 - DNA, 122 bp, Homo sapiens
gctgcgggagacagcgctgctgcagggcttggctgaggtggccgcgagcggagctgcacgcgcgctcctggggggcgtggttgggatcggcttctgggagcccctccagcagcgctgtctct

SEQ ID NO: 21619 - DNA, 122 bp, Homo sapiens
gatggctgtaggtaataatagtggccatgcaaatcatatttcatgacagtttttgaaaggcgccgtttccacctcgcagttccagtgcaggcgggtgggactcagtggtgtgtgtgtgtgcg

SEQ ID NO: 21620 - DNA, 122 bp, Homo sapiens
tgctcccacggcgggtggtgggatggctccacgtggtcacagggccaggagcaccagcaccggctgagccttcttagaaatgcagagtcccgggtgcaccctgcctgctgtgccgcaccggc

SEQ ID NO: 21621 - DNA, 122 bp, Homo sapiens
ttaaccctgtagtcactttctactaaccggcggggttaagatggggtttctcaggccgggcgcggtggctcatgcccgtaatcccagcactttgggaggcccaggcgggccgatcgcttgag

SEQ ID NO: 21622 - DNA, 122 bp, Homo sapiens
tgaactgtggtgcaatagttgtaatagaggccaaagccaattccatggctggagctgagacggcccttcagaactgggacaagccaatgcatcaagtgggcattgattgtgggctgctcttt

SEQ ID NO: 21623 - DNA, 122 bp, Homo sapiens
tggcagagcctaagagcaagtcactgccccttccccgtaccagaataagtcctctaggctcgcagaatgaaattatattttaaaagtttgtttctacatctatatataaggagcactccctc

SEQ ID NO: 21624 - DNA, 122 bp, Homo sapiens
atgccttcgaacccagcagccaaacttccagaaatttatcctactaatataatggcacgacgatctaaagagatatgtacaaggatgttctcgacagcctttatttaataagatgtggaaag

SEQ ID NO: 21625 - DNA, 122 bp, Homo sapiens
gaaggctaacccagacacggtcttgcagggcactgacagattcctctccattcccgcagccgtgcctgcgcgggcgtttcttcacagcctcaccccagggcaggcctggtgacccgccgaga

SEQ ID NO: 21626 - DNA, 122 bp, Homo sapiens
ataacaattgtcctaccctactggaaaatagtgttaattattattcagttctatttccatcgtgtgtcagctcgggtgcgagttcgctgggttatgtaggagccatcagacttaagcagcca

SEQ ID NO: 21627 - DNA, 122 bp, Homo sapiens
ttctggtcagactttaacagacgagctacacggtctaagccagctggggctcaccagcgccgggcaaggccagacctgcgacctgtcgagaagatgtggtcctccaggaaagctctacttca

SEQ ID NO: 21628 - DNA, 122 bp, Homo sapiens
ctgctggaagagccacagctggggatctcagggagcccaaggtggctcctgcctaatgtccgctccagagtgggtaccccagggtcagctcacagagtcccctgttcccctcttctgtaggg

SEQ ID NO: 21629 - DNA, 122 bp, Homo sapiens
tgtgctctgaaagaaattattttcttatgagtatcactctgttcctccttccctaatgctcgccactctggtaccattgctactgatgtcacagcttcttttctggctcaagtcactcctcc

SEQ ID NO: 21630 - DNA, 122 bp, Homo sapiens
acacccaacaggtagcccaagacaagagaagctgtgttttgtcctctgcccacctagccacgccttcctagctccttccaaggcttaagtgggaagtattcaaaactggtccatgcacatga

SEQ ID NO: 21631 - DNA, 122 bp, Homo sapiens
tccaagcgtgctttgggggaccctgccactcccacggaaggtcctcgccgcccacctccccgtcctccctgtcggctcagcatgggccgccgtcacaaactctgtagccctgacccgggcca

SEQ ID NO: 21632 - DNA, 122 bp, Homo sapiens
tccactccctcttgccaacatagagtttaaaatatctaagtactggctcccttggaataccgggaaatcctgcaagttttgattgccataattcctttgtggccctgttgatgagccaactt

SEQ ID NO: 21633 - DNA, 122 bp, Homo sapiens
cccaaatctcaccactgaccaagatagccctctgaccacagtgggctcccccagccaccacgatggtaccccaactgctatgaaaggtcccctgaccacaacaggcaccctgaccaccatga

SEQ ID NO: 21634 - DNA, 122 bp, Homo sapiens
actgttgggagtctgcaagctggcgtgactttggtgcaagcagccgcaggaagaggctgccgccagagcgggcaggaaagggcgcgttcccacatatgtccactagatggcgccccaacacc

SEQ ID NO: 21635 - DNA, 122 bp, Homo sapiens
agtcccgaaggatgggctcaggagccccagtgtgctctaccacacaggtgtaagtgtccccgtaagagggggttaaggctaaatgggagagggtctggtatgtccagtctccattgggctgg

SEQ ID NO: 21636 - DNA, 122 bp, Homo sapiens
cttggggccgtcgtggggctggtaggggtccccaggctatctccagccgtggccgatggccgtgccgggggcagagcccgctcccctccgcgcgttgctacgtgcggggatgacatggatcc

SEQ ID NO: 21637 - DNA, 122 bp, Homo sapiens
atgatggaggagccaggtgtggtcagaatttgccagggaacagtgaccctccaagagggccgctcagggaagcttcatagaggaagcagcgcttgggcgaggacttggggttgggggagggc

SEQ ID NO: 21638 - DNA, 122 bp, Homo sapiens
gctgggcttggcagcgggagcctgtagtccctgctactcgggacgctgaggcacgagagtcgcttgaacctgggtggcggaagttacagtgagctgagatcgcgctactgcactccagtctg

SEQ ID NO: 21639 - DNA, 122 bp, Homo sapiens
agtaggggcctccacacacaaaacttagccttccaaaccaacagaagccatcccagcctccgcacccctgaccgacccaccagcatgaagacagcaagctggccaaatctctattacaggga

SEQ ID NO: 21640 - DNA, 122 bp, Homo sapiens
catggccacatgctagactgcttccccactgcccacagggagctaagggaaaccatagctcgtgcctcatgatgtaagtaaggatctgtgggcaactgtgattgccatttgcttttgctttt

SEQ ID NO: 21641 - DNA, 122 bp, Homo sapiens
agtggcggtgacgtgcggccgcgggaatgacgttggccgcggccccgcctcctgctttcgcggcacttgactggcttcccactatcagctgacggccgtgtgctcatactgcaccagattcc

SEQ ID NO: 21642 - DNA, 122 bp, Homo sapiens
atacacataaatgctcagcaaatatttcttgaatactccaataagtacaagcaaacaacccgagaagaacacaacagaatgtaattgttcatcttttgagctcaaccgtaatatgtggcctg

SEQ ID NO: 21643 - DNA, 122 bp, Homo sapiens
cagcaaaggctttcttccccaaacaggcattcaagcttcctctgctccagctacagggtccgtgggttccttgtgatgtcacagctggttgctatggagaccaggttgctgtgaatgtcagt

SEQ ID NO: 21644 - DNA, 122 bp, Homo sapiens
atttttccatcatgaacaccttggggacctagacacagataaggtctagatgcagagccccgtcaccatgttaagaagcaggaattcaaagctgggggcacaggaagaggaatgcaagaaac

SEQ ID NO: 21645 - DNA, 122 bp, Homo sapiens
cgtcctgcactggtgcccatgggcagcagagggcgcccctgaccatccctccatggcgtccgcaggagcctcaccagcctcagggtccaggggcacccacccagctgtcaacctagctgtct

SEQ ID NO: 21646 - DNA, 122 bp, Homo sapiens
ccgaaggaggagctggcgctctttccgggcgcagaagcacccgacccacgctggaggaaacggtccctctgggcaggagaagctttgggcctggctggagcacactcacggaaccacgccaa

SEQ ID NO: 21647 - DNA, 122 bp, Homo sapiens
gtctctgggtgttcccgctccacttccggagtcagtgtggttctcccaggaccctagacccggggccacctcccaggaatatcagcccccaacctggcccactgcttgggcggctctggtcc

SEQ ID NO: 21648 - DNA, 122 bp, Homo sapiens
gttacgaccattgtgtgggaggcgtctgtgtagcaattgctggaatcactgtgagtagtccgtgtcacatgtgtctcccctgatctctcaacgtctcttcttccctctccactcccactgtc

SEQ ID NO: 21649 - DNA, 122 bp, Homo sapiens
aatagaagaaggaacatgaatttgccatcccttttcagattataaccagaacaaaggcatcgctgacaggaattaatgaaactttatgccttaagggtacctttattgacatctctcaaaga

SEQ ID NO: 21650 - DNA, 122 bp, Homo sapiens
gaatctcccggaccgttccagcgcctcgcgtgagccccgcccaccgccgtcctgcgccgccgggcacagatgacaagtcctccaggaagccagagcgaccgtttccgctacgcgacggggaa

SEQ ID NO: 21651 - DNA, 122 bp, Homo sapiens
agtgagcacagagcgactcactaaagcttcagggtcacaaattgagcggcaagatacttgcgagacagaaaaccgaggttatgacggatactttggccctaaataaagcctgggtgtatgag

SEQ ID NO: 21652 - DNA, 122 bp, Homo sapiens
attcacaggaagtttcaccaaatcggagtcctgccagatctaattttttttccctaatcacgtttgtctcagtcagtagcttaagacaatggaaataatcagtgccacttttaattgggatg

SEQ ID NO: 21653 - DNA, 122 bp, Homo sapiens
gaaacagctatccctgatcccgttttagggcgggtgaaactgagacacggcatgcccacacgcacccccaagcgagaaaaatagtcggtcacgtttcttattaggtgcctgatagtaatctg

SEQ ID NO: 21654 - DNA, 122 bp, Homo sapiens
caggccctggaggctctaggtgttctggccatccccagctcctgggccatcctgcctccacggccttccagagcctctgaggcccgaggccttcagaaaacgtggtccctgaccttgatgac

SEQ ID NO: 21655 - DNA, 122 bp, Homo sapiens
cgctcccgtacccagccacggaggcttagtttgggcagtcgcttggggtgcggcggccgacggcgggggcggctgcggcgattgcggggcgcgcgctgctccgagtgagcacgcgcgggagc

SEQ ID NO: 21656 - DNA, 122 bp, Homo sapiens
gtccaccctggctctgtaggggcggcctctgtgcagctgaaggcgtccgtcctgaggggccgcctgacccctggcctcaccccccaacagggcggcggccaacttgtgaacaggagcgtttc

SEQ ID NO: 21657 - DNA, 122 bp, Homo sapiens
gtctgagagggcctctggcggttccaaggctgtgcagccggggaggaaggtgaggaatatcgtgggtaagaagaggcaccaaaatcacagaatagagaggaaaattattgaggaaatgtact

SEQ ID NO: 21658 - DNA, 122 bp, Homo sapiens
caggtctgcagccacggtttgggcatctgcagcggcaccccgggagctcccgccccaactcgtaaggggcagagcttccacttgtccccggctcctatgggctccttggagcaagcggcccc

SEQ ID NO: 21659 - DNA, 122 bp, Homo sapiens
ggtgtccagcccatcaataacctcatcaataacctaactttggtcaattaggttggagtccgaaggtgactgatttgcggcaaggttttctctcttcctctgtaaagtggagtccttcatca

SEQ ID NO: 21660 - DNA, 122 bp, Homo sapiens
ccttaactgtagctaagcttccactcttaagtatcaattaagcttctctgttcagtccagcgtttagggcgcctactgcgcgccccgccccacacacttttgacaaaaaggtcgcctgctct

SEQ ID NO: 21661 - DNA, 122 bp, Homo sapiens
agggctgggggaacaactgtgtcatctccccaccctctctgggggccgagccctccctgccggaagtcactcagggaggaaaccacagggccggtccgcccccttcagaagggaaaataccc

SEQ ID NO: 21662 - DNA, 122 bp, Homo sapiens
cggtttggagacggggggcgctgtcggagggagggaggaagggagggagcgggggtggggcgcacagaggattccaacaggagactggaagagattttgaaaggtcatctcgtccttccccc

SEQ ID NO: 21663 - DNA, 122 bp, Homo sapiens
aggcccatgtggacacgtctgcagccacacatgctttcacggggcacatgggaacgtacacgcgaagggtaatgcgtgcacacctgtgcagccaggtgtgcatgagcgtttctgcacaggcc

SEQ ID NO: 21664 - DNA, 122 bp, Homo sapiens
agttggctatgctaacaggactggtcaaaactaaaaaaaagcaagagcccagtgggaagacggcagcctagaggaaccagacatctgggaaggtcacaactaggaaccaggaagggggagag

SEQ ID NO: 21665 - DNA, 122 bp, Homo sapiens
agctcccggctccctcccccttcggatgtggcttgagctgtaggcgcggagggccggagacgctgcagacccgcgacccggagcagctcggaggcggtgaagtcggtggctttccttctctc

SEQ ID NO: 21666 - DNA, 122 bp, Homo sapiens
tgagcaggaggacccttttcaccatcgttgttcggctgaacttgcttcgcggtttgttctcggctgggtcaggaactctggtagagggaaaccagtgccctgtctctgccgggctgggactc

SEQ ID NO: 21667 - DNA, 122 bp, Homo sapiens
cacctgaaaccaagaggcccagaccccggctggggaatagtaagtaagggatgctgcaaacgcacttggctgcagtcaaacctctctgccctgatgccactctgccgccatcccatgaaaca

SEQ ID NO: 21668 - DNA, 122 bp, Homo sapiens
ccgaggaggcccgggagggaggcggggaggctggcgagaggcttaatgaaactgctaacgcgttagtgattcctgcctgctcgggaaaggcggaggcagacagccatgttgccagctcctgc

SEQ ID NO: 21669 - DNA, 122 bp, Homo sapiens
acaaagttcagaagagggaaaatgctggaaaaaaatcaatgcaatgtccttatttggcagcgcttagtttggctaattactggttacaggtaggaaacacagctaatggggcttagcaacag

SEQ ID NO: 21670 - DNA, 122 bp, Homo sapiens
tctcatcttaaggtggtgctccgacctgatacaaaggaaagcgggttgaattcagaggcacgggcataccctgtccttgtttctaaagtgttcatgaagaagatcgaattcaaatggtgaaa

SEQ ID NO: 21671 - DNA, 122 bp, Homo sapiens
agatccatgggggcatcctcagggctcatctgtgtcacaggaggacatctgcctagcctgcgatcagaaagaattttcagtctctttctgtgggtacctgctgtgagtcagatgtttcctta

SEQ ID NO: 21672 - DNA, 122 bp, Homo sapiens
ccacttctcttgtctttgcggggtcccccagggctttctgggctctgttcaggtgccccccggcctggtgcagttgggcggccaatgtggcgcgtgggctggggccccaggcggggacgccg

SEQ ID NO: 21673 - DNA, 122 bp, Homo sapiens
ccgaacggcgaaccgccttcaaaccccaattcttacagccaagccgttcccaaccctgcacggctagggctgggcctcaggccccgtttctaactctgactggggtttggaccccgtttccg

SEQ ID NO: 21674 - DNA, 122 bp, Homo sapiens
tccgagacagcaggtaagtgaggctcagaagccggcgaagccttgcaccaggattgtgcgcggggcagggggtgcttccagtgcagactaagaggggtcgtggagcggggggatattaccgt

SEQ ID NO: 21675 - DNA, 122 bp, Homo sapiens
cgtgctgcccatgcaggcctgggtggggacagacaggcacgtttcaacctaggactgcagcgcttctcaaatgggatcctcccccaaccccagcagcagcagcagcagcagaatcgccctgt

SEQ ID NO: 21676 - DNA, 122 bp, Homo sapiens
gcagtcagcaagtggtaagaatctttggagagacaacaggagaataaaagccgaaacatgcgtatatacaaaatgaaatatgaatgtgagcttagaggctacacgtggtctctcggatacta

SEQ ID NO: 21677 - DNA, 122 bp, Homo sapiens
ctcactgtacacatttagaaaatcattgcagaaaggtctacctacaatgcagctctgaatcgtctcatttgcctttggctttgtccctaaacacttcctctctgcctaaccacttcagttga

SEQ ID NO: 21678 - DNA, 122 bp, Homo sapiens
actccgtaggttgttgcgttcactgcagcacctcacatgataccgtcccctctcatggaacggagcctcccccatgcagcccccactcaaatggagttttaaaggctgggttcaggttacgg

SEQ ID NO: 21679 - DNA, 122 bp, Homo sapiens
cacaggaacagaaggggctgctttcgccatccctcccacagggacggggtgtgcatggtgcggggaggtggtgccgaataccttgcacaaacgacacctgttcctcgacgctaaagtttcct

SEQ ID NO: 21680 - DNA, 122 bp, Homo sapiens
ggacggggagccagcgctgacgcagctccaccgcctccctccccatcccgcacccgccgccgccgagctcagcctgcagacaggtcttgacatccctcctcagcgaggagcgagggagtcgg

SEQ ID NO: 21681 - DNA, 122 bp, Homo sapiens
aaggaagcacagaatgacgggcaggttctgtttgctctctcctcagcagtgtttggccagcgcttggatgagactgtggcctatgaacagaaattcggcccccatctggtgcccatcctggt

SEQ ID NO: 21682 - DNA, 122 bp, Homo sapiens
gaggagccccagagcctgcaagctgccgtgcgcaccgatggcttcgacgagttcaaggtgcgcctgcaggacctcagctcttgcatcacccaggggaaaggtaagcacgcacgccaccttcc

SEQ ID NO: 21683 - DNA, 122 bp, Homo sapiens
agaaactggccgagtccactcccactccatattctcagagccccctgcctccctatcacacgccccaccctaagatggggactcttgcaagagcagctgcatctcacccctcttgtagctcc

SEQ ID NO: 21684 - DNA, 122 bp, Homo sapiens
agctgccacgccatgtcctgcttggcccgctgcagggcggcctccagctcgacaacttggcgttagcatccttaatggccagctctccacactgctcggcatctgcaatggcggcctccagg

SEQ ID NO: 21685 - DNA, 122 bp, Homo sapiens
aaattcttcggccttttcccaaagcaaagttttcagcgactattaagcagccacctcctccgggaagactagggggattttcttgaattacaaaaggaagaggcttttggctcctaccgagt

SEQ ID NO: 21686 - DNA, 122 bp, Homo sapiens
cgggaggggggacagcaggcatcaccaccgccccttccacgccgtcccgcctcgatgtaccgggattctgtcaagtgcctgagaacatgttcaaaaagctgctctccatctcgactttcacg

SEQ ID NO: 21687 - DNA, 122 bp, Homo sapiens
ctgccaaaaatgtgcatttctagcaggttcccaggtgacgctgctggccacaggggctgacgctgcgggaagccctgacctagtgcacaacccattgggctcttcactgtcagtgtagaggc

SEQ ID NO: 21688 - DNA, 122 bp, Homo sapiens
gaaggagagaccagagggaaggagccgggcctgggagctcagcggagctgctgtcggagccgtgacttcagcaccatgtggccagtgaatcagagccgtgaggcatggagctgggctctggc

SEQ ID NO: 21689 - DNA, 122 bp, Homo sapiens
ataaacttcctgttttcactatcaatctcttttaaaatggtgttcttggctatccataatcgccccaggggagagaaacaagcggaggaaaaaaatgcaagagtgaggggaacaaatgatgg

SEQ ID NO: 21690 - DNA, 122 bp, Homo sapiens
acgagcgattccgcatcgtcagttggaagctggacgagctgcactgccagttcctggtgccgcagcagggcagcccgcactcgctgccgccgccactcacgctccactgcaacatcacggtg

SEQ ID NO: 21691 - DNA, 122 bp, Homo sapiens
cactcgcgagcacaaaaactcgctgtaactttggctccccctccgtgagctgcagggcgccgtggcccacagcagggtacagtagacggtgcaatccttaccagcccctcccccaaagaggc

SEQ ID NO: 21692 - DNA, 122 bp, Homo sapiens
cacggtgcctgcccaaatcccctggccgccgcccgacccccgcagcagcagcagcggcagcggcagcagccgcccagagacggccacgtggctccgagctccgccaatcagcgcggggaccg

SEQ ID NO: 21693 - DNA, 122 bp, Homo sapiens
agctacacctgccacattagcaacagccccatgtggctggcagctaccaaagcggacggtcgcagacaagcagattccggcaccgcagaaagggaggcgccagacagcgctgcccgcctgga

SEQ ID NO: 21694 - DNA, 122 bp, Homo sapiens
gcccgcagcggcctcgggtctaggccccacctgggggtgagtgttgcctggggttttgagcgagctcggcgccttggcgcggcagagtctggcacaggagggagggactcgtttgcagtctt

SEQ ID NO: 21695 - DNA, 122 bp, Homo sapiens
ctgtcaaatggtgatggaatgtcaagtcagattactcccagtatgatatggagagacaagcgctgatggaaggtgccacttccctggttcagatgtgcacagtcgtcaccagcaattaatgc

SEQ ID NO: 21696 - DNA, 122 bp, Homo sapiens
gggtgtggctgcctgccacgcgcgctgccataggatccaccaacgtttcgcctggtcgatcgccatttcgcctaacgggctgcttccatggaaaggtcagaggcaggggaaggggcgcacgc

SEQ ID NO: 21697 - DNA, 122 bp, Homo sapiens
atgcaagacacacagtggcaaaccagcctataatcaaatgagataatgctaatgatagcacgttgttaactgtaaatccccattgaaatatgagttatgattatttaaaatgttcctgtgta

SEQ ID NO: 21698 - DNA, 122 bp, Homo sapiens
agcctccaagggtcaggagcgacgttcagcaggagcaatgactggcctatattcgggactcgggggcgggtcggcgccagagacgagaagagaggaggggaggcctcctccgccgccgccat

SEQ ID NO: 21699 - DNA, 122 bp, Homo sapiens
atctcccttgagtttagaaatctggctgagaaataccaaacagtgattgccgacatttgccggagaatgggcattgggatggcagagtttttggataagcatgtgacctctgaacaggagtg

SEQ ID NO: 21700 - DNA, 122 bp, Homo sapiens
ctgggctcagcgtttgtggcaggcgggccagacctgggaacagcttttaaagactgactccgcccctgtccctcccataagactgcacctccttaagggcgccaacatcctcagcccgtagg

SEQ ID NO: 21701 - DNA, 122 bp, Homo sapiens
tggcgtgcacgaagtccccctggtacagctggctgcgaagcttctcctccaggctgaagccgcggacgctgacgatctcctccacgtccgacaagtcctcgttctcgtcgtatcgctggcgg

SEQ ID NO: 21702 - DNA, 122 bp, Homo sapiens
ctgcgcgccctggaggagctgcaccgccgtcgcggggctctctcagcactgaggacaccacgccctgcaaattgttgggaacttgtcggtggcaatcacactgctggctcctgcaaactggt

SEQ ID NO: 21703 - DNA, 122 bp, Homo sapiens
atctggggagactgacaaagggacaatttgtgcttaggatcactatttggttcacaagaccgatcatgtgagttttaaaacctaacaacccccccccaggtcctttggtcatgctaaaactc

SEQ ID NO: 21704 - DNA, 122 bp, Homo sapiens
tctgtgtgcgtgtgtgtgtgtgtctctctctgtgtgtgtgtgagatgaattggagtcatacgactgggtgtttccttccgagtggttttcatcagcaatccattaggaaatcatggaaactt

SEQ ID NO: 21705 - DNA, 122 bp, Homo sapiens
tgagaccaggcatgaattttgcaagaaagcatttcccttgactgggacagcagactggggcgtgtgaacgtcagtcatagctactgtaaacatgcatttgcttctctgtcccttgttggcca

SEQ ID NO: 21706 - DNA, 122 bp, Homo sapiens
tgggaagtggccgtggtggttggccgcggtggagctagcaggcgggcgggcgggagcgggcgccggagtggagaaaggagccagcggtgggcagcgctgctgggatggcgcgggccgggccg

SEQ ID NO: 21707 - DNA, 122 bp, Homo sapiens
tatgagtcacacaatgcaaggcaagataatgtaacaggtacaagaggtaaatcagaatgacgttgaagttgaaagacaatcatttcctatttgaatttttgaagaaatacttgaaggggcat

SEQ ID NO: 21708 - DNA, 122 bp, Homo sapiens
gtctcgggtggctagcccggctggcggggagatgtcagctagcggccggaggagcgggctcgggagggggcggcggctcgcgcgctggaggaggtggaaggagggtcgctgccctgccccct

SEQ ID NO: 21709 - DNA, 122 bp, Homo sapiens
cctgcgggatcgcagcatccagcctcaatgtccgtcagctgcgcgcgccgcgggcccggccggggtcgctatggcaacgcgccgccccagcctaccaaccaagcagtgcccgccccttcctg

SEQ ID NO: 21710 - DNA, 122 bp, Homo sapiens
agcccacggcagctgagcggagggtctggcgcggtgacgctgcgcatccgggccgcgccgcgctcgccccgaccctaaaccctcacctgaaccctaaccccgctgggctcccggctcccccg

SEQ ID NO: 21711 - DNA, 122 bp, Homo sapiens
tattacagtgtaaaacataagtagatatacttattgagttagaatgatggaattcccgtgcgtaacctcaactacatataaattgaaaggaggctagttgctcaaagttttaaattttttat

SEQ ID NO: 21712 - DNA, 122 bp, Homo sapiens
atacttataaccattgtgtttttacgtatttaaaatacgttatacctataattagtcacacgaggaaatcaaatgctaaagtatgatatgtttttatgttttgtttttcttgcttaggggat

SEQ ID NO: 21713 - DNA, 122 bp, Homo sapiens
cgtggctccgatgacgtcaatagtctttttggataagagggcgaccggggcggttaccagcgaatgttcagcaccactatctacaagaaagtcaatgtctctaccccccgactgtcaatctg

SEQ ID NO: 21714 - DNA, 122 bp, Homo sapiens
ccgggcagctgcgcgagtgaggggtggaaagaggtggctttttactccggggaacggtggcgagtgggggcttttgcctctcaaaatacgagcccctcacaactacccatgcacctgccaaa

SEQ ID NO: 21715 - DNA, 122 bp, Homo sapiens
ttatagaatatacagtgaatcccaaacttgacagtttaaaatttggaaagtcagaggtaacgcatgcctacaaatcactgtagagcttggcagtagtgaaccatgtcaattagaataactct

SEQ ID NO: 21716 - DNA, 122 bp, Homo sapiens
cggttttttcctctacccgcaaacccaggtcttagtggtggtgctgaataggacactggacgcgcagaggaattacaatctgaagattatctacaacgcgctcatcgagaatgagctcctgg

SEQ ID NO: 21717 - DNA, 122 bp, Homo sapiens
cagtgcgcacgcgcggggcaggaccccgggaaagggctattaaagggccagcgtcgatctcgcttgtctatcacgatagtcgcggtgctgcgactgaacgcgcctgcgcggaaagggaagca

SEQ ID NO: 21718 - DNA, 122 bp, Homo sapiens
caattaactgcctaggctgggtgaaccaaagtaactcagtaaaaaaactttaccagttcccgtcctccctgtagttgctaaataaatattgaaaggactaagataattctctaaagatccct

SEQ ID NO: 21719 - DNA, 122 bp, Homo sapiens
cttgacaggacccggcttagccacggggctgctcggggcgcgcttggaggtggggaccttcgccttccccatcctgctgcagtccagcgcctgggccggccgccacccgagaccccggcctc

SEQ ID NO: 21720 - DNA, 122 bp, Homo sapiens
aggggggacggacacatttctgggcagggccatctcttgctctggcctttctgcggttgacggctccatcctccctggtgagtcttcgcgctgcggggagtggggagtcctcagagcagggg

SEQ ID NO: 21721 - DNA, 122 bp, Homo sapiens
gcagggccgcgccggggtccggccgcctccgccaaggacgcctttgcacttgtagctgcccgggaccgagctcttccagggtccccgaaaccccaaatccctgcaagccaaggaagcgatcc

SEQ ID NO: 21722 - DNA, 122 bp, Homo sapiens
tctccctttctctctctctgtctcgccccctcttttctctttgtgcacttctcaggggagcggttacctaagccggagcgggggaagatgagagtgcacaaaatcaacaatgtgaacaaagc

SEQ ID NO: 21723 - DNA, 122 bp, Homo sapiens
tggctattatttttgagactatgttattaatgactccgagggctttccaatggtggcaggcggccacgctcacggaagcagggtgagtcctgggatgtttgatgtgcccgtgtgaatcttgg

SEQ ID NO: 21724 - DNA, 122 bp, Homo sapiens
cccattgtggcataactcttagtgtaatacagtatttaacattgtgccttgaatatagcacgtgttccataaatgtttgtgaactgaatgaatgaaggatggcaggtgaaaaatctcttaat

SEQ ID NO: 21725 - DNA, 122 bp, Homo sapiens
attgtgctccatactgcttaaactgttccctaagtgtccaatttggagaaaacacccacacgcaggataactggcgagtgacgcggagtggctgcgagtccaagttatcactaacggatggg

SEQ ID NO: 21726 - DNA, 122 bp, Homo sapiens
actactcccagttctgcaggcggcatactcctggcctctgatattctattctatctccagcggggaggagaggatgatactactaccagtattgaaggaggtgttcaccacccctgtgatat

SEQ ID NO: 21727 - DNA, 122 bp, Homo sapiens
acggacacaaaggggattctctgtccccgatgatttctgatttcggcacacccagacccacggcgcacccatcgcgccccgcacccccgccccggcctcccgccctgccctcccccccgcag

SEQ ID NO: 21728 - DNA, 122 bp, Homo sapiens
agtggagacttagacacaaagttatgcatagaaggaagatgatgtcatgagatgcagggacgagatggccatctacaagccagaaagaaaagacagggatagattctccctcatagccttca

SEQ ID NO: 21729 - DNA, 122 bp, Homo sapiens
gaatgtacttgctcttattctagacacaatcctaacatttaaaaaatttgacaaataatccgtagtgtattgggggtaacacatttagaatggggtgagggactgctgtaatcagtagtaaa

SEQ ID NO: 21730 - DNA, 122 bp, Homo sapiens
tgaagagcatttcaggtcagaatagggtaaagggaccaaacccatcctctaccccccacccgctaaagatgcccaggcagataccagggttactaatatatgaggctctactaatgtaggtg

SEQ ID NO: 21731 - DNA, 122 bp, Homo sapiens
tgaaggatgagggtgaaaagaccaggagttggctctgtcgccaaatttcaagaacatgcacgtctctcaaacacaagccatttggaaaagcagagctcttgcaaaataactgaaaaaagatg

SEQ ID NO: 21732 - DNA, 122 bp, Homo sapiens
gcaggcgcagtgccacccggagggggccgcctgccgaggggcggggcgcaggaagcggggcgaaaccactgttggctcatttccgggtgggtccccgtctccaggcaaccatttcgcgtcct

SEQ ID NO: 21733 - DNA, 122 bp, Homo sapiens
tctgaaaatagacaaagctgaatataaacatcatttaattccccccacacagacagcctccgctcctgtgagggcgtggggaaaacggagtgggagaagggggctagcgaggaggaagaggc

SEQ ID NO: 21734 - DNA, 122 bp, Homo sapiens
gcagcctgagccctccggcctggctcagcaggggcggggtggggacatggtggcgatgcccggactctgggctgctctggccatcagctcccttgcttgtccccagcaggaggagattctgt

SEQ ID NO: 21735 - DNA, 122 bp, Homo sapiens
ggtaactgacaggaagcggaagccgtgcgtgggaggccgattctagtgcgcctgcgtggccgcgaatcaccagccagcctctgggtctgtagcaaccgcccagcgttgaggcgcggctcatg

SEQ ID NO: 21736 - DNA, 122 bp, Homo sapiens
cgccgcgctttcaggaggtgcttttggttctctccggtcttgtccacgctagggggtgcacgtactcccaactgtggtcgcgctctcaccccttctgctgctctcgtggccccctcgcgatg

SEQ ID NO: 21737 - DNA, 122 bp, Homo sapiens
ccaagcgatgacaaatctcaacctgtctttatgctgagaccactccccagtttccggagccgcggccactatctccccatgcgcatgcacacccggctctcccttccaggccctccccacca

SEQ ID NO: 21738 - DNA, 122 bp, Homo sapiens
gggagacctgacctgaaaggacccccttcaagtgatagggcagagcacagattgcaaaaacgcatattaagaaatcactcttggccgggcgcggtggctcatgcctgtaatcccagcacttt

SEQ ID NO: 21739 - DNA, 122 bp, Homo sapiens
tcactgccgccacggccacgccacccggtgttggcgatccctgcccatctatgctccccacggtgccctgagcttcttaacgacagtgacatgttcagggccccagcatcatgcagcccagg

SEQ ID NO: 21740 - DNA, 122 bp, Homo sapiens
tgagataagtccatttctgtgcagcggcagtcaccaggtgcagcgggactgccagcccagcgcgctgaactgctttgtggaagccatgtcccagtgcgtgccgccaatccccatccgaccct

SEQ ID NO: 21741 - DNA, 122 bp, Homo sapiens
aaggatcagaataagaaggttccagtgctgctctgtctccagtttgctgtgtggcctgatcggcttatagcccttctcggggcctcagtttccccatctgtaccatgaaaggtctggctaga

SEQ ID NO: 21742 - DNA, 122 bp, Homo sapiens
cccaccccagccctgcccagccccggtcctcaccgtgtatgccacggagcagcacgtccacgccattctgatagtggttgaaggccgcctcatagtcctcactaacatcgcgctccagggcc

SEQ ID NO: 21743 - DNA, 122 bp, Homo sapiens
agggaggagggtggatcgaaagcgccaaaaatcaatcagaaatcgtccccgtagtttgtgcgcgtgcaaaggttctcgcagctacactgccagaatagaacgtgctcctccgcttttatacc

SEQ ID NO: 21744 - DNA, 122 bp, Homo sapiens
caggcccgagttgatgggcacctcgggctcatcaccgtgaagtcccctgcggccgaagggcggtggatttttagggtctctcccgcccacccctaatgccagtccccaccactgcgtactct

SEQ ID NO: 21745 - DNA, 122 bp, Homo sapiens
tgaggtgattaaaaacactcctttattgagtcttaaaaaataaacaccttaaagggacagcgtgaagctgagaagtagcatcccaacagcttgtgtccttgggagctgcagtcttctctgaa

SEQ ID NO: 21746 - DNA, 122 bp, Homo sapiens
ggaggggaggctccccgtgtgtcagggagcagcaaggtggatccgcagcacgggcgtctccggagcctctactgggcctgggcgtttgtacatcgccaagacaggaggcaggcttctgagca

SEQ ID NO: 21747 - DNA, 122 bp, Homo sapiens
aatgactctgaaaaagccaatacgcaagaggctaacacaactgtagtctaaaggcaacgtcgaggtcactgatatgtccctcagacaagaggcactgctcagaatccccctgtgctgggggt

SEQ ID NO: 21748 - DNA, 122 bp, Homo sapiens
atagttgtgtgtgaggtagggtctcgctctgcccgtcggttctgttgcctcacgcggttgcggcaaccacagtgccaggctgggtgcctttccccggggggctccgaaccttcccggcagcc

SEQ ID NO: 21749 - DNA, 122 bp, Homo sapiens
tgtcattgagccatccctctgaagtcaagttgcttctctccgaagttcaactgtagtctccgatgtccagctgcttcgtctcttctccccttgtctgccgtctgccagtggagcctggggtt

SEQ ID NO: 21750 - DNA, 122 bp, Homo sapiens
gcaggattcagtttctcaaaggttgttagctggggacctactggttccttgccacatgtgcgtctccctaggcagctcacagtgtggcagctggctttccccagaaggagccaagaaacaag

SEQ ID NO: 21751 - DNA, 122 bp, Homo sapiens
attcactgcagcagaagggattctttctggatggaatggcttggccattctggaacaggacgttctgctgcaaggaacaaaggatgcctatgtctgacagtgaggcaaggaaacttctagga

SEQ ID NO: 21752 - DNA, 122 bp, Homo sapiens
cctttttgtaatctttagaaggtgataaaagctatggctatctctctccagaaaaatgcacgtttgccacatatacatagggtgtatgtatagttaggggggaaatattttactaatcctgc

SEQ ID NO: 21753 - DNA, 122 bp, Homo sapiens
ttgaattctttggattctttgttcacaaacaaaccagtgccagagccactgcctcttcgccgcctgcaaagtgcgctgcgctgcctgccagcagggggcgggggtccatcctcgtttctatc

SEQ ID NO: 21754 - DNA, 122 bp, Homo sapiens
aaggcccatctttgagagtaaggaaatctttcccaggagtcccctcacattggctagagccgggcccagcctatgcctgaactagtcactagcaaagagcagcaggtatgtccctgagctgg

SEQ ID NO: 21755 - DNA, 122 bp, Homo sapiens
ctgcggaccccgtaggagccggggctgggaggtggaatctcagagaacgcaccgtggaggcgcggctccggcctctgttctttcccggagtgccccggacgcgcctggcaaggccccccagc

SEQ ID NO: 21756 - DNA, 122 bp, Homo sapiens
agagccaggattcacgccctggcaatttgactccagaatcctaaccttaacccagaagcacggcttcaagcccctggaaaccacaatacctgtggcagccagggggaggtgctggaatctca

SEQ ID NO: 21757 - DNA, 122 bp, Homo sapiens
acaacaacaagacaaacctacaagtagtcatctaattatttttctggagttttaatactacgacaacatttaatgactttctctgtcttaagcagagggttgggaagtgatgcagaatttat

SEQ ID NO: 21758 - DNA, 122 bp, Homo sapiens
agagggacactcacccgcttcagccccgagccttcactgcaccggaagtagtcacccgcccgttgccagggtgaggaagcggggctgacatcaagtctccccattggtcattcggggtacca

SEQ ID NO: 21759 - DNA, 122 bp, Homo sapiens
agagtgggtaggactctcctccagggggtgtggggtggaggctaggcggtgagagcttcccgcgcccagggagcaggtcttcacgggaggtttccggaggcaggaggagcctgcgggtcctc

SEQ ID NO: 21760 - DNA, 122 bp, Homo sapiens
cctttgaactataatcccctagttttaattgtaaacaataaattgtctttcaaatgctttcgcttctctttgcctccatcctctcaaaactgaatctgcctcagcttgacatctaacagaag

SEQ ID NO: 21761 - DNA, 122 bp, Homo sapiens
aggcagggccaggccggctgctctccgggaactggcgcggctgcagtgcggacctcgcggcgccaggctctaggctcagactccgggccgccccagctggccagcctgtcccgccggctgct

SEQ ID NO: 21762 - DNA, 122 bp, Homo sapiens
ccaacctggtccacgtagttggcgacttccaggagacgctgtttggtgtggttcaagtttcggtgccgagtcaagaactgggaaggcagaaatcccggtggcttgaggggctgagctggccc

SEQ ID NO: 21763 - DNA, 122 bp, Homo sapiens
ccacctcctcctttgcccccagaaccatcccttctaggagggtatggaggccgaggaggccgggctgggggagccacagccccagccatccagtcatctgcatactgctgtccccctccaga

SEQ ID NO: 21764 - DNA, 122 bp, Homo sapiens
gccggctgggctgggggttgccctggccagcaggggcccgggggcgatgccacccggtgccgactgaggccaccgcaccatggcccgctcgctgacctggcgctgctgcccctggtgcctga

SEQ ID NO: 21765 - DNA, 122 bp, Homo sapiens
ttctttcatatggcttttccgttatccctaatgttggcagcacctcaagttagaatcattcgtgaatttcattaacatcactacctcccttttccacatactaaacaaagatatcaactagg

SEQ ID NO: 21766 - DNA, 122 bp, Homo sapiens
ctaggcccctgctcagccacatcctcctggagcacaactatgccctggccgtcaagcccacgccccctgcgccagccctgcggcccccggagccagtgcccgcacccgccgccctcttcagt

SEQ ID NO: 21767 - DNA, 122 bp, Homo sapiens
tttgtaaaattagaatagtgatgcagcttttctgcattccacagggatgatttgagggcacgttgagacaacatgcatgaaagcagttcagataaggaaaacagagatccaagagtcattct

SEQ ID NO: 21768 - DNA, 122 bp, Homo sapiens
ctgggaggggcaatgacacggagacccacgttcagaccacagcctcccgcggaagatggacgccctccctgaggccctcccagggagaagattcgcaggtagcagaggcccagcaggaacat

SEQ ID NO: 21769 - DNA, 122 bp, Homo sapiens
tagcagaaggtggaccgagtcgagctttagaatcctgatcttctagaagggctcagcttgcggtgatcgaaaatctgttcagaagttcaaagactgatcaataaaatagggaaagcaactgg

SEQ ID NO: 21770 - DNA, 122 bp, Homo sapiens
ggatccgctggcgactgacaaaatggctgctgcaccaccggaagtgacgcaaggcaagggcggggactgagccctgattggagcgcactctcgttttctggcttgatggagccgatccagtg

SEQ ID NO: 21771 - DNA, 122 bp, Homo sapiens
aaccccatgctttcactgtgtacctaagagtgccttttacaagataggagctcaaaagtacgtgttgtttaaataatggaagctgttactaaatctgaatgtcaggtccttatcatttttag

SEQ ID NO: 21772 - DNA, 122 bp, Homo sapiens
atctctttatcacaaaaatgttcttggagttcatttctgttcctctctctttctggggagcgtctgctaggaataatggaataatgaggaaagagaggtcagagacgagaaggtgatgatgt

SEQ ID NO: 21773 - DNA, 122 bp, Homo sapiens
ggtatctggcacatcagctatttggtgaatattagtcctgccccctgctccctccgtctgcgtaagcctgcccctgtcacagggttcttgtgagggacaatgagctcttgtaagtgcgtgcg

SEQ ID NO: 21774 - DNA, 122 bp, Homo sapiens
gaggcagaagggctggtgccctggtactcacaggtgcgtgcagagcagtccttcctctggcggcagcagcagcctttgtgtactgatctgggagacggcagaggaggaagtgacactcccca

SEQ ID NO: 21775 - DNA, 122 bp, Homo sapiens
gtacgagggagggtaaaatgggccccttggacgccgcgtgcagagcagagatgaatggcccgaaaccctcgcgctgctctgcgcccttcgtcatccagtcggggtggttagggactgtcaga

SEQ ID NO: 21776 - DNA, 122 bp, Homo sapiens
gttaagagcaagactccgtctcaaaaaaaaaaaaaaaaaaaatgatcctccacaaacttccgccttgatttgtgcctctcacatagtccaagtctgtttgctcatctgggcgatgggttctt

SEQ ID NO: 21777 - DNA, 122 bp, Homo sapiens
ataacacaagacatattttcccatccacaacacctggagggtctgaacaaatctcatttccgtaggagatgtttccttctggtcctttaaaagaaataaacaggtgatatttttctccaggc

SEQ ID NO: 21778 - DNA, 122 bp, Homo sapiens
tacataaaagtgtgcatatcaggaatttacagtgattaatgaccagagtgaacacagctgcgtagccgacaccgggatccaaaacaccgctattctgaaagcctccctctttcccaaaaggc

SEQ ID NO: 21779 - DNA, 122 bp, Homo sapiens
gtgagtgtgagtgtgagtgtgtgccgggggaggggggaggaacaaagagccaagtaaacacggcgagtccgtgtcgagcaaagctcataaatattcaagtcgcgtcctaatctccccaacac

SEQ ID NO: 21780 - DNA, 122 bp, Homo sapiens
gcgcaatgccgcgggccggctggagctggccctctgcatgctgccgggtctgcccgacaccgtctttgagctcagtgaggtggagtcactcaggctggaggccatctgcgatatcaccttcc

SEQ ID NO: 21781 - DNA, 122 bp, Homo sapiens
ctggcagctgactttcctggcagttcactcgagtctcttgcctctgctcacaaaagcctgcgcctttattcagctttcctcaccgcttcccaaggcagagcagagcctctcccgcccgcctc

SEQ ID NO: 21782 - DNA, 122 bp, Homo sapiens
cccgacgccagggagggtgcaggcttgggaccctctatggcggtgcaccccctggctgggcggaccgggtgggggtgggtacgagccggggccgccgccgaggagcgcgtcccgagtgcgtg

SEQ ID NO: 21783 - DNA, 122 bp, Homo sapiens
ccaaggactgctccagagcgggacgcatcctctcccggctctcagcagttcatgcccggccgtccctcacctgaagtgctgcaaggggtcagttggctcccacctcagtccgttcctgaccc

SEQ ID NO: 21784 - DNA, 122 bp, Homo sapiens
gccggctcaggaacaaagctgcggaccttcacggttagtgttagggctcttaaggcggcacgtctggagttgttcattcctcccggtgggttcgtggtctctctggcttcaagagcgaagct

SEQ ID NO: 21785 - DNA, 122 bp, Homo sapiens
gggtcatcagtgtcagcgttgaggggtcccggggagcggttgcagggcggcggcggcggccgggtcatcagaagcacagtggagccgccccctgctttgggaggagcaaaagagcctctcgc

SEQ ID NO: 21786 - DNA, 122 bp, Homo sapiens
tgcaaccgcgagggcagctcctcatgccacagtcgtcaccagtgtagcctgggtcacacacgcagcgcccaccctcacagcgtcccctctggctgcaacctcgagggcaggagcgctggctg

SEQ ID NO: 21787 - DNA, 122 bp, Homo sapiens
ctcctctgcggccaagagtccaggatgcatcttccgaagaggctcgtgcactggtctcagcgaccctgttcggatccctgcagagtccgactgcagagcccgacactgttgggatccctgca

SEQ ID NO: 21788 - DNA, 122 bp, Homo sapiens
ttataggtcatattttcctctctttcttgcatgtctgttatagcagttatcagtttattgcgtctcaactctaaatccacccttcattgccacttgtgatactggaacatttctcccttgcc

SEQ ID NO: 21789 - DNA, 122 bp, Homo sapiens
tcggctgggcaggaccctctgatgagccccacccacctctggaggggtcccagcctgggccggcatcctccaggtgcccatgcagcagccatcagtcagacgcttggcagcaaggtgccggc

SEQ ID NO: 21790 - DNA, 122 bp, Homo sapiens
tgcgtgtgtttaattgtccgaaacagaggtgaatcatccgctgtgagcgggacgcatgtgcgtctgtggtcctccgccttggaggctgtcagtcctgatgcctgctgcacagagctgagaag

SEQ ID NO: 21791 - DNA, 122 bp, Homo sapiens
gctgaaccacatggtcctgtccccctgtcaaaagttatggttagtttaatccttgctcctcgggaggctaaggcagcaggattgcttgagtctaggagtttgaagccagcctgggcaacata

SEQ ID NO: 21792 - DNA, 122 bp, Homo sapiens
gcgcggggacgcagtaagatcacaggctgcaaagaaaacagcactaagcgtcctggaggacgctggagcttcaggatagtgtccttccaggtcgtgggaccgccccctcctccccgcactcc

SEQ ID NO: 21793 - DNA, 122 bp, Homo sapiens
gtcgcctcgcgtctctctctcccaccccacctctgagatttcttgccagcacctggagcccgaaaccagaagagttgtcagcccaacaagaatataggatcaccggcccatcagtctggaga

SEQ ID NO: 21794 - DNA, 122 bp, Homo sapiens
agatctcgaatacttcactctctccccaccctcttatctccaagctagctaaagccatctcgaatccagaggataaacaagtccaccaatgcagttaagcttcccagggcacaaagcattat

SEQ ID NO: 21795 - DNA, 122 bp, Homo sapiens
gcagcaggtgaggcctggggcaagggctcagagaggcaagatgccatttggccatgccaccgagtgagcagtttctcttcttgccctcccaggtggcgtgaaggggagatggctgctttctc

SEQ ID NO: 21796 - DNA, 122 bp, Homo sapiens
catcttcacaccatctgcaattaactaacctgcattggagaccttaacagagagaagccacggagctagttccatcatttatctgccaagggatatccccattagcatggggctcctggctc

SEQ ID NO: 21797 - DNA, 122 bp, Homo sapiens
gctgagcacgaggaagcccctgagagaaagactctggcctggattgggtcgaattaagcccgtcgctctgctcagtaccaaaatgacagcgccaatgtggcagccatctttgtacagacggg

SEQ ID NO: 21798 - DNA, 122 bp, Homo sapiens
cagcctcagcctcccaaagtgctgggattacaggcgtgagccactgtgcccagctgacaacgggcatctctgatgccccccttgcacctcacctgttgcctcccaagagcacgcccacccca

SEQ ID NO: 21799 - DNA, 122 bp, Homo sapiens
ttcccagccacccgccagccctgcccatgccagcgcctcgcggggtggctcccgcctcggcgcagcccccctggttgctggctgcacatctgcttccgagccacccaggggcaacttgaggc

SEQ ID NO: 21800 - DNA, 122 bp, Homo sapiens
gccgggtcagtgctgccgggttggtggaagctgccttccctccctccaagatcagaaaggcggagggttcaggaaggggttctcctctaggtgcaagggactgcctggatatttggagggaa

SEQ ID NO: 21801 - DNA, 122 bp, Homo sapiens
catccacccccgtgtgtgcgtgtgtcccgtggggtctgggcacccattgtatgtcggtcccggactttaaggttggaggtttggagtcttcctccgcctctcccgtttcttcttcccataat

SEQ ID NO: 21802 - DNA, 122 bp, Homo sapiens
acattaagcagaatgttccgtaactttaaccttctgtttctaggcaccagatatatgtgacgctaactttctaggggacacctcatcagatattcctcatctcttctttcctaaactcttct

SEQ ID NO: 21803 - DNA, 122 bp, Homo sapiens
gggttcgatgtgatttcccttcctcactctcatgttctttcagccgcagtagagcggccgcgtggacctgtgtcctcgggagacagatgactcactgcccacggaaaggcagctttcccatc

SEQ ID NO: 21804 - DNA, 122 bp, Homo sapiens
ttgatacttctttctgttcttcctggtttggccgcaagctgctgtttccatttaaggatgcgtcttatgacccttttttattagctcccttgggcctcctgaattccttctttaatgaaact

SEQ ID NO: 21805 - DNA, 122 bp, Homo sapiens
ggaagcaaagaaagaaaatggcaaaacttcccaaggtaaggaacagcacaccggcacgtgcggagagtacgccgggtgtgtgcggagaggaccacgcccgcgtgtgtggagagcgctggtgt

SEQ ID NO: 21806 - DNA, 122 bp, Homo sapiens
tacttgaaaaaggactctcttgagggttacttaacacagtcacctgttgatttatgaacacgcacactcacacataccttgtctcacccttttaatcatatcaatttgctgcatctcagcaa

SEQ ID NO: 21807 - DNA, 122 bp, Homo sapiens
cacgcttgaagtttgcgcacttgcacagcaaaaagaccagaaggagatctattacaaagccgagagtaaagttctcccagatgtgacagcaggcatgagccttgaatccaccgctcagggta

SEQ ID NO: 21808 - DNA, 122 bp, Homo sapiens
ccagccctccacttccctctacttgtctcaaaacattcagaggacactggtgggatttcacgagccctgatttccccagctccttccccatatcccccagccctgcaacctccagtgaaatc

SEQ ID NO: 21809 - DNA, 122 bp, Homo sapiens
cttgaacctgccctctgagatcttctagtttctcccgagggtccctcagaaaacccagcccgttcctccccactgccccttaaccccttcccctgccccaggccccgtccgcgccccagcgc

SEQ ID NO: 21810 - DNA, 122 bp, Homo sapiens
cgctgattggcttctctagatatccaatacccaatgggagtgggaagtggggacgcgtcacgagtatcctggaagaaggacccgacacaagttgggagaagaagtgaaactcaggggagtgg

SEQ ID NO: 21811 - DNA, 122 bp, Homo sapiens
agaaaccaactccaggaatgggatttagcccatggaaggtctgcacagaggtctggaggtcggcggccacacccagtcacggacactgtggaggagctgggctcctttggctttattgctct

SEQ ID NO: 21812 - DNA, 122 bp, Homo sapiens
ggcctctgacgcagctggcggagtgttgagaaaagaagcagcgagctttttcttatcgctcgcgtgtctgtggtcagctactggatttcacatgtacttactgctggcttctcttccggcgt

SEQ ID NO: 21813 - DNA, 122 bp, Homo sapiens
gcggtgtcaggaaggccccgaagtcccctctgttggcctcagtcgcgtgatgacattctccggaatcgctgtacggccttgatgaaagcacatttgaacccttttccatctgattgctgagg

SEQ ID NO: 21814 - DNA, 122 bp, Homo sapiens
acaggaacagaagctctcactccgtcacggattctacgtaaaaccggcagctcggttttccggctttaaacggtctttggcttgaaggtcaggtttcactggggacccgttcctgtctgtct

SEQ ID NO: 21815 - DNA, 122 bp, Homo sapiens
gaaaagaccacccttgaggctgattccgggtccagctgggagcggccagccgtaaatcaccgcccccgtgggccgtaccattctggccggggggacctgggaggggacgcgcggagggcttc

SEQ ID NO: 21816 - DNA, 122 bp, Homo sapiens
cgcggggtgagccatcaactccagccgcctgcctggccgcgcaaggcgggaaagtgggggcgcttttgcgcctcacgttaagtttagggtcacgagcactcttgtggagatcgggagcggtt

SEQ ID NO: 21817 - DNA, 122 bp, Homo sapiens
gacttgccgaggctccagggcagcgctgtccaatagaaacatgatgagagccacgtgtgtcgtttcttatttgactcagtaagtccaaaacgttatcatttcaacaaatggcactagctgcc

SEQ ID NO: 21818 - DNA, 122 bp, Homo sapiens
tctcctaactcccaccctaccacgtctcagaatattctagtctcctccccacccacagcccgccgtctagctccgcagcagcttaggagccctgaaggcgagtttccagcccctggtccttc

SEQ ID NO: 21819 - DNA, 122 bp, Homo sapiens
aggagggtttcaccgtctccagggacttggctcgaggaaattaaactctaatgagtagctcgagaaatgttccgggatggtggatgagcgatcatccttaaaagaaaatgctattctgggag

SEQ ID NO: 21820 - DNA, 122 bp, Homo sapiens
aaatcaaaagttgccaataaatggctatcaatgaacaataggaaatgccattagcatcagcggtagtgggagtattatcagatatgttacccaaggattctacacaaaggaagaggaaagtt

SEQ ID NO: 21821 - DNA, 122 bp, Homo sapiens
ggccagcgtcctcacttaggcacctgtcccccagctggcacaccccaggatcagcccacacgagtgacctgcccccacatccaccaatcccctgctcagttaagaactggcatttgctgagg

SEQ ID NO: 21822 - DNA, 122 bp, Homo sapiens
tggaactgcgcgcgggatccgcctcaccccaccttactccgccttctcctccctttcctccggcatcttcaccgacaggatctgctctcccggctccgggcccgggctcatgcagatcctca

SEQ ID NO: 21823 - DNA, 122 bp, Homo sapiens
cctttaatgttcataaacaagccatgtaaggcaggtgccccaggaccccaacactcactccggctgaccgccacctcagtctcacagagcccaggctgcagagtgtctcctcaggcagaaac

SEQ ID NO: 21824 - DNA, 122 bp, Homo sapiens
atctccctgtgagattgtgaggaaggaatgaacaagcatgtagggtgcttaggacagggccgggctcagcttgccgcctcacagcaacaccagcccggagccctgtcctgagcttgacaggg

SEQ ID NO: 21825 - DNA, 122 bp, Homo sapiens
ggaggcggaggttgtaatgagccaagattgcatcgctgcccttcagcctgggccacagagcgagactccgtctcaaaaaaaaaaaaaaaaaaaaaaagtgggtatagatatgagtgcagccc

SEQ ID NO: 21826 - DNA, 122 bp, Homo sapiens
ccagatgtggtcccagcaaaggcagccagtttctggcggaagctctcctgggtggagggccggtcttggtaaggaaatgagggtttttctttgtgcacagccttctcctccgggaagctcac

SEQ ID NO: 21827 - DNA, 122 bp, Homo sapiens
aatcgctgtggagatggagctgtcactgaatctgacagagccctgcactccccagtccgccgaccctttctgtaatccagtcttcactgtagcctgaggaactatttcaacctgctcctttt

SEQ ID NO: 21828 - DNA, 122 bp, Homo sapiens
agagagcaagggggcgcgtggggagggcggggtggcccaagacgctgggccactgggacccgagcgcgcgaccccagccggaattcggagctaaggctgccgcgctccggcaaaacgcgctt

SEQ ID NO: 21829 - DNA, 122 bp, Homo sapiens
gttgctcagcagctgtgtggccgaggtacctgcacagcctccctgagccttggtgtctcacgtggagatctcacaaggatgcagtgcaggtcacatggggcatgcactgagtccccttgaga

SEQ ID NO: 21830 - DNA, 122 bp, Homo sapiens
cgtaaccccacagagcagccggaggcgctccgtaaccccatagagcagccggaggcgccccgtaaccccacagagcagccggaggcgccccgtaacctcatagagaagcgggaggcgccccg

SEQ ID NO: 21831 - DNA, 122 bp, Homo sapiens
gctaccccacgctcttctctttttcttctttcattcctagataaatgaaatagactagaacgttcagaaataggtcggggcagtggctcacgcctgtaatcccagcactttgggaggccaag

SEQ ID NO: 21832 - DNA, 122 bp, Homo sapiens
agtgagtacggctcgccaagttggagcgctctcgcgatagacacagcaactattcagctgcgaggggacgggagaggtggtgagcactctcgcgagatttgaaggagcggcggaggccagag

SEQ ID NO: 21833 - DNA, 122 bp, Homo sapiens
cactctgtgggcctcactctggactgtggtaagaacacaatgagatactggatgtaaaaacgattgataaactatagagtcgcgcgatggaggggcagtttttttgtgatcttggctggggt

SEQ ID NO: 21834 - DNA, 122 bp, Homo sapiens
atgctgttgcccaggctggagtgcagtagtgctcactaacctctaactcctggactcaaacgattgttctgcttaggcctcccaagtagctagggctacagggacacaccaccaagcccgac

SEQ ID NO: 21835 - DNA, 122 bp, Homo sapiens
gccactataaataactgcttacaagtgtggacttacgtttttatttcttttggataaatacgtatttgtggaattgctgggccatgtggtaatagatgggtaactgtataagaaattgccat

SEQ ID NO: 21836 - DNA, 122 bp, Homo sapiens
gtgtggggccgggcctgaccccgggggcccgccccgcgtctgggcggtgccccagtgccccggcctcgccatttcccgctcagccctggagcgcgtagctctaccaagaatggccactgtgc

SEQ ID NO: 21837 - DNA, 122 bp, Homo sapiens
ccttacctaacctactcttaacctacttggtaggtagggttcagatgcaagggagtggctcgaataaagcattttagttatgccttttagaaattagggagcaagagatatatagaaaaatt

SEQ ID NO: 21838 - DNA, 122 bp, Homo sapiens
aaaggggtgccaggaactggcggatgtgattggatttttagtcttattatctgagaaatgcgtcttggctaccattcctgagcgattttctttaatgactctatggttgtgggggggtattt

SEQ ID NO: 21839 - DNA, 122 bp, Homo sapiens
ctaaaattaaaagtacatttaaaacatgcaccctaacactttccttctcactcttgtccccgttttcactcagtttctgaccgttcacctctcgtaggtaaccaccattattaattttccga

SEQ ID NO: 21840 - DNA, 122 bp, Homo sapiens
gcggcatgcaagtgtcatattctgttctttccattaacagcatacaccggattttttactcgagttttcagatgcagactcatgccctgatctcttgattttttatgtgaacacacgtttgg

SEQ ID NO: 21841 - DNA, 122 bp, Homo sapiens
gacttgctgcgggacctgggcgttttctctgaaactgttaacgatcgtgccgtctggccgcgaaaggaacacccaaaccaagaaagcgaaacacctaacagaaaatccatctccaagggggt

SEQ ID NO: 21842 - DNA, 122 bp, Homo sapiens
tgaatcctggtgccatcccttctagttacatgaccttggataagttcattcatctctctgcgctttcatttcctcttttgtgaagcagaggccataacactgcctacctcacagggctgtga

SEQ ID NO: 21843 - DNA, 122 bp, Homo sapiens
ttaataaaaatgaaactcatccactacaatattgataaatcttgacgacattatgctaagcgaaataagctgaatacagaaagacaactactgcatgatctcgtttgtatgtaaaatctaaa

SEQ ID NO: 21844 - DNA, 122 bp, Homo sapiens
cgagcattcccccggcagcggcgcggcccggcggccgctgcactccgcgcaggctgtggacgtggcctcggcctccaacttccgggcctttgagctgctgcacttgcacctggacctgcggg

SEQ ID NO: 21845 - DNA, 122 bp, Homo sapiens
cagtcgggaggcgggcgcggagcggttcccagcgcctggacgtcagccagtcgcaacacccgcgggaacacttgctacatttgccataatgcatttctgatctgtttccgcgcaggcctgcg

SEQ ID NO: 21846 - DNA, 122 bp, Homo sapiens
cccgggctcctttcgcccgctgcagggaccgggcctcgctccgcccagcgtcgggattggcgcccagacacagtagatgacgcacctcagccaattcgcgcagccctcagcttctttaaaga

SEQ ID NO: 21847 - DNA, 122 bp, Homo sapiens
agcccagtattgacgcccacgagtcgcttgtaaagaccgtctgtgacgccggaagtgacgcgctctcgggcactatgtgcttccggtctccaataccgcaggagggcggtcttccccggctc

SEQ ID NO: 21848 - DNA, 122 bp, Homo sapiens
ctgggaccctgctgtgaaatctggagcggggttgttggggggttgaggtgctgaccaaagcgatgccagcagcaacccagtctcctgagtgacccaggccagggtctggaaacaacggggtg

SEQ ID NO: 21849 - DNA, 122 bp, Homo sapiens
tgcttgaagccaggagtttgagaccagcctgggcaaaaaagaaagacaccccacactccccgctgtctataaagaaaaataaaaataagttagccaggtgtggtggtgtgtgcctgtagtcc

SEQ ID NO: 21850 - DNA, 122 bp, Homo sapiens
gagacgccagtgccggcggctggcacgggcggcgcgagtggggagttggcgaagcaggagcggctccggggagcttgtctgtgcgcctggactcctagaggcagaggtagcgcggggcctcc

SEQ ID NO: 21851 - DNA, 122 bp, Homo sapiens
tggaagcagatggaaggagtagaagttgcggggatcaaggaataattcatagagaatagacgccattggagctggaaaccagagaagggcaggagggtgtcagtacagcagtctgcagcggg

SEQ ID NO: 21852 - DNA, 122 bp, Homo sapiens
cggtgcccttaagtaggacccttaaagtaactctacacagaatgtcccttctcagtccgtcggagaagttgcaaactagtgctagtcacaagtaaggtttattgagcccttactcctgccag

SEQ ID NO: 21853 - DNA, 122 bp, Homo sapiens
tcaggtggtttcccaggtgggaagaagggtgggggggacttccatcgtgatgcctggagacgaacaagagaaaaggtgacagggacctagtgcaagagagaggactctttggccacgtttat

SEQ ID NO: 21854 - DNA, 122 bp, Homo sapiens
gatgctggaggaagcgggcgaggtgctggagaacatgctgaaggcgtcttgtctgccgctcggcttcatcgtcttcctgcccgctgtgctgctgctggtggcgccgccgctgcctgccgccg

SEQ ID NO: 21855 - DNA, 122 bp, Homo sapiens
tctcctccaaccttcaaaataaaaccctcactgtccaatatctgaatttatattttcaaacgtctaaaatcttaatcaaagctaagagcagtgcattagcttttccccataaaattgttggc

SEQ ID NO: 21856 - DNA, 122 bp, Homo sapiens
tgtttgtgcgtggtggctattcagtggatactggttgtaatttatataggtgagtacagacgattggaattttgtcctactttgataaatgtgtcggtttcataaattttatttagttttta

SEQ ID NO: 21857 - DNA, 122 bp, Homo sapiens
ttcctttgcactgaaaaatcttcacaatagaaccccaaccccaaccaaatttaggttgggcgatcccgctatgtgcagtcacagaaccacatacttccaatcaaagctttcccacactgtat

SEQ ID NO: 21858 - DNA, 122 bp, Homo sapiens
ccaccccatcccccagcctcagttccctatttcacagccagagtcaaaatactctgacctcgaaagactgagttgatcagtaaattagatcaactgtgtaaggcctgccacatggtaggctc

SEQ ID NO: 21859 - DNA, 122 bp, Homo sapiens
tgaggcgccgcccgcgccgcctgaccagaggatactcgactgccgctcccggagccagggcgtacaggtaatatgctccgcagcatgatggttggagaaagcctgccctcctgtcccggctg

SEQ ID NO: 21860 - DNA, 122 bp, Homo sapiens
ctgcctaccactacaaccccgaggcccaccactgccaccacccgccgcacgaccaccacccgccgcacgaccaccaggcgtccaacaaccacagtccgaaccactacgcggacaaccaccac

SEQ ID NO: 21861 - DNA, 122 bp, Homo sapiens
tgccgggccatgaaaaggaattaagaacaaaaaagccacagtgagaactgaagaggagagcggggctgaaaaggggtgccgagtaagccacactgtgatagactgaatggaaagggtctggt

SEQ ID NO: 21862 - DNA, 122 bp, Homo sapiens
ggtcaactcagccataatgaatagactcagaggctgaccctgccttccagattttcaccacggaagaaagcacacaagtggtagttaaagcatcttgtttcacattgtacctctgctactca

SEQ ID NO: 21863 - DNA, 122 bp, Homo sapiens
gctggagcgggtgcactagggaggtggagcaaggcagatgaggtgtggagggctggcggccgagaagggggcgtcacggctcctaattgtctctacaggataaataaccacctcccccctcc

SEQ ID NO: 21864 - DNA, 122 bp, Homo sapiens
aggctgggaacgagccaccgattggtcagagctacgcggcgaatggcggagacgctgaggcgggtgctaaccaggggcggtgcggcctggtccggggaggagaacatgcctgccgccggacc

SEQ ID NO: 21865 - DNA, 122 bp, Homo sapiens
gttcacagcagatgaataagcatttgccaggcagctcagttatggacgaggtgttgaaaccgacggaatatagcagatatgaaagcatagaggcctgaaacaatagggtgtgttcagggagc

SEQ ID NO: 21866 - DNA, 122 bp, Homo sapiens
ggcaggggcaggggcgtgcatcctgcctcccatgctgtgcccgcactcctgaggggcagccgcagcttttgaattccctggggctacagagaggtctggactggagagtgcagacaaacaga

SEQ ID NO: 21867 - DNA, 122 bp, Homo sapiens
gtttggctgacccaggcactcagcctggccttcagccccactcactgctcagtccctccccggctcccacagcctgcccaggccctcctcacagttccatggccaggtagaggtgggaaggg

SEQ ID NO: 21868 - DNA, 122 bp, Homo sapiens
aggccaacccccgccactccacccccacctacgaagtctgtcactgtcacataggagggacgcacgtaagtgggaccccacatgctatggccaggccaacccccgcctacgatgtctgtcac

SEQ ID NO: 21869 - DNA, 122 bp, Homo sapiens
gccccacggagcttctgtggacccttgacccgccaccctcaggtggaagccatcaggctgcgctggataagccagcctctccccacctctgccattcaagtcggtgccagtgctgactggag

SEQ ID NO: 21870 - DNA, 122 bp, Homo sapiens
ggcgacgttcccgctcgcggctcctgccccgacgaggcgtttccgatctttgccgcagtccggatttcctgggtctctgggcactgaaggggaaatgccctcgggatgtttctagcaacccc

SEQ ID NO: 21871 - DNA, 122 bp, Homo sapiens
tatgccaagcactaggagggcagagacaaacaagacaaagtcctcacacttagaaactcccggtgtggcagctgagatggcccaggaaagaactatattaccttcaaaaagagaggtacatg

SEQ ID NO: 21872 - DNA, 122 bp, Homo sapiens
tgggcactggtaggccacacccacatggccccgggacaccaggtggccttgtctgtgatccgcccacatgcagagccccagaccccacttctccatgtctctggccacggggaaaacatctt

SEQ ID NO: 21873 - DNA, 122 bp, Homo sapiens
gccgtagaaaccgtggctctcctgcgctgaggctcctcgcctgagaggataaactgcacgcgccacgggctatgcactgggctgggcgccttgtgggcatcctccctgccttcctagggggt

SEQ ID NO: 21874 - DNA, 122 bp, Homo sapiens
cttcgggacgccgatgaggaacgggtggatgattccttcaggacgcagatgaggaacgggcggatgacttccttccagacgcagatgaggaaagggcggatgacttccttcaggacgcagat

SEQ ID NO: 21875 - DNA, 122 bp, Homo sapiens
caacagcttagcactttaccgaccttcgccaagattttttggggcccatctgcccgtgcacggcccatctgtgacctctccatgggcttagtgaggtgtaggcacaaagccctaggctggca

SEQ ID NO: 21876 - DNA, 122 bp, Homo sapiens
ctattcttgctgtcggcttaaggtccccctcttagtttatgaacaaaatttctctgccagcgtgcgttgtctactaacaagaccacaaagcccgccttgcctgtggtaaccaagcccttctg

SEQ ID NO: 21877 - DNA, 122 bp, Homo sapiens
cttccccatccccaaagaggacacccctccttccgcccggcccgctccccacccccgccgcggcaccgcctccccagccgcccgcccttgcccagcgcctcccaggcagccagcgagcgaag

SEQ ID NO: 21878 - DNA, 122 bp, Homo sapiens
ggccgggcctgaccccgggggcccgccccgcgtctgggcggtgccccagtgccccggcctcgccatttcccgctcagccctggagcgcgtagctctaccaagaatggccactgtgccagatg

SEQ ID NO: 21879 - DNA, 122 bp, Homo sapiens
cccccctcgggcaggggcacactcacacccatctagggccgggcacactcacacctccctcgggcaggagcacactcacacccccctggggccggacacacccacactcccctcgggccggg

SEQ ID NO: 21880 - DNA, 122 bp, Homo sapiens
ggccaattgcagaaagcggtccccttcttcccagtgccactcctgagtcctggaaaaatccgaatgggtcgtgaaggttcgagtgtcagctcctagagagatcccttcccgcccgctcgggc

SEQ ID NO: 21881 - DNA, 122 bp, Homo sapiens
gtttacagtgagcctatatcacgccattgcactccagcctgggcaataagagcgaaactccgtctcaaaatatgtatatatacgagaggaaaaacgctgaatcaaaacatgtctctttcaca

SEQ ID NO: 21882 - DNA, 122 bp, Homo sapiens
tccgctccggcccctcctgggacccgcactcgcgctccgggcccgctcgacgtcggccaccgacacacaccacgtggagatggctcgggagcgctccaagaccgtcacctccttttacaacc

SEQ ID NO: 21883 - DNA, 122 bp, Homo sapiens
acaagagggaagtgagacccagtgggaaaaatgacttgttcagagtcataaagcaaagtccggaagcaagtctttctggtccattatgtgtgggaaaagtaaacaaaaaccgcggggcgtta

SEQ ID NO: 21884 - DNA, 122 bp, Homo sapiens
tctgaggttcactttcacccctggctcctcctccgtctactacccggcttggacgcacctcggctcgctgtaggcgagctttaggagatttaaatagacattaggcagtggggaaggtagtc

SEQ ID NO: 21885 - DNA, 122 bp, Homo sapiens
cccgcacccaacgctgcagccgaccagctgaccgtggctctgcgttccatgtcctggaggcgggaggtctgaggtatggtccaggcctgaggtttcccgacctccctgggaggagtgcgtca

SEQ ID NO: 21886 - DNA, 122 bp, Homo sapiens
aattgacatcactacagacagcctggttagagaacaaactgcctcatcccaagtggaccccggcagctgggggaagccaggcaagatctgggaaggctgtgtgtgggtgttttttctacaga

SEQ ID NO: 21887 - DNA, 122 bp, Homo sapiens
tatttcaaaactcaacaaagctactggtagtcagaggtgagaactgcaagctctttgtaccgtcaggaatgaataacaaatacattaccctaacttttcttgaggcctacagtgagaaaaaa

SEQ ID NO: 21888 - DNA, 122 bp, Homo sapiens
tcctttctcagtggaattgtggacagcacttactgctcccagcagtgatgtgtggtaacacgcatggagtattgtcaatcagggaagctcatccaagctttgatatccaggaattttattgg

SEQ ID NO: 21889 - DNA, 122 bp, Homo sapiens
cagggggcccgagcagggacagaagaggccggggtgaacatcaccctttctacagtggctcgatgccttgcttcacactccagttttagtgttcgtgtgatacttgctattctctttctaga

SEQ ID NO: 21890 - DNA, 122 bp, Homo sapiens
aaactgaaaggaatggagacaggctgcattgaccagggcatgagctgagcagtagctgggcgctggggctacacatgttcagagagcgatagctagagtctgagttactggttaaacttaaa

SEQ ID NO: 21891 - DNA, 122 bp, Homo sapiens
gcagtggagccaaggggaaatttgaactcccactccacggggacacccagaggggagctccggtgtgggagggtggctcccctgggagccaggcggccgaggagctcgtgattcgacgcccg

SEQ ID NO: 21892 - DNA, 122 bp, Homo sapiens
cccgtcgtgctcacctgcaccggctgcgaggagcagggagctcctcaaagagctcaggaacggacaggacatggtgagtgcagggcaggagccgagccggagccggagccctgggaggggag

SEQ ID NO: 21893 - DNA, 122 bp, Homo sapiens
cctcaaggacaaacagggaggtataccagcctgaactacttttcctggtttaactctcctcggagctgaccaggtaacccagtagaagaatccctcattctttccaacttgccagacactca

SEQ ID NO: 21894 - DNA, 122 bp, Homo sapiens
caataagggcaagaaacatgtaacaactgctaatcctctattaaaagttccttttttggccgaacgtggttgctcatgcctgtaatcccaacacttttggaggccagggcgggcagatcact

SEQ ID NO: 21895 - DNA, 122 bp, Homo sapiens
cgtggaggacaagtacaagtgtgagaagtgccacctggtgctgtgcagcccgaagcagaccgagtgtgggcaccgcttctgcgagagctgcatggcggccctgctgaggtaggcgccctcgc

SEQ ID NO: 21896 - DNA, 122 bp, Homo sapiens
tgttgccccatgtttgggcatggcctcctcctagctctgtctgacaggacccaggaggcacgctcacctgcatcaggtgctcagcagccatccctctgcctattagctgcacctgggccctg

SEQ ID NO: 21897 - DNA, 122 bp, Homo sapiens
ggacttgatggtctggatggtgtgggccattcatatcatgacactgacaatgtgtctcaacgctcttctgaaagaatggggtgttagtcctttaaagatattcatatacttttctttgaaat

SEQ ID NO: 21898 - DNA, 122 bp, Homo sapiens
gggaagcgtatgctaaatatttcctgcagtgacggaaagcagcagttatcccccaacatccggagccccaacaaccctggcgtctgaattctgaacattctaaatcccacatccacggccaa

SEQ ID NO: 21899 - DNA, 122 bp, Homo sapiens
tctccctggggccggcggccgcggcccccgccccaccgctcccgcggctgggccaccccgcgcgggctggcacctccctgccaccggcagctgctaccgcagccaggggcccgcctgcggac

SEQ ID NO: 21900 - DNA, 122 bp, Homo sapiens
gctaagtttccaccttgtggaggtgggatgacttgcaattcccgtctcctgattcatccccgggttactgattcatttccctggaatctggactgcttatggccatgcccccagctgctgct

SEQ ID NO: 21901 - DNA, 122 bp, Homo sapiens
gtggttctgggctatcgggctgagcgtcccaccctggggtttggggatgggaagtgatcccgagacctctggcccttcagatgtcaggacaccctcactcccgacaaagatgcctttattgg

SEQ ID NO: 21902 - DNA, 122 bp, Homo sapiens
tctaaccttgctatgctttagttttctcatctaggatgataattgtacctatctctaggtcgttgtgagaattaaggaacataatatatgttaagtaactaatatcaactaacttaataata

SEQ ID NO: 21903 - DNA, 122 bp, Homo sapiens
acctcaggtgatccacctgcctcggcctcccaaagtgctgggattacaggtgtgagccatcgtgcccagccacaagtgacacaaactctaacttgaactagcttgagtgaactagttgtatt

SEQ ID NO: 21904 - DNA, 122 bp, Homo sapiens
tggcagtgttgctgaattgaaaggaggtgtggaggctgatgaactgtcacagccttatgccgtgtgggcctttgatagctcttgagcaatagggcattcccagggaggtgctgtgctgtggt

SEQ ID NO: 21905 - DNA, 122 bp, Homo sapiens
aaaacacctggtcaataatttctaagtgattgtgcataggttctttaggctcttcagtagcgggaagtacagtttctgggtttaagactccagcagtctgcacttttactgcagggtcatct

SEQ ID NO: 21906 - DNA, 122 bp, Homo sapiens
caccttgttctgggtggaaactggacactaagtgcccagcctgcttcttccagggagctccgacaccacgctctatcagaacgtgtccggcgctggcccacccttgccgctgctcatggccc

SEQ ID NO: 21907 - DNA, 122 bp, Homo sapiens
agcgccgcctcaaagggtgcaaccttgatttcccagaggacgagtctgtctcagtatctacgtcattccgtagcctccgctgccgccatctttgttggggctgacaacctgcaagccaagaa

SEQ ID NO: 21908 - DNA, 122 bp, Homo sapiens
gtttatgttgggtcgccgggtctctggcagcctgacagactacctgatgagccagggcaccggctgcgtgcccgaggacgggctcaccacgcagcagctcttcgccagagccgacagcctca

SEQ ID NO: 21909 - DNA, 122 bp, Homo sapiens
cggtcgggaagggtggaatccacgggtgcgaatccacgggcacgtgtgatctggggtccgcggagttaaggcggggaggggcatgggatggggccggcggctatggttttccagtgccctct

SEQ ID NO: 21910 - DNA, 122 bp, Homo sapiens
gagaagcaggatgaggaagagtgagggaaggcggggacaggctctgcccagaagagctgccgcctcctggcacagcaaacgctccaggcctgggccctgttcatatctggagtcggagggag

SEQ ID NO: 21911 - DNA, 122 bp, Homo sapiens
caggtgggcaccgtcctaccctccaagtccaggacggcttctgagaggatggcaggcagccgctcaaaagagcgccacccttgggggccggagacttggggtacggccacccgcgtgctggg

SEQ ID NO: 21912 - DNA, 122 bp, Homo sapiens
caaggggtcttcggggtgaaatgtccaaataagagagcggggagtggacgcgcaaagatgcgtcaaaaggatggaaaaggcagctttgcccttcgcaaactgagatctcctttgtccgcgaa

SEQ ID NO: 21913 - DNA, 122 bp, Homo sapiens
ttcgacttctctgcaaatttccaccatatgcatttccatagcaacattgcaacacaaacacggtgtaatctttgtccactgcagtacatagcttgaaaggtttttttgttttgttttgttgt

SEQ ID NO: 21914 - DNA, 122 bp, Homo sapiens
gggtaagcaggggcctggggacattgggccgggaggggtgaccggaagggaagacaaacccgggcctcggggccactccctgttctgcacagccgcctcaggcctttgtccaggtgctctcg

SEQ ID NO: 21915 - DNA, 122 bp, Homo sapiens
gcctcagccccggaagtgctgggattacaggcatgagccaccgtgccgggcctatatttacgtgaataaaagtggtagaaatagtcctagtaaggacagaaataccagtcagtaaaagtaac

SEQ ID NO: 21916 - DNA, 122 bp, Homo sapiens
ttcagcttcaatcccagaaaagtggatcaaaacgacaggttccacgaacaaacactgcgccggcgcctctactttggagaaaaggaaaagggcgtgaggtttcggtcatttttgtcaaagga

SEQ ID NO: 21917 - DNA, 122 bp, Homo sapiens
gaaggcaggaaggggacaggggtggtaggtgaggagagtccagaattatttctagattaacgcagtggaaaggcaatagaatgcgaggcagtgccgttttccatgcagtacttagttaactc

SEQ ID NO: 21918 - DNA, 122 bp, Homo sapiens
gagaccaagtgtctatgagaactgctcaagagtgctttgcacattctcctccacaaaggtcgaggctcccactgcgcccaggaatgcgcctcgtcagacattaggcgccccttgattttgtg

SEQ ID NO: 21919 - DNA, 122 bp, Homo sapiens
cagatctctatctgtactccctcccttggtgagctcaactaggctcacggctttgaataccggcattatactgacaacttccaaatttgaatctccagcctaaaacattcccctgaaaccca

SEQ ID NO: 21920 - DNA, 122 bp, Homo sapiens
tatttacatactcaaataactacgtgtaaacccttcaccgggtttttatgattcgggaaacggatttcatccgtggcctgggcgggggtggggtggggagggaagtcaatgtcgtttcctca

SEQ ID NO: 21921 - DNA, 122 bp, Homo sapiens
tgcccagcctctctgtgctaatattaatagaagagcccctgtgggcacgcggcaggatggcggtgccacacaccggaagaggggactcaccagaagctgcactggttgacacgttggtcatg

SEQ ID NO: 21922 - DNA, 122 bp, Homo sapiens
ctgctgttcattacagttgattcttaaggcagcatccggtgatgcctttgaaacatacatcggcaaagtcttaatcagatgaaagccaaaacccctacacctgtgtaaggcgccacattatc

SEQ ID NO: 21923 - DNA, 122 bp, Homo sapiens
tcagggaggcggggctcctctgagcccagctaggccaggatttctctgaggcctctgggccggacttccagtggggcacccctgcggctcggtcaggcgcgtgggggaagggcagggcaagt

SEQ ID NO: 21924 - DNA, 122 bp, Homo sapiens
gcaccaccatgcccggctaatttgtttatttttgtacaggcagggtttcaccatgttgcccgggctggtatgggactcctgagttcaagccacccacctgccttgggctcccaaagtgctag

SEQ ID NO: 21925 - DNA, 122 bp, Homo sapiens
gcagcgcggcgaggctgtggttctctgcttgtgcccactttgtgtttgtaaatagcgagtcggagtcggagctggagctagtttttcatcatctgtcggcttctgcagaccaatgtcatcat

SEQ ID NO: 21926 - DNA, 122 bp, Homo sapiens
ggcgagccccccttggttctggagaggaaatgacatacagtttgtgaaagcataaatattcgtgaaaataagaaaattcaggaaggaaacaaagcttaaggcagtgattgataggttatttc

SEQ ID NO: 21927 - DNA, 122 bp, Homo sapiens
aaaggtgtgttgtcattcaagttattgagagtaattgtagcaaggacttcgacttcccggcggtacggcaagccccagtctgatgcacgaatcctcagagtataaacccgaggcatcagttc

SEQ ID NO: 21928 - DNA, 122 bp, Homo sapiens
ctgtgtcaggccactgtgtcaggtgtcaggcttagcccagagagagtgaggtggaggaggcggagggtgtaacccagccaggtcctcttcacataagctatcagacaagctcctcagggcag

SEQ ID NO: 21929 - DNA, 122 bp, Homo sapiens
ctctcatttactccttatgcagtagctctacaccacaatctgttctcctcttccaagagtcgtagctggaacatggctgtccagcctgggactgcattcctcggtcaccctggaagccaggt

SEQ ID NO: 21930 - DNA, 122 bp, Homo sapiens
tttgagcttattgtgctgggtgctagagtagcagggaggacagacctaagttgaagattacgggacaatctaagtgacacctgctatctcagacagagacttcagcatcatagggagccaga

SEQ ID NO: 21931 - DNA, 122 bp, Homo sapiens
ccaccccgaacaggcactatgctggggtcttgcatagaactgcaggctccttccctgggtcggggtgccactgctgggggttacagtgaagaattcgccagacagaccacacatcacacctc

SEQ ID NO: 21932 - DNA, 122 bp, Homo sapiens
tatgaactaaattcctctctgtctctgtggatgcccctgttccggacatttcatatgaaacggaatcctacaatatgtggccttttatggcttttttcacttagtgttcgagggtcatccat

SEQ ID NO: 21933 - DNA, 122 bp, Homo sapiens
tgtttgttctttgcaggggggctatttcctaggggcgccgatcaagaatacagtgcatttcgagtagggatggttcagttttccacttcggagttcagactgacaccccacatcgacaattt

SEQ ID NO: 21934 - DNA, 122 bp, Homo sapiens
taccgctgtctgcaacacgcttgcactgcaaacgcactctgcagccggcggccggctgggcgccgctcatgggcctggtgtgcatgcagctgcgcagagggcctctgcctgccgcctagaat

SEQ ID NO: 21935 - DNA, 122 bp, Homo sapiens
gcagtgaggtttgggaacaacaacctcggaaagtttctcagcgtcccctccatgccccagcgcccagtgcaggtgactctagcaatatgagaactcggtttttgtgtgtttaaaccaaactt

SEQ ID NO: 21936 - DNA, 122 bp, Homo sapiens
tccaagactccaggcagccctgggctgccctcccactggtgagccctaaggctggagtcccggccatcccagggaccagcagcctcccacatgctccttcccactgtggccggccttaggca

SEQ ID NO: 21937 - DNA, 122 bp, Homo sapiens
actcatttttgttcaaatcgtatattctttcttctgtgccaacaggctagaatcattttccgcaaaggaaacagtttttagtgatgtcgtccacgagaaaaaaaaatatttaaccctggctt

SEQ ID NO: 21938 - DNA, 122 bp, Homo sapiens
acgccgatgtggttcagagttttcactgagagcctcgtaaaagctctagctggttggggacgcttattgttcattttatttgagttctttatcatgtgcaaaatgttccaggcaccattagg

SEQ ID NO: 21939 - DNA, 122 bp, Homo sapiens
ctctttaaagacacacctagaagtggaatccatcattttccttctactccatctgctaaacgtagctcatagccagagatggctgtaagggaagctggaaaatataaatcttattctgatgg

SEQ ID NO: 21940 - DNA, 122 bp, Homo sapiens
caacagccccgccctgcacatcggcagtgtcagcgccacagacagagactcaggcaccaacgcccaggtaacctactcgctgctgccgccccaggacccgcacctgcccctctcttccctgg

SEQ ID NO: 21941 - DNA, 122 bp, Homo sapiens
gagcccaagtgcaaaacatgctttttatatgtgcgtcgggaagggtgcctctgttgcaaacgtttcagtgtagtttagggtcatatccctagtgcatgcaggtgaatgagaggcatctagac

SEQ ID NO: 21942 - DNA, 122 bp, Homo sapiens
ggtgatccacccaccttggcctcccaaagtgctgggattacaggtgtgagccactgcacccggctgatattggccttttaaggaggtaattaacacgaggcctttagactggggcctaatcc

SEQ ID NO: 21943 - DNA, 122 bp, Homo sapiens
caaaacaaagcaaagcaaaacaaaacaggccagagagttctgtaactaatagaagcccatcgttttaggtgtggacagatagggggtgcagcaagaagaagtccttggggctacaattggcc

SEQ ID NO: 21944 - DNA, 122 bp, Homo sapiens
aactccacctggggcttcgttctgagctgcgcatgcgctattgcttatctctacccaccccgcccctgaataagcccgcaggatgtgattatatctgagtggttgattgactaatactgtga

SEQ ID NO: 21945 - DNA, 122 bp, Homo sapiens
ttgttggccacagccatcgggtccgtggaagtggccgaacagtgaaccacaatgccctggcgttccagcagcccgagtacatggtgttcgtgaaaggtaacaacccgcggggctgccacgac

SEQ ID NO: 21946 - DNA, 122 bp, Homo sapiens
gcatcggccagccgggcgcggcggcgcccccggacttcctgcaggtgccctacgaccccgcgctgggctcaccctccaggctcttccacccgtggaccgccgacatgccggcgcactcgcca

SEQ ID NO: 21947 - DNA, 122 bp, Homo sapiens
cgcctttgcgagggcggagctgcgttcttcccagcacagccaaggagagcatcgccagggcggagctgagttctcctctgcacagacttcagatatacagcgaaggcggagcagtgttctcc

SEQ ID NO: 21948 - DNA, 122 bp, Homo sapiens
gatcctctgttccattgtctgtctgtctcctggacccatcctggcctcgtctttgccctccgtcgcagcctggccttgggcctgcccttcccggggacactcggtctgatccccttccctcc

SEQ ID NO: 21949 - DNA, 122 bp, Homo sapiens
atggtggtggggctggagtcccacaggagctcttcagctggtagccctggaaaaactggacggaggcggggtcagcccgggctcacctgcgagtgggactagaggctccccagccctgcgca

SEQ ID NO: 21950 - DNA, 122 bp, Homo sapiens
ctcctggcagcaattgcaacaggcacactaaggggccaagctgcatctcctggcagtctgcgctggctgcctgcacccccctgaccctgtgctgctgagctgggatttgagaatggggatgt

SEQ ID NO: 21951 - DNA, 122 bp, Homo sapiens
ctgcaggtatggaaaacactgcaccatgacaaagggcttttgagcgcacgtctgaagatccggcctctaacttcagctatgctactaacagcccttctgatgcagagctgtttccctccctg

SEQ ID NO: 21952 - DNA, 122 bp, Homo sapiens
ggtcaggacccgtgtccttagtcccacagagggacgggacgggcagcaggtgcggtgggtcgcctagcagctgaggagctggcggtaacctgcggcggtggtttacagcctgcagctgcacc

SEQ ID NO: 21953 - DNA, 122 bp, Homo sapiens
aagtcactatctgatgataacacagggcaattccaatggttagcaagtgtcataatgtcccgatctgcttctgaaaagcactggacaaaacacacccgcagcttgatcaaaacctgtatgaa

SEQ ID NO: 21954 - DNA, 122 bp, Homo sapiens
gcagtggggcagaggctcagcccccagccttctggaccccacgctgccccccagaggcctcgaacatccagggaatgccaaccacagcaagaatacccctcccagagacagaacccaccaag

SEQ ID NO: 21955 - DNA, 122 bp, Homo sapiens
cctccaggtgcccggcatagcggtggtaggtgctgcgcaggtgcacgcgatcgtggtgctcggctacctggagggcctcctgccaccggcccgcagcctggtagaacttgttcaggaggtcg

SEQ ID NO: 21956 - DNA, 122 bp, Homo sapiens
ccctcagtgcatgtgacggggtgggagggggaggtttcttcctcccccgtccccaagccccgccttctccagagaggctgcggcttcctattgcgccaccaccgaaatgaccaccgtgccag

SEQ ID NO: 21957 - DNA, 122 bp, Homo sapiens
ctttatttccagggagctgcacaacctggggtcttctctggggccgtgggctctgagggccgaaggccacgttccccgggtgttggtgtggacctcggcacggcccccactgacctgcatgg

SEQ ID NO: 21958 - DNA, 122 bp, Homo sapiens
ggctaacacggtgaaaccctgtctttactaaaatacaaaaaaagtagcccgacgtagtggcgggcacctgttgtcccagctactcaggaggctgaggcaggagaatggcgtgaacctgggag

SEQ ID NO: 21959 - DNA, 122 bp, Homo sapiens
atcttcccaatcataaaaatgatgcattgctaggataaaatgttgtcttggtttcatgcccgccatgtgttacacaatcctcatctcttcctccacattcatcaacaattttcccatttaaa

SEQ ID NO: 21960 - DNA, 122 bp, Homo sapiens
tgtgtctgcctttgaaaagagcaactcgtgctttcaagctctgcccctgggggctgccaccgctgatggagtggggattacaagggatggggattgggcgcccggctgctcagccctgcagc

SEQ ID NO: 21961 - DNA, 122 bp, Homo sapiens
tttacgcgtttgctccctcccgccgcgttcacctgtcgggtcgctttgcctgtccggagccggctcccaactgcagcggtcctcccgccctgcgcctcgcagaggagatgcaggttcgggct

SEQ ID NO: 21962 - DNA, 122 bp, Homo sapiens
gcgggacctcgtttccaactcagaagcccccggaacgcggctgcccggcttgggagcctgcggcacagggccctgtgcagccccttggggaagacggccccaggctctgccagcccccgcca

SEQ ID NO: 21963 - DNA, 122 bp, Homo sapiens
ccaggctgccgcgccggggctaggaggagccgcgttgtgtggcttcgctttcctgatgctcgggtcaaaaactgtgacatccgataagacccagaacttatgtttccccctgataatttccc

SEQ ID NO: 21964 - DNA, 122 bp, Homo sapiens
acacacctcctgctaggccctacctcacaacactatcacactggggattaaatttcaacacgatatttggcagggacaaatcacatccaaactatagcactgactcaatatattttacagtt

SEQ ID NO: 21965 - DNA, 122 bp, Homo sapiens
agcgtttattttcaattttaatttttatgtacagtctctggctaagaacacaggagtaagcggcaatatagtgtggcagtcaacagctgaggtttttgagccagacaatctgggttcaaatc

SEQ ID NO: 21966 - DNA, 122 bp, Homo sapiens
aaatacatacttaccgtaaatcctgcccttcgtcaaattccctgtggtatgtaagccctgcgtctgagccataacagtgtgggggcccagtttctcactgcccgagacaaggcttctgtttg

SEQ ID NO: 21967 - DNA, 122 bp, Homo sapiens
cttcctaccactgagaaagaggcaaagagcttctggcagcctctaccagggacccagctccggctcacttactgaataactcaaaaggctggtagctttgtgtgaggtccgtagcaagagag

SEQ ID NO: 21968 - DNA, 122 bp, Homo sapiens
cccgacacaggccgggcgcgccatccggtgcagctgggagctgggccatgtgtcctaggccgcggcggggaaggggcgagacccccgcgacctccggcgttccctccctgcccccatctttg

SEQ ID NO: 21969 - DNA, 122 bp, Homo sapiens
aggtgctgtgcatgccgctgggacacaggtagatgccagcgctgccggggaacaggagcgcgaggccacccccacactgagctgtttcgtgagcttgtcagccttcactctcgtccacttgg

SEQ ID NO: 21970 - DNA, 122 bp, Homo sapiens
agaaaaccctcattcccattcatctttgaaagaactagttcaagtgttctatatagtattcgctagctttgcttcttcccaccccccaccaaagaagccgccctcttctggtttccgtggca

SEQ ID NO: 21971 - DNA, 122 bp, Homo sapiens
tcactccagctactgtgtggggaacggattacagagggcaagactgaaggtaaggagacccgttagaagattgttgctataatatactccaagctagatatggagcactgtgctaggatcat

SEQ ID NO: 21972 - DNA, 122 bp, Homo sapiens
taggattcacgggtggctgaggcaaacacgcttgaaggcctaagacttttaagtctcttccgcaccctctcttctgtctcttccacctggaggatgaccgcttttttgggggttttgttgtt

SEQ ID NO: 21973 - DNA, 122 bp, Homo sapiens
ctcttgcgagcagccttggtagccagctgcttgcgtggcgctttaccgccggtggatttccgagctgtctgtttagtacgagccatggcaaaaccacagaaaagcttgcctgcagagacgtc

SEQ ID NO: 21974 - DNA, 122 bp, Homo sapiens
tcctggagtttacaaaagcccttcagagtgtaaacaccgatgtggattcaatcccacttccggagagaggatcaaaccaggaatctaatacaactgaaaacggagcctgagccaggtgtatc

SEQ ID NO: 21975 - DNA, 122 bp, Homo sapiens
cgtacactcttctgagagcacctcgcgggcagggcttgtgctgttcatccctgtgttcctcgtgcctagcccggtccttgacacacagccagtgcgcaataacaattgtcgagattcattca

SEQ ID NO: 21976 - DNA, 122 bp, Homo sapiens
tgcgcagccttttcttcaaggcaggttggttcctgtatcttgtcttaatctgttactcaacgaatgtaatctccatttggtcacagcctaatcttttcggcccaggggctggggaaaggagg

SEQ ID NO: 21977 - DNA, 122 bp, Homo sapiens
gcgaggcccggcacggggccacgtgggggcggggtccagcccgcccacctgccccgtccccgtcctaggtcattaagcacaagctgtgccgacgaggaaaatgccagaaggaggccaaaagg

SEQ ID NO: 21978 - DNA, 122 bp, Homo sapiens
gatggatatggcctcagtgccctggtttgctgactcctgcactaatctctttccactttccgaagtgcaaaaagccacagggaaagcagagtttatactgggaaggaaatctaagggtactg

SEQ ID NO: 21979 - DNA, 122 bp, Homo sapiens
gttttgcctaccatctcactgcctactgcgctgctgagaataaaatgcagtaccctgggccgcagagatgagtcatctctccaatcagctgcctctggttgagtaatgggtattgctcagct

SEQ ID NO: 21980 - DNA, 122 bp, Homo sapiens
tttaaaggaagacagacacgaggctggccctggattcgtgaacagtagctctcacgctctcgaaatcgtgtccaaaattttgtgcccaccgtgattttctgcaagcacaaagacagcagcgg

SEQ ID NO: 21981 - DNA, 122 bp, Homo sapiens
agggtcagtttgggaatatctgagtagcatacatttgtgaagccggcatctgtgaagctgcgtgatgcatgcagagaagcattacctgctccaaaataaaactgggcttcaggctatggccc

SEQ ID NO: 21982 - DNA, 122 bp, Homo sapiens
atgagcactattcatcagcagtggaaaatcagtttttagcctatcctaaacctgcattaacgcagactgtttttgaatttttaatcatttattcaggaacattagtaaagtacaactttgaa

SEQ ID NO: 21983 - DNA, 122 bp, Homo sapiens
ttcaatcaaagcattagatgggatatctcaagttttaacacgacgttttggcaaaacatacgatgctccatcagccttacctaaagctaccagaaaggctttgggcactgtcaacagagcta

SEQ ID NO: 21984 - DNA, 122 bp, Homo sapiens
aggagggatacggaccttcttttcacctctgcttctctgtaactgcagttggagaatttccgccccagaggcgctggtgctgcaaggaggcataggagggtggagtggggtggatgcggtgg

SEQ ID NO: 21985 - DNA, 122 bp, Homo sapiens
gaaaccaggaatctactttctctccgtatggatttgcctattctggagagttcatataaacggaagtatacagcatttgaccttttgtgactggcttctttcacttactataatgttttcag

SEQ ID NO: 21986 - DNA, 122 bp, Homo sapiens
cccttccacgcgtcaccgtgacagattcgcaggaggcagcgctcccgccgtcagtgcccccgcaccttcttgtgcctggcaggctgggaggtttgtttgggctttgccttcaagatccaggt

SEQ ID NO: 21987 - DNA, 122 bp, Homo sapiens
agaaggcggggttcaccccttttctattggcccgcggggctgagtgacagcggccctcaccgcccctccggttccaagctaaggaatgggggtatcagcaaaattgcaagggagctgttctt

SEQ ID NO: 21988 - DNA, 122 bp, Homo sapiens
aagagcttgttgtgcgtatgtacaccctgcatgtgcagaatggcctgtgtgtttgtgcctcgtgggggctacttggaccctgtgggtatctcactcctaggagagcttatctgggtgttgca

SEQ ID NO: 21989 - DNA, 122 bp, Homo sapiens
gaagtgcggctgctacgttgtagcagaagggcggggccctgcggggcggggccggggcgccgtgggcgcgcggggacaatgcggcgttgcccgccggcaggggcgcgctaccttgggccccg

SEQ ID NO: 21990 - DNA, 122 bp, Homo sapiens
tgaaggagaaacatagtaggaatgtagatttcggcaatgtcatcctctctccccttcctccgttaaatcagcatacttaggctcactcacactaccctgctgagtttctcctttaagcaact

SEQ ID NO: 21991 - DNA, 122 bp, Homo sapiens
actggccgcccgtgcatccagccaagctcctggcggacggatatcggaggcccaggcattcgagggacgtgcagttgcatcacggagagcctttgggaaccgtctggggtcttggcggagac

SEQ ID NO: 21992 - DNA, 122 bp, Homo sapiens
cgcaggcctcgagaggctccggaagtactgggtgcagcctgatggcgcaggaggtagacacggcacagggcgccgagatgcggcggggcgcgggcgcggctcggggacgcgcttcctggtgc

SEQ ID NO: 21993 - DNA, 122 bp, Homo sapiens
ccttctctgcccacttttcctcttcatctccttgcttccagcctagcagtctcttcactgcggggctggtgaaggagaagagggagctgatgggggtggtggagtgcataagaggccacagc

SEQ ID NO: 21994 - DNA, 122 bp, Homo sapiens
ggtgggagggagtgcatagagagtgatcacaggggcaatggtgcacagttttgaccatctcgtgtctctggcatgtcctagtgcttgagagtaccctacaaagaggactgtgtagaagctgt

SEQ ID NO: 21995 - DNA, 122 bp, Homo sapiens
caacagagaattgaaaacctttggtgacagagcacgcagagggataggtgggccaccatccgtgctgcttgggtgactcagccattccagcctccaggctttggggagcccaagctgactag

SEQ ID NO: 21996 - DNA, 122 bp, Homo sapiens
cttcactgtattcagcaatttttttaaaacaatcccgaggcaagcaatgcctggaagatgcggttgagaataaaaatgaatgacattgtcactaagggtgagctcaaggtaatgaaaactgc

SEQ ID NO: 21997 - DNA, 122 bp, Homo sapiens
ctacgcgcggggaggcgcgggcgccgctgtcaccgccgccgccgccgcgcccgccccgcccgccgccccctgcacgcgccttccccgcgccctgcacacgctgctcctgcacccgcacccgc

SEQ ID NO: 21998 - DNA, 122 bp, Homo sapiens
ttccagggattgctgggtcaccttgaatgctaagagtagagaaaaagccaaaacgggcagcgagacttacaggaagtcttaggactctgcaagaaagcagaaataggcaagtttaattttaa

SEQ ID NO: 21999 - DNA, 122 bp, Homo sapiens
cgcgccgcgcggagatgacagccgaggagatgaaggcgaccgagagcggggcgcagtcggcgccgctgcccatggagggagtggacatcagccccaaacaggacgaaggcgtgctgaaggtg

SEQ ID NO: 22000 - DNA, 122 bp, Homo sapiens
gccacagtcgctgcccttacccaagatggcggcccacaccgcttccgtcgctgctgtagtcgcttcctgcggccagcccgggttcaatcagcggccgacaactgtctagggctcagacacca

SEQ ID NO: 22001 - DNA, 122 bp, Homo sapiens
aaagctggactatttttctgaatgatccacatccaaaacagtgtctgcctgcttttgttccgcgcaaacctatctcaaatgtagaaaggtcgctatgtgcttcttcaccaggcaaagacctt

SEQ ID NO: 22002 - DNA, 122 bp, Homo sapiens
gcagccaggtaggcctccagctcggccaggttgtggctggtgcggaagaagatgctgcggcggttggaggccacatagcgggatttgtgcaggaggtgcgccaggcagcagcgggctgtgtg

SEQ ID NO: 22003 - DNA, 122 bp, Homo sapiens
cgcgggcttggccacagaggccctccacgtggtttgaagtcttatttatgaccctgacagcggggctgggtgtctagggtggtggcggcagaaaccctggagccaacaccttcgactgcccg

SEQ ID NO: 22004 - DNA, 122 bp, Homo sapiens
cttaatgtgattcctacctgtgtgactttgcttatgatgctgtgctttctgcctggaacacgtcctctccatcccaatgccaataatctctcgcagctaaaatcctaccaaccctcaaaggt

SEQ ID NO: 22005 - DNA, 122 bp, Homo sapiens
ccaatgacgggccaggacacgggcgatttctgcgggccagggcggcggaggtgggacttccgcttcgtcgcgtgacgtcatctccgtgagcaggattggccctggaacagtgtggggcctgg

SEQ ID NO: 22006 - DNA, 122 bp, Homo sapiens
cgtcttcagtagggttcctggaagctgcgactccacgtataatgagtcgcagtggatccacgtataatggatccacgtataatgaaaccgatgttttttcctcatccaccttgtaaggaatc

SEQ ID NO: 22007 - DNA, 122 bp, Homo sapiens
ctcctgaggccgcatgaacaagcctgggggcggggggtggggtgaaaggctgcaccacagcgctcagggcccactgggtgtcgggctcctctctgatgtggcttgcactaatcagacgcagg

SEQ ID NO: 22008 - DNA, 122 bp, Homo sapiens
tgtgcaaaccccatccagaaatcaagcgttatgctttccgtcctggactggagccagatccgttgtcttttactttctggagagagtgccccctccaaccaagatttaaaacaaacgaaacc

SEQ ID NO: 22009 - DNA, 122 bp, Homo sapiens
agacagcctgcctagcacaacacagggaggcccccaaatggctcattcctcagccatcagcgactgtgtcctgaacacccaggcaacatgaagccagctgtaacttatgaacacgtcacctc

SEQ ID NO: 22010 - DNA, 122 bp, Homo sapiens
gaggcgccgccacgccggtacttacggcccgggaggcggtcccgcgtggagcgcgcgctccgctttccccgccccgggctggctgcgaaaaccgccggccttaaagagcccgcgacgcgggg

SEQ ID NO: 22011 - DNA, 122 bp, Homo sapiens
acgtgggccttttgaagacagagattttgacttatagagaatttaggaatggtcattttgcgctgatggctggcgtgtgaggcagacaagatttgtgaaaatatggaatactgtcaagtggt

SEQ ID NO: 22012 - DNA, 122 bp, Homo sapiens
tgttgcctgggttaccagagctccgccccacgcccttgcgtatatccggcgagcccagtgcgcaggcgcctcccaaagcctatctcgggtcctgagtctaagggagagaggttcctctgcaa

SEQ ID NO: 22013 - DNA, 122 bp, Homo sapiens
agagggggaggagtccgggaggagaggctccgcccccgagggcggggcctggatccccggcgccccctatcgcccacctcctgctttgccgtggcggcgctaaacgcacccccaaagctgcc

SEQ ID NO: 22014 - DNA, 122 bp, Homo sapiens
cctttagcactgctgctcggggctgccccacccacccctaccctcattgggccagctccacgcccatcaccgccgcccccagacccactggttggtttgcgcgcccatctccaagggaagac

SEQ ID NO: 22015 - DNA, 122 bp, Homo sapiens
gcacccgggacagtttccagtcggcttctccgtgaccttcctcccccttccagctcggagcgggatgctgggatccctccaaggaccctctgaggacgtaggagggatgctgagacaggcaa

SEQ ID NO: 22016 - DNA, 122 bp, Homo sapiens
atgaccttagcagttagcgtcaacctccgcactctatgacctttccaaaatgatggtgaacgtaatacgcaccacactctgaccttctcaagatggcgctgagctgacaaactcgcgtcgca

SEQ ID NO: 22017 - DNA, 122 bp, Homo sapiens
ccatgccccgtgttctaccaacctcatctttgtgaagacacttcccttggtcctgccacacgtggactggtgcatgcacatctgggctgatttccaagatcgtcttcacctcatcctgggca

SEQ ID NO: 22018 - DNA, 122 bp, Homo sapiens
acaggggtccgagctcagggaccacgcgacagacctgggaagactgatgactgcccatcccggcccctcgcgccgggcgccgccgccgcgtccgccgggagcgcgctccgctcgggtccggg

SEQ ID NO: 22019 - DNA, 122 bp, Homo sapiens
ccgcgcgcagcgagggatcagaaggtctcggacgccgcggcagggccggccagggccccacgagttagggagttgccccgcacccctaaacgctcagcacccatttacggttgaaagtacgc

SEQ ID NO: 22020 - DNA, 122 bp, Homo sapiens
catgagaaaccggagaaaagcctcagcctaaatggagcctgctgtgctcggctcccttcgcgcccgagcttaacaagagagcgggtgtcctcgatttcctaattacagcaacgacgcagagc

SEQ ID NO: 22021 - DNA, 122 bp, Homo sapiens
ataacccattccccaactccctgaatgctcaggactccaggagggtgggcaacccccatccgatggacacctgccaagtctggcctgtccatacagcactccccacttctccagctctgcac

SEQ ID NO: 22022 - DNA, 122 bp, Homo sapiens
ccaagggcctgacatcacaaggggaggggaaggcagctgaggttgtggggggaggtgccccgccccttggcaggcccctacagccaatggaacggccctggaagagacccgggtcgcctccg

SEQ ID NO: 22023 - DNA, 122 bp, Homo sapiens
accacttttgatacagtaagaggttttttcctttcctccccctcccccactctttttttgcggggttggacatcagagacgaatgaaaaccggatgcgcacacaaacaacatttgcctaaaa

SEQ ID NO: 22024 - DNA, 122 bp, Homo sapiens
gaactccgggatgaacaaaggcaaggaaacggctgtgtaaaaatcagctctactgacgcacggctgggtgctcagcggacccgcacagaaccacagtcctacctggcacgttctgacgcgca

SEQ ID NO: 22025 - DNA, 122 bp, Homo sapiens
gcaatctgttgaagatcagacgctaagacagggaggtggggagaaagatacacacatacacgtgtcagcaacgcggcccaggcagtcctatttgcatattcacatgagttccgttctcagat

SEQ ID NO: 22026 - DNA, 122 bp, Homo sapiens
actggagaagggaggggccgcacagtgggggggtgggcggatgggggaccctcaaggcaccgagctgccccacttattccgtgtcagcctctgtccagcccctgccttgggtggcaccgtgc

SEQ ID NO: 22027 - DNA, 122 bp, Homo sapiens
acttaccggccagaaccctcgcctctcccagccgccgccacctcctccggcgtcttagcccgctcttctggccccgccccgcgctacgcgtagggaggcggggcctcggggcgagacgccgg

SEQ ID NO: 22028 - DNA, 122 bp, Homo sapiens
cagcctgggcgacagagcgagactccatctcaaaaaacaaaaaaagctcaaaacaaaagacgggctttccagagagagggaggagagaagacagcaaaaaccgtaaattgatctgtttccac

SEQ ID NO: 22029 - DNA, 122 bp, Homo sapiens
ccgggcacgcgcccgccaagatggcaggggccggggcccagctgtcagtcgccgccgccgcggcccttccccgcagctagcggccccgacgcccacccggagaagatgagcccccgctgccc

SEQ ID NO: 22030 - DNA, 122 bp, Homo sapiens
acgacgccgttcaggtagagaatgggcagcaggtgaggctgcgtcttctccagcgccgcccgcaggtcctggaagtggtcccgctccttggccaagagcagcttgagcagcagctccgcctt

SEQ ID NO: 22031 - DNA, 122 bp, Homo sapiens
ggcggccaccccaggccggggcctcattccgttaagtagggccaggtgtctgtcctctcacgcgtccgaggtggctgccggcgtgcgggtgtgactgtcgatgagagctctgagctgggata

SEQ ID NO: 22032 - DNA, 122 bp, Homo sapiens
gagaccactgacccggtccgtgtgggccagcacaaacagcgtcttgcggctgccatagaccgaggcccacaggttctcaaagagggttttgccaggcagccagtcgcgttcctccaggcaca

SEQ ID NO: 22033 - DNA, 122 bp, Homo sapiens
taaaaatatttaacccaatctgttcagaaagttactgtagctgcctttaagagccgaagacggcagctttgaacaattcctgctaccatcatgtagccagagtccaaatagtgtttaactct

SEQ ID NO: 22034 - DNA, 122 bp, Homo sapiens
caagtttttgttttctttgtctcaccactagaatatttaagagtctaacaaactcattcccgcatttgtaggtatcagctctttgccactctccagattgtcaagcactgtctcttcagcag

SEQ ID NO: 22035 - DNA, 122 bp, Homo sapiens
ataaatgagggaatttttgatgatgagtgtccatttatttgcagtacctgcactactctgcggctggaaagtggcagttaagggaggttggaacctaactccacattctgaagggttcccta

SEQ ID NO: 22036 - DNA, 122 bp, Homo sapiens
agaaaataaatgtctcttgtttaagcctcccaggctatggaattgtcatagcagccccagcggagtaacataaaatacaataaatatatgcatcctttcttttctgttttgtgaaccacaag

SEQ ID NO: 22037 - DNA, 122 bp, Homo sapiens
gcagcatccgattgtgcagacaccaaggctgatgtaaccactgcagatgttctgcaggggcgtccctgggatagagactggacatgtagcaaagagctccgtgagcgtgagcgaggcaagcc

SEQ ID NO: 22038 - DNA, 122 bp, Homo sapiens
aaaacttcctgaaaggcccaatgtatttgacaggagaggtaactggggtcccgggcctagcgaggcggggcggggaggcgcaggtgtcaccgcgggcgcccagctgcttacgtcacaacccg

SEQ ID NO: 22039 - DNA, 122 bp, Homo sapiens
agcagctctggagagcagtgagatgacaggggtggccacacttcacataactgctggtcccgggcatgtactcagtggtagcatcacttgttattctccttccctaaatgtccgtaaacgtc

SEQ ID NO: 22040 - DNA, 122 bp, Homo sapiens
ataaacttgtattgcatgtaaaccgttaatattttcaggttgatatgtttatatcagtttcgtctattacagatatatcctgctaaagcatagaggtttcaggggccaggcgggtaattcaa

SEQ ID NO: 22041 - DNA, 122 bp, Homo sapiens
tgcagcgcttgggtgcatccagaccgtcagagctttgggagcgctttgtttggcgacagtcggaaggcgcgaggggaggggtcctcccgctgaacagtgggggttctaagggtcggcggcgg

SEQ ID NO: 22042 - DNA, 122 bp, Homo sapiens
tgtctacaacaaagcaataacatattatgagtgcccacagtatcgaacacatacggtaaccgcagtccagccagcacccctgcagtgcccagagcaccaagcacccatccgttgaccccgca

SEQ ID NO: 22043 - DNA, 122 bp, Homo sapiens
gacggagacagagttgatccaggaggggctggcagagtgctggagggggaaggctgggggcggagggaagggcggcaggagcccgaccggtcccacccctagctacaaccccgggcaggaag

SEQ ID NO: 22044 - DNA, 122 bp, Homo sapiens
gcggcggcggctggagagggtcctcggcagcctctgaggagcgcggggcgcggccatgagcgagtccagcggcagtgcgctccagcccggcaggcccagccggcagccggcggtccatccag

SEQ ID NO: 22045 - DNA, 122 bp, Homo sapiens
ccatggtctacgttgcctgtctctctgggcaaggaggtgaggcggtgggtgaaggggctgcgagtgggggcaggatgctgacatcacaaagggagcccatccccacttgggaacctgggtct

SEQ ID NO: 22046 - DNA, 122 bp, Homo sapiens
ccagtgacgtaggtatcattacatattattatccccaattaagacattagggaaatgaaacgtaggaagattcagagaaagcacaggaaggtgaatatgcccaagatttcacattaagtaaa

SEQ ID NO: 22047 - DNA, 122 bp, Homo sapiens
catttttattctggggttgtacaatctaaggtatgaaatttttcctttttgaatctctcacggtttgctattgacacagctggaatgaggttgcaaggagagggctgggggctctcctccct

SEQ ID NO: 22048 - DNA, 122 bp, Homo sapiens
ggcccgggccgtgacatgagggcccaagaatgaggattagatttcagccaggcgtgaaggcgcatgggggaggccacttcctgctccagtgatccccgttctgtggccattcatttagttct

SEQ ID NO: 22049 - DNA, 122 bp, Homo sapiens
cagctggggcgactcaggccagggagtctcagcaggagcgtcctgtcagaagagggatcacgggtttggggtctactgtagacttactcagatgccatatcatggccccttaccaactgatc

SEQ ID NO: 22050 - DNA, 122 bp, Homo sapiens
agcgctcggctggctgcagcggcaccgcgggttgcgcggccggggatgctccagcgggcgcgatggcccccgccatgcagccggccgagatccaatttgcccagcggctggcgtccagcgag

SEQ ID NO: 22051 - DNA, 122 bp, Homo sapiens
aagtttcataggggtcggtatatgtgattaactgccaaagaagaatattcgccgtgtgtccgaaacgcagtcccctggggcgccacactcggagcctacttgaaccgaagagtccctccctg

SEQ ID NO: 22052 - DNA, 122 bp, Homo sapiens
ttttgtacttttgcttgctgtccactacagagggtccaagcacgaagctgtgcacagagtcgctctccacagagatgcttaggatgtgatccatgaatcgcaaatcccagctagtgctcaca

SEQ ID NO: 22053 - DNA, 122 bp, Homo sapiens
gcttggccgacggggagcaggtgggcggggacagggcccctgctggaagaggcgcagcagcgaggtggcgggctgcgtgcgcaaacagggcggccgccttctgggcccggagaacggtgagg

SEQ ID NO: 22054 - DNA, 122 bp, Homo sapiens
atacccaggtgggtttaggactttctaggcctctccctcaggccataggagcacccaccccgggctcctctggaggggcagccccaaggaacctgttggggtaacttgtttgctccccacac

SEQ ID NO: 22055 - DNA, 122 bp, Homo sapiens
tggaaagaaggccatcctattcaatggatgcatgactcaagtctttggagaacatttcttcggaggtgcagagggcatcctacttactgtgatggcctatgaccactatgtggccatctgca

SEQ ID NO: 22056 - DNA, 122 bp, Homo sapiens
caccccagtgagtgttcagttccctgccgcagctagtgccctgtgcccagtgggaagccacgtggccaggcctagcgagatctccgggcgcggtggcccgtgtgtgcctctagccaggccgc

SEQ ID NO: 22057 - DNA, 122 bp, Homo sapiens
cggcaacagtgttcgtttcctagtgccatgactgcatggtggccgtgcaggacaatgccccgatggtcgtaaagcacatgaaaatcatcagggtgacgggacatgaggctggcagccggctc

SEQ ID NO: 22058 - DNA, 122 bp, Homo sapiens
gtgacaaaaggcagaggaaacagaagggagcacggctttgtccccaaattcccacttatacgaaatgatgaaatttcagggctgagcatccatcgtgggccccgggaaccggcctctcagcc

SEQ ID NO: 22059 - DNA, 122 bp, Homo sapiens
cctaggccaagtcctctccaagttcttggccctttgtcctaaggttggatctcttcctctcgcttcccttgctccgagctgtgtctctggatacaccccctgcaaacgacgcttcctgagct

SEQ ID NO: 22060 - DNA, 122 bp, Homo sapiens
gggttccccacgatctctcaccctgtgtttcggcggagttgcgggggttccctctgctcccgggtccctgagatccctgatcccgctctcagggcagggaattccggggttcgcccctctgg

SEQ ID NO: 22061 - DNA, 122 bp, Homo sapiens
gctaatttttcccaaatccgaacgacccatccttgctggctctcagcacttccgctcagccgacacggggtcagggaggtctgtgctgaccgtctgacatcagccacatcgcagcatcccgc

SEQ ID NO: 22062 - DNA, 122 bp, Homo sapiens
agagagtaaaaagtggccgcttagcggatttgaaattggtgagatgtttcctgggctggtcggtctgaggacctgaggtcgtaggtggatctttttcacggagcaaagaacaggaggacagg

SEQ ID NO: 22063 - DNA, 122 bp, Homo sapiens
caccctgctcctcctctgcagcctccccgcgtcttgccccatcttccttgccctcctgctcgtagagacgcctccacccggtcctgcctgtctcactggtcccgtctcctcgcagaaccctc

SEQ ID NO: 22064 - DNA, 122 bp, Homo sapiens
ccagggtgcgcacaggcaacggaacgcctgggattcccaagcctcgtgctcccccgagagcgggtaattacctggatgtggaccgtattaactggaagcccagatgtttatagaattccctg

SEQ ID NO: 22065 - DNA, 122 bp, Homo sapiens
ttttccccagaaccaggaagtcaggccagcacctgacagatgcctgtggcgccagcagctcgctgagcctccacacgattgtaattcgcttgtttctccggcctccaagcttccagggaatt

SEQ ID NO: 22066 - DNA, 122 bp, Homo sapiens
gccatcttccgttgcaaagcatttctgggagctgcatgtgggtgacgcagcagcattgttcgcaggcacaggaagccgcggctgagctgaagggctcgagaaggagcccagagcgctgcacg

SEQ ID NO: 22067 - DNA, 122 bp, Homo sapiens
taatatgtgcttaaggaattaaaccggtgatgatagagatgaaagaggcgggtaggtcatcgcagtgcctgcggtaggcactagatggcgcccaagcacaccaagaaggcgctgagaggcgg

SEQ ID NO: 22068 - DNA, 122 bp, Homo sapiens
cctgtgcaccgtgcgcctgtgattggacatctctgggtctctggacagctgccggggtcacgcgccgccggtgaaacgacgtctccacaaagagaggagcagaggcccccagggatcccgga

SEQ ID NO: 22069 - DNA, 122 bp, Homo sapiens
gctgagcgtcccagagcgcaacctccctttcccccagcagcgccggcgccgcagaagccgcgtgtccccaggcgcactcccccaaggtgaacccccgccccccacggaggcggctgggtcgc

SEQ ID NO: 22070 - DNA, 122 bp, Homo sapiens
atgtgtttacgataagttaggttcaaagcgcccacgtgcagtgccttatctatcctgccccggcctttcctctaaggagtccaaaggataaagcctggttataaaaggccacagccaacctg

SEQ ID NO: 22071 - DNA, 122 bp, Homo sapiens
gcccctgccgcgcgccattgagcccccgcgccgcagaccttgaggtcctgctccaggctgcgcaacagctccccgtcgatttccccggtctgggcgtagcggagccttttgcgctcggcttt

SEQ ID NO: 22072 - DNA, 122 bp, Homo sapiens
gagggccgcttggtgaactgttggcgacgtcgttcgcagcccgaagtccctgtagcaggtcggtatcacacatctgctacttgccttgcgctgtcgccaagcgtagtcccagtccttcccgt

SEQ ID NO: 22073 - DNA, 122 bp, Homo sapiens
acggaattctgtctcatttccctagttctaaatatgaccagcagacccagagttccatctcgacttcataaaggagctgtcttggactgggaacagctgccaatgtctttgttgagatggga

SEQ ID NO: 22074 - DNA, 122 bp, Homo sapiens
cctgggtccccaaggccgctcgccgggcagcgctcgtttccggcaccgggacgagcccagcgcgctcagacaccactttcccggtgaaatctgcttttatttgctccgagcaaacctcgggc

SEQ ID NO: 22075 - DNA, 122 bp, Homo sapiens
ctttgtagcaaatgagataatgttaagacctacccctctgatgggaggtggggcgaggaccggaatattaaggatctttaaaggaatcgacttcagctctgcagaaagattagcaatcagta

SEQ ID NO: 22076 - DNA, 122 bp, Homo sapiens
ctcacgaccacacgccaggcttccgtcaaaccactcaacatgtattagtaatcttttaatcgacctacatattgttttaatttgcatgtgttaatgcgttgatctatgagatgggtattatg

SEQ ID NO: 22077 - DNA, 122 bp, Homo sapiens
catatcgcatggttggctgaaagccccgaaatctgtcctgacaccaaagcaaccatgcatcgcacaagagaatcagcacacattccaggaggggcttggcagcaatgccacgagtttcaaaa

SEQ ID NO: 22078 - DNA, 122 bp, Homo sapiens
aaaaaaaaaaaggaaaaatgtagtttaccccatgactttctagaagttagaacagtagagcgattttgagaataagccccggattcatactgctggaagttaaatcacctcctaggccagca

SEQ ID NO: 22079 - DNA, 122 bp, Homo sapiens
tagggtgaaccggccgctttcccagcaaaggagcaatcgagctgagggtagcgcctcctccgcaggagggggcgggagctcggctgagaaagctttcctagggagttgccttaaagaaagaa

SEQ ID NO: 22080 - DNA, 122 bp, Homo sapiens
ggaggcggggcctggacttcacgcccggcgcgctcctcccctttaaggcgcgcggccgggcggggcccctatgacccctttaaggcgcggccagagtcctcccgcagaaaaacgacttaaag

SEQ ID NO: 22081 - DNA, 122 bp, Homo sapiens
ggaagaaggcccaagtcatgaggcctgtgactgtagaatggctgaaggcactggtgcactcgcagccggtccttccggggtccagcttcccgaaggactgggcagccccggggcgaacccct

SEQ ID NO: 22082 - DNA, 122 bp, Homo sapiens
taataaaacccgtatgagtttggcatatggttaccccattttacaatgatgaaactgagtcgtcacacaggcttaggtgttcacttgttcttttcctgaaagtccacaggctcccaagctga

SEQ ID NO: 22083 - DNA, 122 bp, Homo sapiens
ctgctgagagcgccgggtcagcacatggcatggtgtgtcagacgccttccagagcgagggcgcgccggagccacaggaacaggcgactgtcccctgccagcagaggaagcccaaggagcgga

SEQ ID NO: 22084 - DNA, 122 bp, Homo sapiens
tgggggcccctcacatcttaccacccatgaagaaggctgggttcagagccccttggagagcggtgggtgccccctaccccactacgagaaatgggcaggccatctagtgctgtgggatgggc

SEQ ID NO: 22085 - DNA, 122 bp, Homo sapiens
tttacttattatcattttactgtttttttttttaagagtcatggtctcacagtgttgcctcggctgactcagaactccggggttcaaggaatcctcccacggcctatcaagtagctgggcct

SEQ ID NO: 22086 - DNA, 122 bp, Homo sapiens
gtagatgagggggttggcattctccaggaggccgccgccgaccccgccgccgcctaccatcgcggaaccaccaccgctgatcctagcaggcgtgcgcttccgctccaacccgcgcacttccg

SEQ ID NO: 22087 - DNA, 122 bp, Homo sapiens
tggggttggccaaacaaagatggtggaaatgggagtgctgtattcttgacagaaggggtgcgatcagccaaagcaagggaggagaaagcagaatacagcctcctggggaaacgcaggtcatg

SEQ ID NO: 22088 - DNA, 122 bp, Homo sapiens
aactgtttctgtaaccatttatcttttaactttttgcctattctgcttctgtaaaaaaatcgcttcagctagcctcccctcctctatttagaccaaggtatcaaaagaaatctagccccttc

SEQ ID NO: 22089 - DNA, 122 bp, Homo sapiens
gagtagccataaaaatcaatgaatggatgtggctgggcaagagcctctgtaatactaatacgctgaatggctaataagtcacttcatttcggtgaaacaaatacctaaattctttgaagaat

SEQ ID NO: 22090 - DNA, 122 bp, Homo sapiens
gatagcccagaagcctgtcttttctctcctgggaaagatctatgcaatcaccccaactcacgagcacccggaacagccctgatcaggggcattcacaacaaattctccctggatctccaaag

SEQ ID NO: 22091 - DNA, 122 bp, Homo sapiens
gactgggtgagcttggggcagcccggaggtgtggagggggcagtgaagacaccagaggagcggtggcccctccagagcttgtgcaggcccctctgggtcctgggtccttggccaaatctcat

SEQ ID NO: 22092 - DNA, 122 bp, Homo sapiens
gtcccgcggggcgagctgagctagggtgagcatcctgtggggtagactatggcggctgggcgcgtgcggcctgtgcggggcctccccggctgcggtgagagcggctcgaggggtcccgtgcc

SEQ ID NO: 22093 - DNA, 122 bp, Homo sapiens
gtttctcgaaagaagatactttttttctcaaaccagaaagcatgtctggtttttgagtggcggttgcagagtggagaggaatatctctaagatttagctgattttattcccaaaggttgagc

SEQ ID NO: 22094 - DNA, 122 bp, Homo sapiens
gacatttacaggcatcagaatgaatggattcttagggaggagagagaggaggaaagtttccggtaggagccagttcttagggctccaagggaggcagacacccaggagcagcagatgccgtg

SEQ ID NO: 22095 - DNA, 122 bp, Homo sapiens
actggagaactttcctttatctgcaggacccgctggggtctcccgggcctaggcttccctcggaactgcatctcgaagggcagctcagctcgcactccgcgcacctactgtgtgctctctaa

SEQ ID NO: 22096 - DNA, 122 bp, Homo sapiens
cagccattctgacagggtaatggtgacctgaagtcacctggacactccatgttcccaggccgctgcctctgccatcccggggtccctgaactcccccctgctgcatagtcaccctgacactg

SEQ ID NO: 22097 - DNA, 122 bp, Homo sapiens
gaccaagacgccactcctgttgaggatgttctgtggtgaatcacagagcctcgtgaggctcgtgggatggtggcttgcttttcccatttgtgaagtctggtggtaacagtacccagacaggg

SEQ ID NO: 22098 - DNA, 122 bp, Homo sapiens
ccccagccatgggcttatactatgctgagaaatctgacatggttttatgcttttgaaatacggaattctcaactccatatttacttagcagattcaggaagggttcagtctgcaaaagccaa

SEQ ID NO: 22099 - DNA, 122 bp, Homo sapiens
ttttctctgtcaaataagaacattatatcagccagtgagagtgggattggagatggtgtgcgagattgaaaagagcagagaaagattaaaatagcagcactggagagtggcagtgagatgac

SEQ ID NO: 22100 - DNA, 122 bp, Homo sapiens
tttaaggtccgtagcgatccccagatcactggtacggagaagtgaggactgcaaagtgcacgtttaatccaggcagacggagcgaagtaatgtttaatccacgtagactgaaacacacacac

SEQ ID NO: 22101 - DNA, 122 bp, Homo sapiens
tggactctgacacgggagcaaggcaggtgtgaatcagccgctgaggctgggagctggacccggctgaggcctccctggtggcacaggtggtccaagggtcccgctgagcccagacctctgga

SEQ ID NO: 22102 - DNA, 122 bp, Homo sapiens
caaggtcctctggggcgcctcggaactgcgcgcccccagccgccagcatggtgggcgccgcgcctccggcagcacccggtccccggcccctacctccaagagcagcccgagcagcagcgccg

SEQ ID NO: 22103 - DNA, 122 bp, Homo sapiens
ggggtccctgcaccggaggagagtgagggctgagctgcggggcactcaggctcacaagaccgtcccgccaccgccatttctggcgcgtcccaaagaggcctcccccgtctccaaacgccctg

SEQ ID NO: 22104 - DNA, 122 bp, Homo sapiens
ggaagctatgcccatcagagaaaactaacagaagccggaatctcctcacattcacgttcacgacatcgcagatatagtccgaggttacccggaaatgatctgctgagacataggaagctatg

SEQ ID NO: 22105 - DNA, 122 bp, Homo sapiens
catcttccaggacttctgtgtgggcaagtgacgggatccagggaagtcgcacccaagctgcgtggagacccaggagcctcgggggatctggaaacagtttaggccaattgggattctcattc

SEQ ID NO: 22106 - DNA, 122 bp, Homo sapiens
gatccctagaatagctctgctttccttccagatcttaaggggctcctgaaggacagaggccgcatcacctctttttaaaaaaattccaccgattgcaaggtgttacctcctttggaaaccct

SEQ ID NO: 22107 - DNA, 122 bp, Homo sapiens
gatccggccgcctcggcctcccaaagtgctgggattacaggcgtgagccacagcacctggcggggaatcatgtctaagccaagactggagaaaaagtggccaagagaagggtccagctctcc

SEQ ID NO: 22108 - DNA, 122 bp, Homo sapiens
gagagtgggaggcaccctgagacccgcgctgagcatgggagtggccaggccgcgtcctcccgggggccagcctggagcctgccccaccctgcttgccgacaggattatcctggctgagccga

SEQ ID NO: 22109 - DNA, 122 bp, Homo sapiens
ggatgtctattgctgccgctccctcccctcgccgggagcttgggtttcccggggtgtgtgcggattctcaataaaaagggaaaagcacgatccaagttaattttccagcgccgacaggaaat

SEQ ID NO: 22110 - DNA, 122 bp, Homo sapiens
cccttcaactaccctcaagacgcctacaaatttgtttggcggcacctacaactcccagaacgcaacgtgggggacggaggcggaagcagctggccaagccgaggtctgtgattggtgaagag

SEQ ID NO: 22111 - DNA, 122 bp, Homo sapiens
cctcagcgggcacagccgagaggcggttggcctgcaggtccagcagccgcagcttgggggcgtccctgagcgccgcccaggggaaggcggccaggcggttcccgggcagccgcagctcccgc

SEQ ID NO: 22112 - DNA, 122 bp, Homo sapiens
caaaacatgggaaataaaagtatatcattataggccccccgctgcacctccaacaagtcacgagtactttcacaaaaactgacataactttgaagtaattcaacaaaataattgcagtaact

SEQ ID NO: 22113 - DNA, 122 bp, Homo sapiens
atgcctaatctgaacttccgccctgcccttcagctcaccaaccaattgaattccaggtttcgtgggtccgctctaggcggctgatagtactcaatgctccggcagtcctgctccttcccggt

SEQ ID NO: 22114 - DNA, 122 bp, Homo sapiens
tgtgtctgcaattggagggttctcggtctcaccgacttcaagaatgaagacgcggaccctcgcggtgagcgttacagttcttaaaggcagcgcgtccggagtttgttccttctgatgttcgc

SEQ ID NO: 22115 - DNA, 122 bp, Homo sapiens
tccaccagcacgacccccaggacctcaggcacaatggcaacgtggtggtggctggccggccgagctgttcccggggcccccgccgggcgatccaaaagccccagccggctgggggccggcgc

SEQ ID NO: 22116 - DNA, 122 bp, Homo sapiens
ctgggcttttaccgtaagcaggtcagcgaggccacagggcagtgctgggtgcccgggtgccgcaaggccctctcctcggcaaggtgtgccggctgggccacggggagcagagcaggggcacg

SEQ ID NO: 22117 - DNA, 122 bp, Homo sapiens
agccgcgccgcagctgctccaatccctggaaaaggcaatcgagcgccctccggaccgctgcgcacagccccggctccgacctggcgcccaaaacagagctagtcctagtccctcgcgcggcc

SEQ ID NO: 22118 - DNA, 122 bp, Homo sapiens
agagcaataggtgtttgccggagagaataggctttaagttcttggcagagagcaaagcatcgcacaggcctggacaccttgctttttcaaggaactggtcaattgagtgatgaggcagaaaa

SEQ ID NO: 22119 - DNA, 122 bp, Homo sapiens
agtttggacactatgttctttcacaaaagggatttcattttgtgaaatatttgaaagcatcgaagtctagcatttcacgttttgcaagctggggaaaagcattcattccctgagaagcagcg

SEQ ID NO: 22120 - DNA, 122 bp, Homo sapiens
caaagacccagcattgcccagaaaaggcataaattatacctttttcccctttttttgagacggagtctcgccctatcgcccaggctggcatacagtggcgtgatctcggctcactgcaacct

SEQ ID NO: 22121 - DNA, 122 bp, Homo sapiens
aggtaagccagaggctgaggaaatgaggcagaagctgaaggaactaattacttccaactgcggagtcagaaggatgctgcaaacaaataggggaatcaaagtataaaaatgccatgaagttc

SEQ ID NO: 22122 - DNA, 122 bp, Homo sapiens
aggggctgaaggatgatggggaggtttcttgtattcttaaaacagactaccccttcccaacgcacaacccccagtaagtggccgtgggttcccaagcgcctctcctccctgggccatgggcg

SEQ ID NO: 22123 - DNA, 122 bp, Homo sapiens
ttgctccacacctcagtttccccatgtgtaaaatgaggataatgccatgtctctgtcactcgatggtgcaaggattaaatgagttaaaccacagtacaaacatgtggaagctcagccactga

SEQ ID NO: 22124 - DNA, 122 bp, Homo sapiens
agcccagcgcggaggctgtgtggccttgggcaggtcgctgcaacactctgagccagtacccgcgacccccaccccagaaggcgaccgacctcctctgtcgccggaggatactcacggggcct

SEQ ID NO: 22125 - DNA, 122 bp, Homo sapiens
tggggagaaggtgaggtgggctcagggtccctaatcaaagcccagcccatgtgcaagaaacgggaaagaacctgccttgtgacatcaaaggctgacatcaaaggctgcagggtcgaccacac

SEQ ID NO: 22126 - DNA, 122 bp, Homo sapiens
tactttatgagataatattaacccataatttccctggatcaaagagaactatgttcttcacgaaaaataatgtgctaattctctctgaatcaaagccccaacagccattccttttaccctag

SEQ ID NO: 22127 - DNA, 122 bp, Homo sapiens
tgaccccttgcgcttcccgggtgaggcagtgcctcgccctgcttcggctcatgctcggtccgctgcgcccactttccgatactccccagtgcgatacctcagttggaaatgcagaaatcccc

SEQ ID NO: 22128 - DNA, 122 bp, Homo sapiens
gcaaaagaaaaggctagacgacacaggaatgattgtggagggggctgtggaaccacaaggcgtcgcaccgggggcttcagggggtgctggccactgggagattccgactgcagcccatccac

SEQ ID NO: 22129 - DNA, 122 bp, Homo sapiens
ctctgtggcatggagaggtctcctccagtgtgagacccagctccctctgctcaggagagtcgagctgggagcctagggcaggccttcaccctttgtggcatggagaggacccctccagcgtg

SEQ ID NO: 22130 - DNA, 122 bp, Homo sapiens
ctcctgggatcaagtgatcctcccacctcagcctcccgagtaactgggactatagatacacgtcattacacctggggatcttttaaattttttttgtagagacagggtctcgctatgttatt

SEQ ID NO: 22131 - DNA, 122 bp, Homo sapiens
ccgctcctcagtcgggcctccggggtcgaccggctgccgcccgcgggcgtgagactcagccggcgtctcgcatacctaatgtaaatgacgagttaaggggtgcagcacaccaacatggcaca

SEQ ID NO: 22132 - DNA, 122 bp, Homo sapiens
cgaggcccagtggtctgaggctctgtacaaagcatgacgccacatgtgatcattctcacacgcacacacagcctaatcatccaaaacctccctttgggctttgtcgtaaaaaaccctccatt

SEQ ID NO: 22133 - DNA, 122 bp, Homo sapiens
gcaggcgtttctagagcccagctaagtgtccaacccgggggacggagaggggacacgtcccggtcctgggctgggcagactctcagaaggcacattggcttttgctgtgggggcatccaaag

SEQ ID NO: 22134 - DNA, 122 bp, Homo sapiens
tcgcaccgtgtacaacaccttcagggccgcggcgcccccgcccccgatcccggcctacggcgggtaagtggggcagcctcctgggtgggcctccctgcaccagccctccctccccagaggca

SEQ ID NO: 22135 - DNA, 122 bp, Homo sapiens
gcacaggcctgtaggtcgcgtggcctaatcctcagcctccctgagtggaacggtccagagcgaacattactagacgtgcgttacaagaagagtgagtggatagctcaatagatgatgagaaa

SEQ ID NO: 22136 - DNA, 122 bp, Homo sapiens
cagcagcagcttttcaaggttccaaaaagaaagttggtggaggggggcagaaagggaaggcgttgttttcatgcctcttgcttcatttgcataaggtgaaaaaatgtttccatagaaacaac

SEQ ID NO: 22137 - DNA, 122 bp, Homo sapiens
cagcgcaccggcatgggcaggcggccggcggcggagggcggctgagggctgctgagggtacgcgcagcggcctctcgtcgccctgcacgtgcctcgccaggcagtgcgcctgctcgcagcga

SEQ ID NO: 22138 - DNA, 122 bp, Homo sapiens
ggtcctgggaggggggttgataaatcctgcaatcgctttgctctgagctgcggcgggaatcggagcctagggctctctttgcctgggccaagggagcgggggcgatggctggagtcgtgtag

SEQ ID NO: 22139 - DNA, 122 bp, Homo sapiens
gagcccatcctggaggccaagccggatcctcaggtttggccagggggcggctggggccggcgtgccggcggggcgccggcggggccgcgggggtttgcggcgctggctgggattcgcgctcc

SEQ ID NO: 22140 - DNA, 122 bp, Homo sapiens
acgtgcgcgcgcggcgcgatgacgttcctctgtgatcatgggcgaggggcgggccctgaacgtctccatggtaacctggggacacgactcgacatcgcctgggtaacccggagacgcggcgg

SEQ ID NO: 22141 - DNA, 122 bp, Homo sapiens
tccattaggaacagtgtgggcagtgaaggggaccctccaaactgtaaagctacaagagaacgttttaactccttttaaaattagaagaaaaatgaagttttacagtctatgaaaatgtttta

SEQ ID NO: 22142 - DNA, 122 bp, Homo sapiens
ttttttaattgagacagagtctccctctgttgtccaggctggagctcagtagtgtgatctcggctcattgcaacctccacctcgcaggttgaagcgattctcgtgcctcagcctcccgagta

SEQ ID NO: 22143 - DNA, 122 bp, Homo sapiens
ggcatcgagacctgaacaggctgtggtccggcagagcggggaggtcgtgatggtactggccggacagcggctctgaatatggcgcatttgtgagacgtcgtgggcatctatggcatgtgtag

SEQ ID NO: 22144 - DNA, 122 bp, Homo sapiens
ctggggaattttgagtcgccacactcatgtctcgaccgagcctggctcgctgcgtctgagcgagtacttgaggaaggctgatctagaaaaaccagctgagagaaggggcagaagcccctgaa

SEQ ID NO: 22145 - DNA, 122 bp, Homo sapiens
tcacctctactgaggagccctacccattaaagctggggtaggttggcccaagaatggaaccgggatcgttgagatttcagcaccccagcattttttagtgactgaaataatgaaaattctga

SEQ ID NO: 22146 - DNA, 122 bp, Homo sapiens
tgggtaaggagagcggcaaggcccgcatgtgggtaaggagagctacaaggcccgcatgtgcgtaaggagagctgcaaggccgcatgtgggtaaggagagctgcaaggccgcatgtgggtaag

SEQ ID NO: 22147 - DNA, 122 bp, Homo sapiens
tcgccaacagtcttccctctgttgtcaccgtaggtaacacacctctctctcctatgtctgcgcctccactccatctccaccatactgcccccgtcaggcctccccacagctcacttggggcc

SEQ ID NO: 22148 - DNA, 122 bp, Homo sapiens
ggctcagaggcctgacagacaccagtttaacaactatctacatatatttttttaaaaacacgctcttaagaaccaaaaatcaggtgagcactcacagtacctggttctagcaactttgtatt

SEQ ID NO: 22149 - DNA, 122 bp, Homo sapiens
attaataatgccacagcccaatgtcttttttgttgctgtagcaaattgtgattgtgtgtgcgtgtgtgagtgtgtgtgtgtgtgtgttcctgaacagatgaagggccagcagagactcccaa

SEQ ID NO: 22150 - DNA, 122 bp, Homo sapiens
caggctggagtgcagtggtgcgatcacagttcactgcagcctcaacttcccaggctccagcgatgctcgacctcccaggtagctgggaccacaagcgtgcacatccgcacctggctaatttt

SEQ ID NO: 22151 - DNA, 122 bp, Homo sapiens
ctgagtagcgggaagtgcggtacagtctgggcattctgatgtttgtgattgtttttctcacggtgatgaaaaagtatgtgctataagtagaggagcgctaactcctgacttgagctaattat

SEQ ID NO: 22152 - DNA, 122 bp, Homo sapiens
gggcgcctgcggatcgcgcggccccgggccggccgcctgcccatctggcgcaccccagcgcgccgcgcacacctgggggcccgcacaccagcacgtcctcagacacaccgacacccacggca

SEQ ID NO: 22153 - DNA, 122 bp, Homo sapiens
agggtgccctaccggagcccagccctgcttctttcttgcagtgtttcaaaccggcatggtcggctaccccgaggccctcaccgatccctcctacaaggcacagatcttagtgctcacctatc

SEQ ID NO: 22154 - DNA, 122 bp, Homo sapiens
gattactccccgttgttttaaagtagaagggaggtcactaggcgagtgaaatgtggcccacgcagactgggacaagttggcccaacgtgcttctctaaagtaactggaagttttctgacagg

SEQ ID NO: 22155 - DNA, 122 bp, Homo sapiens
tttgatgggggaagcctgtggtgaacccactgaggttgctggtgattaagtttatgtggacggtgaatctcaacagaatgaaaataaactgtgggtgtctattttgaagcagatgaaccagg

SEQ ID NO: 22156 - DNA, 122 bp, Homo sapiens
gtgtcttgccgctctgcggacgctgtgtccgcggccccgctgtcgcgcagagctgggctgcgatcagaaagtccggctcccctggccccagacagtggctcccgggggaaccagcgtggagg

SEQ ID NO: 22157 - DNA, 122 bp, Homo sapiens
gcccctccgacgtggtccgccccggcctcacgacgccccgcctctgccacgcctcttccccgccccatgcaggtcttcgtcccgccccccacaaagccggcttccgccccgtccctcagcgg

SEQ ID NO: 22158 - DNA, 122 bp, Homo sapiens
ttgagaacctggccaatgctgaccggcctgtagccaagtccggggcttccccatttttgtcggtgagctccaagcctcccattgggaggcggtcttccggcagcattgtttccgggagcctg

SEQ ID NO: 22159 - DNA, 122 bp, Homo sapiens
aggaaaatataaacctctatgaaaatgtaagtttaaaatctgcctaggttctgtggagaccgttcttttgaacactcttttaatgataagcctccaaagtcaagaaggcaaatggcagccgg

SEQ ID NO: 22160 - DNA, 122 bp, Homo sapiens
ccaggcacctgacccgcagtgcacttctgggagctgtgcttatctccccggggtctatttcgccccaaggtttggcgggttaaaagctgatatgcaaccggcacgacatgaacagtatttca

SEQ ID NO: 22161 - DNA, 122 bp, Homo sapiens
ttacactttctagcttagctgcgtcaagtttcagatgcctttaagatagccaagtggagacgtcaagtaggaggcgagaggtggcactgaacgtgcaggcaggttacctgggtttgaatcca

SEQ ID NO: 22162 - DNA, 122 bp, Homo sapiens
tccaccgtctccctgggtagctcaggccggtgctccaaggccattgcctgctgacgcagccgactctgcggtctcctacagcatgcgcctcctgggagcgagctcgccgggccgcgccccct

SEQ ID NO: 22163 - DNA, 122 bp, Homo sapiens
cgctcggaggtagaggaaaggtcttgacggggtggctggatccgtggcaggtaaatcccgcgactaactgcacccgggctaccgcgggggagggggtggctgttggatgatgctttaaggct

SEQ ID NO: 22164 - DNA, 122 bp, Homo sapiens
gtaaccaacgtgaccgactggggactctctgatttctcccccttctttaaaattctcagtcgcagtggctgggatgaaagagggattgcaggggtacactgacaggtgacttaggagtcatt

SEQ ID NO: 22165 - DNA, 122 bp, Homo sapiens
atcccgacaaccttcgcgtcgcgcgagggcacggagcacgcgcagctctgcggtcgacgccgggccgcccccactccgcttctccgggttttccgtgaagctccagccaacagcggccgtca

SEQ ID NO: 22166 - DNA, 122 bp, Homo sapiens
aatatggggagggctgagtcgtccagccgaatgagttgggttaacaccagcgccgcagatcgatgttcccactatccaaacgtcgggctaatcccagttctgctcccttaactaaaagggag

SEQ ID NO: 22167 - DNA, 122 bp, Homo sapiens
ctcttcagaggactaaaagataaaggccacgatggattcattcaacaagtcctaatcctgcgccctggtgtgtgccagaccctgctccccgcgaggggatccacgagcgaccctcaccacta

SEQ ID NO: 22168 - DNA, 122 bp, Homo sapiens
taattatgaacaaggttagtaaaatctctgctttttaagattcacaaatccttggccaggcgcggtggctcatgcctgtaatcccagcactttgggagaccgaggtgggcagatcatgagtc

SEQ ID NO: 22169 - DNA, 122 bp, Homo sapiens
acacacagagagacaccaggacactgaggggctagctgaccccctctgtaggcacagaggcgtcctggcctgggatcctgtggttggagggtgcagaggagggtggctttgggccggagtgg

SEQ ID NO: 22170 - DNA, 122 bp, Homo sapiens
tatcaaggcttgactccaggaggattcacttccgagctccaagctccctcatgtggctgacggcagggatcaagacctcattggttgttgcccagagacatgagttcctagtgatgcaaacc

SEQ ID NO: 22171 - DNA, 122 bp, Homo sapiens
gggtgtctccacagacctggaaattccggcccctctttctcaactcagagcaaattgagacgtccgggtgggagtccgtgagtcttttccttttgagtttaaagtcgccctgaggctggtcc

SEQ ID NO: 22172 - DNA, 122 bp, Homo sapiens
tgaccagagtccgtgcaggagcgagtgaggacagggctggggcaggcggcaggatgaggccgcccagagcaactcagtgagtgaatgagtgaaagcacgcacgccccatgctccagcggggc

SEQ ID NO: 22173 - DNA, 122 bp, Homo sapiens
aaaataaactttaatcccaccataaaaaccaaatctgaaaaacatacttgcccttgtggtcgggagcgccgcggcatccctggtggaggtcacacctccgacgggattagttttaaggaggg

SEQ ID NO: 22174 - DNA, 122 bp, Homo sapiens
ctattggctgtctgtccaccaatccaaagagacgcacagtccgcaaggtcgcgaggctggcgtcacaacactactggcgccgcgggctcgcccccgacgcccaccgggctcgtacgtgcgag

SEQ ID NO: 22175 - DNA, 122 bp, Homo sapiens
gggaacaccgaggccaaatcccaggtctgcagagggtaaacagacggagtttatcatcaccgcggaaatactgagagtgagtgagctacctgtgtctttgctaggctagagggaaatgcaga

SEQ ID NO: 22176 - DNA, 122 bp, Homo sapiens
ttctttgactaggaaagggtactccctgaccccttgcgcttcccgggtgaggcgatgcctcgcccttcttcggctcacgctcggtgtgctgcgcccactgtcctgcacccactttctgacac

SEQ ID NO: 22177 - DNA, 122 bp, Homo sapiens
gactcttgccccatggtgccacctttctgggctcaggccacgcccctggtgaactctgcacggctggtgcgcgggaggtgctccctgggtcccggggtgcccagccacctcacagtggttgt

SEQ ID NO: 22178 - DNA, 122 bp, Homo sapiens
acagcgagtctcctgagccgcaggcgccggggctgtggagagccgtctccattcagcaggcgccagggctatggggagccgtctccattcagcaggctctggagctatgaagagccgtctcc

SEQ ID NO: 22179 - DNA, 122 bp, Homo sapiens
agcggaggagcagcagctgccaccggccggaagcctgctggctcggccgagaacaatggccgcctgtcactgtggacagctgtctcccaggctaaggcaaggctgcgctcccagggaatgcg

SEQ ID NO: 22180 - DNA, 122 bp, Homo sapiens
ttcaatcagaaaagcatgtggagcctttccaaggcaggctggatcttacctatgatgtatcggtagtgcatgaacatgccatggtcagcactgtccaccttgcagtgtgcctctgggacgtg

SEQ ID NO: 22181 - DNA, 122 bp, Homo sapiens
gccttctatgtcatccgtaagaatgcgaaacaaccgcctggatctgtggaattaggaatccgtttctattgccacagttacactgtgtgacaaccacacaaatcctcagagaagagcaggaa

SEQ ID NO: 22182 - DNA, 122 bp, Homo sapiens
acggaagtaatactcctctcctcttctttgatcagaatcgatgcattttttgtgcatgaccgcatttccaataataaaaggggaaagaggacctggaaaggaattaaacgtccggtttgtcc

SEQ ID NO: 22183 - DNA, 122 bp, Homo sapiens
ggcggctcccctagagccgagagccgagcgcgttgggaggctggcctttgctagaggagtcggtgccaacaggtttttgtttgcgacctgaagtttgcccagtggctttccctggggcagct

SEQ ID NO: 22184 - DNA, 122 bp, Homo sapiens
atgccggtggtcccaactactagcaaggcagaggcaggatgatggcttgagcccaggaaccggaggctgaaatgagctatgatcgtgccactgcacttcagcctgggtgacacagtcagacc

SEQ ID NO: 22185 - DNA, 122 bp, Homo sapiens
tgccgggctcagctacgcgactcgctcagatcttctgggagtctgtctcagcattacaggcgtcatttccgggcacgtttacaaggtgtcttggtaggcgcaatgggcgcctgcgcagtggc

SEQ ID NO: 22186 - DNA, 122 bp, Homo sapiens
acagcaaaacttctgacctgagacatggaagcagataaaaagccactacacaaaatgtatcgctacaactagagggcagttttgcctttcttccattcaattattcagtttctcatgttcct

SEQ ID NO: 22187 - DNA, 122 bp, Homo sapiens
ttcgcgcccctcgggcgaggaccccacgcaagcccgagccggtcccgaccctggccccgacgctcgccgcccgccccagccctgagggcccctctgcgtgttcacagcggaccttgatttaa

SEQ ID NO: 22188 - DNA, 122 bp, Homo sapiens
tcccgccccgagaacggagcgcgcggaaccggcgcaggcctccgaggcttccagccgagacggcacccaggtttcccgagcagggtctgaggctccaaggacatcccggcggcgagaaggcg

SEQ ID NO: 22189 - DNA, 122 bp, Homo sapiens
tggggccaggatgcaggcagtggcaaggggggtcaagggccacctaccaggaagccaccacgtcggacatcttctcacttgccgtccagccctgcagccggggactgtcccatcctagccac

SEQ ID NO: 22190 - DNA, 122 bp, Homo sapiens
gaaggaaggctccggagcacaggccctggtgttcctgtgaggacgctggacctgcaggagcggggagctgcagtgccacctgctgggtaccacgggccgggcctggggtccacgcctttggg

SEQ ID NO: 22191 - DNA, 122 bp, Homo sapiens
ggtgaaaaatgttagaccagattactcacccttaaaaattagacaaagtatctgagtcatcgctcccttgaacaacgcctcctagccgtgggattgaggaggaatctggtgttaaaagtcca

SEQ ID NO: 22192 - DNA, 122 bp, Homo sapiens
tacgacagcgcggccgccatgcgcgtcacccgcaagggccggctggagctggtcaacagccgcttcacccagcccaccccggaggacctggtctatgtggaccccagccccgactactgcct

SEQ ID NO: 22193 - DNA, 122 bp, Homo sapiens
ggggagcgtgcctgcgtcgctcggagcggtgacagcaaggagcgcagcgcggaggccgggcggcaaggggagtttccagtcctcgataagtggagtccctgctctgcgctgcgccagcgcct

SEQ ID NO: 22194 - DNA, 122 bp, Homo sapiens
tgcatgggaaattctctgggcttctctgggtttcctcagctggcctggggacaggaccaacggggcttcagggggtggaatcccagagctttgtgtcagtgtcagtcccttaagagatccat

SEQ ID NO: 22195 - DNA, 122 bp, Homo sapiens
ggccccgcaggcaaacctgagcggggaggctcctggatgcagaggacacgggaccaggaccgggtgagccacaagggaggtggggggcccagcactgcctcaccagcaccacccagccacag

SEQ ID NO: 22196 - DNA, 122 bp, Homo sapiens
attatgtactccatgggctcccaggatccagacgtgcatccctgtgtctatgcagttctgcgtccataaacaggtgaagccagagatgggcagattgcagatgtactgcagggggccagatg

SEQ ID NO: 22197 - DNA, 122 bp, Homo sapiens
taatcaacaatttgttcctgatatatctagatgagccagtgagacaattataagtaataacgggaagaacaataccagagtaaaatcaaataggaagaaagtgataggcgtatttacactaa

SEQ ID NO: 22198 - DNA, 122 bp, Homo sapiens
tgcaggcaccccagtctcctttcctaaagaggtctctttaaacagaattttgagagattgcgttttagttatgcgggccagggagaagtggatgctcgccgcgccaggcacgtccacaggaa

SEQ ID NO: 22199 - DNA, 122 bp, Homo sapiens
ccgcccacgcactaactttcgcggccggtcccttgagtgcgtgcggcatatttccctgcgcggaggagtgcgtgttctttctgatccgctctttcaagagcggattcggaagctgctgtgtg

SEQ ID NO: 22200 - DNA, 122 bp, Homo sapiens
gtcgggtaagagggcaagtgtaaatgatcttgtccgtttttgagttaatgtgtaatgagacggggagaaaacaggagagcccagaatgacctggatgctgatcactgaacataccctacccc

SEQ ID NO: 22201 - DNA, 122 bp, Homo sapiens
ctacgttttttactacacatacatatctattgctatggtttggatatgatttgttaggcccgatcaaatctcatgtcacaatttgatccgcaatgttggacggggggccagataggaagtgt

SEQ ID NO: 22202 - DNA, 122 bp, Homo sapiens
cggggatgaggccagggcctagaacttagggactggcctgggctgtcgctcagaggatgccgggggccagagctttgtctccttcctgggctgggagtcccactgggtccttagttcacatg

SEQ ID NO: 22203 - DNA, 122 bp, Homo sapiens
cctgttaagacttttcttgtttctgagcactaaccaagctctataaatgtatgtctcagacgttaataccccagggatctctttattttctcagggagacacagcctctggtgcaaaatgaa

SEQ ID NO: 22204 - DNA, 122 bp, Homo sapiens
agatgatatagctagtatgcctcagcaatataatagaaacacactgcttcctcccactgccgtaagtgtcaaaacacatgggttccagttcttgctctagtccttattatgtgatgcaggga

SEQ ID NO: 22205 - DNA, 122 bp, Homo sapiens
tccctggaaacccgagggagagcacaggacgccaggctgggactcggctggcagctgcttcgggcgtctcaccttgtgactatttcctgggcactgtgggagaggaggcctcttgcctgagc

SEQ ID NO: 22206 - DNA, 122 bp, Homo sapiens
tgtttcccaagttacttcctatcagtgtcctaaaaaatgcaagttaattttaactttggccgcaaaccaagaacaaaaaggttaagtgtattgaattaatttttcaagccaaagttaaagga

SEQ ID NO: 22207 - DNA, 122 bp, Homo sapiens
ccgcgcatcacctccacgtcggctttgggcgcctgcgcactgcgcctaccctgccgggcgcgggaacgcctctgaactggaagtttaaaaatggttaaaacggggccgggcggagtggctct

SEQ ID NO: 22208 - DNA, 122 bp, Homo sapiens
cagtgcccacccgggtcccctcccacgcgggccggccaagaagcctcaccccggcctgcccggccagcgcctccgagcgctcttttccgtgactgcagcaacttcgtccgatgagacagccc

SEQ ID NO: 22209 - DNA, 122 bp, Homo sapiens
tgtagtgcctctgaagtgtcattactcttacacttgtttacacaaggcacctctctcagacgtgccagtcagggttgttgagggggctctggccattttcagaccatgaagggccctgaaat

SEQ ID NO: 22210 - DNA, 122 bp, Homo sapiens
gcactggggggcttcctgtaccgcttcgacctgctgcggggcgtgggcgccgccgtgatgcgctacaacacagtgaccggctcctggagcagggctgcctccctgcccctgcccgcccccgc

SEQ ID NO: 22211 - DNA, 122 bp, Homo sapiens
acatttgaaggatgaattcagatgcgtgggctccaggttccaatgaattataacctgttacgcaggtagagcccaggaatctgtattttatttaaaaaatttatacgtatatatgtttataa

SEQ ID NO: 22212 - DNA, 122 bp, Homo sapiens
gagtcttgctttttgcactgggcaaaatgcaatttgctttgcttgggaaccctgtaccttcgtaatgaatcatcacattcaatagtgtctcttggaattcgcccccctttttcctttccctc

SEQ ID NO: 22213 - DNA, 122 bp, Homo sapiens
tgtggggctaaactgctcttactttgacacagtttaactcacagtatgtggggcaagctacggggagaactcatgcctgtcagccggagaaaagcgtccagtttgctcacgggtcactttgc

SEQ ID NO: 22214 - DNA, 122 bp, Homo sapiens
tcctcatctgtgaagggaggtagctgctgtagagtattccaaggtctctgctagctctaacgtcacagatatgtgtatctagatgtttctagtttgttgtctaaaaagggcgaatgcaacag

SEQ ID NO: 22215 - DNA, 122 bp, Homo sapiens
tcatcaacttctgcctttggcttcagtgccctggaaaggaatgggtgggtagaggttacacggaattatgaccatcagggtctccaaaatttccagcaggcttcccacccctctctccttcc

SEQ ID NO: 22216 - DNA, 122 bp, Homo sapiens
ccgctgccacgtggctgatgaacagacaacaacaggcccagggcagggcagggccggttccgaggagggtggtcctgggctgggctgaggcttttgggagcaccgtgggtactggggccagt

SEQ ID NO: 22217 - DNA, 122 bp, Homo sapiens
cagagcccgcgtgtgcgcgatgtggctgcgggtggggagcgggcggcgggcccgggacaccgcggccactgttctagccccgcctgggccgcctgaccgcggctccgctgcgccgcagcccc

SEQ ID NO: 22218 - DNA, 122 bp, Homo sapiens
ttatttacttttatctacgcatgcgcactcctggctgctagagagggcctcttcgcccggcggtcccgccttctgacgtcgaccattggccggctctgccagcgcgctcctgattggtggct

SEQ ID NO: 22219 - DNA, 122 bp, Homo sapiens
cggctgtagttttcaaaatcccaactgggctggtggagggtcgcaggtgtcaggttgagacggactcgagtcgctatagtaaggagctccgttcatttccttggcctctcctggtctagggg

SEQ ID NO: 22220 - DNA, 122 bp, Homo sapiens
ccgcagccacgcgcggccgcttgcgggaagcgccagccctggctgggctcctttcgcgtccgctgccttctcgaatccgcacagtcccagttcagagatgttacgcagcttgcccgaggctg

SEQ ID NO: 22221 - DNA, 122 bp, Homo sapiens
cccaggagtttgaggctgcagtgaagtaatgactgtggcattgaactccagcctgcgtaacggagtgaggtcctgtctctaaaaaaaaaaaagaaaggaaggaaggaagggaggaagggaga

SEQ ID NO: 22222 - DNA, 122 bp, Homo sapiens
caccgagagtctcagcgtttctcgagataggtgaggctgcgcgttccggaactggtttcccggaaggagcatgtctgcgcccgcgatccgaccggaagttgcacgctgagccgcggacacca

SEQ ID NO: 22223 - DNA, 122 bp, Homo sapiens
ttaggtgagtttctggaggtcgttggccagaggacattgataccctaaaattacagtgtccggatcagggcaaggaattctttgctgaatgaacaaattggcccattggtgagaaaggtctg

SEQ ID NO: 22224 - DNA, 122 bp, Homo sapiens
ggaccccgttgggctgtgaggcgtcccgggcgaccgtgtcgaaggacggttcaggaggctcgtaggggtgcggcaccaccggtagaaaatccttgatgaaaacggaagtgtagtgagccggg

SEQ ID NO: 22225 - DNA, 122 bp, Homo sapiens
gaatccactcttgcaagtacaagagctggtactcccacctgcccctatgtatcctggaggcggctaacacatgataggaaatcttagctccaggggctttatttgcaaactgttgactatgt

SEQ ID NO: 22226 - DNA, 122 bp, Homo sapiens
ctgcgaaggaaacatcacgacctgtttgcataaagaaatgcaaacctgaaacaccgggcacgtgcggtttaggggagcgggcagtctcacacactactgagttgtttcccagcagccgtcaa

SEQ ID NO: 22227 - DNA, 122 bp, Homo sapiens
ctgccaccttcttttctctaggtaagactgaggtctgagagcaggccatccccaccactccggactcagaagggagaagcagaccccagtctggagacaggtgcagggtgtcaggattcctg

SEQ ID NO: 22228 - DNA, 122 bp, Homo sapiens
cttagggaattctggaatcgctttctcccggcagagccgactctaaccaagtgggaaaggcgaggtccgtggctgcctgtggcccaggggtgacggtttggcccaaggccccacctccgccc

SEQ ID NO: 22229 - DNA, 122 bp, Homo sapiens
acgggacaagaggcccatggtgcaccacccgcaacaggccctcccgaaaccctcacagcacggagtgtctccagcctgggacaagctccccaaacccacccctaagctcttctggcagccac

SEQ ID NO: 22230 - DNA, 122 bp, Homo sapiens
aggtgcaggagtcctgggcagttggccccaggaccctcatcaggagcagtggacccctctcgggctctagggcatttccaacaacagccagcccttgtctgacactttctgtgtactgggca

SEQ ID NO: 22231 - DNA, 122 bp, Homo sapiens
ggagaacaggcagctccttacaaagctcaaagttaaattaccatgtgaccctggcacttccgcttatgggtgtacacccaagagaaacaaaaatgcatttccacacacaagcttgtacacga

SEQ ID NO: 22232 - DNA, 122 bp, Homo sapiens
gcagccaagtgcacagcttcacccagcagatccgtacgttttgacaactgtgaaacaagacgtagcacatcgccatcgcgcttctcagctccgccttcaccactctgggtgccagcaccggc

SEQ ID NO: 22233 - DNA, 122 bp, Homo sapiens
ctctgacaccgcaccccgggagcggctcatagatgcaaaaagtgagtaccagagaggcctcgcatttcctcagcagcccactcacaggcagccaaccctgagtgagcagagggcgggtgtgt

SEQ ID NO: 22234 - DNA, 122 bp, Homo sapiens
ttctgctgggactgcaggttgcagcaagacgctatctcttccaagagagtcttcaaatgacgagctctctggccgcatcagcccttatataactcacccccaccaaccgcgaacaccccacc

SEQ ID NO: 22235 - DNA, 122 bp, Homo sapiens
gcatgctttgatgtctgggaccagagcctggaaatggttgagactaccctgccacgacttcgctcccgctcccgcctcggttcacgtttacctccgaaccgcatgcacaactggaggagaac

SEQ ID NO: 22236 - DNA, 122 bp, Homo sapiens
aggctggagtgggagtgcaggtcgaccgcagccggggcggggggcgggcggcgggggcggcgctccgggaccccggtacccttctcagcaacatctcctccgcgcgcggaccccgaccccat

SEQ ID NO: 22237 - DNA, 122 bp, Homo sapiens
cctcacatggcagaaggcagaggggcagaagggcaaagggcctagctagttcccccagcacgcatgtggtcactaacaccttcatgaaggcacatccctgccctggccccctaaaagtcttt

SEQ ID NO: 22238 - DNA, 122 bp, Homo sapiens
ccagctgcaccgggtgaggccaagagcgtgcatgccatgcccgggttcatctggctcatccggagcctgtacgagatgcaggaggagcggctggctcggaaggctgcacgtggcctgaatgt

SEQ ID NO: 22239 - DNA, 122 bp, Homo sapiens
aggtgcccatgcttgcccctgatcatctttggcatgcctggtgtgagactgggttccatgcgtggcagatagatattcaggaagcatcgattttcactaccttcagggaccgtttggcatta

SEQ ID NO: 22240 - DNA, 122 bp, Homo sapiens
aggatgttcccgaaggctccttctactcataagagcataaaatctgtgcctctaatttctcgcagaaacaaataatgagaacttcacaccaattcatttattatatgaatgttttgtcccgt

SEQ ID NO: 22241 - DNA, 122 bp, Homo sapiens
aagcttgcaaacaaactcagttaatctacacaacagctctagtaggtaggtgcttatcaccgtttcctttttacaaattaagcatgcaggatttaagtaatttgtccatggtcatgcaggag

SEQ ID NO: 22242 - DNA, 122 bp, Homo sapiens
accatgttcctctccgcggtcttctgtaagtggggctggagacgccggtaggggttacggcgagggttagggggccgtgacaggcagggccccggaatgatgcggggaaggatgtgcgaaca

SEQ ID NO: 22243 - DNA, 122 bp, Homo sapiens
ggctgcccacctggaacggagaccgaggttgagcagggagctactcagaggacccaaagccgcctagctgaccaccttcttccctatgagttcccagtaacggagcccagtggaggagacgc

SEQ ID NO: 22244 - DNA, 122 bp, Homo sapiens
attagaaatgggcttacctggtgctcctcccgcccctcaacagccttcacatttatttttcgccagggtcttagaggacacagtaaacttttgactcttcacaacagggattcttgccccat

SEQ ID NO: 22245 - DNA, 122 bp, Homo sapiens
ttggatttcccaagcccccacttggaagccatagggttcatgtgtgctccctgtcactgtcgcagaaactggtcttttactttctattttcattcctgctaagagttagctgcttaacattt

SEQ ID NO: 22246 - DNA, 122 bp, Homo sapiens
aaaagccatttactgtatttgataggctggcgccactggccagatgaaagtgcaaatgtgcgtactgagatcttacaacccttctctgtgtctttggggattggagaacctctagagcaatt

SEQ ID NO: 22247 - DNA, 122 bp, Homo sapiens
acaactgggcgggcagccggcctctgcgcccgtttatatcgctcctcacaaaatggcgcccgcgccacccggaaatgaaaccttctgattggcccaccgcgccccgcttcgtaacgaccctg

SEQ ID NO: 22248 - DNA, 122 bp, Homo sapiens
ggaaggggaggcagaggatctacgatgggtaggggccctgcagacccaagagctgggacccgtcaggctggcctggctgtgtggcctcaggcacactcggggtctctctgacccagcaggct

SEQ ID NO: 22249 - DNA, 122 bp, Homo sapiens
ttcacttgttaattcattaatttctttcgcaaatattttttcagtacctgctaagtcccacggactatgctaggagctgctgttaaaatgacaaaccagataaggtcactgcccttaatcaa

SEQ ID NO: 22250 - DNA, 122 bp, Homo sapiens
agtgggagtggacacccgtgtcttgcctcaggactcaagtgctctccagggagtgagatgcgggctcgattgtaagttacaaagtgatgcttccctgtgggaaaaagtacatccaatataga

SEQ ID NO: 22251 - DNA, 122 bp, Homo sapiens
gggcggtacgccaaggagagtgggaggcatggcctccggccctgtgcgggctcgtgtgggcggcaccggcggcctcatgggcatctgaacccagtccccgggaggccacccatggcctggca

SEQ ID NO: 22252 - DNA, 122 bp, Homo sapiens
cctgaaggctctgcgcggacttgtggagacagccgctcaccgtgagttgccccggcttcgcgcctggccaacctcatgccacccagaccatcgggccacactccggagtaactatttcctga

SEQ ID NO: 22253 - DNA, 122 bp, Homo sapiens
aaatgacgagaaggtggagccgcctcagtgccggtatgaaaaagtttccgtggtctgcgccgaagatcaaaccagtcacaatattccttcaggccgaagtctcatccagagccaggccctca

SEQ ID NO: 22254 - DNA, 122 bp, Homo sapiens
agtctggtctccaggcagatccgcgggtgcttggaggccggcgtgtgggccgcactgtgacgctcggctgggcttggtgtcagccaaactctgcaccttcctaggaaaggaaagcctcggct

SEQ ID NO: 22255 - DNA, 122 bp, Homo sapiens
agcatcattttttctgcttgtctaagagaaacacttcacagtgtgcaagtaccacaacatcgacaggacatgaataactcgtttcacacgcgatcactcaccattcggatatatgggttttc

SEQ ID NO: 22256 - DNA, 122 bp, Homo sapiens
tctgggcacacaaaaataaattaaataggttcttaccttcaggcaagaatttgtggctttcgaatctgaaaagaacccactaaaatacagagcagacttgaacaaaggttataatgaaatac

SEQ ID NO: 22257 - DNA, 122 bp, Homo sapiens
tggactcctggcctcaagcaatcttcccaccctggccttccaaagtgttagggttacaggcgtgagccagggcgcccgacctgttattgttactattattgctgctgctgttgtgattcccg

SEQ ID NO: 22258 - DNA, 122 bp, Homo sapiens
cccccacccctcctcaccgtcacttggaaggggctgttgggcacgtgctcgccaccaaagcgcacacagatgacgtatttgcccggctggggggccgtgtagaagatgtcgaaagtgccgtc

SEQ ID NO: 22259 - DNA, 122 bp, Homo sapiens
catttcttctgtgtggagagatacccggaagtgagactgcagggtcaaagcacagtgtgtcgccatattggtgggtgttgccagatgctgtttgtgggatggttccatgttcctgcaccaga

SEQ ID NO: 22260 - DNA, 122 bp, Homo sapiens
cctccctctcttgggtctccctaccccctccctgcagccgggccacctgctcccgctgcacgggtggggaggaggcaggcctggcacattgcttctgccaggaatactccaccaagcctgtc

SEQ ID NO: 22261 - DNA, 122 bp, Homo sapiens
tgaagtggtacagggtggcggtagcagctggggtggacaggaagaccatatgcagagtcacggagggacctgtggttggggacagagcagcacagcgtgatggtctaagtttccaaagggga

SEQ ID NO: 22262 - DNA, 122 bp, Homo sapiens
ttgaaggaagtggccttgtgtcacttccggcctccctttagctgccatcttgcgtccccgcgtgtgtgcgcctaatctcaggtggtccacccgagaccccttgagcaccaaccctagtcccc

SEQ ID NO: 22263 - DNA, 122 bp, Homo sapiens
gggcaacagcagcgggctcgagtgctaatggcaggaaggcgtgcgagacgttcaaatggacgcgtccatcttgactttcccgtcttgcctcgcgccggggcggggcatcgcgggaggtgcgc

SEQ ID NO: 22264 - DNA, 122 bp, Homo sapiens
aaggtgagagccgccttcaagcacaaaaccaaggtctggtcgctcacgagcagctctgcccgcacctccaacgcgaagcccttccactcggacctcgtgagtgcagcctccataaaccgagg

SEQ ID NO: 22265 - DNA, 122 bp, Homo sapiens
tgcacacatttgcacacataagcagcttgtgtacacacatgtgcacaaatggagccagaacgcatcctggcattcttcctcctctaatcatcttgggagcatctggcttctgcagagggatc

SEQ ID NO: 22266 - DNA, 122 bp, Homo sapiens
ctcctccgtaactacggaaagcttcggtgaggggccggcttccccgcacctcagtccatgcgctcacccgccaaggaatccggcgggaaggcaacagcctcccaggacctcgagcgcgctcg

SEQ ID NO: 22267 - DNA, 122 bp, Homo sapiens
gagcggggctaggggccccgggccgccggcggggcaaacgcggttcagaaacgcaggccgcgctctggcccgccccctgcagcagcacggcctgctcgccatcgcccggagagcgccgcggg

SEQ ID NO: 22268 - DNA, 122 bp, Homo sapiens
cactggctgggggcaccggcagaatgcgctgcatcaagtccagcctgaaacagtgccgtgcgcgtgagaaggaagagggtcggtgtcttcccgcccgaggccggactgccccagtgaaggat

SEQ ID NO: 22269 - DNA, 122 bp, Homo sapiens
gtgagcgccaattggctgagtcgtcgccgagctgggccaatcctcttggtggaggaagctcggctgattctcggctcacgcgggaggggagtaaagggtggcggtccgggcctggagttcag

SEQ ID NO: 22270 - DNA, 122 bp, Homo sapiens
gatgaggagccaccccagacgcggccgcgtggccagtacagcacgcggccgtccaggccccgctgcacctctgtgtggtagcaccagttgtacctgtcgtcgcacaggttggccaccagggc

SEQ ID NO: 22271 - DNA, 122 bp, Homo sapiens
ctccatttccgtgtgtggggcgggggtggtaagatactagtgcagagagatgaactgactcgtcagaggcaaggctagttggaggaaatccagagggcagtttgggcttcttggtttcttct

SEQ ID NO: 22272 - DNA, 122 bp, Homo sapiens
gcaggcgaggggcagggcgggcgaaggcaattccgctgttctggctccagaatctcctaacgcgcaggcgtccaacgtgaccggcgcgactcaccgctctaatctctctggttttccaaggc

SEQ ID NO: 22273 - DNA, 122 bp, Homo sapiens
ccctccaaagtaatcacttcacccccatgacctacatagggtagcctaagtcatagatctcgaatcctgatctggtagctctgaaaggtttagcttcctaataaagcctcttgtgctgtcag

SEQ ID NO: 22274 - DNA, 122 bp, Homo sapiens
agaaggaactctgaagactccgtagattgctctagaccgcctcagacactctcggcgcagcgtggagaggatttgtgcaaacatttcctctgtggaccaagaggaatgcaagaggaggctgc

SEQ ID NO: 22275 - DNA, 122 bp, Homo sapiens
ggggccagctctgagagcccagccctggggtagactcttgagtacaggctcctgggctcccgctgtgaaggtctcactcagcaggcctgtgctggggctcactgacgggggaaggacggagg

SEQ ID NO: 22276 - DNA, 122 bp, Homo sapiens
cagggctctgatcccaagaagtgccaagaagacctctgtggtcacagatgcggaccaggccgggacatgctggaaggtgtcaggacacgcccggcctgcacctctgtctcccagagcatccc

SEQ ID NO: 22277 - DNA, 122 bp, Homo sapiens
aaggggagaccccagcgcggaggagacgcgggagcgcggggtaggtagcagcggcggctgcgtcgctaaaatgagtgcagaaacgaggaaggtgggcggcgggaggggacaggctgcgcccg

SEQ ID NO: 22278 - DNA, 122 bp, Homo sapiens
gacaagaagcacctgtgctcccgcaagcacagcctggaggtgacccaagaggaggtgcagcgggagcagtcccagcgggaggcgccgctgcagagcctggatgagaacgtgtgcgacgtgcc

SEQ ID NO: 22279 - DNA, 122 bp, Homo sapiens
atccaggacattcagtttcatcttcctggcactttagtgtttaggaagggcctggcctctcggggagcgacactcctcgcccggccactttgtaagaagcatcgagcgtggaaaaggggctg

SEQ ID NO: 22280 - DNA, 122 bp, Homo sapiens
gagtagaatgggcatcaccttaatagatctatcctgggatatcaaatacagaatagtgtccggagacgaggaaggctttttcaaagcagaggaagtcatcattgcagatttctgttttctca

SEQ ID NO: 22281 - DNA, 122 bp, Homo sapiens
cgcctcagccaatcgggagcagccatgctgcgcagtgcagaacgccatagcgacggatgacgcctgccggggaatcgccgtagcaaccagagacgcgctagatccaccaccaagcttgcaag

SEQ ID NO: 22282 - DNA, 122 bp, Homo sapiens
ctttatacgtcgcccggtgtttggcactgagcccactatggtttggggactactttatctcggcggagtgttacgtaggaagtggttgtgacgtcattctggtcccttccctaggccgcagg

SEQ ID NO: 22283 - DNA, 122 bp, Homo sapiens
gtgtatcagttctccgggattacaacggaatacctttgaggaacattggggaccgaaaggcgacctcggagaatgtggcctccagggggagcccaggtacatttgccgggtccggagccgac

SEQ ID NO: 22284 - DNA, 122 bp, Homo sapiens
tttgctttgctttcgtcactgtcgcccagccatcgcctctgaaggcctgtgaagttggagcggccagccccagaagtggtgcccaaagcctgtctctcagtggcctcacctctggagggctg

SEQ ID NO: 22285 - DNA, 122 bp, Homo sapiens
cagagctgctgtcattgtcaggggcccggcttggcatcaaggccagatggagtgctagcacgggcctgggctgggcatgtggtgtcaattccagcctcttggaagtcggagtaattccttga

SEQ ID NO: 22286 - DNA, 122 bp, Homo sapiens
tcagcctccggagtgaggaagcagcagaaacagaagcagcagaagcaacagcagtagcagcggcagcagcaacagcagcagcccctactgaagtccaatagaggagacttgatctctagttc

SEQ ID NO: 22287 - DNA, 122 bp, Homo sapiens
tagcaaccgcgtaagagcatgataggacagcacgggagccccaccgctcaggactgcaaacggatggaaaactgctggttcattagaggccattcttactatgaaaagaggatgggcactga

SEQ ID NO: 22288 - DNA, 122 bp, Homo sapiens
tgtcctctgcagtcttgtaaatagcctgacatcagttgttttaaggttttaagtagtctgcgttttcattagttatcactagatggtagcagagagcatcggtcagaattaataaaagaggg

SEQ ID NO: 22289 - DNA, 122 bp, Homo sapiens
atggatatgctatctggtgcataatggctgtgaattccaaccagcctcctgaaaccaagacgtttcaattaacaggaggcacttcaaacctgaacatctctctttcctggctttccagtcag

SEQ ID NO: 22290 - DNA, 122 bp, Homo sapiens
gccttgggggtacccagccttaaactgcacacgtgggcatgtttgcaaatgatgaaggcacgctctgctgggtttagaatgccatgtcctcagaaacaagaggagcagagcagatctccagc

SEQ ID NO: 22291 - DNA, 122 bp, Homo sapiens
gcaaccctggacacctcactgctatttaacttaaccctccctaggcagatcatatgagtccgattgtaaaagtattaatgtggacatctttccactctggatcaagtccatttcaggttatc

SEQ ID NO: 22292 - DNA, 122 bp, Homo sapiens
gaagtgtgctgcttgcagctctggaggtcagaagtccaagagcaaggtgccagcagattccgtgtctggtgaggccgcttcctgtttcatagacggtgccttctaactgagtcttcacagtg

SEQ ID NO: 22293 - DNA, 122 bp, Homo sapiens
actgaggagaaagattatcactgggtgtcttgagcagagctgcttgcttctgaatgctcacgataatcaatagcagatgtgtggtaagcactggaaagttgcataactgtctcacactgaat

SEQ ID NO: 22294 - DNA, 122 bp, Homo sapiens
gatccttcaagctggcatccttggcctcgctgcgggggcttagctacctgtgggaacccacgtagcaagggtgactcaaagggttaacaagcagtggcgccgcagagtggcggggagtgcag

SEQ ID NO: 22295 - DNA, 122 bp, Homo sapiens
aaagggaggagggcttgaggatagggacaaagtgatgtggagcttatgtaggagatgatgcgcagcctttcagcattgagagagaaaccgggagaccagccagcctcagtgggcccaggaag

SEQ ID NO: 22296 - DNA, 122 bp, Homo sapiens
acctgcaggcccctccccggttctctaggacccgccctctcctttcactctgggcgaggccgcccctatcccagccgcaccggtccttcccggcacacgcgaggctcccatggctctggcgg

SEQ ID NO: 22297 - DNA, 122 bp, Homo sapiens
gaatgtaacatgtaaacactgactcccatattacactgttacaacttgcattaacagcgccggacaaaagccgcattttcacagaagcatcgtacagggatatatctccagcttaattttta

SEQ ID NO: 22298 - DNA, 122 bp, Homo sapiens
atctgcaatcccggcacctcgggaggctgaggctggtggagaccagcccggccaacacagcgaaaccccgtctccaccaaaaaaatacgaaaaccagtcaggcgtggcggcgtgcgcctgca

SEQ ID NO: 22299 - DNA, 122 bp, Homo sapiens
ctgtggatgctataattacataacagttctcctttgaccagtgctcatccacgtacgtcacgtacacaccaatggatccttgtactgcagatcagacagcttcgtctgcaaatactaagatg

SEQ ID NO: 22300 - DNA, 122 bp, Homo sapiens
ctcatacgctccactgaaacgcaggacttcccagcccagtccctcagtggagaagactgccgaagcccggctccggcagcagggtggcgcctgcgtcatgaggacgggctcgcatcttcagc

SEQ ID NO: 22301 - DNA, 122 bp, Homo sapiens
tccctcccactccgcagtctgcttttgttgccagctctgtctggggcaagtgtgggttggcggtggggaggggcaaaggtgtgggcggaggcaacttctcattttacagatgtggaagcaca

SEQ ID NO: 22302 - DNA, 122 bp, Homo sapiens
gttctaagaatcaacagagctcaattctcggaatttgagcttcggactttaccactgctacgtggcaggggaggacttggtgtcagctctccgagatttttactgcccctggccaaccaaaa

SEQ ID NO: 22303 - DNA, 122 bp, Homo sapiens
gtctgagggtgaagatgacactaactttgattttgttctgacccttaaggcaggcttttacgcaggcagccaacaaccacagggctgtgtgtggtgtgtcagtggagcatggtattcctggg

SEQ ID NO: 22304 - DNA, 122 bp, Homo sapiens
tcaagtccttaactcagggtcagcttctgaagaaacttatcctaaggcatgctgcaagaacgaaaagccaagaaatgatggaaagagaaaatagcagaactctgaaaaaatacaaacaacta

SEQ ID NO: 22305 - DNA, 122 bp, Homo sapiens
aacatatactttataagccagtaatacctctactacgtatatattcaacagaaatgcatacgtatgtgtaacaacatgtataaaaatgtttatagtggcatttctcgttatagccccaaact

SEQ ID NO: 22306 - DNA, 122 bp, Homo sapiens
gagcctcacaggctatatcgcacagcccaggcatcgcacagccaggcacgtaggaggctgcgccatctaggcttgtgtacgtcactgtagtacgttcacacggcaacgaaatcacccaatga

SEQ ID NO: 22307 - DNA, 122 bp, Homo sapiens
gagccggctctcgcaacccagccgccccaagcccgccgtcgcccctcctcccgcgcttctcgcccctgattctagatgcagctgacttgttgcatgcagaagagcagctgggttcggcgttc

SEQ ID NO: 22308 - DNA, 122 bp, Homo sapiens
agactctgccgctgtggactacatttcccagaagtctccggggcacaggccttttaggggcggggcgagcttgcctgccagaagctcctctcccagcctgcgagcatttccaggctcttgtt

SEQ ID NO: 22309 - DNA, 122 bp, Homo sapiens
gatgcctagatcctatgacagcctggcaggtgactggcagaattttgctgtgtcttgtcccggcagtcaggatttcaggcctcaaagaaaagctccagtgaaaaggaagggggaaatcctgg

SEQ ID NO: 22310 - DNA, 122 bp, Homo sapiens
caaaccacatctcattatgcaagagggcacgggtcccctccgcgccggggagcagcaacacgccttagcacatatttgccagagctctcctgccggttgcaaaatactgtgtcatgtttcat

SEQ ID NO: 22311 - DNA, 122 bp, Homo sapiens
tctcggcttgattttccaaatcccttctcttgttgcttattgtcacaggagtgcatacctcgctcatcattttggaatgtccgcgagccagtcttctctgcctaatctttgcattttaatac

SEQ ID NO: 22312 - DNA, 122 bp, Homo sapiens
gtttgtcttcacagccgccctccccagggcccctcgtgggctttcacctgtgtctccgggcgtttgtctacacggtgggcaagagggacccaccaagcaagggcggcacccaccctgctgga

SEQ ID NO: 22313 - DNA, 122 bp, Homo sapiens
ctaaactgcattgtacaaaatgccacttgaaacgtccaccagaacccccagccaaagacgcgcatctggacagcttcacagcacagaatgtgtgaccttggtccccgtgggtcctgggggag

SEQ ID NO: 22314 - DNA, 122 bp, Homo sapiens
gagacgagggggcgtgtaggcggtgacgccctgcaaagtggccggcgtgcttatcattaccgagcttccgcgggcctgcagagcctggcggactcagacttctctccggagcgggatgcggc

SEQ ID NO: 22315 - DNA, 122 bp, Homo sapiens
aggtgatcgcctgccttggcctcccaacgtgatgggattacaggtgtgagccactgtgcccggccaggtccagaggtcttaaccttctcatggattcctgggattttgaggtggtgtctcag

SEQ ID NO: 22316 - DNA, 122 bp, Homo sapiens
ccagttacccaagatgtcccattaagttgttcccggtaggtctgctttccctggaagagccgtatgtactcagcctttcctattgggccttccccacaattagaatattttgacttagtgtc

SEQ ID NO: 22317 - DNA, 122 bp, Homo sapiens
gggaactctggtgccttccgcggaggtttcggcagtggcatccggggccggggtcatggccgtggacggggcccgggccgaagctgcggagcttgctgaggcaaggccgaggataaggagtg

SEQ ID NO: 22318 - DNA, 122 bp, Homo sapiens
ccgagctcccatcctgcccaccagcctttctcgaccagggtcccgattcgcggacgccaacggcccaacctatctctgccccaaatccacgtgggacacagcacccatgtccagggacatcc

SEQ ID NO: 22319 - DNA, 122 bp, Homo sapiens
cgggataactcaccatgcaggcggcctgcaccgcctcagacacgttaccagcattaggctcgcaccagaaaacgtggcactcaaagcgctggttccccgtgtccatgatgaaggcaaatgtg

SEQ ID NO: 22320 - DNA, 122 bp, Homo sapiens
gggaaaggattgttcctaggactcaaagcaccacccagacctctttaaaggcagtgagagcgaggaggaggagttcaggagtgcaaacctctcccttaacatctgtaaaaactgaggcctgg

SEQ ID NO: 22321 - DNA, 122 bp, Homo sapiens
atggagcggttaccccgaccctgcgggaccttcttcctctggcggaggtgcacggcgcggcgtggtgtttttctggcggaagtatctgtgcgtggccccaggcccttcccggcgcggtctca

SEQ ID NO: 22322 - DNA, 122 bp, Homo sapiens
ccctgacccgttgttttgaggcttttatgtgtataactcatagaactgcacagcttgcctcgaagatgcacaagtgtcctcttacttcactcttttgcaaccttcccacccccaatgaacct

SEQ ID NO: 22323 - DNA, 122 bp, Homo sapiens
gtagtatctccctaaacgtctgatgactatcagaacacagggaatgtctaaaacttttatcgttgcccttggtctctgcataatcatgatttaagatcccctttaacccaagcacgtgggaa

SEQ ID NO: 22324 - DNA, 122 bp, Homo sapiens
aggttcaaacaatacattctaacctattatgaacctgcttggtggttttaagttttgcagcggtaacttaccctctctccttcttttcaagtcttgcctcttattcccacccacccctcccc

SEQ ID NO: 22325 - DNA, 122 bp, Homo sapiens
aacagtaggctctgcactacttcaggtgagtagtgcagtggacgatgagtaggctgtggacgcctaagaggcactgtggtgtagatatggcatgggcccaccaatttgggtgccattcctac

SEQ ID NO: 22326 - DNA, 122 bp, Homo sapiens
cagagagtgcaaatctctctgagcttcagtttcattttctacgacatggggataaccctccggtgcttataaatattccagcataacatggccaacccgatggctcccgaaaccttgccaga

SEQ ID NO: 22327 - DNA, 122 bp, Homo sapiens
actctgctgccaactttcatttcctattccagttgctttgcacatgcagttcctccccaccgttctgcctaagggacctctcttcacccttcaaagcatggttcagtgccacccccccaagt

SEQ ID NO: 22328 - DNA, 122 bp, Homo sapiens
gggacccgcgatggcagcgccctgagaggaggctccaggcagggcgggctgcgctggcagcggccgctgaggtgctggccggccggctggctggcgacgggggcagaagcgacgagaggcgc

SEQ ID NO: 22329 - DNA, 122 bp, Homo sapiens
tccccgtctccctccccagccttatctcctgactggattcttgctcactcccaataaacacggactcttaattcgtttcagtatttactaacctcaaaacaaggcaatgtaaagatgaataa

SEQ ID NO: 22330 - DNA, 122 bp, Homo sapiens
ctcaccgcgatgcccgaatgctacctgtactccacgttcctacaccggttgacctcaccacgatgctggaatgctacctgtactccacgttcctgtaccggttgacctcaccacgatgccgg

SEQ ID NO: 22331 - DNA, 122 bp, Homo sapiens
tcttcccgttctttgcgccgccttcacccattgaaggagcctgtgcccaccctgcccagtcgctttccgggccgctgaggagcttccgctgccatcttcggatcctgtgttccgcacggggg

SEQ ID NO: 22332 - DNA, 122 bp, Homo sapiens
tctacggggcggcaggaggcccgaagcaagatggcggtgaatcagagccacaccgagaaccgccgcggagccctcatccctaacggtgaaaggtgcctgaggggaagcacggcgtgctgtcg

SEQ ID NO: 22333 - DNA, 122 bp, Homo sapiens
tcatgaattttggtagtttctcctatagaacttggccaatgctggtgactagacacatggcgggttgacgtgaggtgctgtggttattccaagaatgataattaatacgatacgtctccccc

SEQ ID NO: 22334 - DNA, 122 bp, Homo sapiens
gggcgaggtggggtcgggccgggcagggcttgggctgggcctccctgagggggtgaaactcgaaaacgaggatttccttcgttccacaccctgactctacgccctgcccctgggcattgtcg

SEQ ID NO: 22335 - DNA, 122 bp, Homo sapiens
taacaccgcagaggctccaagcgctgggagtcgtgtgcccgcggcgctcgccactgaggccggttggaagattctagggtgccccttcccaggttccagcaggcactccgggatgttctaga

SEQ ID NO: 22336 - DNA, 122 bp, Homo sapiens
gacctacattccaccctcatttgcttgacccgggtactggaaactgggcaaggtccattacgccacctgttgaccgtgtgcagccctcatcccacatgtcagcgggactccaccttccccca

SEQ ID NO: 22337 - DNA, 122 bp, Homo sapiens
atcaccaccgcggggagacagaaagacgttagcgctcaaagaccggctcggcgtatgctgcgccaggccgcgcgctcggccttataaaaaaggcaccgccgcgggggcggggcctgcgcgac

SEQ ID NO: 22338 - DNA, 122 bp, Homo sapiens
cgcgggcggcgctggggcgtttccaggcagcgcgcgcctcctgccggcgcgcggggaacgcgcagcctgcggtgctcccgggagcccccaggaagtcctggcttgaggcccggtcttgcccc

SEQ ID NO: 22339 - DNA, 122 bp, Homo sapiens
atcccaattcagccacttaccagctgtgggactgttggcaaatcacttaaaattgtgcctcgtttccacatatataaaacgggaataataacagaacctaccttacaggactattgttaaga

SEQ ID NO: 22340 - DNA, 122 bp, Homo sapiens
taatggaaccacatgacaccaggacccatgtaggcaagcaggcccagggacatgaaaacccggggacagaccccagtgcctagaacattcagtctataaggtagcatatgataccggtgagg

SEQ ID NO: 22341 - DNA, 122 bp, Homo sapiens
ggggggcggagctcattatgtaacgaggccgggaggcaacgaccaatggggtggcagccacggcttctgctgaatgaaaacaaacgcagcacgtgggcccggctctagagccatgtgagccc

SEQ ID NO: 22342 - DNA, 122 bp, Homo sapiens
ccgggcttccgactccccgggccactgccattttgggaggccccggccctgccgccgtgacgtaaatgcccaaacatggacacaggatgtgtgccggggactcccgaaaaggaaagctcgag

SEQ ID NO: 22343 - DNA, 122 bp, Homo sapiens
atggcaatgggagtattgcactgagccaggtttcgggggaacggggacgtgtcgggatggcgtagggggacagagcctggcaggagacacatggaagtttccgccttgtcagtctcagagca

SEQ ID NO: 22344 - DNA, 122 bp, Homo sapiens
ggcaaactgaggcccagagagagtctaaaccccacctaaagtcacacaggtaatgagagacggccccaaagcctgacaccacattcagaattctttctaccacatcaagtgtggccagccct

SEQ ID NO: 22345 - DNA, 122 bp, Homo sapiens
aacacaggatcagtagatgaatgtatgcaatactaattcctacgaagaccttggtcatctcgtgtgtttgattcagtggccctgtggcattaagtgttagcacctgatccagactgaattcc

SEQ ID NO: 22346 - DNA, 122 bp, Homo sapiens
ctaggctggcaggaggtgaggtgggagctgccaggccccttttgtcaccacgggagctgccggtgcatgaagccatccagaggcagccaagagatggcaccagagattcctggcgccacagc

SEQ ID NO: 22347 - DNA, 122 bp, Homo sapiens
ggaactccccggccacagacgcagagccctgattcagcgctgtgaaaatcgctagccacccgtcccccatcaagtccgcccacacttgcccacgggtggtggcaccatattcgattcgtggg

SEQ ID NO: 22348 - DNA, 122 bp, Homo sapiens
gtggcggcgggtcccgactgcgctgccgcccgtgagaggcaccggacctgccctccagggcggggaaagggaggactctgatcccatgagaacccagacagttccatgtccaaggaggcacc

SEQ ID NO: 22349 - DNA, 122 bp, Homo sapiens
cgcccgcgcactgcaagcccaactggatgtaggactcggtgagcttcttggcgtcgccgccggcgccgtggggcaggcagatgcgcgccagcaggctccgcgcctggctctccttgtcgccc

SEQ ID NO: 22350 - DNA, 122 bp, Homo sapiens
cagtatgcgaggtgtggttttcagtagggtataattcgttttttcaacatatatttattgcgcatctgctctgtgccacattttgttcttggctcagggaataaagtaacaaaacagaaaat

SEQ ID NO: 22351 - DNA, 122 bp, Homo sapiens
ccccgttcagaccctcagagtccctatccaagggcgggtgccaggagggaagccgacgagcgccaaagggctcgggagcgctgccaggagtcctcccgccccttctcagcctctccgcgcgc

SEQ ID NO: 22352 - DNA, 122 bp, Homo sapiens
ggtgagacgggagaattcacaccagtcccagctgccctccagggaaatagaacccacgaacgtgtcacgtctgcgtttatcgataaccgcgtgtgcgcggaggggctgtgctcagtgtcccg

SEQ ID NO: 22353 - DNA, 122 bp, Homo sapiens
ttccgtctaacccatcaggcccctagaagggctaactatgccctttctgagtcttccacgcggtgggggcgaaggaggatggagctagaacgaagcctcagcgcgtgccccgcacaaacatg

SEQ ID NO: 22354 - DNA, 122 bp, Homo sapiens
aactgaagctcaaagggctggagccactgttttgggttgagttccttcacacgaagaccccgggacaagtagtggatttgggaggtgatcccaggaagcacaggtaaggaagtgggacaagg

SEQ ID NO: 22355 - DNA, 122 bp, Homo sapiens
tgaatgcatcacctctaatatggataactcctatttggtgaaattttaatttcagatgtgcgtgtatgtaaaaccatatatgcatatggatataggtgtgtatgtatttgtgtgcgtgtgag

SEQ ID NO: 22356 - DNA, 122 bp, Homo sapiens
tcctagcccgctggctagaccatggagggccgctgggtgcagccacagagcgcggggccccggcgaccccgccccgctccgcgtcactcggcgccctgcggcgcgcgatgagcacctaccac

SEQ ID NO: 22357 - DNA, 122 bp, Homo sapiens
tcagatggagctgcattgtgtaaggatgcaaagatcaattttgactctaattcagcctatcgccaaaagaaaatgtttgatctacaggactggacccaggaagatgaaaggaacaaagatgc

SEQ ID NO: 22358 - DNA, 122 bp, Homo sapiens
ttggggttcccctgagggttctgggggagctcggacttgcgttcccagcaggccggttgtcgcctgctttgtgcctaatttgcgtcactggggttcctagcggactcgcctgcaagtgtgct

SEQ ID NO: 22359 - DNA, 122 bp, Homo sapiens
tggagccaagcatgcacttgggaactctgcaggtgaatactccaggggcacaggggcctccgggggagtaaggcaggggaggggagtcactgtttctctagaccatagaagtcacgggctct

SEQ ID NO: 22360 - DNA, 122 bp, Homo sapiens
attggaggcagtgaagatgaagggcgagaatccattggccgtgccagtacgccatgggggcggttgggagatcttgtagaacaactgttcgagcccgcttgtccactcattactctggaatc

SEQ ID NO: 22361 - DNA, 122 bp, Homo sapiens
tgagcccgagcccctcgaaggccaccccgcaccccgctcccgacctggcttacgcggtcccgaccccgcccagctccgtggcctcacctctgactcctaggccctccctgcctaatcccctg

SEQ ID NO: 22362 - DNA, 122 bp, Homo sapiens
atcaaacgacggctacggtctgtgttcgtagggaagtgaagtcagacctctgctggatgtcgtgtgtcccctaggactgcgtcctcccgcgcagacaggtacgtgcctggggtgtgcacata

SEQ ID NO: 22363 - DNA, 122 bp, Homo sapiens
ggtctctcctagggctgtgcagctatgcaaacagcagtggtgccgcattagctcacagcccggaggccgcctatttccccacagcccctaggaccctttctgtagagggagcacatgcagag

SEQ ID NO: 22364 - DNA, 122 bp, Homo sapiens
ggcggaggagtagggccaagggactcagggcgtccttccccagctgagcccgaggggcagcggccggtgaggaaggggagctcgggggtggaattcaggcctgggacaaagtgtgtacccgg

SEQ ID NO: 22365 - DNA, 122 bp, Homo sapiens
ggcgcaagccatcctcccaccttggcctcccaaagtgctgggattgtaggcatgagccaccgtgtccggtccttactgggaaattttaagtcacctaagaggttcacgctctatttctattg

SEQ ID NO: 22366 - DNA, 122 bp, Homo sapiens
cctctcagtataaagaaaacaaagttgcaaccataaataaattaggagcaaggcaaagtgcgtggttaaaatctagattggggctgttgaccaaggtatatcaattttcagattggatggga

SEQ ID NO: 22367 - DNA, 122 bp, Homo sapiens
cgatttctgctgaacttggaggcatttctacgacttttctctcagctgaggcttttcctccgaccctgatgctcttcaattcggtgctccgccagccccagcttggcgtcctgagaaatggt

SEQ ID NO: 22368 - DNA, 122 bp, Homo sapiens
acgagctcacgctgctcggtgctgtgcacacgcgtccctaatcccagatgcctgggagaacgcaggctcacgctgctcggtgctgtgcacacgcgtccctaatcccagatgcccgggagaac

SEQ ID NO: 22369 - DNA, 122 bp, Homo sapiens
acaaatctgttttatttaaaactgggatgaaagcgtctgtcgctcaaaggcgtcacagtccgtcacattaagataaattttcagaagaaacgcaagccctcgggaaatacctctgcccagag

SEQ ID NO: 22370 - DNA, 122 bp, Homo sapiens
tgcgtgccatgtctggcttctctctctcagcgagtgtcctccgtgtctccgagtcgcgcccgttctgttgtgcgtaaatgccgttctcagagctgttgtttgtttagggatgtatcatgttt

SEQ ID NO: 22371 - DNA, 122 bp, Homo sapiens
cttggtttcgcttcgctagtcccagaggcccagagtggctcgcctggagtctctgtggcgcggtttcctgtacctgccttgggatccggagggaggaagctgggacacccgggagtcaggaa

SEQ ID NO: 22372 - DNA, 122 bp, Homo sapiens
gtgaccaaacattgtgatttcctattaaaaaaaatcttaagataatgagatgattttttccgtgttacatgcgtaagcttattctgagatgaaagggtctaagtacacacagcaggataata

SEQ ID NO: 22373 - DNA, 122 bp, Homo sapiens
tgccctttctgtagcctgtgggtgggcgggaactcagggcgcatgcacctggcttccaggcgccacctaacggactgcactcaaagggcacctggagccgcgccaagaccgccagcctcccc

SEQ ID NO: 22374 - DNA, 122 bp, Homo sapiens
gatcacccagaaaagcccagttaactgccatcaataagacaaaaaactaatttaaggagtcgcctggattatgcaagagtccagtgagtgctggcaaatatttttatcaaaagctaacaaac

SEQ ID NO: 22375 - DNA, 122 bp, Homo sapiens
gcgcggcgtggggcgcgcgtgggcgcggcgcaggcggcccgggtcaccatgaggactctccgcaggttgaagttcatgagttcgcccagcctcagtgacctgggcaagagagagccggccgc

SEQ ID NO: 22376 - DNA, 122 bp, Homo sapiens
ggggaaggactcgtgtgctgcgagctggcggccgggccggagtgctggggctttgaactccgagaggaggtggaccagaacttttggaactagtgccggcggctctccaccccccaggtaag

SEQ ID NO: 22377 - DNA, 122 bp, Homo sapiens
cgggcccgccgcccagcccaccggcccggccgcccgcgcctcactgcccggcccggaccgcggcgcccaccccggcccccgccgcaaccgccgcagcagccgccacccctgcttcctccttc

SEQ ID NO: 22378 - DNA, 122 bp, Homo sapiens
tgggagggaagcagggcctgtcgggggtggagatggcctttcctccctgtcctgcggcggcggcgtcatccgagcccagcatcggtcagttcccatacagtcaggcatcgcttaatggcggg

SEQ ID NO: 22379 - DNA, 122 bp, Homo sapiens
ccccagggctgccggacgcccagttttcctgctgtctctcatcacaggggcggtggggcgcgcccgcctccagcctggctctggacccggggccccgccacctcccagcagcgggcgcagag

SEQ ID NO: 22380 - DNA, 122 bp, Homo sapiens
gccaatcagcggcgacgctggacgtagacgtcctaccccgtgatattaaagcaagatggccgcgccctgcagattgtctcttgttgcgtaagtttttttgaccgtcactcgtgtcagcttca

SEQ ID NO: 22381 - DNA, 122 bp, Homo sapiens
taatacattcttcttgcccccaaggaaaaatgatccagctataataaccacctcctttatcgaacacctacttggtgacagtcatgctggctctgataatctgattccttacaactgttctg

SEQ ID NO: 22382 - DNA, 122 bp, Homo sapiens
aatcccgcagctcgccgcacccgctaacccggacgctccacgtcagccgcgccgccgccgcggggtccgccccacctcacaccccagagcacgcagctccgcccaccgctcacggagtccgg

SEQ ID NO: 22383 - DNA, 122 bp, Homo sapiens
tgatcatgagcactttccacctgccaggtcctaagagcactttgtgggattatctcagcccgcacagtccgcagggtggatactatcatcatccccattttacacaacaggaaactatgttt

SEQ ID NO: 22384 - DNA, 122 bp, Homo sapiens
accactgagcagtctgaagacttcaattatgcacatggcaggacagtgggtgcctccccacgtgggtgggagattactgccgctggccgggctgtcgctctcatgcaaaatattaagaaaag

SEQ ID NO: 22385 - DNA, 122 bp, Homo sapiens
tattatcttggggctttgggatgacaaaaacatgaaagcctccggaattggtgagatgcccgcctctcctcattacgtcggctggggctgggggcgggggccctcctgggagcctcatttag

SEQ ID NO: 22386 - DNA, 122 bp, Homo sapiens
ttcttccttggaattcccactctgcatttggcatagtgcagtttcactgatcagggaactcgttatcagacagatatgctctcaaatagcaacttttcttctgtggttttggacaattcatt

SEQ ID NO: 22387 - DNA, 122 bp, Homo sapiens
agtggggtcttaagagtgattttcttggtcagagcagaagtcaggtcctgaggagacaaacgtcaaccagtgtgggaaagcatcccttacacctcaaggtgttactgagtcccccacaaaaa

SEQ ID NO: 22388 - DNA, 122 bp, Homo sapiens
gggacaaatctgagagccacccagccccagacaccagcggtgaggcaggaagaggagaagcgaaagttgcaaaaggaaatgttcaggaaaacaaacaggccgccttggcaccggcgccctcc

SEQ ID NO: 22389 - DNA, 122 bp, Homo sapiens
cccaccctgcccccggggacctggctggtgggttcctgaggatggtctccatctcgggaccggggcaggcaggtgagggtgggggatgggaggtgggcgcggcggagggagaggagggaccc

SEQ ID NO: 22390 - DNA, 122 bp, Homo sapiens
agacacacgtaggacataagaatctttcctctggaagcacggtctagtagagaagttgaacgcataaccctcctaatgcaggattcatggaacctgggcagtgtcagaagtgtgtactaaag

SEQ ID NO: 22391 - DNA, 122 bp, Homo sapiens
acggggaggctcctgcaggaggctcaacccgacggatcacagtgaaagggattcctcccacgccagatctgcacaacgaggcaagacaggacccacctgtgcgtgcgctggggccatggggt

SEQ ID NO: 22392 - DNA, 122 bp, Homo sapiens
ggctcaggcgatcctcctgcctcggcctcccaaaatgctgggatttaggtgtgagccacccgcctggcctgtaatacctttaaaagtcaaagttgaggcaaaaaaagagcctacggtaaaag

SEQ ID NO: 22393 - DNA, 122 bp, Homo sapiens
ctcaccatggagtctgtggaggatccaaatgctgaggcagggttgagtctgggcaggatacggggggcctcaagaaggcctctgtggtggccaagtcttgctgccacctggaagcatctcct

SEQ ID NO: 22394 - DNA, 122 bp, Homo sapiens
gtccaactccaccccgccgcctcccacaccttggcgccggtgcttcgttcccggagtcggcgggttccactccccggaccccgcaatcccgtaaccccgcaaccctgccgttgcgcccagcc

SEQ ID NO: 22395 - DNA, 122 bp, Homo sapiens
cctggccctgaccctgacccagacctgggcgcgtgagtgcagggtctgcagggaaatggtcgggaggagcgaggggcccgcccggcgggggcgcaggacccggggatccgcgcagggaggag

SEQ ID NO: 22396 - DNA, 122 bp, Homo sapiens
gtttattgctacagtgctgttatatacaggacaggtctctgaatccacctgaaagagggtcgttttaaagtcccaatcatccagccagctgtgttgacacgtatacaattattttctttaaa

SEQ ID NO: 22397 - DNA, 122 bp, Homo sapiens
gcgagactctattaaaaaaaaaaaaaagttccattatgtctactgttttgcccaaggcaacgaagtgattaaaagattccatgacacctgcttatgtggccatagagccattttctctgagt

SEQ ID NO: 22398 - DNA, 122 bp, Homo sapiens
aagaacaccatttggtttcccccggctgggtctctatttaggtaagcttcgcggacttcccgtgtctggccggcttctggtcactgatcttcctcaggtgggtaggtttgtgagctagagga

SEQ ID NO: 22399 - DNA, 122 bp, Homo sapiens
aaaaactgcccggctctttatgttcaagtgcgaagggggcggaggacaggggtagggtaacgcagattgtctgctcacaggggactgccgggtggcctgactgccgagttctgacaggtctc

SEQ ID NO: 22400 - DNA, 122 bp, Homo sapiens
aaaaaatatgttttattttttgccccgttggggtgagatagagaccgcactgagaatgcacgctttacataattagttcacaacttgcccccggcagcctccaccacgtaaaattagaagaa

SEQ ID NO: 22401 - DNA, 122 bp, Homo sapiens
gctggtcggcagtggcccgggccccactgcccttcctcagacctgcagccacagaggccgcgctgctcctgaggaggctctgctccaccctggccccaacacccccacattttaagtccagg

SEQ ID NO: 22402 - DNA, 122 bp, Homo sapiens
cgcggagcgcgcctggcaccgcgcctgccacgccgcccgcgctcagcactcgggagccgccggggcgctgtcacccctaagtccccagcacccagcccaggtcgcccagcccgccccagcga

SEQ ID NO: 22403 - DNA, 122 bp, Homo sapiens
cccagggcgcctgcgcgccgcgcgcccagctcactccgcaaccagtggcctgccccgccccgttccgtctagcagcacgtgataggctatccccgcccgggtcatgctattattcgcgtaga

SEQ ID NO: 22404 - DNA, 122 bp, Homo sapiens
gctgcctcctctgcgctgagggcggtatccaggccacgagcttcctaggcttttggggtccgcctgcgtgggtcgcgcagaaggcacaagtgagctgaccaccattccctcttttcttgtca

SEQ ID NO: 22405 - DNA, 122 bp, Homo sapiens
caagaaaggcaatggcaattggactctaaccatacatctttaaagtatagtctcacatttcgggaggaagcccaagagagatttaatcagcagggtttctttataagtgaatgttctgaagc

SEQ ID NO: 22406 - DNA, 122 bp, Homo sapiens
cacctccccaccactgcgtggtgtgtgctgcggtttagcttgtgtgactgtgatctttttcgtcaactggttcattgaacaagtgttcaacgggccctctaagaaagtaattaacgtcaaat

SEQ ID NO: 22407 - DNA, 122 bp, Homo sapiens
gcaaggcctcccgtggcctctcttgccactctgaaccagggagctgtgggggctcagctgcgttgtttttgggtgcgtgtctggggcaggaggccggggccgggcaaggggtgaatccaaca

SEQ ID NO: 22408 - DNA, 122 bp, Homo sapiens
gccgcggtcatcacagaatggcctggcacggtgaccacggagtgccctggcaccggtgcccgcggctgtgacggaaaaagggtgggaagaacagggaagaggaagcagaaacaggtatctgg

SEQ ID NO: 22409 - DNA, 122 bp, Homo sapiens
cgggtggtgacgctgagtgacaggtgaggatgtggcacggtgtggagggccgggtggtgacgctgagtgacaggtgaggatgtggcatagggaaacacatcctcgccgagcgcacagtggga

SEQ ID NO: 22410 - DNA, 122 bp, Homo sapiens
agtactggagtaaagacttcgcgattgcctggcaggcagggctttgggtgcatatggggccgggagtggacagaaggggcgggtctgatattcccggggctggtaatagatggaaggggagt

SEQ ID NO: 22411 - DNA, 122 bp, Homo sapiens
ggttgtggtgacgaaagcagttgccatggagttgctctgagtaaccctgaggcagtgggacgccaagactggagaggaagcgactgcgggtgagtcgggcgggaaaacaggaaacccgttct

SEQ ID NO: 22412 - DNA, 122 bp, Homo sapiens
actcctttgcagcggagagtggtcacatgaccccattcagcccaatgagacgggagccagcgggcccagagagggcgtcccttccagggacactgcatttcggatttgtgctttatcctcct

SEQ ID NO: 22413 - DNA, 122 bp, Homo sapiens
aaatcgtaggacttccgaaagcagcggcggtgtttgcttcactgcttggaagtgtgagtgcgcgaagatgcgaaaggtggttttgatcaccggggctagcaggtgaggcctcctttgggttg

SEQ ID NO: 22414 - DNA, 122 bp, Homo sapiens
cttttgcatagatcggtcccgccccgcatatggcgatgaggactcaagagacacggaaaacgttttctttctggaaaacatgaaataggctttgtagatggacaggaagtcaagggacaagc

SEQ ID NO: 22415 - DNA, 122 bp, Homo sapiens
ccgctcatctaaccccgccaccccgggaatgtgaggaggaggcggtgccgccactgccgccgccaccaccgctaccaccgccaccaccgccggggctacccgcaatgggaagctgccggcct

SEQ ID NO: 22416 - DNA, 122 bp, Homo sapiens
ctccgatccagtgtgactggtgtcctcataaaaaggaccaacttgtcacagagatgggcacgcatagagggaagaggaagtgcaaagacacagggagacgagaaccatcccagagccaagaa

SEQ ID NO: 22417 - DNA, 122 bp, Homo sapiens
tatgtcttgaacttttcctcaaagcattacacttgtgaatgtatttttgtctaatagggtcgaaactgttgttcagtattttttcaggctgaggatgtgatgttactctacacattgtgacg

SEQ ID NO: 22418 - DNA, 122 bp, Homo sapiens
cgtttatacaacttctcagtagcatttagctccagcaagctcaacgaccccttcactcctcgcttccctccactagcttctgctcccagctgttgcactccctaataaagcacaaaagactt

SEQ ID NO: 22419 - DNA, 122 bp, Homo sapiens
ccacgactacagctgagtgaagcttgagcccctgagcattgctgggcactgagggggacacggggaggcagcagccactggcactggggatggtcggagacgcaaaagggactctgtgggaa

SEQ ID NO: 22420 - DNA, 122 bp, Homo sapiens
aatggtttcctgaagcattatctgtgatatcaaaaaattggaaaccacccacatgtccaccgacagggggataataacaaaattatgtgtctcaaaaataaactacatttgatagcactatc

SEQ ID NO: 22421 - DNA, 122 bp, Homo sapiens
gcgggagcgaaaagtctacttctaggtcaggcactctttggacttcacgcaacgtgtgagcgccacctctcgggaagccaatttgctcgcgaacgaaggaagtgagtcagagaacccggggg

SEQ ID NO: 22422 - DNA, 122 bp, Homo sapiens
gtttcacagtcctgggagggataacgctcattaatctccgccttcttttctccagacccccgccccccaaatccggtgaatcttctgtgggcactgattcctcaccacccccgcttctgaat

SEQ ID NO: 22423 - DNA, 122 bp, Homo sapiens
cagagctcccaaacctcgttcgtgccggcctgttgtggggcccaggagctgggcagagggcgggaagaccggcgaggggctggcagggagacgtctgtggagggggttcagctcgtagaagg

SEQ ID NO: 22424 - DNA, 122 bp, Homo sapiens
ttataagtcagagtctaacattcaaatactgtttacaacgtgaattagctaacaccttaacgaattcaaatcagttacacacataaaaattacaaagtcaagataacttctcattctggcag

SEQ ID NO: 22425 - DNA, 122 bp, Homo sapiens
tgattcccactgccttccctatccacctatcctctggtccccagaaggcacagtgagaagcgggctgaggcccacaggcaattatgtagatccatggattcataattcaaaataaacccatc

SEQ ID NO: 22426 - DNA, 122 bp, Homo sapiens
tggacagtccaggtcgctgagtcaagctaaagcaccgttgttttgactcactctttgtgacgtaggtctttctcaccagtcaagaaaatacaatccgaaagcaacctctgggctggctttag

SEQ ID NO: 22427 - DNA, 122 bp, Homo sapiens
gcttttaaagacaatgtttcagttttgtactcactttttgtccctgggagcagtcccaaccgggcgcaaggtaggcccagaggaaatgaggcccagactcagatgtaaagcttacattcctt

SEQ ID NO: 22428 - DNA, 122 bp, Homo sapiens
cccacctcggaggcaacccctcacctcggcaacccctctgctgtcttctccctttctcagcgggcacttccaggccccataggtctgtagctctgtccagcgagttcaaggctggccctgct

SEQ ID NO: 22429 - DNA, 122 bp, Homo sapiens
ttggcgcaggcactgctggacaaagcagtccatctcggtgggctggcactgcggagccagcgtggacattccaccgagcacgaggcgaaaggggcagcccagaggcctgccactgaaaccgc

SEQ ID NO: 22430 - DNA, 122 bp, Homo sapiens
tgctctcctcactgtcctgacaggctgaggcggctgtcgtccccggccgacagggctggacggctctaggcagattctcgccggcggccggcgcaattctgcctctcagagagagcttagtg

SEQ ID NO: 22431 - DNA, 122 bp, Homo sapiens
tgaattattttctcattatgtgtgtggctattatgtgtgtgtgtgacacatgtgaccatgcgtgtatgtgactgttatagttacaatgtgaactgtttctataaaagcatccatagttacca

SEQ ID NO: 22432 - DNA, 122 bp, Homo sapiens
ccagcatgagcgcgcagccaggggcgacgcttccgctccgagccgcggcccggggccacgcgctaagggcccgaacttggcagctgaccgtcccggacagggaggcccttcagcctcgacgc

SEQ ID NO: 22433 - DNA, 122 bp, Homo sapiens
gccagatgcccacctctgggctttatagtttcctctgccagaggtcaaaggcatcgcaggcgaaggatcccagggagaggccagggccgtttatcagcgccggccatcgcctcaccaaacac

SEQ ID NO: 22434 - DNA, 122 bp, Homo sapiens
aaaaatgaggagaggcattccctgaatccagtagatagagctttctggacatctggtctccgtaggaagaatgttttggacctacaggcatgctgtgttcactcagccttgtgacagacagg

SEQ ID NO: 22435 - DNA, 122 bp, Homo sapiens
cggcctaggccacgaagtcctgagtgccgtatgattcctggacagcctcctgcctctgcccggcgactctcagtccccagagactccgcgtgcgacgagtcttcctgcatacccaaagcctt

SEQ ID NO: 22436 - DNA, 122 bp, Homo sapiens
tgtatatatgctatactttataataagacatatttttaagaagaaagaccatataccattcgaggtaataagcaaaagagcaaatttcaaaggtgcatgcaatctaaaatcataactgtatt

SEQ ID NO: 22437 - DNA, 122 bp, Homo sapiens
cgcccaaagcactcatttaactggtattgcggagccacgaggcttctgcttactgcaactcgctccggccgctgggcgtagctgcgactcggcggagtcccggcggcgcgtccttgttctaa

SEQ ID NO: 22438 - DNA, 122 bp, Homo sapiens
ctgagttcctgaggggctggccgagattatggtagcaagtgaccatgaaggctcttgggacgcaggctagactcccagcaggcaggcccactccagcaacttttgtcacccactatgcaggg

SEQ ID NO: 22439 - DNA, 122 bp, Homo sapiens
agaagcccagggcccagcacctcagggtggcctcatggtcagagagggggtggtgggtcacgtgtgtctttgggggttctgacgggaagagtcagaaaattcagacactttgcatctctctt

SEQ ID NO: 22440 - DNA, 122 bp, Homo sapiens
tcctgggctcaagcgatcctccctgccttggcctgtgctgggattacaggtgtgagccaccgtgctggcctcagtactattttttattgattatatgttgaaataataatattttggatgta

SEQ ID NO: 22441 - DNA, 122 bp, Homo sapiens
ggactggggctggaggcggggccagggcccgggcggaagcggggctggagtccgaaccagcgcagcgcggggcggggcagcgggaaggtagtcggaggcgcagggcggagcggagcggggcg

SEQ ID NO: 22442 - DNA, 122 bp, Homo sapiens
gatgcaaagcaccaggcacaggaggagtggggacaccaccaagcggggaccaaaggcccacgagggtatagagtatctgccagagcatactaggtcatgacaaagaccaaaggcattccaga

SEQ ID NO: 22443 - DNA, 122 bp, Homo sapiens
tcttgtcataggtctcaccaagagaggagagatagaaagagagagagatttatttttgcacgtgaggcatacctaatgatattcccacagacagacagacaggaagaccaagagagggacag

SEQ ID NO: 22444 - DNA, 122 bp, Homo sapiens
cttgcacactgtaaaccctccaccctggagctatagccccacattacccctcacagctgacgcttacacgtcacgttgtctaattctccccaggggccctgtgagctgggattatggttcag

SEQ ID NO: 22445 - DNA, 122 bp, Homo sapiens
ggggactcggggcaggcagacagagcgtgtgtggaccgagagcggcttgctggttcgtcccggacagcggcggatcccacagcgccccctgctggaggaggccggtactgctcaccacccca

SEQ ID NO: 22446 - DNA, 122 bp, Homo sapiens
agccggaatccaagaaaaggaaagactccgattttaagggaacggggacatgcggagccacgtgagtcactgggtcccagagccacggaaggctctcagctcagcagtcagagtgcactcgt

SEQ ID NO: 22447 - DNA, 122 bp, Homo sapiens
ggtgcctgcatctctgaggctcagctgctcattggtaaaatggggacactgtaactgcctcgcagggcccttacaaataaaggaatgcagagccattcccagaagccagggcttggcagctg

SEQ ID NO: 22448 - DNA, 122 bp, Homo sapiens
atggaaagctcaaccgtcggttgtggggcccgcagatctctctggttcccctctctgccccgtctccagcttttttgcaggtcggtgtcgcggcctcgcagatccccaacagccccgagagc

SEQ ID NO: 22449 - DNA, 122 bp, Homo sapiens
cgagagggaacctcctccgctgggggacgggaagcccaccgactttgaggatctggaggacggagaggacctgttcaccagcactgtctccaccctagaggtgagaccgcgtcgctgcgggt

SEQ ID NO: 22450 - DNA, 122 bp, Homo sapiens
agccacttccacctgcatccccatcaagcagtcagggaaggctgcatggaggaggccctgcgtcagctgaggcttgaaggaggcctaggagtttataggaaggtaaattggagtaggaggct

SEQ ID NO: 22451 - DNA, 122 bp, Homo sapiens
tagtcacacacggctaattccagagggctggccctttgtcctgggacgctcccaggttttcgggccgcggtgcggagaactcaggtgggtgcccggcaagttacctaccaggggctgttccc

SEQ ID NO: 22452 - DNA, 122 bp, Homo sapiens
actaggaattggcgcgcgtgcaggcccctcgggggacgttcctccctttcgtgctgccgccgttccggcctgtaacggccactcggccgccactcccgcctggtgccctactctgctgtgtt

SEQ ID NO: 22453 - DNA, 122 bp, Homo sapiens
ctgtgtcttccgaaaaacagctcttgtttaaagcaggatccatctctgcataacttaggccgggctgaccatcatcttggatggcgtcgtccttgttggcgcagattgtgttggggggctgg

SEQ ID NO: 22454 - DNA, 122 bp, Homo sapiens
ggggccggtggcgggagggacccagggactgggaggctggtcggggctgggctcagggtccgagacctagctgggcttggggcggggccgagacggagcgaggggtccagggtgtgggaaac

SEQ ID NO: 22455 - DNA, 122 bp, Homo sapiens
cgcactctggagcagagagaagtgagatgtcccctcagcacaagacaccctcgtgcctcccgcctgcgtctgctcggctttctctacagagcctggtgcgtgcctggcaggagaggccaggt

SEQ ID NO: 22456 - DNA, 122 bp, Homo sapiens
gagctaaagaaaacaaggtgcagccctcctgagccccacatgaatgaaagcggaaaggtgcgcttcgccctctggctgcaggttcagaacctgagcacacctaggaaatgggacccccacaa

SEQ ID NO: 22457 - DNA, 122 bp, Homo sapiens
cccagtgcctctcctggtggtcctcccagtctagagggtcacggcccccccgccctcctccgtctctggcaagctgaccttgactaacccaggaatacagggtcatcctcattcctaagtaa

SEQ ID NO: 22458 - DNA, 122 bp, Homo sapiens
atgctgaagaggcaggctgggaaagaacttccctgagagggcgacttcactgtccaagtccgcttaggctgccataacaaaatgccacagatggagggatttaaacagcagatgtttgtttt

SEQ ID NO: 22459 - DNA, 122 bp, Homo sapiens
accaggtgcctgtgagagagccccaagggcgggggcagcacctcctggctgggttgggtccgcctggcctcgcctcgcctccgggatccttggcgctcagcgccgccctcccgctactgcgc

SEQ ID NO: 22460 - DNA, 122 bp, Homo sapiens
cttgtcagcctctccgagtagatcctttggccgaaggagtgtccatgtggggtggtatctcggcctggtggagggggatgcgatggtagtgagaatattagggtattcatatctttcctccc

SEQ ID NO: 22461 - DNA, 122 bp, Homo sapiens
tggctgcggcgcctgggctgctcgtctggctgctcgtgctccggctgccctggcgggtgccgggccagctggaccccagcactggccggcggttctcggagcacaaactctgcgcggacgac

SEQ ID NO: 22462 - DNA, 122 bp, Homo sapiens
gctcgccacatctgagcagagcgcctgtgctttagcagtgactgcagatggatcagtgtccggacctttcttcggcctttgccgaggttccctgccacgggaatgtgttttcttctttgctt

SEQ ID NO: 22463 - DNA, 122 bp, Homo sapiens
ggggaactgggagtttctttcaggtcacaggataggtctgcagtgcgactcaggctcccgcggggacctgcccactcgaacgggggaggaggaagaggctccgggggagagccaaggaggcg

SEQ ID NO: 22464 - DNA, 122 bp, Homo sapiens
actcttacttttttcctattgagaggtgacagcgttctggcagcccttgcagcgctcgctcgctcttggtgcctcctcggactcagtgtccgctctggccatgctcggggaacccttcagcc

SEQ ID NO: 22465 - DNA, 122 bp, Homo sapiens
aataaatgaataaataagcgaaaaacctgtttctcacggttgtcaaatgaccttagattccggtctgtataacatcgtccccagacgctaaggattaagttatgcaacatagtaaatctgac

SEQ ID NO: 22466 - DNA, 122 bp, Homo sapiens
ggccgtaggacctgcagtcacacatctgggcccagcacaacccgtgcgtggggcaggagacgcgggcacctcctcctgtgtggcggagccccgtgcgcacctggcggtcctgctggagacgc

SEQ ID NO: 22467 - DNA, 122 bp, Homo sapiens
atcgcctcgggctctcagctgcaaggtgaaaaataccatgaggaattgatctgccaagggcggtcttgtctcaaagcaagtggattgctggggtaaagaatctagagaccagcttaggactc

SEQ ID NO: 22468 - DNA, 122 bp, Homo sapiens
tcatttacagcctgcgggcgggagtctccttgtttaccaaagcagagggcgtgtgggaggcgggggccgtcgctcgctcccgcctcctcggaaaccttgtccccacaaccgctgcgtgttaa

SEQ ID NO: 22469 - DNA, 122 bp, Homo sapiens
cgtctcctcttccaagttcttaacagaattagttgattaagcaccatgttactcccctgacggaggagtatttaagctgcccttgcaagatggcagatgcaccagctcaatacagaggtgtg

SEQ ID NO: 22470 - DNA, 122 bp, Homo sapiens
ccgtgatatatcactgctttgctcatgaagattaacggtcatccctgggacaagggaagccgggggtcccccaagagcagggaattagagcgactccttcatccaagtgcagcggcccctcc

SEQ ID NO: 22471 - DNA, 122 bp, Homo sapiens
tggccaacatggtgaaaccccatctccactaaaaatataaaacttagccgggcgtggtggcgcgcacctgtagtcccagctactccggaggctgaggcaggagaatcacctgaacctggcag

SEQ ID NO: 22472 - DNA, 122 bp, Homo sapiens
ttatttttggattgagtctgcccagggttttggcttgctggaggcaaaggcaaagacagtcggtgaccttgccccagggctgacaacgggtgccctactgccatctagtggcaacaaggaaa

SEQ ID NO: 22473 - DNA, 122 bp, Homo sapiens
tcctccctgccccttgtcccccatcattaaacttacacctcgacgcccaaagaagcaagccgagcagataataacagccccctgtaactgagcgcttcccaagtgccagacactgttgctcg

SEQ ID NO: 22474 - DNA, 122 bp, Homo sapiens
tgtctttctctgtattacatacagatgcatatacatatcatacaagcagttatatatagacggacatgtgtctatgtatgtataaatgcagcacaggtaaaacataccaatggcaggatgac

SEQ ID NO: 22475 - DNA, 122 bp, Homo sapiens
ccgggggcggcagcagcaggcacgagaagagcctggggctgctcactaccaagttcgtgtcgctgctgcaggaggccaaggacggcgttctggatctcaaagcggtgagctccggaggcggg

SEQ ID NO: 22476 - DNA, 122 bp, Homo sapiens
gggttcagtgtcaattaagttaccactataggcaacaggagcttaagttgctgagtaactcggggagccagcgtaggagtcatgtttcagagttatcccactggaggggaagaagggaaatg

SEQ ID NO: 22477 - DNA, 122 bp, Homo sapiens
aagagctgtggattctccaaggtgacccgagcctgggaccccttccaagaaatcagccagcgaaagtccagccccagaggccaagagcatggctctggccgcctacctgaaaaaaacccgta

SEQ ID NO: 22478 - DNA, 122 bp, Homo sapiens
gctaataattagcaacatctggcttcagagcctgtgctctttcttctatcctgtttgaaccgcatggcacccatcaccccacttctcaggttgccttgtggaccaggtgatatttgagggtt

SEQ ID NO: 22479 - DNA, 122 bp, Homo sapiens
agtagacagtagccaaggcttacaggagggaaatccagacctgctcttcatcccaaacaccgacccaaggaccactccttccaggaacctagcctaaagcaaaggtgcagacagcccggggc

SEQ ID NO: 22480 - DNA, 122 bp, Homo sapiens
actgcagggcgcccccctcatgcgcgctgataagggagcgtgggaacccagcgggcaggccggggcagctcccccaggaactttccaaaacaagcgcctggaggccggaaagtttccaccac

SEQ ID NO: 22481 - DNA, 122 bp, Homo sapiens
cttaccaaagcatgcttagtgttagggcacaggccctgggaaacgagaaagatgcgcctccgacaggaagtccaggctacatctggagggaggagaggcctgcagagcctgatgaggactgc

SEQ ID NO: 22482 - DNA, 122 bp, Homo sapiens
taaggtcataaactgcttccttggcttttgaaaattgtttaacttgcctgttttctagctcggtaaggcctgggacatatgcagttggccacacctctagatatgctggaaatagtcaaacc

SEQ ID NO: 22483 - DNA, 122 bp, Homo sapiens
ttccagagggacaagctactttaacagtgaattgctagggactggaatgaaaacaggctccgaggacagtgttttcattttttagaaagctgtctggggaaacttgaactgatcagtggagg

SEQ ID NO: 22484 - DNA, 122 bp, Homo sapiens
aaagacagtgctccaaaaaggtgttagcttcggtgtggggtaagctcctaattacagatccgctgctgctggagggaagaggctggagttaacacaagagccttgaaacacatgggattttt

SEQ ID NO: 22485 - DNA, 122 bp, Homo sapiens
agtagaatttcaccatataaaatgtcattggtgtggatgttgataatggaagagactatgcgtgtgtgagggcagctggtgcaggggaatctgtatctttgactcaatttcctctgaacata

SEQ ID NO: 22486 - DNA, 122 bp, Homo sapiens
ggcaggggagggggccactcaaccgacctcctcacccactgccctcccgggtcttccccgcgcccacggcgccgttacctcccgccgcagcttctgcccggcctttactcatcgcctttccc

SEQ ID NO: 22487 - DNA, 122 bp, Homo sapiens
gacccccacctgcaccccctccctccctaggctggtcccgctccgcacccggaacgtgtccgccacgatctcagctcctcggtgattggtccatttggagaggcctacgaaaaactcccggc

SEQ ID NO: 22488 - DNA, 122 bp, Homo sapiens
gtaaaggaaggcggtcagagcatctctggaggccacctggtcgggtgaaccgagtctaaacgctgaagttccacacctccccgagtccgcgtctccccaagccaaagcaatcagctcgcacg

SEQ ID NO: 22489 - DNA, 122 bp, Homo sapiens
aacaaacaggcacgccctcgctcacttccgtcacttggtttgagtcacccacgctcctcgcgattgcgggcacaccccctgccgcgagctctgccgggagttgtagtccaagctcgagcaag

SEQ ID NO: 22490 - DNA, 122 bp, Homo sapiens
tggggcatggcgggggaagtgactcagggccagaggcagcaggcccacggaaggtggggtcgggggggcgcggggactgggcgaccctgaaccgacggggcagggcgaggttgccggagcac

SEQ ID NO: 22491 - DNA, 122 bp, Homo sapiens
gcctcagcctccagagtagctgggaccacagggaccacagggaccacaggcgccctgccacgacgctggctttatttttatttatttatttatttatttatttatttatttattttttgaga

SEQ ID NO: 22492 - DNA, 122 bp, Homo sapiens
cccgggcacctgagggcttctccctctggacactgcgggccaggtgtacatagagcagcgcggcacagtggcctcacctcccgtcgggcactggcgggagcaaggtcgggggcaggcgctgc

SEQ ID NO: 22493 - DNA, 122 bp, Homo sapiens
cgcagcctggtagtcttccatctttcctccggcgcgtcccctccggctccctgagtggcgcggactgcgcaggcgcactcaggccccgccccggacctgccacgcccctctcctctcgcgcc

SEQ ID NO: 22494 - DNA, 122 bp, Homo sapiens
gccccgccgctctccccttctccgcccctgccctggctccgcccccgcctgcccgcgcaccgcagaaggcctcctggaacttcctggacagcttctcgatgacgctgtagctctccacgtaa

SEQ ID NO: 22495 - DNA, 122 bp, Homo sapiens
ggatcacacaggtcctccacctgctttctgaacagagcttgtttccggggcacccgctctcgtcgcccagccctgcgcccaaatgcgtcagtgcctcccggagtgcaccgcgcggtggggat

SEQ ID NO: 22496 - DNA, 122 bp, Homo sapiens
gttcaaagataccaaaatcactactatgtgaaatgtgtgttttgaaagcagtttgccagccgtgtgagacctgcggtgtggcctgcagtgcctgagtatgatgccccacttgtctttttgta

SEQ ID NO: 22497 - DNA, 122 bp, Homo sapiens
ctcaggtgatccgcccgccttggcctctcaaagtgctgggattacaggcgtgagccaccacgcccagcctgcatttgtttatattggcattggcattgaaacttctggtagagaacacaaga

SEQ ID NO: 22498 - DNA, 122 bp, Homo sapiens
actcccaacagtggcaaaattcatactgtaagcacttggatgcctattcccaaatgtcgacgtgctccagacgacttgaaacatgtcgtatgcaaggaaacaaagatgtatgcgtgtaataa

SEQ ID NO: 22499 - DNA, 122 bp, Homo sapiens
ttttcttcttccatgccttatcctatatagacagcttcaatttttgcttttctaaagacccgggttaagacaatagtatttatgagaatatataccaattttgtaactgtccaactggtaaa

SEQ ID NO: 22500 - DNA, 122 bp, Homo sapiens
aactcccggggaggctttatattttaagagaggaggtggttctcccacaaaacgtggcatcggtacctggtgtcaaggaggtttttgttttctaggtaaaagaagggagagttctagaaagg

SEQ ID NO: 22501 - DNA, 122 bp, Homo sapiens
aaggggaatgtcagcatcggacagcctccctcccaaggcagccaccaaaccacatgcggtcgagttaggaagggccctggtcacccctctaagcctgcagctcactgctggcccctccctgt

SEQ ID NO: 22502 - DNA, 122 bp, Homo sapiens
aaggccagtaggagtagaaagcccgcaggatttgatcttctctactcatcccagctgccgcgtcaggatcttttctccccgggcggccacgtgcccctgtcctataggggtttgatgagaga

SEQ ID NO: 22503 - DNA, 122 bp, Homo sapiens
gggccttgtgtaaactgctgtccagtctggccgtctctggcacagccaagtccaggtctgcgaaccgggggaggggagcagagaccagacacatgagaggtgacggcaagcccagaggccca

SEQ ID NO: 22504 - DNA, 122 bp, Homo sapiens
ggggaggcgacctcagcacagcctttcctctgctgcctctgtggcatgatcttccctgggcgggctggctacaggcttcaccggcgccaggcccacagctcctctggcatgactgagggctc

SEQ ID NO: 22505 - DNA, 122 bp, Homo sapiens
acgcgatggagttgccgtgtcccctccgagtttggcaggcccgggattccgcaaaggaggcggcgggaccagatgcctccagcccggagctcagtacattcggtgtcctggatgctcccttc

SEQ ID NO: 22506 - DNA, 122 bp, Homo sapiens
ccagaccctcaagctgccagcggttgtttaaagtcctggcagatgtcaggaagatgggcccggccgtcgcaccctcaaaagctctttttcgtttaagctttttaaacctcgaagatttagca

SEQ ID NO: 22507 - DNA, 122 bp, Homo sapiens
gtgagttctgccttgatgctgaagtcttttccacactggggacacccatagtgtttctcccgagtatggattcgtttgtgtttgcttaggtctgagctccgactgaaggcccttccacactt

SEQ ID NO: 22508 - DNA, 122 bp, Homo sapiens
agcctgcaggcctggcgccctgcgcggaggaagaggcctcgctccgggtaccctcccggacggcgaaaagtctcagggcaccctccgtttcattggccacagctgagccacgtgactcacca

SEQ ID NO: 22509 - DNA, 122 bp, Homo sapiens
aagccagtgccctaggagatgggattccaggaagaggccttcagaggggctgccaagcgccggctggggcaggtggcggggccgccccatccacttaggtctctgggtctcagggtctgtgc

SEQ ID NO: 22510 - DNA, 122 bp, Homo sapiens
agggtcatggcatctcctcctcctggccctggctgtgcaggcaggtgtggccacggtgcccgtagacacagacagacacatggtgtgcgggcacacggaggctgggtcctccccatcacgag

SEQ ID NO: 22511 - DNA, 122 bp, Homo sapiens
gtagagggcagcgacttggcctattttgcgatactcgcccctcccttgggtaatccctcacgccctccctccgggcacctctgtgaagacacgtggaagacctgcccctggcgtcacaaccg

SEQ ID NO: 22512 - DNA, 122 bp, Homo sapiens
aaggcccagcactgaggaaacaaatgacccagtgcagcagctcctgaagtcagggttaaccgggaaggccttccaggtctttgctagacacccccaaaactgcccccgaggcgattctccca

SEQ ID NO: 22513 - DNA, 122 bp, Homo sapiens
aatagcagctgtcactgttgttactgttaccgctcctcttcacaggtacagggtgaactccgagaccatctctcctattcatttacatcctcagaacttagcacgatgtctgaccatagtgg

SEQ ID NO: 22514 - DNA, 122 bp, Homo sapiens
gagcgcccgctctcggcccggtgctgcgctgggccccagaagttgcgaaagaaaggacctcggccctgtcctgagcccctgtgggccgaagagctccttgcctagctaggggcatctgcact

SEQ ID NO: 22515 - DNA, 122 bp, Homo sapiens
ggctggccgggggatcggggggccggaagagttttcgcctctccccagctctgaaagcgccgcgctgtctcgtcaactgggtgccggaccccgactggcctagaaaggtctttcaggcagcg

SEQ ID NO: 22516 - DNA, 122 bp, Homo sapiens
ggggctgagggaggccggggaggcgtctagaaagttctgctctgagttcgggggttgccgcgggcgccccgactgtgtctgctcctccagcacgccccacaacttaaccccttccttcccgc

SEQ ID NO: 22517 - DNA, 122 bp, Homo sapiens
cattctacagaggaggcctggagaaggatgactggtttaggactaagcgagccacctgatcgccaggctctggccttgaaacattcaggcccctcagacgccaccgcggccaagctctcatc

SEQ ID NO: 22518 - DNA, 122 bp, Homo sapiens
cgaggtattctcggcggtgattggggcaaacggccacggactacacttacttacatgccgcgcgaggcgcctccgccgccggggcaaacggccacgaactacacttcccgacacgccgcgtg

SEQ ID NO: 22519 - DNA, 122 bp, Homo sapiens
tcgagcgtgcgctggcggcggcccgggctcccgggcgtctctcacgctgtgttttggcggcgcctggggtcttcgtttgcatatgagaagagccgaaagcacagagctacaggcgaatacaa

SEQ ID NO: 22520 - DNA, 122 bp, Homo sapiens
cgagcgaccgagcagggtccgaacagagccagcgagggaccccgggctgtgcttgaggcccgacgacgcgccatatcccggcagcgccgcagctcaggcctctgcgaatctgtggtccacac

SEQ ID NO: 22521 - DNA, 122 bp, Homo sapiens
cagttgaccctaaatgtaatcacaggtatccttctaagagggagggagggggagatctcacgggaaaaagcaatgcaaagaataaagcaaaatgccactccactggccttgaagatgaaggg

SEQ ID NO: 22522 - DNA, 122 bp, Homo sapiens
cttgggatcttcctggaaagcagagtcttaacggaaactatgcaaggtgacccggacacccgggctccacccctctgccccagtcccctacatcgacaggctctgttccggctaccttagtc

SEQ ID NO: 22523 - DNA, 122 bp, Homo sapiens
caggagcccgcggccggccagccgaagatggtggcggctactcctcctggtgagtctgcccgcccctccggcgacggagggaaacctgttgtgtgcggcccgggtctggcgggcggggcgga

SEQ ID NO: 22524 - DNA, 122 bp, Homo sapiens
gaacagaagccagtagagagtaaccagcaccagcttcacaggaatggcatgaccttgatacgatagcggcagttttcccttaacatccctgccccctaaagacttcagatcatatgtcacac

SEQ ID NO: 22525 - DNA, 122 bp, Homo sapiens
cgagaatgccaacaaggcgctggacaaggcgcgcaccaggaaccgggaggtgcggcccgccgagagccaccagcagctgtgctgccaacgcttcgagcgcctctccgactccgccaagcaag

SEQ ID NO: 22526 - DNA, 122 bp, Homo sapiens
tgggacgctgtccctaaggccttattccatgttgaatctgacgctctcaatgtccaggctcggctgcggcgtggggaccgaaaaggggcggggtgggtcggacggcagtttaattacgtccc

SEQ ID NO: 22527 - DNA, 122 bp, Homo sapiens
tggtcctgcataagccactggacaaactgctcatcaggttggtacagaggtgtggaagggcgtggcttagcagggtatgagtggtacagaggtgtggagggcatggcttagcccggtgtgag

SEQ ID NO: 22528 - DNA, 122 bp, Homo sapiens
agctctccccacggccagccggctagcccggcttccgcctgggcctcggccgcccccggccgcccccagctcaggtggcttctgtgcagcaaggcaccctccaagttggcggcagatcatcg

SEQ ID NO: 22529 - DNA, 122 bp, Homo sapiens
tagccatagtggcggtgaagagcgcattttaccatggtctgtgccttgggtaattttccccgatttctctcttcagcttctggagatcagactgctcatatctggagatacgcggtgcagct

SEQ ID NO: 22530 - DNA, 122 bp, Homo sapiens
agtttccttcattcctggtctccaaatttcatatgatatcagtgcttgtctggtaacggtcggggatggggtcaggataggtggtaatgtaggtattggcatggaaatatagcagggagatt

SEQ ID NO: 22531 - DNA, 122 bp, Homo sapiens
cacaagcctggccttggctgtgctctggagagcacattgccattgttgccatctgacagacgagggcacgagagcacaggaagggaagtgacccgctcaacggcacaggtagcaagcaatgg

SEQ ID NO: 22532 - DNA, 122 bp, Homo sapiens
cctccctgagattcacccggaacaagggctaagcggcccgcggagggcgctaggaaaaggcgcgacaccaagagcgagacagggacttgctgctccttaaaggggccgctggccgatttccg

SEQ ID NO: 22533 - DNA, 122 bp, Homo sapiens
cggcctgtcagagccgaggggcccaggcgactgggggattctgaggcaacgccgagggctcggcagggccgcggacaccgccgcggcttggtttgttattgtcgactccgtctcttcctccg

SEQ ID NO: 22534 - DNA, 122 bp, Homo sapiens
ctgaggtctcctcgctccttttcccatctgggtgttggaggcggagccgccggctgggttcggagccccacccccagctcccatccaatcaccgtccctccctccgggggctgggcggacgg

SEQ ID NO: 22535 - DNA, 122 bp, Homo sapiens
gaggatggccagcatgtaactggtgacaatgaacaaaattatatacttacaaagtgcaatcgttacattatcctgatcatctcttgtgttgacagcaatctgtaggatgggatgaatcaagg

SEQ ID NO: 22536 - DNA, 122 bp, Homo sapiens
gttctaaaatgaaaagtctccccaactattcacgattatgacaaacacttgtttaaccaccgcaaaggcagcatgtcgcattttcttatatactcaacttctgaaattcattcttgactgag

SEQ ID NO: 22537 - DNA, 122 bp, Homo sapiens
accgtgcctgacccacggtggtttcttcattccttcttttctttttctttttttaagagacgggcagggggtgggggtctcactatgttgctcaggctcaacacaactgttgcactatgggc

SEQ ID NO: 22538 - DNA, 122 bp, Homo sapiens
ggcctgctggctgagtgccagacatctgagaaggccctgctccggcgccaggcctgtgcccgctggtgtctggcccgcagcctccgcaagcacttccactccatcccgccagctgcaccggg

SEQ ID NO: 22539 - DNA, 122 bp, Homo sapiens
cccgacccagtcggcgcccactcctcgccctgcgggctcgcggcaactgggcggccggcccggcccctgcccacccccagcccagcccggcgcgccgcactgggcatgctccgtagcctggg

SEQ ID NO: 22540 - DNA, 122 bp, Homo sapiens
ttttcaccttcctgtttcacctcgccagggaatgaggccatgcccccacccgctttcctccgacttcttttcagggagctgattcaggggagcctggataccagagcctcgggggccagggg

SEQ ID NO: 22541 - DNA, 122 bp, Homo sapiens
agggccaggggagaaaactaaccaaccacccacacgccacaaaagccacaaaaaggagtacgcctggagcgtcgcagagggacaggcgaggtggggggacagggagacgcaccggccccgtg

SEQ ID NO: 22542 - DNA, 122 bp, Homo sapiens
ctgaccactcatgccaaatagtttaatgttagggggaagggagaggtaaggcagggttttcgggagttacccccaaagcaagagggcacagtattcaggctgctggggttgggagatagaag

SEQ ID NO: 22543 - DNA, 122 bp, Homo sapiens
gagctggggtgagttggggaggggcgtcgggggccatcatctaaagttaagacgctgggacggaaaacctgtctcactgttccatcatcctagggaaggcacgctcttgtcctggctgcaaa

SEQ ID NO: 22544 - DNA, 122 bp, Homo sapiens
gggcgggggcggagcacgccttaaaggggccacggacgcctggggcagagggcgggggaccgccgagcgggactggggcgagggcgagaccgaggaaagccagagtgcaatgcctggacgct

SEQ ID NO: 22545 - DNA, 122 bp, Homo sapiens
actagccgatgaagagcagacaccccgggactgcctaggccaccggtccctgcgaactgccgccctgtctctaaaactgctgaagaaccaggaggcggatcagcacagcgccaggctgttca

SEQ ID NO: 22546 - DNA, 122 bp, Homo sapiens
tcactgtggtcctatgccaagtgcccttagggggtctcaatctttccaacagaccatgttcgagatagtatgagtcaatgtacagtgtagcccacacttgagaggatgaatatgtgtgcact

SEQ ID NO: 22547 - DNA, 122 bp, Homo sapiens
aggtcaagtcatgcgaccaaagaccggaaaacggagattgctgcatgcaagcgtgctgggcgtttgtttggtttgcttgcctgcttaaagtatccactgggagggatggcggctagaagtca

SEQ ID NO: 22548 - DNA, 122 bp, Homo sapiens
tgaaacatctgctgcctgctaacagcatgatgaagactccaaactttcccatcaaccacacgctctcctggaatacatcactccaccgttatcttcctctatattccagaactgaattctca

SEQ ID NO: 22549 - DNA, 122 bp, Homo sapiens
tgaggctggcgccgaggcctgacaggctgacaagggatgaagtcctttttgtgtgatagtcgtccaagtaatgcccatagtagtacttccagaagactgtggacacacacccacaggcctca

SEQ ID NO: 22550 - DNA, 122 bp, Homo sapiens
taggaggcaggcacctcctggccctccctctccacccttctttctcttttccattctctccgcagccctgctcacaagagccctccggagccccaccaccttgccctgcagccatcagtgta

SEQ ID NO: 22551 - DNA, 122 bp, Homo sapiens
aagcgggaagcaggagcgggagcgcgcggccctggcacgcatagggcggcggagagggcacgagcagggattgagcacctactgtgtgccttcacgctttacaaaaggattttcgttcgatg

SEQ ID NO: 22552 - DNA, 122 bp, Homo sapiens
ctctcttatctcttttctatgtggtcgctcccttatatctctatcacttctttactagtccgtcttgaccccttctcatagcctccgcattaggtctgcctcctttgctctgacacatgtcc

SEQ ID NO: 22553 - DNA, 122 bp, Homo sapiens
ttgagactaaatttttctcattaaaaacaaaacatttacactgaacaaatggtgcgtgtccgggtgaagcatcaggtctcaagaaggcaacactgctcaaacgagacttaggacagaactgg

SEQ ID NO: 22554 - DNA, 122 bp, Homo sapiens
gcctcagaagccctggagaaaaagtgagcacagtgggcagtgaaacttcccccaaacagacgttttgaacacagatcactttattggcatggctttgttttaagaaaaggaaaagtgacaaa

SEQ ID NO: 22555 - DNA, 122 bp, Homo sapiens
gggatttgtgaagttgccctgacgtggcagtagcttcgtggcggtcggtcactacccagccgccgcccgcccggcgaagccggcttggggaggtgcaggagcgagcggcgtcctcgtcctct

SEQ ID NO: 22556 - DNA, 122 bp, Homo sapiens
ttgggggagaaaaaaatgggggcggacgtcagctccctgggcggccgccgccaccgcctccgcctccccgaggcccctcctgcattcctgggcagcgaagcccctcgctaagacgggggctg

SEQ ID NO: 22557 - DNA, 122 bp, Homo sapiens
agccggactcatccgtcccatatgactctcggtaaagaagcccaaaacaaacccggagcccgatgtaaacaactcacaggcatgttgatcctcttgcaagctcagccctaccagacctccca

SEQ ID NO: 22558 - DNA, 122 bp, Homo sapiens
tgtacacatttacccagttgagcgttcttagaataactactgcacaagttgacaataggtcgttctctctttttttttgtttgctccctttttctttttctccccttcctccttaccctccc

SEQ ID NO: 22559 - DNA, 122 bp, Homo sapiens
tcaaatacaggtgcggctcctgcggggccgggggctcgagttccagtgtggccgctcacacgcctctaccagcctgctagagtcctggacagtcagggcacagatgggcccagacgggggaa

SEQ ID NO: 22560 - DNA, 122 bp, Homo sapiens
aagatgctggagccaaaggccggggccagctccgcacccacccagcctaaggcgcctgcccggggcgccacctcggcctctggctcccgagaatgctgctcctgaagatcgggactgggctt

SEQ ID NO: 22561 - DNA, 122 bp, Homo sapiens
gtgctcacctcgagcactgccaggctgctggagaggctttccggggcacagaagctgcagcggcgcggggcggtgggctgtgagcgagcatatgtaggggagcgtttcccgcgagaaagcag

SEQ ID NO: 22562 - DNA, 122 bp, Homo sapiens
tctaggttgtaactgtctcagcagtctgtatgacctctaattcttatcctgcaggcaaatcggtatcctatccccatcacctgggtatgggaccatatccaaaaaaatgctttcagatcagc

SEQ ID NO: 22563 - DNA, 122 bp, Homo sapiens
cggccgcagcgggagatgcaggcgcaggacaggcagctggcagggcagctgctgcggctgcgggcccagctgcaccgactgaagatggaccaagcctgtcacctgcaccaggagctgctgga

SEQ ID NO: 22564 - DNA, 122 bp, Homo sapiens
tgccctggcacagctcggggcctggcagcggcgggtggggcatcggctaagagctgccaccgccgcggggaggggagcccggcccgccgggaccgcaggtaacgggccgcggggccccgcgg

SEQ ID NO: 22565 - DNA, 122 bp, Homo sapiens
gggcagtgggaccatgacgccaggaggacacaccagtccagtcccgttcctgtaggacctcgtttattattacaaggcccatttaagggcacttaggccccactaggctcatcagaaaacct

SEQ ID NO: 22566 - DNA, 122 bp, Homo sapiens
aaagcctccctctccgcctcctgtgactcagtgacccggactcaaccccagcggctgccccgcccccagggaaatccgggaaagccccggaccttcggggccccaccccggggcggggagag

SEQ ID NO: 22567 - DNA, 122 bp, Homo sapiens
tcttcaatgaaaaggtttgataactcttgacctttgattttatttttagatcttgtcaaccgatgtaattaataactcagggtagggtccctggaaatttcagtaagcatgactgtttgggg

SEQ ID NO: 22568 - DNA, 122 bp, Homo sapiens
aataattcaacgccttcctatcaccccaaatcctgatttactgtagctgagaagttgttgcgatctggccgtgtccctaagacctcatctcctaccacccacgcaacactcacgtcactttc

SEQ ID NO: 22569 - DNA, 122 bp, Homo sapiens
agctcgcgcgaccagcctcctcttccaacgtcacattgtgcgagagacaaaacccgggcgcgccggagctcacacgcgcacgcacacacatccgaccccgtcgcctcttctctcctggtgct

SEQ ID NO: 22570 - DNA, 122 bp, Homo sapiens
tgtgcggtcgcgggacctgcgtgccatctacgaagctatccctttgttgccaggcatgggcgacctgctgcagtttgtggctaagcaaggcacctccttcgaggtgattctcatctctgatg

SEQ ID NO: 22571 - DNA, 122 bp, Homo sapiens
cccaagactccggtgtccagtcgccgcccagagcctcccaagactcgggtgtccagtctccgcccagagcctcccaagactcgggtgtccagtctccacccggaacctccagagactcgcgc

SEQ ID NO: 22572 - DNA, 122 bp, Homo sapiens
taaccttccctctacacttatcatcttcacaattctaattctactgactatcctagaaatcgctgtcgccttaatccaagcctacgtttttacacttctagtaagcctctacctgcacgaca

SEQ ID NO: 22573 - DNA, 122 bp, Homo sapiens
tggggcccctctctcctggccccatcacaggacgtggtggcgacccgggcctgcggtgcacggctctgatcgctggctgcacggtgacctcatcggccaccccacctccctgtgtgcccagg

SEQ ID NO: 22574 - DNA, 122 bp, Homo sapiens
agaagctccagcctcacggtgcaggcaggaacaagcctggcgcgccagacagctcggccccgcccactcgccgctctcggaaagctggaaccctgcccctttggagggggaggcggcggcgg

SEQ ID NO: 22575 - DNA, 122 bp, Homo sapiens
tcccgcagcctgccgcccgcctcacggtgacagcccgcccgggcgctgaccatcccggcccggctctgtttacaagcggcttctcgcggtcccactctgaaatgcttccgccggcggcccgg

SEQ ID NO: 22576 - DNA, 122 bp, Homo sapiens
cgtggaacgtgggtttaagatgggaccaaggagagctgatgcagacagagaatttaataacgactccaacaatcgctatagagaatgatttgaggcgctgggaccacgcagagctggtgcag

SEQ ID NO: 22577 - DNA, 122 bp, Homo sapiens
acgcgctcggactcaagactgattaaccagcaccggggttttctggggcctcgcctgggccgcggcctgagcagaagcgctaggaggtagaacagcgtccagcggggagaggagctagagtc

SEQ ID NO: 22578 - DNA, 122 bp, Homo sapiens
aggttttgaccagatggcggctgagctcaggggacgatgggggcgttaatgaggtcactgcgttgagctgggcctggttgacggctgtgtagctgtctagagaagagctggccggctggagg

SEQ ID NO: 22579 - DNA, 122 bp, Homo sapiens
cacccaatcaacggcgggctctctcctaccccatcccaatctccctcccctcggccaatccgcgcgctccattccgctgcccgcccagccaacccgggccttgaaaccagcaggcgaatggg

SEQ ID NO: 22580 - DNA, 122 bp, Homo sapiens
gggcgatcactgtcttctccccagacggacacctttttcaagttgaatatgcccaggaagcggtgaagaaaggatccaccgcggtgaggaagcaactattaccggactattccccgctctga

SEQ ID NO: 22581 - DNA, 122 bp, Homo sapiens
caaggcgggcaaggccaccaaggtgggcaaggacgagctctttgccctggagcagagctgcgcccaggtcgtgctgcaggcggccaacgggaggaatgtgtccacgcgccagggtatggacc

SEQ ID NO: 22582 - DNA, 122 bp, Homo sapiens
cgcggggcagtttgactaagtgaaacccaattccttcgccccaaagctgtggtggccagacgtgcgcgaccctctagacccaaaacagttttagtcagcaacgggtcatcagcaggaccgag

SEQ ID NO: 22583 - DNA, 122 bp, Homo sapiens
gactcgggtcccgaaggtggaaaggtttttttgccccaggtcccgaaagaacttcccggccgcgctgggagcaggaccgggtgtcctgacgcgtgcggggacaggttggcccctgtcctgcg

SEQ ID NO: 22584 - DNA, 122 bp, Homo sapiens
aggcgttcctgccaggataggttgcatcgctgcagatctccagccctacgtgcatacacacgtgcacacacacgtgtacacacacgtgcacacacatgtatgcacacacatgtatgcacaca

SEQ ID NO: 22585 - DNA, 122 bp, Homo sapiens
ggttgagtctcccccgcttgcccatgcttccaggagcacactctcctgacttgatgcagccggcagggctctggccaccagccttagtgctttggaaacaggtccccccacttctgcccttc

SEQ ID NO: 22586 - DNA, 122 bp, Homo sapiens
agtttatgccgcgcacaccgaatccatgcgcctgagtgagggtgggtgtgttggggagtgcgtccaagtggacagtgccgtacagtaatgtctacggggagttccaggagagctcggctact

SEQ ID NO: 22587 - DNA, 122 bp, Homo sapiens
cgtttctttccaacttcccttcccctcccatctcagtaatcagttttctttctgggcaaacgcaaagtggattctgtctacagcactgcggtaggcaatagtaaaacagaaaaaatggaggg

SEQ ID NO: 22588 - DNA, 122 bp, Homo sapiens
ggtgcggctgttacctgaggactgagcaggtgcggctgttacctgaggacggagcaggtgcggctgttacctgaggacggagcaggtgcggctgttacctgaggacggagcaggtgcggctg

SEQ ID NO: 22589 - DNA, 122 bp, Homo sapiens
cgtctcaaaaaataaaaataaaaataaaaataaaagaaaataaataaagtaacaaatatacgacatcagtttaagatcttaataacaggggaaactgggggaactctatctattttttcaat

SEQ ID NO: 22590 - DNA, 122 bp, Homo sapiens
acccaggtgcagggctctgccctggcgccctcctgtgacagtgccgggagcggcggggtgcggggcaccgccagctgtggtctgtcccggtgactggtttcttctgagtgtctcagttctgc

SEQ ID NO: 22591 - DNA, 122 bp, Homo sapiens
ggaaagcagatgccccaaaggcagctcttccacacaatcaatgggagccctggggagagccgtgaagtctttgagtctttgtcctggctcccatttctctccaagtaacagacacgagagaa

SEQ ID NO: 22592 - DNA, 122 bp, Homo sapiens
ttggaggcagaaattgggcataagacgatatgaggggtggtctcctcccttaggaggaagcgaattagctgacgtagtctccagccagaggctcggctagctccgtgagaagcgatccccgt

SEQ ID NO: 22593 - DNA, 122 bp, Homo sapiens
acttttgggaaatgctatttagtgtttgagtccgcaagacatactcgtaccctgagcattcgcagttgctgctccaccacccattctctcactgctcacccacgtgcttctggacacttgct

SEQ ID NO: 22594 - DNA, 122 bp, Homo sapiens
accggaacatcgtaatgctccctcgagaactgatgctctggtatcagagcatggtcaggccggaacatcgtaatgcaccctcgagaactgatgcgctggtatccagggaggatcggtaaagg

SEQ ID NO: 22595 - DNA, 122 bp, Homo sapiens
tggggggagccgcgggctgggccagcgccggccccgcccctttaacccgcccgcgcccgccgcattccgcggggaagtgtaggctttaggcctcttagggcctcagtttccccgtctgttcg

SEQ ID NO: 22596 - DNA, 122 bp, Homo sapiens
cacttgtgtgtgctggagcgaggacactgactaacaacggcggcagtgtctgcggaacagcgttccattgagcgcaggaaaggccttttgaagtggggacagttttaagaggcagcattcct

SEQ ID NO: 22597 - DNA, 122 bp, Homo sapiens
agtccttgttttttcctgcagtcggcccaggcaggacctgagcagcctgaagccatgagtcgctgccactgctctttctgtgcctggtgcagccccagctcatggggtctgggccgcctctg

SEQ ID NO: 22598 - DNA, 122 bp, Homo sapiens
tgccattaaggcccagggacgcctacctatgacacttgccagccctcatccgttccccgccgggccaaaatctcagagggcaggggctgccctgcctagaaaccagccccagaacatcaggg

SEQ ID NO: 22599 - DNA, 122 bp, Homo sapiens
cctccgcaggactgaatgcaattataatagaacagttgtttttgaacaacatccctctcccgttagactggaagatccatgaaggcagggggcctttggtccgctgctctatctctcatgct

SEQ ID NO: 22600 - DNA, 122 bp, Homo sapiens
gtgaggcggaatggaaaggaggagggaagtcagcccagtggttacacccctgtgcagaggcgcgccctccactggcccccttgccccactttgtgcctttggtttgaaacactggaggtggc

SEQ ID NO: 22601 - DNA, 122 bp, Homo sapiens
aggacacaggcccttgaggataaatgtggtccagggagacctacgctgggctactgtaggcgtcatggatggagtgattttggcctgggtggtgtggtgggagaggaatggtggcagctggg

SEQ ID NO: 22602 - DNA, 122 bp, Homo sapiens
gggtagcgagtgcatgtgggccctgggcctggggcctcctgggctgggacctgtcattctcgccaagtgccatccccagtgcctgagcctctgtgcccacgccccctctaaaccactgaacc

SEQ ID NO: 22603 - DNA, 122 bp, Homo sapiens
gaccataggctttcttgcctcttgagtggccactgtggagggtcaccctgaggcatttcccgggagaaccatccttgcatgcctggggctcaccctgcttgggcacaaggtatccttctttt

SEQ ID NO: 22604 - DNA, 122 bp, Homo sapiens
cgtctgctcccttttcctcacgtcctgcgtctccctgttcatgtttccttccatcacccacgtttcctggcttctgctctgtgccaagccctggagacaaatcaagaacaaaaccgagcccc

SEQ ID NO: 22605 - DNA, 122 bp, Homo sapiens
tccacaggtgatgagcatgtactctcacttcgacaagccaagagtgctccaaaatgccctcgaaatgcctctgggaatggcagggagaggacaactatcaatccccaaggttagtttaagga

SEQ ID NO: 22606 - DNA, 122 bp, Homo sapiens
gcctggctcaatggctcacaactataatcccagcactttgggaggcagaggcgggcagatcgcttgagcccaggaattcaagacctgtctctacaaaagtacaaaaattagagcatctgtag

SEQ ID NO: 22607 - DNA, 122 bp, Homo sapiens
gactgggcctgtgggagcctgggggcgtggcttagagtggggcaccctgggactggaccccgcaggtgcttgggggcgtagcctggagtgagggtttggctggtgtagcttggagtgaggcc

SEQ ID NO: 22608 - DNA, 122 bp, Homo sapiens
tccaccaggcccctcctccaacactggggattataatttgacatgagatttgggcagggacgcaaatccaaaccatatcagggtttcacagctagagagaaggagtcaatgcctggctccag

SEQ ID NO: 22609 - DNA, 122 bp, Homo sapiens
ccctaccagcttctagctctcagtctgcgcgagggtgtaggaaggaaagcccaggacctccggagcagagcacagcagctgcagaggcaaggccagcatgtcgcccaacttcaaacttcagt

SEQ ID NO: 22610 - DNA, 122 bp, Homo sapiens
agtcgcatcccgggactagtgagggtagcgggtacacccggcaggagtcccctccgatcccgtgtccccactcggaaccgcccaccaaccggttggaaaggagctggagctacgcagctggg

SEQ ID NO: 22611 - DNA, 122 bp, Homo sapiens
ggggttttgggtttcgcgctgggctgcgtttctgcaggagccaggcctcttcatgctctgcggcgacagccgctggggtggggctacggggaagtcgcgctgcccctcgtctgagcgtgggc

SEQ ID NO: 22612 - DNA, 122 bp, Homo sapiens
gtcgtgggcggagaggggcgagaccaggaaacggggcgtggcggccgccgtggttacaggcggttggcgagggtaattacgctccaatcactggctttttttgttgtttttttttttttttt

SEQ ID NO: 22613 - DNA, 122 bp, Homo sapiens
tgatgggggcatgttaaaggacacagaagcctgcttcagggggctcccactggcgacgcacgcagcaatttgagcactgaaataataaagaattggccaggcgcggtggctcacacctgtaa

SEQ ID NO: 22614 - DNA, 122 bp, Homo sapiens
aagaaaaagcataaatgtaaaacaacctttcacatcttcagagatgtaaaagcagtttggcgtgattaaaactagcaatgagaacagaaaagcaaggttgaatataaaaggggataaacaga

SEQ ID NO: 22615 - DNA, 122 bp, Homo sapiens
ccgccgcctgattgtggcttcctctcccctatccggctgctctaggtctggttccaaaaccgccgggccaagtggaggaagaaggagaacacgaaaaagggcccggggcggccggcgcacaa

SEQ ID NO: 22616 - DNA, 122 bp, Homo sapiens
ccgcatggccaagagtcgcagctgctcctacaacgtgctcacgggcccgacgccggcccccgcgcccccccgactgccgtgctccatggcttcccatgtggaaagtatcacccctcccacct

SEQ ID NO: 22617 - DNA, 122 bp, Homo sapiens
gcccatcctccaagcccatgtgtgttccgatcggtacactaaggcaagcacctgggaacccggaatacagaaagccctctgtcctcgcgataaggcacagggtgtaatcgagctgattaaca

SEQ ID NO: 22618 - DNA, 122 bp, Homo sapiens
acagtcgtctctaaactcccccggggaaagggagactcccttttccggtctgctaagtagcgggtggtgtttcttgacacttttcgctaccgctagaccacggtccgctaggtaacgggtgt

SEQ ID NO: 22619 - DNA, 122 bp, Homo sapiens
atcaaaacctgttccaaggaaattatttgacttctcatttacactagggtgataacaggccgataattgcctaattgttattcttttctgagctagcttcattttctaacttaataatagct

SEQ ID NO: 22620 - DNA, 122 bp, Homo sapiens
ggtgaggcggttttcagggcttagcccaagcatcacctaatctgtggggattccctgcaccggctcctctctgggctgccctagttctatgccatgcagccctcacagccaggctgggcagg

SEQ ID NO: 22621 - DNA, 122 bp, Homo sapiens
gttctctctcggtagcaggagtgttttcctcagctaggtcgaggagacacaaacagacctcgtcacgcacacatctcagcacacaggcatatagtctcaaacacacggttttagatttgatg

SEQ ID NO: 22622 - DNA, 122 bp, Homo sapiens
tcctggttgggagtacaggcacgggacacagagtatctcatcctcatcaggacctaacctcgaacatggagccgggcacttgtggccgtgctccctgcccgcaaagtcacggtccctgcatc

SEQ ID NO: 22623 - DNA, 122 bp, Homo sapiens
ctgtgtctcaaaaaaacaaaaaacaaaaaacaaaaacgaaaagaaagacagaaaagaaagcgtgtggcattgcaaacctgtgaatcctccctagatgttaaatttgtgctccctcttggaat

SEQ ID NO: 22624 - DNA, 122 bp, Homo sapiens
tcttcctgtcccgaccttctttataagggggcggtagaaaaagtagatcccatccctccgcggctcttgcgagcacttcttacaactgtatggcgttgaggccgctccatcgcatcttcaaa

SEQ ID NO: 22625 - DNA, 122 bp, Homo sapiens
gcacaaagtcatttctttgtagaagctgggcttcttcagggctgtgtaactcataggtgtcgtggagggtctcagaaggaaacgagggaaggcaattctgtgttgcagaaaaagagtttttc

SEQ ID NO: 22626 - DNA, 122 bp, Homo sapiens
catccgaggctggtcatttcatcttgaatgcacaggggcccatcaggagacttggggccacgtgggatccatctagaaggtggtcggaggaggattgggacccgccatgctgggcacgaggg

SEQ ID NO: 22627 - DNA, 122 bp, Homo sapiens
gagctctctgcatgtcctgagcactctgcagcctttgaaatgaacagtgagggttttcatcgcagcctctcatttccaactgaaccacactatcaagaagagctactcagccagacaacatg

SEQ ID NO: 22628 - DNA, 122 bp, Homo sapiens
gcggatgggaaggcgcaaggcagcagtgaacagggagaccctcatccggctgggggttcccgtgcggcagggacagtagagccggatccaattcaagggtagacgtagtggaggcccccgag

SEQ ID NO: 22629 - DNA, 122 bp, Homo sapiens
gtttttattttttcgtgcaattcacagaaggcatcaccctacaagctctcacaacttttccgctcctgtgcggggacgcgaggggtggcttgccccgcactattccccattaccaagagtta

SEQ ID NO: 22630 - DNA, 122 bp, Homo sapiens
aggagcgtcaatcaagcagcacacccctcacttaacattactttttcagctcagctctcacgcacatgtggggtagagaccagaaaattccatgtaacctgaatgggatatctggggaaaga

SEQ ID NO: 22631 - DNA, 122 bp, Homo sapiens
cgacagccggagccattgtggctccggccgattgcgccggccctcgggccctcagggaggcgagggtgtgagggtacagagttcgaggccaacttggtccacattggtaggaaaaaaaaaat

SEQ ID NO: 22632 - DNA, 122 bp, Homo sapiens
tttggttttttccaggaaagccccagcaccttctgaggtgaacacacccacgtggcggcccgtgtgggccctgcacagcccggtggctgagaggcacctcaaactgcaggagcgggctgggc

SEQ ID NO: 22633 - DNA, 122 bp, Homo sapiens
gcctgaggaggagtgtgggcggtcaggcccccagccctgcctgaccctccctcctgcccccgaccaaggcttcctggggctgaaggaagtgagtgcagccacaggccaacacttccttggct

SEQ ID NO: 22634 - DNA, 122 bp, Homo sapiens
aggcctgggaatcggggctagaggcccatttgttccccgccgcaggccagggagcaggcacgcgtaactgggtcagccccgccccgccccgccgcgcgctggtcacgccccctcgagcgcgg

SEQ ID NO: 22635 - DNA, 122 bp, Homo sapiens
acgtgggcggagctctagctcgcgtattctgaggaggcggggttggcctaggcgaagatccggactctgggtgttttgctaccgtgaccgtttaggtgagtggaatagccaagaacatttcg

SEQ ID NO: 22636 - DNA, 122 bp, Homo sapiens
ctcgtggtaatcctcttctggtcggtactttttcccctttcttctcctagatcttcttatcgccttgacaaaacccaggaagcggtccatctcttactcaccgtgcagcgcggcacagctag

SEQ ID NO: 22637 - DNA, 122 bp, Homo sapiens
atatcagtgaactgctttaagttcagttagagaaggtgagattaaagaccagaagaaactcgagggagactgctgtataagtcccagttatctttccaaacagacaggttcatcacagcagt

SEQ ID NO: 22638 - DNA, 122 bp, Homo sapiens
acttaaaagccaaaatttcatcagctaacaggcttagagtatggagcctaaaggacctgtcgatgaaggaggttattcgttgcatatctgtggttttagacaatcaagggggttgttttttt

SEQ ID NO: 22639 - DNA, 122 bp, Homo sapiens
gtccacgcgggccggcagccatcttggtaaagggagcccgggctgccattttagtaaaggcgtggtttccctttcgcttttttcgcccattcattccgctaaaattttagtgagtgcctttt

SEQ ID NO: 22640 - DNA, 122 bp, Homo sapiens
ggcacagccgtctcccgtgcagcaaaactgtcccacctggcctcctgcagtgtcaggagtcgctcggtggaaaccgagcgcctgcccctccctgaaagtcaggcttctagacttaagagggg

SEQ ID NO: 22641 - DNA, 122 bp, Homo sapiens
gcttctgtaaaatttacaaactgctgtgataaaatgtcaccttttatgatgcatttcacccgggttgcatatataaagggcactgcaatggaaagagttgcaaaaacaaagcagcagcctag

SEQ ID NO: 22642 - DNA, 122 bp, Homo sapiens
gtatatagctgtccctttaatgtggtcacatgataattattacttaagttaggttttatccgcttttaagtaagtatgtgtagaactgaagtccaaatatactgcttgtgcttttttattct

SEQ ID NO: 22643 - DNA, 122 bp, Homo sapiens
gataagagaatataagagtcatgggacagggcagcaaatcctgaagccacaccaccaacacgaaaagcaaagttaagcctcagaaattctccttttatgtatgtgcctcattcagattctta

SEQ ID NO: 22644 - DNA, 122 bp, Homo sapiens
atctataagtttcagtaatagagtcaaggtatctttaagatcaactaacagtaggccgggcgcggtggctcacatctataatcccagcactttgggaggccgacgcaggcagatcacgaggc

SEQ ID NO: 22645 - DNA, 122 bp, Homo sapiens
ttggccaagctggtctcgtgatccgcctgcctcagcctcccaaagtgctgggattacaggcgggagccactgcacctggccccaggacttgtctttcttaagcacagaagttctctgaatga

SEQ ID NO: 22646 - DNA, 122 bp, Homo sapiens
gacagacctgccgtttactaactgggtacccagggcaaattacttcacaagtctgagtctcggtttcctcaccgtgaaccggactggtacccataggttgcggcgtggatcaaatgagatag

SEQ ID NO: 22647 - DNA, 122 bp, Homo sapiens
aggcagagaggaatccatgcccaagctgtcttgacagctacaggagtttgtctgtgagggcggggctcccatcaggttccacctctctacactgttgctctggggaatgagtttctcactgt

SEQ ID NO: 22648 - DNA, 122 bp, Homo sapiens
aaaccctatgaatttactgaatgtgggggaactgttactcatatgttgcatttcgtcgaacgtgcaagtcatgctgaagagaaaccctgtgcttctaaggagtattgacaagcccttagcta

SEQ ID NO: 22649 - DNA, 122 bp, Homo sapiens
tacgtcatctctccgtgcctcagtttccctatgtgggataacgtagtacctagtgaatagcggtgacttgaggaataagtgagttaatccttagcaaggacttaaaatgttgctgcttggca

SEQ ID NO: 22650 - DNA, 122 bp, Homo sapiens
tgcatcggtgagctctggtcttctgctaagaggctgacttttttagccctgcaaagtccccgtacagactagcagtacgtcgaagcacagtcatccaaatgtgggaccttcaataacgatga

SEQ ID NO: 22651 - DNA, 122 bp, Homo sapiens
tgagcgacaccctgttggcaccacggaagctcgtgtgattatcttaggagagccaagatgcgggaggtgtggtggcttccttgaggtcaggcagctagtaagagttgcttctgaactggacc

SEQ ID NO: 22652 - DNA, 122 bp, Homo sapiens
cggcacctgcccgggcctccccacggagctgacataactgccggggcgtggcctggacgccggacggtctaaaccatccccaggtgactctcaagcgcagagcaatgggagctgctgtccgg

SEQ ID NO: 22653 - DNA, 122 bp, Homo sapiens
agatagtgacttcttgagagcatatctcttgtcttatttatctctttatttcccccatatcgcttagcatggagcctcacacaaagtaaatggccaataagtgctaagctgacagtgttaga

SEQ ID NO: 22654 - DNA, 122 bp, Homo sapiens
taactacacatttccagcaaaagtaaagaaatgatactcaatttcattattcaccacagacgccaagatcattctttagtctgattttagcctcacgtggtctcacccgaacatttgttttt

SEQ ID NO: 22655 - DNA, 122 bp, Homo sapiens
cggcgacccccggaccgcgctggcctcgcagtctgctccggcttccggctccccgcgctgcgcccagctgcgcgtcccgccacccgccccggcagcaccgacgctccccatggactcttctc

SEQ ID NO: 22656 - DNA, 122 bp, Homo sapiens
caaaattgaaaaatcaaatgtaaaaatcatgaaaaatcctcctatgaattctgattttaacgaagccttaatatctgctctttgacgtgttaggcacttgggactgggaacagaagggacaa

SEQ ID NO: 22657 - DNA, 122 bp, Homo sapiens
ctacttacaactatttgggaggacccatccccttatttttataccataagttaaacagcccgccttcaccaccacaaaattttcgtcattttagctgtcatctcttctattcagcagaattt

SEQ ID NO: 22658 - DNA, 122 bp, Homo sapiens
tccagccaggtgggggccggatcagattggccctgacagtgggtggggggcacctgagcccgggtccatggtttgcttttttctaagttatcacacagtaaaagccatgtgtacgtgggggt

SEQ ID NO: 22659 - DNA, 122 bp, Homo sapiens
cccctgggcacctcgcctcccccacggccggctctgcttgtaaacagacaagtgcacaagcgcagcccggtgaaggcacagcggtcccaggaggcatctgggctgcaccccagcgagccgcc

SEQ ID NO: 22660 - DNA, 122 bp, Homo sapiens
aggaaagggacagggatccagggagggcttcccatgagaaagcatgagaaactacatctgcggggctccgaggctcccctgccagcctggagggtccgtgcagagggacttgggtgggcctc

SEQ ID NO: 22661 - DNA, 122 bp, Homo sapiens
agtatctaacccctggccctgccattcccgggcctgcctgacccacattgaaaagtgaaccgggtaacttaagactgggatgggcttcatcagaattgttcattgcctggttcagactggat

SEQ ID NO: 22662 - DNA, 122 bp, Homo sapiens
ttattggctggtggtagcgtcgctcgcccggcagtaccacgtgacggcctcggccgcgggcgtttacactggctctgcctccggcatctcttcgccggtgcgtcctcgccgcgcccgtaggt

SEQ ID NO: 22663 - DNA, 122 bp, Homo sapiens
acatctgtgtgtttgtggtgtggaaagccaaaacattaaaaacacatgtgcacttatcagcgtggctggtgtaaataccaagtccatcactcaggcacacatgctaaggttagacccagtcc

SEQ ID NO: 22664 - DNA, 122 bp, Homo sapiens
taaacagaggtgcagcccttagagcaggcaactttagtttttttctcccttccctgtgggcgtggcttcccaatcacccacccaccgagaggcctcctccccagcacgctgcaagggccact

SEQ ID NO: 22665 - DNA, 122 bp, Homo sapiens
tgttaaaagctggaggggggatatgtgatcccaggaccaaaagcgcggggccagactcatcggttcattcaacaaccagtatttagtgcctgctgtgttctgcaggccctgccataggcgct

SEQ ID NO: 22666 - DNA, 122 bp, Homo sapiens
ggccctgtgatcggcctgccctctccacgtgcggttctactgtccacactggctgccccacgcagggtgtgcgccgaaaggtgtgtctcagaagccctcagcctcttcattaaaagatgcca

SEQ ID NO: 22667 - DNA, 122 bp, Homo sapiens
gatttatgaaaagcagagaagggccagcgtgtttgccttctaaggcgtattgttctgtagcgtcggcatcctcaggcgttcacgtaaatagagccattttttacaaggagtagggataaacc

SEQ ID NO: 22668 - DNA, 122 bp, Homo sapiens
ctgctgtgctcccgagtctgggtcacacacaacttggagccgtgaaagagctgccgtccgcgggcattaaccctccatcttcctgcacatcactggagggaaccgccgcgcagcccagacag

SEQ ID NO: 22669 - DNA, 122 bp, Homo sapiens
ttcttgtaacttgaggacttctccacacccccattcagatgcctgagaacagctaagctccgtaaagttggttctcttagccatcttaatggttctaaaaaacagcaaaaacatctttatgt

SEQ ID NO: 22670 - DNA, 122 bp, Homo sapiens
gtgagttatggctgctgccttcaatcagccatgtctcttcctccccgacctttccgttcacgacatacccggggagcctccctcttgtagaattgaagtttgtgatccttgaacttgagctt

SEQ ID NO: 22671 - DNA, 122 bp, Homo sapiens
ccagggtggttgtgttcagtgggtgaggggtgagtaagcccatggctcagggacagtccccgctcttcccagaggccactagcttcccagaggccactaccttggcagggctgccaggttcc

SEQ ID NO: 22672 - DNA, 122 bp, Homo sapiens
ttgctgacagctggcaggtggcactgccgtgagcaggcccagaatgaggaggctgagggccgacatggctgcagcagctcctagccttgcttctggccgccggtgtctgggctcctggagct

SEQ ID NO: 22673 - DNA, 122 bp, Homo sapiens
tccattccatgtaaactgaaacaagataatgtgtcccatttttaaaatctggtctatactcgtcattttaaaaagtataatctggaggctcagtcccttatccttcttctgaagatgaacag

SEQ ID NO: 22674 - DNA, 122 bp, Homo sapiens
gcacgcgcacacacacacacacacaacacacacacacacacacacacacacacacacacacggagagagaaccaactattatttggaacgtcatgaaactggagtaattttatgaatgtctt

SEQ ID NO: 22675 - DNA, 122 bp, Homo sapiens
ggttggagccattttgaaccctgcgaccctagtgttttccctcttttcctagctcttcgccgtctttcccgatgtcggccaatcaggggaaaaggaaaaggcccaatcagcagaaagtccac

SEQ ID NO: 22676 - DNA, 122 bp, Homo sapiens
tgtctctgggagtgagacgccagacctgacccttcccttgtgggtctgggggcttccggtcgccgcagaccctggtcgctttgccacactcgtctacactgcatacgatcactgcatagaca

SEQ ID NO: 22677 - DNA, 122 bp, Homo sapiens
ccgcaagagcccccgagtgctcatcaaaacgctggggaagctggatgggtgtttaagggtcgagttccacaatggtggcaaccccagcaaagtgcctgcagaggactgcagtgagccggtgc

SEQ ID NO: 22678 - DNA, 122 bp, Homo sapiens
agctactgcagatagaggcggctggctcgggggcgggggtggagggggtcttcctccttccggttcttgggaagatcctgcaatctgaaagaggcaggagagctctttccccatctgtaatg

SEQ ID NO: 22679 - DNA, 122 bp, Homo sapiens
gaggataggtgacaggggtgttgaatcggcccgagcggttctttcttttcgagttaatttcgcattggtctctaggatgcaagcttgtccaacgcgtggcccaagggcggcatgtgactgag

SEQ ID NO: 22680 - DNA, 122 bp, Homo sapiens
ttttagcgccgggagaagtgaggcctgggtttggggtccaagtccgaggctgccccggagcgggtcccgcaaggcgggtgcacttgaggtgggcgccacggtgctgggggctcctacagggc

SEQ ID NO: 22681 - DNA, 122 bp, Homo sapiens
gtggtgcgtggggggcggcgcggggcgcggccgggcgctcaaaactcctcgtgcacgctgcgcgcgtagtccaccagcttgctgcccgtgaagaactcgctgtacttgagcacctcctcggg

SEQ ID NO: 22682 - DNA, 122 bp, Homo sapiens
ttttgtgtttccacgtctcagctaggttgcagacttgcggagtgcagggcctcggacctgcgtctcttgtccccagtggtgcctaaggaggtgctttccacacaatgctgtttgccagcata

SEQ ID NO: 22683 - DNA, 122 bp, Homo sapiens
acatcagctcacatgactggcaactctaaatagagagccctaatggactgaggcaggaaacgtctaaaagctcaatctgctgtatgtcatgaccccttaggttgggtttatgccacatcggt

SEQ ID NO: 22684 - DNA, 122 bp, Homo sapiens
ggaggctgaggcaggagaatcgcttgaacccgggaggcgaaggttgcagtgagccaagatcgggccactgtgctccagcccaagtgacagagcaagaagactgtctcagataaataaataaa

SEQ ID NO: 22685 - DNA, 122 bp, Homo sapiens
acccgactctggcaatgtaggttccccacgccgggagttcccaagctgggttggagaactcgagcttcgggcattcagtggccagctcggctttataaaggaccgtgcccttaacagcaggg

SEQ ID NO: 22686 - DNA, 122 bp, Homo sapiens
ggtgcgctgcccttctgtcctcacaggggccctccgaccgcagcctgaaccaccagatgccgtcaggcactcgagcagatgcctcacagatagaaggctggtgcagaagtcattgtggttct

SEQ ID NO: 22687 - DNA, 122 bp, Homo sapiens
ggaaccctcatttatctagtgtactacaagcagggttgttctcctctcatcttactgctccgataaatcactgcccaaggatccttggcagtttttttctgaaaagaaaaggtttcacattc

SEQ ID NO: 22688 - DNA, 122 bp, Homo sapiens
gtcgtcgttccagatgaagaggtcgatgaggacgcgcctgttgaactgtgagttcatcagcgccagctgccgctccagctcccactcgagtcctggggagacagtgccccgcactggagact

SEQ ID NO: 22689 - DNA, 122 bp, Homo sapiens
ttcatcaagaaactcctgttggatccctcctaactgtggaccaaaataagccaacaggaacgggtgtttacttaatggctagtttctgtttgaaatgggaggagggatcccctagcagggtt

SEQ ID NO: 22690 - DNA, 122 bp, Homo sapiens
cctcttcgccgagaaaagcgcgtcttccctccgcccagatcggcggagccccgaactctgcgcagtttcaagactagagaaactgcctcagatgtttccaggaacagatcccccccacaccc

SEQ ID NO: 22691 - DNA, 122 bp, Homo sapiens
attgaaagttacacgcgtgcccaggactggacaacaggttgaagcgatgtccgatttcttcgatcctaatggtctgtcaaagcctttggagagcggatcatttataaagctcaaggccacac

SEQ ID NO: 22692 - DNA, 122 bp, Homo sapiens
tacctggatcgcacatgaaaacttggatttggtgcctacttctagactgctgtttcgtctcgtttattttctagacaaactgtgctgctccatggcagtagcatcaatatgtcttttgtttc

SEQ ID NO: 22693 - DNA, 122 bp, Homo sapiens
tttggaaaaatatatatttaatttttggttataaatttaggattttgagatttggtgattcggagaagacattgtgaaatacttactgggtttatggcagaggacactttgtaaaacaaaac

SEQ ID NO: 22694 - DNA, 122 bp, Homo sapiens
ggggcccttcccccacctctccgagactgacactctgccgtaccaaccaacccgcgtcaccggacagagtccagccaatcagcacccagtatcgggcgggctctggctaacctagccgggac

SEQ ID NO: 22695 - DNA, 122 bp, Homo sapiens
cccaggaagcaatccatctaagtccagggagctgcataagagaagcacccaagagagaagcgtcggcttcatcatctccagacccaccctggagcatcagctttaaccatccatatgtccag

SEQ ID NO: 22696 - DNA, 122 bp, Homo sapiens
gcgattgttcacttgccaggcgccacgtgtgggcgacgtcactgggctttatgctttcatcgccgctatctgcctacgtgagctgctctcctcccatcgcccccgcctcccctactacggag

SEQ ID NO: 22697 - DNA, 122 bp, Homo sapiens
ggctttcggttaacaccgcaggtgaggtcgttaaactgtgtattgcgactcggctcctatcggaccgtgaaggctaagaaaggcttcacagttcccactcttttggtctagccttagcaaca

SEQ ID NO: 22698 - DNA, 122 bp, Homo sapiens
tattgttgtaactatattgaatttaactttttctttaactaccaaggactccagattcaccgtcaactttcttcctgcattcactcttactgttcagttctgggttaaaagacagcggggcc

SEQ ID NO: 22699 - DNA, 122 bp, Homo sapiens
ccagagtgtggagcaagtgccctgcatcagaggacggcccaggggaaacgtgcatgatgccgaaccccacaggacagaattacttcaatcgcctggtcctgactactacaaggaggaagtct

SEQ ID NO: 22700 - DNA, 122 bp, Homo sapiens
ggatcccaggccagcgggaggaggggccgcaggggcgctgcgggcaaggggagcccagtgcgcagggctccagaaaccccgaccctcgcaggggagagccagccgaaccagacgtgtggggg

SEQ ID NO: 22701 - DNA, 122 bp, Homo sapiens
gagaggactgaaggtcagagactctgggtaacctgcacattaagaacgtcctcaagttatcggggggaaagatagagtcctttctgttctacacaaaggggcagatctaaaatcacagtccc

SEQ ID NO: 22702 - DNA, 122 bp, Homo sapiens
ggaaagacttcccacaatgcaaagctcttcacggcagagccggaactgcgggaccggaagcggaaacagatcgcaagcagaaggggcggagcaaaagcggagggcagctgccggttgctatt

SEQ ID NO: 22703 - DNA, 122 bp, Homo sapiens
atataaaagccttcacttttggttaattacaaaaaaaaaaaaaaaaaaaaaaaaaaaaaccgtgggagatatgtgacagtgagagtaggcctgctactgatgagaaggaccagcaacttagc

SEQ ID NO: 22704 - DNA, 122 bp, Homo sapiens
gcccgccgggtcacgtggccccggccgcctcacgtgacccggtgcagcgcgcgcccgggacgctacccagccgagcatcccgcaccgccccggccccggccccggccgaaaccctgctcttc

SEQ ID NO: 22705 - DNA, 122 bp, Homo sapiens
gtgggcgaaggatatgaaaagacacttctcaaaagaagacatctacgcggccaacagacacgtgaaaaaatgctcatcatcactggccatcagagaaatgcaaagcaaaaccacaatgagat

SEQ ID NO: 22706 - DNA, 122 bp, Homo sapiens
aggcttgggaagagaaccccagagacgggtcgggagaggtctggatgctctgttcctctgcggctaatcacctgtgggacttgggggcttctctgtgtgtctctgggcatctgtttcctcat

SEQ ID NO: 22707 - DNA, 122 bp, Homo sapiens
gctttactccacaggctgagcttgagaaaggcggcaagaccctgagaagaaatggcggcacgaaaagtgttgcggaggctgtggagttcccagtcccgccatgctgtaggcgttgaaaaatg

SEQ ID NO: 22708 - DNA, 122 bp, Homo sapiens
ggagggcgggagatcacaccagacaattataaaagaagagctggtcctgaagctcacaaccgtaacagccaccagacaagcttcagtggccggcccttcacatccagacttgcctgagagga

SEQ ID NO: 22709 - DNA, 122 bp, Homo sapiens
ggaagacagcaggccgcgatcagagtcgctgttcattcagccgcagcctctgggccggggcggcccccaggggccaggagagagccctggagtcccgcagccaccatgcacgctcccagcgt

SEQ ID NO: 22710 - DNA, 122 bp, Homo sapiens
ggggctccacttctcagtaactctgtttaaccccagataactgctctcctgcccctcggccggggctgatatgagctgaatccagcttcctgccacccaaaagccacttcctgccaagctga

SEQ ID NO: 22711 - DNA, 122 bp, Homo sapiens
atcacatacacactgttaacggtgacggaaccagagagaatctagtgtttgagacagacacgttgccaatacatcaaaataagaattttgggccagacacagtggctcacgcctgtaattcc

SEQ ID NO: 22712 - DNA, 122 bp, Homo sapiens
gggtgaccaggagggaccaccacgaatgcggggaacaagcaccctctcctgttagctgagcgagcccccaggtgacctccaagccaactgccaccccagtgaggacgctgtcctcatggccc

SEQ ID NO: 22713 - DNA, 122 bp, Homo sapiens
ttaatttaattatgcagacactttaggttagtgctgttgggattctccgaaaggcgcccacgtgaaccagcgcccctcacccgcagcccacttgtcctcagccctttccctccccagtctcc

SEQ ID NO: 22714 - DNA, 122 bp, Homo sapiens
cgggctgggggagggggctcgtgtctcagtgctgcagtgtcagggggccctgcccctccccgcgcttcgctgtgtaaggcaccggctccagcgaggtccgcgagcgcgcgaggggaggggta

SEQ ID NO: 22715 - DNA, 122 bp, Homo sapiens
acaggttgggggcgtggcaggccagggtggtcttgggaaacgcaacatgtgggcaggaaacgcctgtccacacctagatccttaggggtggagccctagtcacgccctcctctacccagcgc

SEQ ID NO: 22716 - DNA, 122 bp, Homo sapiens
gggggacggacttccagcatcgctcattcgggggcgtgacgggaggacctggctggggagcggcgggttgggagcctgtggctgccccttcggtgacagtggagtcaccgagcctagaaatg

SEQ ID NO: 22717 - DNA, 122 bp, Homo sapiens
cacgccacagcgctcccagggcagttcacgcggcgcgtccccatgccgtccacacccacccggcacacacaccccctcgccagcaactcgccgggtcctggctccggtcgccccctgtgccc

SEQ ID NO: 22718 - DNA, 122 bp, Homo sapiens
ctccttccggagcaggagctgtcatgtggggagctggcccaggctcacgagagcgacttgcgctggctgagggaacggcaggtccaggcgggcagcgctgtccggcgcctacctttctgcgg

SEQ ID NO: 22719 - DNA, 122 bp, Homo sapiens
gacccactcccgacaggaagcaccagcccctcttcacggacaaacccgtcccaaaggccccgtcacgacaccgccatcatggtgaccagatttggacctgtgttccggagcagacaggccat

SEQ ID NO: 22720 - DNA, 122 bp, Homo sapiens
attggcccatggtagtcacgtggaggcgccggggcgtgccggccatgttggggagtgcggcgccgcggcccgcgccacctccgccccccgcggcttgcctccagcccgcccctcccggccct

SEQ ID NO: 22721 - DNA, 122 bp, Homo sapiens
ttaggtttgtgtttctggtccccacagcctcaggaatgagggcttccaagcatgacgaggcgagtttaaggaagtggaagtaaagatgcttcatttcttttgcatgtgtgagtttagcagat

SEQ ID NO: 22722 - DNA, 122 bp, Homo sapiens
cgccagggagcgcgcggccgcttcctggtgggtccagtgtccccggggtggagggcggggcgcagggcaaagggccccggggctgggccgggctccgagtgccccgcgtggggccggcgggg

SEQ ID NO: 22723 - DNA, 122 bp, Homo sapiens
atgtatctgggcggttaaggatccggttagaaatcatgtttcagtgtgagggcaaataaccgatttgaacatgaggtatttccgaggaaacgctttttttgcccgatagtagtttgtcaaaa

SEQ ID NO: 22724 - DNA, 122 bp, Homo sapiens
cagaaccaccgccctagaggcacagaggggcttctggcactgctaggttcacaccctcctcgccccgatcttccttccacctaaagtgaagcacttttccttccaagggcagctccgtcttg

SEQ ID NO: 22725 - DNA, 122 bp, Homo sapiens
ccccacacccactttaaaataacaaaagcctcatgtgttgcagcttttcatagtagggaccgaggctgcagggcactgccgcacctagtcatttggaggtcgttgcagccttctgcgccttg

SEQ ID NO: 22726 - DNA, 122 bp, Homo sapiens
tttctttccctctgggtgacaaaccatttaatatgcgtagcgcttagtattttaagtgctcgacgaccacttaaggctggtcccagggcgatcatcagaaacagagagatacaaccccattt

SEQ ID NO: 22727 - DNA, 122 bp, Homo sapiens
gggtaagagtcggggtcgggtggctgggggttctccgtgtccgccgggaggggacaacgacggcgacaggggctgcggggagccggcggcgcgcctttcttgctcgctcccgctctgcctcc

SEQ ID NO: 22728 - DNA, 122 bp, Homo sapiens
gttagacaagcagacagagaaagtgtgcagggctggggttctggcccgggcagacgggaacgcggacacatctagcactccgagtccgtcaaggcagcgcgagcgctgcgccgctggaacaa

SEQ ID NO: 22729 - DNA, 122 bp, Homo sapiens
tcaacctgcccagcccggtaggtccttccttgatgatggaatgttctagacgctgtccaccgggtagccaacagccacgtgtggctactgagctctggaaacatggcccacgtgactgagga

SEQ ID NO: 22730 - DNA, 122 bp, Homo sapiens
ccagcggcttgccagggctcgtggtgtttgccgcatcctctccagcccatctaacccttacgatgcaatgtggcatctcttggctggtgctgggctgggcttctgggcaaagaccacccgct

SEQ ID NO: 22731 - DNA, 122 bp, Homo sapiens
aggacactgtctcctgacaccagcccctctttccacagtctgacattttgggtgttatttcgtcctctccatcaccaagtgttcagacaacagaggcaatgacgggttgggctctgagagaa

SEQ ID NO: 22732 - DNA, 122 bp, Homo sapiens
gagtagactccagtccccagagaaaggcttgcaaatgctgtcagctgaaagccaggcaggcgtgtactaaaatggtaacgtactggggatatgggcaagcttggcactactggcatctgctg

SEQ ID NO: 22733 - DNA, 122 bp, Homo sapiens
tgaggcggctcctggcgtcgcccagagggagcgactagacgaacagtccggtgagggcggcgagaggaagcccgctacgagtgccctagctccccgccgctctcgatgaaccggacggaata

SEQ ID NO: 22734 - DNA, 122 bp, Homo sapiens
gaggccgcggactgcttgagcttaggtgttcgagaccagcctggccaacatggcgaaactcggtctctactaaaaatacaaaaactagcggggcgtggtggtgcccgcctgtaatcccagct

SEQ ID NO: 22735 - DNA, 122 bp, Homo sapiens
taagggaattacccctgccttccactccatcctcaccttgccctgcccagattagaggcacggaggcatgtaccacaggcctgaaaaactgtccagccaaaaagcctgactgccttgagtac

SEQ ID NO: 22736 - DNA, 122 bp, Homo sapiens
ttctaaaatgcttattttttcacagtttaacctttgtataattaggatacattttatgaccgacagtatgtcatcaattagcgtttttacttggtcagagatacatgaaatgtttccatcac

SEQ ID NO: 22737 - DNA, 122 bp, Homo sapiens
gctccgcagcagagacagggcccagagcatgacacacacgaccgctgacaggtgtaggggcgggggcggcagcgctaccagatgggccacaggacgtacaggcagcgctcggtgctcatggc

SEQ ID NO: 22738 - DNA, 122 bp, Homo sapiens
gccgtatcgctccctccagcctttcttgccgactcgggcatccggagcctgtccacctcacgggacagctcaggcacatgtctgttctgacctagttaggccttgcccccgtggccttgttg

SEQ ID NO: 22739 - DNA, 122 bp, Homo sapiens
gtgggggagcagcggaagttcctagcgcagcgtgggggtgctctgtgcacagataagttgcgggccgcgggaaacaggaccctggggggccccctagagcctcgcggagcggcttgcagagg

SEQ ID NO: 22740 - DNA, 122 bp, Homo sapiens
gagggctgagccaggcacgccatctttccttcattccctcaacacatattggttaagttccggccgtgctaggcacgggcatacagctgtgaccaaacacgtcaagtctttttccagcggag

SEQ ID NO: 22741 - DNA, 122 bp, Homo sapiens
actgcgcttccggtcgccgccaccccttagctcccagctctctctgcggctcttcaggcgcgtcccgaaactacaactcccgtcacaactcgcgattatgacctgagggtcccattggtcgc

SEQ ID NO: 22742 - DNA, 122 bp, Homo sapiens
caagtggaactcgcggttaccttcctccactccaccctgcctactccgctcgggcccggacgagtccaggcgcgctccccgtccccgccctgcccaggtctcccgcccgcctgcccgggggt

SEQ ID NO: 22743 - DNA, 122 bp, Homo sapiens
accagcttccctatctgtcttcccacagtgcggctgggatccggcggccacctgcacctgcgtatctctcgggccgcccttcccgaggggctccccgaggcctcccgccttcaccgggctct

SEQ ID NO: 22744 - DNA, 122 bp, Homo sapiens
tgtgtttgctgaatgaatgaacaagtgaatgggtgtggagcctagtttgaggaatgctcccgattgtacgaggaactcattcctgccagctctaagctggagtgagagtgacaagcccatgc

SEQ ID NO: 22745 - DNA, 122 bp, Homo sapiens
ctttcaccacttgaactttcaatagctacaaagtcttgcagttacaggcttgtgccaactcgtcgggccacaccacgttcccctccccctgccgctgcgccccgaaatcaactgcgcgccgc

SEQ ID NO: 22746 - DNA, 122 bp, Homo sapiens
gtgtttgcccaacccttacttggaaagttcttttccactagtacccagctcaaatcccaccgcctttgtgacactcgtttattcgatatatactaacgtttcccttttcaaagtattctatt

SEQ ID NO: 22747 - DNA, 122 bp, Homo sapiens
cacgtagcgccggctgcgcgacagggcgcgcgcgacgctgccgacggcgcatgcgcggtccggcatgccgggcggaagccccatttgatttctaatgctatttatttatgtatcccttgtct

SEQ ID NO: 22748 - DNA, 122 bp, Homo sapiens
ggggcgggggcaggctagcgggaggctctccgtgaggcacggagggtgactggggacaggcgggcggcgacgggcttgtcatggggatccgggctgcgagacggcactcgtagcatctgggg

SEQ ID NO: 22749 - DNA, 122 bp, Homo sapiens
ggtctaaagccagctactggtctctcagtctcgcttgtttggagcttttttcctgactctcggagcggaaccactaacctgccctacccggtaaggcatgcagaacgagtccccgaaaagca

SEQ ID NO: 22750 - DNA, 122 bp, Homo sapiens
ccgcccgcccgctggccgggctgtcaccgtctcatctgcataggcgcccgcccattgggccgcccacccgcgccttatctgcatggccacgcccccggcgaccgagcaacagccgcctattg

SEQ ID NO: 22751 - DNA, 122 bp, Homo sapiens
tgcaattcggggactccttgcactggggcaggcccccggccaggtgcatgggaggaagcacggagaatttacaagcctctcgattcctcagtccagacgctgttgggtcccctccgctggag

SEQ ID NO: 22752 - DNA, 122 bp, Homo sapiens
gagagtgtggggaaacagaagaagtcagggtgaccttggtgagcactgccctgggggactcgaggatggatgaaagcagggaggaggccagattaggtggggtagaggacctgaggtccatc

SEQ ID NO: 22753 - DNA, 122 bp, Homo sapiens
gagttatagataagaccctattttcgaaaacaaagtgttaaatccccccacccccacccccgggccccgtgttaccttttgaaaggttgagcgaaagtgagaatgcaaggttttcctgaacg

SEQ ID NO: 22754 - DNA, 122 bp, Homo sapiens
agagccaggccgggtggaaaacaaaaagagaagaagtgattatgaaataataagacggaccgtgtgccccttgcaaggtgcggcctgcgaaatcaacagacttataaataaggtctggtgga

SEQ ID NO: 22755 - DNA, 122 bp, Homo sapiens
gtcccactgccatgctcatctgcatatgtatggtttcattcgtctcattttgaagaaagacgccacagagctgagataccaggtttgggttctgtgcctcctggtcaccactgtggagacaa

SEQ ID NO: 22756 - DNA, 122 bp, Homo sapiens
catctgaattgataatggcagaacggacacctgtccttcaacaccagtactcagttgaaccgtttgtatttgccccagtccctgcagagagagatgagtgtcggacagatggctcacagccc

SEQ ID NO: 22757 - DNA, 122 bp, Homo sapiens
tactgaggtgaggacccctagtggagacgaagggaccagcaacgctagaacagtgacgtccggtagcgtccagccgtcagccctcagacgccacgggctgccggatgtgagtcatcctgact

SEQ ID NO: 22758 - DNA, 122 bp, Homo sapiens
tcagatactcgaaatatgaatctctttttgaaaagagaagaaaatgccccaagccacaggcgtttctggaaaataaacatttctaccgtgattgagtcactacgacagaaaaaggtgggtag

SEQ ID NO: 22759 - DNA, 122 bp, Homo sapiens
tcgggaacccgcgcggcgccgcgtccatttttaccccagctccgctaaaaatagttgccgcgctccgagccgagcccgaaatagcggcccccagataaggcaggacgactcagcgcttccgg

SEQ ID NO: 22760 - DNA, 122 bp, Homo sapiens
cctgcttaactctgatcttttaactcaatgggagaatctacagggaaattccctggacaacgctgcattgtctttgtttacacatggctcatatttaaagaatgattctggtaagtattgtc

SEQ ID NO: 22761 - DNA, 122 bp, Homo sapiens
ggagagagaggtgggtctcttctggccccagtgagtgtggtgtcctgctccagggtgtcccggggctactttccctgtaaaggcgggacgcgggaggatgagacaggtaaagaccctctctg

SEQ ID NO: 22762 - DNA, 122 bp, Homo sapiens
ggtgaatattactcattttccctcaagagaagctcataagtgtgtgtgggtgtgagagcacgatggtgcctgtgttctgtgaatgtgtccatatgtgtctgtaagagagacagagaccaaga

SEQ ID NO: 22763 - DNA, 122 bp, Homo sapiens
tcaacctagacattcatctctagatctgtcccactaccctttcagctcgatttccccagtcgcgccagttagacaaacacacaaacaaataaacagagtggggtctggggcctctctccaaa

SEQ ID NO: 22764 - DNA, 122 bp, Homo sapiens
gcctctgcgggcgtggcctgccgggagccagcctctgtcttctcaaactctactcacgtgcgtccgaggccggcacactgagtaactgcactgccctcgctcgtaaacttcagcggcccgga

SEQ ID NO: 22765 - DNA, 122 bp, Homo sapiens
gcaagctctctgtgagtatcaaaccttgtcttggacccagtccacactcagcaagggatgcggtatgtgtgtgcatgaccgtgtgtatccgttttgtgtgtggcaaatcgttcacgggtccc

SEQ ID NO: 22766 - DNA, 122 bp, Homo sapiens
gccgaagtagctgcccttggggccgctgtacactgtgagcttttccacgtccaggttgaacgcctgacaggcgggggaccacagcaacatccccagcgcggccgcggcgcagcagaggggcg

SEQ ID NO: 22767 - DNA, 122 bp, Homo sapiens
cactgtaaattccaaaattagacctgcgccgcgaagaccgcccaccagcaaaatgccaagcgtatttctttaaaaactggaaagccgtgtttcgctgctcttcctgtagacaatacagcatg

SEQ ID NO: 22768 - DNA, 122 bp, Homo sapiens
ggaaaatgagctgccaagggccctgcacatccggcctctgctacaccaggagtttggggccggaagctccccagtgccccattggtcctgggccgcatgaagtgattcagagctacagggtc

SEQ ID NO: 22769 - DNA, 122 bp, Homo sapiens
tataggttcaagcggcttttcaaccacagagggctccttgcattccctatcgcctaccaacgggatcacagcaagactggggctggggctgatacaacgcaattttcctagcctcgcttgtc

SEQ ID NO: 22770 - DNA, 122 bp, Homo sapiens
gctttgaaggccgacaccgagacccgccgtgcacgacagccacctcgcagccactcagaccggcggaccacgctcccctgtttccagagagatgagagagtcagaagtaatacttgtttttg

SEQ ID NO: 22771 - DNA, 122 bp, Homo sapiens
tctttttacaccccacgtctctgcagtcaacccggtgtgactatagagtgaagcacgctacgcataatccgtttggggattccgaaccccagtggctctgtacgcacccaggtcgctggagc

SEQ ID NO: 22772 - DNA, 122 bp, Homo sapiens
acccgctgccgttcgcgaaccctagcagaggactcagccaccgccggggggagggtgaggcggccgggggcattaactgacctctgagtacagcaataaaataacctggggatcttttgtgt

SEQ ID NO: 22773 - DNA, 122 bp, Homo sapiens
catctccggagctcgccccacacaaagcctggggtcgagagcccgctcacacatacggcacggcccaccttgctgttgctttatttttaaatatgaaatttgtagtgacaaagattgcccgc

SEQ ID NO: 22774 - DNA, 122 bp, Homo sapiens
taatttttgtattttgagtagagatggggtttcaccatgttgaccaggatggtctccatccgtgaccttgtgatccgcccgcctaggcctcccaaagtgatgggactaccagcatgagccac

SEQ ID NO: 22775 - DNA, 122 bp, Homo sapiens
caccttgataatcccaggcttcttggctaatcttagcgccttggcccagagcagtcacatcggcaaaaaattcccgcccacttctcctcccagttccacccctcacagcagctgctcacatc

SEQ ID NO: 22776 - DNA, 122 bp, Homo sapiens
cacagtcacctcccctaatagaaccctggggagtttaatccccatctcacgactgcttcccggaggagccggacgcacacttggctgtggatttgttctccagccacgctcagctccagccg

SEQ ID NO: 22777 - DNA, 122 bp, Homo sapiens
gctaaggctgctggaagtggcaaactgggggaagaggatggcaggagctaggttcctccacgacacctccagagacctgagggcctcaagctgcagctccggggcacatcccgctgcgctcc

SEQ ID NO: 22778 - DNA, 122 bp, Homo sapiens
gaggccagtgctagaaaggcacatcacctgacttattctgtgcctgattctacctagatccgtgcaaccactggcttctcagggggacccttgagtactgggcactgatgaactgctgccaa

SEQ ID NO: 22779 - DNA, 122 bp, Homo sapiens
tggactttgccgtgaggggtggccagtgctctgggtgcctttgccagacaactggtctgccgggccgagcattcatgctggtcgccatcacgtgactcccatgcgccctggccctggggttg

SEQ ID NO: 22780 - DNA, 122 bp, Homo sapiens
tgtgtagtattccgtgtgggaaatatcattagtctatttaccaggacataaaattaccagcgtatttattagaaaattagactcagtcagttgtcttccttttttccctgagagtgttccct

SEQ ID NO: 22781 - DNA, 122 bp, Homo sapiens
cctcgccttctacttgtcagcgttgtactacactctgagcaggcacccctgtgctactcacggaagcgggaccattaggtcggccattcctcctcaccccacgacacgcacccactgggtcg

SEQ ID NO: 22782 - DNA, 122 bp, Homo sapiens
cggctgctcgagggcgtcccgccgggtggggtgttgcggctctgggagggatgtgaggcgcggcccagagctagggggtgcggggcctgcgggtagagcgcggggtcctgcggacgcattca

SEQ ID NO: 22783 - DNA, 122 bp, Homo sapiens
agtgatgaggccagaaagtgatgtcagctgtgcggggaccactctgggccttctctgcaccgccatagataaccccacctaggaaaccccttcagaggccctggaatacaaagactccttga

SEQ ID NO: 22784 - DNA, 122 bp, Homo sapiens
ccatcctcctcttcctcctcctccccagagccattaccccaggtggccccagccacatcccgagcaatcttctcccgccagctgctcaagtccactgctcaaagaaggagaagattaaagag

SEQ ID NO: 22785 - DNA, 122 bp, Homo sapiens
gggactggagaaggatcaacaagaatacatggaagaattagcctcctgggtcagacttatcggagtcctgttttctcagggattgagtgggagaagttgtaaggagaaagacccagaacagt

SEQ ID NO: 22786 - DNA, 122 bp, Homo sapiens
tccgtccctgccacctcggggctgaggagccccctaagctccctggatccttgacctccacggctggtccacaccaccaccagaacaggcatccagacccacaggctgatcaggggagaaga

SEQ ID NO: 22787 - DNA, 122 bp, Homo sapiens
cttctcccttagagccgggtgttgctgggttgtgtgctgatgctgtgaaaccgcagcggccgggagactgtcctggctgcgggggacccctcactgcctctcccaccctacattgagcctca

SEQ ID NO: 22788 - DNA, 122 bp, Homo sapiens
cgcgcctggcatggatggcacacaggttggtgtcttcaaagagctgcaccaggtaggcctcgctggcctcctgcagggcgccaatggccgcactctggaagcgcaggtccgggctgatggcc

SEQ ID NO: 22789 - DNA, 122 bp, Homo sapiens
gggtcagtttgatcggcaaagtacgcctctcttgcttcctttccttctggcactttcccccgttgtgtcctcggtgcttttgcttgcaagagaaaatatcttagtgaggagggcaggtttgg

SEQ ID NO: 22790 - DNA, 122 bp, Homo sapiens
tgctggtagacatgtaggaccagacggtagccgaagcccaggagagccaccacacggccccggttgatgccactctcaaacaggctggaggcgatcttggtgaagtactcgtaggcgttctc

SEQ ID NO: 22791 - DNA, 122 bp, Homo sapiens
tgccctctgtgagcgaatctggcctggccctgggctccaaattctgcatgtagcttctcccgggcgcgggccgagccgaggtggatgaggagagtcctgggcttggcggggccccgcagacc

SEQ ID NO: 22792 - DNA, 122 bp, Homo sapiens
tgcattgtctccctcattcagctactactgtcctcatttcacagatgaacaaacaaaggccgatctgccttgtcgacctctgcccaccaccataatccacaggggtactgcccgctaggggg

SEQ ID NO: 22793 - DNA, 122 bp, Homo sapiens
agcaagacggtggaagccatcgagatcgactgttacaacagcctggcaggtgagccgcgccgcgccccccgcgccgcggtccccgttcttcggcccggtccctccgcggaccactgcggcgc

SEQ ID NO: 22794 - DNA, 122 bp, Homo sapiens
tgaggtcaacctgtgctaggagctctcaaagctcctcaggtggccaggtgtggtggctcacgcctgtaccccagcactgtgggaggtcaaggcgggcggatcacgaggtcaggagactgaga

SEQ ID NO: 22795 - DNA, 122 bp, Homo sapiens
cagggagagagaaggacgactctcaggataacagttcacattccccactaggcaggcgctcgtggctttgggattcgttcccagtgggcacctcggagtggcaacgcttccccctgaagaat

SEQ ID NO: 22796 - DNA, 122 bp, Homo sapiens
tcttccgaggttatgtaggtcagtgtttaggacaaaaataaagtgacaacttgagcataccgtggatcgagctgcaatgataattcagaataggagaaactcacattccatgttgacaccct

SEQ ID NO: 22797 - DNA, 122 bp, Homo sapiens
cctgggaaattctccatctcaggaccagaagagctggggtgcactacattttgcttgcctcggttatgctgtttgtctgtgcggacactgctgaagctgtctccaaatgccacataggctca

SEQ ID NO: 22798 - DNA, 122 bp, Homo sapiens
ctcctggtgtgccgttttttaagcccgttggaaaagtgcagtattagggtcggagtgacccgattttccaggtgccgtctgtcacccctttctttgactaggagagggagttccctgatccc

SEQ ID NO: 22799 - DNA, 122 bp, Homo sapiens
aactaatttaattgacacatgaatgatactttttttttttttttttggtcttttaaatcacgtctgtgtcttctgccaaagacaacaagaaggtattccaagctgcacaatgaggcccaggt

SEQ ID NO: 22800 - DNA, 122 bp, Homo sapiens
taactcacgacaagaaaaagatggcttgtaacataagcacaccaggtagacgccacaggacgactccttcctaaggggaattcatagcatgcgatatttattcataattgtttggagaatca

SEQ ID NO: 22801 - DNA, 122 bp, Homo sapiens
ccccccccccaacccgccccactgcccctgcaacagaaagaatggtagttagaccggggtcgggacaggacttctgcagcaagaaggcgcttaaaaagcgggacttttaagcgagggtactt

SEQ ID NO: 22802 - DNA, 122 bp, Homo sapiens
cagatgtaaaacgacctgctcccccaggtgaatggattctcgccagggccaatacttatccgcaggggtgtgtgccaggcagcccaggtcagcctccctccaccgggccacccgcaccaggt

SEQ ID NO: 22803 - DNA, 122 bp, Homo sapiens
tgctttatttatttggcttcatgacccagattagatttcctgttctttcaacttgtaatacgtgtagctcacactcacacagaatttggggtagagtgtaatgatcctcccatccattcaca

SEQ ID NO: 22804 - DNA, 122 bp, Homo sapiens
ctccgagggcggccagggacagacgcttgcgccgagaccgcagagggaagcgtcagcgggcgctgctgggagcagaacagtccctcacacctgggcccgggcaggccagcttcgtgctggag

SEQ ID NO: 22805 - DNA, 122 bp, Homo sapiens
agagaccggacgcgggagctgcgggtgggccaggtgtccagccttgggagccgtaggagccgccagagccgccagagccgccggcgccccgccccgcctcctccggccgctctcgccggctc

SEQ ID NO: 22806 - DNA, 122 bp, Homo sapiens
caggtggagcacaagggggagagagactgagccctcccttggctcactgtccccttctgccgccagccctagccagtaagaggtgggatttctaagaccgactgtatgagctcgcctcttcc

SEQ ID NO: 22807 - DNA, 122 bp, Homo sapiens
tctggggacgggaggcaggggaggcccccgcaggccggccaggggctgggggctgggggccgggggccggccgccgggcacctggggccctctccctccccaggcaccaccctcaccccgca

SEQ ID NO: 22808 - DNA, 122 bp, Homo sapiens
caggtgctgtgaaggcatccagcctgtctcaaggggccaggtgctggtctctcttggtgccgcttttcccatgcagtgctgctggcgtgagttccctgtgccagacttcccaccctcagcag

SEQ ID NO: 22809 - DNA, 122 bp, Homo sapiens
tcagttgtttaacttcgtgaccgtgtggctgactgagagctgtgaatcactgacattgcccggcattgtcagagactatccgaccgcatatcgctagcccaggataagagcagaattccaga

SEQ ID NO: 22810 - DNA, 122 bp, Homo sapiens
ccacggaactttgattttatgcccgggagcccggtcatccacttctgcatctcagacaagcgccggaggctcgtgcagcttcctcgcgtcctcttcctggacgcggggcgcccaccttagtc

SEQ ID NO: 22811 - DNA, 122 bp, Homo sapiens
cgcgcctcgggctttggctcccacaccgcggcccgccaggcctcgattcaacccgcgcgtcgcacggtgaaactgagggcatccccagctcaaggctgcagacgctactcgggggtacgggg

SEQ ID NO: 22812 - DNA, 122 bp, Homo sapiens
gctcccactctccctagatcctccatgaaaaagaagaggctcgaccccgcacctcctcgccgcagagccgttcgtatacagcctccagctcctgcagctctgtcagggagcgaatgagctca

SEQ ID NO: 22813 - DNA, 122 bp, Homo sapiens
ggtgtggggcacacctggatgtatcccgataggacctcctcttgtggaggagcaggtgggcgcggctcaggaaggggaccttccaagagagagaagctgctagggggacgccccccacaggg

SEQ ID NO: 22814 - DNA, 122 bp, Homo sapiens
tcttccgtggccaggcccaccagggcatggaagctcaggtgcaggtattttctccagaagcgtcggtcctgcccgtacacctgggccgggtagcaggggcttcctacggtggagccaagaca

SEQ ID NO: 22815 - DNA, 122 bp, Homo sapiens
ccccaccgccccagccgccttcttctccccccccagcccattcggctcaccatcaggccacggcttctccagaaaggttggaaggatgggagctgttgttgcttccacaaaggtctgtgaca

SEQ ID NO: 22816 - DNA, 122 bp, Homo sapiens
aagtatttccagcacaaacttttccatttgaatacattccaagcactattgctaggatcccgtattagagtttgcttttggctgtttcaacacgggcccttaattaaattttgtgaggatga

SEQ ID NO: 22817 - DNA, 122 bp, Homo sapiens
tgatttcctgccactctcatctccggagtggcatcacccgggtctgattggacgggagtccgctccgtgacagtgggcgggctccggggctggacacttgcccagctccgggactcccggct

SEQ ID NO: 22818 - DNA, 122 bp, Homo sapiens
gttctctgctgaaaacctaggcttgttgctgcttcagggtaattcccagatcggaacaggcgctgttccgctgacagaaaagtctctggagcccaccccgaagccatcagcagaacttgccg

SEQ ID NO: 22819 - DNA, 122 bp, Homo sapiens
taccttgctggttaggctgtgaagactctcctctgcccattttatacttgacttcatgctcgaattacttgcttttaagtgaattaactgatgttgagcacaaatgtatgcgagctgcagtc

SEQ ID NO: 22820 - DNA, 122 bp, Homo sapiens
aaaaatagccaaatgtagggaaaaggtcaccgatgtgtcagctgctgcctgttctgggatcgctggtgctccgggcggcatccccacctcagggtcgtcttcatacccccatcactctcctc

SEQ ID NO: 22821 - DNA, 122 bp, Homo sapiens
gaggaatgggaaatcccaatgttgtgactgctatcactcaagagtagcttaggactgccacgtaagatagggacccctggccctatccataaagggaagggctcctaagaagcactggttct

SEQ ID NO: 22822 - DNA, 122 bp, Homo sapiens
attgaagctctctggcttcctctgcagtctggcaggtgcactggccagaaaggggctcttcggctgaatgctatgagtccgcttcagtaagagaagaaaggtggaaaatgctctgggatgag

SEQ ID NO: 22823 - DNA, 122 bp, Homo sapiens
acagcaaagcggaaatcagcttttcctgaacatgtactgaattctagtcacattcacacacgttaattcatttaattccagccacaaggtaggcagcctctgttaacattttacaattgtga

SEQ ID NO: 22824 - DNA, 122 bp, Homo sapiens
gtgcggtgcaaatgcctgtttgtgcaaggctccgagcggctgaccttcccctggctgtgccgcaggtgcagaacaagttggacggctgctgctacgcagtgaagcgcatccccatcaacccg

SEQ ID NO: 22825 - DNA, 122 bp, Homo sapiens
tcctatttatttatacattaaaacactgcagccagagcggcgaggtgtcccgccaagaaacggccaaatccagtttcctccccagccagcctctccttagaagcggcagaaccgcttcaacc

SEQ ID NO: 22826 - DNA, 122 bp, Homo sapiens
atagtaaatattttaggttttgtggactttatggcttctgtcgcagctactcaacttcaccgttatagcatgaaagcagtcatagacaatacataaatgaatgagcgttgttgtgttccagt

SEQ ID NO: 22827 - DNA, 122 bp, Homo sapiens
aagactttcagaggggaggatgccaaggcctgcagggggtctgggtgaccacagacccctcggtccctcccaaccccagagcagctggaagtgaggcccatgggggctgccccacagcctgg

SEQ ID NO: 22828 - DNA, 122 bp, Homo sapiens
aataatgacttaaaaaccttaaggaaaggaacatgccataaggctgttaagtgcgaagcgcgtttcagatagagggaagagcacatgcaaaaccccaaaccaagagtgtgcttaacagaata

SEQ ID NO: 22829 - DNA, 122 bp, Homo sapiens
gatatccttctagttctttcccttcctccccatacagggtgacggtttttgccaaggctacgcctgtcccaggtcttgtgctatggcaagctccgggtttatcccaggcgcccgcagtgcta

SEQ ID NO: 22830 - DNA, 122 bp, Homo sapiens
ggctctttaaaacagatgttgcaacaagcaaacatctttgtgatgacacagtgatgttatcgtagctgtataaacaaccgtatggcctttggcctgagattccggaagcttcctgaagagca

SEQ ID NO: 22831 - DNA, 122 bp, Homo sapiens
aaggaacagggagcctgcagcacacgagggttagacaggctgccctgggctctaagccttcggcccatttgggcagctggagactggaccagatgatgctcagccactcctaccagtgctga

SEQ ID NO: 22832 - DNA, 122 bp, Homo sapiens
agagcaagtcccggagcgggctggtggttggagagatggtggggccaccattgttgtgcacgcttattacaagccaggcattgtgctgccttctgcacacattatctctgtgtcatcacaac

SEQ ID NO: 22833 - DNA, 122 bp, Homo sapiens
gggctccgaaagtcgttcatttccattggtccgtgtgcggaccttgcgttttcagcaatgcgtacgtaacaacaccgactcttgacttgattggccggttctgaagccatattaggaccaat

SEQ ID NO: 22834 - DNA, 122 bp, Homo sapiens
agtgatgtgggttctccactggagggggggcggcgcggaccagcgaacgtcagggagtttcgggtccaacccacccgtaagggtcgggtctacaggaaagtcctgctgccactctagcggag

SEQ ID NO: 22835 - DNA, 122 bp, Homo sapiens
caagtgggaccttttgtgtgtgtgtcttggaggtgggagatttaatgtaaacacagaccacgtttgtgctttctgttatacacatcctgcatcaccacacactgagcacacatgtgttaaaa

SEQ ID NO: 22836 - DNA, 122 bp, Homo sapiens
gacctaaaaccctgaacctccttccaggagagctctgaagacctggaaccccctggaagccgaagggggaattctgtggctcagaggaccccacctagaggcatgaatctcgggagaccaaa

SEQ ID NO: 22837 - DNA, 122 bp, Homo sapiens
gatccgtgcggtggccggagcgcagagcgtggcctgtgaccaggaggcgggcgcgctctacgtgatccaggagggcctggagaacacgggctgcacgctggtcttcctactgctctactact

SEQ ID NO: 22838 - DNA, 122 bp, Homo sapiens
agtgacagcctgagggagctgagcgcagcatggctggtctggcagctgctgtcggtgtcgcgaccccaccccacttccccggctccctgcctccttcgctggagaagcatcctcagccaatg

SEQ ID NO: 22839 - DNA, 122 bp, Homo sapiens
ccgtctcaagaaaaaaaaacaacacaacatggatggtgcctggctcaaagtaagggctgacggctgccaacctccaatggtggtctctgccatcagcactcctggaccacgcgtgccatctc

SEQ ID NO: 22840 - DNA, 122 bp, Homo sapiens
gctgcccagacgcccagcgctctgagcgcgcggcccaggctgcaccagtctgctccgccgcgccggcccctttgtctaggggcgagcctgttgttgtggctgctgctgttcaggatgtcccg

SEQ ID NO: 22841 - DNA, 122 bp, Homo sapiens
aaggaggccaggacttgaatacaagcaagaaaatggcataaaatgaaggaattagccactcgaggttgaaaacacacttccctaaaatgacagcagcatttggagctgcaggtgggagcaca

SEQ ID NO: 22842 - DNA, 122 bp, Homo sapiens
ggagcctaggatgtagagctgcatactaccattaggaggcgcaccctcaggcctcggctccgcgttctttatgtctctggaccgctctctctcgcagctcatctctatggtttccgttgggt

SEQ ID NO: 22843 - DNA, 122 bp, Homo sapiens
tgagttgaaggaatgggatatggagccacatccacttccaccccttggtatctggacccacgtgttcttcctactgagattacagaactgtagagatgtctttgatttttaaaatgcaccat

SEQ ID NO: 22844 - DNA, 122 bp, Homo sapiens
taaaaaacacagcacataaagtagtatatgcattccagtgttcgcgccagagacggcgggcgcccaagtaaaagctcttctaaaacggcctgactggggcaggccgggtgcgaacggttccg

SEQ ID NO: 22845 - DNA, 122 bp, Homo sapiens
cgcactcctatgagaatcaaatgctgccactggtctgaaggaggcggagctcaggcctaacggagcgatggggtgtggctgtaaatacagacaaagctcccctgtcttgcccgccgctcact

SEQ ID NO: 22846 - DNA, 122 bp, Homo sapiens
cgaaagccaagggcggatttacattataaagacgctgacccatggcctctcctgacaaaccgaaagaagccggctgttggctggccgcggcggtggctccgagaaggggctgccccgcgtgg

SEQ ID NO: 22847 - DNA, 122 bp, Homo sapiens
tttttttttttaaatgggcgaatacctgtttaagttttaaaagcacatggaaattgcccgcgagcgaccatataatttgatttgccaggcaatctgcagagcgatcgcacgtcatttataat

SEQ ID NO: 22848 - DNA, 122 bp, Homo sapiens
gctttaaggtcttagacctctgggatgggaagccccttcctctgggaagctttcctggagcgtgccccactaagtagctccagcagtgtcagtgggcctcccatacagaacctccttggctt

SEQ ID NO: 22849 - DNA, 122 bp, Homo sapiens
tcggagaaacagaagctgcgggctcaggtgcggcggctatgccaggagaaccagtggctgcgggatgagctggctggcacccagcagcggctacagcgcagtgaacaggctgtggctcagct

SEQ ID NO: 22850 - DNA, 122 bp, Homo sapiens
attaagcatattccttgggcgcttactgtacccaagcgcagtgctaagggcaggtagagtcggtaacctgggtctgtccctgacctcaaggcactgccagtctaatggcgggtaggcgggga

SEQ ID NO: 22851 - DNA, 122 bp, Homo sapiens
tcttaagtaaacctggccttctgcaaaattccacacaggtcataggacgcaggattccaacgtgcaccctcccccagcccccaggccgcctcagctcccggggatctgactttgagaaccac

SEQ ID NO: 22852 - DNA, 122 bp, Homo sapiens
tgtctggttcctgctgtttcttctgatgggcgcggcggtgactgagggtgtcctgcgagccgtcggtgagcgctcagctgtcctggtctgcaagttcctactgacatcacaacctgctgctt

SEQ ID NO: 22853 - DNA, 122 bp, Homo sapiens
gggagccaccattatggtgaagaggaagagctccgagggccaggagcaggacggcggccgcggcatccccctgcccatccagaccttcctgtggcggcaaaccaggtgaggggcgcagaggg

SEQ ID NO: 22854 - DNA, 122 bp, Homo sapiens
cgacagggccccagatccgccattaaactcgcccagatcagcagcaaagagtaaaagccgcgcagcgcctgggaaaagatgagcgaaggaggggacccagcggggcagaggcagaagccctc

SEQ ID NO: 22855 - DNA, 122 bp, Homo sapiens
tgcccagaggccggtgaggggctcttgtccagcatcctggatggggatatgatgttgcctcgtccatagtcctgagctgagggtgtctgctgggcctttgagctgggagaagcctgcaccat

SEQ ID NO: 22856 - DNA, 122 bp, Homo sapiens
ctcgggaggctgaggcaggagaactgcttcaacctgggggatggacgttgcagatagccgcgatcacgctgctgcactccagctggggcaacagagcgatactccatctcaaataataataa

SEQ ID NO: 22857 - DNA, 122 bp, Homo sapiens
tcttccaggctccgtagtggggctgacgtggccatggtatccttagttcagagaggtctccgttcactggtgaggacttcttctccttggagacgcgacatagagtcaggagcaagcacagt

SEQ ID NO: 22858 - DNA, 122 bp, Homo sapiens
aagggcaaatgagaacactgaagggcttcaggtaagcaagagacattgtgggaggatttgcgctttagaaggctctctctggcagctatggactgaggagtcacagtcagcagaattagtta

SEQ ID NO: 22859 - DNA, 122 bp, Homo sapiens
actcgctaaacaaatgttagccatcaaacctgccactgcctgatgttcctaacggccccgcgtgttaggcaaggggtatcattgttcccatggtgcacttgggaatgcgaaggggagccact

SEQ ID NO: 22860 - DNA, 122 bp, Homo sapiens
agacactccggccacagcacacagttcctcagaaagtctgaggaggggtcgggatctgcccgcgaaccccactttgaaaaacatcgctcaaggggctcacactcctcttccgaagcgggaag

SEQ ID NO: 22861 - DNA, 122 bp, Homo sapiens
agcattctcctatctgtttcatcttgtaccacgtgggatttgatgttgtgctgacagcctcggcttggggatttgggcagggagactggggagaaaggactagaaacagtaaaagaacaaag

SEQ ID NO: 22862 - DNA, 122 bp, Homo sapiens
aggatcggctgcttgccatggctgtcatccgcaagaagcacggaatgtgaactggtgccccggcagcctgctggactcccagaccccatccagccaggggaccgcaggccattgttgaactc

SEQ ID NO: 22863 - DNA, 122 bp, Homo sapiens
gccatatgcttacttcctttatcctcccatcagctctgtgaagcacccaccactttagtgcggaggaagccgagccttagagaggtcaaggcctttatttcagcctcccagccagcaggcag

SEQ ID NO: 22864 - DNA, 122 bp, Homo sapiens
aacagagccagcacatgcttctcccgtacccttctctccatcaggtggccaggaatgttccggatccccgtggctttgccatggatatctcatttgaacaagaagtaaccccccccccagaa

SEQ ID NO: 22865 - DNA, 122 bp, Homo sapiens
agccagggagccctgaaccagagggtcaaggacccctggacggagtattccccgggctcccgggacacaacaagatcagctgggaatgaatgggtcctgggcttttgggaatctgagtgggg

SEQ ID NO: 22866 - DNA, 122 bp, Homo sapiens
aactgcatttgtctcccaaatgtcttaatcgtgtcggaaatctcgaataaaataaagtaacgacacatcttcagtcatttcatataacacactcctgtgtttttaaaagctgtcaacctcca

SEQ ID NO: 22867 - DNA, 122 bp, Homo sapiens
gggtagagaggagggacgccatccgccagccgtgtcgtccgaccccgcgggcccctcccgcgccacgtcccgcccctgacccccgccccccggcaagggtccccgcccgcggccacggcggt

SEQ ID NO: 22868 - DNA, 122 bp, Homo sapiens
aggaggagttgggggccgaaaattctgtcgctgcatatcaggagccaaagccgaaaacctcgcagccgcgttctcccaccggaactgtatcaaccggccctccgcagagaactgctagtcct

SEQ ID NO: 22869 - DNA, 122 bp, Homo sapiens
actgcttttatgagctgtaacactcaccgccaaggtctgcagcttcactcctgaagccaacgaaaccacaagcccacctggaggaatgaacaactccagacgcgccgcctgaagagctgtaa

SEQ ID NO: 22870 - DNA, 122 bp, Homo sapiens
cgccatgagcacacagcaggctgggccctgggtggcctgcgccgtcactcctggaagcggcgcgcctgtcgggagggacgggctctggactcctctgtccttgctgaggggagtgacatgca

SEQ ID NO: 22871 - DNA, 122 bp, Homo sapiens
cccaacgtctggtagtagtctttacccatgaccccctcctgcggcccgccgacccgctgtcgccgtcccccggctccgccgccgaccagtcccggactctatatacccgtccggcggaagct

SEQ ID NO: 22872 - DNA, 122 bp, Homo sapiens
aagcatcgccaccaccacccccttccttgaccatgtggtctgggtggaactggccggccccgcccaggcatggatctcaggcagtgctggacagagatctgctggctgtgtccctgacacgg

SEQ ID NO: 22873 - DNA, 122 bp, Homo sapiens
atgcaccatcctagagtgcaccgtgagcccggctttccgctgatgcacagtcccagggtgcgccgggagccccgccgtccatggaggcactgtcccagggtgtgccgtcgccctgagccccg

SEQ ID NO: 22874 - DNA, 122 bp, Homo sapiens
cctcaggagttctcctgtccagttagaggttttggggtttcctccttacgctggtctcagcgacttcctgcggctcagaagcagcacaggctggacccaacccctgcctcggaaaaccactg

SEQ ID NO: 22875 - DNA, 122 bp, Homo sapiens
cgctctggactctactgcgcaagcgccttcattcattgcctaacctaagtggctaggtgtcggcaggctttgtgacagggacacttcttggcaccagtgacacatctccatacccacctggc

SEQ ID NO: 22876 - DNA, 122 bp, Homo sapiens
taagaatgacatacaaacctgtcaaacctgttaaaacgagctagactttcacactttcaccggtggaaaatgctgttccttcatgtcaactgaaggtaactttgatcacattttagtacatg

SEQ ID NO: 22877 - DNA, 122 bp, Homo sapiens
ttagcatttattgccttctttttgtcctttccaacttggagagggtccgggtgtggagcgcgcgtggatcggacgccttggtctgcgcggccctattcattcgctccccgggcagccgcgtc

SEQ ID NO: 22878 - DNA, 122 bp, Homo sapiens
gcgccctggctgctcacgtcctccgcgtagaatacgtggcagagcatcttgtagaggcggcggccgtggtcctggggtgccggcctccgtgccagccgccgccgcgccatcagcaccagcac

SEQ ID NO: 22879 - DNA, 122 bp, Homo sapiens
aagaccgagaaggagctgagggggcccccggcttaccttctgctgtagtacccagaacaacggcagcttcttcccccggccgggtcacgatgccctatttatagctgaggggtggggatgga

SEQ ID NO: 22880 - DNA, 122 bp, Homo sapiens
cacagccaccctgggctgccgcatttccatctcggtgggtccttttacacagatggcacccggtgaactcactcagtggagctgcctttccctgaagccattccttcacccggctgcagggc

SEQ ID NO: 22881 - DNA, 122 bp, Homo sapiens
gggcgcagccgctgacaggctctcagcgcgtgcgcggaaggcggagcccgccgggggtcacgtgttcatcgagacggcccccgcctccgcagccctggatccttccgctcccgcccaagcac

SEQ ID NO: 22882 - DNA, 122 bp, Homo sapiens
caaaaaaaaaaaaaatagccatttgtgctttcaatctctccgcttccggcctccacccggcgggaaaaaactcccgcacgtgggcctccacgattccttggcatgcgtgtcactctgggcaa

SEQ ID NO: 22883 - DNA, 122 bp, Homo sapiens
tcccgacgggcctcgcattcctggtcctccaccttctgccaagaccctgcccacgcttcccgcaccagccttaggtcccgaggtccccaactttggcgaagatcccgcctgggctccccgca

SEQ ID NO: 22884 - DNA, 122 bp, Homo sapiens
ttagccaaagcaagtcactccctatctcctaccacagtgagagggcagtgcaaaattacacggcaaaggtaattgttccaaggagaagggaagaattggggcttgtggaaggctgaataatg

SEQ ID NO: 22885 - DNA, 122 bp, Homo sapiens
ccttccgcagcttgtactcctcctccacctggcccagctcattcaggtggttgagccaggcggagacgccgagcctcttgtacatgctctcctcggggtgcgtctcggaggacggcagcttg

SEQ ID NO: 22886 - DNA, 122 bp, Homo sapiens
cgcgcatcggtttcccatcccatagcgcagataggtagggcaggtacacagggaggtgttcgaatgatccccgtttcacagaagacgaaactgaggctgggaggcctggggactggcccggc

SEQ ID NO: 22887 - DNA, 122 bp, Homo sapiens
ttaaggagcagtgattctttaagtggtgcttgatttatctaaacccgattaattagtgaacggtcatctgtttctcccaggaatttttaatgatcattaggcttttgtagttactgtgaaat

SEQ ID NO: 22888 - DNA, 122 bp, Homo sapiens
cccagaaaatgcaatattttgacacagaaaaaaacattaggatgagtgtgaaatcaaatacgattctggtttttgagctgacatttagtcatttggagccacatggctgtcccagggcctgg

SEQ ID NO: 22889 - DNA, 122 bp, Homo sapiens
gttacttaacctttttatgtctcatttttctcctctgtaaaatggagagaataatcatatcgagtccttggggccattggtgcagattaattaaactagctatggtgatgatgatggaagtt

SEQ ID NO: 22890 - DNA, 122 bp, Homo sapiens
ggcccgacctgggaaggctggcgaacgctaaccggagggtttttcttccagacttgattccgggatgttgagatctttattcgaaatagactagcattcgagtcgcctgtgatggagggagt

SEQ ID NO: 22891 - DNA, 122 bp, Homo sapiens
tcttctctcctggcagagcccgcggttcccttcaaaaagcggctgcaagatctggaggtgcgggagaaggagtcggccacgttcctatgtgaggtgccccagccgtccactgaggccgcgtg

SEQ ID NO: 22892 - DNA, 122 bp, Homo sapiens
gtcctgagctctccgcagagggtgagagaaggcgttagggaggttcgcagcagggttcagcgaaggtcactggacttcgtaggacaggtagcccggtgacgcccaggcccagccccagccct

SEQ ID NO: 22893 - DNA, 122 bp, Homo sapiens
caagtcgaagcgcctgtgagaggcgcggggagagtcgccgggcagggagtttggcagcagcgtctggcgttcaggaaaggggatgaggccacaggctgacgccggaagccacgggcctgtgg

SEQ ID NO: 22894 - DNA, 122 bp, Homo sapiens
ttgaaaggcattttgggtttgtcacaatgattagaggacaccccaggcatttattgggtgcggcccaggataccagacatcttgcagtacatgaaatagtcctacacaaaaagaacagttcc

SEQ ID NO: 22895 - DNA, 122 bp, Homo sapiens
ctgagtcaagtttgggacagaggttccttgctctccaggaactccagggctagctgtatgcggacttgcataaataacaagggctattccactgactttgtctctttttctcaggttgtcag

SEQ ID NO: 22896 - DNA, 122 bp, Homo sapiens
agtaggtgggaagaaacagaagaaggtatcatcggatgaaagctgagtctgaaatcacctcgagatgccaaaggccagaaagcagcagcctccaggccccaccacagatgagcctgcagaca

SEQ ID NO: 22897 - DNA, 122 bp, Homo sapiens
cctccaaaagccctacaattaatgactaaagtgacatgcactttaaccaggtttggcttacgtaagtaaatccaaaacgcctcttacacgaaacacacgaaaatgaagacttcaatatccaa

SEQ ID NO: 22898 - DNA, 122 bp, Homo sapiens
tgggaggagtcttctccccagccttagctggtttcatgatttctttgcgtctgtaggcaacgcggtaaaaatattgcttcggtgggtgacgcggtacagctgcccaagggcgttcgtaacgg

SEQ ID NO: 22899 - DNA, 122 bp, Homo sapiens
tttcgctctgggctgcgcattcatttttagattccggcctcctccctccccgccatctcccgcttctattcttagaaagcaaactggggtgtgcttgggcttcgcagggaagtcagacagaa

SEQ ID NO: 22900 - DNA, 122 bp, Homo sapiens
gtttctggctgagcagcctctccaggagtaaccagggcagcctccctgtcaatccatttgcgacttcatgcctcatttgttgggatccacagcgctactccaagttatggaccagcatgaag

SEQ ID NO: 22901 - DNA, 122 bp, Homo sapiens
agtctcgcgtttcctctcagtccaggtcatcggactccacctcctctcctaggtgagtggcggccccgggctgcctctgagtggctcctacctggctcaggtaccaccttctcttccgcctt

SEQ ID NO: 22902 - DNA, 122 bp, Homo sapiens
tgggggtggggaacggcctgagctttaggacagaaaggatggaaacttctttaaaaaaggcgccaccctctgactgcttttttgcgccctgcgcagcctcgctttggtgcagcttcctctga

SEQ ID NO: 22903 - DNA, 122 bp, Homo sapiens
gtgtgacttccccagtcctggaataaaagctgtgacaggtatcccccatgtggagagcaccgataagccagggaggactaggatgctgtgttctcatgggtattgggggtgaccagtacaag

SEQ ID NO: 22904 - DNA, 122 bp, Homo sapiens
gccttgaccggaaagggtggggcaacggcgagaaaggccgcgtcgagcggtaggtgcagtcgtcgctgtggtgaccccaggtcctgatgcgtccggcccagggccagccaatggcggtagag

SEQ ID NO: 22905 - DNA, 122 bp, Homo sapiens
cccctcaaggctccacctccaaataccatcaacatatgaactttaggattgagtttccaacgtatggaatttgggggacacagtcaaaccatagcactcggtatctgaccaccctcaacatc

SEQ ID NO: 22906 - DNA, 122 bp, Homo sapiens
gcactccgtggcagcttgaagccaggaaaagcaagccagggcaagcaagcaccacgctctcgcctggggagatgaggcctttagccccaagagtgaattcttcttcatacatagagttgttt

SEQ ID NO: 22907 - DNA, 122 bp, Homo sapiens
ccccagacaccacaatctggcgatgggatccagtccatgctatttctctcaaagatagaccggaacaaacttttggaaactcctgacatgcggatcaacagtccaggccaagccgttgagcc

SEQ ID NO: 22908 - DNA, 122 bp, Homo sapiens
cttcatcctctcctcccgatggagttgctggaggtctgcggacactgcctggttagcctccgggaccacagcgccgtgggctttccctcgtggtgtctgccttaaacttgggtgctatcaat

SEQ ID NO: 22909 - DNA, 122 bp, Homo sapiens
gtgggaaaaggtgctgcgaatctgccgtccagacctaaccgagaaggcatggcatgttgccgccctcagggcatgtgccgatggctcctcctgggcccacgcctcctcctgcgcccaccctc

SEQ ID NO: 22910 - DNA, 122 bp, Homo sapiens
agatcatccttccaaatatactctgtaagtgaggcgaaggtcgctgcacgcttgagtgcacgtctttccgcataggtaggacgctcaagtcttaccgggaggctctcctagagagcagcgcg

SEQ ID NO: 22911 - DNA, 122 bp, Homo sapiens
ggctgggctgctgccaggcctgaccggccacacagagccttggcgggccagcatgaggagcgggggcccggagtctcagggtcagacctgcagcgcctgtcctgcacccacgctgaagcata

SEQ ID NO: 22912 - DNA, 122 bp, Homo sapiens
tagtgtacccagatgccagccagtcactttccctgaggtttaaaagcgaatcagcagggtcgtgttgggtctttgacttggaaatgcatacatacatacataaagtaatgctgctgtctggg

SEQ ID NO: 22913 - DNA, 122 bp, Homo sapiens
ttgactgctgatattagccaacatctcttgagcatttgccttgtgctgggctctgtcaggcggggccgttatttcattcagtgcttactgcagcgctcttgggagggggatatggacccagc

SEQ ID NO: 22914 - DNA, 122 bp, Homo sapiens
cacctgctgcctccttggccaccctgtccacacagtagcccgatcgacccccgtggcggccgagacccaggcccatccgcagccctgagacctccctagggattgcacccagcagccagtca

SEQ ID NO: 22915 - DNA, 122 bp, Homo sapiens
atcactattcgcgggtcagcacagacggcccgtcctcgcccggcgtccaactgcacggcccgaggactctgtccctgcgcgtcccacccccggcacccggaacctcacggccactcactctg

SEQ ID NO: 22916 - DNA, 122 bp, Homo sapiens
tcaactatggaaaggagatctagggaacaccgtcttgaacccgccaggggttttgagtctcggacccaggagatccaaccctgaccaccctcccaggatgcagcagggggatgttaaatcag

SEQ ID NO: 22917 - DNA, 122 bp, Homo sapiens
cagctcagcccgacccctcctctcccgcttcctttccaaacccagcagcagccttggcggcgcagttaggctatagccccgcccttgcgccctgcccaccgtggcccggccgtgcctctact

SEQ ID NO: 22918 - DNA, 122 bp, Homo sapiens
gcagctccgcgccgccctggacaggttccgggactggcaggtccgctgtcccgactggttcgaatgtgagaacctctactcagcagatgaccaggatgccccgtccctggacgaagaggtgt

SEQ ID NO: 22919 - DNA, 122 bp, Homo sapiens
aggggtgatggtggggtctgggtggtgcttcgcggccccaggaggctttccggctggcctcgttgactaggcgtacagcagcgtctccgcatgcctcttgcccttaaaagtgttgatggatt

SEQ ID NO: 22920 - DNA, 122 bp, Homo sapiens
aatcctaataacaaagacttctcttctttccaaaagcatgcgttcctccccagtcctgcacggtaaaccacatcagtgtgggatggtaacatttcagtaagttatttgaatatcccaagact

SEQ ID NO: 22921 - DNA, 122 bp, Homo sapiens
ccttgtccgtgtgcccccaggactttgcctctacagcattttcttacaccccctccccagcgtgccctcagccaagtgctttggcccggtgcttcccgcagctgcacagagaccttggccac

SEQ ID NO: 22922 - DNA, 122 bp, Homo sapiens
atcaggaagcttcaaacgcagactggagtggtttgagtctaatttagccctcatttaggccgcaggtaccacacaaggtaaacacggcattgttataattaattacccctcaggccgcgcca

SEQ ID NO: 22923 - DNA, 122 bp, Homo sapiens
gggtcagccacgtggtttctctcagtgcccgagagcatctttgttttggctggcttgtaacgtcagtggaaatcggaaacctcgccctggcctgatgacggctgcagtttcccttcaccttc

SEQ ID NO: 22924 - DNA, 122 bp, Homo sapiens
gttttgttttgttttgtttagagagaaaaagtaagttgtgctgtgtttggtttcatgattcgacttctgaaataccatgttgggctttgcatatttgggttagtagaaacttttattttggg

SEQ ID NO: 22925 - DNA, 122 bp, Homo sapiens
ttggaatatttgctttcccctctctctactgcatttgtctattttcaatttttaccttagcgacctgattgtgacctatatgtcttatggcaagccctatgaaaaggaagtggggtataaat

SEQ ID NO: 22926 - DNA, 122 bp, Homo sapiens
ctttagacgctgccttcagggagcagtgaaagagggagggagagacagagagcacccgggcgggtctcccagccacgccaggcaggtgggcaggatttatgtgccaggtactgtgctggcta

SEQ ID NO: 22927 - DNA, 122 bp, Homo sapiens
gtcagtctgcaaggagctggaagacaattctcccttagtgaaaaggaaccctctagcacacgcaccagcgttttcctggacagcttctcaccagggcctcagagttgcgggtcacacatatt

SEQ ID NO: 22928 - DNA, 122 bp, Homo sapiens
cacatcatgcagcacatcgaggcggcccccgacatcatgcactacgccctgctgggcctgcggaagtggtccagcaagacccgggccagcgaggtgcaagagcccttctcccgctgccacgt

SEQ ID NO: 22929 - DNA, 122 bp, Homo sapiens
ataggcgtccccttaaacttcattagacactgaaacttggaatatgattccatgattctccggagtcgggttttcaaacgtcaaaacactcaaggtattcttgtttctttgttttgtttttc

SEQ ID NO: 22930 - DNA, 122 bp, Homo sapiens
gaacgtaaagccccatctctgcaaaaaaaaacacacaaaaaggccgggtgcggtggctcacgcctgtaatcccagcactttgggaggctgaggcgggcggatcacaaggtcaggagatcgag

SEQ ID NO: 22931 - DNA, 122 bp, Homo sapiens
cgcgtcatggagtgtgctcaggggtgcgtggacacctctgctgtggtttgctgctgggggcgatgggagcgcctctccgtcctgtgccctggtccaggatgctgacagcagtgagaggcctg

SEQ ID NO: 22932 - DNA, 122 bp, Homo sapiens
tagagacggggtttcactatgttggccagagctgggattacaggcatgaaccaccgtgcccggccattttctttagggaaagcagggtggtacaaccctgtttggggcttgtcccagtctcc

SEQ ID NO: 22933 - DNA, 122 bp, Homo sapiens
cgggcggtccgcagcgcccttgactcctgggatggcagagctaggggcgcgggccgaaatcgggcctggcggccgggggtcctctcttccatagtggccaagttcgccatccgtcggcgggc

SEQ ID NO: 22934 - DNA, 122 bp, Homo sapiens
tgcctcctgccacgtggcatgcgcctccctccgccgtccatgctcgggccaagtgctgtgcggttcctgcttctgcaccgccttcgaggcggaggtgcagcacatggtgcttgtgggctacc

SEQ ID NO: 22935 - DNA, 122 bp, Homo sapiens
gcacttgttgcagcctagttttgggtcaacttggtgggtgggctttgctccttaacattccggggagcacagagtcccccaagccctctcccctggactgagaagggtgctgagttgggggc

SEQ ID NO: 22936 - DNA, 122 bp, Homo sapiens
ctcagcacttacagccagtggtgtgccagtaaatgtttgacaattggctaggggaagtggcgagtgctaatttgccaatttctgtagtgtaaatactaccagcatggctgatttcaagctac

SEQ ID NO: 22937 - DNA, 122 bp, Homo sapiens
tcgccatcaacatcttctcggccgaccggcccaacgtgcaggagccgggccgcgtggaggcgttgcagcagccctacgtggaggcgctgctgtcctacacgcgcatcaagaggccgcaggta

SEQ ID NO: 22938 - DNA, 122 bp, Homo sapiens
tgagggcggccgaagtggctggctcatttaagatgaggcttctgctgcttctcctagtggcggcgtctgcgatggtccggagcgaggcctcggccaatctgggcggcgtgcccagcaagaga

SEQ ID NO: 22939 - DNA, 122 bp, Homo sapiens
gtcggagcccatggctttttaggacaggaagcgctgcggggtagtgcgggcaggcaggcacgtcacaccggacagcgtcgagattgctgctttcggttccccagcgggtggtgaggcagaaa

SEQ ID NO: 22940 - DNA, 122 bp, Homo sapiens
gttatggactggctactcagatttttttcttcacttgctcaggctccgccccatctgaaacgtcttctctgctaggaactcactaggagaaaatgaccagtgagcttaccaaagctcagacc

SEQ ID NO: 22941 - DNA, 122 bp, Homo sapiens
cgcctgctttaaatagaccatccctgattgaccctgcctgcttaatgtacaccatacctgcgttatcgcacctcctttaaatacacaacacttgattgaccctgcctgctttatgtagacac

SEQ ID NO: 22942 - DNA, 122 bp, Homo sapiens
aaagtgtttactctgcttcttctcagaaatggctttgatagcgccaataaccgctacaaccggaagcgaaatgaaagggggggggacttttttgaaatgatgtttcggtgccgccatgcact

SEQ ID NO: 22943 - DNA, 122 bp, Homo sapiens
ggacttctcaattctaatttaagggcaagaagtttgagggaggaatgggcatagagaggtcgtaagcttccagtatcaatatggtgaggccaggtgctagttaaaaggcatttattggctgg

SEQ ID NO: 22944 - DNA, 122 bp, Homo sapiens
agcggcagcaccatcgagccaaggtcctccagcgttcctagagcggagaagaaagcgctccgaagagctagagctgacactcggcgatgagctaagacgctgtttcagagcgtttgggtcct

SEQ ID NO: 22945 - DNA, 122 bp, Homo sapiens
tcgggtggcggggccagtgtcccggcgtctcccgaaggctgggggtggggtcacaacacgcgaatcctgcaagcctttctggaacttattagacagctggggccttgatcctgaacaaatac

SEQ ID NO: 22946 - DNA, 122 bp, Homo sapiens
agaaccctctgttttcccccactctctctccacctcctcctgccttccccaccccgagtgcggagccagagatcaaaagatgaaaaggcagtcaggtcttcagtagccaaaaaacaaaacaa

SEQ ID NO: 22947 - DNA, 122 bp, Homo sapiens
cagccagagagacgcccagggacacacaacctcccagtgacacgcactgacacactccgacgatgcactggaacacaacgctgtcgcaccccacacccccggcgcacgctcccgccgccacc

SEQ ID NO: 22948 - DNA, 122 bp, Homo sapiens
tttccaagctaataaacaacagctcatcttctgcttcatcacaaagggtggtatccagtccgcacctcacggaccaccaacaaaatcctctcactctcaagtcgatccctcgaacccaggtg

SEQ ID NO: 22949 - DNA, 122 bp, Homo sapiens
gtaggggccctgggaccacttgacgggcctttgcaggcagttctgtacagagtcctaacccgtaacgggcctcaaccccggctgtgtgtgcgtgtgcttgtgtctgtgtgtctttgtgtgta

SEQ ID NO: 22950 - DNA, 122 bp, Homo sapiens
ctgctccagaggctgaagcaggagaattgcttgaacccaggaggcagaggttgtagtgaacgggagatggcaccactgcactgcctgggcaacatagggaggctacatctccagaaaaaaaa

SEQ ID NO: 22951 - DNA, 122 bp, Homo sapiens
caaaaactggtacaaccagggtagagaaaggtatgaattagggtggggctgtctaataggcgattaggcaagtgaggctggaacacaggaggtcagaggcatgaaggtcttctaactgttca

SEQ ID NO: 22952 - DNA, 122 bp, Homo sapiens
ttgtgtggaagtgtgtcgtgattgcatggaagcgtgtgattgtgtggaagcatggtgtcgcggtgattgcatggaagcttgtgattgtgtggaagcatggtatcgtgattatgtggaagcgt

SEQ ID NO: 22953 - DNA, 122 bp, Homo sapiens
agagggaaccccaaatctccccctccatgtacctagaggcagtttcagtctttcatcccacgggcattttctgagcacctactatatgctggaatttgccccatgtctggggatacaaacaa

SEQ ID NO: 22954 - DNA, 122 bp, Homo sapiens
gaaagtgcttaaagctcaaaacagcccatttccttgcaacttccccaataaagtgcttctcggtcttaccagtctcagattgcaccatcatttacctagtagctcaaaacaaaaatctgcag

SEQ ID NO: 22955 - DNA, 122 bp, Homo sapiens
gtgggctgatgttggtgtcatatcccactgaagcctcatagtctacagccaatagtgacacgtacacacatgccaatagtgacatgtacacagatcttctagaagctactgtgtcattcgaa

SEQ ID NO: 22956 - DNA, 122 bp, Homo sapiens
tgctgcaggacgcgcggggacccgcgattcccagccggcggatccgggaatggcgcggcccggccctcaggcgttcctcggcgggatttaaagggaccgagctccattcctgcacgccaggc

SEQ ID NO: 22957 - DNA, 122 bp, Homo sapiens
tgtgctgcgtgaaatatgtcttggcctcacttcctgtcctctgagctgcctgcagccgggcgaggtggtgttgaactgtgttttttgtgacgaagcttacttttaagtttcatccctaaact

SEQ ID NO: 22958 - DNA, 122 bp, Homo sapiens
gaagggcccttaaattgggcgagccaaggtgggctaaggacgcagcggacaggaataagacgagggaagggttgttgtgggagggaacagggaggtatgcaggggcaaaggtcatgcctctg

SEQ ID NO: 22959 - DNA, 122 bp, Homo sapiens
tgagcccacaagtttaacagcgactgcactggctgcagatgtagcttctcccaggatgaccgaaataaccttttgcactattgcaattttgtctgtttccttttccttaatatcctgaagtt

SEQ ID NO: 22960 - DNA, 122 bp, Homo sapiens
taatctggatagttactactgcttaaaatctaagtgcacagctagaaaagtgggtagtgacgcactacagtcttgctgaacactgggtaagaaaatcatagcaaacgttgagtctgttttgg

SEQ ID NO: 22961 - DNA, 122 bp, Homo sapiens
atgctcattttctacctactcacacagaataaacgagaggcgataagccacaaacaggaacgtgcacatccaggggaaacacatcttcccaggcccactgaaactgtatgtgtgtctagatt

SEQ ID NO: 22962 - DNA, 122 bp, Homo sapiens
gagactcacgtcccagctgggagcggccatattgttttctgaaaccatggaaaccattcccgactctcctgggtacaaagacttctgggagttgtagttttatcccctccccgctacctcct

SEQ ID NO: 22963 - DNA, 122 bp, Homo sapiens
gagcagcagaatgttctgcactatgcagaggccgtttgtcggatcacgtgacagcacccgcgtgttcccccatcacgtgctcagaggttttccctacttccgggtcctctctgtcttcgctt

SEQ ID NO: 22964 - DNA, 122 bp, Homo sapiens
cccagttttctggcgaccggatgggcgagtcttcgtcgggcctgcttagaccctgagggccgtttagattacagttttgcttttcgtgctgctgttgctggtgctactgctactactgatcg

SEQ ID NO: 22965 - DNA, 122 bp, Homo sapiens
gggaacgagcaatgggaattcacgctgggtgagtttggggtcctctgtcaggaccccattcgctgatccttgctttctcctgggctcttcccacctgttctcagtctctcacgcccctgcgc

SEQ ID NO: 22966 - DNA, 122 bp, Homo sapiens
acagcaacctacatttattgagagtttactatatgctcggcactacactaatcctttatccgggttatctcatttaatctttacactctctgaggtagacaaacctacattttccagatgag

SEQ ID NO: 22967 - DNA, 122 bp, Homo sapiens
cccaaacgccggaaatgacgtcacggagggcggggcgggcctgctggccggggcgaagagcggctgcggcggggcctgtggcgaacggaggcgagccggaagtgggggggttgtctgctctc

SEQ ID NO: 22968 - DNA, 122 bp, Homo sapiens
aggagctgagttcccgcaaactaactgcagggcctcaatttccctcagagccccaggccccggcaccaagcctcttccgccagtgcctgctctggttttgtggaatgagcagaggtggggtg

SEQ ID NO: 22969 - DNA, 122 bp, Homo sapiens
aaataaaggcagacgctgtttttctacccatgtggcccacacgcgtctccgtttcagtggcggggctggcaaacgtcattccctagccccgcggccctttaaagcccggacaggtgcagctc

SEQ ID NO: 22970 - DNA, 122 bp, Homo sapiens
gggtggtggggtgggggcaggcagagcccaaggaccaccaaactcagaaccacccaactgcggcctgactcctttggcccagggcagccctgaggcctgctggcgcttctacccgaagttct

SEQ ID NO: 22971 - DNA, 122 bp, Homo sapiens
ccatttctccccctcacccatgctgagtgtagagccggggcctgggtggcgggtgggggccgggtgggaggtggcagtagtcttagcctgtgcactctcttccttgggtgtttggtgctggc

SEQ ID NO: 22972 - DNA, 122 bp, Homo sapiens
aagctgaggtaagaggatcctttgagtccggaatgcagaggttgcagagagccaagattgcgctattgcactccagcctggcaacagagcaagaccctgtcttaaataaatgaataaataaa

SEQ ID NO: 22973 - DNA, 122 bp, Homo sapiens
tctcacacacagcccctccacccccacggccagcggaggctgcggagtgccagcaaggagcggctccactcggtgccccgaatgcgcgcacggagaactgagaactcaaaagtgcacccgga

SEQ ID NO: 22974 - DNA, 122 bp, Homo sapiens
ccctcgccgccgactcgagtttcttgaggtcctcggactggggggaggccgcctgggactcggagatccgctgggtggacgcggaggacgagccagcggagctacccggccccaacttcctt

SEQ ID NO: 22975 - DNA, 122 bp, Homo sapiens
ggctgctccccttgcggggacttaggctcctcctggcattggcaggccggtataaacccccggctcggatccagctatgcccgatgctgccctaagctttatgaggtcgccacggaaccgca

SEQ ID NO: 22976 - DNA, 122 bp, Homo sapiens
gtgtggccttctcactgacctctcccaacgccacagtcgctccctgcccagaagaaaccacggaaggtacgttagcttctttgggctgcaccaacagctatgcctttagtgggtcactcctg

SEQ ID NO: 22977 - DNA, 122 bp, Homo sapiens
tggcttgggttttgcatattctccaactgtaaagatctatgtgacacatgtctgtttatccgtcccttacacctgtttcatgtggcaaaacaccagttttttttttttttttttttttctgt

SEQ ID NO: 22978 - DNA, 122 bp, Homo sapiens
tctcctcttcctctcttcctcccattcctctccctccacaacccccctctttccccctcccggtccctatgagtcaaacttcagcaatgtgcccagtgtcccccagtgcattacagcggatc

SEQ ID NO: 22979 - DNA, 122 bp, Homo sapiens
taaaaaagttagctatttcacttaacgccgcttttatttcgttttcgttccaataatgctcggcgacccccggccctgcgccccacccctgcggcggtagaagccgagcggcggcgcgcagg

SEQ ID NO: 22980 - DNA, 122 bp, Homo sapiens
tcctagctaattttatcttttgtagagatgtggtctcaccatgttgcccatggatggtctcgaactcctggcctaaagtgatcttcccacctcggcttcccaaagcagtgattacaggcatg

SEQ ID NO: 22981 - DNA, 122 bp, Homo sapiens
cattcgaataagtgaatgaaagaattaatgacgttactccatacttgggcttcaccacttcgtctagcacagccgttgttaaaacaggaaaaatgcaatcgcagatgccagcagaggtctgt

SEQ ID NO: 22982 - DNA, 122 bp, Homo sapiens
tcagcaattatttttcagaaattcccttagataaaattagtcccaaatcctatggacatgcggttgcctgataaccttatctaaaacaagagtagtatttcagcttaattgccatcttaact

SEQ ID NO: 22983 - DNA, 122 bp, Homo sapiens
gaggtgagattgtaagggctctgggtcactggggcatctgcgctgggcagaagggcagctcggtcaaacagctggagctgggagccggtcagttgccaggccctgccgctgctacgtcacgg

SEQ ID NO: 22984 - DNA, 122 bp, Homo sapiens
tttcggccctggggttgaagatcctgtgtggggcagctgcgccttcgggacagccccagccgcggagcgcccagaccagggcagccggagtcgggtcatacgccgcacgccgccggggccgc

SEQ ID NO: 22985 - DNA, 122 bp, Homo sapiens
gatcctcctcacactctctgagagctggggcccatgggcgcctctgaaggggaaggtgctcgtgggatgccccctctgagacagaggagaaattgtaatcattcaagctagctcccagaaag

SEQ ID NO: 22986 - DNA, 122 bp, Homo sapiens
ctactttgtttttagttatcttagggtctctaccaagtagacacagttcagttagagagacgtatttaaggagaagggaaggcaggatacccagaactagcagcctagggaaaaggcttagg

SEQ ID NO: 22987 - DNA, 122 bp, Homo sapiens
gggccggcctccctccctcctcccaggctgacctctgccctccttcgagcacttcccgttcggggtgatgattgaagaactgagtgtggacagagcacctgtcctcgccagcgcccagctgg

SEQ ID NO: 22988 - DNA, 122 bp, Homo sapiens
ttgcgggccagctagagttccgggtgggcgtggcttggcgggccccgcactgggagcggccggccggcgctgccggccctgggcattgagggtcttggcacccgggccagcagctgctgagg

SEQ ID NO: 22989 - DNA, 122 bp, Homo sapiens
tcctctgaatgccttataggtatagtttggcaatctcgctcacacctgggtgtgaacctgcgtgtacccagcccgggagatatcggggtctgtacaggattggtaccccttatgggttagag

SEQ ID NO: 22990 - DNA, 122 bp, Homo sapiens
cttcaaacgcacgaccttcagggcagcaggagccaccatccattttttcttgtcatagggcggtgggatgccgtcaaacaccttaaggcagtccagagcggcctggcctcgcttggtcttgt

SEQ ID NO: 22991 - DNA, 122 bp, Homo sapiens
cccctccccctgatgacccccataggagtggagggagaagccaggaaggaaagggggctgcgttagtttgcaacttgagtctcctgccacagaccagtgaggaagtggggggagaagtggct

SEQ ID NO: 22992 - DNA, 122 bp, Homo sapiens
gcgggcccggggagcctggggctggcgggggcagggcaaccgcgagggccagggcgggggcggctccgcccaggccgcgtagccgcccgccgccccgcccgtcctcccgcccgcagccgctc

SEQ ID NO: 22993 - DNA, 122 bp, Homo sapiens
gcctcagtcggcgtacgaacccagagtctcctcctaatctgctgacaagtatgaacccgccgctgttcgaacccagcgtcgccgcagccccggccaagtaaaagaaagaggtggctgccagc

SEQ ID NO: 22994 - DNA, 122 bp, Homo sapiens
ttgatgcccgctgctcggtcaggattctttgtttgttttttggttggttgcctgccaggccgcagtttgtgaagggcttctagcggttaccaggctgggccacctgttctgggcagccgccg

SEQ ID NO: 22995 - DNA, 122 bp, Homo sapiens
cacgatcgagagcatcctggagccggtggcacagcagatctcccacctggtgataatgcacgaggagggcgaggtggacggcaaagccattcctgacctcaccgcgcccgtggccgccgtgc

SEQ ID NO: 22996 - DNA, 122 bp, Homo sapiens
ccacacaacaaagagggcctcgggagagtcgccagccctggtagcatatgaaccaggcaccggcgttggagctggccagggcagggcgggaggaacgcgaggcctgcgcgcctttgtgtggt

SEQ ID NO: 22997 - DNA, 122 bp, Homo sapiens
cccggtggccgccagtcgccggcgcaaatgccaagtcaccggtaggagacacaacagaggcgatgacctgaatccgcacgtggcctggttcgcctggaagctgccaaagcgaaggcaagaga

SEQ ID NO: 22998 - DNA, 122 bp, Homo sapiens
ttttgcatcttcataagttaaaaataataaagtttgaacgcataatcaccttttctagaacggtcacaattggagtgcaggtgaaatcactagtgaaggtgattttggaattgtcagtggat

SEQ ID NO: 22999 - DNA, 122 bp, Homo sapiens
tacacccagaaaggaactagaagatacttgtattaggtgggtaaccttaccttccattatcgtaaatagttgctcaagcttcttcacagtaatggtctgcatttcttatgtagcaaaacctc

SEQ ID NO: 23000 - DNA, 122 bp, Homo sapiens
ttgctctgccttttctggcatggatacaatctctagatatggtttccccattagctaatgcggggggtgctatgtggtgttcctccagagtcccttcaatctaaggacctgtgaatctaaaa

SEQ ID NO: 23001 - DNA, 122 bp, Homo sapiens
gtatcccagagaggaaatgaatgggacctgaaaagtgggtctgccacatccctggtagcccgcctccaagagcactacactccccccagccccaccggccacactacatgacgtgggaaggc

SEQ ID NO: 23002 - DNA, 122 bp, Homo sapiens
ccctcttccggggctactggcgggaggcgcagccgagctggtggtggcggggtttccctccggggctagggctgagggaggagaagagggcggactggctccttccgttctcggccaccctc

SEQ ID NO: 23003 - DNA, 122 bp, Homo sapiens
ccagtgtctagacacagtaggtgctcaataaataggtgtgggtttgcggtggcagaagagcgctatcccttaagtttctgacagtgagggggaaaaaggctaagcagggaaaggaagggaaa

SEQ ID NO: 23004 - DNA, 122 bp, Homo sapiens
gacccttaaagatcttaaggtcagaggttctcatatggcaacagtccttcctccctaaaacgaaacagtatctttctcccctttgcaataatcctttccagtgaagtctctccttcctcaag

SEQ ID NO: 23005 - DNA, 122 bp, Homo sapiens
accctgtgatgccaggctgggcccccttggccagcagggcccctgtgaggagctgccagacgggtgctagtgacgccccagtccaggggaggaagggctgtgtgccctctgtcctgcagcct

SEQ ID NO: 23006 - DNA, 122 bp, Homo sapiens
ggccgcttttctgccctgtgtggctgcgtcccgcgtcacggagcactgcgcaccgcctgccgctctgactcgcggcctcctgggctcctccagcccctgagaccctctgtgtgaccttccgg

SEQ ID NO: 23007 - DNA, 122 bp, Homo sapiens
gacgcctgtgtcctcccctcccccatccctctgtcacccttggaggcagagaactttgcccgtcagtcccatggggaatgtcaacaggcaggggcagcactgcagagatttcatcatggtct

SEQ ID NO: 23008 - DNA, 122 bp, Homo sapiens
ctaagccaaaggaactgatgatagcacagagaagggtctgggtcacaccaggggctcagccgactctagacccacttgttaagtggggctctggcccggcccttattgcctcagtttaccca

SEQ ID NO: 23009 - DNA, 122 bp, Homo sapiens
ctgtccaactgcaaggacgctgtaagcaggaagtgaaaccacagagcttcaaaaaaagagcgggacagggacaagcgtatctaagaggctgaacatgaatccacagatcaggtaccgctgcc

SEQ ID NO: 23010 - DNA, 122 bp, Homo sapiens
aagtcatcaaaaaaagtaaagaagccccaaacgcaaaaaccatctttaactcgagacctacgtgagcaggcagtgagttgggtctggcccgacgacgatgatttgccaagcccggttctaga

SEQ ID NO: 23011 - DNA, 122 bp, Homo sapiens
cgtttagccacatgatgtcgctgtccaccacaaggtctttctccacaaaagaaataacagcgtgcattacgtattcagatactgctttgcttcatcctctctaaaatttaacaccgaggagt

SEQ ID NO: 23012 - DNA, 122 bp, Homo sapiens
ggactccagggcaagtggtgctggccggatgcccacagtgaggaggtgcggggcacgcagcgagcactttccggacagtgcggtgcggggcagcgagtggccgcctgtgttccgacaagcca

SEQ ID NO: 23013 - DNA, 122 bp, Homo sapiens
gaattatctgtggatgaacctgccttctccatggactgccagcccccaaagcaggaaccacgtccttatagagggcctggcacacagtagggaactggggtggggtactgccatgcagcagg

SEQ ID NO: 23014 - DNA, 122 bp, Homo sapiens
aactagcagaaacaccttcaaaggccgctctctgggagctcggtccccatcagccacccccggtaaccgcccagattgcgctccgcgccccccacccagatcccccgattccccagcccgcc

SEQ ID NO: 23015 - DNA, 122 bp, Homo sapiens
cacactagaggaagcacctggtaaatatttagttaattgtttctgaatgaagtacacatgcgtattctttgggtcaggatgcttaagcatctacctatatctattaatacaaggagtatatg

SEQ ID NO: 23016 - DNA, 122 bp, Homo sapiens
tagccccgcctctgccctgctgggacccttttggtcgctctggggtgcagcggaaactggcggcggtttgaagccgccgcgctcactccccttggctctctccgttattcccttcccaggat

SEQ ID NO: 23017 - DNA, 122 bp, Homo sapiens
aggtcacacagccagtcagtgggactgcaatcctggtctgtgtccagagcctccctgaggcggagaggcccccatttcctgcagccgctcctggacagttccctttccttgcaaagcaatga

SEQ ID NO: 23018 - DNA, 122 bp, Homo sapiens
gtgcgggcatcgtggtaatggtgctgttctcgctcttcgtggattaactttccctgatgccgacgcccctgccccctgcagcaataagatgctcggattcactctgtgaccgcatatgtgag

SEQ ID NO: 23019 - DNA, 122 bp, Homo sapiens
tgttctggtggacagacactctctcccttgacagggtcctcaccactgtgtgcaccgtcccgccacctggtggccgtgcctatctgtgcattccctatttggttaactcattcacttaacaa

SEQ ID NO: 23020 - DNA, 122 bp, Homo sapiens
atggctggactcaaggggcccaggcagccaaagaaactgctacaggtccggcttcgtagacgcgcccccgcgcctccgcttgcttcaaatttggctccgcagcacgacttcctggagcgggc

SEQ ID NO: 23021 - DNA, 122 bp, Homo sapiens
ggcttcccaatctcaggggacagcttgcccaagcagtgtgaaagccaagccccctctcctcgagctctatccagagttgcttcttcccttgccctttcagcttacacctttcgcttcattga

SEQ ID NO: 23022 - DNA, 122 bp, Homo sapiens
gcgtgaggccgcgtcctggggcggggtgaggggcgagcggggcgggcccacggcatgctgcgagcccagcctcccgccaagcaccgtcccccatccagccccctgtgggaggagccgtggga

SEQ ID NO: 23023 - DNA, 122 bp, Homo sapiens
ttgggggtagggtctgtttttggtagggtggtcggggagtgcctcactgagaaggtgatccgggagtaaagtcctgaaggaggtgaagtatgagctgcagggacagctatgagaagagcaaa

SEQ ID NO: 23024 - DNA, 122 bp, Homo sapiens
caaatcccagaagtaacatcggataacagcctgcgctggctgtggtgtgaccaggggaagcgagggtgtgtctcggtgcttaccgatgcctggggccacatagatgaagtacagacaggacg

SEQ ID NO: 23025 - DNA, 122 bp, Homo sapiens
gtttagcttaaattgccaaactgcaactacatgcattaccacagaccaaataccatgtaacggcatcaattttgcccaaagattacacatgatgcctataaaaggtatatatcccaggtaca

SEQ ID NO: 23026 - DNA, 122 bp, Homo sapiens
cggcctgcctccagtccttggctgcctcacagcgatgctcagagccggtttcccaaggtccgcgcgccgcctgcaaggcgcaaacccaagccgctgctggttgctaggagatactgggccag

SEQ ID NO: 23027 - DNA, 122 bp, Homo sapiens
atcccaggcctggctttcattgggctagcttggatcacgtgctcatcactgagccaatcacggtgtccaggcgacccagagccgagacgggagccaatcagcagcgctgggtgttacactgg

SEQ ID NO: 23028 - DNA, 122 bp, Homo sapiens
gcagggcggctgtcctgagttgtttcttggctccctgcgtcttctgggtcccggcaggtgcgacaggtggggaagaacagtgaatccctgcgctcagagcacgccagccatggacggagggc

SEQ ID NO: 23029 - DNA, 122 bp, Homo sapiens
attagattactttgtggcatttcaaataaaacggcaatttcagggccatgagcacgtgggcgacccgcgggagctgtgggcctggcaggctcgcacaggcgcccgggctgccggccgctgcg

SEQ ID NO: 23030 - DNA, 122 bp, Homo sapiens
taggattaatggtattctgatcactaaggaaaagccccctagtatggaaacaccagaggtcggagatcccaggaaatggacatttctctcaaggtaaccacggttcaaacacttagaactct

SEQ ID NO: 23031 - DNA, 122 bp, Homo sapiens
agttcaagcccaacagcgtcacatataggaccaaatcaggcaacatcctgctgcacaagtcgaccattaacaggtgagggcatgcaggcctggatggggcagctgggatggtccaaaagggt

SEQ ID NO: 23032 - DNA, 122 bp, Homo sapiens
atactttaatccaaagtgatcactttgatactcgaagagacacatttggaggctacttggcgagggggaattaaagacagagaagctgaataaatagcaagcaaaatgttaatgttttggct

SEQ ID NO: 23033 - DNA, 122 bp, Homo sapiens
gcacctgtggaaggaaaatatatggcgtggtataggagggtatctgagtcaccccacggacgaaagtgtcttcccagcagctcctgtgaggtgccccgggcatcctggcgtccctggtttgc

SEQ ID NO: 23034 - DNA, 122 bp, Homo sapiens
ggtcctcattattagagatttggtgaaaacttttggagatgaagatggaaagctagaagtcggaagaactgcattgcttgtgatgcagaatggatatctcagcttgtggattcactctactc

SEQ ID NO: 23035 - DNA, 122 bp, Homo sapiens
gtagggttcagataaatgtgggctctaattctgggtgtttatttgctagcagcatgccctcggggggatcccaaaaccagtctgtgcctcagccacctcagttagttagaaatcacaggctg

SEQ ID NO: 23036 - DNA, 122 bp, Homo sapiens
cccgccccctctgttagacgtggaggggagcctgctgtagtgtgacttagcccattcctccgtactgtgaactgtgaactgcaaaacctgaaatgtcagggatggtgatctgttcgttgtaa

SEQ ID NO: 23037 - DNA, 122 bp, Homo sapiens
agaggcatgggtcagatctatgaggtcagcagctgtgacaacagggacccttctgagcagcggtacgggatgataagaactttttacatcgccgctgaagaagtagaatgggattatgcccc

SEQ ID NO: 23038 - DNA, 122 bp, Homo sapiens
accgggtgggctggtgtggagtcctgtcaggagacctggggcggttttgaggcaagctcacggaggcctgccgcagggccctgcgctgacaaacctttcgctagtgaccagttaccttctgt

SEQ ID NO: 23039 - DNA, 122 bp, Homo sapiens
ccagcctgggtaacatggtgaatccccacaagaaatacaaaaatgagcccggcatggtggcgcgcgcctgtagtcccagctactttggaggctaaggcaagaggatcacttccacccgggag

SEQ ID NO: 23040 - DNA, 122 bp, Homo sapiens
gaggctgggagaacctaactgagctctcccgggaactttgctttctcgttgttttttcttcgcccacaggtctcagattctatccgctgtctttctaccctaccctttgaccatttttgcac

SEQ ID NO: 23041 - DNA, 122 bp, Homo sapiens
agcgacggggcccggggtgggtcatcggccaggagacaggtgcgaggccgcagccagcgccgccctctgctctctcccgtgttgcccctgggatgggcgtgagagcaggcgtggggtgggag

SEQ ID NO: 23042 - DNA, 122 bp, Homo sapiens
agctgctccgggatgttcattcaccctacctctctcaggacaccctggctttgcagagcccgtgcgtgagtgtctctgagccgggtgccagggggtggcactgtttgctcaccgttggcctc

SEQ ID NO: 23043 - DNA, 122 bp, Homo sapiens
agaacgggcccggggccaggccggacagctccacgaccgagatgccctgcagtgccatggcgcttcccagtgccccgctgaaggaaactgagcagcccttagccccagcccagcagcctgca

SEQ ID NO: 23044 - DNA, 122 bp, Homo sapiens
gtctgctgcatctggcgcctgttgcacctggcctcttggctgcaactggcctctcagctgcgcctctttgttgcctctgcaaactcgggtgccctggagcttcctacccagaagtgagtgcc

SEQ ID NO: 23045 - DNA, 122 bp, Homo sapiens
cctgcgcccagtgttgggtgaagcccggggcgttgggccagccctgcaggttaaaggaagcggggtcagaaaaacgaaatctagatcctaggtttggggcctgccttcacctgttggggacc

SEQ ID NO: 23046 - DNA, 122 bp, Homo sapiens
tctccctgtgacttaccaccccagactttctgtgttgatgcatcgtggtctacctccttccgtcagaacgtgagctccgaggcaaaggctcttcagacctgaaacagtctaggctctgtccc

SEQ ID NO: 23047 - DNA, 122 bp, Homo sapiens
agacgaaaaacgtgaacttgaagccgatgatgaacagggtgcagacccgctgccttggggcgccccggagcagccgcagcaggaggtcggggggcttggacatggtatccccagatcagacc

SEQ ID NO: 23048 - DNA, 122 bp, Homo sapiens
ccgccccgccctcacccgtgttgaaatagtagcccttgttctctaggcccagggtccacacgccctgtgggttctcatcccagaagtgggtggacatgaagacccagttgttgtagccttca

SEQ ID NO: 23049 - DNA, 122 bp, Homo sapiens
gtacccacttaggacaaacaccagcctagccctggcggcgatttctaggtcgtaggaagtcgatgtttcgccacagaaaggctgagtgaccctgtgactcatttcccagcaactccgggttt

SEQ ID NO: 23050 - DNA, 122 bp, Homo sapiens
aggggtaactctacagcagtattttcccagcctttaaagaattcagcttgttttcatgtccggcttttaaaaggcctagtccttaccagcttggaaccctccaaatcactaaaaggagatgt

SEQ ID NO: 23051 - DNA, 122 bp, Homo sapiens
aaaaagtgaaactactaagggaggaggggtgaggggaccccttcccatgctcctttatcacgttaaggtgcttcacagcttaaacatcccatgattattagttaactccctgcagtctgaga

SEQ ID NO: 23052 - DNA, 122 bp, Homo sapiens
gcagctgccccttcaggcggaagctcctgttgcactctgggcactggaagggtctctccccgctgtgcacgcgcaagtgctccgtgagcttggattgtctggtgaagcccttgccacactcc

SEQ ID NO: 23053 - DNA, 122 bp, Homo sapiens
ggtgatccatccgcctcggccttccaaagtgctgggattacaggcgtgagccaccactcccggcccaaccccatgttttctcaggaactggagttccctttaggaagcaagtaacagaggtg

SEQ ID NO: 23054 - DNA, 122 bp, Homo sapiens
caggacgcgcagtctcatcgctgtgggcaggagtgctggggaggaagcgaagtgtgacgccgtgtttgcagagaaagagtgggagctgcttgcctcactctggtttgcagacttttcttaga

SEQ ID NO: 23055 - DNA, 122 bp, Homo sapiens
gcgggccaggtgtgggaaatgaacagggctgggcgctagatacctgcgtggggtaggacccgcgaggaagaggtacgtgcggatcggtgggagagccaggcaccagacaggctcctgcactg

SEQ ID NO: 23056 - DNA, 122 bp, Homo sapiens
cagcggcgtcctcagaccatagagttccgcaaaagaagagagtacatcctcatgttccggcgctggaacaaccatagagacatgaacctgtgctttttgggggcgggacagttggctggcca

SEQ ID NO: 23057 - DNA, 122 bp, Homo sapiens
aagcaggcaccgccctgtttttatcacacggaaaatatgtctcctcccgctagtctgtgtcgggggcccccgcaagccccgcgttactccgcgcgggcttggggcactcacacggaggactc

SEQ ID NO: 23058 - DNA, 122 bp, Homo sapiens
tgtgtgtttttagtagagacggcgggggtgggggtctcaccatgttggtcaggctgatctcgaactcctgacctcaagtgatccacctgcctcagcctcccaaagtgctgggattacaggct

SEQ ID NO: 23059 - DNA, 122 bp, Homo sapiens
gtggggcctttaaaatgtcttggagaataaccaccaccaccacaggaagtgcagggaccccgctccccctagtggcggtgtgccggaggcagctggaagtgcctggccggcctggccggcct

SEQ ID NO: 23060 - DNA, 122 bp, Homo sapiens
ggtggagcacgtgggcccgggaggcgcttcccagctgcggtccctggatcgccctctccacgctgaagcaacagctccctggggccagctacctagagtgttccagccccggtgtgccagtg

SEQ ID NO: 23061 - DNA, 122 bp, Homo sapiens
ccctcagtgcccccgtgcttgcccctcccctgcaggctcccgctgagccggaggcgggcacgtcggtactgatgtgctagggtagttcagaccccctgctccgggcaggcgcggctggacgg

SEQ ID NO: 23062 - DNA, 122 bp, Homo sapiens
ccaccgaggtgcgagtctcaccatcgtgctgtctgctgagagatctgattcccagcggaccggccttcctcactcgatgattgtcagggctgagaacccagcacaggtctgtgatgcccacg

SEQ ID NO: 23063 - DNA, 122 bp, Homo sapiens
aggggcgcggggttaggccggcgtggggaacaaaggcacgagtgagaggcgggagggtcccgccgccaatctcagcagacagccccgaagagcagttcagcagatgccctggaaagttaatc

SEQ ID NO: 23064 - DNA, 122 bp, Homo sapiens
aggcccaacccagaggctgctttcggttaccctagggttcctgggccctggacttcaacccggtctgcaagccccgccctgattagctgcctcccgcaccggtcgcggcgccccgcccccag

SEQ ID NO: 23065 - DNA, 122 bp, Homo sapiens
tgctggatggcatcgaggcagtcttgaagatagtcattctcctgtggatggaaaggcacacgtgagcgtgggggacgctgtccaggttccgcccatgtcccctcaagtgagtgtctgggcat

SEQ ID NO: 23066 - DNA, 122 bp, Homo sapiens
aaaagcggggccacagttgcattcattgttcagtgagcttgtccacacagttcaacccaccgacagcaatgaatgttgattgtgaccttttaaaaaataatctctgcacagggaagagaaag

SEQ ID NO: 23067 - DNA, 122 bp, Homo sapiens
tgtaaaaaggcctcggcttggggacacggtttgggcatcccacagatgccccttgaggctcgcttgacagcccgcctggactcgctcatctgcagcaaagccctctgagatactaccctaac

SEQ ID NO: 23068 - DNA, 122 bp, Homo sapiens
caaggttgggacttctcagtgtttggagagttggacttgaggcctgcactccagggcccccgtgggtttgctgctgtggttgggggcctgagccactggtgtcctaaacggaggaggcttgt

SEQ ID NO: 23069 - DNA, 122 bp, Homo sapiens
gattctctgccccatccagagaccaacagattcttgaggactaacagactgagggctgtccgggacgagggcatcgggagggaggaagagagcagtgtgggttgtccctctctgattctgtg

SEQ ID NO: 23070 - DNA, 122 bp, Homo sapiens
caaactaaggttttgtgtgctttgggtatttcaattaggaagaaagaaggcaggcaagaacgttattgaacatttattctctgatactggaggatgcgctggaattcaagagcctgacttca

SEQ ID NO: 23071 - DNA, 122 bp, Homo sapiens
tgaaatcacttagaataggggagatgtggaggaaaagaggaccaggacacagctctggggcgtcccaacatttagagattgagacttggaggggaagccaggcaagaggacaccagccagct

SEQ ID NO: 23072 - DNA, 122 bp, Homo sapiens
cgtcaataagttcatcatctgtggtttctgcgagctccagaggccttcggagtgcaccagcggccccagatattcaggaggactccacaacactcccctcccccaagcttctttacctccca

SEQ ID NO: 23073 - DNA, 122 bp, Homo sapiens
caggaagtgtgagctgagctctagaaagtggtggtgtctaaagtggctcaccagcctctccgtcaggcctcgaaggttcgtcaccaactcgtgcagcagatagacggcagtccgggctgtgg

SEQ ID NO: 23074 - DNA, 122 bp, Homo sapiens
ggactggcactcgtcgatgtctgcagggagagccaccgctgctcagtgcagtgaggccaacgcccaccgcaggaccggcatggcctagggcagcggggagccagtggcacacaggcgcaagc

SEQ ID NO: 23075 - DNA, 122 bp, Homo sapiens
ataaggccaaaggatttggcaatttgaaggtcaatcatgaacagaaaacatagtgttctacgaagtgtttagaagggaggagagaagaaagcgaaaaggcagactacagagtggggttaatg

SEQ ID NO: 23076 - DNA, 122 bp, Homo sapiens
caagcttcccctgaggcttgcccttcagcgcactggcactgcccacccgaacgggcgtcacggatcctggtcagtctctaggatcgcgctcgctgataggacgcttctggtcgaacgtccaa

SEQ ID NO: 23077 - DNA, 122 bp, Homo sapiens
agggttgaccccgggcggagaggctggtggccggaggcgaggggcggggagcgtctgagccggcaaccaagccctcccttgtgggagaggagccggcagtctgctgttctcaggtcccgcag

SEQ ID NO: 23078 - DNA, 122 bp, Homo sapiens
cccgggcaccgacctgccgctgagcgagatcccgcgcggcgtgagagtcgccctggactacgaggcggggcaggtgaccctccacaacgcccagacccaggagcccatcttcaccttcactg

SEQ ID NO: 23079 - DNA, 122 bp, Homo sapiens
tagccatagggttcaatcttgatgaaaagtgactgtgttgctctatagtcatgtatcttccgtcattcaaactgagctactcacctgcttgctgagagaagatgctctcccacaccctgggc

SEQ ID NO: 23080 - DNA, 122 bp, Homo sapiens
taaccatggcaaccccgggggtggggcctcgcttccggtagccgagagttttgttagaaccgcgtccccgccccagttccctgtccgtgagccgatttatctgcccagggtcggcgcgcgcg

SEQ ID NO: 23081 - DNA, 122 bp, Homo sapiens
cctccaatcggggcacaacttaaagccttcccttctccacgatgaagggtccccactccccggcctgcctctgagtcttgccacagcaagctctgaataaactgcctcccactaccgtggcc

SEQ ID NO: 23082 - DNA, 122 bp, Homo sapiens
gccccggagagtggcgaggagggcctggcccctgacagtgaggtgggcaggaagagctaccggtgcgagcagtgcggcaagggcttcagctggcactcgcacctggtgacgcaccggcgcac

SEQ ID NO: 23083 - DNA, 122 bp, Homo sapiens
acagcttcactctctaatctttccacgaaatagctgtcaccttgctccggtgctgaagttcgggatgcggaactagctgagcatgcgtacttcctccctgccggccctccctccgtcccgtt

SEQ ID NO: 23084 - DNA, 122 bp, Homo sapiens
ccagggaagaaatatagctcctataattaaaggaggcaacggccagagggggagtgcagccggcagccaaaaaagaaaagtaagagttttatttatttgctgattgaacttgggttgtcatg

SEQ ID NO: 23085 - DNA, 122 bp, Homo sapiens
gcctcacccactcccagacaataacaacatccttcctgtgggttggtgaccagtgctgcacgtatctaagaggtataataagcattttacacggtggcattgccacctccttctctttgttt

SEQ ID NO: 23086 - DNA, 122 bp, Homo sapiens
aggctgggtctctgtgttccgaacacagcgctggggccctttctagaagcttcctggaagcgagagtcagtttttgtgtaggcgcggggaacacaggccggaggccccgtaaggacgggcac

SEQ ID NO: 23087 - DNA, 122 bp, Homo sapiens
ccctgagcaactccggcccaggccgcgggcagcactggccaccactgcccaagtttgacccgtcagtgcctccaccaggctacatgccacgccaggaggacccacacaaagccacggtggat

SEQ ID NO: 23088 - DNA, 122 bp, Homo sapiens
gtcctgtcacctgaaataaatgtaaaaagtaaatatgccatgtgttgctttttggaatcacggtagtggactctggcttaaaagaaaaagaataaaagtgcctgtgggtggccacatttcat

SEQ ID NO: 23089 - DNA, 122 bp, Homo sapiens
aaaaggtcaagactaccagcaacatgggcgagggggcctctggggtcacgttgagttagtcgctgcatagaaagagggctcaaatctaaaaaatgcaagagggtaggtcacccaagggtggg

SEQ ID NO: 23090 - DNA, 122 bp, Homo sapiens
catataagacgaccatattgcagctgtaccgcatggaatagcggctccaaggcccaccttcggtggtttgcacacccctctttgcactgttcagaaaagcaccccctccttcccgcccctcc

SEQ ID NO: 23091 - DNA, 122 bp, Homo sapiens
ttcctttgggtcaggtgtccactcctgctccaaaaatccattcaaggatacaaatctgaccgcctccaaatgcaatgtctcttatctctgcccagtcctacttcattgatggttcacattac

SEQ ID NO: 23092 - DNA, 122 bp, Homo sapiens
catgccccatagaactgctggaaattatctttgtgctccatctgctagacagtgtagattcggggcctacctggatcaagtataagacttccaggctgcattttaggccattgcccttggtt

SEQ ID NO: 23093 - DNA, 122 bp, Homo sapiens
gacagccccgcagcagggggctcgtgcccgtggacaggcctgcagcgcggggcgggggggcggggctcgcgcccgtggacagccccgcagcaggggatcatgcctataaacagcccctgcac

SEQ ID NO: 23094 - DNA, 122 bp, Homo sapiens
gggcgctggggaagtgctgctcgtaccctgcttggttctgggaatttaaatactgcaccacgtcgtccggcaggaaatcctcatcgttcaggttggcatcagcgtccatggtcagggactcc

SEQ ID NO: 23095 - DNA, 122 bp, Homo sapiens
tgaagaagcttttaatgctttttagcaaaggaagtaatgttggtgaaaggctttttctgacgactaatggaaagcagtgctatgtatggtgacttggttatgaaccaaaaccagaatgactg

SEQ ID NO: 23096 - DNA, 122 bp, Homo sapiens
cagaagatgagaaagaaagttcccgtttgtttgctccacatgtttcctttagaatgaagccgattggaagtcaacttcaccctgaagaaattcctcctggcgtttacaatgagcttctttac

SEQ ID NO: 23097 - DNA, 122 bp, Homo sapiens
acgaagggtgagtgagacagagacacagagactcacagagaccccaggccaaggagacctcggaggtccccaccctccaccaaatcccaagggagtacaattcgatcatatggacaacctac

SEQ ID NO: 23098 - DNA, 122 bp, Homo sapiens
ttgttccttctgatgttcgaatgtgttcggagttttttccttctggtgggttcgtcatctcgctggctcaggagtgaagctgcagaccttcgcggtgagtgttacagctcttaaggcggcat

SEQ ID NO: 23099 - DNA, 122 bp, Homo sapiens
gatggggagtggcttcacactgctctgagagttcatctggatagggttaacaggattcaacggaccaagaaacataggattcagattattgttcaaattcataggtgctccagagccattca

SEQ ID NO: 23100 - DNA, 122 bp, Homo sapiens
tgtttgtgtaatgctgggtgtcactggggttgtgtgtgtatgtcatggtgatggtgtgtacgtgtatacaatgctgtgtgtatatgggattgtgtgtgtcactgagtgtgtcagtggtactt

SEQ ID NO: 23101 - DNA, 122 bp, Homo sapiens
caccctgctcctgctgctgtctgactctgagacaacacggccgcgccaactcgctaagaccggcccagcccacggagtaatcctcaatacgctgtcacatacacgaaaagaaaatcaatcag

SEQ ID NO: 23102 - DNA, 122 bp, Homo sapiens
gcagacccccatgtatttcttcctcagaaatttctccatattagaaatttcgttcacaaccgtcagtatacccaagtttctgggtaacattatttcaggagataaaaccatttcctttaata

SEQ ID NO: 23103 - DNA, 122 bp, Homo sapiens
aaccaaagaatcacaatgctaaggagctggagggcatctttgagtgcatctcgtccgtggcgttccaccttcccacttaagtgtcctgagcagtcggggaaagaacattaacccattttttt

SEQ ID NO: 23104 - DNA, 122 bp, Homo sapiens
cagaggtgctggagtcctggtttcgaggggctggaggcagatctggaccctgtctccaggcgcacgggatcccgggtccaggattagggccccggcggggcgtgggcggggcctgggagttt

SEQ ID NO: 23105 - DNA, 122 bp, Homo sapiens
cggtctggaacactctgggccaccaccaggatgtcctcatctttgggggtcagggtaggccgcagctccgtcggggagggctggtgggaggctcctgagctccgggtgcgccggccccgagg

SEQ ID NO: 23106 - DNA, 122 bp, Homo sapiens
taacttccggcgagggttggacgaccgcggagaagtggtccggagtgggcggcgttagggcggtgctttctggccacgtggtctggcggccgattgtgcttctgggctccgcggggctacct

SEQ ID NO: 23107 - DNA, 122 bp, Homo sapiens
gtcagtaagaagggccctgtgccgattcatagaatccaggttgacaagcccttctaggcccggccctgtcactcccgtcttgcctttcataagggatcccaagccagtccacattcccaatt

SEQ ID NO: 23108 - DNA, 122 bp, Homo sapiens
cgaccccgaggaggaggattcgcaagccgagaccaaatccttgagtttcaggcaagtacacggcgtccccgctgagatgcagacgcgcttgcctccatccatctgcgactccctctgtgtgc

SEQ ID NO: 23109 - DNA, 122 bp, Homo sapiens
ggtcaaggttattaggtcaagcccttgggagccctgttgccaagggaacagatcgacccccgtcagggttggtttacccacggtctgcagccctgtggagaaaaggagtggcccgtgggcct

SEQ ID NO: 23110 - DNA, 122 bp, Homo sapiens
cttgcaggtaagtgacactccctgtcctagtcggtctatctggacttgcccttgtctgttcgtggtcctcggtggttatctgcagcttgttaatcgtgtaaagtcaagagaagaatgtatac

SEQ ID NO: 23111 - DNA, 122 bp, Homo sapiens
ttctccctccgcgttcatacaggttgccacaaaaagcttgggcctgaagctcgaaggccccggacccgctggggaaagaactaggcctgccactcagggattcgagtccctggagtgtatcc

SEQ ID NO: 23112 - DNA, 122 bp, Homo sapiens
cagccgcctgcagaatgtgaccgttgggagcgtccctgagcggggttttccgcattcctccggggctgctgggccaaggtggctgtgtgtaaacagagcctgcgtctccaggcctggatgtg

SEQ ID NO: 23113 - DNA, 122 bp, Homo sapiens
tatttctccaagttggcccccaactcaagcccttgcaatgtgtctcttggttatattcttcgggttccttttaatctggcataggccctttcataggactctgactcgacaaagagaactgg

SEQ ID NO: 23114 - DNA, 122 bp, Homo sapiens
actggattcagggcacaaaacacttgattaacacttgtcaaggctctgactagcaaatatcgacagatattttcaaaataaagtactcgcaccgattcctacataaatcgaagctcttgatt

SEQ ID NO: 23115 - DNA, 122 bp, Homo sapiens
cggcacgcgggagggcccaaagcagcctgtacatggcgcatgcgcggctgcagcggtgggcggggccggcctcgactgaagccccgccctggggtcctttcgccctgcccagctccagcaaa

SEQ ID NO: 23116 - DNA, 122 bp, Homo sapiens
cacaagaccaagttcggcctcccggagactgaggtcctggaggtgaactgagccagccttcggggccaattccctggaggaaccagctgcaaatcacttttttgctctgtaaatttggaagt

SEQ ID NO: 23117 - DNA, 122 bp, Homo sapiens
ctaacatttaaaagtctatgtttgagaatgaacaaccacttcaaaaccattataaattagcggaaagaaaaatggttgtcctttcaaagtagctctcacttcttttctgaaataaccagcat

SEQ ID NO: 23118 - DNA, 122 bp, Homo sapiens
ttggagtttccttagcctgtaaaatgaaaacgaaagtaacacgccaggtgcagtggctcacgcctgtaatccaagcactttgggaggccgaggcaggtggatcacgaggtcaggagttcgag

SEQ ID NO: 23119 - DNA, 122 bp, Homo sapiens
gtctagttcttagtacccttagaattgagataattcattatttgtcactcaggtaggtttcgagtgaactgatatatttaattagatccttaaagcccataggatttatactggtcatttct

SEQ ID NO: 23120 - DNA, 122 bp, Homo sapiens
tacccagggctggcccgcggagacgcagccgggaagggtgtggtgcagctgtcgggagagcgcgcccgggcccggccgcctcggctccgccctcggccccacggtcccccatcccgccgccc

SEQ ID NO: 23121 - DNA, 122 bp, Homo sapiens
tgatgcaattgtttcaggattcaaaaatacttatttcattacaaccctgtttttcccccccgaaaaaaagagttgaagaataactttgatagaatcttaagcaggaaaaaaacctgacaaac

SEQ ID NO: 23122 - DNA, 122 bp, Homo sapiens
gcgcttaaaaatgtatttttaaaaaacataacagaaagtcctgaaactcacctttcggtccgcggaagggcttcctgcaggcccagggaatctcctggttgctgccccgtctgacagcgccc

SEQ ID NO: 23123 - DNA, 122 bp, Homo sapiens
cctgatttacatgaaccccactcactggctcctctccagccagccaccaaatctccacaacgagggctgtggggtggtcccatagccgtatgatttgtaactcacatctgcaacagtggaac

SEQ ID NO: 23124 - DNA, 122 bp, Homo sapiens
tccttaggtacggaagcgctggggcgcggctgcctagcagccgccagtccgctcgcccctcgcgttctctggctctcaaatccgagtgcagcctcgaacataggtccttctgccgccccgcc

SEQ ID NO: 23125 - DNA, 122 bp, Homo sapiens
ccccatcatggccggcggacccccaggaccccgggccagcgctgggctccccgaggaaggcgctgctcagggcttcgtccttgctgttctgcaacactgacacccacctgcggagattgaac

SEQ ID NO: 23126 - DNA, 122 bp, Homo sapiens
cctaaaggttcttctccctgcccactttttggtctctttttagacctaggctgcccctgccgtcatgtcgcaagggatcctttctccgccagcgggcttgctgtccgatgacgatgtcgtag

SEQ ID NO: 23127 - DNA, 122 bp, Homo sapiens
atgatggaaagagccacctatttcctgtgttggcttcttctctgctttcggatttaggcacggtgtcttttcagatgtgctgactttttacggcttcagcaaggtaatactgtataaatgcc

SEQ ID NO: 23128 - DNA, 122 bp, Homo sapiens
ttttgggtgaggtactaaatattactgtgtagcaatctcataacattttggaaatgcggccgggtgcggtggctcacacctgtaatcccagcactttgggaggctgaggtgggtggatcacc

SEQ ID NO: 23129 - DNA, 122 bp, Homo sapiens
aaaatagcagcccagagagcaaatccttcttcctgccctaggctgcagtgctcctaacctcggtcctgatcagggagctgctagggtcctggttttctatctcctagggctcagaaaagcta

SEQ ID NO: 23130 - DNA, 122 bp, Homo sapiens
cggcccgatgttgggttgccttacaatcacatgtgttatctgtgatctctagggccatttcggttttgagagcacactattgcacatacactaagatgtttctgagtatttcccatagttag

SEQ ID NO: 23131 - DNA, 122 bp, Homo sapiens
ggggactcgcctccgcgggtgctcaaggctgaaggcgccggaccttcccccacggtggcacgcacatcatccggcaccatttccgtgccccgaagacgcccgcgcgggacctgggaccgcca

SEQ ID NO: 23132 - DNA, 122 bp, Homo sapiens
agcatatgcgtcttcagcctgactgggctggagaggcggtgcgtcctcctggccggggggcgggggccgtcgcgctcacgtgacctttgctcatggcggcggcggcggcggcggcggtgctg

SEQ ID NO: 23133 - DNA, 122 bp, Homo sapiens
ttaaaagactgagcagccgtttcatcttctctgaggccggggctgggaggaagaggcttccgtggctacattaggcagaactttctgtgtaatgtacgtgatgagaaccactacacaggctg

SEQ ID NO: 23134 - DNA, 122 bp, Homo sapiens
gtctggaaagcaccaaccaacggtctaaggggcgggccggaggggtgtgggccggagggccgcggtgtgccgcggggcagttgcgggttgtcataacggtccccgccggagtgaggcgaggc

SEQ ID NO: 23135 - DNA, 122 bp, Homo sapiens
cacgaaggtttaataaaagttcatgatggcgctttgagacccactgggaattagcacacgcggagtccggtgtgaactgggagatgtcgctccagtctgacctggctctggactgttccaca

SEQ ID NO: 23136 - DNA, 122 bp, Homo sapiens
tttttgaaacaacttaactgttcctgataagcagtaaagacaactgaactggttggactacgataatactgtaccctgctgggacagaatgccagcatggcaaagggactttttgtctacac

SEQ ID NO: 23137 - DNA, 122 bp, Homo sapiens
atgtttgtgatgggagcaagcaagcttgatagttagccggagtgttggtgattgggatgccggctgataagagtcgactctaattttggcattttaacctacattctgagctgtcacactaa

SEQ ID NO: 23138 - DNA, 122 bp, Homo sapiens
acttccccttgctttggggcggggggctgagactcctatgtgctccggattggtcaggcacggccttcggccccgcctcctgccaccgcagattggccgctagccctccccgagcgccctgc

SEQ ID NO: 23139 - DNA, 122 bp, Homo sapiens
gatgccttcctaaaggtcacagccgaatggaatattctgtggaaagaatggaggatgtgccgggcactgcagggctcagctctgtgttccccaggcttcgtgggacagagatgaagcagacc

SEQ ID NO: 23140 - DNA, 122 bp, Homo sapiens
tcgccatgcctggttacctccttgaactagggaggaaggagggaaatatgggcttagacacgtggaactcagggtctcccatgtcactctgactaccacccaaagcaccttgctctgggttt

SEQ ID NO: 23141 - DNA, 122 bp, Homo sapiens
ccaggtaccctgggtaaacgctggccggtgagcacacagcgttcccagcaggcatgttttcgtttttgctttggtgatagtggatgatgccgtttacagggcccgtcatggcggctgcagcc

SEQ ID NO: 23142 - DNA, 122 bp, Homo sapiens
tgttgttttgcacaactgattctctttttctcttgtggtttgtcctatcccatctggtggcgaactccactaatagacatacaatttcatatccaactctctaaagtgcacttactttatca

SEQ ID NO: 23143 - DNA, 122 bp, Homo sapiens
tcctagaaaggaacgggaaaccgtcacctgcccaggtgggacgcgaggcaaggaacccagcgcaggaggccgctgggtcacggaggtttcctgtctgcttcccgccgtcactgccggccgcc

SEQ ID NO: 23144 - DNA, 122 bp, Homo sapiens
cagcccgcttgcctccctggctcttaggacccccatcacaggggggcgaggcgccccccgcgatgcggggcataagagccagccccgcctgtccccctggctcttaggacccccatcgcagg

SEQ ID NO: 23145 - DNA, 122 bp, Homo sapiens
cctccttccaccattgccctacaactgaagaccaccaactgaggaccaccacctgaagagcgccaactgatggtaccaactgagggcactatctgaaggcaaccaatgaggacacccactga

SEQ ID NO: 23146 - DNA, 122 bp, Homo sapiens
gataagctggagttgaatcacagagtcgggggatgaggtccgagggccggtgggaggaatcgtatttatgatgtccattgtgacttggtggcttatccaagactatttctagttagcagtgc

SEQ ID NO: 23147 - DNA, 122 bp, Homo sapiens
tcggaagccacccccagctcccccggcagcttggagcctcagaaacgcggggcagagacgcgacacggagccgcctggcactgagactccccagtggctgcgccgccttcccgggggcccga

SEQ ID NO: 23148 - DNA, 122 bp, Homo sapiens
ttcctgttaggaaaatgctgctggctcagggtggcgtgggcgccagaggtggatccacctcgtctgtgtcctcagtacagacgcagaaggcttgcctctgccatcctagaaccatcattttt

SEQ ID NO: 23149 - DNA, 122 bp, Homo sapiens
gatcccacgctgttcctgttccgctgttcacccagaggccatgagtcagccatggtggcccgaggccagctgaggaggcaggcccagtctagcctgtgagaacttacctgttgggggcagcc

SEQ ID NO: 23150 - DNA, 122 bp, Homo sapiens
gccgcgcgcaggaggggacacgcgtgcgcaaaagggcggtgggtggggcgcgactcgtcacggggagggcggggcgcgcgagggaggagggcgtggtgggggcatcgagaagggtgaatgga

SEQ ID NO: 23151 - DNA, 122 bp, Homo sapiens
gttcaaggcccgtcagtcactcgagccaccccttggcggctggaccaaatcttgggctgccgcctggatctgcagctggaaagcgccgtgaccaccggtgtccccagctggagcagggcggg

SEQ ID NO: 23152 - DNA, 122 bp, Homo sapiens
cctctgagttgcctcttctctcatctgactgcaacagccttcagagattagtagctgttgcgtcatttctttcttctacatctcacagaaatttatctttaggcaaccactgtttatactag

SEQ ID NO: 23153 - DNA, 122 bp, Homo sapiens
accaagattgacatgggcgtcacgtgatggattagggctccaggaaagttttcaaagaggcgacaatggggggctcagactgatctgatatctcccacagtttagcgggaaagaaaatcagg

SEQ ID NO: 23154 - DNA, 122 bp, Homo sapiens
gttccgcgtgggcgcctcagaccgcggttctccggctttgagcagcgaggcgctggtgcgcgtgctggtgctggacaccaacgacaactcgcccttcgtgctgtacccgctgcagaatggct

SEQ ID NO: 23155 - DNA, 122 bp, Homo sapiens
ggaggagggctccaaagacatgtgagcacacagaggaggccctgagctccctgcacaatacgagtcagagcttctaggttttcattctgtcttttaggtgggctacagggctgttgggttta

SEQ ID NO: 23156 - DNA, 122 bp, Homo sapiens
gcccgttcggtgtgaggtgtctgcctcggggcgtggctgcatccaagggctgccaggtatcggtgctgccgctgctgagggagcccagcccgacatgccccggcgagcggtcctgccgaggg

SEQ ID NO: 23157 - DNA, 122 bp, Homo sapiens
ccggctttcacttcctctcgcttccgcccgcctccctggctcgccggctggcgtcgccaccgcctcctcgtccccggccaccgctgtcgccgctgctgcaattcaaggcgcacactatccca

SEQ ID NO: 23158 - DNA, 122 bp, Homo sapiens
gagggaggagaaagccacaggcagccttgttttcttctcattagaaaccaagtcctagcccggcagaggcacattccacaggggctggttgggtttgggaggaggccggagcacagaaacat

SEQ ID NO: 23159 - DNA, 122 bp, Homo sapiens
attcagaataagcttaataataaaatactgcgttggcgatgtgtgtacctgatggtgtcccggacccttcccttccaggtgttagtgagtgggggagactctgatgtgtgagtcctcaccaa

SEQ ID NO: 23160 - DNA, 122 bp, Homo sapiens
ctcctcgctgccccaaagctcctgggcccttcatctgccctcgccccatctgatccaggtcgccagagactctcgcgagttcgccccatttgggcctcagcatggaccatcccccttactcg

SEQ ID NO: 23161 - DNA, 122 bp, Homo sapiens
cttaattctccacagataactacctacaagttttctgatttattcattagtggatttgttcgtgatcagccccacacctgttagaatggaagctgcaggcagcaggaaccagtgtggccaag

SEQ ID NO: 23162 - DNA, 122 bp, Homo sapiens
caaagtcacaggagaaggcaatacatttctgtggctcagataagtttaataactccctcacggtcatacagctactaaatgttgcatccagaagatgcagcaaaatattagcaatgaaaatg

SEQ ID NO: 23163 - DNA, 122 bp, Homo sapiens
tatgggcccccgtttttgacacccgcgggatgcgctcaggagagctacaggcacagggagcggtgcaggcaaaggcctggagatgaactgagccgagaggatcgtaacctagggtccacagg

SEQ ID NO: 23164 - DNA, 122 bp, Homo sapiens
ggcagcggctcctcggggctggccagcgctgggcgggacaaagtgcctcactggggcccgcgggccactcagtccctcccgcctggttccccgcggaggctgcagccacttgtgctgtgatg

SEQ ID NO: 23165 - DNA, 122 bp, Homo sapiens
agagtctctggcagctataacccaagtcttagcaccatctagtgataaacaggcacacagcggggagggaaagccggggagtggggagggcggataagagaaggaaatgccaactttaatta

SEQ ID NO: 23166 - DNA, 122 bp, Homo sapiens
gtgaacagctggcacgtctctgggttgcggacgataagggccacgtagacttgaggagcccgctggtgctcccggtaggcagccagcctccgcaggaccgcgaccagcgacacgatggattc

SEQ ID NO: 23167 - DNA, 122 bp, Homo sapiens
gcgtggctgagggaaacgcggtgggaaccgcccccgactccaggcgactccttggccgggcgggggagagcgtccccgtcagctgagagcatcctcactcggtcagttcctcgggcgagtta

SEQ ID NO: 23168 - DNA, 122 bp, Homo sapiens
attagaaccaggtcaagtgcactccgagcaggacagtaggcagatcctatctggcgcatgcgaacgcttctgtgccagttccttgaagagcaggcgcagactcaaggctgttgcttccgccc

SEQ ID NO: 23169 - DNA, 122 bp, Homo sapiens
cacctcagacaagtaccttaacctctctgagcctccatgtgctggtttctaaggtgagggcgataacaccgtctttcccttcctcttgctaatgatattgttgttccctagagaaaaatgag

SEQ ID NO: 23170 - DNA, 122 bp, Homo sapiens
ctcaccgcagcctcgtcctgggctcaagctatcctcccacctcagcctcccaagtagctgcgtctacagacatgcaccaataggcctggataatttttaaattttttgtagagacgaggtct

SEQ ID NO: 23171 - DNA, 122 bp, Homo sapiens
ctaatagaaaattcaaaatttacttgtggttcacattttactgcagaggactgcctccttcgtgaaatctcaggctgccttcatggattaggtcattttcacactgctataaacaaatacct

SEQ ID NO: 23172 - DNA, 122 bp, Homo sapiens
ccaacttctggcctcaaatgatccccttgcctcagcctcacaaagtgctgaggttgtaagcgtgagccaccacacctgggctttgcctttgcatattgtaattttagtgccctttaaaagtc

SEQ ID NO: 23173 - DNA, 122 bp, Homo sapiens
gccttcaggcgtttggactcagtggaggttgtgagtgcccagcagtgtggcctgaatctccgtggggtttagggagacgaaaggaccccagatcgacgtcccctcgttcccactttggggat

SEQ ID NO: 23174 - DNA, 122 bp, Homo sapiens
cctttagtaagccacttgcggctgctgctcatcagggttcgcctggggccactgagaccacgcgccggtgcccgccctcccgctgcggtccgattttctgaaccaaccaggcgcttccgggc

SEQ ID NO: 23175 - DNA, 122 bp, Homo sapiens
ccacctccctggcctgtgacaacggcagacgcgcgaagcaccgggaacctgagccgtgaccgcgggctctggcgcctttaagggggtcaacacgccccacccccagttccgcagaggcagcg

SEQ ID NO: 23176 - DNA, 122 bp, Homo sapiens
tccggccaatgggcgctcgggcgtggatccggcagccaatggcagtcggggcggagctggcgcgcggccttataagcccccccgcgagcgcttgcggagggctcggtcgccagcaaccgagc

SEQ ID NO: 23177 - DNA, 122 bp, Homo sapiens
gggcgcggggcatggggcacgtggctttgcggaggttttgttggactggggctaggcagtcgccgccagggaggagggcgggatttcggacggctctcgcggcggtgggggtgggggtggtt

SEQ ID NO: 23178 - DNA, 122 bp, Homo sapiens
ccactgcttcctgtaatttaattttctctcccgaaagcgttgctaattaaatcctttctccggcgagccgtcgccccccgcccctgctagtctgtttattaagtacccggcacctgcgaggg

SEQ ID NO: 23179 - DNA, 122 bp, Homo sapiens
ccacacaaaaaggtgtgcccgggttggctgcccctgcccagtgttgtggctccatgtggacgctttcgtgcgcgcgtccctgccccgcgcgcggcaggccattccaggctgtgggctgcggg

SEQ ID NO: 23180 - DNA, 122 bp, Homo sapiens
agtctcatgcatttttgcagcccccacaagactgtgcaggtggccggccctcattgaatgcggggttaatttaactcagcctctgtgtgagtggatgattcaggttgccagagacagaaccc

SEQ ID NO: 23181 - DNA, 122 bp, Homo sapiens
ctgttcctcaaaccatgattgtatctggggtcaaaaggtgaccccttagtgtcaccaagtcgtgattccggctggttgtgccaccgaggggcccctcaggaggtaaaagggcttgaaaataa

SEQ ID NO: 23182 - DNA, 122 bp, Homo sapiens
agcctgacgctctgcttgctgtcagggtaggtccacattggccttgttcacccagcaggccggtgtctgcgagtgattcccggggagagggtcccaggcgggcaggggcgtcgcagggctga

SEQ ID NO: 23183 - DNA, 122 bp, Homo sapiens
ggcagcagcacctgtgaggtggctgcgtacttgccccctctcaggactgatgggaagccccgggtgctgctgatgtcagagttgttcttgtatttccaggagaaagtgatggagtcgggaag

SEQ ID NO: 23184 - DNA, 122 bp, Homo sapiens
tggcaggggaggggccgcgagatgcagctcgggccacaaaaggagtgctcctcccgggagcgccagacccctaccccacccggtctcagtttaccctgccaacccaacttcatcctctacta

SEQ ID NO: 23185 - DNA, 122 bp, Homo sapiens
agaaactgctcctggggtcctccttgactgggtttgaggcagtgccctggcctgggagagcgggcactgggtcatcgggatccctttgtttatttgggtgttttctcttccctatatgaagc

SEQ ID NO: 23186 - DNA, 122 bp, Homo sapiens
gatgtgcaacagcagcagttaaagtgtggcagattagatccagggcgtgtcataaatcctcgacagcaggcattcccaaagctggggcaagtaagggctccaggagtgacttttatggatgc

SEQ ID NO: 23187 - DNA, 122 bp, Homo sapiens
ggtctgtgccaatcggcgcaggacagaagcgggacctgggccagatccccgagaggtgggcggggcctgggcgaggccggggcggggtgcaaaggacaaggggcccggcgcggaagagaaga

SEQ ID NO: 23188 - DNA, 122 bp, Homo sapiens
cggcagcagtcacggctcctccatcagctcctggctcagcgaggtcagcgtctgcactgccgacagccgtgaccccacgccgcagccccgcttcagccccgactcgctggcagggcttgacc

SEQ ID NO: 23189 - DNA, 122 bp, Homo sapiens
ctctctgcccttctttgtaccaaagatcactgtgtccaagaaaagcattctcaggaggcccgaaactgtgctgtgggcagaaaatcagctttctgaaaccctgaagctactacatgtttgct

SEQ ID NO: 23190 - DNA, 122 bp, Homo sapiens
cggccagggccagcgagggaccccccccatgcagagctggaggttggggtgatgtcttttcggaagagcttcaagggaggtgttggggcctccccggccaccttccattgctaccccaggat

SEQ ID NO: 23191 - DNA, 122 bp, Homo sapiens
gcccggggagggccttggcgtcggcgggggtgggggtgggcggcagatccgaagcagggtcggggaaaaacggcgttgcgggagggttggggggtggcctctgaggaagtgggacaaaaggc

SEQ ID NO: 23192 - DNA, 122 bp, Homo sapiens
cccgcatcctccccagagctgccctggcgacctcgaggtctccgcaaccttccccgaagccgctcacagccttgtgatctggatgcccgcaaaactggggtcaagcggcgccacgaggaaga

SEQ ID NO: 23193 - DNA, 122 bp, Homo sapiens
ctcaaatgatccactcacttcagcctcccaaagtgttgggattacaggcgtgagccatcgcgcccagccgttttagatatgttttgaccaggggtgaatacatgcatataggcccctggttt

SEQ ID NO: 23194 - DNA, 122 bp, Homo sapiens
ttcgagacccgcctgacccacatggagaaatgccgtctctactaacaatacaaaatcagccgggtgtggtgacacatgcctgtaatcccagctactcaggagtctgaggcaggagaatcgct

SEQ ID NO: 23195 - DNA, 122 bp, Homo sapiens
caggcagtgcttcttaggtgatgctacacccacctgcagcagggcctggtggggtgggggcgaaggggtgcaggaagtatgtgaacagaatgaaggtgggagaaagaaagattaacgagtag

SEQ ID NO: 23196 - DNA, 122 bp, Homo sapiens
ccacagaacagggacaaaagtcgacaaaacccagcggtgcctcacccagaaacctggcaacgcgggcggaacagagccggttggttgctcagtgcgcgtcacttccgggactcagggtcgca

SEQ ID NO: 23197 - DNA, 122 bp, Homo sapiens
ggaacagccatttgttagggatgcccaaacggggaattctgctctaaggaagaggtgctgcgccacatatccacagtggttctgtccagcctgatgtttaaatgtctaatattttaatacag

SEQ ID NO: 23198 - DNA, 122 bp, Homo sapiens
aaaattctccagaaggaataatataaactgtggactttgggtgataatgatatgtaggttcgtcagttgttaacaaatgtatccctctgttgggggctattgataatggggaaggctgtgca

SEQ ID NO: 23199 - DNA, 122 bp, Homo sapiens
gtcactgaatcgagtgggaggctcattttgcagtttactatctccatgagcaggtccaggcgcgggacctgttctatgactcgattgggtcctgcccttgtccgtcatcggaaggcttacag

SEQ ID NO: 23200 - DNA, 122 bp, Homo sapiens
tgacatcctccgatacctatttcccgtgcccaaagatgacagccaccgggtcatcaccttcgcaaaccaggacgactacatatcattccggtgggtccacgggccatgccccaggaaagcat

SEQ ID NO: 23201 - DNA, 122 bp, Homo sapiens
cctgctaccatgaaaggtttcatcacccaaggctgctcaggaagtttgcccacaaactgccggagatgtgggtgagaccgtgtaatccaagccaacatagtgagctcttgagcagctgctaa

SEQ ID NO: 23202 - DNA, 122 bp, Homo sapiens
atttttgtctgattgcaatgtctggacgtggtaagcaaggaggcaaagctcgcgccaaagcgaaatcccgctcttctcgcgctggtctccagttcccggtgggccgagtgcaccgcctgctc

SEQ ID NO: 23203 - DNA, 122 bp, Homo sapiens
caagggctgatgagaggtggggacgagtgctgccgaaggactcctcaactaccagaactacgtagggcccctaacatcccctcggagcgagctccccgcgccccgtacaccaccaggtctcc

SEQ ID NO: 23204 - DNA, 122 bp, Homo sapiens
gagctgctggaggggacctgcaccccggtgcagctggtcgccctcattcgccacggcacccgctaccccacggtcaaacagatccgcaagctgaggcagctgcacgggttgctgcaggcccg

SEQ ID NO: 23205 - DNA, 122 bp, Homo sapiens
agcagagcttgggacacgtcccacccgtaaccgccagggtcctcttctgccccgagcatccgactccagcctcccatggccggaacatctgaacgttcattgatctcatcgatttctcaacc

SEQ ID NO: 23206 - DNA, 122 bp, Homo sapiens
ttcgttctctttcctgtggttcagtgtagctggcagtcagggagaactctctgcagctggcgccggccctgtatttgttaggcttgtttctcctgggctcggctgctgggcaaggccttttg

SEQ ID NO: 23207 - DNA, 122 bp, Homo sapiens
ttagataccatctttctagtcaggttactgaatcttgccaggccttagtggccccaccttcgtaaggttgttggacagattactgaaatcctcacaaatatgtggaaagtgcctagaatgtt

SEQ ID NO: 23208 - DNA, 122 bp, Homo sapiens
tcgggctaaaaagggttaaggtgtaggagcacagagtcctccttctggggttggaagctccgttcccgggcagctcagcgtggattccgctgcgttcacctcttgcctccagggcccagtag

SEQ ID NO: 23209 - DNA, 122 bp, Homo sapiens
agcggggagcggaagtgggcgtggcctggtggcgtgggcgcggggcgggggtgcggggggcgtgtccgcccgggcgcggcccagtgaggcggtggccgagtcctctggcctcagacgcgtag

SEQ ID NO: 23210 - DNA, 122 bp, Homo sapiens
ccagccaaaagatcaaatttgaaataaacttagtgtggtctaagtatacagtgtctatagcgtctacagtggtggacagtcatgtctgaggccttcacattcactcaccacccacccactaa

SEQ ID NO: 23211 - DNA, 122 bp, Homo sapiens
tagaacagtattccttaaaagagtcaactttaccatatgcaaattatgactaaatatgcccgactttgttttttcaaaagtgagggtgaggtgggatggggttgggggagacattatataca

SEQ ID NO: 23212 - DNA, 122 bp, Homo sapiens
actgcctgggctgcattttgtccagaatcctttgtctccttacttgcactgcagctgaggcgagtgtcccttgttccgggtggctcctgtattgtggcgctcatgttattgagagtcttaga

SEQ ID NO: 23213 - DNA, 122 bp, Homo sapiens
ttttcccccactgcctccagttcccacccaggaggctccctcgcggccgcgagagctcggcgcccgacccacagtaggcagtgcgggcacagtgttgcagaccaccacctcgccaggtccgg

SEQ ID NO: 23214 - DNA, 122 bp, Homo sapiens
cgaggagcgacgccgtgatgcaaatctgccacttaccttctgtcaccattctgtcgctaacgctaggaatgatgaaacctcctgttctggaaatgcatttccctttagcaccagcgccttct

SEQ ID NO: 23215 - DNA, 122 bp, Homo sapiens
tttgttccatttcccggatcctggggtctggaggcgaaatatgctctgggcgaggaccaccgggtgtgggaagagggttctgagcgtctcctgacgttgacggtttatttcctagagtgtgt

SEQ ID NO: 23216 - DNA, 122 bp, Homo sapiens
aggctgaggggtgggcacaagttcctgcagccctggctccctgggagggtcgagattactcgggacagagcctgaagtcccagatctgccaccaatgccctgtgtgacagcagcaacttcct

SEQ ID NO: 23217 - DNA, 122 bp, Homo sapiens
ggctcctttagggtgaatggaaggatcccacactactccatctgctgtgaaccaatggagcgcacaacccaggagcttcaggtggacacgcacgttggctgccaaggaaaaggaagcctcgg

SEQ ID NO: 23218 - DNA, 122 bp, Homo sapiens
tcactgtatttttgcttcccactgtttagtataacatttatcagagaggcagaaaacatgcggataaaaatatccagttgtgtattctcagttggtatcaaaagctaggtcactgaaggtca

SEQ ID NO: 23219 - DNA, 122 bp, Homo sapiens
tggcaccggtgcgcaagcttgcacctcctgggcaagccgatggcaggacagagcctaagccgaggctggcgccgaagtgggctcgggaggacgcgctgccttctgcaccctgggcaccaccc

SEQ ID NO: 23220 - DNA, 122 bp, Homo sapiens
ccctgagtttcagctccccggggccacctctcctgggtcccctctttgctgtggctctggcggacattagccagcagtggagagaagcccatctccacccccagggagctcagccgaggtct

SEQ ID NO: 23221 - DNA, 122 bp, Homo sapiens
agttcacctggagaccgcagaaaagctggacagacccctggttcgcatgtaccagagacacgtgggcacccaactcccggaggctgcgcgcctcgcacaggtaaaccccctcccccgtaccc

SEQ ID NO: 23222 - DNA, 122 bp, Homo sapiens
agccagatgtgcaggtgaagcacaagacaggttctcttcatgcctccactatcctggcctcgaccaaactgcagagggaaaaactcaggtgagagtgagaaagcacagtcactttcagttag

SEQ ID NO: 23223 - DNA, 122 bp, Homo sapiens
attgtgctggggaagtgcgcatgctcatgtcgttccaatgacgccattgctcgctcgtgacgccacgggggcggtgcctgcacatgggtggagcctcaggtcctatataaactagagcctgg

SEQ ID NO: 23224 - DNA, 122 bp, Homo sapiens
aaatcttacctagttcatgggccagggtgtgggccgcctggagcccctcatcctcgatcacggagcagcttttgttggggtcacaaatggtcccgatgtctgccacacccagggtgtcacac

SEQ ID NO: 23225 - DNA, 122 bp, Homo sapiens
cggctccagcagaaccagccaatcacggctgaagtttgtgcccggcccttttcccctcaccgccacgccccaagccgcacggttgccccggcaactgctccaggatcctgtctttgaagcat

SEQ ID NO: 23226 - DNA, 122 bp, Homo sapiens
cccgggccccggacccaacacccgtcccgaccccagaccccgctccggcaccccggaccgcgggacccctggacccccagaccccgccccgagacccgcctggaccccatatcccccgcccc

SEQ ID NO: 23227 - DNA, 122 bp, Homo sapiens
gggttcagggtcattatatgtcaatgaccttcagcacggattactaacaacagtaacatccgttaccgtttactgctttcctattaagcaccatgcactgtgcataacatgttatctttatc

SEQ ID NO: 23228 - DNA, 122 bp, Homo sapiens
aaccagctcatcagctgccgggctatcacagtggcttactctgctctcacaaaacagtcgcggtgccactccggctccaggctgtacgcccagggccccccccttcatcgctgcctcctgca

SEQ ID NO: 23229 - DNA, 122 bp, Homo sapiens
caggaggagagggacttactcttcttggtttcccaaacatggagcacgattttgaagatgcggaagatgtagttgcgagaccccaagcagcagacctaacatcaaagtgagctgaacatttg

SEQ ID NO: 23230 - DNA, 122 bp, Homo sapiens
gtctcccgcatacccggcgggcttcgggacgcctacaaatcggttccaggtaatcgcgcgcgttcctccggcagcacatcgccaggccgcgggcgaagggctcccacctcctggctcggcca

SEQ ID NO: 23231 - DNA, 122 bp, Homo sapiens
gggttcctggtgtgggtcaggcctgggtaaggggcctgagggtcatgatgcccgcaacatcggcatgccctggtcaccttctgcagccggacaggcagacgctgtgatgctgaggagtgacc

SEQ ID NO: 23232 - DNA, 122 bp, Homo sapiens
tcacaatcatgactggcttactcatgatcaaaatattcagtgcggccagaacatgcagctcggcaaactctaaggagtcccaaatataacaacctactttgctctgcccaaggaacagagac

SEQ ID NO: 23233 - DNA, 122 bp, Homo sapiens
ccaccgccgccgccccgggaggaggcgacaccatgtcggaccgggtcacatggggcggcgcgggccgagccctgggcacgcccctcacacctgcagccttggagccacttcggggtgcgggc

SEQ ID NO: 23234 - DNA, 122 bp, Homo sapiens
aaaatgcatcccacactgcaggacaaatggtccttatggagtgccgcgttctctgtactacgtggctcatggaaaaagtgacaacatggcttcctctaaatcatttcacctttcagtcccca

SEQ ID NO: 23235 - DNA, 122 bp, Homo sapiens
gaaaatgttacccagccttatgtctgaattttattgaggctgaaaacaactttaacttgccggctcactggaaccccactcccagtggctccttgattaggtttgactgtatggcagtgtcg

SEQ ID NO: 23236 - DNA, 122 bp, Homo sapiens
tgacatgatggctgaatagtactccacatacacgtgtgcaccacattttctttctccattcgtctgttgatggacacttaggtcgcttgcagatcttggctattttgaatagtgctgcaata

SEQ ID NO: 23237 - DNA, 122 bp, Homo sapiens
ccagccgtcaggaaaggggggactagcacgtaccactcagaattcagcttgcgcgggctgcggtggagttctggggtttgtttgtgggcatttccaggtagtctgatcctgtgaggagcaag

SEQ ID NO: 23238 - DNA, 122 bp, Homo sapiens
gtcaggactggcgatgcgtaggccactgagagcacccggagtccgagtgacggaatcaggcgggcgcccgcgtcgctaaggagtgcgtcacagtgcgcgggcggccgggggcagggccaggg

SEQ ID NO: 23239 - DNA, 122 bp, Homo sapiens
cccagcctgggccctcacaagcgagggcaggaccgcggccccactctggaaagtgattagcggccccgccctccgccgaagacagctagggtagatttcacacagccaggaggagctccagg

SEQ ID NO: 23240 - DNA, 122 bp, Homo sapiens
gcctgggacttgcaggtcacctgaatgatactggtgccatttctgaagttggtgaaactccgcattacatcctgactcagagattccactgatgatttccaggaactaccaaagccacggat

SEQ ID NO: 23241 - DNA, 122 bp, Homo sapiens
gagacaccagggatggggcatcctgctcccacctcagccacagggctcagcctcagggatcgagacccaggttcaaatcccagctccagtgccaactgacaatgagacttagaaccagctgt

SEQ ID NO: 23242 - DNA, 122 bp, Homo sapiens
cccctcacccctacgccatcttcgatagccgcttggggaaacaaaacagattatgctgggcgggttgaattcctagaagtaagaccttagacatacattgccaattgccctctggaaaaccc

SEQ ID NO: 23243 - DNA, 122 bp, Homo sapiens
ggctcaagcgattctcctgcctcagtctcccaagtagctgggattacaggattcagaatccgtctcaaaaaatacatagatagatatatagatagatagatatcctggttgtgatactgcac

SEQ ID NO: 23244 - DNA, 122 bp, Homo sapiens
cgcagcgctcgccgtcgggctagggctccgccgccgccacgcctcgcgcccggcactcaccgccccatgctggtgcacacctactccgccatggtgagtagtctcgggcccgggacatattc

SEQ ID NO: 23245 - DNA, 122 bp, Homo sapiens
cgccggcctccgaggccggaagtcagaaggcggaagtgaactgcagcctatcagcgccgccggcttccgcgcggcattgtggggcttgtagttcttgtgccgcagggctttaaaggaaacgc

SEQ ID NO: 23246 - DNA, 122 bp, Homo sapiens
tcttgggctattttctctctatagggtcctctgtgtcttcaacagtaacaatagttgctgcgtattattgtttcaatgatttttaaaattgccttctgtaaatatttggggatttggactag

SEQ ID NO: 23247 - DNA, 122 bp, Homo sapiens
gaatacgtcagaggcgttttgctcgcctttccaaaagcaaagcaagagaaggaagcttgtcgcgggcctggcctgtgtgttcatccaagttgctgcaatcttttcttgtttttaaattccct

SEQ ID NO: 23248 - DNA, 122 bp, Homo sapiens
tactgcagcaacataccaggaaagccaagagaattcacagaccctttgaaggaactgtatcgccactgcagtttctctgagatgccaaaaagaaaagtcatgagtctgcttgctttctcagc

SEQ ID NO: 23249 - DNA, 122 bp, Homo sapiens
ggttccggggttccgggagctgtccagcctcgcggggtgagctacgagagggtgggccaacgccggcgaggcggagggagccgcgggcgccaggcgcgggtgaggcagcgactccccctcca

SEQ ID NO: 23250 - DNA, 122 bp, Homo sapiens
tggctaacagactggcctcaggtgggacccctggcgcagctcttccagtgggccctgggccgtttctgaggagatgggaacctgagcctgcactcccagggcctcacactctgacctgtgtc

SEQ ID NO: 23251 - DNA, 122 bp, Homo sapiens
ccctccgcagctgctggcccgggtggtaagcccctcactgcccggggcccgcgccgccggcgggcggctcagagtgcggggccctctgaacccacacccacccggaacttgcgctggcccga

SEQ ID NO: 23252 - DNA, 122 bp, Homo sapiens
gggttaaatgaaatattagttctggttgctagtgcagatctggactcggatcaagggtgtcgagagggtcctgggtcctgttcctttgcctttcaaaaagactttttacggattgagaattt

SEQ ID NO: 23253 - DNA, 122 bp, Homo sapiens
ccacgctgcacgtgctcctggtggacggcttctcccagcccttcctgccgctcccagaggcggcccccggccagacccaggccaactcgctcactgtctacctggtggtggcgttggcctcg

SEQ ID NO: 23254 - DNA, 122 bp, Homo sapiens
cgggcccagcgcatttctggggcatctcccagcatgctgcttgtgtcctgcagaaagctccgcagcctccttctcgcattagcctgacgggaaagtaaattagggctattccacccctgcac

SEQ ID NO: 23255 - DNA, 122 bp, Homo sapiens
cctattcccagagaagaaaacctcggggtcctgttttctcgccgtgtgacgttcctgacccgctagtccgggttatttatagcaggaggggaggggggcgaggggagcagaaaggcaatgct

SEQ ID NO: 23256 - DNA, 122 bp, Homo sapiens
ggaggtggcgtggggaggtggggaacggcccgggactcgcacgtggaggtggagcgcggacgcctccctcagccagggcaagactaaggagctgggtgagggaccggaagggctggaagggg

SEQ ID NO: 23257 - DNA, 122 bp, Homo sapiens
tatgtgcttatgggtgatagccgctatttaatgctactgtgtgtaaagcactgctctaaacgctctgcatgtattagctcactgagtcttcacaaccaccatattgagtaggtacgatatta

SEQ ID NO: 23258 - DNA, 122 bp, Homo sapiens
ctgctcttcgctattaggttagcgttcggaagttttcagtccttgttttcccgttgacttcgctgcctatgtgcagctaggctggaagcagcaatcgctgatagaaagcctgtggttaaagc

SEQ ID NO: 23259 - DNA, 122 bp, Homo sapiens
aacaatagctagctctcggtggcagtcaggccgcatttggtgttcacacaagtcccacgtcggggagggggccgtcctctgcacagggccctgagtgcccaccctgcaggcttcggggccca

SEQ ID NO: 23260 - DNA, 122 bp, Homo sapiens
cgcacaccgccacgtcaacctaaacctacaccgccctctccaccccaccgccgcagcgcccgctgggcccgcagcgggtctccccaggcagcgtcctccacgcctttcccacaatgctccgc

SEQ ID NO: 23261 - DNA, 122 bp, Homo sapiens
gcggcggacaatggcccgcgggcgccgggccggggctgcgcttaccgcggcgggcggcggcggccggctctagccctgctccggcgctccgcgccgcatctcctcagcctgcgccgccaccc

SEQ ID NO: 23262 - DNA, 122 bp, Homo sapiens
tgctcctcatgttaccctggtgtccttccccagagcagttgttttgggaaaaactggctccggctgaagcaggaaatggtgctccttgtcaaggtcatgttgtcctgttgctatagaactga

SEQ ID NO: 23263 - DNA, 122 bp, Homo sapiens
ggacccgcctcgcagggcgtccccatgcaggggcaaggcaccatcggcaactacgtgtctcggaccaacatcaacatgcagtccaacccaggtacctactctgcctctgcaaccccgggggg

SEQ ID NO: 23264 - DNA, 122 bp, Homo sapiens
tacctgggagcactagaaagtttttccaacatgatttccaaaaggaccgcctccggaagacggcatttccaggagtgacgctaaggcttcctaggcgcggtttctcgggcactgcctgcaat

SEQ ID NO: 23265 - DNA, 122 bp, Homo sapiens
ggaggaagcgggggaggggacgggtctggtgaagccggggaggcgcggagccggggtgaccggccgggggcgtgggggcagggacgaggccgggagggtggggggcggcgtgggggaggggc

SEQ ID NO: 23266 - DNA, 122 bp, Homo sapiens
cagatccgggccgcggctgtggggagggcgacggagcgggtgaccttccggaggcgggagcgagcgaggaggcccgggagcgccgagcgtcgccgccgccgccgccatgaacaactcgggcg

SEQ ID NO: 23267 - DNA, 122 bp, Homo sapiens
aatgaaccagacaggatttgtgtgagattccactggaaccttgggtatgatcccaacagccgcaagtctcagcctggactgtcacgggtactgttcccagcaaaggggctggggagtggatg

SEQ ID NO: 23268 - DNA, 122 bp, Homo sapiens
gcaggggactgccactttccatcttcatgctctccgtcagtgacacctggtacttgacgccgtccttgtcctctcctcgggctgcactaccccccgcggaagatgaggctggagacgcagcc

SEQ ID NO: 23269 - DNA, 122 bp, Homo sapiens
ctcaggtgaggggggaataaagggaacaggaagcgccttttgcggggctttgcaggctggcggtcagcgcctttctgcacccgtgtgcctggggcctgtcactctccagccccaaggccttc

SEQ ID NO: 23270 - DNA, 122 bp, Homo sapiens
actccagcccgtagatcactggtgcatcgtcctccatgctgcggggaagcgacccgaccccggccactcacacgctaaggacctcgctacggccggcgcgtccccacctcgcgggcgtgttc

SEQ ID NO: 23271 - DNA, 122 bp, Homo sapiens
tcccactgagggggccgaagggccgagaccggaggtaggtaagatggaaaatgcccaggtcgctgcctgcagagcaggtgaggacctgtgtgtgatgagcacgcctctcccaggggccgacc

SEQ ID NO: 23272 - DNA, 122 bp, Homo sapiens
ggtcccggccgcgcacccgacgtcgcagtggaggctcccgagccgccgccagcgtcgcgacgggcaggggtgtccggtcacctgcatcaactcgaagatgtggttctcctccccgtactggg

SEQ ID NO: 23273 - DNA, 122 bp, Homo sapiens
aagtctgcagcagaatcactattttttttttaatcactaatttttaaactgtggtctttacggctcagatctgggagtggacattgacctttcttatttaaaccattgcccacagataacac

SEQ ID NO: 23274 - DNA, 122 bp, Homo sapiens
caggcaagcaggtcgagagggagagagggagggagagagagggagagagagaggatcatccgccatgcagcagtaaccagagcctctgaaacgtcagtgtttgaacgcacacacacacacac

SEQ ID NO: 23275 - DNA, 122 bp, Homo sapiens
taggcagccatgcacatggcagtcaaggccctccctttccattccagactgtgattgatccgtgctcccctccccgccccgaccccactccccgccccgcccccactccccgccccgccccc

SEQ ID NO: 23276 - DNA, 122 bp, Homo sapiens
acctcaggtgatccgcccactttggccttccaaagtgctggaattacaggcctgagccaccgcttccagccacggtctcttttaaagagggcttttatgattattaaattcccctaacactt

SEQ ID NO: 23277 - DNA, 122 bp, Homo sapiens
tgtttgtaaatataatggtatcccagatgtacgtggaagcacacaaccccagcacttcagcgggaggggggagaaaaaaatcttttgtacgagctcttttctcatcacaaagtgtctctcta

SEQ ID NO: 23278 - DNA, 122 bp, Homo sapiens
cttattgttccctggaagattcaacagggagtgaaattagaaagaaacaggtactgtaaacgccaatataggaagtgcttacagaattaggccccctaaagagggcaatccctagcatttct

SEQ ID NO: 23279 - DNA, 122 bp, Homo sapiens
acagtcacttttttaacatcaacaattcaaaacattcagctttccatccacctttttctccgatcataattttgtgcttataaatcctatattatgtcactgactggcctcctgataagagt

SEQ ID NO: 23280 - DNA, 122 bp, Homo sapiens
aggttccgaccccatctgctctctcgccttcctccttcccctctgccctctgccacctgacgacacagcaagagaccctccagatgcggctgcgcaatctgggacttcccagcctccagaaa

SEQ ID NO: 23281 - DNA, 122 bp, Homo sapiens
tatccattgagctctcccacagaccttcttgggcccaatcagacaataatgaagtgcaggcgagacagcattctgcactcacattccaggcactggttcaagtccctcctccaggtccctca

SEQ ID NO: 23282 - DNA, 122 bp, Homo sapiens
gctggcccagttgatgacgtcaccataccacagcttctagtgctattctgcgccggtatccgaccgccgggcgcggtggcgcgtgcctgtagtcccagctactcgggaggctgaggctggag

SEQ ID NO: 23283 - DNA, 122 bp, Homo sapiens
gcaaaggcaaaggaaagaggagcctaaactcagtgatgttatgtgatttttccaagatcacgcagcattggcacttggcagagctggggctgaaatgcagggccctggacgctcccgcatcc

SEQ ID NO: 23284 - DNA, 122 bp, Homo sapiens
ggaggaggtaggatgggggagggcgcagcccgagcggctgaggctccagccataaacaagcgcccggaggagcggcgcaggagtgaggcgagcggggcgcgcggagcggacgccgcggatct

SEQ ID NO: 23285 - DNA, 122 bp, Homo sapiens
agagaggaagagctgtgatccagaaggagcacacggtgccacagggctggggagaggccccgatgccacccagcccagaagcccagaggtgaagaggccctggattgaggagaggagaggac

SEQ ID NO: 23286 - DNA, 122 bp, Homo sapiens
ctgtggtgtaaatactcccactgtggccaattcatgctaccaatgtgacatcactgaaagcgcagtggagaagagaggcacagtgaaataccgttatacagtatttcctccctatcgacata

SEQ ID NO: 23287 - DNA, 122 bp, Homo sapiens
aagtgctgggaggccgccgtgcagggtccttcttttactctgacgttgcaacaacagcctcgccgcccactgttcactcgcagtatcccaagaactaaaccagtagcaacacagaactcagc

SEQ ID NO: 23288 - DNA, 122 bp, Homo sapiens
tcggcccgtcaggggagatcggggcctgtcagtgcccctaagcctgaaggtgcaggtctccgagccccagcggagccggcctcgtggaaggacgagggaaagaatgcgtggtgcacggggcc

SEQ ID NO: 23289 - DNA, 122 bp, Homo sapiens
ggcaagggggctttggccacatggggggcaccttcaggtgcacaggaggaagggcaggggcggacagacaccctgagcccttagacttgtgggagccaagctgaccagagtgaggttttttt

SEQ ID NO: 23290 - DNA, 122 bp, Homo sapiens
ggggccgggcggggggtgcctgggaagccaggctgcgctgacgtcactgggcgcgcaattcgggctggagcgctttaaaaaacgagcgtgcaagcagagatgctgctccacaccgctcaggc

SEQ ID NO: 23291 - DNA, 122 bp, Homo sapiens
ctgctgagaagtgcagaggctttagggtgtgaaggagtgtgccatgcatctgggggtgtccggggaggagtgttccagatagaaaaaagagcagtgcaaaggcccccgaggcaggagtgtcc

SEQ ID NO: 23292 - DNA, 122 bp, Homo sapiens
ttaggatcagtctctgggcaggtgctggcgctgggtgtaaaattgctccccaggtgacttcgtatgcagctggatccctacggtgccttccagcttctcagagggcctctctgagccctgca

SEQ ID NO: 23293 - DNA, 122 bp, Homo sapiens
ggacccagcggagagggcccgggtgagggctctggaggcgctgagcagggccgggagccacgggacccgcagagggcgcccgtccgcgtgggggcagcagcgtctggagggaggtggccccg

SEQ ID NO: 23294 - DNA, 122 bp, Homo sapiens
gaaaggtctcatttaggggttatcttttactcctcctcaggataagttcagaatccccctcgaaccctgggagtgggtctccctctgctgaccaacggatgagcgctaagaaagagcgtacg

SEQ ID NO: 23295 - DNA, 122 bp, Homo sapiens
ttctctgccctgtgggtggccataaaatccagacaatttccccctaggtgttttcgatggcgcagccacagcttctgtgagattcgatttctccccagttcccctgtgggtctgaggggacc

SEQ ID NO: 23296 - DNA, 122 bp, Homo sapiens
agccctggagaggtgggggggcggccaatcagggagcagcggccgggggcggagctgggccggggcggggcgaccctcgggaggccgggccacccgggaagcctctgctgccgccgcaccgg

SEQ ID NO: 23297 - DNA, 122 bp, Homo sapiens
ccaaatgaacattcattttacaggacatgcaggtgatacaaacgttaagtgacaccacaacgaagctatcagacaaattcagagtgtgggggcactggacaagacaatcagtcctgtctctt

SEQ ID NO: 23298 - DNA, 122 bp, Homo sapiens
ggcctaccacctgcacatctacccccagctgtccaccaccgagagccaggcctcgtgccgcgtgactgccaccaaggacagcaccacctcggacgtcatcaaggacgccattgccagcctgc

SEQ ID NO: 23299 - DNA, 122 bp, Homo sapiens
agttgttgtgcagaagggggcagtgttggaaaagtaactacctggagtactgtcttaacacgatctcaagagtactttactggaagttactgtgaaaacttggtatcacctttgtggcaaat

SEQ ID NO: 23300 - DNA, 122 bp, Homo sapiens
aatcctgtgttgtggcaggcctcctttcacgctgccctgtaggtcaagggggtaccacctcgttatcacccgcgagggtggaggtccagttcccactcagccatcatcgacacctgcaccgg

SEQ ID NO: 23301 - DNA, 122 bp, Homo sapiens
agcgcctaggccggtgcagctgtaggatcagcccgactccctcccaccttccctccttctcgcaggctgccacttcccttgggtgacagctcccaccgcacgtgggccctgctttcccaatt

SEQ ID NO: 23302 - DNA, 122 bp, Homo sapiens
gtactgggagacggtgctcagccactggtcattgtctaggaaattgccgtggttggggcccgcgcctccggcgagcgcgtccaggtgccggctctcgacttggaggaagcaccacgccgcgg

SEQ ID NO: 23303 - DNA, 122 bp, Homo sapiens
taacagatggaacattcttgtaactaaggttgccattgtaacaaattaccacaaacttggcggcttaaaacaacagagatcttgaggtcaggagttcgagaccagcctgaccaacatggtga

SEQ ID NO: 23304 - DNA, 122 bp, Homo sapiens
gcaagaggcagtggcgctgtatggaggacacacacctgcaggcatgcagaccaagtacctcgatgtcggctggggcctgggcagcgtcactcatgagttagcccccggcatcgactgcccgg

SEQ ID NO: 23305 - DNA, 122 bp, Homo sapiens
cagccctgggcctggcacccccagtcgcccgcagtctccttgtggtggcaccggcgtccccgctggagcggctggaggccaagcccaagcatgacagctgctcctggcctgggaaccgcaac

SEQ ID NO: 23306 - DNA, 122 bp, Homo sapiens
ggggcagatggtagatgatagactattagctgagccctcagctcctgcacagctgacagtcgctaaccatctcgtctttctacatgtgttggcggggggctgtggggcagggaagacctggg

SEQ ID NO: 23307 - DNA, 122 bp, Homo sapiens
gggccgatcgcccgatgcccacagcggggaccactacaccgaagcctacagcaggggccgcgacagtttcagcaacagctatggccggagtgaccattacggaagaggaggctgctacgagg

SEQ ID NO: 23308 - DNA, 122 bp, Homo sapiens
gtcttccttagagcatcaggtatctgaccactgacatcacctgggcacctgaccagctgacgcgcgtttccaggagccatatctgtgccgtggggtcgggttgccggcctaaggagcaggat

SEQ ID NO: 23309 - DNA, 122 bp, Homo sapiens
tgttgcccaggctggtctgaaacacccggggtcagcctcccaaagtgctgggattacaggcgtgaggcaccgtgcccggccaccaaactgactttaaatcacactccttcactcggagtttt

SEQ ID NO: 23310 - DNA, 122 bp, Homo sapiens
gttttaggcctcaggacctaacatctgggaaggcctagatgtggctgctggtcctgccctcgggtgttgtgagctgtggtctggactgggccccagaactgcatgtcagtgccctcctccaa

SEQ ID NO: 23311 - DNA, 122 bp, Homo sapiens
ggcaggtcacggtgggaccggccaccacaggccccggggagcctttcctaccccacccttcgttgtcctgcctcccaacagccagacaggtctattactgctttaagtctctgggtttgtat

SEQ ID NO: 23312 - DNA, 122 bp, Homo sapiens
cctccctatgagctatcacacaggtgtcccgcagtgatcagaaagcaccttcctccatggcgaggtcctgcctgcctaagctgttgtctcttctggaatactctccttcaccctcccttggc

SEQ ID NO: 23313 - DNA, 122 bp, Homo sapiens
agcatgttactggcatctatgttgttaaacatcctgcaatgcacaggacagcctccacaacgaaggattatctcatctaaaatgtcattggggcagaggctcagaaactctggtctagagtg

SEQ ID NO: 23314 - DNA, 122 bp, Homo sapiens
atgaggaataagttctggagatttgaagagaggaggaattgtcttagtccattatggccacgataacaaaataccttagaccaggtaatttataaacaagaggccaggtgtggtggcttaac

SEQ ID NO: 23315 - DNA, 122 bp, Homo sapiens
agtatctgttttaaaaaccactgtgatagctagctatcacctcaaattttgaagtcgtttcgttgagtgtgaaaaaaaggagaagacatttcaaagtgcatttagctatttaaaaacccttt

SEQ ID NO: 23316 - DNA, 122 bp, Homo sapiens
ctcctcttcgcgcttgcggaccccggagttgcccccctgcatcgccggccgcgcgcgggccgcagcccagcccgccggccagcccagcactgccacactccgatgctgcagctagcgccgtc

SEQ ID NO: 23317 - DNA, 122 bp, Homo sapiens
ataacctccccaggggcccaagtttttgtcttgttcatgcagtgtctccagcccctaggacggcatccggcacagagtaggtgctcaacaacatttgttaaataaattaagggcagagataa

SEQ ID NO: 23318 - DNA, 122 bp, Homo sapiens
gactcccctccgcacctgcttagcagtgccagccagtgtgagctgttctacagcgtgtcccgcatgcacagtgatgaccaggaaacggtggaggtcaaccatccatccccagaaggaaaatc

SEQ ID NO: 23319 - DNA, 122 bp, Homo sapiens
cccagcacggccgccggcctcgccttccccgctcctgaaaaatgagatcatttcaaacagcgccgttttccactttgcaaaatgtgcttgcgtttgggggagcaaatgtttcaccttttatt

SEQ ID NO: 23320 - DNA, 122 bp, Homo sapiens
tataattattaagcatttactacctgtcaggtactttacacaattgtcccctttaatcttcgcagtagctgtatgaagtaaggactatttttaccccctgctttgcatgtgaggagaccagg

SEQ ID NO: 23321 - DNA, 122 bp, Homo sapiens
gcttgctcagacccagcgtggtggctgccaggggtgtggttttgagcaggattctgggggcgtatccagatccaaggaagaagagcacaaggctggaaggtgtcagcacacaggccattcat

SEQ ID NO: 23322 - DNA, 122 bp, Homo sapiens
cacgacagcaagagggaagaagagacaacagcagcaccctgagaaacagtgacacagcatcggcttccagctgagacagcgagctgacagtcacgtgcctctcacactcagaatggattctg

SEQ ID NO: 23323 - DNA, 122 bp, Homo sapiens
tctccagcgcaggtccttgtgtaaggtacattgttggagcacaatgagccatgtcttcgccgtgcttttgtcggggtcagaaatgccgcgcaagcagatggtccctgcattcatgtttttca

SEQ ID NO: 23324 - DNA, 122 bp, Homo sapiens
ctgtaacttgagtccggaaccgcggccctcacagccccagcccctccggcgtgctggggacgccagccccgctcacgctgcagacagtctgctgctaagcgcgggtctcagctctggcctag

SEQ ID NO: 23325 - DNA, 122 bp, Homo sapiens
tgggctcaaggatcctcctgcctgcctacagtctcccaagtagctgggcctccaggtatgcgccaccacgcctggataactttttattttttgtagaggcggggtctcactatgttgccagg

SEQ ID NO: 23326 - DNA, 122 bp, Homo sapiens
aggcctcagacctgcctggtccatgtgctggagctttaagagctctgggctggggccaggcgtagtggctcacacctgtaatcccagcactttgggaggccaaggcaggcagatcacttgag

SEQ ID NO: 23327 - DNA, 122 bp, Homo sapiens
cgcagtcagtctcacagcaacagctaggctctcatctgcgagctcctctcgggggtctttcgtactcaacagcacggcggcggtgtgcacgggagtccgccgggcacacgcggggtacactt

SEQ ID NO: 23328 - DNA, 122 bp, Homo sapiens
gggacggagagcgggaagcaaggtccatgaggatggggtgtcctgcagctgggtcctgaccgggggctgctccctctcctgggcctaggcactgcaggaaaatggcaggtagtcagcctgcc

SEQ ID NO: 23329 - DNA, 122 bp, Homo sapiens
tgggtgtagagcatctgaacccatctacacattgaccaaacacaggcaggttccagtctgcgggggagatggagaaggtgccaccatgctgctgcacaaatcccaggatagctggggaatga

SEQ ID NO: 23330 - DNA, 122 bp, Homo sapiens
gctgtgcgcccgcaggtcccagactcgccgcccgcctgacctggcgcggcgccctcacctcggaacgctgggtggacttcgcagtaaaccttaacttcccatccaggcggcagcggcgcggt

SEQ ID NO: 23331 - DNA, 122 bp, Homo sapiens
tgcctacttgcagatagggacacgtgtggatgcctagccagagggtgcaatacagactggcgtgggcagagatgtgcacccccttggagaggaataccaagaagttataattaaagagaaat

SEQ ID NO: 23332 - DNA, 122 bp, Homo sapiens
ctgctcgccgtgtgtgcacgccggccatggggagggtatgataggcaccaaagagcaacacgcctctcatgtacttacatgcttatgctcacaaacctccttcccccgtgaagcaggggaat

SEQ ID NO: 23333 - DNA, 122 bp, Homo sapiens
gacatacagccctggtgcacaagggtcccattctttgcacaccaggggtataatggactccggactgttggcgagagtgacagcaaaaagagccagcctcttctcccaggcttcttagcaac

SEQ ID NO: 23334 - DNA, 122 bp, Homo sapiens
aaggaatttgggcggggcagaggcagggggttgcagtggtcctggaaggccctggggaatcgggcactgggtaggttgtggccttggcatatatccagcctctgcatcttggcctccagggg

SEQ ID NO: 23335 - DNA, 122 bp, Homo sapiens
tgcatctgcgacgtgggagccgagagcttggctcgtgtgcttccggacatggtgtccctccgggtgatggagtgagtgtgggagtctgggcggtgggtggctcagcccggggtgggagacac

SEQ ID NO: 23336 - DNA, 122 bp, Homo sapiens
gcgtttcccgagggaggccacggggcacctggacgagggcagcttaggacgctcggctctcgtctcaggaatcccagggcagaagtccagcgaggcggcaggtggccggcccgtccccagcc

SEQ ID NO: 23337 - DNA, 122 bp, Homo sapiens
ggcaccgagatgtcctgtgtgttcatggagtttatgttggggtttggttgggggcacccccgagctcccctccacagttcagaatgaaacaagaaataagacaggacaggcagataaaaatg

SEQ ID NO: 23338 - DNA, 122 bp, Homo sapiens
atttgaacctgcccaagttaatcatgaagctgcgatctttatctaagggagacgtgcgagcgcctgggctcctttcctccccgatacagtagcgaaatccagttggcttctcaatgaggagc

SEQ ID NO: 23339 - DNA, 122 bp, Homo sapiens
tgtctacaccacgctggaaccattttctgtcccacctcgggactgggtggcacgtgagagcggccagggagagaccgcatctgggaaggcacagctggctgcagggaacggccgccctggaa

SEQ ID NO: 23340 - DNA, 122 bp, Homo sapiens
ctgacagcctgccatccctcagccttttattctaacacacagacagggagttagtgtgtgcggatctgtggtggagaaggtatctcattcctctctaacatcatctccactttgcatctgtc

SEQ ID NO: 23341 - DNA, 122 bp, Homo sapiens
gaaggaaaagcccagaatgagggctgtgctaggagacaccctcaacaggtgggccactcacggctgaacgctcagcgtccacgagaactaagcctgccacagcaggggacaacaaggaggca

SEQ ID NO: 23342 - DNA, 122 bp, Homo sapiens
cagtaaccgaagccacgcccagttcctgaaccacgtcggctcccctcccccaacaccgttcggaatccttgggtcaaccgcctccgtctccacagcaacggagtttcagagcgcgcggcagc

SEQ ID NO: 23343 - DNA, 122 bp, Homo sapiens
tggcgggatttgaggagcctggagaggcccaccacgtgtgtgtctccccctagtgaccaacgggctgaagttcctgtggttaaaggcaattgctgattttgtcattagcaggaaggtgaagc

SEQ ID NO: 23344 - DNA, 122 bp, Homo sapiens
cttcgctggttgtcacacgtccggaggccgagccgtcgcgtacctaggatacctggaagccgaagccacacctcccgcatggcccctccggccagccgggcccctcagatgagagctgcacc

SEQ ID NO: 23345 - DNA, 122 bp, Homo sapiens
gctggggggttgttatctctcagggcttagcacttgttggggatgggtgaagtccagtcccgagtcacagtgtgtgttgtgggaggttgctgatattcatagccctgtatgtttgagtaatg

SEQ ID NO: 23346 - DNA, 122 bp, Homo sapiens
agctcgcggcaagcaggcagcgcagcagcagtagcagcagcaaccgggccgccgccgccgcggggctaagagattacgttcagcaaaaactcttccaggaaagaggctcgagagctcccctc

SEQ ID NO: 23347 - DNA, 122 bp, Homo sapiens
ctccttcaccttgtggcccccccatgctggctccctggaggagggagacagggtagcccacgatagccctccaaggctggtgctacacgttggagcctggaagggcctctccgtcatcccct

SEQ ID NO: 23348 - DNA, 122 bp, Homo sapiens
gctgttgcggcgcagctgtcgactcggtcgcgcggagggaattgagcgacggttttggaacggtggtggcggctcggctactgctcgtggaggggaatacaggttgtcaatttatacgctat

SEQ ID NO: 23349 - DNA, 122 bp, Homo sapiens
gggaagaaaaagcccagacaagcgtcctcttgttgagtctctttactgcaacgaggctgacggatggggtttttcaaaacgtcgctgcaaccagatgcaaggctgcagctttgcttaccgca

SEQ ID NO: 23350 - DNA, 122 bp, Homo sapiens
acggtgacaccggaacacttcagaggggcggctggggagttggggtgggacgggctctcccgcagctggagccggtgtgtgacgcgggaacgcggccaagcgcgccccatccaggcggccta

SEQ ID NO: 23351 - DNA, 122 bp, Homo sapiens
ttctgacttggaggaattctgggagccaaatcatagctaaacgtgtgaatcttcactaatcgaaatgggtggaattttctgtaaagatgcaaactggcttgactgtgtccagttattgctcc

SEQ ID NO: 23352 - DNA, 122 bp, Homo sapiens
ctggagcacccatggcacctggtcctgaccttagctttcttaaagacctgtccatggggacgctgatgaaaggattggttaggcagcccccaatctgctagacatgctatttgtagctgcac

SEQ ID NO: 23353 - DNA, 122 bp, Homo sapiens
gcggacgccgccgggcgatgcgcgaggcctgctgggctgacgtgacgtgaggctgggctgcggggcgccggaggcggaggcgggggcggggcgccgggaccgactagggcggggcgcggggt

SEQ ID NO: 23354 - DNA, 122 bp, Homo sapiens
gtgagaaaagacaggagagaaagccgggagagaggatagaggggcgttctcgctgcgctgcgtgtcagctctggtaagccgtctagcatgtcattagtggggacctgaggcgccagcgggaa

SEQ ID NO: 23355 - DNA, 122 bp, Homo sapiens
tccggacggcagcgggagaggcgcggccgagaaggcagaggcctggttgggctgtcactccgagccggggcggcatgtggctgggctctccaaccgcgagcggtcggggcaggggaaaggaa

SEQ ID NO: 23356 - DNA, 122 bp, Homo sapiens
cgacgccagctggctgctccaagtatggggcatgccgagtccgcacctaccaggaactcgcgctggcctccgagccctgtgcgcagcccctgttcccgcccgcacctctacctccacaccta

SEQ ID NO: 23357 - DNA, 122 bp, Homo sapiens
tcacaagttctggcagccctatctggactggctacacctctgtatctgaacttttgtccacgggacaggggtctgacgcttggcccaagtaattacctggtctatacttttccttttgtcaa

SEQ ID NO: 23358 - DNA, 122 bp, Homo sapiens
gcgggtgtggcgcaaagtgtgcggggtgtggcgcaaagtgcgcggacccgggtcctggaccgaagatttagcccagggtttcgtgtgtgttgctccctgttgctttctacggggtctgcgct

SEQ ID NO: 23359 - DNA, 122 bp, Homo sapiens
tcttcttgctttaaccggggtcgctcagcagcggccagcgctgcaccccttatcctctcccggtcttgtccgttccagatcctccaggtcagggggtcgccaagtgagagctgcgcagcgtg

SEQ ID NO: 23360 - DNA, 122 bp, Homo sapiens
acacggatgtggggtgcagaacgctgtagtggggacctccaggccggcttttgcttgcaccggagggaagaagaaactacactgcggggacgagcgtaagagtgggcacgagcgacaaaagg

SEQ ID NO: 23361 - DNA, 122 bp, Homo sapiens
cagtgtgagacccggggctcggagaccgtgaccctacctccagaggcagtcgtgcagattcgtgccggggtgattttgttctgtgcagtttatgtgcaagggggtaggaggtggggagagca

SEQ ID NO: 23362 - DNA, 122 bp, Homo sapiens
ggcaagtcttcaaagactacagtcccagtcaacctttcactgcaacctcatggtaaaccccgcactggtacatcaagctgctcctgaattcctgactcacagaaactgtgagagaataaatg

SEQ ID NO: 23363 - DNA, 122 bp, Homo sapiens
gaggaaattcccctcagggaggggtgtcggggactccggagagctgtttcgggctccggacgctttcctgggctccaaaactgggagtgacgcttttgagccctcacgtgtgccgcgtactg

SEQ ID NO: 23364 - DNA, 122 bp, Homo sapiens
ccccttggctagtccagctggaagagctagaccgcaggagccgcgccgtcttcctaacctcgcctcggccttcgctccacagtggagagtgggagcctagctgtgcttgatgctgaatgcct

SEQ ID NO: 23365 - DNA, 122 bp, Homo sapiens
gaggctgaagaaagagcttgtggccagatcctggacaacctcttatgtcaggctaaggaccgtactcgtcagagggggaaagcagcagtcagaagaccccagtgcacagagatccatggtgt

SEQ ID NO: 23366 - DNA, 122 bp, Homo sapiens
tagccgcaccccgccgagctctgacctccgaagagggtccctgtggcgatcccgccccttcgtctgatgtttgtgcctttgattggctcttaggtggatccctcagcgtggcttgcccaatg

SEQ ID NO: 23367 - DNA, 122 bp, Homo sapiens
cggtaccaaactgtaactcctctcgctacagacgcggagaaccaaacgctgactatttggcgagggaccaccaccacccagaaaaacacacggttcagtgtgcgttgattgtttgcatcagc

SEQ ID NO: 23368 - DNA, 122 bp, Homo sapiens
aatcactgttcatcaacctgcattctaaactggggtgcagaatatttttgccccataatacgctgttgaaatagcattccctttattttacttaagaaaccagaagacacaatcatttgtac

SEQ ID NO: 23369 - DNA, 122 bp, Homo sapiens
cgccaacccggaaaccggaatctgctgggttcgggttctacctagtctggccctagtgtccgcctctttcttctaccccggtggttattcagattctcgccaagacccagagcgcgtttcag

SEQ ID NO: 23370 - DNA, 122 bp, Homo sapiens
ctgaaggcttgcgtggggctagaggatccactttcaagatgactcaccctcctggcaagacgatgctggctgttggcaggaggtctcagttccctaccacatcagcctctccatatggctgc

SEQ ID NO: 23371 - DNA, 122 bp, Homo sapiens
aggagaagatgttctggtccaccagcttctgctgcatcaggttgtcgaagacgggcagcacgttgttgacggagatgcgggggtaggccatgcccaggatgccatcgaacttggctgcgatg

SEQ ID NO: 23372 - DNA, 122 bp, Homo sapiens
ccttgcctggatctgccacgcttctgggaaagagtgctgcccaaacgccccttgttcctccgttggggtccaggagctccttcgacagttccccggtttaggagaactgtctgattctctct

SEQ ID NO: 23373 - DNA, 122 bp, Homo sapiens
acaagggaagggaggtgatagatgaaacaagattagcatagagctgatgattgctgaagtcgggtgatgagtacatagaattcatggcaatgttctctctacatttattggtatttgaaaat

SEQ ID NO: 23374 - DNA, 122 bp, Homo sapiens
ggcggtgggggactggggccgcatgcctgctcagcagcgcggggggcgcagggggagcgccgcttgcgccatcttgcacccacccgggcgatctgtcagcctcgcccggggtgcgcgctcca

SEQ ID NO: 23375 - DNA, 122 bp, Homo sapiens
ggtggaggggaggcttggaccgggggtgtctcagtatcccacggaaataacctagatgggcgcgatctggtaccagaaggtgggtggtcttgaataggggatctgtggcaggtcggagagag

SEQ ID NO: 23376 - DNA, 122 bp, Homo sapiens
catcccgcccgagggccagaccagcatggaccactctcaccactgggtgttcctgggcaacgggcagccgctgcgggtgcaaggagagctgtcgccgccagcaggcaacccgctggaaaccg

SEQ ID NO: 23377 - DNA, 122 bp, Homo sapiens
cggaattagcctcgaggtggtgtaaagtagtggcagtggtggtggggtgtttttggaaggcggcacagagtacaggagaaaaaggggtcattaaaataataacctcaatggcctagtggagt

SEQ ID NO: 23378 - DNA, 122 bp, Homo sapiens
ggccaagagatggcagagtctggcacggatggaccagcccacagcagccacggcccacggcgggagtgctgcacctccacccacagcggccacggcccacggcaggagtgctgcacctccac

SEQ ID NO: 23379 - DNA, 122 bp, Homo sapiens
aagatttcagatcggttcctccccgtagagattgggacaagaacttttccaccgtggggacgtactttgacccccagagttgacataaagattgtttttaagtgaaaacattgagctacaga

SEQ ID NO: 23380 - DNA, 122 bp, Homo sapiens
atttgtttaagtaggttccactgcacaaacacaaaaagccctaatacatgcagactgggtcggcctcatgccatcagatgtcaccgctgacgggtgatggcacttatatagatttacacaac

SEQ ID NO: 23381 - DNA, 122 bp, Homo sapiens
atgtaaatttataaatatattcaggagttggaatgttgtagttacctactgagtaggcggcgatttttgtatgttatgaacatgcagttcattattttgtggttctattttactttgtactt

SEQ ID NO: 23382 - DNA, 122 bp, Homo sapiens
ctctcctcagggcaggagctgggccaaccggacaccctgccctgggctctgggtcttgggcgggtatgaggaggtgctgctggcccccacagagcctccttcagttggccagggtccacttc

SEQ ID NO: 23383 - DNA, 122 bp, Homo sapiens
ggagcggccggctggctgcaggctggaggggcgcgagggtccgcactggcacatgagggccgtcttccaccgcgttgcgctggaacgtgggcccagcagatcttttggggtgggaggcattg

SEQ ID NO: 23384 - DNA, 122 bp, Homo sapiens
ttctaggtctgcgtgcctagggctgcgtgttagtggcttcaggcgctgcgccaaacacttcgtttgagtctcatctcctaacccctcccctacccccaacagggccttgcaattcctggacc

SEQ ID NO: 23385 - DNA, 122 bp, Homo sapiens
ctccccgacgcctcaggggcccctccgatgctgcaatatgttgctggggtcctgagcacccgctggccaacagaccccacatccaccctcgttcatcatcatctctgtggggacagacaaga

SEQ ID NO: 23386 - DNA, 122 bp, Homo sapiens
ttcccttttttttacttgccagggagtatttcccattctggctctctcttcttggtgtgccgtataaacctttcttgcgcagccacactgcctggagtaggatgttctcagggcccgggtta

SEQ ID NO: 23387 - DNA, 122 bp, Homo sapiens
ggcccagcaggcacccgagttcagcgccacgcaaggtgggtgtgtgtcccggccggcctgcgggcaccatgcatgcactgcagaaaggcctgggttgctggtttcaaaggctgggggctgaa

SEQ ID NO: 23388 - DNA, 122 bp, Homo sapiens
actgttaagttgtctatccaaatgggtggacaatggagctatcggcaaagttgctgccgccgaaagcctctcctgtccccatccacctcggtgagagccgagagtgttttctttctggaata

SEQ ID NO: 23389 - DNA, 122 bp, Homo sapiens
ggtgcgcacattcccgccagccccgccccgcgcccggacgccccgcccccagacctcagccggttccgcccccacccgcaactcccgtgggaatccagctgctgggtggtgggtggcagggg

SEQ ID NO: 23390 - DNA, 122 bp, Homo sapiens
gctgtgaagctgtgcgcaaacttctcctgacttaagagtctcaatcctagcctgcgctcccgccccacccccgcccgcctcccgacaggcggcagaggaggtggcagcagaattgatgagag

SEQ ID NO: 23391 - DNA, 122 bp, Homo sapiens
tacccactgtctgggccctctgagacctcagagagatggagttcccactgcatttaaccacgggggagctggggcacagaggggtgaagtggctgcctgctgtcaccactgattcctgcacc

SEQ ID NO: 23392 - DNA, 122 bp, Homo sapiens
tgaatcaagcttaatagctcaagggagctgggccatttcctattttctttttagtgagtgcgatgttctctaaacaccgcggagaggcagggttcccggtgatggccttgccgagggtgctc

SEQ ID NO: 23393 - DNA, 122 bp, Homo sapiens
gcagccgtgattggcgcgttcactcaggccaggggcgccccaggtctcaggtgctaggagcgcggtgacctaccaccctccgggcacgcgttctggccacgcctcgcggcccctttcattga

SEQ ID NO: 23394 - DNA, 122 bp, Homo sapiens
gcgggacggggcgtggctcgttgactgaccggttgaactcggagaagacgtagagcgcggcgcccgagtcccggctacccgctgccaccacctgcaggtacacggtgtttgggccgccggag

SEQ ID NO: 23395 - DNA, 122 bp, Homo sapiens
tagggccagcatggtcacctagaagcctgcaaacagtgccagcctccaggccctgtgccccgaggtggcctttaatcttgcactcactctctaggaaatgatggggcagtattctgtgttga

SEQ ID NO: 23396 - DNA, 122 bp, Homo sapiens
ggaggcaacatcaatgcagttagctacacgggcctgaaaactggaggccgcgacaagcgtcgctgagtggaggcccagtaagtcccacccactaggccagcccgagcgcgtctgccacgccc

SEQ ID NO: 23397 - DNA, 122 bp, Homo sapiens
gtgtcttctcggttggggagccgctgccaaaaacgtacacaccctgaatctggccctggccgctcaggagctgggtatctgagactctactatggccaactcaggttggcaggctgcgcggc

SEQ ID NO: 23398 - DNA, 122 bp, Homo sapiens
gcctcccagggtccctgcccagctgtgggtcctcactgagcacccggcgaggacagagtacggcatccgttggcctcgatctccggaacaacacgggcacacggccgtcccagccagcaacg

SEQ ID NO: 23399 - DNA, 122 bp, Homo sapiens
ccagagctgcctgggtcccaacctccctgacaactccctttgtgccctccttcccctctgcgatggcaccttcccattaacgactatggaatggactcacctgtcccatctttaaacagcaa

SEQ ID NO: 23400 - DNA, 122 bp, Homo sapiens
ttcttcaggctgtttggacagccgagaagccgagccacacccaggagggttgtttcacagcgtgtgccgcaggggcgcaggggccgcgctctttcctcacatgtgggagaagcggaggagcc

SEQ ID NO: 23401 - DNA, 122 bp, Homo sapiens
cgcgccaggtgggtgggtttcgcggtgacgaggcgacacctctttcccctctggcgagcacgttaactggggaagctaccaaattctcacgccttagctgccctgcctccacctcccgcaag

SEQ ID NO: 23402 - DNA, 122 bp, Homo sapiens
ttgagaccaatgctgtcctcgcctagtgggggccggcgtcggtggggagctgactgagtccgaggccgtcgagtgaaaccagggggcagccagagagctccatgctctcggcgtcgacgccg

SEQ ID NO: 23403 - DNA, 122 bp, Homo sapiens
atgaaacctccttgaggtcaagggctacttttgtatttccatggttattcaaaacatactcgggacatactctctttccagagctagactgagaaagatccaagaacaagaagagcaggtag

SEQ ID NO: 23404 - DNA, 122 bp, Homo sapiens
tttaagagtaatttttccacttgggtttgtttgttaatttggaatatttctgacaaatagcgttctgtgtgatgatggacatgtcctgtatctgtgctgtgcaacacaatcaccgctagaca

SEQ ID NO: 23405 - DNA, 122 bp, Homo sapiens
ctccctgtcttctggggggactgaagtgcgctgggtgcttcctggcgggagccagagagtcgcaggtaagggaggcgtgagggcactagcaggttgctccctgtgccctcccctgcagagcg

SEQ ID NO: 23406 - DNA, 122 bp, Homo sapiens
ggaagccctcggaggcagcacgatggacgtggccacactgccctccagtggccagctcgccgaacaacacgtctgggccccttttgggggtctgggtgacgtgtccaccctctctctgccct

SEQ ID NO: 23407 - DNA, 122 bp, Homo sapiens
ggaggcctctccattccatggccacaaaccgtagggcaatcttctctctcacctctgccacgcggatccacttctccaggagccgggccctctgtgggggacggagtggccgtatggtcacc

SEQ ID NO: 23408 - DNA, 122 bp, Homo sapiens
agcccgccgagcccgcgcccaccaccacatagctgtactcgtcccggctctcagagcctgcgctggccagggcccgggcacccagggattgctgctgccccagggctccccgtgccagggct

SEQ ID NO: 23409 - DNA, 122 bp, Homo sapiens
gtccagcgggatcccgggagagctccagaccagtgcggatggacacaccctcagctgaggcgttgatgtagcccccatcatagctgccaggggggttaatattcactccaggtaggagctca

SEQ ID NO: 23410 - DNA, 122 bp, Homo sapiens
gttttaccttagcaaagcattttgtcagctctgcccacaccaaatctgagatgtttggcacgcattccacagggatacaggggcctaattaattggttcacagatgcagaagtttttattat

SEQ ID NO: 23411 - DNA, 122 bp, Homo sapiens
tgcaaacacagcacacacactgcctcagtctctgggtgtgttcgggggtccacactcaggcgggcatcagcgtccttctgtgggctctgccccctctccaggtgggcgcagcagagccctgc

SEQ ID NO: 23412 - DNA, 122 bp, Homo sapiens
atttccactactccataccatgtgctctgctctgtgctaaggacacgctcaggcttcgcacgcatttcagactatggaggctcctgtctagctagtgagagaggcagtcactagccaaatca

SEQ ID NO: 23413 - DNA, 122 bp, Homo sapiens
gtgattacttgcacgtatttgttcattcaccatcatgtggcacataaatgtagttaatttcgtggtaaaccagccactttgatttgtccacttactagctatgttacttggaaaaattcacc

SEQ ID NO: 23414 - DNA, 122 bp, Homo sapiens
ttggtgtgagcagacccaggctagctgtgcactggggcatcactggtgaagaggtgaccacgtggccaagaagtggagaacagggactgcagcccggatggtccacccccaggggcctcacc

SEQ ID NO: 23415 - DNA, 122 bp, Homo sapiens
tggtgcccaaagtccacaacaattggtagaacagtcaatctgtgaagaaaaccacctgaacgggcagctttacctcctttgtgtttcctctcttgctacatctataaataaaaaaatgcagt

SEQ ID NO: 23416 - DNA, 122 bp, Homo sapiens
gaaaccacctccatctatgatgcatactgatgaggcggtgatctcaaacacggcgtgagacgagtgtttgaagcctgtttccatttccaggtttgggatgaatgaacaagaggcgaaggcca

SEQ ID NO: 23417 - DNA, 122 bp, Homo sapiens
ggtgagaagacagagatgcggggcgggggcgagacgcggcactcaccctgcggccggcctcgttgttgtgcaggttcatgaggatgcgagcactctcgtaggagcccttggcgtggatgcgc

SEQ ID NO: 23418 - DNA, 122 bp, Homo sapiens
cccaggagtccctgtccggggtgccaggagtagagaggctgagtgcgcccactgcagccccgggaccaggatggcacctgcatgtcctggaaggctcggcacagccactgcacacaagcacc

SEQ ID NO: 23419 - DNA, 122 bp, Homo sapiens
gtgcccctgcccctgccggctcacacggctgcagcccacggctggagccaaaaataaccgcgcagttgacgccacggtttctttagcgtcttgctggagacattgactttcagagcccctgt

SEQ ID NO: 23420 - DNA, 122 bp, Homo sapiens
actcattaccaaaaggaagtgctcaagccatagggaggcatgccacaggggatttcagggcgaggattgtgaggagctaggtgctcagggtgatgggggcaaaaatcaacgtcttgtagttc

SEQ ID NO: 23421 - DNA, 122 bp, Homo sapiens
ctctttaagtagcccctcctatggagaaattccttgtgcttcttctcaaagtgttactcacgtaaagagcagctaaaacaaacacttactgggtggctaaaacaaacactgttgacagacag

SEQ ID NO: 23422 - DNA, 122 bp, Homo sapiens
ccccttccccctgctcaaggagtggaggcctggccgcgctgtgggaggtgctacagcccacgaccctcccctgctaggcccaggccactgggggaagaatctcaactccagttcttctcaga

SEQ ID NO: 23423 - DNA, 122 bp, Homo sapiens
caattggacagctcttggtaataccggaaaggtgcttgagaaactctaaaaggtgtatcacgaggtcgcgttacaactactagtgagagtggctgaagccctagacattgtcaaccctgaga

SEQ ID NO: 23424 - DNA, 122 bp, Homo sapiens
ggaaaagaaaaggaacttccccatggagagacttgacggacgccgatttcacccagggcacgttgacatcagcagtgaggggccctcggacacgcttactcacaacaccactgcgtaggatt

SEQ ID NO: 23425 - DNA, 122 bp, Homo sapiens
tactactgtcttatctcgatcagattcagctctttaatgagaggctctaaatcttatgttcgattcacctttgtaacccacaccgggcctggaatagagcactgttcataattaatgctgtg

SEQ ID NO: 23426 - DNA, 122 bp, Homo sapiens
cactaagaagatcacagtagagtttggaacatttttggagtaaactgaacaaaataaaaacggagcagcatgggaattattttagcttccaccaaaagggtctgtttctgctatagttaacg

SEQ ID NO: 23427 - DNA, 122 bp, Homo sapiens
ttggcggcctggtccgcagcgccctgcgcccacccgccccggacgtggggcccaagcccccgtgaagatggtgtcctggatgatctccagagccgtggtgtaagtgcctctcactgcgccct

SEQ ID NO: 23428 - DNA, 122 bp, Homo sapiens
tgcacaccactatggtcccatgcatggggcccatgaaaagctggacctgcaggagggaaacggtaaagacaggatttgaagtcaggacactttggtgtgaaaatccacacactttccattat

SEQ ID NO: 23429 - DNA, 122 bp, Homo sapiens
gcctctgaccacacacacgaaccctgcttttcctcccccagggcaggcagaacatctcaccggataagatcccgtggtctgcactaaagaccttaatggcccagtccatttatggcgggcgc

SEQ ID NO: 23430 - DNA, 122 bp, Homo sapiens
tcccggcgtgacgtcatgcataggcctggctggtcagagagcgcaactgcgttctcatctcggcccgcttccaaccagcagttccttctcctgctcgcgtcaatgcaagtgacgtctgtcag

SEQ ID NO: 23431 - DNA, 122 bp, Homo sapiens
agcaaagggagaggaacccgccagaccagaaacggaagagagcgcgggggatgtgtttggcgtggggcgcactgttcagttgctctcctggatggctttatgtctccgcggtgtttcctaga

SEQ ID NO: 23432 - DNA, 122 bp, Homo sapiens
gactcagggagaaagaagaggaccgggcaaaggaaggcttagccgaaacgctccaggcagcgcagagttcattttccaagtggggacgacgggtattgtttttggcacctaggaaaccttcg

SEQ ID NO: 23433 - DNA, 122 bp, Homo sapiens
gccgctcgcggatctaaggccgaggggcgtccccgggaccccgccctgggctgggaccagcgccctccaggccccgccgcagtcgcccgcgcccccgcccccgccccagccctcggggtccc

SEQ ID NO: 23434 - DNA, 122 bp, Homo sapiens
gactcatctcctctacctctgttacctcgtcagtaagatagagataacaggacctaacttcgagggttgttggaaagaccaagtgagtaaaggcatgttgtgcccttagagcctggcacgtg

SEQ ID NO: 23435 - DNA, 122 bp, Homo sapiens
ccttggtctccccaccagaccatgcgatcgttaccatcagtaagcagggcccttcgttttcgtctctgtggcggctcgcactctaccagggctcccgggtgggtcccacagattcctgtgcc

SEQ ID NO: 23436 - DNA, 122 bp, Homo sapiens
ctgaccactcttacggtgtttgggggcaacaaactaaggatctagactcgctaaaccgctcgctgggtccttctctccccacaatgcaccggggccagcaggaaggccgctccgacccctaa

SEQ ID NO: 23437 - DNA, 122 bp, Homo sapiens
caccgatgctgctgctgctccagggagcgggcttgcaggagcaaggatccagtccctgaacgcacgtgctccccccgggagaaattctgcagccaggcttggtccacgcaccgtcctcccgg

SEQ ID NO: 23438 - DNA, 122 bp, Homo sapiens
actggggatgcggtcaggggatgggtattcatattggatgctgtgtttggctgtacaggtcgtgcacccaagagggtgagtggggctaaaatatggtctctccactctgtttgtcaaaccat

SEQ ID NO: 23439 - DNA, 122 bp, Homo sapiens
cccaatctcttgaccttatgatctgcctgcctcggcctcccaaaatgctggcattacaggcgtgggccaccgcacccggctgtattgcctgcattcttattctggctgggcatggtggcaca

SEQ ID NO: 23440 - DNA, 122 bp, Homo sapiens
atttttcacagcaggaggcattttatttgggttgattccatgtcgttcaagaacatcctgcgctctggttttcgcagctagaagaaaaggaaacacagcaagcaaatagctcttttccacag

SEQ ID NO: 23441 - DNA, 122 bp, Homo sapiens
ggctctgcgccctgggcccttcctgccagtgcagtgccaggtcgccctgatcagggctcccgttggggccgccgtggcttcctgttcttttcggcttcctcctggctcagctgactgtctcg

SEQ ID NO: 23442 - DNA, 122 bp, Homo sapiens
aactgaccgccggctctgccgagcagcctcgaccccagggcacccccgggagagagggcgcggctcaggtccctgcccgaacccctggggtgctgagagactccccagcgccccgcgtgggc

SEQ ID NO: 23443 - DNA, 122 bp, Homo sapiens
gtttccacccgtgtttctcacatgtgtgttactgtgacagagtgacatcagagcctataccgggggggcaggatgcgctcgtgtccaggacccaggctttgcgtccaggtgttgttgcagtc

SEQ ID NO: 23444 - DNA, 122 bp, Homo sapiens
aaggaacatccctgagaaagagaatgcgtccctgagggtaggcttctaaaatggccgcttcgaggggcggccatcttttatggtcgaagctgtagggatgaaataaaccccagtctcctgta

SEQ ID NO: 23445 - DNA, 122 bp, Homo sapiens
gccgctttggattgctgagtcactttcttcagccacttagggaaaccgaaagtggaaactcgtggggcttgaaatagtgtgttctcttgagaaccaccgaggcagtgagatttgggattccg

SEQ ID NO: 23446 - DNA, 122 bp, Homo sapiens
cgatattcctgtgggagacacggggggctctgagcgctacgagctttattaagagatttgcgaatggttcactcaggtccctgaacactcccaatagcctaagctgcctgctgtgttatagc

SEQ ID NO: 23447 - DNA, 122 bp, Homo sapiens
cccagagtgttaacagatgactctctatatacctttatctctcttcaagaactccagcaacgtccggatggcagccactgctgaggccatgtcaggatcttctttcatctgagacttaaagt

SEQ ID NO: 23448 - DNA, 122 bp, Homo sapiens
caggaggcacctccacggttgggacgccgcgtggcgtggggtcatgaagcccccagcgctcgtctcactggcgggccagcctagtccctctgcggcagtgacagccagtggttttccccggg

SEQ ID NO: 23449 - DNA, 122 bp, Homo sapiens
cttaatcatcttcagacatttttatgttttcatacttataagcttgtcatgactgactaccgagtttcttcttattttcccccagtggtgtgcactaactaagaagaaattttcagatgtca

SEQ ID NO: 23450 - DNA, 122 bp, Homo sapiens
gaagataagaaatagggctggatcagaaccaaggtcattctcgttgcttccccagcagtacgtgggccctggtgcttccatctctgccttttctcctcttcttctctcttgcctggcttcca

SEQ ID NO: 23451 - DNA, 122 bp, Homo sapiens
ctgtgcgcgcagccgggccaggtggtcgccccagggtgagtgtgctgagccgggcggggccgagggcgggcggctccggggagggatcctggaggacccccgggctgctgcgtccgcggtgg

SEQ ID NO: 23452 - DNA, 122 bp, Homo sapiens
tttctatggagattcttgtaataggtgggctcattacatctgcctaacccaggcttggttcggtaaagacaccattccaaggagctcagctcacccctctgccttgaatcattttcccctaa

SEQ ID NO: 23453 - DNA, 122 bp, Homo sapiens
atttgagaggtaaggaaactaaatcttgccaggttaagcaatctgcaaacgttcgcatgacgtttatgcagccgagtcacatccacattctctccctgtcagttcctttcccgggagctaga

SEQ ID NO: 23454 - DNA, 122 bp, Homo sapiens
agctgctcttggccatggcgcctagccacaaactttccaggcagaagggcgctcaggttccgaggctggaccaggggacgtctacatgtcacctgcttcaagcctggctccctgcctcgtgg

SEQ ID NO: 23455 - DNA, 122 bp, Homo sapiens
gggcgtaaactcactcccgcgttagcggccccaaagcggggagggggtggtcccgtggtccgcacccaggggagctcagtggactgtgcgccttgcctttctgctgcgcaaagcccagtcca

SEQ ID NO: 23456 - DNA, 122 bp, Homo sapiens
gtcaggaccacagaggattaggcccagtcttgggtttattgctgtacttgaacaaagtgccgggggctgcctaaactggagcaagagagaggtaattaagagggcctgcagaaggaagtaaa

SEQ ID NO: 23457 - DNA, 122 bp, Homo sapiens
gggtctaacttacaactcaggcaggtgatttgagggcagtgcagctgtccttaagtcacccgcgggccatttctgaaatgctttacttacgaaaagatagaacataacatctgttgcagggg

SEQ ID NO: 23458 - DNA, 122 bp, Homo sapiens
gggcagccctgcccagctcaggcccctttccttccccattgaggttggggtaggtgggggcggtgagggctccacgttgtcagcgctcaggaatgtgctccggcagagtgctgaagccataa

SEQ ID NO: 23459 - DNA, 122 bp, Homo sapiens
ctccacgcggccgctgaacatggctttgagcatggtgtcctgtcccgtgagggtgcgcagcgtggtgtagtgcaacgagccgcccacgttcagcttcacgtatttgctgttcggggtcagcg

SEQ ID NO: 23460 - DNA, 122 bp, Homo sapiens
gctggagtacgactggctggggcccggccgccaggacccccgccccggctccctacccaccgccctccacaagcagcgcctcctcagctgcctcctgaagctcatttccaccgaggtcaacc

SEQ ID NO: 23461 - DNA, 122 bp, Homo sapiens
agaaagcctcagacagaaagggtaatttttcatcaactactgaaaccaggggacataaaacgaatgtctgtctgtgcccttagcattcatggtttctgccatggaactgaatgcccattctt

SEQ ID NO: 23462 - DNA, 122 bp, Homo sapiens
tgaccttgtaaacagagagaggggctcagacatgctgagaaatccttatctctagagaaacgtctttaaatgctaagtaaaagccctagcaagtaaaagccctgaggcactagggtgtcggt

SEQ ID NO: 23463 - DNA, 122 bp, Homo sapiens
tcgttgcccagttgaaaaaggcggacaggtttcggctctgtggcatgtaggcatcaaacacgtccatgtcgcacaaaaagatagagcgcatcaggtcgcgcacggccatgtgcagcgttgcc

SEQ ID NO: 23464 - DNA, 122 bp, Homo sapiens
gtctgaccttggaggaaatgaactgtacaaaaaatttcaagcaaacatgatccaactgttcgcacaaaagggaggttgcataagaaattcattgtgtttctatccaaatttccccctcgaat

SEQ ID NO: 23465 - DNA, 122 bp, Homo sapiens
cgccacgcgacaacagctgcccagcaagaagcctcggtagcaagtcatcgtgggccgggccgcggccgcgggcttgggctcgggccccttgcctcagctccctaccgccgggagtgcgcgcc

SEQ ID NO: 23466 - DNA, 122 bp, Homo sapiens
tacggaagaagacacaacccagagttgaggggccaccggggtccctctcttgagcacaggcgcccggagcgcaaatgcgcggactgacccagcggccggcgcggcggcgccgggcggactta

SEQ ID NO: 23467 - DNA, 122 bp, Homo sapiens
caggtccgggagggtaggttggctgccccggcgagcggcagagcccttctggacagctcccgctcacccaaacagaagacgtcggcgccggagcgggctcggacatggcgaggctgcgagcc

SEQ ID NO: 23468 - DNA, 122 bp, Homo sapiens
tttacgattgtctgccaggcgggctcctgaagtgtgggcatttaacactcgtcacgtgagcgctggcgacgtcacctagcaacagccaatcagaagcaaacggccgcggagctccgggaacg

SEQ ID NO: 23469 - DNA, 122 bp, Homo sapiens
agccaaacggtctggaggcactagtcaacagaaccagtaccagggagaccccagagggtacggtatgtattcaaggtggagacaaaggctgataccctttcccaaagcacctgctgggggct

SEQ ID NO: 23470 - DNA, 122 bp, Homo sapiens
ggaggagacaggagcgggccctcaagaaaactcactacccaccgcaggaggagacgggagcgggcccttcaggaaaactcactcctcacttgcccgccgagcgctaaatggattctgagagg

SEQ ID NO: 23471 - DNA, 122 bp, Homo sapiens
cctcagcatccccactgacttcaagagagtggacggggctggacaacccccaggccccagcgcagacggtgtggggaattgaaggacatcccgtcggcgtgacatcaatggaaaccaatagg

SEQ ID NO: 23472 - DNA, 122 bp, Homo sapiens
ggctgttatctctatcaggaggtgtttaccccacccaatcctagtcagtggttacaattacgtctagaaagctatccctaaatatccactttgatagtccctcctctgggttctcaaactac

SEQ ID NO: 23473 - DNA, 122 bp, Homo sapiens
gaacccagaacagcagccagatggggcgtatccaagcaggtcaagaggagccaggcccagcgcggcggggatgggggcagcgctgccttctggagaagcacggctggaggggaggtgacgct

SEQ ID NO: 23474 - DNA, 122 bp, Homo sapiens
gtttcctgcaggctcccgtccctgctggtgctggccacaatgtccccactcccagggtttcggcgtcccagccccctgcgcccaccgcgcctgcccgccagaatccctgtgcccttggtgcg

SEQ ID NO: 23475 - DNA, 122 bp, Homo sapiens
acccgaccccaccccaccgcctcccatctgccctgtggcagcttatcgggtaaccagagccggcagcttcatccacgtctgaaacaggaagccccagcctgtgcatgagtcgccactgagag

SEQ ID NO: 23476 - DNA, 122 bp, Homo sapiens
ttcaacttccttcaatggtgaatagtgaggcactggcactagcagataggttcacacaaacgctatgattcttaacatatatgaatttggagggaaatagtccaaaatcaggtgagagaggg

SEQ ID NO: 23477 - DNA, 122 bp, Homo sapiens
aagcagcaggcgggggattagctcaaatggtagagcgctcgcttagcatgcgagaggtagcgggatcgatgcccgcatcctccactcagcttttgcgtccgtcacactacagaacacaaaac

SEQ ID NO: 23478 - DNA, 122 bp, Homo sapiens
cccgactctctcccagattgttcagggatgacagagggtcattagagcagaatcccgactcggtgggtgcgtgggaggagctgcggccagtggggtccccagtgtctcctgttaaaaaaatt

SEQ ID NO: 23479 - DNA, 122 bp, Homo sapiens
tccctggcaggcatttgtcaggccatatgttttaaccttatggtaatactttgctttagtcgttcctcctgctaccagtagcgttttgacccacctgccagtgtttgcttgctctatgtttc

SEQ ID NO: 23480 - DNA, 122 bp, Homo sapiens
atctccaaaaaatcttcccttcagacctacccctctgaaactccatgtggcagttgtatacgccctatacgaggcagggtattcctttttaacctaattttctttactcacatcctagccct

SEQ ID NO: 23481 - DNA, 122 bp, Homo sapiens
ggagccagcgggctcggcaccgccgcggcgggcgcagaacgcacgagcccagtgggagcccggcccccgcctccagcccggctagtaaccaacacggcccccaccctcggaggggcgggacc

SEQ ID NO: 23482 - DNA, 122 bp, Homo sapiens
agcaggatgacgggtgaagctgcttctaacccttcccttctctggccttctccgctgtggcgcaatcttgaaacctcaaggacccggatctgcgaccccctgtggacagaggttgaccgtac

SEQ ID NO: 23483 - DNA, 122 bp, Homo sapiens
tccatcaggagctcggcctgtctccctgcaccgcacggcaccgagcggccaacccctgagcggctgctggctcgctggccgcatttccctaatgcagcccaggtcttccgttccttcctact

SEQ ID NO: 23484 - DNA, 122 bp, Homo sapiens
tgcctgataattgctccctggatccatcaaggtttaaggggcggaggggggcgacaagggcggggcacagaggaagcatccagcttaataatttaaaggaaaaagatttaggtgagagggcc

SEQ ID NO: 23485 - DNA, 122 bp, Homo sapiens
cgaggccaccgcccacccggcccggaggaggcggacccactcggagcgccgcgcgcgcgccgggctgagccttgcaaacaagtgtctgtgctgtgtccccgcggccctcctcgcgccggggc

SEQ ID NO: 23486 - DNA, 122 bp, Homo sapiens
cttgcggagagcacaagtgagctcactgccctggactccagggaatcagagttctggccgcggggtgacccagctcctctgctaccatgaatagggcccctctgaagcggtccaggatcctg

SEQ ID NO: 23487 - DNA, 122 bp, Homo sapiens
aagcctcaccttcagacccagtaactgtccgcagctgtctgctagtggttgtcttaacatcgtagtcctagtttgcattttttaaatcccctctgtttaaaaggtttgtaaaacaaaaacaa

SEQ ID NO: 23488 - DNA, 122 bp, Homo sapiens
caggccaggaccagtttgaactggagcaattggagtttgtcccttctcaggccctggcagcgtcctggagtggttacgaaggacttgcagtcatcccctgtgtgactggcccttttcacggg

SEQ ID NO: 23489 - DNA, 122 bp, Homo sapiens
ctagggatgctgaagacactctgtgcatcttacctcctggcacacgcggtactggtcaatcgcccacactgttggcacgtgggtggccagcagctgatactgcgtgagtgtggtgttgcacg

SEQ ID NO: 23490 - DNA, 122 bp, Homo sapiens
aggagccacagttcaaatgcccagtagctacatgtgggtagtgaatatcacactggacagcgctgatacagcgtatgtccagcactgcaaaaagttctatttacatagtactgctttacaat

SEQ ID NO: 23491 - DNA, 122 bp, Homo sapiens
ctgatggactgcaaagctttccaggaactaggcgtgcgctatcgccacacagccgccagtcgctcaccaaacagggactggatacccatggtggtggagctgcgttcacgaggggctcctgt

SEQ ID NO: 23492 - DNA, 122 bp, Homo sapiens
ggaaggcagtctccagcaccctggaacctctgccgggtccccagcccacgttggaggcaccgacagggaactcagcagctcagcccagggaggatctggggtcacccctgtagccctctgtg

SEQ ID NO: 23493 - DNA, 122 bp, Homo sapiens
ctccacacctgacactcgtcttcagttgataccacgggtttgactccgtcctgtctcgggcgacgcccgtaagacaggtcgacactaccccgacgaaacaaacaaactggtttctgagcccc

SEQ ID NO: 23494 - DNA, 122 bp, Homo sapiens
cgaggcctcctccgcccccgaccgccgttcccacgctccctgtcccatggcgaaggtcgccggtgcccggtattcacctacggcattcgcggctgcagccttcagcacccgcgccattttgg

SEQ ID NO: 23495 - DNA, 122 bp, Homo sapiens
aaaaaaattatatacataattctcactctcccttcctcctcagttgaagattaaagtggccggcgataaggacgtgaaattgccgttaggctcatcctgggctaaaagggattgttaaaaag

SEQ ID NO: 23496 - DNA, 122 bp, Homo sapiens
gttgggggctggctttgaggctaggaggtggtctggggatgccgcttgcctggaggctctcgccccgctgcccaatcccttcacggtgccgggcgatccctgcagccgtacgcggacccggt

SEQ ID NO: 23497 - DNA, 122 bp, Homo sapiens
gaacgccgcgaagagggggctgacgggcgggagcctgatcagggggcgcaggcccgcgatcgcggcccctcccggctgagactcaccctgcgggctggggggctccggcggcgacttgccgg

SEQ ID NO: 23498 - DNA, 122 bp, Homo sapiens
tcagaatgtttgtattttcagaatgcctcctctgtgtagggtggcaggatgaaagacattcgtgtgccctggagcttttattccaggttaactagctctgctttctggtgtgtcttggttcc

SEQ ID NO: 23499 - DNA, 122 bp, Homo sapiens
atatctgctctccctttctatcttccccgactgtcagtccggtcccgtgggaacccggggcgggttggggcgagtcaagagcccctgcaccccaagtcagggtactgcacctaccccttggg

SEQ ID NO: 23500 - DNA, 122 bp, Homo sapiens
agaaagcaggagcccgcctagtccttcatggcgggagaacagcgccctcgtgtggactgccgggttcttggtgctagaggcagtttgggtccgttgccttttcactactccggacacacatt

SEQ ID NO: 23501 - DNA, 122 bp, Homo sapiens
gccgagaagaaagcatattagccgaggaggtagtcacgcggcacgcgccggtgattgccacgatgtgattgcaatactcttagaagcaccatattatcccagacatgttctttcaagccctt

SEQ ID NO: 23502 - DNA, 122 bp, Homo sapiens
cccctttgttggtgatctgggttgcagatatcccctctgtgtctgtggcttgtctcgctgcgttgtttatggtgcgcttttgtcatgcagacgtttctaattttgctctgtctggacttggc

SEQ ID NO: 23503 - DNA, 122 bp, Homo sapiens
tgacatagacttttagaggaaagctctcatctgtgtgacttagccactcaagagaagtgacggggaccctggaaatttaaggttttttaaaaaaaggaggaaagggcaatattaggtttgac

SEQ ID NO: 23504 - DNA, 122 bp, Homo sapiens
aaactttatttgaaagatctcaagaaataccaaccatagttagagtatgctggggtgcaccgtggcccctcctggacaaagaggcctccctcaaggttaagaggtgtaggggcttccctctg

SEQ ID NO: 23505 - DNA, 122 bp, Homo sapiens
ctggggaactgagggcaccgctgccgcctgcctgcagagccgccctctggtcccgctggccgccggttgtagtttgctctgctgccaccaggccaccacttataaggcagtggctccaccca

SEQ ID NO: 23506 - DNA, 122 bp, Homo sapiens
tagtaccaatcctactcaaactgttttgaaaaacagcagggaatatttccaaacttattccgtggggccattattaccctcataccaaaatcagacaaagacatcaaagaaggaaactacag

SEQ ID NO: 23507 - DNA, 122 bp, Homo sapiens
ctcacccgcacactgcccggctcaacatgctgctagtgctggtgctaccgctgatgccgccgatctgctgaagccgctgccgaagccaccacagccacgagtgccgctcctgcgccgcccgc

SEQ ID NO: 23508 - DNA, 122 bp, Homo sapiens
gaattctttctctgacctcttgcatttatgcaatgcctgggaggcctttcctgctaagcccgcccccacattgttgctctcagctttttgcccacagtgagcactgtgctaattgggtagat

SEQ ID NO: 23509 - DNA, 122 bp, Homo sapiens
ttggctcccctgagacccagtgtgttccattagaggtagatgttgtttttccctcactcccgggtggtacagacaccaccacattgggccatcaggcacaaacctggactctgccactatct

SEQ ID NO: 23510 - DNA, 122 bp, Homo sapiens
gttacaggcaaagaggggcagttcaggattccggccgtggtccgcaggaatgagtcggggcgagggaatggttgttataacccaatagtgagcctccccggtcatccgggctggacgggact

SEQ ID NO: 23511 - DNA, 122 bp, Homo sapiens
gccgcgcgctctaagccggcctggcgcggcggggcggggggctggcggccccatggggcgcgcccacacttgccccccgggctcgggagcatgaagtaggggcctgccatgggagcgggatc

SEQ ID NO: 23512 - DNA, 122 bp, Homo sapiens
agatttaaaattcttccttctcaattgtattttctaggtctttaatgattttagctgtttcgaatcttcttcacgttctcttttttttaaaataatggagagtgaagtgtgatgtttcaccc

SEQ ID NO: 23513 - DNA, 122 bp, Homo sapiens
atagggctgagtccactggctcctttccctttctttattctcaggaagaaaaggcaccaccgaagggaaagcattaaaatccttctgaggttcaattcatgatccctccctgcccctcaacc

SEQ ID NO: 23514 - DNA, 122 bp, Homo sapiens
cagcctcctgccttggcctcccaaagtgctgagattgcagcctctgcccggccgccaccccgtatgggaggtgaggagcatctctgcctggccgcccatcctctgggatgtgaggagcccct

SEQ ID NO: 23515 - DNA, 122 bp, Homo sapiens
attatgactagagataatcttagcacacataaaatatgggcatcattgccaagaactcgtcgagatttattacgttgagttatacagctcctatgctctgtaaggaaatgacatgtttaact

SEQ ID NO: 23516 - DNA, 122 bp, Homo sapiens
tttttttttcagacaggatatttcagaaaatgctttgaatgatattgttgtcgactttcacgtatgaagacttagtgcagttgataactagaaattttaatttaagatgtcttaagaatgct

SEQ ID NO: 23517 - DNA, 122 bp, Homo sapiens
tttctttcttggttattatgaatgctctcttacaactggagagctaggatgaaccaatcccgagtaagaaacgggaaagtacagtaaagaggcgacagctctgcacccccacacggaaaaag

SEQ ID NO: 23518 - DNA, 122 bp, Homo sapiens
actgagcgggctgtgattcactcgggaggaggaaggcctcggagggcagccaatcgaagacggacccagggaaaagtcgctgggttcttacaggaagcgatctaattatgttactgtaatcc

SEQ ID NO: 23519 - DNA, 122 bp, Homo sapiens
cattgtttgatcttagatccttccatcccagctgcctgtgtccagctttagagttcagctcgtttcagacccaggtcccacctcctctttcttctcccacccctgactgggttcctgaaagt

SEQ ID NO: 23520 - DNA, 122 bp, Homo sapiens
gttcatccatgctgtgccccatgccagtgcattattccttttttgtggctgaataacacccgactgtgtggatgggccacattttgtttctccatccatccatcaatgcacacttgggttgc

SEQ ID NO: 23521 - DNA, 122 bp, Homo sapiens
tcgcgggtgatctcctggctcagggcccgcatgcgggagtagcaggtcgggggagtgggccgcgcggcgggggctcccgccaggagcagcagcagcacgggcagaggcccaggcgtcctcat

SEQ ID NO: 23522 - DNA, 122 bp, Homo sapiens
ggcctcccgcctctggaaggaggccgtgcacagccctcccgcctctggaaggaggcccagcgcagcatcctccgtgatggccaccgcggcctctcccatcggaattgcagggaataccccgc

SEQ ID NO: 23523 - DNA, 122 bp, Homo sapiens
tattgccccaggctggtctcgaactcctgggctcaagccgttctcccgcctcccactgcccgcctgtcactgccgtctgttccctgagctgtgctttacggtacttagtagttccattggac

SEQ ID NO: 23524 - DNA, 122 bp, Homo sapiens
gagtataagactaaaggagatttttttttttttttggttgccttttgcagctggaaacaacgtggaggtagatgagtctttgttccaagaaatggatgacttggagctggaggatgatgaag

SEQ ID NO: 23525 - DNA, 122 bp, Homo sapiens
accggagcccctggcatgactcaaaatctgtggttcttcaaaatgatgaacatgggctcccgttgtctcctcacgcgggaaggtccaggagcccacacccaggtgtgactctattctgctgc

SEQ ID NO: 23526 - DNA, 122 bp, Homo sapiens
gaccctattttcaggttctcttccctccattcctaccccttccccggtaccataaaatcccgggatatgagctggaagaggcatcacctgatcccggagacctttggagttaagaggcggcg

SEQ ID NO: 23527 - DNA, 122 bp, Homo sapiens
ggctactgcacgtattttcgaaatcaccgagtgtgggtgtttggggcaggtatcaccccgcgaggaccatctcagactgagagttggtttaggagttttgaacagattggatacagaactat

SEQ ID NO: 23528 - DNA, 122 bp, Homo sapiens
gctgttgtcagatagaatttattgaagactgggacgtggaaacaaagaggaaggaagagacgttttaatctctgtgggtgttaggctgacttctgagctagttcctttcctccagtaatgca

SEQ ID NO: 23529 - DNA, 122 bp, Homo sapiens
tgggcggggcctagggagtgagcggggcgcatctcccgctaggagttcctagtaaagtggcgggagccgcagctatggagccgcaggaggagagagaaacgcaggtgatggggcgggaatgg

SEQ ID NO: 23530 - DNA, 122 bp, Homo sapiens
atcttgacgtgatcaaatctgtttctgtctctcacccttgtccgaaggaaacagcttagccgcgaggtgggctgcgttaatcgcgtcttgaaaagttggttacctttctgaaagatagtaga

SEQ ID NO: 23531 - DNA, 122 bp, Homo sapiens
cccagaccaggcaggggctgggacggtgacgtacggtgatgcagggctcgcctgcggcctcgcagtctcttccttaaatgggaggtcagacggagaaggtgaggcagaggccgtcagagagg

SEQ ID NO: 23532 - DNA, 122 bp, Homo sapiens
acctaccataaaaccagccatattactgatactgttcagtgcatttagccaggagacttacgttttgagtaagtgagatccaagcagacgtgttaaaatcagcactcctggactggaaatta

SEQ ID NO: 23533 - DNA, 122 bp, Homo sapiens
gaataccccactcagtgcgcatgctgcacagacctgttggtgcccatgtctgttgctatgcgtgtctgttgttgcgcaggcgccttgctgcccgtcttgtgtccgcacagaggtctgcaagg

SEQ ID NO: 23534 - DNA, 122 bp, Homo sapiens
agatgctgaaaccaatagtcttagcccagaatctcaaacgccgtggcaaagagggagtgacgacggcctgtggaaaaacctgaggagttttgggcttagcgccttcatgtagaggggacgtg

SEQ ID NO: 23535 - DNA, 122 bp, Homo sapiens
cctagatcacttttccagaagactgtgactccgggacacctgtgacactcttgaggggagcgtgcccagtacccctggtcgcgtctctgggattccgccggggtgggggcccgcgcgaggcc

SEQ ID NO: 23536 - DNA, 122 bp, Homo sapiens
acgtccgtagctgagtccagccccgtagtctccagctttcctcaccaggacctggaaaggcggaagttcccggctttaaactagacgttcaacaagttagaaaatcaggaatctttcaaggt

SEQ ID NO: 23537 - DNA, 122 bp, Homo sapiens
acagggactgtccctctctctgtggtgaccagagaggcctcaggacctcttaaaaagccacgctgatttggcgccgggacggccttctttctgccctcggactcgtcccacgaacgcagact

SEQ ID NO: 23538 - DNA, 122 bp, Homo sapiens
ctttcagctctgacaattctctgcctcatcttctttgtgcttgcttaaggagtgggaaggcgctaggtggccaggcagtccccacttctgtctcgtggtgtccattttgatggcctgcaccc

SEQ ID NO: 23539 - DNA, 122 bp, Homo sapiens
cgtcccaggggagggctggggctggaggaggcaggggctgggctgagcgggagtgggcagcgctgtgtcctggcctggggagcatggctgagcacctactacatgcagacactgctgggggg

SEQ ID NO: 23540 - DNA, 122 bp, Homo sapiens
cccctatgcaacggcgggggctcagctcctccctgtgctcacaggcattccaaggtggcacgcagctccaaggagaggcaggctggggccggctgggctgggccagatattagaagaggagg

SEQ ID NO: 23541 - DNA, 122 bp, Homo sapiens
gcgtgccccttcctcactaccctccaaatcccgctgcagccattgccgcagacacgatgccgaaacgaaagaagcagaatcatcaccagccaccgacacagcagcagcccccgctgcccgag

SEQ ID NO: 23542 - DNA, 122 bp, Homo sapiens
ccctggtacaagccatagggaacacggacaaagcgctccatccgctctcaggtgctcaggcgcagtctaatatcctagccagtttgtttgggtccttattttgccttcctccttcatccgcc

SEQ ID NO: 23543 - DNA, 122 bp, Homo sapiens
gcctggctgctcgctggtgtccacaacactgctgtggctggagctatgagatgacgatcacgtcacagggtgggggcaggatcaggaagcagtgccagccggtgtcactgtgcaaggtcatg

SEQ ID NO: 23544 - DNA, 122 bp, Homo sapiens
gcagccgctcccgccctcgcctgccccgcccctgtctccgccccctcccggctcaggccccgccctctggccccggcccggcccgtcccgtccaccgcccagtctcgctccacgccccctga

SEQ ID NO: 23545 - DNA, 122 bp, Homo sapiens
ctttctcattggcttcctgctcaatgaaagccatcatgtgcttaatctgctttttcacatcgacatcactcagggccatggctgctctcagaggggacggcagagagggagctcgtacaccg

SEQ ID NO: 23546 - DNA, 122 bp, Homo sapiens
tgggatatctctctgaatcttgcaccccctactgctaataaagagctatagcacttgatacgactctggattggggaaccaatatgtactgtgtgtgtgtgtgtgtgtgtgtgtgtgtgtat

SEQ ID NO: 23547 - DNA, 122 bp, Homo sapiens
gacttgctcttcctatttgctccctgtccgcttcctgcgggcttcctgttcctgggagctcgttgtctccctccccagccaacagccggcagtgccaaaccggagccgcagcggaacgcagc

SEQ ID NO: 23548 - DNA, 122 bp, Homo sapiens
tttaaatatgttttatttagcctagtatatcaaaaatatttatgttacttgttggaatatcgtttcaacaagcaatataaaattatagcagggagaagactggtttactaggaagcttgcaa

SEQ ID NO: 23549 - DNA, 122 bp, Homo sapiens
ctgctcaaaagtgctagagtaatagagcaaaacagagcaggtaacacatcccttaacactcggtatctcaactgactttcacaaaagctctattaaatgagcaggtgattgtggagtgaaag

SEQ ID NO: 23550 - DNA, 122 bp, Homo sapiens
gctggaagggaagttggaatcctttcattcaatctctgttctacatattcattcagcttgcgtcctgaggcctcacagcctggtgggagacacacaggcactttagtaatgacccagggggc

SEQ ID NO: 23551 - DNA, 122 bp, Homo sapiens
ttgttaactcacggcactggacctccagtttcatgcctctccacattgcagggtcctctacgttgttgtatcagtcacctttctaaaatacaaatcttaccatgtaaattgtttctaaaatc

SEQ ID NO: 23552 - DNA, 122 bp, Homo sapiens
caagcatattcgtccccggaaatgactccaagcaccgcctcttggccagcccctctgcgccgggccgtgagctctcctggctgggccctaccagatgatgagaacttggggagaggctgttg

SEQ ID NO: 23553 - DNA, 122 bp, Homo sapiens
gcataatgaagccctgaggcttggaaacttgcaaaccaataagatgatttaatgatgaaacggcatgtcagtttgacactgtctattaatagtccttgagtgagcttaaatttgagacactt

SEQ ID NO: 23554 - DNA, 122 bp, Homo sapiens
cagtggccgcaaggacccggacctcagggaggcctccgcacgaagtcggaccgtcctgcgcgccgcctaagtccaggcttgcccgtctgctgccaggcaacaacgcccctagtctctccgtt

SEQ ID NO: 23555 - DNA, 122 bp, Homo sapiens
ccagcacacgctgcagggcttgacacttactgcctataggtgagccacacttgccctctacgcagaccacaggtctccgagttcacgtctcacggcgcccaccccacgacggctctctcaca

SEQ ID NO: 23556 - DNA, 122 bp, Homo sapiens
cgcatttttctcactccaagctccttccttgccagatggctctgctggaggattctgccccgggctgggaggggctggggacctgattctctcatttccctgtggtttggcgagtcttccct

SEQ ID NO: 23557 - DNA, 122 bp, Homo sapiens
tccagggcggctactggtcccagagctgggggctgagtgggcccgtgccgagggctgtggcgtctgacaagccggctcccactgtgagcagggaagggcggatgggcgggggccacggctgc

SEQ ID NO: 23558 - DNA, 122 bp, Homo sapiens
ccgatggaacacagtggggctgggccgcgctggtgggaaagtcaaggccaggggtgtttgcggggccgagggcaggggaggcgatgggacatggggcggggtccggagttggccgcagcgac

SEQ ID NO: 23559 - DNA, 122 bp, Homo sapiens
atcatcactctaataatcaatcacagatcctaagaaagattctatgtgaggacatacatccgggcactgtttcttccagtgacaattttttttttttttttttttgagacagagtctcactc

SEQ ID NO: 23560 - DNA, 122 bp, Homo sapiens
gggggcgccgcggggagggtcgctgtcagtcaggccgagcggggctcgctggcctgggggcggccgcaggggcgcagcgcagcctgagggcgcggcggccccggcagcctccgcagtggcag

SEQ ID NO: 23561 - DNA, 122 bp, Homo sapiens
tcccacactccgcggccaatggccgggcgggccgcacaaaggcgccggcccattagcgcacgctaaattgcctgtgaattggcgcgggcacaatgggcgctccccaaggagcaggtgggccg

SEQ ID NO: 23562 - DNA, 122 bp, Homo sapiens
aggtgagaaatcagatataaccagacatcccagacctcctggacgagctcctgcaccaaacgaaatgccatctccagctcctgcagctccacgggaggcttgccggggctaaagcggaggag

SEQ ID NO: 23563 - DNA, 122 bp, Homo sapiens
aaaaaccttagaaaagttactttaatcactggaatcactaggaggaaaatgaagcacaggcgcacagcgtcttgccgctgtcagtgtcctgccttctgaacgattagaggcatgccacagag

SEQ ID NO: 23564 - DNA, 122 bp, Homo sapiens
agaaggcgtcgggtcaggggaggggatgccggctaggtgccccaaggatctgcagggccgcggctgctgggacgccttgtcgcaccctctgctgccctgggatctgggcctgaagcgccctc

SEQ ID NO: 23565 - DNA, 122 bp, Homo sapiens
aagtggccctgtcgccagttctggcgcgtgggggagcagcaggccgctctgaggggtcaacgcggaacccgggtcgggggcctgcccgcgggggctactcaagctgtcctgggggcccttag

SEQ ID NO: 23566 - DNA, 122 bp, Homo sapiens
tcattccctcactcattcaacaaacgtttggagagcttgctctgtgccccatcctcaattcgtggccctaaggagctcacagtccagtagacaggggaacagaaaggtaacagacgtttaca

SEQ ID NO: 23567 - DNA, 122 bp, Homo sapiens
ttatgtttaaattggcaacctagcagggttcggtggcctgcaccaatagtccttgctactcgggatgctgagctgagaggactgcttgagcctaggagtgtgaggacagcctgggcaagagt

SEQ ID NO: 23568 - DNA, 122 bp, Homo sapiens
tgaaactattaaggagcaaaatgtttccacatgagtaatgctgatttcagacactccacccgaaccacaaagggagcagatctggggttggcatcccaaatacatttctttattctgagcct

SEQ ID NO: 23569 - DNA, 122 bp, Homo sapiens
catactgattgcctcatactgacttgaaggacaacttgatgggtgaaggaatcaagctctcgtatcaaaaaaaataggagatatggcctcttgtataaagatactgcaatatccttggggat

SEQ ID NO: 23570 - DNA, 122 bp, Homo sapiens
gaaacagctgtgaggacaggtgggccgtaatctctgggtagctaaagcccagcagcagcccgaggatcatgtgtcaaccctgtaatactgctctgtgcacacaggaattatgatgtgagctc

SEQ ID NO: 23571 - DNA, 122 bp, Homo sapiens
aggccctggaggctgattggccgtgtgctgcggaggcggcaagaggaacgtgtcctggcacgtgccgaaggagcgctaaaggccaggggcggtcccacccgcgaagccctggaaggcggatt

SEQ ID NO: 23572 - DNA, 122 bp, Homo sapiens
gtaaagatatagagactttgagtagcacagttaataagctgtattgtacacaaaacagggcgtgttaactattttggcattacagatgttaggcaaggtcagaggaaaagcttagataagaa

SEQ ID NO: 23573 - DNA, 122 bp, Homo sapiens
gaatcttgacttcacatctaagcactcttctgcttagactttctccatgatgtggaatctcgtgtcagaccctagctccaaaactggagctttgctgttgatggatatgtattctaataaag

SEQ ID NO: 23574 - DNA, 122 bp, Homo sapiens
atctggaaacaccctcacagacacatccagaagcactgtttcatctaggcactctgtggccgactaaatttaacccataaaattaaccatacttaccacctgccaaatcctgagctagacgt

SEQ ID NO: 23575 - DNA, 122 bp, Homo sapiens
gcagcctcaagccctaggaagcccccagttcaaagcacagggcgcattggagcctgggcacgatacagttcacaccacggctgcgatggtaagccacgcccaagtcccaagggcctagggga

SEQ ID NO: 23576 - DNA, 122 bp, Homo sapiens
aaagagagacctgccttgaatgctcaaggtggcatctatgtcattaacccagagatgggacggagtaattcaccaggaggagattcagatgatggctctctgaatgaacaaggccaggaaat

SEQ ID NO: 23577 - DNA, 122 bp, Homo sapiens
cccacctcctctgccggacaccccagcttgctcccgccttggggcttctgtgctggttctcgctgctacccaggacgttcctccggcagacgtccacacggccctctccctgtctccagggg

SEQ ID NO: 23578 - DNA, 122 bp, Homo sapiens
cagggggtggggctcgggcggggccaggagcccggcgggaggctgccttcatcgagtaaacgcgtgggactgggaaggacccagtcatctgtatattggttaccaacacgtggccgcgtaga

SEQ ID NO: 23579 - DNA, 122 bp, Homo sapiens
tttcaataaaagaggtgcttccagtgtcgccccctttcccgctttttcgtttacggtgagcgggacatttaaagtattttgtggtttgttggttttttaaagtttttatttattgtgtgtat

SEQ ID NO: 23580 - DNA, 122 bp, Homo sapiens
gtaagaaaggccacaaaactgcagatcttcctggacaggactgacacttctcctcccctacgagaggatttacaaacctgataaaaactgagatgtagcctgggcaacacagtgagaccccg

SEQ ID NO: 23581 - DNA, 122 bp, Homo sapiens
agagtcggcggttgtggtggtcctggcccagcatccaggcctcgcattgccaggggcaggcggctgggagcctgtgggaggaggtgtgggagcagggcaggggtccccagagatcctcccgg

SEQ ID NO: 23582 - DNA, 122 bp, Homo sapiens
cgaggtgtttcagattgaagctctgctacctgctgtataactcaggggaatgaagaaaggcgtttgctgtggccccatgcaaattctgagcctccctaaaggaagtgtggtctctggaatgc

SEQ ID NO: 23583 - DNA, 122 bp, Homo sapiens
tctcacctcccagatgggcggcggccgggcaaaggtgctcctgcttcccagacggggcggcggcattcttaccacccagaatggtgatgctagtgcctctttccagtcgatttccaccctac

SEQ ID NO: 23584 - DNA, 122 bp, Homo sapiens
tcccactcaattagtgttagatcatgtcccctttgtccaatcacgcttctacacgactgtcgatcatgcctatccaataaagtccccataaaagacccaaggggacagggttcaggaagctt

SEQ ID NO: 23585 - DNA, 122 bp, Homo sapiens
aaaaagaaattccgttgcagggaaagtggaggaattaaatcatcttggtataatccttatcgcaatccagaggacctcaaagattggttattaatgaaaatttgaacattgacgaggtgata

SEQ ID NO: 23586 - DNA, 122 bp, Homo sapiens
tcagcgcaaagtgactgtcgctgcactcaccttttctaggacatggtggggaggctggggcgggggaaggggaacggctagactcccgccgccgctgctgccgccgccaccagcaagtccaa

SEQ ID NO: 23587 - DNA, 122 bp, Homo sapiens
ccaggagggggccaggatacagagggctccctggcgtctggcaataggggtgcctctgggcgggtgcggctttccgggagcccgcgggactcccccactccccactcccgtctgggaggttc

SEQ ID NO: 23588 - DNA, 122 bp, Homo sapiens
ggccgaggcggcgcgcggcgctgacagctgagtcggctcgcggcctcccggccccctcggcgcccggcccgaccctggcctggcctgccctgccccggagccatgagccccgggctgctgct

SEQ ID NO: 23589 - DNA, 122 bp, Homo sapiens
ggcccatgcgggtcgcacaccatgcggcagcgacccagcatctcgtagtgcgctggcccgcgggagctgtgcaccagcagcgggatggccaccagcagcagcagcaccatggccactccgac

SEQ ID NO: 23590 - DNA, 122 bp, Homo sapiens
gtgcttatgagaggcccgaggaggacgagaatgaggaggcccctgtggcaagggatgaggcgggcattgtgtctcaagaggagcagggagggcaacctgggcaacccactggccaggaggaa

SEQ ID NO: 23591 - DNA, 122 bp, Homo sapiens
ccctggcgccatctttttccaccgtgcgaaggcaggagcccgagactgggtgagaggacgcggggctggcgtggggaggggaaggatggacggggcaggacgctgccgcctgcatctgggac

SEQ ID NO: 23592 - DNA, 122 bp, Homo sapiens
ccgagaagccgagaagccaaggccgtcaggctctgatgaccggacaaggagcccaaggcgcggggaccgtggcacgcagctcggttggacggcttgggccggcggccgccctctctggaccc

SEQ ID NO: 23593 - DNA, 122 bp, Homo sapiens
cgcgagcggcgaccggagaggagctcggggcggcggaggtgagcgctgggggtgggctcccggctctgcccgccccgcccgcccgccggccctctccccgctccccgcggccgcgctgccat

SEQ ID NO: 23594 - DNA, 122 bp, Homo sapiens
ggattgggaaaaggcagggaacagaacatctcctggagcctccagaaggagctggccccacgcacgtcttcactcagccccatgagccccatgttgactctggctgtcgtcatgtgtgatgt

SEQ ID NO: 23595 - DNA, 122 bp, Homo sapiens
taactcggcgccctacgccccgggggtaggggagagagaggaggaaggactgggggtccccgccaagatcccccaggccaaacgctctccgaagcccaccctggaataacctcctgcttcac

SEQ ID NO: 23596 - DNA, 122 bp, Homo sapiens
cgagagctggtttgttacccctcccgcctgttttacggcagaggggcctggactcggtcccgcccgcctccagagcagtcccctggaggacctcctcatcgagcaccccagcatgtccgttt

SEQ ID NO: 23597 - DNA, 122 bp, Homo sapiens
caggtatgacccaccatgcccagccaaatattacattttctccttaaattttagtatggacgctccctcccctgtggagtattgcctctatttgtatcaatagccatagttaccaggcgcat

SEQ ID NO: 23598 - DNA, 122 bp, Homo sapiens
ccgcgccgcctactgggaagattctaccgccaggctcgacgcccccagaagtgcaggtggcgttaccaaaggccggctcagccagcttccggccgccgctgtcccccgcaccacccacagcc

SEQ ID NO: 23599 - DNA, 122 bp, Homo sapiens
ctgctctccctggggcccacaggggctgctttggcagcatccaggcaggaggctgcatgacgttaccaggccagtgtttggtccaggttcctcagaaatcacacctggttacacgtgaacca

SEQ ID NO: 23600 - DNA, 122 bp, Homo sapiens
gggagagaggccgagagatgctcgtagggaccgaggcaaaattctacgaccccggaaatccgtaaacgcggggaaggaggatcgaacgcgtgtctcgcttggagaagctgcccacggggcgg

SEQ ID NO: 23601 - DNA, 122 bp, Homo sapiens
ctctggctgatagccgcttgagtttagaagtggatcctccagccccagacaaggctcagacgactgcagcccagacgactgcagcccagactcatagataccttgattgagtctcatgggag

SEQ ID NO: 23602 - DNA, 122 bp, Homo sapiens
tcttacagtgctggaagtcagaagtctaaaattggctggccgtttgcattctttcagaggcgataggagaaattctatttccttgctttttccatctgaggctgcctgaattccttggctta

SEQ ID NO: 23603 - DNA, 122 bp, Homo sapiens
gcgtctgaaggccgctgcctccgcggggaacagcatcctatcaactgaaagagcagccgccgccgcccccagccggagacccctttcgtttgagtcctgctgttggtgtcggagcacgaggg

SEQ ID NO: 23604 - DNA, 122 bp, Homo sapiens
agtcttccaggagaacagccatctctgcctggccctccacagcggggaaagtgagtgggacgggcctggggttgcagaccctgctgatgatggtctgttctgggatttctcagaatcagcag

SEQ ID NO: 23605 - DNA, 122 bp, Homo sapiens
caggggaccctggggagcagcactggaggtggccacagtggtcagaggcttggcttttggcgttcccaggttcctcttgatgagagatcatcaaaagatctggacacatgcagatctggctg

SEQ ID NO: 23606 - DNA, 122 bp, Homo sapiens
aacacgccagtcttcctacctggaaacttctgttgagggatgcgatgaaggggagtgaggcgtttcagtgctgcctcagcccaatcctgattctccgtgtggcagcgccttcttgtgttcta

SEQ ID NO: 23607 - DNA, 122 bp, Homo sapiens
ttctcagaaatttatccctcaacagcctcccatagtttctaaaatttctaccattaccatcggtttgagttaaggtagaagtcccatcacaaaatacttggagatgggaacagagggaaggt

SEQ ID NO: 23608 - DNA, 122 bp, Homo sapiens
gtgcctgggcaccagtcacggcagtgggaggaaccggctccagttctcaggctgtggagccgtctaggcaccgtgcacgaagtgggtctccagggctctgagaggccgggctaagacctctg

SEQ ID NO: 23609 - DNA, 122 bp, Homo sapiens
tctaagaatcaaaataatatattcagtaattattttctgaacctatcctaatgctctgaccgatacattctttagaacatctacccgtacattccaaggaccctttttccacggcccttttt

SEQ ID NO: 23610 - DNA, 122 bp, Homo sapiens
cagctgggagccacacggggcaggggagcaggcaccatgatctcatggcagcttctgcagcgcctccatcctcacatacctctccaaggtccccagcccaacggagggggcgtgaaaagtgc

SEQ ID NO: 23611 - DNA, 122 bp, Homo sapiens
ttgacctgttctctttccaacctgggccagttcaccgctccctgggcaatctggtggctccggtcttcctggaggacatcagattgatgccgaacttggtgcagtcacctgatcggcagagc

SEQ ID NO: 23612 - DNA, 122 bp, Homo sapiens
ttatttaaataaagatcgacaccgagttggtaaagccacgggagaatttcctgttacagtcgctatggaaaaccaagatactctcccccattttgactccctctatttcaactgttcttttc

SEQ ID NO: 23613 - DNA, 122 bp, Homo sapiens
cattgtactacatcttcacacaatgctgggaggcagctgttaccaaccccatcttacagccggagaccctgaggctcagggaggtaagggatgtgtgcagagacatgcacaaagtggaaaaa

SEQ ID NO: 23614 - DNA, 122 bp, Homo sapiens
gaactgcatccttgctgctggggagaaggcagtgccctcagcactcccttaaggtaagtgcgcctcgggtgagcatgcacttaatgtgggtgtatgtcactcggctcggcccactacccaat

SEQ ID NO: 23615 - DNA, 122 bp, Homo sapiens
aaaacattggcccacgctggtagaggttctttcatttggccacataacacgtatttgattcgggaacttgcaaataccaactaaaaagcaaacttttggaagaagacagtatgcatgatgta

SEQ ID NO: 23616 - DNA, 122 bp, Homo sapiens
atgctgaccgcaggcccgcagcccaggacggggtggcagggttgacccaggccttcctgccgcagtcaggggtcaggtctgaaaacacagagatgatggaactacggggcctgtcttctaga

SEQ ID NO: 23617 - DNA, 122 bp, Homo sapiens
ctgacagtgccgtcatatgaaatggacaccaggaactgtatgacttcaccaggtctctctcgataccaatatacagatgttgcagaaattgttattccagacaccacacattccaggcgggc

SEQ ID NO: 23618 - DNA, 122 bp, Homo sapiens
gtgtgactacagagagtgctgccaggttccagatgatcctgctcctgtggccaaggcacacgggtccaaagagtgaccactggtccatactagtgatagagttttagaacttccaggagtgg

SEQ ID NO: 23619 - DNA, 122 bp, Homo sapiens
gggaagctgccgccccgcttcccttgctcacacagggctttgcagtagtggtggcagccgcggcagaaactggctctggggaagcaattgattcgtctactgccagcagcccggagttgcct

SEQ ID NO: 23620 - DNA, 122 bp, Homo sapiens
ggattttatatgtgtgtgtgtgtgtgtgtgtgtctcaatatacctatttttttagagaaacgtgactagaagagaaattactctggaaaggttgatgtttcacagtggccagaaacctctca

SEQ ID NO: 23621 - DNA, 122 bp, Homo sapiens
ttgtaattcatgttaaggaatttgaattttaacccatagggacgccactgaaaggtgtgacgcagtcagattgacatttataaagatcattaaggctaacatgcaactaataaattaaaggg

SEQ ID NO: 23622 - DNA, 122 bp, Homo sapiens
caccgggattcacagagcaatttgtaagggtaaatgaatgggctgacgatcttactttggcgtgtcaaggcaagccccagtctcaagctagaggtgagtgtttccctgggaaaatagttttt

SEQ ID NO: 23623 - DNA, 122 bp, Homo sapiens
ccaataaggtttatctgaggcgccattattgctaattgaaaactttgctcagtaccccatcgtgaagacttgccatagagtcagcattggcaatttttgacaatttctatggagagtgaatt

SEQ ID NO: 23624 - DNA, 122 bp, Homo sapiens
ggctcaaccaacttcccctacgctaaaaggacgaacccacaccttccgcgggattccgcccgggcttccaacgtggagacgacttttactgagctggtttaacagttgcccacgaacgctta

SEQ ID NO: 23625 - DNA, 122 bp, Homo sapiens
ccgattccagaaaggtcttccagtagctgggctggagccgggtccatgtttccttgccagcggcctccttcagggcccctggtgtctagagaaatgaaggagtttctccctgggtccctgaa

SEQ ID NO: 23626 - DNA, 122 bp, Homo sapiens
ggggcctctaccatgcagtgcagtgtctagtgggccaggcgggactaagagagccgaggtcgctccccatccactctcacaaggtttgtggccatctctttgccttacaaattttgagctgt

SEQ ID NO: 23627 - DNA, 122 bp, Homo sapiens
ggcaaaaaccaaacgtcggaaacaagtaggtcccgactttatttcgcacacagtgccactcgctgtcttcctcagctcgagctggataaagaaacatctcatggtttattttccaggttgta

SEQ ID NO: 23628 - DNA, 122 bp, Homo sapiens
atgacggtgggggtgacgggcattcaccccatgaacagcatcagcagcctggacaggactcgcatgatgacccccttcatgggcatcagccccctcccgggcggagagcgcttcccgtaccc

SEQ ID NO: 23629 - DNA, 122 bp, Homo sapiens
gattttctgggcctctttcctttatcagcgccagtgtctctgcaggagtggcgtgagcggcggccgggacagctcctgacagatgggcaggatcagccgctgccttgtcattgtccacacgg

SEQ ID NO: 23630 - DNA, 122 bp, Homo sapiens
aacggtgctggagggtgtcccagcttcaagttcagtcccctgcttggtgcccatgagggacgtcccaagctcatcccttcctccagcgctgctttctctggtgcagagttgctagaaacatt

SEQ ID NO: 23631 - DNA, 122 bp, Homo sapiens
gcctggtgataacataaagcttcagtgtcggagttactagactgggtagcttgtggccggcgagttacctgatgcctacacgtcctggtttcccatctatgacacggagacggtcattcctg

SEQ ID NO: 23632 - DNA, 122 bp, Homo sapiens
agataatccggtgcctggagtgacgcagagaggcacagcaggtgtcctggacacatctaccgtctcccgaggtcagagagaaggagaccatccgtgcgtccgtcaaccctgtcagcgctggc

SEQ ID NO: 23633 - DNA, 122 bp, Homo sapiens
tttcaactgaaccaacaagacctggatttcttcttgtccagatgcctagaatgtgccacacgttggccactctgttctgggaagaagaccaagggaacagatgaaagccacagccttgccaa

SEQ ID NO: 23634 - DNA, 122 bp, Homo sapiens
gaggcacggaccgtgagctccagtggtgcctggggcctgacctgcagcggcttttccaggcggatcacccccgtggtggcgtcgatggaaaagtggccttcggctgaatccggcagagagta

SEQ ID NO: 23635 - DNA, 122 bp, Homo sapiens
cgcgaactcggctgctgtgggctgctgcgcgctctcgcctttgtcagtttcatcagccggcgtttcagctgcgcgcgcgcatgcgcctgcccacccctccgccagttccgggcttgcgtccc

SEQ ID NO: 23636 - DNA, 122 bp, Homo sapiens
tgagccctcccacccgaatgtacaatgaactctacctccattaggagggagcccccagaacggtctcctccgcacataatgaaagacacccccatcctcaaaatggaccctctctagtcaca

SEQ ID NO: 23637 - DNA, 122 bp, Homo sapiens
acacagggagacagtgcacagagctgccgcagccatctgccgcgacttcatatgccgccccggaaactgacagacactgcttcagcaaggcccagcccgtcagatgagtcaatcaatcaaaa

SEQ ID NO: 23638 - DNA, 122 bp, Homo sapiens
ccgcggggaggcaggtggcgctgcggccggctcagggcggtggtcgtggctgcatggaggcgcagcaccgcccccgaggtttaaggagggagtgagtccggttctagctccaagaagacccc

SEQ ID NO: 23639 - DNA, 122 bp, Homo sapiens
ggcggcccgcctcaccactcccggcttcccggggcttaggcccgcaccatcgagtcgaaccgagtcctcatgttttcctagacaagccgctgggggagaggggaaacacttctggcccatgt

SEQ ID NO: 23640 - DNA, 122 bp, Homo sapiens
ttctcgcttgagtactcagtgtcttcactgaatttgacagggttttaagttccgatgtagcgtcattatcctggcgatgtagcatcgttatcctggcgccgtagcgtccttatcctggcgcc

SEQ ID NO: 23641 - DNA, 122 bp, Homo sapiens
ttgccatttttcaaagcacacctgtgtggcctgtgtcccctaggaccccctttcttgcagcgctgtgctggtttcttacagaatggttctgggccttggaacagcatcccaccccaccatgg

SEQ ID NO: 23642 - DNA, 122 bp, Homo sapiens
acaggaaacacatagcttcactggaatttgaaaagggaagtagtaggatgatgtcaacagcgattagcttgaccctacatggctgactgctgtggtgattaaaggtccagaccatagaagga

SEQ ID NO: 23643 - DNA, 122 bp, Homo sapiens
aggaggttgcagtaggcaatctggtgaccaaaggcagggcctgggacccgagccacagtgcggatgttgttcccatagtcacaggccatctccatgccactgaggctgggcaggctgcccga

SEQ ID NO: 23644 - DNA, 122 bp, Homo sapiens
gtggagggaaaggggcagagatccagactccaatctcagaagcttcactccccccggaggcggaggtgacgcgccacagaagcgcctgccactcggggactttatttcaggtggggctattg

SEQ ID NO: 23645 - DNA, 122 bp, Homo sapiens
accctcttgggctctgcaccctccccggctctgcaccctccctggccaggccaccttccccgggctctgagcaatgtgctctgccgtgagtcagctcccgctttgcccctccggacacctct

SEQ ID NO: 23646 - DNA, 122 bp, Homo sapiens
agaatcaccagctgttcctagtggctgctgggagggggcgctgctacacggccgacctgtcgccaggagagaagcatggcgccctgcccacccactgcgcctggctgggtgccggccacacc

SEQ ID NO: 23647 - DNA, 122 bp, Homo sapiens
gggtcgctttgggtcgcgggggcgctctttctcagcattcttgtttcgtactgaggctttcgggacggcggcgggaagatggcggcctccaggaatgggtttgaagccgtggaggcagaggg

SEQ ID NO: 23648 - DNA, 122 bp, Homo sapiens
tgttctgaacagggacagggagagccagagggaaccagcctggggctcactggaggggctcgtgggcagacagcgccctttggagggaactgagtctgaaaggaaggaaaccctttccccgg

SEQ ID NO: 23649 - DNA, 122 bp, Homo sapiens
gtggggctggctgattcacgtctctctttggtcatcctctagcggattagcctggatttacgtacattgtggcaggaggattccagtagtagcaagaaaacaaaccctattgtgtacatgct

SEQ ID NO: 23650 - DNA, 122 bp, Homo sapiens
tgcacaagtgggtggctaccttctcctctgtaccatctgttattgggggctgggggctcccgcctttccctgtgctgtggaataagtgcattgggtcagacctgtctgttctctgcaggtaa

SEQ ID NO: 23651 - DNA, 122 bp, Homo sapiens
ccagggctttctcagagcaagaccattggttctgggcatgtggtggtgcccagctacttgcgtgacaagcaacgccacccctgttcttcttggtgctcactccaaaagcctggtaaggagcc

SEQ ID NO: 23652 - DNA, 122 bp, Homo sapiens
gcttcaaacaagcccagagctggcacagggaacagcctgtctacatgctgggtcaccaaacgggcggggaggggaagcgggtgcttgctattggcccaggctcttggagcaacagccctcga

SEQ ID NO: 23653 - DNA, 122 bp, Homo sapiens
ggcgcggcggcggctggagcagcgcggtagggtccttcgccagagcatccggtccgagggcgcacacaggcagaaggctcgcggctcgtccactctcctccctctctcctcctctccctggc

SEQ ID NO: 23654 - DNA, 122 bp, Homo sapiens
tcaggactgcggagatcgcatctacatcctgccgcgctctgtgccggcacagggtggttgcgaaaatcgtgcagtctgaattgattcaaggccttgcagcatgattgctaaatacgtcgaga

SEQ ID NO: 23655 - DNA, 122 bp, Homo sapiens
ggccgttgtcatggagagagcgcgcgcccaactacgtggcttgtgattggctgggaggcacgcccccgccctccccttccagcccgtggctcggcgacttacagggagggagaacatggctg

SEQ ID NO: 23656 - DNA, 122 bp, Homo sapiens
accagggttcaaacagggctgctccctgccaacccagggatgtctctctgatgctggtcccggagcctctggctgctgtttgtgcagggaaggggaggtgccttctgggtataaatagcaga

SEQ ID NO: 23657 - DNA, 122 bp, Homo sapiens
ggctcagcgcccgcagctcaggctccgtggagcccggcggcatggacgaggcgtcgcgcgcgccctctagtggagaaaaagggtcactgccgaacgccagctgcggaccgtcgagagttcct

SEQ ID NO: 23658 - DNA, 122 bp, Homo sapiens
tccgggtcttatggaagaaggccccgtgtctgggcagtgccgtggctgtgagtgagcatccggggccagtcagatgtgccgtctccggaggtcacttccatagtggccatcaacagcttggc

SEQ ID NO: 23659 - DNA, 122 bp, Homo sapiens
gtctcgctggcttaggactgaagctgcggaccttcgtggtgagtgttacagctcttaaggcggcgtgtctggagttgttcgtttttcccggtgagttcatggtctcgctggcttcaggagtg

SEQ ID NO: 23660 - DNA, 122 bp, Homo sapiens
ggtgcaggcggcggatgctgctggggtgacggtgctgactgcagctgtggcggcggcggccgcactgggaaaggcccagcggctgggggcgggcgtgggtggcgagagggggtggacgcgtc

SEQ ID NO: 23661 - DNA, 122 bp, Homo sapiens
tcaagaaccctggacactggacatctcactgcaacccagccccagcccccatcccacctccgccccccaacagggttactaaggttaatgagcccagtgcttagggcagcgcctggctcagc

SEQ ID NO: 23662 - DNA, 122 bp, Homo sapiens
ccaggaaccagaggggtgggaggccaagcaggggagccccccaacccaaggcacccaccacgcagcacgccgtccctttcggcgctcggaaagccctcgggcgaacccctcccgagcccacc

SEQ ID NO: 23663 - DNA, 122 bp, Homo sapiens
cccagcccctgcccctcgagggcagcgctggccccggcacctgcagggcggctgtcatgccgtccaccctcctagttcttgcagcagcaagacagacagctgagctgggggttggaggcacc

SEQ ID NO: 23664 - DNA, 122 bp, Homo sapiens
tgtgtgcgccggctctggctgcttcccgtccccaggcgcgcagggatcgcccgcgggattcgctcagctgcccgcatgggtcttcaggctggaggcgctccaggacttaactggagctggag

SEQ ID NO: 23665 - DNA, 122 bp, Homo sapiens
gaatggaccgatggacgcgggagaccaggcggctccgcagctccgctccctgccggctcccgggtgggactgcagcccaggcggctccgccgtattatcccctgtttctcggtctccataga

SEQ ID NO: 23666 - DNA, 122 bp, Homo sapiens
gcctgcgccggggccaggaggctgtagaggacggtttggtcggggctaaagcagctactccgcaccgacgcgggccgcgaaagcccccaagttccgcatggcgaaactccggagatcaacta

SEQ ID NO: 23667 - DNA, 122 bp, Homo sapiens
acaaactgcttgtgctgagaaatggagaagccgcgtcccttcccggccccattggctgtgcggagtcactccggacactggtcccctcctggccccactggctgtgccgagtcactccggac

SEQ ID NO: 23668 - DNA, 122 bp, Homo sapiens
tggctttcccagcaagagaccgagggggcgggcccccaagagctccagaaagctctccaccggacaccagcaggaacagcactgcagatggagcagcaggggcaaagacccgaggtgatagt

SEQ ID NO: 23669 - DNA, 122 bp, Homo sapiens
ggacaggatccggagagggtgctcccaggaggagcgatggggcagcgggtcctggaggggcggcacggttcaggcgggtgtcaccgcacctcacacccgagcagccgtggccaccaggtggc

SEQ ID NO: 23670 - DNA, 122 bp, Homo sapiens
gatgggcggccgggcagagacgctcctcacttcctagatggcatgggggccgggaagaggcgctcctcacttcctagatgggatggcggccgggcagagacgctcctcactttccagactgg

SEQ ID NO: 23671 - DNA, 122 bp, Homo sapiens
gcaaacaaagaatcctgctaaaagaagcttttgctcctcctctcccgctgggaagaaaagcggctggcagttggcagacttttccagaaggttccctgataacctccccaccccctcaacac

SEQ ID NO: 23672 - DNA, 122 bp, Homo sapiens
gcagtggcgcggctgctaagtagcagcaggtgggagactagggtctgcgctcgcggcgaccgcggaggagggtgggcgcctgcggaggtgtcctcgctcacttcggggggcccagagtctcg

SEQ ID NO: 23673 - DNA, 122 bp, Homo sapiens
ttggtgaggaaattgatatgtacagaaattcagtcagtttttctcatattacaaggtagtcgtagagccaagactagaaatcaggtttctgacttccaatgactttggctaattagacaaaa

SEQ ID NO: 23674 - DNA, 122 bp, Homo sapiens
aaaggattcccgtgctcagggaacctggggcacaggagagggtggataggcgcgaataagcgggctccaaaaagtggtgtggcttggcaatcctattcgttcttggcgggcagaaaattcag

SEQ ID NO: 23675 - DNA, 122 bp, Homo sapiens
tcttcatacatggtagcgaggctctgagggaagtactaaccctcgccaatctctgatcatcggccaccagcaaagctaccaagagaaactactagcagtgcttgaccaagccggcccggggc

SEQ ID NO: 23676 - DNA, 122 bp, Homo sapiens
ccgctcgtcaccgatgaggacagctggtacagcaagtggcacaagatggagcagaagttccgcatcgtctacgcgcagaaggtgcgcgacgccggcgggcccggggggcgggcgggccgggc

SEQ ID NO: 23677 - DNA, 122 bp, Homo sapiens
gttgctcggcagtgctgcgcggcttggcctatgggacggcgcgttgttgggctgcagcgccgcaggccgcacccaggtcgggcggtgggggcgagcggaggggctgaggggcggagaggcct

SEQ ID NO: 23678 - DNA, 122 bp, Homo sapiens
atatatagtttcaaattgctaggaggatattgaatgttctcaacacaaatgataagcccccgggggagtggcttctgtgagacctaaatcctcatctgccacagaaggaaggcaacacatac

SEQ ID NO: 23679 - DNA, 122 bp, Homo sapiens
ctagcagaacctctatgactcagcactggtgtcataaagcctggggagagggactcttagcggggcctttgctcacttacaggccagctgcagccatattgtccaaaacaaaaagacaaaaa

SEQ ID NO: 23680 - DNA, 122 bp, Homo sapiens
actatgaagccaattcccctgagtttcctgaggtggctgtgaggatgaaatgaggtggcacgcagcagggttgtcattaggagcatccgcttatggccgttctggccacaagacaagcagga

SEQ ID NO: 23681 - DNA, 122 bp, Homo sapiens
atgcacccaccctgtgaggaagggtcccccgccagactcaacaggcgactgatttaagttcgtctcatctaaaaatagcttcatagcaacacccagactagtgtccggccaggctgtgcact

SEQ ID NO: 23682 - DNA, 122 bp, Homo sapiens
cccgccggctgccgttagggctgggagccggctgggcgcgggggtagtgagggtgcctctcgccgtggctgcgcggcggcctcgtccgagaggccggcgccggggcagtgaccggcccgtgc

SEQ ID NO: 23683 - DNA, 122 bp, Homo sapiens
gattgggtcgctggcagagtctagcacagcgcccggcacatagtaggctcttaattcattcggcattaagcaaatattcattgagagcctactatgtgctaggcattgttttgggcttttag

SEQ ID NO: 23684 - DNA, 122 bp, Homo sapiens
tgaggacggcacggccagcgcctgctgtgagtgggtctcccaagactaggcctcaggacgcggggggagccatccccgccgccctcacaggacccaccaggcagcggagacatgtggaatta

SEQ ID NO: 23685 - DNA, 122 bp, Homo sapiens
actgagatttcagactagttagggttaggcctcttgtacacacacacaagggcctttaaacgacatcaacactgtatcttcattattcgcatcagatttattcaacaacctctttccaaatg

SEQ ID NO: 23686 - DNA, 122 bp, Homo sapiens
ccagagcctcccacctgagtgttcctcccggcactggaagccagtggccgtccagaggaacgtgattgaattgctgtatatccatctggtggagcactgctgtgtgtctgttaaaaaagaaa

SEQ ID NO: 23687 - DNA, 122 bp, Homo sapiens
tttccaagcatccagccatgaggcccccttatttgccaggaaaaaccattctggcactctcgaacagctctccctggattcagatgtttttctttttctagatcctagaaactatgattttt

SEQ ID NO: 23688 - DNA, 122 bp, Homo sapiens
cgctacttctgcgctactcagcgacctcgttgcctctgccaccatgccgcgctctttcctcgtcaggaagctccctgaccctgatcggaagcccaactacagcaaactgccggactcgaatc

SEQ ID NO: 23689 - DNA, 122 bp, Homo sapiens
tcacccccttagcggaagagcgtacagatgtcccatgacacgagacgctcagagggctcacgcagttcgggtgggatttccctacccggttcatccccttttactcccttttcctgtcccag

SEQ ID NO: 23690 - DNA, 122 bp, Homo sapiens
gaggccaacaccttcgatggtgagcgctgcctctatggggcactgagtgaccccatccgccgggctctacgcgattacaagcaggtcacggcttcctgcaggaggcgggattactatgacga

SEQ ID NO: 23691 - DNA, 122 bp, Homo sapiens
aggtttggcctggtggccccaggatcctccccatagtaattgaacagtcttgggctgtgacgcatggcagtgcccagtgcctggcactgcacctgtgtggagtagagctgggcacagcaaag

SEQ ID NO: 23692 - DNA, 122 bp, Homo sapiens
gaaatctctgaaaaggaacagacgttgagtcccagtctttcggcccaaggttcgcgcgtgcgcacagccccctttccgagacttatttcgcgcggtcggagaatcagattgtgcccacaagg

SEQ ID NO: 23693 - DNA, 122 bp, Homo sapiens
gagaggaaggtacggtgaaggagcttagggaagacttccgggaggtgacggtgtctaagccgagtcttgggaaacaagcaagagtaagataaactaaaatagaaaaatagaagtttcagata

SEQ ID NO: 23694 - DNA, 122 bp, Homo sapiens
agagagctgggtgggaggccggcggtgaagagcacttccggttggagcatagagcagctccgcggcgccgcgcccagaagggctccctcgggctcgtctaccagagagaggctccgcttggg

SEQ ID NO: 23695 - DNA, 122 bp, Homo sapiens
gggacccaaggcggggtgtctgggaagccgcaaggagccccgggtggctgaaatggagggcggacagctgggggagggtacctgaccctgaaggggcttaactccgactgacacggagtcac

SEQ ID NO: 23696 - DNA, 122 bp, Homo sapiens
ccttcaaataaccaaatgttaccagagagcagagcctgggaaggactgccaatgagctgccggcaggggacactgggaacaatagtgaaaagcgtgtttgtgctgcaagggtacctgttcta

SEQ ID NO: 23697 - DNA, 122 bp, Homo sapiens
tgcaggtggcgtggtgcacccgggggcccagggcttggccccaagcttgcaggctgtcctcgcgtgggtggagcaggcacagggcctggggtctgggctgtgccagagtctgaccatcgagg

SEQ ID NO: 23698 - DNA, 122 bp, Homo sapiens
ggctgtccaggtggcgcgagcaggctcgcttagcagcccctccaggattctcgggagccacgtagcgtgaacggaatgcttcacctggggctcttggaaggagtctatgaacccatggggct

SEQ ID NO: 23699 - DNA, 122 bp, Homo sapiens
gggccagtcacatctgtcacctcccaggggctggtggcaggagtgcccacccacaggcagcgctctggattccgcgcaggagaacagcagtttcttctcagcctgcactttgagtttgccca

SEQ ID NO: 23700 - DNA, 122 bp, Homo sapiens
tgttgtcttttctaccctccacaggcacagacactgtgttcacctctccagtcacatcgacgtccaagcagatgttctgtggcaaagttacaaagcatttatgtcactttttaaaattaatc

SEQ ID NO: 23701 - DNA, 122 bp, Homo sapiens
gagccgtgcgagacagacttcccatctgggaagggctgcctacgggtaattgggtttgctcgagttgcctctataattaataagtgatttgacttggagattggaaatagtcatgaaaggaa

SEQ ID NO: 23702 - DNA, 122 bp, Homo sapiens
cgcggcgggaggaaaaaggttccggcctcagccggcgcacctggcggaggaggaacctcgcgacgcgctctcgggcatcggtttctcccagcaaagcttggagggtttagctgcgcggagag

SEQ ID NO: 23703 - DNA, 122 bp, Homo sapiens
gcagtgtagcgatagggcacccaatctgccacccaccgccggcagtgcaaccccagatagcgcaccgaactcactccctgctgggcagtgcaaccccacatagcatccaacccgcctcccca

SEQ ID NO: 23704 - DNA, 122 bp, Homo sapiens
atttccaggccttttagattcggcttcatccacaaccaatgtgagttcttatctgcaaagcgggcctaagtgtaatggagggaaggtgggccaggcaccagggtcctgggttctcccgcgcc

SEQ ID NO: 23705 - DNA, 122 bp, Homo sapiens
ggtctatgaagaaagtcaggtaccatccagttctgggtgacaggcttcacaggtggccaccgtggcagccctctcagaagcaggtactctatgtccttaggggccagcagggctgcctggga

SEQ ID NO: 23706 - DNA, 122 bp, Homo sapiens
actcccctccgcccccgtgtccgggcgtgtaaggccaaggcagggcgagcgggcgtggggcgcggggccggggcttacctgctccccgaagtcgatggctatgttggtgatgcccaggggca

SEQ ID NO: 23707 - DNA, 122 bp, Homo sapiens
ggggcagtcccagggcgccgtgaagaggtgacggagggctggctatgggcgaaacccctacgactctcggcgaagaacgtctctcatcagagactcttaatagcagagttgaccaagcagaa

SEQ ID NO: 23708 - DNA, 122 bp, Homo sapiens
tttggaccccgctcaagaagtcagtccccaagagtggagtccaattcagcagagaattcacggacagaagaacaacacagcagggcagagagccacagagccactagcagatgtcagggaga

SEQ ID NO: 23709 - DNA, 122 bp, Homo sapiens
ctcctcttttctgccccgcctgcgtttcttcttttcagacttgggtccctattaatagaccgaggaagcagagagcagcagcttcagcgaggcaggggtcattcctgctatgcccacaaggc

SEQ ID NO: 23710 - DNA, 122 bp, Homo sapiens
tgatgtcaagtcccagtttgaaatctcctttggcttcccatcacctataggatggagtcccgaccccttagcttagcacataagggctctctcaagctgcctcttcctactttttctcctgg

SEQ ID NO: 23711 - DNA, 122 bp, Homo sapiens
gaatgtagaggtggtaatagggagccgcagatggtccgggagcaggggagtgacgcagtgcggtgcccacaccacctgattgggtgcagaagacaccagcccaatcccacgagagctgggcg

SEQ ID NO: 23712 - DNA, 122 bp, Homo sapiens
ccatcactttccccagcagaggcgaggcggccacaacgccttcctagggtttattaaatacgttcaagagcctatttgtagctgtcagggagaagccgagggggagccgcggagtccgctca

SEQ ID NO: 23713 - DNA, 122 bp, Homo sapiens
ttccctacaccataccccgccccaccacatccttcatctagacacatcctgggtctagaacgtatcaggagacagaggtgtagaaccacagccagcttccctaaacttccactaatctccgg

SEQ ID NO: 23714 - DNA, 122 bp, Homo sapiens
gcaaaatgttgcagatgtatttagccataaaaagtaatgaaatattgatacatactactgcgtggatgaaccttggaagcattatgctaagtgaaagagaccagacacaaaaggctacatat

SEQ ID NO: 23715 - DNA, 122 bp, Homo sapiens
gctcagcgtcctggcccagcgccccagcagcaggtccaagtgggtccggctctacagcggcggcacctacttcctcaccactgggcagacgccgctgtgtcaggacccgaaatccttcctgt

SEQ ID NO: 23716 - DNA, 122 bp, Homo sapiens
agtcaaggctgcgtgagccatgatcatgccattgcaatccagtatgtgacactaagactccgtctcaaaaaaaaaaaaaagataattaaaatgtgtaagatactgtattagcaatataaaaa

SEQ ID NO: 23717 - DNA, 122 bp, Homo sapiens
aagtgacttgcaaaggagccatttatttagatgaggcatgcacccaccacggcagagacacgtagggaagtgcgaggatcgatgaggctgctaattaaagcagaggatcaatcccctgtgtt

SEQ ID NO: 23718 - DNA, 122 bp, Homo sapiens
gtttcataatggacttttggtggttcaatagcagtcactgaactcctcaaacccaggaagcgtcttccggtgcaatctccgccacctgccagccgagagcatcgcgggacttgcagtctttc

SEQ ID NO: 23719 - DNA, 122 bp, Homo sapiens
cgcatctgtctggagtggtgagtacctggaccctcccatccctgcaggctgctggtggaccggttctcaggccggttctgggcctggctggaacgggaggagttcctggtccccaagaatgt

SEQ ID NO: 23720 - DNA, 122 bp, Homo sapiens
ggtgggggagaggaagggagcggtcacgtgtgaggggcggcccgaggtcacgtgacggagcgccggagcggagggagccggggctgggagttctcctgagggaagaggagtggagtaggggg

SEQ ID NO: 23721 - DNA, 122 bp, Homo sapiens
ttttggagaaaataattgtacacttcccacgaaaaaaaaatccctgagaaatggcatcaccgggtacaacctcggtcaagtcgtgtgaggctgactcaggaaacgccggggccaggggcgtt

SEQ ID NO: 23722 - DNA, 122 bp, Homo sapiens
cttattacagtactgtggaccttgaagagatttcatgaggagagtgaaaggacgaccctccgtgtaatcaagtggcgctgaatattccacgcgtttttgatcacacactgattgggcacagt

SEQ ID NO: 23723 - DNA, 122 bp, Homo sapiens
tcaaaacacttcctctgtgaatgtgccctactccagggggccgtgggtagggctgggggtcgaccgcagccgggtgcgcccctcccaggttcccccctccctgatcgacccctaccccgccc

SEQ ID NO: 23724 - DNA, 122 bp, Homo sapiens
ttctgcatcgattgagatgatcgtgtgggttttctcccttcgtgctgctactgcagtgcacgacattgactgattttcttatattgaaccacccctgtgttcttgggataaatcccactcgg

SEQ ID NO: 23725 - DNA, 122 bp, Homo sapiens
gtggagcgctgtttggcgctgccatttgagcctgggctgaaactgcgggtgtgacccccccgtggtggctccgggtgtctgcagtggagctgggggcggaagcatgaggctaacggcttggc

SEQ ID NO: 23726 - DNA, 122 bp, Homo sapiens
cgcgctgggtcctggattggggcagtgaggggctgggatttccagtcagatggaggaggacgtgggggctcccggatgcctcggagccccgccctcctgccttacctcctgggcggaggctg

SEQ ID NO: 23727 - DNA, 122 bp, Homo sapiens
gcgcggagggcgacccgggtgagtcagccgaagagcagacgggctgcggagcaagaagaccgaggctggaggcggcagtgagtgttcccgccgggcgggtggcgttgtcgccgccaaggggg

SEQ ID NO: 23728 - DNA, 122 bp, Homo sapiens
gaacagctttaaggtgggagagaactggaggcaggaactgcgggttatctaccagtgcttcgtgtggtgtggaaccccagagaccaggaaaagcaaggcaaagtcctgcatctgccatgtgt

SEQ ID NO: 23729 - DNA, 122 bp, Homo sapiens
gggtcccagtctatcagagaggtcccagcgaggttctaggacctgcaccctagccaagtgcggctgtgaagtgttcgatgactctctggcctgggccacccacacccattcgccctggaaga

SEQ ID NO: 23730 - DNA, 122 bp, Homo sapiens
agcagtttggaggtggtggcatgtgtcctgctgtctgcagggtgctgtgtctggggtgtccgtgcgtctctgtgagtgccctgaaatgtcatacagtctacacctggcgggtggcacctctg

SEQ ID NO: 23731 - DNA, 122 bp, Homo sapiens
catcgagaccatgaacccagtgggaagaatgaacaactccagacacagcaccttaagagccgtaacactcaccgcgaaagtccacagcttcactcctgagccatcgagaccacgaacccagt

SEQ ID NO: 23732 - DNA, 122 bp, Homo sapiens
gcggcctgtgtggacggtgaattcggcttcgttacactgtgtgagcgtcactcctgctcccgttggcgccctgtgtggatggtgaattcggcttccttacactgtgggagcgtcactcttgc

SEQ ID NO: 23733 - DNA, 122 bp, Homo sapiens
ggcacggggactgggcgcggccgtcaggaaggttcggggactgggctgctgtagcaaactcgggggcttaaagcaacagaaacccacccccactgtcctggaggccagaagtctgagatcaa

SEQ ID NO: 23734 - DNA, 122 bp, Homo sapiens
tccgggtactcgtgaaggaccctgcctcgagaagagctgcctgacgccgttgcactgggccgaggatcgtgaagagccctttggcgaggccgaggcggccccttccccagcagcgcccggcc

SEQ ID NO: 23735 - DNA, 122 bp, Homo sapiens
acagagctggagagcaaggactgcgctataaccgcgctatgtgccaggcttgggatctcacgtgaaacaaatggaggacctgatggcttttaagcacaggagtgggcgtggtctaatttgca

SEQ ID NO: 23736 - DNA, 122 bp, Homo sapiens
gtaccatgtacccctcttttatggcctgccactgtagcttttttaatttacctgtagtttcggatgaaagtctacatttccccaccaccacacatacttctataagctctatgagagtagga

SEQ ID NO: 23737 - DNA, 122 bp, Homo sapiens
aagctctgacccccgctgtgcctggggcgggctcacccacggaggtgactgttaatacagcgctgagtgcgaaggagacccgagaaaatgggcctattctgtctagtaacgttttaccttct

SEQ ID NO: 23738 - DNA, 122 bp, Homo sapiens
ccacacaggccgagttttggtgagaagaggaggaaaggataatatttgggaatttggaaacgaaatttaagagagatctttgagaagcatgagggtgttacttacttgaggagagagaaggt

SEQ ID NO: 23739 - DNA, 122 bp, Homo sapiens
aggcaatctgcccgcctcggcctcccaaagtgctgggattacaggcgtgagtcaccttgccggaccaaccgtaacttcttacgattagagttaggaagcttccggtttgtgtgtgaagacga

SEQ ID NO: 23740 - DNA, 122 bp, Homo sapiens
cgactctggtcgccggctcggtggtggcggcggcggaggcagcggcagctggagcagcagcgcctctctccccgcaggactggctcctacccttggccgtgatcccctctgctcgctccgca

SEQ ID NO: 23741 - DNA, 122 bp, Homo sapiens
ggttgcagtgagccgagatcacaccatcacactccagcctgggtgtccaacagcttggtccgattttgaaaaaagttctctttgtcagatggagaaagagttaacttccactgtattaactt

SEQ ID NO: 23742 - DNA, 122 bp, Homo sapiens
cacgccgtgtgccgggctgagggctgatgagcacaccatcgcgttggagcacagccagaccgcgcacgtgaccagtgtggcctcagcgccaccccaattaggtgccgagagcacggctggct

SEQ ID NO: 23743 - DNA, 122 bp, Homo sapiens
aaaacgaccctgctgagctgagggctgaagccccaggtcctgggacccttggaaacagcccgcgggccaggagctgctgtggaccgtgaaggtgtagggcctaggcacgtcccaagcaagac

SEQ ID NO: 23744 - DNA, 122 bp, Homo sapiens
ccttcccctggggttcctgggactcggcttctgcggacatggaaaagccgtcccaacatccggcggccccgtgggcaggggtcctgggacgccccctcctgcatccccgggcgggccctgca

SEQ ID NO: 23745 - DNA, 122 bp, Homo sapiens
ccttgaatctaaatgacagcctggctttctcctggctcctcaggaatcactaccacctgccggaatgcagctgaatttggccaggagcagacacactgatgctgtcccgtgatgaggacaga

SEQ ID NO: 23746 - DNA, 122 bp, Homo sapiens
ccatgttgccacatgagcaagcttgggtgctcccaaggttcaaatactttttattagacacggccaggcagagaagaccatgggagttcccgaggggccccagctttcaagggcgacgggag

SEQ ID NO: 23747 - DNA, 122 bp, Homo sapiens
ccatctatgcaggccagggtgagatgctgtgcccaaatccctactttcttaggctcctcacggggattatgggctctttaaactccatgagtggggtctgccacagaagatggcccctgttg

SEQ ID NO: 23748 - DNA, 122 bp, Homo sapiens
cagcgttcgggcggtcaccagtgtcagaagtgtctccagcagacaatgacaggggcctggcgggctgggtatgttaagtaactgcgaagttggagggtttggccacctcgctagctctcctg

SEQ ID NO: 23749 - DNA, 122 bp, Homo sapiens
cgggaggacgcaggctatttacccgcctcgggaggctggtgggaattcccccacccacaccgcattcctgagtgctcccgtcagcagcaagccaggccccaagaaggcatgcggtaccagag

SEQ ID NO: 23750 - DNA, 122 bp, Homo sapiens
ggggacgggggaagtgttttatatttgtgctatccagcgtggcagctgctaagccacatgcggctactgagtccctgaaatgtggctcctgtggctgaggaacggaatgctgaattctaact

SEQ ID NO: 23751 - DNA, 122 bp, Homo sapiens
gagtgctcatctgaccgggcagcctgtgtttgacctagggaccctgactggcgcccttctcgggggcaaatggcctccccaacagctgccctgcctgcttggctctcagcccgggacagcag

SEQ ID NO: 23752 - DNA, 122 bp, Homo sapiens
gtcaccaccagggtggcctgagcagatggtgtgtgcacaccatcagcttcaccccacccccgcccccaggaatttccagaatctctgctaaggccacagacagttattatcatggagtccag

SEQ ID NO: 23753 - DNA, 122 bp, Homo sapiens
tggcactcttttacttctccactcacttcctccaactgcctttgaactactagacttgaacgacccctcccctacccttccaaagggagcaataataatagctagcacttactgagtgacaa

SEQ ID NO: 23754 - DNA, 122 bp, Homo sapiens
tcctgctcaaggccctgtcctcaggttcgcggcctccgttttctcgtcagaggccccaggcgacgccaggaggtaagatttacctcactggtcaagggcagcctctggcctggacacctgcg

SEQ ID NO: 23755 - DNA, 122 bp, Homo sapiens
aggccccccaccacccgctggaagcacaggccccagctcaggtcaggttccggaacctagcgtccccaggttctcacgtgacttagtttcccaggcaatagcgcttttctcccggatgtagc

SEQ ID NO: 23756 - DNA, 122 bp, Homo sapiens
ccaccagctgctacttccgggatcggaaactgtactgcaaacaagactaccaacagtaagcgcttctcgtcctccttccccgccaccgcccggcactcgagcccggtcagccccctgccggg

SEQ ID NO: 23757 - DNA, 122 bp, Homo sapiens
gtgtgtggttacaacagaaaacactcttcctgccaggccgaactcccccggagatgccctcggcggcagacccagggccattgccactttttcaaatcgcacgtagaggatgtccgagggct

SEQ ID NO: 23758 - DNA, 122 bp, Homo sapiens
gatttctgaaattgaggctgggaggggaggggctataaccggcgcttccctggcacgcgccgctaggtttccgtcctctcagagccacgaagccaaagggcatggaaagggcacgcgcatgc

SEQ ID NO: 23759 - DNA, 122 bp, Homo sapiens
ccgggagtgagcaggggcttggggaggctgcaccaagtgccctctgggtggaccaaatgacggacagatgggcagtcccatggtgcgtccagcagggtgcagccggtgtgcagggtgagagg

SEQ ID NO: 23760 - DNA, 122 bp, Homo sapiens
cttgatttacagtctagtgaggatttagtcaagttaacaggcaataccttgtaagtgctacgatgtggggcgtgcacagaggactgagggaacacataagattcacatgtcataggttccag

SEQ ID NO: 23761 - DNA, 122 bp, Homo sapiens
agttctccataattatcaagattcagactgaggggtgtgctgggaaagagctggccagtgcgctgggaccacagcaagcaccctggggctcagagaagatggacaagttcccccgagttggg

SEQ ID NO: 23762 - DNA, 122 bp, Homo sapiens
agcaggagaaaagatctattctcaacatttgctaaactccctattttccaggcactggctcggatcacatgggttttacccttggcatcatctctgttttccagcctttgccccctggaggg

SEQ ID NO: 23763 - DNA, 122 bp, Homo sapiens
gagctcacgagcacgtccagagcggaggacactcgggacaccggggtccagctccggaaacggaaaattccacaagcccgtcactctaggaagcggcagcgaacgttctcggtaggtttaac

SEQ ID NO: 23764 - DNA, 122 bp, Homo sapiens
gatgaggatgataaaaatatttatgtccctagaatttgtgggtttggattaattctgtttcgtaaggaatattgttggccttcaaatgcagtgccacttgggagagaagcaagcgggcagta

SEQ ID NO: 23765 - DNA, 122 bp, Homo sapiens
aggaatttgacacaggtacagtgtttgcatgtttttatctcaagtgtagattcccgtaaccgtcaggatacaaactcttctatcaccacaaaaatctccctggtgctttttatactcacacc

SEQ ID NO: 23766 - DNA, 122 bp, Homo sapiens
cagggatgcctgagcaggacgaggaccctggagtccaagaaaatgctgatgatcagagaacggtccccgaggtcaccagggatgcatggtctgcatttcggcccctgcgggacaatggaggc

SEQ ID NO: 23767 - DNA, 122 bp, Homo sapiens
actgctgccgtgtcattttcacacgacagcaagttggggacagcgagttgttctgtcctgcgcgtgtgtcccctcatggtcttgagtgacctgaccctctgtggggagccctgagcctcctc

SEQ ID NO: 23768 - DNA, 122 bp, Homo sapiens
ggcgctcacacactctggccgctggggtcgcagtgggtgcgtcatcggtaggcggcagtgcgtgctgtggccttgcccacctatgggacagcgcgtggctgtgccagcatgccagctgcctt

SEQ ID NO: 23769 - DNA, 122 bp, Homo sapiens
aggaatcaaatgggctcacggatttgcgtcagaaacgttgcttccccgataattggtcaacgtcggtgtaactatgattaaaatgtcagtattcaaacaagggctccaacactaccgtggcc

SEQ ID NO: 23770 - DNA, 122 bp, Homo sapiens
ctcacgtccgggctctcccctcccccatccagccatggattttggcgttaaaggggccctcgctccccaggagccaactgagtctgtgttttgccggggagaaggcgtctggatggtcacgg

SEQ ID NO: 23771 - DNA, 122 bp, Homo sapiens
aagacccggaacgccctgtgggcagggccagctgcggacggagggacgggggctcaagggcgggtcgggtggggtcccgacgccccctcctcggctgggcgcaccccgggtgtccgcaggga

SEQ ID NO: 23772 - DNA, 122 bp, Homo sapiens
cctcggtgaccttggcaatctcctccaggatttcctcgcgcttcttcatcttggggatcccgccgatgaagaggcggcagttgtccacgctgcagcacacgccgagcaggcggcccgggcgg

SEQ ID NO: 23773 - DNA, 122 bp, Homo sapiens
gacaggaagagcagatcaagaagacgggaacagcacgaggcactgggagctgcaaacgcccgcgatactgtcagagacggagaaaggtatggccatggctgacacaaaatgttactcaacat

SEQ ID NO: 23774 - DNA, 122 bp, Homo sapiens
cgccacccaccccctcggcgcgcgcccggcccagggacgcgcccacgcgcacgcgcccagcggctcagggctccctggctctcaccggctctgctgcccggaggcagccgcttaccctggag

SEQ ID NO: 23775 - DNA, 122 bp, Homo sapiens
ctttccccagacccccagtcaccagcctggacaggtctgctgtgaccccagcagcaagatcgccccagacaggagaaggccctgctgggacagaggctgggagaggcaggaggcctctctct

SEQ ID NO: 23776 - DNA, 122 bp, Homo sapiens
ttgccagcttagttgtaatttcttgtatccatcttggtcctcttcagtgcccagccagagcgctggcagacaggcactgggtacgttttgttgaatgaattgggagcgaacgtcgtttagtg

SEQ ID NO: 23777 - DNA, 122 bp, Homo sapiens
ccgtgctctttgggaggagggagggaggggcagtagctctgtgcaccgggatccccacaccgcggcttgggtttcaacgcactttggcgcctgacagagtcgcatctcctcccagaatctct

SEQ ID NO: 23778 - DNA, 122 bp, Homo sapiens
gtgcagagattccagcccattcaccaaggtctcgctgagaagcctgtgccgggcagcagacgccttgtgctccgaaggatttgttcctacatgacttggaaacagtttgtccccgttagctc

SEQ ID NO: 23779 - DNA, 122 bp, Homo sapiens
ggtgatcgtcccacctcagcctcccaacgtgctgggattacaggcgtgagccaccgcgcccggtcagactagggatttagaagcaagactttgtcatttataagaacactgcagaaaggaac

SEQ ID NO: 23780 - DNA, 122 bp, Homo sapiens
agaggcggcggcggcggcgattgggtaccgaggtgcgcagggtgcgggcggccggaactgcgcatctcctcctccctctccccgggctcctactggcctgaggttgagggcggctgggggct

SEQ ID NO: 23781 - DNA, 122 bp, Homo sapiens
gcctttaccttctacatagctcccctgtttcatccaaggaggttaagtattgatttttatcggttttctcaactgtgaatataataaactgaaagcatttcagggagaagctggagaacacc

SEQ ID NO: 23782 - DNA, 122 bp, Homo sapiens
ggatgggagagtcccgttcacacccagccccgcagagccggatagaaacgctgccactgccgactccatgctgccgggaagtgcactgtggaggccactttctggaaagaagaaaccgtctg

SEQ ID NO: 23783 - DNA, 122 bp, Homo sapiens
tcatcagcattggccgactcacaaccccggcgggtaccgactcacacccccggcggggaccgactcacacccccagcgggcaccatcttacacccccggtgggcaccatctttcctgtgatg

SEQ ID NO: 23784 - DNA, 122 bp, Homo sapiens
ttgcggcttttggcccccgccgctgccggtttttgccgccgccgcaggtttctcccgccgcggctttctgcccccgccgacgcagctttttgccgctgcggctttttgcccccgccgccgcg

SEQ ID NO: 23785 - DNA, 122 bp, Homo sapiens
tgactttagacattgctgggagagggtgagagtccccgctctgccatgaataggatgagacgtggctgggctaggcagcatgccggactaggctctgactcaggttccacagaagggaactg

SEQ ID NO: 23786 - DNA, 122 bp, Homo sapiens
tcaagtgtatagccatattatgccaatattgctttatgaccactcacagttcagaaagaccgggaggctgattgagttgttcatgctaacacatcctctgttttctcttgttcccctgccac

SEQ ID NO: 23787 - DNA, 122 bp, Homo sapiens
atctccgcctcccaggctcaagcaattctcctgcctcagccacccaagtggctggaaccacgggtgcgcaccaccaaacccagatatttttaaggaattttttagtagagatagggtttcac

SEQ ID NO: 23788 - DNA, 122 bp, Homo sapiens
ggatctcatggagaaacaagcaattctgttttacaaaagcctgcttccaactttcaacttcgctccttcatactaaggggctcttccagggtctctcttccgtattttttgtacactgatct

SEQ ID NO: 23789 - DNA, 122 bp, Homo sapiens
tgggctgctggctcgactcagtcctcagcccccagcccccgacccccgacccccggcccccgacccccgacccccggcccccagcgcccggcgccccgcctccagcgctcagcagttaacca

SEQ ID NO: 23790 - DNA, 122 bp, Homo sapiens
ctcaggtgatccactctccttggcttcccacagtgctgggattacaggcatgggccactgcgcctggcctgatctgttgatttctaagtgttaggttctctgtcataatttttatatgcatt

SEQ ID NO: 23791 - DNA, 122 bp, Homo sapiens
acccttttatccccctccccgccccttttctcctcctccccacccggaggtcgccggaggcggagatcaggttacctaggcaaccgccacaggcagtctgtacacaccaggcctggggcggg

SEQ ID NO: 23792 - DNA, 122 bp, Homo sapiens
gctggagaaggaggccgtttcgggctcgaggttagaggccctgttagggtgaacaacctgcgcaaggcggcgccatacacagtgttaaaatgaggaagaagacaagctttcgctgcgcaagt

SEQ ID NO: 23793 - DNA, 122 bp, Homo sapiens
gggtcagctggcgccgcagctgctcggcctgcgtgctgacctgggtgcgcagctggtccgcgtagggctccaggcgctgctgaagctctcgcaggttgtccccgatcttctggctcacctca

SEQ ID NO: 23794 - DNA, 122 bp, Homo sapiens
tgtcgtcagaaagcaagagggggaacaccccagctttaactttttctcatacaggggtctcgtctgtgtaaagactaagctaaactgtgcctaacatgtattattctattgatttaaagaaa

SEQ ID NO: 23795 - DNA, 122 bp, Homo sapiens
tgcacgccaactgccgggagccaagggcgccggggctgaggtcgcagtgggctggggcgccggggcccgcagaggggccgggactccccacccccacccatcccttcccctccccccacgcg

SEQ ID NO: 23796 - DNA, 122 bp, Homo sapiens
tgcacgtttgggatggggacagagtgttcagcctgaggacaggcctttgggggtcagttgcgggggagacagtgtccagggacccagggatccacactcaggcctcatccccgagggctcag

SEQ ID NO: 23797 - DNA, 122 bp, Homo sapiens
aggcaggactggcatcgcggggtgggagccctggacctccgagcaacctcggactcggcccgaaaagcaacactctcatcaccaaaccgcagaattagaccccgatggagaaaatgggtcag

SEQ ID NO: 23798 - DNA, 122 bp, Homo sapiens
ctctgagacctcgcaggaagagtcgcctccggcctttgttagacattggggcagacagtgcggtgcgcttcagggttcatccaccccacacagcctacaagtctcccgaggtctccggcgtt

SEQ ID NO: 23799 - DNA, 122 bp, Homo sapiens
caaaattactggttacaagagcagaactaaaacaacattccagagattttcatttgtccccggactaaaaccaagcttccaatccgtaagggcactattctcaaagagctctagacagtgtc

SEQ ID NO: 23800 - DNA, 122 bp, Homo sapiens
cggcgctaactgcgcggtccggagccggtccctggtcctccgcgcttgccccgcccccaccgccctccactggctcggctccgccccagcggcaacgccccgcccccaccccgcagctctgc

SEQ ID NO: 23801 - DNA, 122 bp, Homo sapiens
cgcatttcctgaaaaaggagaggggaattctctttcattataacaggatgtcctctctgtcgatggccatagacattccttgtaggaagctgtttcagaatgctgaagattgacttgtccag

SEQ ID NO: 23802 - DNA, 122 bp, Homo sapiens
tcctaagccctcttctctcaaaactcatcacccacttttctttaactgtttgttataagacgctgatataagttttagcctcttcaccctgttgtttacctgcctgtggatgtcagtcagcc

SEQ ID NO: 23803 - DNA, 122 bp, Homo sapiens
agtgtcaggcgccccaaagcatttattctgtgccaggccctgtgctggatgctgaaagtacggaagtggataacatacagtctctgtttccatgaagcctacaatgcacattctctgtggag

SEQ ID NO: 23804 - DNA, 122 bp, Homo sapiens
cccggcctttccctgcgccgtgcccaccctcctccggaatctcccttcccttcctggccacgaatggcagcgtcctccccgacccccagtctgggcgcttctgggagggctcttgcggtgcc

SEQ ID NO: 23805 - DNA, 122 bp, Homo sapiens
aaacacttattttgattggacaaagttaatatacgtttccaggactcaccactggttaaacgcacaacttcattctctaccccacttgcgttaagaagcagtgaataagcggtaggttgaca

SEQ ID NO: 23806 - DNA, 122 bp, Homo sapiens
gctgtctcagctctgagatgaggaagctctgggcccagtgacctcactcacctgcctctccggatccagatccagaactgcccatgaatcccttcgtggatgtctcaacctgtttcctcttt

SEQ ID NO: 23807 - DNA, 122 bp, Homo sapiens
ccgcggaagggcggctgcggcggccaatggcgagctccccaggacaggacgcgggggctgcggagcaggaactcgccccgcccacccctcgcgcagccccgcctccgccacgccaaccaatg

SEQ ID NO: 23808 - DNA, 122 bp, Homo sapiens
cggggagagaaaccagggattggaagtggctttcctagacccttcttagccttggctgtgcgtgctgtcctgaaagtccttgcctagggtgtgcggccagtcctgggagtcctaaccccgag

SEQ ID NO: 23809 - DNA, 122 bp, Homo sapiens
gcagtgtgtgtgccgtctctgtgtttctgagattctgctggctttgtgtgtgcatgtctgcgtttcgggctgtgtgtctgtgttggtgtttctgagtctagaggagcgtgcatgcggcgtag

SEQ ID NO: 23810 - DNA, 122 bp, Homo sapiens
tttaccctgatgcttctaagctcccctttttattcaccacggggattgcttaagagtactcgggtgtcctccagtgtagttccacgttctccaaccgtcgctctggcgacccttcgatccgg

SEQ ID NO: 23811 - DNA, 122 bp, Homo sapiens
tgactcctgaccctgcttcccaggtgggagccgttttcctccttccaaagccagatgcctcgggcccgcgaaccaaaagccttctttccaggaaatttcacaattaaaaatatttatcggga

SEQ ID NO: 23812 - DNA, 122 bp, Homo sapiens
ggctgatctgatgtcagagcagatcatgtggtgctctgtgggcagctgggactggcccgccgaaagcacatggattacagtctgaggctgtaatgggaaagtcggttcctgggctgctgtct

SEQ ID NO: 23813 - DNA, 122 bp, Homo sapiens
tcacggctcctgtctcccctccctccttctctctcacgcctagcgcaatggcggcggccgcggcggagcagcaacagttctacctgctcctgggaaacctgctcagccccgacaatgtggtc

SEQ ID NO: 23814 - DNA, 122 bp, Homo sapiens
aagtgctcaataaatattagtcacccttattccttattgtagttatagttgttaccttcacgaggagcctcaagcatctgaaaggtgcaggcaccagagcaagcaaaatctcccagccacta

SEQ ID NO: 23815 - DNA, 122 bp, Homo sapiens
tgggcatcaggtgcaagtgtgtgactgtccccctgtgtgtgagtctgggcctgctgtgatcgccggtcccgagtcagtcaaggctggtgtgcctgttactgtggccagcccaagtgtgtgca

SEQ ID NO: 23816 - DNA, 122 bp, Homo sapiens
aagctggacgagcccggttccagaaaccaaacagcagttgttatcatgccttttaaatcacgcgtagaggtttcagtttcttcctctgcaggcccgtaaatatttgccttcgggtttctgtg

SEQ ID NO: 23817 - DNA, 122 bp, Homo sapiens
ccccagacccccgccccgtggctcggcccccgccctccgcacacacctcccgcccccacccgggaccccgcaagtaaccccccagcactggccctgagccctcccggcccccgcctccggcg

SEQ ID NO: 23818 - DNA, 122 bp, Homo sapiens
cctggttctctctagcttatcctcctttatccttacagctttcctcctggctgtgtcagtcgccctttatatgaggtacctcttagcttatgcagggccagaagtgccaaccctagccactc

SEQ ID NO: 23819 - DNA, 122 bp, Homo sapiens
ggccatgaggagaggcaggagggcacgtggcctctcgtggaggctacacggaggagttcccgcagcctgacagagggaggcggcctgcggagaggggttgagagaagctggcatctgcgagc

SEQ ID NO: 23820 - DNA, 122 bp, Homo sapiens
gctgtcttcaccatggtccatagcattcacagggtcacggtcaaagagactggtgggaagcgtgggggcctggtctgtgttatttagggaggggactagagagagcattgagggcctcgaga

SEQ ID NO: 23821 - DNA, 122 bp, Homo sapiens
aggggtagagggaggtgcacagtcgggtagtatgtagtgagtgactggcagattccaatacggtattgtcatgttgcatcaaggttcctcattgcagacagaaatctgcctccacacatgaa

SEQ ID NO: 23822 - DNA, 122 bp, Homo sapiens
aggttcctgtgcgccccggtagtgccccagctcgagggaagtgcttctaaccagccgctgcgacgcctcctggctttgcgccccctctagcctggtctctggaagttccactgcgcctttcc

SEQ ID NO: 23823 - DNA, 122 bp, Homo sapiens
atgctggaccgggcggtgaggggaaccgaggccacccggactttccgcggctgagggcagcgccggttccttgcggtcaagatgctgcaaaacgtgactccccacaataagtacgtttccgc

SEQ ID NO: 23824 - DNA, 122 bp, Homo sapiens
gcagagccgcagcctggccctgggattttcttctcagacctctgctccggggtccaccttcgggggaaaagagggcacaattttacaactttgtaagaggaaacctgaagttttctgacccc

SEQ ID NO: 23825 - DNA, 122 bp, Homo sapiens
agccttcctgtgatgtcgcgggagcggccggttcgcgcaggcgcagttggtggacctggtcgcgctgtgccgggtgtgacactacggtaggtgtaggttaggatgtgtcttctggtcgtggt

SEQ ID NO: 23826 - DNA, 122 bp, Homo sapiens
tttgcgtgcatgtgtgtatgtgtgtgtgtgtgtctgccagattttgctatcataatgatgcgggcttcacagaatgagagaggaaggaatccctgcttctcaattttttggagtagtttcag

SEQ ID NO: 23827 - DNA, 122 bp, Homo sapiens
gaatgactggtccaggtcaagctccctctgcttggcctggccctggctccaggccccacccgtcttaccccatctcgggatgcagtgcaatggcacggggctcgtccatgtcctctgacacc

SEQ ID NO: 23828 - DNA, 122 bp, Homo sapiens
cagcctcttggttggcaggggttttatcatccttcacacagcaagaccttgtgaagatgccgtcatatcaattagcacagcagaatcgaggcaggcacgtttctactggcatgagcacaact

SEQ ID NO: 23829 - DNA, 122 bp, Homo sapiens
gggttcttttcctagctcattttctttcctcatgtttcacatttttccagggtgacatcacgtgtggtaactatttgtatggatcttccaagcccgcattttagccaagacatttctcatgg

SEQ ID NO: 23830 - DNA, 122 bp, Homo sapiens
ctaaccggggcctccctcccttctttagtcctggcgttgccttggagcccagctgaaaggcgaagcgcggtgctggctgtcccgcctcctgcttgaacagtttaccgcgttcacagctctca

SEQ ID NO: 23831 - DNA, 122 bp, Homo sapiens
ccgaccaaactgctttttctgaagtctactctgtttcatcatgctggtgatgattttgtgcggctctgggacaaactccacctggctgaggataaagcaaatctgcggtgacttagtcctcc

SEQ ID NO: 23832 - DNA, 122 bp, Homo sapiens
taaaactcccaaagatataagccatgtcacgatttgttcttctggattcattactgaggacggtacactccaaacagcactctggggcagctgcaaggactaagccacatccgcgattgcat

SEQ ID NO: 23833 - DNA, 122 bp, Homo sapiens
ctccgtcggcccgggctcctgccttgggggtgtcccctaggtagagaatgcgtcggggagcgcttcccgccagagatgggaagcccaggaagcccctccccatgcaaacagtgcccccgcct

SEQ ID NO: 23834 - DNA, 122 bp, Homo sapiens
ggtggatcttcatttcgatttagggtaggtgacacctcaagggtgtttcttcccttccagcgtaactggatgggaaacctacaccaagtgtgcttgggagggctgcttgggtcagctacctg

SEQ ID NO: 23835 - DNA, 122 bp, Homo sapiens
gtcccatcctgcgtcatctcctcttggatctgccggaccgtgttggcaatgaggactgagcggcacaggttgggctccacaagcatgtggcaaagctgcaacttcaccagagacatgtccag

SEQ ID NO: 23836 - DNA, 122 bp, Homo sapiens
ggaggtcactgtggcacgttggactctctttcctactacatctcctctcccccaaggtaccggagtctgaagcaattcaacgttgacatctgccagacctgcttcttgacaggcagggccag

SEQ ID NO: 23837 - DNA, 122 bp, Homo sapiens
atcgagaaaaatgacacgtgtccgtcactttatgaggtttattcgacaaagttaaggatgcgcatccgtgacacgacctcgggaagtcctgacgacatgtgcccaaggtggtcggggcacag

SEQ ID NO: 23838 - DNA, 122 bp, Homo sapiens
tgcaggatctccaacactacagtggcatctcttttccagctctttttaaaagaataattgcgtttgcataattaaaaagaagaggtatctggctgactaatattttccacttatattttgaa

SEQ ID NO: 23839 - DNA, 122 bp, Homo sapiens
gagccagaagacccagaagctggagtcccagctcaaccaaatcggagttgtgggcagtcacgggcttccacaagcctcgagttgccccatctattcagtgggacagtagtgctgtctgcaca

SEQ ID NO: 23840 - DNA, 122 bp, Homo sapiens
aacttcggctgctttccttcccagtgtagagcacgggaaacatggagtaaaaagccgtggcgcagtccgagttcggtacactgtaaccaggacccgaagctttattttcggtcatccacacg

SEQ ID NO: 23841 - DNA, 122 bp, Homo sapiens
tgcgcccgccgcttacctggcagggtcccgcgggaacctgaagaaggccaagtcggactgcgtgctcttccgcgtgcagttgggggcagcgcagaagttcggcatcgtcgcccgcccgccgg

SEQ ID NO: 23842 - DNA, 122 bp, Homo sapiens
ttcagtgaaaatgcatgtattttgtaatcatggagaaaaagttcccatggtgtgtattggcgagagaagaggattgtttccttttggctttgcacttagatggcccaaggccttggccttgt

SEQ ID NO: 23843 - DNA, 122 bp, Homo sapiens
ttcctagatgggatggcggccgggaagaggcgctcctcacttcttagatgggatggcagccgggcagagacgctcctcactttccagactgggcagccaggcagaggggctcctcacgtccc

SEQ ID NO: 23844 - DNA, 122 bp, Homo sapiens
tgggaaggctgggagcttctgctgagggtggcaccagcagcagctccatgactgtgactgcggccagggcggctccacgacggtgactggggtcagggcaggagagtgtggaggccagtgag

SEQ ID NO: 23845 - DNA, 122 bp, Homo sapiens
attagttttatcttccacacagcaaactgtcatcaggagcttaaataggacagattttcacggcagtggatataccaggtattgtaccgtatgattgattttgctttatatttgacagtagt

SEQ ID NO: 23846 - DNA, 122 bp, Homo sapiens
cggtcgatgtggttgttctccagcaggcacttgaaggtgatgggcagtgtggctgagctacggttagaggggccggtgtctgcccagcaccctcctccaggatggctggggcctctgtcggg

SEQ ID NO: 23847 - DNA, 122 bp, Homo sapiens
ggactggagaagcagccacccttttacattaagatacgacttgaaacctttttgttatttcgcttattactgccttcaaagcaaaataatgtttgcagctttcttaaaggtgaagggttctg

SEQ ID NO: 23848 - DNA, 122 bp, Homo sapiens
actacttaggagtacccagttcatctcattgggactgcaatgggtgcagcccaaggagggcgagcagaagcagagtggggcattgcctcacctgggaagtgcaaggagccaggggcctcctt

SEQ ID NO: 23849 - DNA, 122 bp, Homo sapiens
ctgggattacaggagtgaaccatcgcgcccggccagttctcagaattctgacactggggccgggagactagaagaatcttccagcgcagggcaggtgccaggaggccctgatacgggctgca

SEQ ID NO: 23850 - DNA, 122 bp, Homo sapiens
cgtcgaagcccaggctgaagaagatgttgttccagatgaacatctgcatcttggtctcctcgctggggttgatggccatcacgttgccgtcaatgacggccatggcgcccctggtggctgcc

SEQ ID NO: 23851 - DNA, 122 bp, Homo sapiens
ctctccaaagaaatgctcccaccaagaccatggaggcccctctcgttgctggtggatactcgttcattttccccgccaccacccatcagcagcgttccacgccgcccttccttccttccttc

SEQ ID NO: 23852 - DNA, 122 bp, Homo sapiens
cacatatatatgcataaaacactctgggaggctccaaaccacaacctctttctctctgggcgctgagggtggagggtgatatttttctcttccttttgttctttttgtgttttctcattcta

SEQ ID NO: 23853 - DNA, 122 bp, Homo sapiens
tcagaacgcctctcatttgctcctggagcggggtgttgccctggggaggcaggtttctctcgtgcgtacggatgttgtttcccggggttgatgcagcgtactaaccccagctctgcctctgg

SEQ ID NO: 23854 - DNA, 122 bp, Homo sapiens
gccgagtcctcaccgggaacccgggcgcggctggtctgtgctattggcgcgggtaggggacgcacagcccaaaaatgcccgcgacaagcttctggggcagttctcgccagtctctctggagg

SEQ ID NO: 23855 - DNA, 122 bp, Homo sapiens
tggttccacccagctcaaggccttggagggctttctggatgtgtcctgagcctttgtcctcggcatctctgtgtggtacttggagagatagtagaccgtatagcgtacgctttatctgtgac

SEQ ID NO: 23856 - DNA, 122 bp, Homo sapiens
acagcgcttcctggagagatacatctacaaccgggaggagttcgcgcgcttcgacagcgacgtgggggagttccgggcggtgacggagctggggcggcctgctgcggagtactggaacagcc

SEQ ID NO: 23857 - DNA, 122 bp, Homo sapiens
agaaaaacatcccagccaccttccagctcttcctgcccacagcgcacatagacgcgtcatcgaatagccctgcctccacgtcagtcaccttgcaaagccttgaagccttggagcgggactcg

SEQ ID NO: 23858 - DNA, 122 bp, Homo sapiens
ggccagatggagggcgggtcgtccttcccctttggggacatgaagataaaagacggctctcggcccccagagaccctgctggagcgcgcaggaccctggagaaggctcctggccagggccgt

SEQ ID NO: 23859 - DNA, 122 bp, Homo sapiens
ggctcccagaggataaacctaggggccggtcggtcttcctcggcgtggaagtgagagccacgcggcgtggcggagctccaccaccgtctccttatctctttaaagcctcaaaatcaaacaaa

SEQ ID NO: 23860 - DNA, 122 bp, Homo sapiens
cgggctccggaggcgggggcgggaactggggcgcgctgggagctgtagtccggatcctatcgccgcctgcggcgtccctgcgcggggcgggagataagaatccgacgcgcccagaagggctg

SEQ ID NO: 23861 - DNA, 122 bp, Homo sapiens
gcgggtatcccccgcccccgctggccgatcggcgatcgatcgcaatgtctgcgctctccgcgttcttccagcgctgtctttttagtaccacatgcgcaggcaggtgatggcggcgctggtcg

SEQ ID NO: 23862 - DNA, 122 bp, Homo sapiens
ccagatgggactgtggttactgtcatggcgggtaacgatgaaaattattctgctgagctccggaatgcctctgctgttatgaaaaaccaagtagcaaggttcaacgatctgagatttgtggg

SEQ ID NO: 23863 - DNA, 122 bp, Homo sapiens
tctgcggagggaaggcagagggcacttggggcatgggcgacatgggtcgtggcgggcacccggcgcacacggcagccgggcgcaggccagaagcccccccgcgtcgccgggccgcccagtcc

SEQ ID NO: 23864 - DNA, 122 bp, Homo sapiens
tactgcaattctcaatctgtagatgaggaaggtggggggtttccttccagaaacaaggaccgaacagctaggacagcaggtcttactaaatgggcaacctctcagcagccctacaagaagcc

SEQ ID NO: 23865 - DNA, 122 bp, Homo sapiens
aaccttcagtcacgtggcaaataccccactgagtgcgcatgctgcacagatctgttgctgcgcatgcgcctttctgcccaccttctgtctaggcagagctctgcaaggagaggttgtgtctt

SEQ ID NO: 23866 - DNA, 122 bp, Homo sapiens
agcagatactctctttttaggtttgtgtgtctccgtgaggtcagatggattccccaaacacggttttagagagaatcacaacctttaatagatcctctgttaaaaaagactgttagagaaag

SEQ ID NO: 23867 - DNA, 122 bp, Homo sapiens
ccttatggcttagcgctgtgctatgaagaggaagaaggaggaaggaaaaggagcgcagagcgggttacactgccaggagatcctgggaagctaggtcacttccctgagcctcagcatcctta

SEQ ID NO: 23868 - DNA, 122 bp, Homo sapiens
tgagccattgagcctggactgaatttatctaatttaagacttgcaccttcagggtggtctcgtctatcttcaggctgctatggccttatgaaagctattgaaaaccactctaactcatcagg

SEQ ID NO: 23869 - DNA, 122 bp, Homo sapiens
gggctcgccgagtttcgcctcctctgaccgcgtagaatggttgcactaaagcagattcctcgtgctgtgtatccgtcaggtaacatctgccggcacctgctgccccgggtccagtgccccgc

SEQ ID NO: 23870 - DNA, 122 bp, Homo sapiens
gcccgcccgcctcttcgcttcccgcccgcgcggcccgcgctctccccctccgcccggcgccgctgccgagtgaactggaaccagtcctcgcggccggcttcccacaatgcacagcgcgccgc

SEQ ID NO: 23871 - DNA, 122 bp, Homo sapiens
gccagctgaccctcagttacgcaatgacagtgagtgaggacaggcttcaggctgtctcttcgggtcacacacggtgtgaaaaggcggcagatacagcaccagggcagacactcgccccaagg

SEQ ID NO: 23872 - DNA, 122 bp, Homo sapiens
tatgattacttgggcctatcaagaataaccttcccactttatcaagcactgtgacaaacccgccacaatcagacagtagccatggcaaccaggacaagctttggcgcctcacaaagccctga

SEQ ID NO: 23873 - DNA, 122 bp, Homo sapiens
tgcgtgtggcaccgcaggcgcggggcgagggcggctccggagaggcccaggggcttagcgcgcctggctttccacagcccggcttcgggcctactcaagatggggtttctcgggcggggcgt

SEQ ID NO: 23874 - DNA, 122 bp, Homo sapiens
ggctgaccccgctccagtttgggaacctgcagaagttggatgggcccacggagcagtgcccggacccgctgcccttgccggccggcaactgcacggacgaggtgagtcccccgccaccccca

SEQ ID NO: 23875 - DNA, 122 bp, Homo sapiens
ctgataatcgtggcagggagaacaaatgcgtatcttgtccatttgttggtacacaaaagccgttagttatcctacatttctttttatgcctaagggagcccagcaaaggggtcttagctgca

SEQ ID NO: 23876 - DNA, 122 bp, Homo sapiens
ccctcgggagctgctgccaggccaggacagtgtctggcaggcacctgaagtcccgccctgcgcggggctggttcccgaggccgggttgtccaggtcgcggtctggcgtgagtcctcgtgccc

SEQ ID NO: 23877 - DNA, 122 bp, Homo sapiens
ctgatggagatgggtgctttcagacttaagacgtgaaaacaaagatcagccactcatgaacgaactcaaggctcactgagatgcaactgccatgaagaagtgggtgcagggtgagaggtctg

SEQ ID NO: 23878 - DNA, 122 bp, Homo sapiens
aacacctgtaatcctagcactttgggaggtcgaggcgggcggatcacaaggtcaggagttcgagcttgcatggatggtgcatgtcattaaatattcaaccagtcatttttccttctgctaag

SEQ ID NO: 23879 - DNA, 122 bp, Homo sapiens
gggaaaacactgtcaataaatagtctagccccagtgaaaatctggcttctgttaggaggacgatgccaactggctcttaggtcagacagatctgagcctcatggggagatgtgctggcacaa

SEQ ID NO: 23880 - DNA, 122 bp, Homo sapiens
aagtctttctggtcttgctggtcagagccagaagggccagtgcccggtccaggagcctctcgcaggccttgggctgcccatccaggcgtggcctttccttggccctttggacgacgacgccg

SEQ ID NO: 23881 - DNA, 122 bp, Homo sapiens
gcgcttccggctccaggtgactgccggagcgtagtgggatgggcgcggcctgagggtactcgcagcggcactttcagccgccggacccgccgagggacaggggatggggcgggcagagcaga

SEQ ID NO: 23882 - DNA, 122 bp, Homo sapiens
cgcgcgggaaaaggcaggctccgagtcaaccagggctgacccgggggcaagaccaggagacgcgacgactggaaccgggtgagtgtggccgagtcggcgccccgagggccgccagcctggac

SEQ ID NO: 23883 - DNA, 122 bp, Homo sapiens
cgccgcatccctccccgattgtgcagggaccgcgagaaggtagtcgggagaatcctgactcggggtgcggggtttatgaatgggaagagctttgatccgtggggttcccagtcactcttttc

SEQ ID NO: 23884 - DNA, 122 bp, Homo sapiens
taatcgttgcgtctgtagctgccacagtatcgccggtcatacaccctccggtcggacgaacgatcatcataactgctgttggataacaaataccaatgaggtgtatctgttcagatcacatt

SEQ ID NO: 23885 - DNA, 122 bp, Homo sapiens
gggtttcctaaataagagattttgttgtgtctttcaaactgcaagcattccccttgaagacggcgaaagagaggctgtgcgttcagatggcaataaagattgacagtggctttgcccgtgac

SEQ ID NO: 23886 - DNA, 122 bp, Homo sapiens
ctccagttgacccggatctgtccagggagggtgaaggaagaaaggccttctcctggcaagcgtggctacctaagacttcgatgaagagaggtcctggtctaccagagggtcgttgattgttt

SEQ ID NO: 23887 - DNA, 122 bp, Homo sapiens
ggcctcccgaagcgctgggatgacaggcgtgagccgccgcgcccgcccattttttttaaacgtgttggggtttgggtttcagccacaggccttctgcgatgagaggaaacccaggacgcgca

SEQ ID NO: 23888 - DNA, 122 bp, Homo sapiens
tgaacgggtatcacacacatgcctagtgtgcgcatgggtatcacacacatgcctagtgtgcgcatgggtatcacacacatgcagtgtccacacaagtatcacacacacatacacattgtgtg

SEQ ID NO: 23889 - DNA, 122 bp, Homo sapiens
gcggccgctccgagtgcggagcccgctgagcccacaacccgcccggaactcgcgctggcccgcaagcgctgcacgcagccccggttcccgcccggcttgtctctccacacctccccgcaagt

SEQ ID NO: 23890 - DNA, 122 bp, Homo sapiens
gtggaaggggcggggctgctcggcgcggggcggggccgggaggtcgccgcctcagtcttccgccctgggccacgccccggtcccgggtcacctctcggagccgcctccttggcccgtggaag

SEQ ID NO: 23891 - DNA, 122 bp, Homo sapiens
cggctcacgacagtcctttagcggcactggcctttgacgcaagtggaactaaacttgccacggcttcggagaaggtgagtctgcttttccccgggggagcactggtgccaaggcgtccacag

SEQ ID NO: 23892 - DNA, 122 bp, Homo sapiens
gtcttcgcttgagggttggcggtcgctggaagtggtagccattgggagttacactaatcccgcgaagggtgcgcaagggaggcggcagccccccccaagaagagaggcaggccggcctccag

SEQ ID NO: 23893 - DNA, 122 bp, Homo sapiens
agcaaagagacaccaatccgattggctgaagggggcgacaaactaatccaccaatgctgacgtcagtatgggagccagtgaggttcagaagacttcttatctgctcgcctcctctcagtgtc

SEQ ID NO: 23894 - DNA, 122 bp, Homo sapiens
gagaggccccaagaagctgagctggcagagagctccaccatttggtgctaaaaaaaaaaacgtcctgaggttcatgaccaccatccagtttctggcctttacacagtcacctttcactgagg

SEQ ID NO: 23895 - DNA, 122 bp, Homo sapiens
gactttagtccctccaagcaagacttttgtcataaattctttgtatgcccccccattacccggcacacagcatatgctcaatggggagccatagactcagtgtttttccctgggtcatgttg

SEQ ID NO: 23896 - DNA, 122 bp, Homo sapiens
gacactattctccatggtctttgaaggtgtccgtgaggcagaggtttagcagtgtgccagcgctgtgttttgtactctcttactgttattgggtaaatgctctccctatctgagcatcctga

SEQ ID NO: 23897 - DNA, 122 bp, Homo sapiens
agatagcggagtaacccaggtcctcttagaggttccagtggtggttggaattacccgggccgtgcccctacctccggggggatgctgtcctccagtggtggttggaattacccgggctgcgc

SEQ ID NO: 23898 - DNA, 122 bp, Homo sapiens
gtcgtctgcatgacgtggacggctggttctggttgtattttaaatgaaatctcatcccagcgtagacaccacgtctggaattacgatccaccctgtgatctgtcacttttatatacacacag

SEQ ID NO: 23899 - DNA, 122 bp, Homo sapiens
cgccgagaaaggcatccgagcaagggtccaagacatcaccgcagcagatcccgagaccggcggcacagatcccgttccaagtccccagatcctcaccgtagtcacagacacaggagctactc

SEQ ID NO: 23900 - DNA, 122 bp, Homo sapiens
tgaaatatgggatatcaaaagtgcatatggtagtttttcactagaaaggcatttcactaacgtctttaacaataatgtctaactaaactacaattattggcatcaaactcagagatgtgaag

SEQ ID NO: 23901 - DNA, 122 bp, Homo sapiens
gcaggctgtaccgtgtttccttagcttgtgtgtgtgtgcggccccgtgtgatgggctagccggacctgctggaggctggtccctttttgggaaacctggagccaggtgtacaaccacttgcc

SEQ ID NO: 23902 - DNA, 122 bp, Homo sapiens
attgtctgaatctaaaccaggaacccagtggggcttccttagtgcctgtgtaagggctctcggctttcactgctaaggagcttgctaggggcagggtgggtgacctcagccaagggggggat

SEQ ID NO: 23903 - DNA, 122 bp, Homo sapiens
caacctttgtgcctggatgatgctctacaaatgcagatcctacttccataactccaatagcgctgctgtagtagcaggtttctgacatactccaaggaagggagaattttagctggccattc

SEQ ID NO: 23904 - DNA, 122 bp, Homo sapiens
caataaagcaagaaaaataatactgcagccagcggccaggagcgtgcaccccattaacggcgagaaagcatcaacccctgctgtaatgactgaattggaaagaaaggtttcctgctgcttgt

SEQ ID NO: 23905 - DNA, 122 bp, Homo sapiens
gggccgggctgcgcggaagccctggagggccagccgggtggagggagctgcaggagggggcggcgtgctttccgggggtgcaacttggttttccctggagggataaagctctcctttggcag

SEQ ID NO: 23906 - DNA, 122 bp, Homo sapiens
tgcagtttctgcgccatccttggcctcctgggaagggtccctgctgtcttatgctgcagacgtaggccatgaggacgtttcccggtgctggggttggggcacggtcaagtctggagatgccc

SEQ ID NO: 23907 - DNA, 122 bp, Homo sapiens
ataaaatgtgctggtgactcactcctaggaaagaacctgtgatggatcattaagctgtctcggaacttatttcaggcccacacccgcaagatgaacgctctcaatttgtttattaggtctcc

SEQ ID NO: 23908 - DNA, 122 bp, Homo sapiens
ggtccacccagtcactgtttttagccagggctgccatgtgctcgggctccttggtgacttcgatggcgtaataggcagtaaagaagccccgggcaccagtgcgcatgttgtaggcctcgtac

SEQ ID NO: 23909 - DNA, 122 bp, Homo sapiens
gtttgggacccgggaggggagttccctgcgtctgggccgtggggggagctacaggccgggcgggggtgagtaaggcccagcggacgcaggaggctcagtggcggcggcggcggcggcgatgg

SEQ ID NO: 23910 - DNA, 122 bp, Homo sapiens
ggggccttacagggacttcaggatggcttagggagcgccttctacccaagacacgatgtacggaagctgtcttttggagaaagaagcaggcatgtacccgggcactctcatgagccctgggg

SEQ ID NO: 23911 - DNA, 122 bp, Homo sapiens
gagaaaggaaaaaatttaacatcaagaacttcctttcatcaagacaccactgagagaatacgacaacccacagagtaggaaaagagatttgtaatacacatctgtaacaatggacttcctcc

SEQ ID NO: 23912 - DNA, 122 bp, Homo sapiens
gctgtcgcagggccgacaggggcgactgaaaaagtgactttcgtccccttttacaaaatgcgtcccagcagggttcccccctaccccggggcaaaaggccgtgcgtggtgctcggcgtcctc

SEQ ID NO: 23913 - DNA, 122 bp, Homo sapiens
tcaggaatttgagctggggatctgcatcctggccattgcagtcctttagcatcctcgccgcgccctgagcgcgctggaggctcgcaggctgcgccctcccagggctgatgccgcgtcctgct

SEQ ID NO: 23914 - DNA, 122 bp, Homo sapiens
atggcatactatccaaagcaaatatacagtttttaagacaatccctatcaaaattctaatcgcatttttcacagacatagaaaaatacaatcctgcaattgacatggaaccacaaaaaaccc

SEQ ID NO: 23915 - DNA, 122 bp, Homo sapiens
ttgcctctacttgaggatcaactgttcaacctcaatggcctttcaggacctcctgggtcacgctggtgacctgtggagattccagatccttcagactgtttttctctcaatctttgctgttg

SEQ ID NO: 23916 - DNA, 122 bp, Homo sapiens
ttaaatataaacatggaagccagttagcatggtcttggccctgcataaggctagatgctccggttcccatctccaggaaaaggcctggctctgggatcacggaagccacgtcctctcggcgt

SEQ ID NO: 23917 - DNA, 122 bp, Homo sapiens
cctgggcctccacggggctctgccgcgggttggtgagggtggagctggtgagctgcactccgttctgctccttgacaaggatgagctccacctccttcgggcccacggcattgggctcctta

SEQ ID NO: 23918 - DNA, 122 bp, Homo sapiens
agggaactccctgaccccttgcgcttcccgagtgaggcaatgcctcgccctgctttggctcgtgcacggtgcgcgcacccactgacctgcgcccactgaatggcactccctagtgagatgaa

SEQ ID NO: 23919 - DNA, 122 bp, Homo sapiens
cggcagcggggggccaaaagccggacgggcagaaagccgtggcagcggcgggcaaaaagccgcggcggcaaaaaggcgcggcggcgggggcaaaaagccgcggcggcggggaccaaaacgcc

SEQ ID NO: 23920 - DNA, 122 bp, Homo sapiens
aaggaaccccatccagtccagccggttggcttgctcctcccctcctcccactccagttcacgctccagcccactgaagagtggtgcccacccctaggcccctgcctaaatggctcttccaga

SEQ ID NO: 23921 - DNA, 122 bp, Homo sapiens
taggggtctttgggccctgctcacctgtctgcacagctggggcggagctttccctcacagcgcgggccctggaagcccatggcacagaggcaggagaaggtgccaggcctgttcacacaggt

SEQ ID NO: 23922 - DNA, 122 bp, Homo sapiens
ctcctgttctctccccaggactcccccgaggcaggcggggagcgggaggaggagcaggagcgggaggaggagcaggccttcctggtcagcctctacaagttcatgaaggagcgacacacgcc

SEQ ID NO: 23923 - DNA, 122 bp, Homo sapiens
gggaagctggcagggtgtgtgtctgtgtgcgtgtggggtttgctttgtcattcgtacccccggtgcgcgctgacgcggtcggcctggccgagctctccagcatccgcagaagggtccccggc

SEQ ID NO: 23924 - DNA, 122 bp, Homo sapiens
tggtgaaaccccatctccactaaaatacaaaatttagccggtcgtcacacgtccggaggccgagccgtcgcgtacctaggatgccgcgtggaagccgaagccgcacctcccgcatggcccct

SEQ ID NO: 23925 - DNA, 122 bp, Homo sapiens
tctgggctggggcctcagaaggtgtggctccaggctgggacatgctgctaggggtctttgcggtcccggggggcttgagccctccgtttagaatccgatgaggcccactggctaccgcccgt

SEQ ID NO: 23926 - DNA, 122 bp, Homo sapiens
tcgggagtcccggggaggagttgccgcgcggaggaggcgtggccgcggtgcctgcggaggcgcgagcggcgcggcgcggcgcggccgggactttggctttgacaccgactgcgagcgggagc

SEQ ID NO: 23927 - DNA, 122 bp, Homo sapiens
cctggggaacgtgtaaggagagacattttaggagaaggtggtcagttaatagaaacaccacgagtgagggctggtttccatagaaggacatttaaaggattcgacatccttgaccaaaaagg

SEQ ID NO: 23928 - DNA, 122 bp, Homo sapiens
gaggatacaggcttagataagcttggggggcaataagagaggtcacagcaaactggtaggcggccccatgtccaactgggagctggttctgcaacatcctggctgatactgagtataccagg

SEQ ID NO: 23929 - DNA, 122 bp, Homo sapiens
tgcagatgaaatgttaaatagcaattcaagaaggtttgattaaatactatataaatgacacgattgcaggaatctaagagaatggacagatttattacagggaagtcttcattagggagatg

SEQ ID NO: 23930 - DNA, 122 bp, Homo sapiens
gaacgcgcccccgggggaggacattagatcaaggtgctttggccacgccgaggcctcctccgcccccgaccgccgttcccacgctccctgtcccatggcgaaggtcgccggtgcccggtatt

SEQ ID NO: 23931 - DNA, 122 bp, Homo sapiens
agaaattggggcgagcgctaacctcaagatcgggcaacatatggaacccaaagaaagaagcgaaggaggccccgggcccacagcacagtgtatgggaaaatgacatttctgacagcaaagtg

SEQ ID NO: 23932 - DNA, 122 bp, Homo sapiens
gtctccctgcacagcttccgggaagaggtggggataggaggctcgccccggggaaggttacgctcggggtccccagaccaggtctccgcacgcccctgccccgtcgcctcccgggagcggct

SEQ ID NO: 23933 - DNA, 122 bp, Homo sapiens
gggcggccacgaacaagggggtgatgccgtaggcgttcttggattccaccttggctcctccgctcaccaggatctgcatgacctccaggtcattgcgagacacagactcgtgcagagcggtc

SEQ ID NO: 23934 - DNA, 122 bp, Homo sapiens
aatctcgacctgacaagatcctacccagcgttcaaggccttatgcagctcattatctctccgggaatgctgagcaagtctccgtgcatctccatgagtcttcacggcaatactgtcacatga

SEQ ID NO: 23935 - DNA, 122 bp, Homo sapiens
gttcaggaaagtgaaaggagaaacactacagactgtgaaatcaaggcagaagcctgattccgtggaagagatgcaacttggaaatggaacaggtgccttgggcccaattacaggtttcaggt

SEQ ID NO: 23936 - DNA, 122 bp, Homo sapiens
gtgatattgttcgtcatatccaggaaggcgcaggatgacattccactgaatttcgcgacacgcctacacgcacagtgtgatattgttgctaatatccaagaaaggagaggatgatattactc

SEQ ID NO: 23937 - DNA, 122 bp, Homo sapiens
ttgcacatatatttttgtgtttgttggtaagtaattctgtagaaagtggaactgttgttgcgttgtgtgttttgagtttggataaattttttatctagagaggtgaaactggtttatgcttc

SEQ ID NO: 23938 - DNA, 122 bp, Homo sapiens
ccccctcgctccgcttccgcccggctgctggggattgtagttctccggttcgtgaggccccgctctctggctgtagttgtgcaggtggactacaaagcccgagatgcatcgcggcccctcct

SEQ ID NO: 23939 - DNA, 122 bp, Homo sapiens
ttaggcacgagagcatcccagaaagcaaaagtgcccaaaaaatggactcagatgccccctcgcatctgagtattcctgacagcatgtgaacattaattattaattttctgtacctcagtttt

SEQ ID NO: 23940 - DNA, 122 bp, Homo sapiens
cgtgtatatttttaaactgtgtgctgacgacagttaagtaaatgtgattcagaacttctgcgtattttgcaggacagttttgacacaatgacatgactcgctagccaggaaagataacgaca

SEQ ID NO: 23941 - DNA, 122 bp, Homo sapiens
cttgaccgctgtgcgccttagtttcctcctctctaaaatgggggtcgttcaagcggaaaacgcgcctcggagcgcttggcacggcgcctggcgcatagtaagcgctccctccatgtgagcgc

SEQ ID NO: 23942 - DNA, 122 bp, Homo sapiens
tcagccctgcgcgtgcatccagccccttcccacagctgtagctcttgcaggccagagggacggccctgccgcgggggccggagagcagcgccacctgctgctgtaagagggaaacgcaactt

SEQ ID NO: 23943 - DNA, 122 bp, Homo sapiens
aaacctcaacagcttcctcaacacctatattttaaatcctgcttaaatgagattaaaatacggcactctgttaagctgtaaaactggctttttgcttctcagttgagtgttggtttgaatgt

SEQ ID NO: 23944 - DNA, 122 bp, Homo sapiens
aagctttattattttattttcctttacttcttcaagtcttagctaggattttggggcagccgcattctccctgcagatggggggaggggggaaaaaggacctgatttttttccctttggccg

SEQ ID NO: 23945 - DNA, 122 bp, Homo sapiens
cagcgagactccgtgggcttaggaccctctgagccaggtgtgggttataatctcctggtgcgccgtttcctaagcccgtcggaaaagcgcagtattcgggtgggaatgccccgattttccag

SEQ ID NO: 23946 - DNA, 122 bp, Homo sapiens
ggggaaagggagctagaagaccccatagggtggtttgcacctcctctaagcatgcaagcacggctctggtcttgacctggggagcccagcttcctcggtgcaccgtgctttggcaaccgggt

SEQ ID NO: 23947 - DNA, 122 bp, Homo sapiens
tcccccggggaatgatcccagcatctctcgcagtgatgtcagtgtaatcctgagtcggatcgggctcccggctgggtggcgggggggcagatgatgctcccgccagctgggcagagcaaggg

SEQ ID NO: 23948 - DNA, 122 bp, Homo sapiens
ctctgagcccggcgggaggagccggcctgggcccgccccacaggaggagccgctcgctggcggctgatccagcgtctccgtgacaggcaccctgctccgccgccaccgccaccgccaccgcc

SEQ ID NO: 23949 - DNA, 122 bp, Homo sapiens
ggtgtggagagagaggtgtgggcgggaactggggctgcgcagggtgcttgtgggccagcgcgagttctggggtgagtgggctcggcggccccgcacttggagtggccagctggcccgcaagc

SEQ ID NO: 23950 - DNA, 122 bp, Homo sapiens
cggcgcggaggagagagggaaggtggttggtgcagtgcagaaccagatttcacctaagggcgttccatgaaatgaaagcagaagtgcttgtcagtcctcttggctgggaaagccctccccag

SEQ ID NO: 23951 - DNA, 122 bp, Homo sapiens
gagaagcgagggggagggtccaaggcaccggcagcagcaggaaccctctgaggggaccagcgccgcacaatggcggcagcagacacatccagagagggagtcggccgcccagccaatcaggg

SEQ ID NO: 23952 - DNA, 122 bp, Homo sapiens
gcgctggccctcttcccctccccctcctcccgcagctcctcccagtgcccccagcctcagcggcgctggtgctcctagctcagaacctgccaggcctggctgctgggggcacctgtgcccgg

SEQ ID NO: 23953 - DNA, 122 bp, Homo sapiens
gaacctcagattctacaaccactctcaaggccttatgatatagcaagccctcagctctggcggagaaataggatcaagagcaaagatcatgccattcatatctggcaccaacaagccaaaag

SEQ ID NO: 23954 - DNA, 122 bp, Homo sapiens
aggagcaaacgccaggctgggagaggctgccctgacgcatgagcttggcctccggagggccgtgaggcaggagctgggcctgcgggggctgccccaaggcgggagcctggcccgaagaggcc

SEQ ID NO: 23955 - DNA, 122 bp, Homo sapiens
ctccgcatcgtgggcattgaacacctcgattcccatacgagaggggctcctccctgagagcgaccagaagccttccgatggcggagcgagttgggccgccccggctgtgactagggctcggg

SEQ ID NO: 23956 - DNA, 122 bp, Homo sapiens
cgagggcctggttgaatgagttgctcccatccccctgtcctggacctgtgccgcccaggccggcagccccctccacctggggctgtgctacctaaaggtggagtctgagttgagatgtgctg

SEQ ID NO: 23957 - DNA, 122 bp, Homo sapiens
gcggagccccgctcacggcacgcccatctctgccgagccccgcccatctctgccgagccccgcccatctctgccgagccccgcccatctctgccgagccccgccctccgcccgccaggcccc

SEQ ID NO: 23958 - DNA, 122 bp, Homo sapiens
tgggggtgccaggagcccttgtcctccgtagcaggtctcagaggctgacgatggggaaatcgcactggtgaagctgccgtggggtcaggaggaacctgcgataagacgcccaacagttaggg

SEQ ID NO: 23959 - DNA, 122 bp, Homo sapiens
acccgcttcagatctcagccgaatctcactcatcagagaagctgtctgcgttgacagatgcggctcgaggttaagtggtccacccgggccgcctcacggttgggaggccttttaagccaacc

SEQ ID NO: 23960 - DNA, 122 bp, Homo sapiens
gttggctcaccctgtagctggctgaggacaagcctctcctgcctgtgcttcccttgtctccgagacctcatccattttctcagtggctgcactgctcctcccagagaacatgggagatttag

SEQ ID NO: 23961 - DNA, 122 bp, Homo sapiens
ggaggcaggcagagagacagagaaaatgagagagaaagagagagagagaggagagagagacgagacagagagagaaacatgtaggtaaggtaaattcccctcaaggcacatagcgtgccttt

SEQ ID NO: 23962 - DNA, 122 bp, Homo sapiens
gtgatgaggctctttgctgggttttcagccagtctgtgccagcgaggacgggcagcatgccggtccggtggtgcgttggaatagtcctgactgctcacacactcgctgatgttactgttttc

SEQ ID NO: 23963 - DNA, 122 bp, Homo sapiens
catagagcatccttagtccagaaatggggagctatgaaccttaagattagaccactaactcgaatctaaatgagctgcccttgtctcctacaaaagaaaagttgggcaggtagggtattcta

SEQ ID NO: 23964 - DNA, 122 bp, Homo sapiens
gccttggttagtgggcccgaccgtgccgcactgtccagggagcgtcaagggtaggtgtctcgctgggagtcacatttcaagtggaaaggagaatcctgttgcagttccttggtgtcgcattt

SEQ ID NO: 23965 - DNA, 122 bp, Homo sapiens
tgagcagaggacaaactgcctatgcctccccccacctcaatgctgagagggggaggatcccgttttccttagagatctcctccagcatccattagtgggcagggcctgtctctatccctccc

SEQ ID NO: 23966 - DNA, 122 bp, Homo sapiens
ggtagaaccgagagttggaagtccctacggcgatcatgttaaccgcgcgggctcattctgcggaacgaagccgggcagagggtggggaagactaggctagattttcgtaaggaagcagcgtc

SEQ ID NO: 23967 - DNA, 122 bp, Homo sapiens
cggggggccatagtgaggtgtccaatggccggtatctcccacacagcctggcactccaaccgtaccctttatgagacctgcattgaaccttggctctcctgaggatatattcaggggtcccc

SEQ ID NO: 23968 - DNA, 122 bp, Homo sapiens
gcacagtgggttctgccgggggtggaatccgcctgtgctggtgtctcctactctgacgtgcgtctcttatggaggaatttgactcagttttttctactcccactccccctctcccttttttt

SEQ ID NO: 23969 - DNA, 122 bp, Homo sapiens
acactactgggtggctcaaggtctatgaccccaggttctgttatctgctgccttcttccccgtcatgaggcaaggagcacgaacctccagccttgggtggggttggtttgaagcaatgcctc

SEQ ID NO: 23970 - DNA, 122 bp, Homo sapiens
gccggtctccaagctgaccttggaccaactctcaaggactgggagctcatccagccatcccggcctccccggggaaaggggaggggggcgctgtctcagggtcacatgcctactaagctccc

SEQ ID NO: 23971 - DNA, 122 bp, Homo sapiens
tcataagaaccgtttcttagccctaatcatacttaaatgcaaatgacttggcgagctgtgcggagtttgttttcgctccttgcaacttattctgaagttgtaaattgattttagacgctgtg

SEQ ID NO: 23972 - DNA, 122 bp, Homo sapiens
ttggcattctgtgagtagcctcaggggcctgctgtgaatggcaggtggggcccagccaaccgaagtcctggcccaggtgggaacgagaagcaaaaaggggaggttgggggaccctctttcac

SEQ ID NO: 23973 - DNA, 122 bp, Homo sapiens
caaaggggaggaggcaaagcggcagggacccgagtgatacgtccacaagccgggggtgcccggagcctccaggggctggaagagacgaggaaggaccttcccgcagagactcggagggaagg

SEQ ID NO: 23974 - DNA, 122 bp, Homo sapiens
atgggcaatgcgttaggcatactttccttgctgactgatgtcatgagctcattagagcaacggggtttatagtacaaggcaactatccagacaataaattaagctgcacaatttagcactta

SEQ ID NO: 23975 - DNA, 122 bp, Homo sapiens
ccacacaggaggctaagggaggtggtggtgggtccatgggccaccagccaccttcctcagcgaactgagcgcccccatctccctcggtgctctgcgttcccggcagatgcatttaaaataca

SEQ ID NO: 23976 - DNA, 122 bp, Homo sapiens
agagccagcgttcctaaccactgaactagacagcctacactccgaagtctcctgagtcagcgaccttgcccgctgccagcgctttgctgtggcgggtcaagctcctggcgcccgaggagccc

SEQ ID NO: 23977 - DNA, 122 bp, Homo sapiens
agcccggcgtggcctacccggcctttctggggcccgacgaggcctttgcgctgcccgactcgctgctcgtggtgctggacatggatgagggcacactcagcttcatcgtggatggccagtac

SEQ ID NO: 23978 - DNA, 122 bp, Homo sapiens
tggctgcaagagcgcaggcgcaagggaccggaaacagggccttccgcggttatacagatccgtgcgctccaggcttgcctttggaaaatgcctgtctgaaatttgttttaaaaccgtttcta

SEQ ID NO: 23979 - DNA, 122 bp, Homo sapiens
ggtggagaggagagcgctgcgcatgcgcatgagcgagtgtctgggctctgggtttagcgccggacccggcctggaccgtgtggttaaaggggaacaaccaccatgccttgccccgccccgct

SEQ ID NO: 23980 - DNA, 122 bp, Homo sapiens
gtgtgtgcgtgtgcgagggtggcctctggggttgggaggtaagtcagccccacaccctcccggggtgaacaggtaagctggccccacgccctcccggggtgagcaggtaagcgggccccatg

SEQ ID NO: 23981 - DNA, 122 bp, Homo sapiens
gagcctctgcgagcgggcatttcttgggtggggaccaaaagcccagtgctgccatagtttcggatcattcttttaagaagctggggccgggcgcggtggctggcacctgtaatcccagcact

SEQ ID NO: 23982 - DNA, 122 bp, Homo sapiens
acacactcagacacactgcaagagtgaaaacttcacagttactttaatctgcacgggttccggggaactcctctgcccctccccgctccccttcaccagcctcccaccgacctggcgtcccc

SEQ ID NO: 23983 - DNA, 122 bp, Homo sapiens
tccaactgttgttgtgtatgaaataaatacacacatataagctaaccagccccacttgcccgcaccacctacacgcccgtccccgccctccctcaggcccacgtgctccgagggccgccttc

SEQ ID NO: 23984 - DNA, 122 bp, Homo sapiens
cggccttagaaaacgtctttctccaataagactggaaagttggaatgactcctggacccacggtctgcagaacggatgctgtgtcagcacaaaaacacgaacccctcgtacatcagcctcag

SEQ ID NO: 23985 - DNA, 122 bp, Homo sapiens
acatatttgtggtagagatgcagtggcaagttacttttcttttttcaaatattagagatacgctatgtccttcaacataatgaaccatggtagatacagtttttcctgcaagtatgctcccc

SEQ ID NO: 23986 - DNA, 122 bp, Homo sapiens
gagcgccgtcccgccctctctcctgccgcctccagcagcctctccatgcccgggacggagcgggcatctgtcctgttgcacaggctgttctcgggggttcccccagccccccgttcgtggct

SEQ ID NO: 23987 - DNA, 122 bp, Homo sapiens
tccttataatggcgggaaaagagaggaacagaatcccaggtaggccatcaatcatcctaacgttgacaacaataagcatgttgacggttataaagtctgcgttttccaagcttctgttagta

SEQ ID NO: 23988 - DNA, 122 bp, Homo sapiens
accctattcaggcacctcccccaaacccattaggttctcttccgccctagccggaagtcacggtacccctaacaaagatggcggcaaattgaatttgcaaagctttctagtttctccgagga

SEQ ID NO: 23989 - DNA, 122 bp, Homo sapiens
aaagtgaacaaataaaacagacatctgaggaactcccaaacaaaacaaacaagcaaaacccgcagctctattaatgctctccttcaaaccatgcagaccccctgcccagcttggaatccacc

SEQ ID NO: 23990 - DNA, 122 bp, Homo sapiens
agccttctcctgctacatccctgcagcccccggctggcggcaaaggcgagcagcagcactcgtaaaagaaaaattataaataagtgggactttctaaagcacacagaggcaggaagaaagca

SEQ ID NO: 23991 - DNA, 122 bp, Homo sapiens
agatgtgggtctggcgctttcggtgaggggtgctctacagtctggcgtggggggtcgggccgggttctgggagcgtgtgggagacgcaagccaggaggccagggctcctctgcggctgcccg

SEQ ID NO: 23992 - DNA, 122 bp, Homo sapiens
tctctgagaattgactcctgaaatatttgggtttcggattccgtgtcttcactacctgaccggtcaggtctggcttgctcctccgtatcttccagacatagcccaacgcgcagatttcccat

SEQ ID NO: 23993 - DNA, 122 bp, Homo sapiens
actcgctgctgccgccccaggaccggcacctgcccctcgcctccttggtctccatcaacgcggacaatggccacctgtttgccctcaggtcgctggactacgaggccctacaggagttcgag

SEQ ID NO: 23994 - DNA, 122 bp, Homo sapiens
aaggttgcaggtttgcagctttattctagagtcaagaaagaactgggaaaggatttcaagcgagggaatgacaaggtctgtgtcttgggaagagcagctgtgccgtaatgtggagaatgcat

SEQ ID NO: 23995 - DNA, 122 bp, Homo sapiens
tccggcccatgaaaagcacttaatatgtgttagctattatgtgaattacgactgcaagttcggctcaaagtcatgtgagatatccgaacttcaatcaggttaccatattaaataccccagaa

SEQ ID NO: 23996 - DNA, 122 bp, Homo sapiens
taagtgtgcatttcagagctgtagaaggcaagccagatttttgctgggaaagaccttcatcggggcggcgaagcccgcagtgacagagggtcttagcgtacccgttcacatgaattgtaaaa

SEQ ID NO: 23997 - DNA, 122 bp, Homo sapiens
ccaaaagccaggtgtctgttggaggtgaggggcaggcagggtgttaaggcaggggaccaccgactcagacaacttgaggtctgccccacgccagccccatctctccaggcgggcagacacat

SEQ ID NO: 23998 - DNA, 122 bp, Homo sapiens
ggcccgagttcccactcccacggtccccaggcaccctagagagggcagaggcagaccgggcgccatgactcatgcctataatcccagcacttgagggagaccaaggcaggaggatcacttga

SEQ ID NO: 23999 - DNA, 122 bp, Homo sapiens
atttctcactacttgggggagggttaggccagggaaaagatgaaggaagagtttttcattcgtgggaagaaaataaaatgtgtagctcttggctatttaacaaatagttgttatttgctaaa

SEQ ID NO: 24000 - DNA, 122 bp, Homo sapiens
tccctctgcctgagcaggaaccagcatctgcagacctagctggatgcgcgtggaagggggcgcactgtctcctgggggggtcacagactctgcctgccctgcagggtctgttgtgggccccc

SEQ ID NO: 24001 - DNA, 122 bp, Homo sapiens
gcagacccccatgtcctgtaatacacagagaggagagaaaacaccactcaacctgttgtccgtggggaaagggccctgtggtttccaagagaccgaaggattccagacccagttaaaacagc

SEQ ID NO: 24002 - DNA, 122 bp, Homo sapiens
ggagcctgaacccgggagccaaggggccccagttccagggacgtgaagctgagcgtacagcgggcgctcccagacactggggaaagtgctttacgatgtcccgagtccctccagtctcgcca

SEQ ID NO: 24003 - DNA, 122 bp, Homo sapiens
tgcatcttgagaagctgggttttcagaggttgctgtgatcaaagcaagcactgagttatccgcgtcagcagcaggggaggggtgtccagtgagactccaggttggggaagccgctcagggcc

SEQ ID NO: 24004 - DNA, 122 bp, Homo sapiens
gagcccacgtgagtggctccgccccatctggcttctgaccaatggacgagcttcctaaggcgtaccgtcccgactccaaggcgcctggctttgaggcgggctgcgtcttgctcggagtcccg

SEQ ID NO: 24005 - DNA, 122 bp, Homo sapiens
gctctcccccagctattctgttgcgatccagacaaacaccaccaaaaggaggcaggtttgcgttcaacctgacagctggtcaatccaatgaaggaaccttggtggaagagaggaaagagggc

SEQ ID NO: 24006 - DNA, 122 bp, Homo sapiens
gagccaggcccctgtggccacccagcccctagccccgtagatcccaccccagtggggccccgggggcacatacctgggtgggctcagcagctccctctgcaggtggacccagggtgcggtga

SEQ ID NO: 24007 - DNA, 122 bp, Homo sapiens
gctcaggcctcaaagcatggtgtcctccttgactcgactgtctcctcgtctcccacccaacgtgccatccattggaaacctgaccagccagtctccagacaggcccagactcccccactccc

SEQ ID NO: 24008 - DNA, 122 bp, Homo sapiens
ggggagaagttggggaggagtctgggcttgagccaagggcctcagctgactcctctaccccgggggatacctcccctccccctcaatagggccggggcttcctcttccggcaaggaggggtt

SEQ ID NO: 24009 - DNA, 122 bp, Homo sapiens
aacaaattcagaggtgtaacaacttgtccagagcagctcagtggactgtctggactcacgcgcagggctttctgactccgagagctctgctcagcggactgtctggattcacatgcagggtt

SEQ ID NO: 24010 - DNA, 122 bp, Homo sapiens
atcaattaccaaactatagattgagtacctacactgtgcaatatgagaccactaatcttacgggctctctcattttctgcaagattaaccttcaagctccagcacttccataggatctttat

SEQ ID NO: 24011 - DNA, 122 bp, Homo sapiens
aaagactactatatgtcaaacactgttagatgctaaatacccaaataaaaataatacatacgtcctgttctgcagacgcgtataagtcacagaaggaaacacaagtgacaggacaacagcag

SEQ ID NO: 24012 - DNA, 122 bp, Homo sapiens
gatccatggacacaggcttagggctgggctgcctgggccacccccagcgtcccactcacacgcaggttcagccctcacaggtgtgcaggctttgtggtaagcacactcacctcctccatccc

SEQ ID NO: 24013 - DNA, 122 bp, Homo sapiens
agaggaggctctttggtccaagctgggcatcgctaaaagaggctaagggcctcgaaggaccgcagagaacaacactcatcatgcgagagtctgaagaggagattcctgaagtgcgcgcattt

SEQ ID NO: 24014 - DNA, 122 bp, Homo sapiens
gcttgtgcatttcccctttctgtctcgagcagagtgtgtgctcatgtgcgtcccttagcgcggggtctgtgtgactgaagttttaggaatgtgttctgttttgtgcacgagggagctgggtg

SEQ ID NO: 24015 - DNA, 122 bp, Homo sapiens
cagaaaacgtgttttcacctttttcagccaattaagacctcacagaatcaacagttggcacgtttttactggctttcctggcctgagtccattccaggggggccctgcccgtggggagctgg

SEQ ID NO: 24016 - DNA, 122 bp, Homo sapiens
gcgggatccccttcccctgcgggacaggggcatgggcacaagctctggctggggcgctctcggatcgagggtccgaaggagggctgcgagctggtgggagtgcccgcgacctggcggggttg

SEQ ID NO: 24017 - DNA, 122 bp, Homo sapiens
agacatttgcatcgtgggctattctgaggccatcccagatgacacatgggaatgtgtgcacggtgcctcattcacaggaggcttttcatacatgtgcactagtgaaacgagaactccacagg

SEQ ID NO: 24018 - DNA, 122 bp, Homo sapiens
gcccgtctccctgcctagcacccaccatcccggaaacagggggccccagaggtacggccccgccccacccgcacacctcccatgttgcatctgtggcaggcgaggctgcgccgcggggcccc

SEQ ID NO: 24019 - DNA, 122 bp, Homo sapiens
cccggctcaccacccggaggcggcgttagcagcagcagcaacagcaacggcaacaggatccgcggcgcggggaccggcgcagtcatggctgggcgggcggacgggcggacggacgcgagcgc

SEQ ID NO: 24020 - DNA, 122 bp, Homo sapiens
tggctcctggactctcatttgcagggatgggcagagatagcccccgagggctggggccaccgaatcacatctcactacagcctcgggggctggcactggcactcctgcccaatcaaaggggc

SEQ ID NO: 24021 - DNA, 122 bp, Homo sapiens
atacagacaatgcgctgcaaattcccaatgttctatggcgatctcagaccacagcactcacggatttcacagactaacagacctctcctcttaggtatcacacagaaatctaaatctaaaac

SEQ ID NO: 24022 - DNA, 122 bp, Homo sapiens
cagcgcttcctacacgtgccgtaggagcttcctgggcagaacagaacatgatcgtggaaacgagtcttcgccaaggcagcgcagagggccgaggggtggggcgcactagatggcattgtggt

SEQ ID NO: 24023 - DNA, 122 bp, Homo sapiens
cagccgggcccgctccgcgaagcgggccgcggcgccgcctgtcctggcctcccccggccgcggttacctgcctccatgatgaacctcgccactcggaagtgcaccctggcttcgggcgccgg

SEQ ID NO: 24024 - DNA, 122 bp, Homo sapiens
gaaggttgaaaaggaatgtccctgcatacagaactgcgcacagcaaagaatttcaactaccgccaccccatcttttccatgaatatgcactggaatactgcaaaattgttggtggtcaattt

SEQ ID NO: 24025 - DNA, 122 bp, Homo sapiens
ctcatatgtagaaagaagacttggactcatgttagctgaaacccttacagaatgggctttcggtctatgactccatgaattaataaccagggccaaagaaagtctaaccagacagttcctaa

SEQ ID NO: 24026 - DNA, 122 bp, Homo sapiens
taaaacctcaggaattgagcgaactctcccagtggctctcctcaccgggatccccttccacgcctcctccccgtgccgcgcctcagtccgcactgctcattggccgcgtgccctgccaatcc

SEQ ID NO: 24027 - DNA, 122 bp, Homo sapiens
ccttccttgtcacaaggacagagggatttctgtatcccgggatttcttgccttggtgtaccggaagaatcgaatcttcttggcttggagaatgagctcaaagttttattcaatagaagtagc

SEQ ID NO: 24028 - DNA, 122 bp, Homo sapiens
ttcgcgcgcacacacatgcaggtccccggcccgcagatgtcacgccgggagccggggaagcggaagggattgccaggagaagggaaaaaatctggctcccgaatttgacagccctccccctg

SEQ ID NO: 24029 - DNA, 122 bp, Homo sapiens
cccctggggcgtacgggtggccccgggggggccgggggcggggaggcgggcggccggcaccgccccggccgacaaaagtcccttcagttcagccggctgcaggggaagtcccggcgcccggc

SEQ ID NO: 24030 - DNA, 122 bp, Homo sapiens
tgactcctagatccttggctgtctcccgggaggtgccccgaaggcctccccagctccacacgagcgcttggaacgctctgagggaaaatacgaacagaaggaaaggtgatggcggcgggaga

SEQ ID NO: 24031 - DNA, 122 bp, Homo sapiens
caacgcagcccccggcgcgtgtcaccctgctccttcgtgggtcgccttcgcccacactagcgtgtttggaacagggcttcccacacccaaagtgccctgagcacctgtggctctccaacagg

SEQ ID NO: 24032 - DNA, 122 bp, Homo sapiens
cccttcatccctcctcccccatcaccgcccaggactgcccaaggcgagcggcccagcctccgggagtggcgagtcaccttccttggtacgattttcccccggtgcctcgcccgggaaggatt

SEQ ID NO: 24033 - DNA, 122 bp, Homo sapiens
cagccttcaaggtcaatgccaaagagatggaggcccagagaaggctcctgcacttgcccccgaggttccaggctcctgttcaggacctgcttcctctgcctgcaccccccgaccccggcagg

SEQ ID NO: 24034 - DNA, 122 bp, Homo sapiens
ggaccaagctacagggaccacccatgttctgctctgggaactagcttatgataacttcaccgtcagacactcaaggtcccctctctgcctggtgttgactgatttctgtaagaccaccagaa

SEQ ID NO: 24035 - DNA, 122 bp, Homo sapiens
ctttttgttcagtatggctccgcttttaaagctgtggtctgtgtgtgtttgtgtggatgacgtgcacggctttctgaaacgatgctccagtggtggtgaaggggacagcggggctggactct

SEQ ID NO: 24036 - DNA, 122 bp, Homo sapiens
gcctcgttgactattcatgagccgaggagcgggtttgggccggaaaaggccgttgacccccggtgggagggaagcgtcgacgagctgaggtgagggctgttgagacgcgaggtctcggccca

SEQ ID NO: 24037 - DNA, 122 bp, Homo sapiens
gctccccggtgtggacgcgcacgtgctcgatgagcttgttggcggtcttggacaggtagccgcactggtcgcacttgtagtggttgcccaggcggtgctcccgggtgtgcgtctccagctcc

SEQ ID NO: 24038 - DNA, 122 bp, Homo sapiens
gcaggcgcgggcgggcggtgggggccggggcaggaggaggggtctcggggcccggcggcccgtcattggttaatattttattctgttgacatgttttcttactgctgaggcttccgacacct

SEQ ID NO: 24039 - DNA, 122 bp, Homo sapiens
agcttgagaagctttgtcatggggcattcatccaacccaggtgacctacaatagcagtgacgtttgatgggagagaaatgggtagtctatagacacatttgtacaaacgacctactgtgtgg

SEQ ID NO: 24040 - DNA, 122 bp, Homo sapiens
aagttcattttcttaccctggatggcaccctctgtctgaaatccctggctgctttgctaacgcctgggcctgtgctgcctgagaattcccaacagagtattaaaatgtcttggcacgtggtt

SEQ ID NO: 24041 - DNA, 122 bp, Homo sapiens
ccccaaagaataatcggaacctgcctccctggtgtgtccagaattacacaatatcaataacggctgaggtgacctgtgatgcccctagcaccctacagtgtcttgtgcatttatcacaatga

SEQ ID NO: 24042 - DNA, 122 bp, Homo sapiens
atggagggaaatgtttgctttggaggctttgggtaagctagggatccgacaagccctgggcgcagggaggaacgctgccctccggcctccagtcgcgctccccgaagcccagcgccagcgtc

SEQ ID NO: 24043 - DNA, 122 bp, Homo sapiens
gtgaattaccgtctacaacagctactctccaggctgatctggggtcttgcacacaaagggcgaagagaggggcgtggggaggctggaaagcatggttgccccgcctggcccggcgacgcccg

SEQ ID NO: 24044 - DNA, 122 bp, Homo sapiens
tgttgactctggatcttccactgagtcacttgtggctaaaacgtgaagtggcgatccagacgctgatacctgtggcgcatcacattttcctggatatggaaaatggagggtccctgggagag

SEQ ID NO: 24045 - DNA, 122 bp, Homo sapiens
acacagtccatcttggtggaatcggcagtggcctgcatcgtgcgggctttgggggctcgccgtggctctcctcgggggcgccgagcgtgcactcaagcgttggtgcccggctgctgcggctg

SEQ ID NO: 24046 - DNA, 122 bp, Homo sapiens
gccggaagcggaactacccgggtcctttagagggcagtcctttggggaaccttggaaccacggtcagaaaggttaggactgatcatttggctcttgccggaaatcgttccgcccggtgaggt

SEQ ID NO: 24047 - DNA, 122 bp, Homo sapiens
tgccaaaccgtataaagcattggcctattttgtcaccgtggagcagcctatggtgttgcccgctgttttgttgtgacagctgggcaggggctccctgacatcttcctccgagtgggaggtgc

SEQ ID NO: 24048 - DNA, 122 bp, Homo sapiens
accctccctcgccaatcctccccagggttccagagatggccaccagcctcggctctcccacgtctacacccatcacctccagcctgagggcgcaactgagaggaactgagacccaagcagct

SEQ ID NO: 24049 - DNA, 122 bp, Homo sapiens
ctgaggcttagaggggttatgtaccactacacttttacaggtcactaatggaggctgagccggcactacctgggcacaggctggatcttgttcagcacttaagtgtgtaaattacattgcag

SEQ ID NO: 24050 - DNA, 122 bp, Homo sapiens
ggtgtccctggcccccaggcacctgtgggacacagggagtggtcagggcagcggcccccacgtcaccccggcttgccagaccccttcttgtctccctgtccagctccaagggcctctgccct

SEQ ID NO: 24051 - DNA, 122 bp, Homo sapiens
ggttcgacgggagttagcgggggtgcggccaggccgttggacgccggggggtcctggggccgatgtgaggggaggcgggggtgggggagccgggccggctctagaatcgagttgtccgctcc

SEQ ID NO: 24052 - DNA, 122 bp, Homo sapiens
gcagccgagccccaggcgcctgaactgggcgtggccagctgcccactctccgccgggttgcggatgaggctcttgctgatgtccaagctgcctgcaccaacgttgctgggccctgcatagca

SEQ ID NO: 24053 - DNA, 122 bp, Homo sapiens
ggggaagactccgccgccagcggggtgactgtgctcggcgccgccgccatcgcagcgaggcgcgcggacaattgcacttgcgtctcgattccgttaagctcctttagccccgccttccgtta

SEQ ID NO: 24054 - DNA, 122 bp, Homo sapiens
gggcgaatgcacagaaaaagccctggggtggaagcaaggtttcccctccgtccctgaccacgtaactcagagcaagttagggcacaatctgggctttgaaccctcaactctggagaatgtta

SEQ ID NO: 24055 - DNA, 122 bp, Homo sapiens
cagcagtgtcaaggcagcagctctggcacgcgggaggcgcatgcagcgcgggagggaccacgcctactgccaaaagcagctccctgctgggagcccaggagacgacggggattgtgagtgct

SEQ ID NO: 24056 - DNA, 122 bp, Homo sapiens
gtggaggcggggcggattctgctggcggccgcggggcggcgagagtgggggctctttaagcgcccaccaacgcgggggcccgaggggggcagggacggagggagggaactccgggagggtct

SEQ ID NO: 24057 - DNA, 122 bp, Homo sapiens
gctggtctctggctgcccgtccctgcccatagtgcaccccctcagggcccagtggtttggcggttgtggaaatggagagaagccttttggaattcatactggagaagggataaacaggactc

SEQ ID NO: 24058 - DNA, 122 bp, Homo sapiens
acgtcaggtcgggcgacagcacagtgcactgccccgggagcacagggaatgtggatgggacgggaggcggctgctgttaagcacattatgtgagtagagacaagattagaggaggctgagtt

SEQ ID NO: 24059 - DNA, 122 bp, Homo sapiens
tatcttccccaaatctgtcctcaggcctgacctttttcctagcattcctgtctgtcattccgacgtggaagtcccatctttccttcaacaccagctccctttcctctagtcccctcccttct

SEQ ID NO: 24060 - DNA, 122 bp, Homo sapiens
tttttctttctgagaaaaaacaacatatgggaaaagttcagtttctcccagaaaaggttgcgcaaacatatggtcaaattacaagatgatgtcgttattttgaaaggaagagcatataaact

SEQ ID NO: 24061 - DNA, 122 bp, Homo sapiens
gtaaaacgtgcagttccagaaggagcagtaccagaactagcagctgctgctgacactgggcggtgtgaccagtgtccctcttgaaaggcccgtcctgctcccacttaccttggagcttttta

SEQ ID NO: 24062 - DNA, 122 bp, Homo sapiens
gcagcgtgtggtgtgcatgtgccagactgtgaatgaatgcggccagcctgcctctgccaccgcctctagagctagcatagcgactcggagtccccatgaggcaggtttcctctatttcttcc

SEQ ID NO: 24063 - DNA, 122 bp, Homo sapiens
aatgttcagatggtgaggttttccgcttcacggtattgacttcaaccggcagtggtactgcgctgggattggtgaacgtcgcctggcggtgtgtatgctttggaattcgtggtttcctctgg

SEQ ID NO: 24064 - DNA, 122 bp, Homo sapiens
gctggagctgggctgattcattcggggctggaactcgaacgctgacgttggctcctgagccgggcgctgcctcgcgcctgattggcgggtcctcggggccgccctccccagcgcaccacccc

SEQ ID NO: 24065 - DNA, 122 bp, Homo sapiens
agcttagagacgaaggacagacagctggaggaatttgctcaaaagaaattgcttacgtttcgccaaagctctaggtttttgcttggagacctcactggtccgaggctggccaagccggggac

SEQ ID NO: 24066 - DNA, 122 bp, Homo sapiens
cctgcgcccttgtagcctgcctggaaactgggccctggcacacctgggctggggccatcacgtacgggaaccaccccgcccccagcgtctggggcctgggatgctaggtcactggggggagt

SEQ ID NO: 24067 - DNA, 122 bp, Homo sapiens
ctcccggcgcgttccccggtgcaggtgcctggcccgtgccccgccatctccgcccggcgccgcctgtgctgaaggagccacgccccgggctccggagcctgcctctgcaaagtccaggcccg

SEQ ID NO: 24068 - DNA, 122 bp, Homo sapiens
gcacgggaggacgaggcccggctgctggtcgtggaccccgagacagatgaacacttcaagcggcttcgggtcacacccaccgaggagcacgtggaaggtgggccacggcccagggcacaggg

SEQ ID NO: 24069 - DNA, 122 bp, Homo sapiens
ctggtcacaagaaaagctgcagtgtggatggaggggctccttctgcagggtgaggacgtgcgtggggaggcaggggcagggaggagctggctgagtttccaaaccttcccaaaggaaatttc

SEQ ID NO: 24070 - DNA, 122 bp, Homo sapiens
ggtcctagaggtcagacaggcagggtcagagaccatgggtatagccaaccctctcccaaacgcccctgctggggagtccatactgctgtccttgttcagtgggggctcagcctggggaacag

SEQ ID NO: 24071 - DNA, 122 bp, Homo sapiens
gtctcggatcctctgagccactttgcagacaatgcaaggcagcggccaacagacgagtcccgcagcagctgcgcaggcggcgagtacatgtgagaagtttgtgaaaggcgaccagagaaagg

SEQ ID NO: 24072 - DNA, 122 bp, Homo sapiens
aaagcccatgggagctctgaggtctgttacagcccagaccacaagttcagtcagaacacacgaagggggatcaatgtctcttaactagggtcaggaaattcaacatttgtgtaattcttgag

SEQ ID NO: 24073 - DNA, 122 bp, Homo sapiens
tggaggtaaggactacctgtgtgagagtgagaaggagccttctgtgtgataggaggggtacggtttcagcaagagcgaaggcttagaggtgagaaaacaccccaggggtatgtgtgttcacg

SEQ ID NO: 24074 - DNA, 122 bp, Homo sapiens
ggcggagcctgcctggcccggagcccggggccacgcccccacgctttgcatatgcgaatccgggcgtccagacctttcatcccagtgtggaagcccagattttcctggcccagggccggttt

SEQ ID NO: 24075 - DNA, 122 bp, Homo sapiens
actttcctgcactaccaagggccactgtaccccaaggattagctgcttcccgcatcaacacgttccctctgatttttcaaagtaaatgaccatttcttcactccccttagaacaattaaagc

SEQ ID NO: 24076 - DNA, 122 bp, Homo sapiens
ccctgcaactggaggaggggattttggaaagttgcgtctgagattacttctgctcgtcctcggaaacccaagcggcacaggaaagtccaaaaaggaagcaaagacgagcatccgaagtctca

SEQ ID NO: 24077 - DNA, 122 bp, Homo sapiens
ggggtgggaaggccaggtggtaaggattagccccccgacacatggaatccatttctcacccggggctggaaacctgagactccaagagcccaaggctttctccatttgctccatatggggtc

SEQ ID NO: 24078 - DNA, 122 bp, Homo sapiens
acttgttttttccgtctttagaaacttgactgtgaatctttaaagagtaattttcagactcgtagaaacatctgaaagacagagattcttgacaatgtttgctgctcgtggcacatgactat

SEQ ID NO: 24079 - DNA, 122 bp, Homo sapiens
gaatgggcgtcagtgcattcccggcatctggatgtagcctttacttgtccctgtgcagcccgagggacccgcgagactccagtgatcatagaggtgccagcggcacccggctccaatcagct

SEQ ID NO: 24080 - DNA, 122 bp, Homo sapiens
ttggtaagttcaactctctttcacagccctctccacagaaagaactctggagttcgttctcggatttcactaaacgaatactgccatccttgtccattctcggaccccttctcgcagctgat

SEQ ID NO: 24081 - DNA, 122 bp, Homo sapiens
acacccttttctccaaaaattaaccatatactataggcttctcagttgtatgagtgtgtgcgtatacacacatatacatacaccaaggtaatataccatatccacatataccaaggtaaaag

SEQ ID NO: 24082 - DNA, 122 bp, Homo sapiens
attcaattttaaaaatgagcaggagatttaaataggcacttcaccaagaggatatacagacggcaaataagcataagaaaaggtgggccaggcgtggtgactcatgtttgtaatcccagcaa

SEQ ID NO: 24083 - DNA, 122 bp, Homo sapiens
tctcagctctaaagtacgttgggtttttcttcccacaggattatgtgctggccgtggaggcgtatcattcggttatcaagtattacccagagcaagagccccagctgctcagcggcatcggc

SEQ ID NO: 24084 - DNA, 122 bp, Homo sapiens
cggaggactggaggactggggcgtgtgtctgcggtgcaggcgaggcggggcgggccggggcggagtcacgcgccgcctggggacacccgcccccggggtcaaggtgcgagacaccctggctc

SEQ ID NO: 24085 - DNA, 122 bp, Homo sapiens
gcagtgtacagcatgatgagctggccagatgacgtccctcctgaaggctggaaccgcacccgccatgtcatcatcctcatgactgatggtcagaagggacctctctcctgtcccagcctccc

SEQ ID NO: 24086 - DNA, 122 bp, Homo sapiens
gatggagctgagcaggggcaggggcaaggtccagagcagcagcgcggcaggcccacgtagcggcgcgaagcggaggagcaccgcccggagaggctgcacaaactctgtaacatagtaatcca

SEQ ID NO: 24087 - DNA, 122 bp, Homo sapiens
attggggattctctccgtttcccaagagggccaaggaattgaattgggaagcatttctgacgctgttataaccataaccagacaagtctccagcaaagttgctgcagcctgtaaagacagcc

SEQ ID NO: 24088 - DNA, 122 bp, Homo sapiens
gttcccacccccactgaatctgaccctgtgcccaggatccccaactctgacccttctgaccgatggctctggtggcacaatgccttgtgcacagaaggacttaagctgctccctgctgacat

SEQ ID NO: 24089 - DNA, 122 bp, Homo sapiens
cagctgcttatgaggtcagagcagcagcagcagcagccccctccctaccccacggccccacgtggtaacaggtcacaatgccccgggtgcccactcccagaatgctgaccaaagtgggagga

SEQ ID NO: 24090 - DNA, 122 bp, Homo sapiens
ggattacaagcatgaaccaccacacctggcccagagcaatgccttttaaaaagtatttagcgcctgtgataatttagttccttttccaactctcttctcacctgctgtggttcaaatatcag

SEQ ID NO: 24091 - DNA, 122 bp, Homo sapiens
aggagcttgactagccaccgaaatgcagacatggctggccgggccccttagtgcacactgcggggatgggtaggaccagatcccttgggctttgtgaagggggaacagacgccccttcaggc

SEQ ID NO: 24092 - DNA, 122 bp, Homo sapiens
accggcccgccccctcctcgccggcggcccaagcaggtgccgcccctcccccaagcccggcgcccactctgccgcccggccagccgcgcgacctgcttcctcgcgcccctcccgtagagtcg

SEQ ID NO: 24093 - DNA, 122 bp, Homo sapiens
agggagtgggtaagatggatccagaacatggggcggactcaggcagcggcgggaatcaggcggactcgtttggaccgaagcctccgccaggcaccgaagccgtgaagtcgcctgcgcagcaa

SEQ ID NO: 24094 - DNA, 122 bp, Homo sapiens
aagaaagaataaactatcactggaaccaattcacatcctaaagttacttccagtgaaaaccggaattcatagagtaaaactgtggtcagagacagaggcagttttatggagattttttttct

SEQ ID NO: 24095 - DNA, 122 bp, Homo sapiens
tgtctccagagaaaacagcaaggccgtgaagtcacactgtggattctcctgccccgtccacggcagccactcttgacctgcctcatgatcgtctacatcaacaccaggccctgactcagttt

SEQ ID NO: 24096 - DNA, 122 bp, Homo sapiens
tcccatcattctgataaatgaattccaatcttcattcttaaagtatgtgcctgaaaataccgtatatagcccaactgcattttgactctttttatgaaagttgcaaaagctcaatataaaat

SEQ ID NO: 24097 - DNA, 122 bp, Homo sapiens
tgaggtccaggaactgtgcaagaggcctctggctcggaggggctgaaacaggtgtctccgcgcgctgggggaagagcgactctcccggcaacaggtagcacccgccaaatcccgcgggaacg

SEQ ID NO: 24098 - DNA, 122 bp, Homo sapiens
agaaatggtacaataagtacagtagtctcctttgatctccagttgaactttccatggtttcggttacctgcagtcaactgcagtcagaaaacattaagtggacaatcccagaaataaacaat

SEQ ID NO: 24099 - DNA, 122 bp, Homo sapiens
tctggcctgaaagcaaagaggcccctctcctcctgcctgctccagggggcacacgtctgccggatgccttcgggcgaattcaaaggcaagggaagatttcagcaaaacattgacagagcatc

SEQ ID NO: 24100 - DNA, 122 bp, Homo sapiens
gtgggcagtgtgcttctggggactggacacttgcactgtggccttgaatttggaggatgccgtgagcagcagccttttactggtttacctgggcatggacaatgagccactgggcagtgatc

SEQ ID NO: 24101 - DNA, 122 bp, Homo sapiens
tcccgcgcgcctcggccttttacatttcaaatgctcgacagctgggccaacttctgcttccgcccaaagaagggctctttgccgctcacaatggccggccagtggcgcgggggctcttttct

SEQ ID NO: 24102 - DNA, 122 bp, Homo sapiens
tgccactttctaagttccccgtttgaaaacaggaaacaggctgtgtgacctgcttctgatcgccccagcccattggctggtgaaacatggtatattgaactcaactgccagcctgccagctg

SEQ ID NO: 24103 - DNA, 122 bp, Homo sapiens
tggccctgcccacacctggattcatttaaccccatgagaccgtgtcggactcctgccctccggaattgccagctaatacagttgtgttgttcaaaccactgaagttcatggtcagatgttat

SEQ ID NO: 24104 - DNA, 122 bp, Homo sapiens
ctgcggtgcctgagctgagtgaggccgaggccgggaggccgtgcccggaggtgagcgtcccggggccgcgccgcgtccggcggggtgagggcggggcggggcggtcgcctgccggctggggc

SEQ ID NO: 24105 - DNA, 122 bp, Homo sapiens
acggacacccacccccgatgcgtccacactgccgccggccacggacacccacccccgatgcgtccacactgccccagccacagacacccactggtgatgcggcctgagatgccaccacaccc

SEQ ID NO: 24106 - DNA, 122 bp, Homo sapiens
ctcttccagggcccactcaccctgggtggaattggatggccactttgccagaagcttcttcggtcttttgttgtcctgttctggtccattaagaccaccttctcttttctggggggtttccg

SEQ ID NO: 24107 - DNA, 122 bp, Homo sapiens
gctcacaggcctggttatgaagctgggtctgggctccccttgaatgttctctcactgtgtcgtcatggtttggagcatggactctggaactgaaccatgtgtgtccaaatctcaatgattag

SEQ ID NO: 24108 - DNA, 122 bp, Homo sapiens
tgaggtagtcggtcaggtcccggccagccaggtccagacgcaggatggcgtgggggagggcgtagccctcgtagatgggcaccgtgtgggtgaccccgtctccagagtccatgacaatgcca

SEQ ID NO: 24109 - DNA, 122 bp, Homo sapiens
cgtccattccagccccaacgaccagatgctgtgggtgcttgacagcaggtggaacgtgcacgtgcggaccgggatcaccgaggagatgcctgtggggaccgcctgggagcatgtgccaggta

SEQ ID NO: 24110 - DNA, 122 bp, Homo sapiens
agacttcgagttctcctgatgttgttccgtgagtagcgatttggcgactgggagagaggacgggcactctttgcagagaacagagccggcaaagtaaagtcaattagcttgagataaaaaat

SEQ ID NO: 24111 - DNA, 122 bp, Homo sapiens
tctggcggttgatggcggcctttagtcctggtggtagtcctggcgcacctgtgaggtggacgcggtcgtcatggcggcgactaaggagaggcggctgcgttcgcggtggtgactgcgcagtg

SEQ ID NO: 24112 - DNA, 122 bp, Homo sapiens
cccacctccaggagcccggccagggatgggaaggtgctggctgggttctctcgcctcctgcgctgccccttgctgtgtggcctgggcccacccccctgcagccagcctggcacacacctgtg

SEQ ID NO: 24113 - DNA, 122 bp, Homo sapiens
tggctcttatggaagggtacacaggttgatatgagtattttttaaacccatgtctgagctcgccccctagatattctgatttaatgtttctgccccatatacccagggccaggtattggtat

SEQ ID NO: 24114 - DNA, 122 bp, Homo sapiens
tggaatggaggccagggtgcaggggcctgtagacagggcctgtgctcacccatgtgctgccgcccgggtcttgttgacatttgattttgcagccactggcatcattggagtaatcatctttg

SEQ ID NO: 24115 - DNA, 122 bp, Homo sapiens
agcgctcttgcagacgcgttcctgcctgggatcgtccccaggtgggtggtcggccggccccgagagggaaaagcgcccactaaaggaccgctagtacccacaagcctcacggagccatacct

SEQ ID NO: 24116 - DNA, 122 bp, Homo sapiens
tcggcgtctgtctggaagctggcagccgccgtcggggagcggtgcgaggctcctgcactgcgcgccgctaggataccctggagaaggaagctacgaagaccgactacagcagccttttgctg

SEQ ID NO: 24117 - DNA, 122 bp, Homo sapiens
gaccgcatcttaaaaagcaaagtgagccagtttttcgcaaagatgatttcactggatttccgcgtttagcgtcacgatatgggggcctccgagcgcctctctgggcttccacacaatgggcc

SEQ ID NO: 24118 - DNA, 122 bp, Homo sapiens
agggagatcctggaagaccagcgcccggaggggtgaggccccgtcttgggggcaaggccgcgaaaccacggcctgcagcttcacgccaggggtacaaagaaaagcgtcgccgggaacccaac

SEQ ID NO: 24119 - DNA, 122 bp, Homo sapiens
cgccctgccccctcgcgcccgcctggtgccaaagcacgctccctgcacgccaccctatgtcgccaaagggagtgggacctgggtcactctgactctgctccgggggcaatccctgcaggttc

SEQ ID NO: 24120 - DNA, 122 bp, Homo sapiens
cttccccacatcattcttggtgccacgcggctgggcggtggcagattcgtcaagggaccacgtggcccgcacccacgcagtacagccatcacagactctggctggcttctgcccaggagccc

SEQ ID NO: 24121 - DNA, 122 bp, Homo sapiens
ccgcgctgtccacaagcctagcacagaaccacacactccttgactgcccgccctccctcccggggcccctggcctctgtactgccatgaccatgaccatgggaggcctctccccggtcctct

SEQ ID NO: 24122 - DNA, 122 bp, Homo sapiens
cgcttcacttcattaggcccccgccccgattcttgccccgcccgctcaatgtcccgcctacgaccccgcccactactagtgaccggcccgcccgttcgaggccccgcctcctccccgcccaa

SEQ ID NO: 24123 - DNA, 122 bp, Homo sapiens
gggaggtacacggaggagtcgcggagaggcgagggatgtgggaggtcgtcaccaacagcgcgacctgggtcacccacaggaagagggccactgagggccccgcctgacccctccctcctggt

SEQ ID NO: 24124 - DNA, 122 bp, Homo sapiens
atctgatggttttataaggagaaaccgctttcgcttggttctcattctttttttgcctgccgccatccacataagatgcgacttgctcggacttgcccggacttgccttccggcacgattgt

SEQ ID NO: 24125 - DNA, 122 bp, Homo sapiens
caccggcctgtttcctgcctgcagactcccgaagttcgatgccctcttaccttcgtccaacgctgtctctgccaatctagtttctgctggtatgaaactccccaaaacctctagggcctcct

SEQ ID NO: 24126 - DNA, 122 bp, Homo sapiens
acggtggcacgggctgtccggactgcctggacgaggtcaccttccccggagtggagcacacgcgccaaagctcagctttcacgaagggcaaaacggtcacccaagcgccaggcgtgcgctac

SEQ ID NO: 24127 - DNA, 122 bp, Homo sapiens
tcggcccgacacggcctctcaaagtgctgagatcacaagggtgagccaccacgcctggcccggggctagattttattacagaagcaccaggtcttcagaagcttcaaagaagatattgtaca

SEQ ID NO: 24128 - DNA, 122 bp, Homo sapiens
tacagcattttagagccctttcagatacaaggcagagaaaggtgtaaagtagaaaatatccggatcttcagtaatttccaaaatggtccaattcctcagttggctgcagggcagctggcaga

SEQ ID NO: 24129 - DNA, 122 bp, Homo sapiens
attctgccattgtacaagctacaaatgcttgttcagcagctgaggggcactcttgagtagcgtgtctgaagagtgaataaaaatccatataaaacaaatattcaaatagtttccataggaac

SEQ ID NO: 24130 - DNA, 122 bp, Homo sapiens
gcgtgtgtacgcgtgagtgggagtgagtgcgaacttaagctcctgtgggccttaagcttccgtgtcaacgagtgcattagtgggtgcgcacatgcctgagcgccctctgcatatgagtgtgc

SEQ ID NO: 24131 - DNA, 122 bp, Homo sapiens
tcaggaaatcaggattctaatccaagggaactctcaactcctatatgttcttgggcaattcgctgaacatcaacttgctcttctttgcaatggggggctcagagagcttgcctacatgggtg

SEQ ID NO: 24132 - DNA, 122 bp, Homo sapiens
gacagtcagcatttgtctcctcctttaactgagtcatcatcttagtccaactaatgcagtcgatacaatgcgtagatagaagaagccccacgggagccaggatgggactggtcgtgtttgtg

SEQ ID NO: 24133 - DNA, 122 bp, Homo sapiens
gtcaaggtcccgggccgcagcatctagatcgtcgtggcgaagccgactctccgggggatgcggccaatctccaagctccctgggccgcaacttccgagcctcccagggcgccggccgaggcg

SEQ ID NO: 24134 - DNA, 122 bp, Homo sapiens
accgcgccgtcgggcatggatctggcaggtgcgaggccgaggccagggctcagcgaaggacgccgagtttacagagcgcgcgcgcctagaggaggcagcagcagccgcagcctggccgcccg

SEQ ID NO: 24135 - DNA, 122 bp, Homo sapiens
acaacagttattggattggagaattactagggtttctgacctcagcaactggagtaccttcgctacagtaccagtcctgagccaggctgctaggattcaaaccctttcatggcccctggctg

SEQ ID NO: 24136 - DNA, 122 bp, Homo sapiens
agaagtagtgttagacaattctacagatgattttctctgaatgggtcctgtccctgcacacgtaacccctgcaagaaacttccattcctcattgatgatttacccttcggagaacaccaaga

SEQ ID NO: 24137 - DNA, 122 bp, Homo sapiens
ggaggccgcgcggggccggggtcgagcccagcatggcggggggggtgcggggcagtggcccggacaagggcatggggccggaagaggcggggccgttgccaggagacgagacggaatgggcg

SEQ ID NO: 24138 - DNA, 122 bp, Homo sapiens
tgagaccaggaaaagtctgccccggctggtgccgcaccgcacacgtgtccggtcgacccacgcgagcagagcaaacggagcgaacaagaccaagccgtgggccctttcttgcttggcacacc

SEQ ID NO: 24139 - DNA, 122 bp, Homo sapiens
ggctagggaaagcgagggaaggtggcggctccgggcagggagcgagcgagtgctccacgccgcccgcaggatcgagtgagtcacgcggccgccagacgaggccggtggcgcacgcacccgag

SEQ ID NO: 24140 - DNA, 122 bp, Homo sapiens
catgatacaaggggtgagctacaaaggaggagacattgtagaaacggcccaaagcaatagcgttacctgtgagccacagcaacacacacaaggtgagaagaagatttctccccacaaatctt

SEQ ID NO: 24141 - DNA, 122 bp, Homo sapiens
cggctccggcggtaatggcgttactcttcatccgggctccgggcagcgaggggcgggacacgtaccgcgcacgggcctttgccacgcccctccctggaccagggaccgccgccgacgtggct

SEQ ID NO: 24142 - DNA, 122 bp, Homo sapiens
caaagctggcggcagcagggtgttgatcccagcagggttctcctgtggtagctgcacacccgctgggaccaggggctcagggcggccctgcaggtcagcacctttaacaaagggtgcagcaa

SEQ ID NO: 24143 - DNA, 122 bp, Homo sapiens
gctggctccgaagcggtggccgtcggggtggcgctcttcctccgctctttggggtcccggcgcccctcagggcagggcgggagaccgctgaggaggcaccctcaagttcacctcaggctcat

SEQ ID NO: 24144 - DNA, 122 bp, Homo sapiens
tggaaccttgagtccttcctttcagagttcctccgtcacaagggctttgcgagggaacatcgtatccgaactctcccagcacttaacggcccccatgccggtgtcccctctttggaatcctt

SEQ ID NO: 24145 - DNA, 122 bp, Homo sapiens
ggcgatgaaggataacagatcgccttctcggccactcagtggcaggggacttgctacttccgggtcggtggcgtctggcgtggagagtttggggatctacagcagccaaaggcttgtccctg

SEQ ID NO: 24146 - DNA, 122 bp, Homo sapiens
ggaccgtggagatccgcatggggggacgccgtgcagtcgtgaggccaagctgagcatgctcggagagccggcctgtcgcgggaggaagcggtgtgggccgcgggcggcgcacgccgcgcagt

SEQ ID NO: 24147 - DNA, 122 bp, Homo sapiens
caggccctgctgtccctccctgaaggtcaggctctcctcagacagtggctgtgtgtccgccgggacctccctctgccagtctgccatggaggctcatggtccctctgcaccggccttgacag

SEQ ID NO: 24148 - DNA, 122 bp, Homo sapiens
aaagtgctgggaactgcagctcctcagatgctttcaaacaatcaaagtacttttccccttcgctgaattcccacagtattcccggggatagagttgaagtcttatgtgtagaaggaactcat

SEQ ID NO: 24149 - DNA, 122 bp, Homo sapiens
tgaggattccaagatcacggacccctcttatttaccaaaaggcctggtggtgcaatgcggcgaatacaagaacctccagagatggtataacacatagggaacctgacctatgctagtctctg

SEQ ID NO: 24150 - DNA, 122 bp, Homo sapiens
aggggccaccttcaacaaaagccttccccgtttgtatataagggaatattttcacaggcccgggagactgaaagaccctctaagagctcacctggagccctcggaaagagatgagccagaga

SEQ ID NO: 24151 - DNA, 122 bp, Homo sapiens
agcaggcggccgcagctctcgctggcccggggccagacccaggcccgctacgccgcctcgcggactggatccaccccttgcagacaggcaccctgcttgggtgttgttcctgaaggtgcata

SEQ ID NO: 24152 - DNA, 122 bp, Homo sapiens
cattcaagatgtggcccgactgcttcgaacagcctacactcaggtacaggagcaaagaagcgacttaaagttggaatatatatttaagcaggaagcagagcataaaagtttggaaaatttgc

SEQ ID NO: 24153 - DNA, 122 bp, Homo sapiens
aaggtaagtagaaaacataggagattgtccggagcccctcaccccaaatattttgccatacgtaccaggtatactgccctggaaggagaggctgtgtgcccccaaattcttcgtgagaagtg

SEQ ID NO: 24154 - DNA, 122 bp, Homo sapiens
cgcgcaggagcggagacctggacgccctggacaagcagcaaaggtagcgggggctcagcccggggtgggagggggtccccaggcgcggctttccggcagcccctgggacgggggccttggag

SEQ ID NO: 24155 - DNA, 122 bp, Homo sapiens
ggggccatactccaaaatcaaccaggggctgcctcggcatccaagacgtttcgggccaggcgaggctgtttccctaacctgtgccatgggcaaaagagaacgccgccttcccatgcagttcc

SEQ ID NO: 24156 - DNA, 122 bp, Homo sapiens
ttctcaaatgtatttttcttgttgttttgtctttttgtttttgcctcttcaagtcaatgtcggaaacttagttgttctagactacccattagctcagagctaccagtaatcagactaccact

SEQ ID NO: 24157 - DNA, 122 bp, Homo sapiens
ggggagcgaggccacttcggggtcggattggaaatgttgaggcttcgcttgcttcctccgcgacatgctggctcaaacatcagctggggcagaataaaaaattactaaaaaaaaatcttctc

SEQ ID NO: 24158 - DNA, 122 bp, Homo sapiens
gggtgcaccgcagggcacgcatgtttccttgtggcttgtgggaaagccactgtcgtggagcgccagcgtcccgagtccctggaaattctcccaagtgacctggaatccaacatttccctgga

SEQ ID NO: 24159 - DNA, 122 bp, Homo sapiens
atttcaggaactcaaaatatttcttatgtatgccaagataaacacaaaacctcttggcagcgatctatgaggattctccttgcttgtgattttgcatttctttatgctaattcagaaatatg

SEQ ID NO: 24160 - DNA, 122 bp, Homo sapiens
acttaattcaattacattgaatcctcttaacagccccctaaggtaggtgtgttttacaggcgaggagccccagacataaatcttaaggcaggttgcttaattactgagtggagaaactggaa

SEQ ID NO: 24161 - DNA, 122 bp, Homo sapiens
gacacgcgctatcatctctagcaaactcccccaggcgcctgcaggatgggttaaggaaggcgacgagcaccagctgccctgctgaggctgtcccgacgtcacatgattctccaatcacatga

SEQ ID NO: 24162 - DNA, 122 bp, Homo sapiens
tgaaatgcctaaattctgggttccataacttttcatctgacagctggtggtgccgaaccccgtccccaattacctaggtcatctttaaggtcaatgtcagcattggtaggattgattatggc

SEQ ID NO: 24163 - DNA, 122 bp, Homo sapiens
ggggactggcctgaacagaggccaaggctccctctggaaccccaaatcaccctccttggacgtcagccagtcacacatgaatagagtccctaagcagctgtgggaaaagcaaaaccagacaa

SEQ ID NO: 24164 - DNA, 122 bp, Homo sapiens
tcccccaaacctgctgcctctgaaggcatctccacacattgacagccaatgccttcagtgcgttcctagggcaggtgtcctggcttgagtgactgtcctccaataatcagagctcaaactaa

SEQ ID NO: 24165 - DNA, 122 bp, Homo sapiens
ccctggttggagggccccagccagggatctgccttcttggcgctccagtgtcctcatcagcgacagaggtgacagggctttcttccaaaggtgctagtggggattaaatgagatggcacata

SEQ ID NO: 24166 - DNA, 122 bp, Homo sapiens
accaacctttgtcttttgaacctgccttttcagaaacggaatttgccttgagtgcgcgggcggccagtgagcctttaacttcttgtgctcagccccggcctgccggcgcggagcacggcggc

SEQ ID NO: 24167 - DNA, 122 bp, Homo sapiens
gaatcataggggacatgacagtaaattatcccatagtgaaataatggaacattgtgtcaccgttaaaacggtggtgacattttgggaggccaaggcgggtggatcacctgaggtcaggagct

SEQ ID NO: 24168 - DNA, 122 bp, Homo sapiens
acctatatgagctgggtgacttagcaagagtttagcatttagtattcacgctttaacacccgggacccacccagctctcaccccactttatgagaatgtaggttgactctgtaagacccctt

SEQ ID NO: 24169 - DNA, 122 bp, Homo sapiens
cggtgggcgaagcgctctgccctggcgcaccccggctcacaccccatctcctcatacccgcgaccccggccccgcatcgccactgtagggggaaaactgcagtccaacaacctcacttgctc

SEQ ID NO: 24170 - DNA, 122 bp, Homo sapiens
cggagaaggtgtacatcgtgcatggcgtccaggtagctacagcagcggcgttgggtcggccgccgggttcagcctggccctgcgggtcgcggcctgccctgggtttgccagtgaggaggcag

SEQ ID NO: 24171 - DNA, 122 bp, Homo sapiens
cgccgcctacatgcacttcctggacagcgggagcatttagccaacaccagttcacatccacgcaccaccaaggacagaagctcagctgcctgcacaccagagccccagggagcatctcctcc

SEQ ID NO: 24172 - DNA, 122 bp, Homo sapiens
tcttgtatttctcaacactcagctcctgcagctgatgcatgtttaaaagattttcactcacgctgttttgtcaacgtgatagattttattcaccagctgggattttcatgtgttctgtagct

SEQ ID NO: 24173 - DNA, 122 bp, Homo sapiens
agcaattacaataattgacaaaacaaaattctttcaacccgagctagggccccactaacccggtccctcccagagcccggattcggcctcggtctcggatgcgacgggtatcagacccaagc

SEQ ID NO: 24174 - DNA, 122 bp, Homo sapiens
catctcatttattgaatactgaaagtgaaaaactggttgtatatgggcactcaccattaacgtacacagctgaaagcacactgggccaaagaatgtttgaaacatctagaattgctggatga

SEQ ID NO: 24175 - DNA, 122 bp, Homo sapiens
gcccttcccccaggcctcaggctcccagtggatgcactcggcgtggggcactagcgggggcggggtcaggaaccccggggccagaggttggggggcaccgagttttgcccccttcaccctct

SEQ ID NO: 24176 - DNA, 122 bp, Homo sapiens
gttgacgacacaggtgcgtggcgggggcgaccagagccttctaagagctgcaggaatgcccgacccacactctagggcaggaagagcagcgggaagccctgggaggccagccagccgtttag

SEQ ID NO: 24177 - DNA, 122 bp, Homo sapiens
accggatgcgaaagactggagaccgagacagcaaagggaggtggagcggagtgctgatctcggttcctccaaaactcgtactgtgaatctgtgacacgggacaatgaaatgtgagcaaggac

SEQ ID NO: 24178 - DNA, 122 bp, Homo sapiens
gcggcggcaccggcagttttcggtccccagggaggtacgaggagtttgcttcctggtggacggagactggccggtgtgggaacgccttccgcggcccggccctccagcctatttgtccgcag

SEQ ID NO: 24179 - DNA, 122 bp, Homo sapiens
ccctgatatccaacccgaagtttgcttctacaagtatgatccaattacttccatgggccacgctaaataactcctctccttcactgccactctctctcttcagagatttgtagattgttacc

SEQ ID NO: 24180 - DNA, 122 bp, Homo sapiens
gcgcagcctcggttcccgcccacgcatctccctccacacctccccgcaagcctaggtagccggctcaggcctcaaccagtccagagaagggctcccatagtgcagcggcgggctgaaaggct

SEQ ID NO: 24181 - DNA, 122 bp, Homo sapiens
aagtccagggtagagatgggggcgctggtgtgggggcggtcaggagagaagggcgggggccgtcccaagcgtcctgcacctgccctactcgccgagaatttgcccgggtcggtgccagggcg

SEQ ID NO: 24182 - DNA, 122 bp, Homo sapiens
atatttgcagtgtatgtgtactacccaaggacatgacttcattattcaatttgacaaatgcgttctgttacacaaatacagaaaggattaataaagctttactagtccatctttcccattat

SEQ ID NO: 24183 - DNA, 122 bp, Homo sapiens
attaatggtaggcttttcaggtttatatttaatgggcttgggtattgagttaggaatgcccggcccacctgcagacaaggcagccccttgcctgcctgataatgcacggggaccgagaccca

SEQ ID NO: 24184 - DNA, 122 bp, Homo sapiens
gccgggcttctcggagggttcactgtacattcgttctcaggtggtcttgtggctgtctttcggaaaatggttattttatatgatttgtcatggaatttgttctaataaatcattcttctatc

SEQ ID NO: 24185 - DNA, 122 bp, Homo sapiens
cctccccacccccatttccactacagtctcccagggcacagcacttcattgacagccacacgagccttctcgttctcttctcctctgttccttctctttctcttctcctctgttccttctct

SEQ ID NO: 24186 - DNA, 122 bp, Homo sapiens
cccgccccggaggaccctagagcagcgtcgtgggggccatggcggccgccagcggctacacggacctgcgtgagaagctcaagtccatgacgtcccgggacaactataaggcgggcagccgg

SEQ ID NO: 24187 - DNA, 122 bp, Homo sapiens
ccgccgggctgtgtccggggccgcgtgagaaagctctgcgggactgagggctgggtgggtcgaccgggaacggcgcgcgctcccgccgccatcgcgcctccgtccccgcctgcggcctgtct

SEQ ID NO: 24188 - DNA, 122 bp, Homo sapiens
ccccgggagggtgggacactgcggctccaccggtccctgtgtctatggaatcggtgtcagcggacatcccgttcatggtgggatatgcccgtaggtgtcgggcagatgggggagtttcaata

SEQ ID NO: 24189 - DNA, 122 bp, Homo sapiens
gccagcctccgcccgcacgtatggagtggactcctctcaccaggagcacccaccccacggcgccacctgccagcctcttcggctgccagggcccgccgcgctgccccctcagttgcttcccc

SEQ ID NO: 24190 - DNA, 122 bp, Homo sapiens
aaagggacagagacccagagaaagggatatgggtcaacacgatgacaggcaggaccagggcgatagaaatgcagagaagatgaagtcttgagatgggtttccaacttggggactccctgggt

SEQ ID NO: 24191 - DNA, 122 bp, Homo sapiens
tcggggaggcaggtgctggctccggtggggtctgcggcagagcaggactggagcccagggcgcagctgcacagctcaacgccggttcgcgccctggtttacagcgttgggctgggtcacccc

SEQ ID NO: 24192 - DNA, 122 bp, Homo sapiens
ctggcatcaactctgacatgagaagcaaggagagtgccaggggaagcctcacacaccctgcgatgagctttctgggcccctgggtgaattgcctttccatgggatgcaggctgtgagttttc

SEQ ID NO: 24193 - DNA, 122 bp, Homo sapiens
agccgcgtcctttcatccttgagacagctccgtggtccaacggttccccgatccgctggccgagatctcaagcttggatgcaacttcggattcgccccaggcaggaggaaggaagccccgat

SEQ ID NO: 24194 - DNA, 122 bp, Homo sapiens
agccccctctgctttggcaagaggcagaatccagacactggcgggagagcgcctgcctgccgggcgttcctggctcctgctgcaggcaccacagagaccccaggccccgggtccccgggggg

SEQ ID NO: 24195 - DNA, 122 bp, Homo sapiens
gtgaaaaaagcactcaggtgcggacagccatggagcgtgacttcctgtgcactctttccccgccagctcaacgccagagccgcgcgctaggcggagactgttggtggcggaggccggagtcg

SEQ ID NO: 24196 - DNA, 122 bp, Homo sapiens
gaggagatggcccagagagggatgagggccagtggccacccagcaggccaacaaggcatccgccccttgtctggcagcgcttctgccacactgctgacctgggccctgatactccccttgcc

SEQ ID NO: 24197 - DNA, 122 bp, Homo sapiens
agggcgggcgtggggaggcgggcggcggcgggcggggggagccaaggaggctcggagcctcgcggcgcgcgggcgggcggcggagggggcgcggggagccccccgccccacgaaggaggagt

SEQ ID NO: 24198 - DNA, 122 bp, Homo sapiens
aaactacactctttcaacctcttgcggattcccattatctatcttaaactacactcccatcgtgcaacggaaaacggacagagctcctgcgtgcaccgaagggacttcgagccaatccattg

SEQ ID NO: 24199 - DNA, 122 bp, Homo sapiens
tcccagctcctcgccctggagcgcaagttccgtcagaaacagtacctctccattgcagagcgtgcagagttctccagctctctgaacctcacagagacccaggtcaaaatctggttccagaa

SEQ ID NO: 24200 - DNA, 122 bp, Homo sapiens
cgactaagggaagggaaggtgttacccggagtcggagggactagcacccctccgtttttgcgcccaccctttgacctgtcccaagccactcagtcctggggaacccagcttctcagatgcag

SEQ ID NO: 24201 - DNA, 122 bp, Homo sapiens
ttcacaaaactttacacatgcaggtaagtttgttttcttgtttaaaaacagtggctggttcgtgttatcattactgctttgcaaaaggtgttcaatggcagactctttctcttaaaaggctc

SEQ ID NO: 24202 - DNA, 122 bp, Homo sapiens
aacgactgcaaaatatgttgcagcattgacaagcttgaaatcatactttttgatcagtgccgtttttgaaagagttcgcagggaagtatggcgtgtgaaaagtctgaagcacagcgcggtta

SEQ ID NO: 24203 - DNA, 122 bp, Homo sapiens
gcggggcgagatgagggtagtccgaggactgagcgagcccgggcgggcccgtaggcgaggcgagatgaggctggccagggggcggggcgggcccgggcgggaggggcggggcggggcgggcc

SEQ ID NO: 24204 - DNA, 122 bp, Homo sapiens
gtgggccggaagcgcaggcactgcactcccaccagcagaagggttctcacagaggtgggtcggccattctgaaactacatgcatgctggaagtgaatgaggaagtaaagacagccgagacca

SEQ ID NO: 24205 - DNA, 122 bp, Homo sapiens
tctcgtgcagcttctcgaaatgctccgaggaggcggcggaggaggccatggcgcaggccgcgctggagcagcggccaccgagattcggggccctgggccctttcctagcccggcggtcagcc

SEQ ID NO: 24206 - DNA, 122 bp, Homo sapiens
taacttgtttctacatgaaaccacgaatcgtgcagggttctagagaaacaaagggccgcgcgcacccgcaggcccctgcgtggaggcgaggacctaaatcaaaactgctaaggggtcaccag

SEQ ID NO: 24207 - DNA, 122 bp, Homo sapiens
cagcactgttaatgattcagtgtagtcctacccccgcttcccaactttcctgtttttcggcggctgcaaaacctttggttagagctctggggcatcatttgccttcccacagacaaaggcat

SEQ ID NO: 24208 - DNA, 122 bp, Homo sapiens
ggagccgggccgggccatggccgcctcggagcggctgtacgagttgtggctgctctactacgcgcaggtgagcccgccccgccccgcgcccgcacccgcacccgcggtgcccccagcttcgc

SEQ ID NO: 24209 - DNA, 122 bp, Homo sapiens
ggcccgtgttggcccccaggaaccacccgcacagggtgcacacccttccccaagcccagccgctcccgctctgcagggggcatcgaaggtcctggattaaggcagttccaccctcggcaccg

SEQ ID NO: 24210 - DNA, 122 bp, Homo sapiens
ccccgctctggtcgccggggctgcgccgtccccagctcaggtaagcgcgaggcccggcggcggcgccgcagtacagtccgctgcgctcctagccgagtggacccttcctcgcccgcgcctgc

SEQ ID NO: 24211 - DNA, 122 bp, Homo sapiens
ccaaaaaccaaacaaacacccaaaaaacaaaacgaaacaaaaaacaaaaaaacaaaagcacgtcttcagagttcatgaacccaggaaatgtaggcacaagtgtgtgtgtttctgcaaaatga

SEQ ID NO: 24212 - DNA, 122 bp, Homo sapiens
tcccgaagctgggggtgagagtagtcatacagtcacactcacacccgggagccctccaagcgtccatctggcggctgcagcctcagttggctcctagacgaacatcaataccgcggccgggc

SEQ ID NO: 24213 - DNA, 122 bp, Homo sapiens
tcactctcctgtctgtctcccctctgtgtgacggggggagtgggtggacgggggatgccccgagctatcccgtcaccgtggctgtgtggactgccccccacgtcgccgcagcgcctctgctt

SEQ ID NO: 24214 - DNA, 122 bp, Homo sapiens
aacattctgctagttctgggtagaactcagccctgccctggccttacaggaatccctatacgttgatgagagtgtctggtggaatagtggggcaagggtggctgagattctgtttcctggca

SEQ ID NO: 24215 - DNA, 122 bp, Homo sapiens
atccacccgcctgggcctcccaaagtgctgagattacaggcgtgagccaccacgcccgtccgacagctctgttttatatagtctcttgcttctggagggctatagtccatgtacttctctag

SEQ ID NO: 24216 - DNA, 122 bp, Homo sapiens
gacgccctgcttcatctggcccgccagaatcgggctgtggcccgcacagcccagaatgaacggtcatcacgcagccacagtgtattccagctacagatttctggggagcactccagccgagg

SEQ ID NO: 24217 - DNA, 122 bp, Homo sapiens
aggaactcacggctggctgtagcctggatgcatcagagacgatggcaaacccttctcacacgtgccaggttccagcaacccaccctagccccgcaattcctcctcgctcactcccaccccct

SEQ ID NO: 24218 - DNA, 122 bp, Homo sapiens
aaaggttgcttgtgcatttttttttcctgttttgggggttttggatcactattgccctaacgtcatgagcggctgccttactccagtttctatataccaccatcactatccctaaccacagt

SEQ ID NO: 24219 - DNA, 122 bp, Homo sapiens
gcgacgacagcaagagggacgttgtgaaggtgagcgccgccacccgccacatcccggacacgggttggtgtaagctcctgtgtcctgcactcagggacctcccggcagggcccgtgtgcccg

SEQ ID NO: 24220 - DNA, 122 bp, Homo sapiens
cgaccatgttgctggtttatgcatctgggatactgtacgtttcattattattttagagtgcgctccttctgcttgtggaaaaccattatctgtaaagagccctgggccagtccttcaggagg

SEQ ID NO: 24221 - DNA, 122 bp, Homo sapiens
ttttaaaggtgtcctgaaatagaatattctataacctttcagtggtggtggctggagaagcgggatacaaaactctgttcctagtgcaatgctcagtctagataagaccgggcttgttctta

SEQ ID NO: 24222 - DNA, 122 bp, Homo sapiens
cctccgtgcggacgtgcgagtgaagccgaatgaaattggggcagtggaagcagccgtcagcggcaaaacaccctctttggagtcagccatcttgctccttttcccaggccggcgcgctgctt

SEQ ID NO: 24223 - DNA, 122 bp, Homo sapiens
cattacctaggaacttaatcaaaatgtgatttctcagtctccactccagaccttgtgaatcgtaattctggcagtggtgtctggaaatttgtattttaatatgtcctcaaggtcactgtgat

SEQ ID NO: 24224 - DNA, 122 bp, Homo sapiens
cttccaaaggtaagcatcttaattcttcaactttttaagaggctaaacccagtgagggcccgtatgtccacaaatagatgacacacccatccaaagcacgcgtgtgtattaagggacagcgt

SEQ ID NO: 24225 - DNA, 122 bp, Homo sapiens
cttcgccctctgtggaccttcttggccgtggattgactattcagaggctgcctgctcctccgcccaaggtctgctacacggcgggcagggatgtgtgaggctggctgtttgttccggtttcc

SEQ ID NO: 24226 - DNA, 122 bp, Homo sapiens
agcctggtacgcggcccccgccccttcgtgcgcgcgctgggcctagctgccgctcagggtcggggctgacccgtcactttcgggaacctcagtcccagcagcttctctccctcagccggccc

SEQ ID NO: 24227 - DNA, 122 bp, Homo sapiens
gctggcacagggaccatggccttgggtccagctgggtttgagttctgggggcagtggccacgcaggccaagggtcatgtctaccctctgcagggtcttgctggtgccctctgggtccacaca

SEQ ID NO: 24228 - DNA, 122 bp, Homo sapiens
ggaggggatgcttacaaatccagtgacacagtggcaagcatcctgccacctcctgttgctcgctctgcagctggttgatttgtgtgtgagtgtgtgtatctgtgtgtgtgtgatgaaaagct

SEQ ID NO: 24229 - DNA, 122 bp, Homo sapiens
ctgtcgcagtctgaggtgcctgtgagtcccccggagcagcaaacactggcattctaactgcgacaggactttcgagcgagtgcgaggaaagcccctttcgacagttctgaggttttatccga

SEQ ID NO: 24230 - DNA, 122 bp, Homo sapiens
gagagagggcaggaccggccgggtggatttggctgctcgtgcaggagctctgaaggggtccgctggcgggggaccctcggacttacccgagctggcactgcggacccctgcgaggttcatag

SEQ ID NO: 24231 - DNA, 122 bp, Homo sapiens
gggcgtcctgcgtctgcaagaagagcccgtgccccagcgtggtggcgcctgtgtgtgggtcggacgcctccacctacagcaacgaatgcgagctgcagcgggcgcagtgcagccagcagcgc

SEQ ID NO: 24232 - DNA, 122 bp, Homo sapiens
acagaggagcagcagaagccgccgccgcagacgcccggatgcggaggacccagagcgctgcgcagctgaggagcacctggggagccaccgccggcgccaacttttgccatcccgggagccat

SEQ ID NO: 24233 - DNA, 122 bp, Homo sapiens
acatgttttttgaaccttgtcatttttgtgaagaattgcctagattccttctctcatcaacgggaaagtacttcctctgagagtgcgagtgcaccatgctcactgttgctgcgtgggagagt

SEQ ID NO: 24234 - DNA, 122 bp, Homo sapiens
ctgaagacactctgctagccacttctttcaggatgggcaagtggcagccatttaagaatacgtcaaagaaatatatgttggggataaaatattttcatctccttcccttgcttagggccatg

SEQ ID NO: 24235 - DNA, 122 bp, Homo sapiens
gatagccagtgaaaaaggacacacacaccttgcactcaacacaactgcatgtgtcccatacgaagtttctctttataaaccctagccttctccctacaagttcaatgtgattcctttggata

SEQ ID NO: 24236 - DNA, 122 bp, Homo sapiens
cctggagcgcgtgccccccggtctgctggccctggacaacatgttgtacttctccagaaacgcgcccagcgcgtacagccgggtcggtgacagggtagggtgggggggtggcagcatccccc

SEQ ID NO: 24237 - DNA, 122 bp, Homo sapiens
gtgatagcttctcttcttttgccaactcctgtttacactgggaacctcactgaaagtctccgattcagggaagtgctcttactcagccctttgtaccaggccagggagccctgtgcttttct

SEQ ID NO: 24238 - DNA, 122 bp, Homo sapiens
aatatttgcagatgaaatgatatattttgaatttgcttcacagtaatccagggttggagacgtgggtagggttacagatgaaactaaattggccttggccatgatttgataaaaactgttca

SEQ ID NO: 24239 - DNA, 122 bp, Homo sapiens
tccctaaacttattctctttctcatcagaatgtgacagtgcagcagcttcctccacacaccgtcaggcaccatggctactacatagggagagaggggtggggtgtcacaccacaaaagttcc

SEQ ID NO: 24240 - DNA, 122 bp, Homo sapiens
attctcgcccggttgccacacactgcacggagcataattgggggaggttgtgcaactgcccgggaagccggggctcgcaacgagggctctctccaagtccccatcacaggcctccggggagc

SEQ ID NO: 24241 - DNA, 122 bp, Homo sapiens
ctatattgaaattttaagagttatcaaaattattaagcagtcatgtttttttcctatgggcgaaaaatgaggtttctaggtcatggcttgctttggtttggtcacaatactcaaaactagaa

SEQ ID NO: 24242 - DNA, 122 bp, Homo sapiens
gaggcttcggaagcaggaggagaggttttaggagcagcataagaggcttcagcagctggccgagccacagagcatcttcaaggagctggtgcgttgcccctcctggggagcctgccctccca

SEQ ID NO: 24243 - DNA, 122 bp, Homo sapiens
ccggagcaagcccccgcccctcccgcgcccctccccgcccccgccctccacctcccctcccgggactcacaacccggcctttggagtttttctgatccgcggaacccagaggttcctcctgc

SEQ ID NO: 24244 - DNA, 122 bp, Homo sapiens
aggcgcagaccaagtctcctaggcagtttccaaaacggaagtcaaagtaacttccccacccgcgggagggcggagcccttgaaacgtaataggatcaggcttcagcccgggctctggcccct

SEQ ID NO: 24245 - DNA, 122 bp, Homo sapiens
gtccttgaagaggtcctgctcctcggcctcaaagagcttgcggttgtcggggatgaggagcgggtgggaccagaaggagccgatgtagaccctgaccacctcgggggtgttgatgatcttgc

SEQ ID NO: 24246 - DNA, 122 bp, Homo sapiens
agttttatcacccattgtcattctcaccttggcaacgttaactgcagacccataaccagtcgagaatccacagccaatgaggcagactttctccaggggcgaggctgcatcaattttggcca

SEQ ID NO: 24247 - DNA, 122 bp, Homo sapiens
ggacattctaaaacaactctggaaagggagagaaggcacgtcagttaaggtggaggccatcggaaaacctggacttctaaacccacctaatggaaacagggcacccccacccctccttgctg

SEQ ID NO: 24248 - DNA, 122 bp, Homo sapiens
ctccaaccgtcgtgggctgcccgcggcctgtaatgagcaagttccgaggcctacggtgagcgccggagccggagaggcaggtgaggggctacgcggcgcggcacggcgcggcggggcccggc

SEQ ID NO: 24249 - DNA, 122 bp, Homo sapiens
agaccagacttcccagtattctgtaagcccttgagctcagctgcacaggtgcgggggtctcgctttccatggttttgcccgggcagcggcggcggcggcggcggcggcggcagggcgggcag

SEQ ID NO: 24250 - DNA, 122 bp, Homo sapiens
ggaggtatctggctcccgcaggttgggagtggagaaaaagaacagcgcccctatcctacccgaaccctctaagagacgggttaaatgatgtacccagggccaatgctacagtacaatctgaa

SEQ ID NO: 24251 - DNA, 122 bp, Homo sapiens
tggagtcccaggctgggcagcaggtgtcccgtggggcccgggatcgggtccgttccatgtcgggtgagccttggccccagccacctccacacaggcaccggggctccctcagttgctgctgg

SEQ ID NO: 24252 - DNA, 122 bp, Homo sapiens
tccgcgctgcgctgggattggtctctccagaagagtgctggccgagggttggctgcgggccggctgaagaacaggtgcacctcaccgcccgggctcgcggagcagccgccgaagatcgcggc

SEQ ID NO: 24253 - DNA, 122 bp, Homo sapiens
cctcctcctcctctgggcaccagacttccaaaccacaggcctgttgtctaataataccagcgacagccaccgccacctccatctgccagcctaaaaataatccctgctgagtccaaaaaagg

SEQ ID NO: 24254 - DNA, 122 bp, Homo sapiens
agagattggggccggcagcgacctaggtacctcactctgggtgggacccagaggttgtaacgttgtctatatataccctgtagaaccgaatttgtgtggtatccgtatagtcacagattcga

SEQ ID NO: 24255 - DNA, 122 bp, Homo sapiens
caatgccctaatctagagaattacatagttctaagcacagcaaatctcctacaaacagatcgggattcaaatatttcattctacagtcttgggatcctcaatgcaagggacaggctgtaagc

SEQ ID NO: 24256 - DNA, 122 bp, Homo sapiens
ctgaagaccatcactcagctccagggtgagcctgcaccgccgtgaccagtctccctttcccgtctgggggtttctgggtgcacaactttttgtggggaaaagagagatcagattgttactgt

SEQ ID NO: 24257 - DNA, 122 bp, Homo sapiens
ctgtgggagtgaagccgagctagcgtcccttcctttctccctttcctggggaagaaatcccggacgcctgaaaaagctgttctcttcatttgagggactgcagcttctctcacgaagctctc

SEQ ID NO: 24258 - DNA, 122 bp, Homo sapiens
ctgcttacctgggaagccactttagtgacttgccacaggggctcaggggatagggcataccgcatgtccttcccttctgaatggccagtggcttctgtcctcctgcctgcaggaggaggacc

SEQ ID NO: 24259 - DNA, 122 bp, Homo sapiens
ccatagccgggggctggggcaggaaagccggccctcggcgggggccacgtggctctcaggcgcctgggctgctgagtcacgcttggccagcacctgtctgtaggccacagcctctgccagca

SEQ ID NO: 24260 - DNA, 122 bp, Homo sapiens
gctttgctccccttccctggaagcagagcgtggggctgctcagctgggcagaagcccgtccgtccagaggctcagcaacgccagggcagggcccctgctgaccccaggccagtcccaccatc

SEQ ID NO: 24261 - DNA, 122 bp, Homo sapiens
acgctgggccagtaaaatgagcgcctggaaaggggggtcccatcgcccctttcttgaagacgctgagggtcaccacagaaggaaaaggcagcagccctggtccccagtgtgaggaaaagacc

SEQ ID NO: 24262 - DNA, 122 bp, Homo sapiens
tccgccaaggcgcccgcgaggcgaagcgggagtcgagtgtgacctcggcttttccagtctcgactcatactgatttccctgtaaattgacaggaaaagtaagggaaaaagtccccgcttccc

SEQ ID NO: 24263 - DNA, 122 bp, Homo sapiens
cccgtcacacccacacaagtgtgcctccaacttataaagttcacctgtttatcttgctgccgcttgttcccccaactcctttccatctccctctccaaggattcagtaatatgttgtctaga

SEQ ID NO: 24264 - DNA, 122 bp, Homo sapiens
tctcaagctgacattgctgcaggcgccttcttggcagcctttcctcagatctgcctcctccggggacttctaaagaggagcctgaggtttctctgttacagccggcttcacttgctgccctc

SEQ ID NO: 24265 - DNA, 122 bp, Homo sapiens
ccaaatggtcccgagcaagccaaagcggcagcggctgctaggcgacaccatccccaactccgccaaggccagaataagatcccggatgccaggagagcctacagttcacgaccgtgggtgat

SEQ ID NO: 24266 - DNA, 122 bp, Homo sapiens
ttggcagcctacggcaggagtccagagtgacaaaacgtgccaccagggggcagatgaggacgatgaagggtacaccccactccttcccaggtacccttagccaggggtcctcaaatttggta

SEQ ID NO: 24267 - DNA, 122 bp, Homo sapiens
aaacctgcctgcgagagaataggatggagatgggaaaagcctggggaagagagagttatgcggcaggaatagcagaaaagcgtactaagcaaaaagaaaggtgtcccactaactccgaagtt

SEQ ID NO: 24268 - DNA, 122 bp, Homo sapiens
gaatgtgtttttcagccagctgacaaattgctccccttgcttttaaaaatatttttttcccgtggtaggaagcagaatcagaattccctttgattttactttctgataaaaaattgagaact

SEQ ID NO: 24269 - DNA, 122 bp, Homo sapiens
cgtttggaggttttacagctgacccgccaccctgagaactggaccctgcaagcccggtggcggcttgtggggctgcccgtccacttgctctttttgcggttctacaagcgtgacaaagacga

SEQ ID NO: 24270 - DNA, 122 bp, Homo sapiens
agttccctaattttccatttcactaagtacttccttattcagtgaatgccaacacaacaccgttatagcataatactcgcatagcaaagttgtgactccctggtgttttgattgggaaggct

SEQ ID NO: 24271 - DNA, 122 bp, Homo sapiens
gtgccatgactactacaccacggagttcctgtacaacctgtactcatcagagggcaagggcgtcttcgactgcaggaccaatgtcctgggccacctgcagcaggtgtggggcaggggtgagg

SEQ ID NO: 24272 - DNA, 122 bp, Homo sapiens
tgcccgccccacctcacaggaattacagagcggtgcgcttacctgcgggactgttatgtgcgctctggcacaggctgactcatgtgtgaagtttaaaggtggggcccctgccgcagacagcc

SEQ ID NO: 24273 - DNA, 122 bp, Homo sapiens
cctggggctgtgcccagacctgggcccagactggtggcagcagaagcaacagtggcagcccggctgcagccccaggaggaaaaaggggatctccctggaggtaaactgtctttccttccatc

SEQ ID NO: 24274 - DNA, 122 bp, Homo sapiens
ctgcttgatacagaacaaaaagagcttaacaggaccaacagggcttaagcccagacttgacgtaacagaaatgtgccaataggtaataggtaatttttctttctctgacttgttttgttttc

SEQ ID NO: 24275 - DNA, 122 bp, Homo sapiens
cccacattgcttcatttccctttccctccatctacctatcctctgactaattcgctgacccgttctgaagtgagctttcataacctgggcaccaggaatcctctgaaaggtgtacaagattt

SEQ ID NO: 24276 - DNA, 122 bp, Homo sapiens
acggactcccgcacccaccagaaggcctgcagggagacctctggggccgcttttcagtcacgacctctatgctccacgcccgtcctctgggcgccaactggtgatgctggagctgggactct

SEQ ID NO: 24277 - DNA, 122 bp, Homo sapiens
tcctaccgctcctccgctctgaattgtgtctggatctctctcattgtctcctgtttgctgcgggtagatccacccccagcgtgccctacaccctcttttacctcggtcctttttctcccttg

SEQ ID NO: 24278 - DNA, 122 bp, Homo sapiens
tcactgcttactgtagactcagcctctctgggatcaagggattgtcccacctcagccttccgagtagctgggactacaggtgcgtgccacctagtccagctaatttttgtattttttgtagg

SEQ ID NO: 24279 - DNA, 122 bp, Homo sapiens
cgcggccgtccggatctcctgattgctttctttcatctctgttcctttctcagccacaaacgcccgctaatgcctcttttatcacggaattaggggatttagggccggtcgcacaaaggggc

SEQ ID NO: 24280 - DNA, 122 bp, Homo sapiens
tgcactcgcagcgcgtgagtgcaattggagatcctggactcaagatgttttcatgaggaacgattccagcccgcggtaactccggccagtctgcagcgtggacgacaaaacaggcaccacgt

SEQ ID NO: 24281 - DNA, 122 bp, Homo sapiens
gttgccttgttaatcttcacaatatcctatgagacagatactgtttttatttccattttacgctgaaagaaataaggcaaaaggttacacagctggtaagtggcagctggactgtaaagcat

SEQ ID NO: 24282 - DNA, 122 bp, Homo sapiens
cttcccccgtgtggcggggatccagcagcccagccctggcggcgatccccgtgcagcgagcgtgaggcctgacgtaaaaaaaaaaagtatccccaagaagacggtgctgtaatcaccttcgg

SEQ ID NO: 24283 - DNA, 122 bp, Homo sapiens
gagcccctccgcccagcagccgccccgtttgggaagtgaggagcatctccgccgggcagccgccccctccaggaggtgggggacagccccctttggccagccgccccgtccgggagggaggt

SEQ ID NO: 24284 - DNA, 122 bp, Homo sapiens
tgcctggctccctgggcgcgcccgcacccggcgcctccgatctcctagtcctcctgatttcgatggctttcctgaatggctgactgtgggctgccctggacttggcccccggacagtcgcct

SEQ ID NO: 24285 - DNA, 122 bp, Homo sapiens
tacaagaccactgttaaaagcccggaagaatcctgcagctcactgtggtgggctgttttgcgtgtgctagagtctattcagcatttcagatggaaaagcctcagcattcctcttccgtgggc

SEQ ID NO: 24286 - DNA, 122 bp, Homo sapiens
ttgtctgacctagctcctcattaatgcccgggccacttagagaccgaatcatggggacagcggagttgtgccctttctgtgatgagacccattgaggcagaactagctagtccttattgcta

SEQ ID NO: 24287 - DNA, 122 bp, Homo sapiens
tccagggtaaacaccagtacacaaacaaagcggtgggggaggggaaagaaaaagtttttccgtttggtgttggggctaaaagggtcatgtcagaaagcagtgtgctctatgtgttcttaatg

SEQ ID NO: 24288 - DNA, 122 bp, Homo sapiens
ttgctggccccagccctgctggggatccccgcctggccaggagcaggcacgggtggtccccgttccaccccaagagaactcgcgctcagtaaacgggaacatgccccctgcagacacgtctt

SEQ ID NO: 24289 - DNA, 122 bp, Homo sapiens
agtatgctgcccaaaatgcttggaacagggcctgcatgggagaagctcccagtgacagcccgtctttattgtgagaggtcaggccaaggacatcccctaagacctcagagcacacaatgtga

SEQ ID NO: 24290 - DNA, 122 bp, Homo sapiens
ccagtgtatctgctgtcaggagctggtgttccggcccatcacgaccgtgtgccagcacaacgtgtgcaaggactgcctggacagatcctttcgggcacaggtgttcagctgccctgcctgcc

SEQ ID NO: 24291 - DNA, 122 bp, Homo sapiens
ccatgccacgcacctcccaggattagccccaggccgggaggctagaggccccacaaggagcgagcctgcgactgcgatccacaggcagagccacagaggcagggcgcgccctggggcccaag

SEQ ID NO: 24292 - DNA, 122 bp, Homo sapiens
atatactgagaaccggggcagcagccgtcacagtcacggagagactggcaatcggcatagcgatagtccacgtcacggagatggtggtcgccatggagatggataccgccatccagaaagca

SEQ ID NO: 24293 - DNA, 122 bp, Homo sapiens
tccttatccttcaccccaccccttagttgggcaaacaacctaaaccctcaggagaaacttcgcctttcagccaaagaataatacagatgacactgccaacctggaatattttgcttgtactt

SEQ ID NO: 24294 - DNA, 122 bp, Homo sapiens
cggggctgtagtcgaaggccagtgggaaggcatcctcgtccgggcccacagtggggctggcgttggggccgcggggcgccagggcgggggcctcggcggagcggtgctcacgggtcgtctcc

SEQ ID NO: 24295 - DNA, 122 bp, Homo sapiens
ggtaggggtggggtgggggtccggggatgctccctctatgagagaattgggtaaacatggcgaccgcggcgcccatttgcacacgctacacaaatgcatcgcattcccggttgtttgcagaa

SEQ ID NO: 24296 - DNA, 122 bp, Homo sapiens
gggctgaccatgtcaggggcaggaagcaaacctgtccaggcagggcccacctcaaggtgccgtacagataggggaacgcaggaggggatggcagcagtctgcctcatccctcaagccccagc

SEQ ID NO: 24297 - DNA, 122 bp, Homo sapiens
ccagcgtggtgaacacgtcctgcaggaagcggccctgctcccggatgttcttgtgggccacgttgcagttgcctttcttggacacaaagcgggccctccgctggcgggcacggtacctgggc

SEQ ID NO: 24298 - DNA, 122 bp, Homo sapiens
agcacggatttgctccggagcgtttcccactctgcgcagtccgcctgacctctcctcttgcggaccaagtgagagcaagtttcccgcacgtggcctttgacctgtcactacatcagcaggca

SEQ ID NO: 24299 - DNA, 122 bp, Homo sapiens
tttccaacaggagtatgacaacttttcaacttgagtgcacacactgtccccggaatcccgcgttccagggaggaagcgcctttgacagcgcgcgccggttcgtggggcccgacggcgtgggc

SEQ ID NO: 24300 - DNA, 122 bp, Homo sapiens
ggaagcactttccgcgatttctttccctgcactatcaatgaccagggcacaggcagcccacgatcactttcgaatacaggtgcaaaaaagggcaggtgagcccacgtcagcgtgttagctgc

SEQ ID NO: 24301 - DNA, 122 bp, Homo sapiens
aagatcaacaaggcatatagcttgcgcccgccagaagttccgcggcctccacacccatcccggcatactttgcgccgtgcacaggcaagccctggtgcgcattggccccttcggccgccgtc

SEQ ID NO: 24302 - DNA, 122 bp, Homo sapiens
actaagcgaccccacccctctccctcgggctttcctctgccaccgccgtctcgcaactcccgccgtccgaagctggactgagcccgttaggtccctcgacagaacctcccctccccccaaca

SEQ ID NO: 24303 - DNA, 122 bp, Homo sapiens
ttttattataaatgatacaaatgaacagattcaccaggcaggtcttgggggtgaggggcccgtgaagcctaagatactgactatcttgccctttacagaaaaagtttgatgatcctgagcag

SEQ ID NO: 24304 - DNA, 122 bp, Homo sapiens
gactttttacagactcgggcgggtgttctgcggccccccaggtgctatgggggaggggggcgttgaatggaattaaaccagaaagaaagcaagcggctccgtgtcctgcttcccctccttgc

SEQ ID NO: 24305 - DNA, 122 bp, Homo sapiens
gttcctccaggctcctgactgtccctatcaacccagatgtcctagcctcataggctttggcgagttaccttgcagttctaaagcttctgtttggtcatcttttaaatgatgataataactac

SEQ ID NO: 24306 - DNA, 122 bp, Homo sapiens
aactcggtggggaaaacggtgacaaatacagattccaggtctccatctagacccctgcaccggggagccccaggccctaggtccttcgcacacgcccctcccagaggggtcgggcaagcatc

SEQ ID NO: 24307 - DNA, 122 bp, Homo sapiens
tgagggacggcgtgggcagcagagagacacccactccaggaccgtccaggtgcaagcactcgggcccgcgtcatcagggccacatccccaaggcctgatggctgacactgaaatcttctgaa

SEQ ID NO: 24308 - DNA, 122 bp, Homo sapiens
ggcagtctgcaagcccatattgacagctgaaaaatattcattccctttcacctagtgattcgactcccaggaatccattctaagaaaacaaccagagttgagccatttcgttcttggcagca

SEQ ID NO: 24309 - DNA, 122 bp, Homo sapiens
cggggtgcaagtggaagatgagaagcggtaactcagcccctcctgacacgcggtgacccccgagcgagggctctttgtcaaaggcctgatggaagctcctagatcctgccggccctcaatca

SEQ ID NO: 24310 - DNA, 122 bp, Homo sapiens
atagtgaagcctccgtgacctgtgtaagctgcaggttgaggagaatgtttaaacagtaggcgagcgttcatacagtgtccctggactgcatttccttgcttacagagccttggagctgggcc

SEQ ID NO: 24311 - DNA, 122 bp, Homo sapiens
actaagtgaaggaaatgaccatgctcttctcccagctggatggcgaggccgggcaggaaccgcggaattcctgctcttcgttttcaaacactttgctgtcaagctatttgaataataaatac

SEQ ID NO: 24312 - DNA, 122 bp, Homo sapiens
aggtatgggtgtttcactgaacttatatcccatgttctccactggcctttgaaaaacacacgttttcttcacaaagcaaatagatgaaaaacatactggtatgggattcaagtttatcactg

SEQ ID NO: 24313 - DNA, 122 bp, Homo sapiens
ccctcctttacctgggatcaggtctaaaccctgacagggaagcttgccacagctttctcacgtctattgccaaaaatatccacaccgatcctgctattaacccctcaatcccgggatcacca

SEQ ID NO: 24314 - DNA, 122 bp, Homo sapiens
cgcgagcggcgcttccccgcggagcgggtggagtgtttactcgaaaacagcggttggcggcggcaggccccacgcgggcccgggctcctgggcattcctgggtgcctctgagacccgatgcc

SEQ ID NO: 24315 - DNA, 122 bp, Homo sapiens
tttattgcaacatggtttcccctttaaaagtgaccgctaaagcaggaaggccacgcagaacggcacagaagaaggctccctcagtactcaataatttaaagagagatcccagccggcccttc

SEQ ID NO: 24316 - DNA, 122 bp, Homo sapiens
tgagcacttctgtctgcagacgtgaacgagtgtgagctctacgggcaggaggggcgcccccggctctgcatgcacgcctgcgtgaacaccccgggctcttaccgttgcacctgccccggtgg

SEQ ID NO: 24317 - DNA, 122 bp, Homo sapiens
tttccaggtacgtccgtcacccctttctttgactcggaaagggaactccctgatcccttgcgcttcccaagtgaggcaaagcctcgccctgcttcagctggcgcaccgtgtgcacacccact

SEQ ID NO: 24318 - DNA, 122 bp, Homo sapiens
tgatagcctcatgggcgaatactcaagaacttaaagctctttacaaccaagccaaacccacgagcaggttccaccatgccttggccattgccagacaaaaccccattgtgtttttgcttgat

SEQ ID NO: 24319 - DNA, 122 bp, Homo sapiens
tatacccacagccctcctcacacaccctttcccttcctccctgtgtgccaagttcgcccccggagtcgtcgtttccttctttcccggcagctgcagcgacgacccacggcctgagagagccg

SEQ ID NO: 24320 - DNA, 122 bp, Homo sapiens
ggccgggagccaggcaagctcgctggggccctcggcggggtgtctaggcccggagaggatcgctgggagaccggcctcaagtgaccacctcccgagccccgggagccggaggcagcggcggg

SEQ ID NO: 24321 - DNA, 122 bp, Homo sapiens
agagagtgcaggaaaagtttttcctccccaacaatggatcaaacagcccaactcattcctcgtgtggaaccacttggaggtgtacattccatggtctcccaatgtttcctcaatggaactga

SEQ ID NO: 24322 - DNA, 122 bp, Homo sapiens
agcagcattcccctaagcacagaggttggggccactgcctggctttgtgacaactcggggcgcatcaacggtgaataaaatctttcccggttgcagccgtgaataatcaaggttagagacca

SEQ ID NO: 24323 - DNA, 122 bp, Homo sapiens
agctcctggggcttctcgtatttccgcttcttcctcaggtgcacgtcgtcagactttctgcgcagaaggccgtccggcggcaccttcttcgagtgctcatccgacctgcgccggggcgcctc

SEQ ID NO: 24324 - DNA, 122 bp, Homo sapiens
ggcttgcttcctgatctgttgctagggccgctggaccccgttgctaaggacccttgagatcgtgagcgcttggagtgtacccctcctttcctggggtagagggtcagtcgagagtagccttc

SEQ ID NO: 24325 - DNA, 122 bp, Homo sapiens
gtgctgaagacggggtagccacgaggtgagaggctctctggtgtagggtttaacatggaacgtagttttgtcacttgaatgcacggaaattggcgttttgacagttttctacgtttaggtgt

SEQ ID NO: 24326 - DNA, 122 bp, Homo sapiens
agcgtaggtcaggcaatgggaagcaaacttgggctagaagtctgtcaggaaccccaaccccgcacatgcgctttggtcagcctggccgttgggttttccccacgaactgctgcatctccacg

SEQ ID NO: 24327 - DNA, 122 bp, Homo sapiens
cgcctttggccgcctttccgatgatgccctcgggacgcgttggcaggaggaatccctgggcgcaaggcgcggctgggccagccccttacaaagccctacgagctgcggggacccaggccggg

SEQ ID NO: 24328 - DNA, 122 bp, Homo sapiens
gtcaggccctcgagtccgcttcctgcctgcttctctctacacgtgactcaccgcggacatcgaccaagtcatcgcgctctgccactgcgcctgtgtcctcgtcaggtcactccatctataga

SEQ ID NO: 24329 - DNA, 122 bp, Homo sapiens
aaaagagtgaccattggttgaacaccccagtacgaatggtctctacaaaatgacgtgctccgacggtgcgggtcctggggagggtgttgctgtgcaggacagagtccactcgctggtggttt

SEQ ID NO: 24330 - DNA, 122 bp, Homo sapiens
agggtttcagggttcctagaacctcggcccggacagagctggggctgaggtagccctgtccggagatgggggtgggtccttcctgtggcaggggtccgtagccccaggcctctccactccgc

SEQ ID NO: 24331 - DNA, 122 bp, Homo sapiens
ccagcgccaggcaaactgggggcagtgccgggaggctatctaggcaggcgtcctgcagggcgcgtttgagcgggctctgcaggtatcagtagaagtccgttggagagcgcccgggcagggcg

SEQ ID NO: 24332 - DNA, 122 bp, Homo sapiens
gcgcggcgccgcgcggccaacgggcgacaaccgaacctcccgccgccgtcgccgccgccgcgagcactgcctgcgcacttccgactatgcgccaggagcacttccggggcagagcctgagag

SEQ ID NO: 24333 - DNA, 122 bp, Homo sapiens
gacagacacccctgtctaaagccagcagtcatctggttcctgagatggacaccgctgacccggttcaggtcaaatccctagtctgttacgaacagtggaggtgacaggccccaggcccccaa

SEQ ID NO: 24334 - DNA, 122 bp, Homo sapiens
ggcctatacccactctatgccagtagcaacccctcctctcctgcacagttgtgacaaccacgaatgtcttcagacattgccaaatcaccctggcgtgaaaatgttcctggctgaaaatactg

SEQ ID NO: 24335 - DNA, 122 bp, Homo sapiens
ggaactgcgggcaaggtgtgtgagagtcggcgcttctgggtccaagaagcctccaggagccgctccccggttacctgggtctcacctgcttgaacccggaatgccgcccttccccctcaacc

SEQ ID NO: 24336 - DNA, 122 bp, Homo sapiens
cagaagcatgcggcccaggttcgccagcagcccaagagcctcaaagtacgtgcaggccagcgccccccgggccttccactccccattcctggggctctgggcccacccaacacaggcacccc

SEQ ID NO: 24337 - DNA, 122 bp, Homo sapiens
aatgtgctgggattacaggtgtgagcaaccgtgcccagccagaatgtagttttctgtatgcgattatcaaagaaatgctattgggtctgaacaaatattgaacacctctccctcgctctcac

SEQ ID NO: 24338 - DNA, 122 bp, Homo sapiens
agatgggccgccctcatgaaaccctaaaccagtgccaaaccacaccaatgtcatactcaacggaatttaagttcatttttcttcattttttttaaaatatgtaatgcttcatgaatttgcgt

SEQ ID NO: 24339 - DNA, 122 bp, Homo sapiens
gcgttcggtcggcaccgtggccgggaatcctgactgtcttggtgtgagcatctaatcacccggtgttggctacagggttaagaaacattcttggtcatctatacaaacattggaagacctgt

SEQ ID NO: 24340 - DNA, 122 bp, Homo sapiens
ctgtacacaggcgagatcagcacaacacgctctctggatgagaccgaagcaccgcgccaccgccttctggtgctggtgaaggaccatggagagcccccgctgacagccacagccacagtgct

SEQ ID NO: 24341 - DNA, 122 bp, Homo sapiens
acctgcccaatctgcgggtccagttgctagggcctccatcttgggggccagtggccgtggcgcccccggaaggggttgccgagtggggcattcacttccggtctggggcctgcggcggcggc

SEQ ID NO: 24342 - DNA, 122 bp, Homo sapiens
gtgcagaggccattctctacaatggcccacttaacagtttcagaacacaaatgtgcctgacggcatgaggtggccacgttcacattcatgcgaattccctgtggcacattgagatctttgca

SEQ ID NO: 24343 - DNA, 122 bp, Homo sapiens
tcatcctggcattagggttcaggagtagagaagggagactaagcgggacgcttcagtatgcgcccttggggctgaaggaacctccccgctaaacctcggtttccctgaccccaaagggcagc

SEQ ID NO: 24344 - DNA, 122 bp, Homo sapiens
ccagagtcgcccaggccccggttcgggttttaagagacacggccacggcccagaggcaaacgagccggccccccacgagcgacccgagtcacccccccgacccaggtcccgggacgctgagg

SEQ ID NO: 24345 - DNA, 122 bp, Homo sapiens
tctgcagaaggcaaaagttcccagaggcacccaaaccttgctggggaaaaggcttctggccgattcatgaagacccccagaccacacgtctgcatcagttttcctgactaaattggtgggtg

SEQ ID NO: 24346 - DNA, 122 bp, Homo sapiens
ttgctgcctgcttagtattgtggtcctgcccttagaagcaattattgcttcaaaccaaatcgtccactatagaagaatattggaaaagcttttctgaaatcagagcatatgagttcttaagg

SEQ ID NO: 24347 - DNA, 122 bp, Homo sapiens
gcctggccgggcctggaggtcacctggatgctggatccttgtctccacacccagctccctcgccccttcccggctcgagggccttgagctggacggcttcacctcctccagtggtgtcccca

SEQ ID NO: 24348 - DNA, 122 bp, Homo sapiens
gcccccttggtcctcatcactgtgtcctatgcccatgtggcagctgcagtcctgcgaatccgctctgcagagggcagaaagaaagccttctccacgtgtagttcccacctcactgtggtggg

SEQ ID NO: 24349 - DNA, 122 bp, Homo sapiens
tctagccagccgcgcacggacgtcggttcccagatgcgccaatgccaggtctctccagcccggctggccttttcagcagcagcagcagcagccgcaggaaagcggccagacaaatcccaccc

SEQ ID NO: 24350 - DNA, 122 bp, Homo sapiens
gtgtttccagtagtcatccaggctgtggtggacgaaggagatggtgagtgcgtcctcttccgtcctcctgggcgtgcaggccgtgcagggaggaagcacgtcttgagggaggagtgcttgca

SEQ ID NO: 24351 - DNA, 122 bp, Homo sapiens
aaagcaccatgctttgtaacagcatcggggtcgttgcaggaccccctgattacaataaagcgagaaagaagaactcctgacttaaaaacatgatattccttcagtgtaggaagcagcagtga

SEQ ID NO: 24352 - DNA, 122 bp, Homo sapiens
ggtaattaattagtccattaatgtccccaacaatgtccccaacctaatccgcaaggctgtcgccagacccccagtgaggctgtgccatcttctccagacaggcccgggctttgggctctagg

SEQ ID NO: 24353 - DNA, 122 bp, Homo sapiens
gaccccacccaaagcacagccctaggcagataggccccacagtcccctcccctcagactccgcaggccctccagtctgcatcggcaggctgctggcagagtctggggcaaaacatcacccca

SEQ ID NO: 24354 - DNA, 122 bp, Homo sapiens
tccagacccagtggctacaaactcttaataagcacagaagctgcttttccttcctccaagcgaaacatcataaaaagtaagtgacagcaattgtgaccctatctgtagaagtttatgagaac

SEQ ID NO: 24355 - DNA, 122 bp, Homo sapiens
ccaatgaaggactcaaactggacaccaaatccacatagttctgcctggcagcttcctgaacggacgatgacaaacaacctcagcccatggtcaatgaataagcactttgagaaagttactat

SEQ ID NO: 24356 - DNA, 122 bp, Homo sapiens
gaaaagagaatgctcatgccacttgaggaggagggggctgtagagatcacagcttctccccgcacctcatttgatagctaagggagctggcccaaggtcacacaggcagtaataagtggggc

SEQ ID NO: 24357 - DNA, 122 bp, Homo sapiens
agtgatccacctgcctcggcctcccaaagtgctgggattacaggagtaagccaccatgcccggcccttcatcctattttgatgtcagagaccacgtatggatatagtgctggatgctttatt

SEQ ID NO: 24358 - DNA, 122 bp, Homo sapiens
gtcttagcgcctgtctgacagtctccccggactccagctttgttctcattaggccaaacccgccctccccaggggcgtgaacccaggagtcgctggcaagttgcacctgccagccggatccg

SEQ ID NO: 24359 - DNA, 122 bp, Homo sapiens
cgtccctccacgcgcaccctgcctgtggtttccgtgcgcccccggcctgagggctctgggcggcaccttaacccggagggcctggaggtctgcacccgaccgccttgtgccaggacggtcag

SEQ ID NO: 24360 - DNA, 122 bp, Homo sapiens
actgacctttggagctcctgcctgttaccgtcctctctggacgcttttattgtaccagggcgatccccagcccaactgtaccattcgagtccctactcctgccttgctctagggaaataaaa

SEQ ID NO: 24361 - DNA, 122 bp, Homo sapiens
gcctccatgacaacgagggaagggctggggtggggccgagaaggggactgaagtgggaggcggcgccactgaagatggaaggcagctttctttatagacactttattaaaactgctacagcc

SEQ ID NO: 24362 - DNA, 122 bp, Homo sapiens
caagttcaggagcttgttcctaggtgactccggcacataggctggaaacactacactcaccgggggctcagccccgcacacctgtgtggggagggagcggggagcgtcggggaagaaggagg

SEQ ID NO: 24363 - DNA, 122 bp, Homo sapiens
tgctcatcagggttcgcctggggccactgagaccacgcgccggtgcccgccctcccgctgcggtccgattttctgaaccaaccaggcgcttccgggcgccttgccccagacgggcccaccgc

SEQ ID NO: 24364 - DNA, 122 bp, Homo sapiens
tcgagtgtggcgtgggcaggccagcagtgctgggggacccagcgccccctccacagctaccggccctgtgctaagtccctcactgcctggggccagcggcattggccgccactcagagtgcc

SEQ ID NO: 24365 - DNA, 122 bp, Homo sapiens
ctccaccctgccgtcccccgcccctccgcgtcccaccttcgttggcctacctgttggctccgcagacttctccagcgctgacccggacccagacccagacccaggcccgcgccgacacctcg

SEQ ID NO: 24366 - DNA, 122 bp, Homo sapiens
aacagacaccccccagaacactacctattaagaacttcggacaagaaacttccttgctgtcgtagaaaccaacagtgcagtcatgcggctgtgaaggtggaaggtggggaatcccaaaggcc

SEQ ID NO: 24367 - DNA, 122 bp, Homo sapiens
agagggaggagatgtaggtctgggcttccacagggacctggtattttaggatcagggtaccgctggcctgaggcttggatcattcagagcctgggggtggaatggctggcagcctgtggccc

SEQ ID NO: 24368 - DNA, 122 bp, Homo sapiens
aatcaaccccccaaaccagccaatcaggttttactgggaagcaggccttcaatgaatgctcgttgattaattgattgattgacaagggtaaattatgggtgttagcctaaccaatagaaaca

SEQ ID NO: 24369 - DNA, 122 bp, Homo sapiens
aaaaaaagtctcggagtggggcggcccgagcgacctaagggacggggcagtggcagcgaccgagggaaattagtcggggtgggggaacagggagacaagcccccagaatttaggaaactcct

SEQ ID NO: 24370 - DNA, 122 bp, Homo sapiens
tatggccttcctgctcgagaaacctctaggtaatctagttctctatgtcggcaccggcagcgaagtcagaagaagtctgagtgaattattaataagcagaattagccctttctccaattaga

SEQ ID NO: 24371 - DNA, 122 bp, Homo sapiens
atgatatggcaacatatgggaaaatctctcacattcaaaagcatgcaagcagctagctaacgctttctactaaaaactttgcttataggtattttgatgaatctagaattctcacaaagcac

SEQ ID NO: 24372 - DNA, 122 bp, Homo sapiens
cagaacgttaaacctccgcatctctgtcagcagggacaggcgaggagttgattctctgcacggtttgtgtgggaaggtggagaagggagcaactatactgggaacctcgccaggggtccaga

SEQ ID NO: 24373 - DNA, 122 bp, Homo sapiens
tcggctaggttcggtgcggtctgggcgcggggctcggagggagtcggcggtgttcggagccgagtcggtgctccggcggagagagccgagccgcttcggagggggtcgaaagcattcggaaa

SEQ ID NO: 24374 - DNA, 122 bp, Homo sapiens
caggcgcgaggctgggggcccgggccacccggctcctcctcccggagcctggtccaggcgcgctgcgcggagcccctccatagagcccaagtcaggaaacgcgtccaggaaaaaggaaatcc

SEQ ID NO: 24375 - DNA, 122 bp, Homo sapiens
gccatacttggacatgccttttgcttcccacctcttaggactcggctcttctgtaaagtacggtcaaggcagggtgggagtagttaacctattagatcttttcatttatttttaaatactta

SEQ ID NO: 24376 - DNA, 122 bp, Homo sapiens
ctttcaggtcggggagaaccagagcctggcccaggaacaagcccttttcaatcaggattccgggcgccttgtttccagcttccttccctcctttcctccacttgctggtaacattccaacat

SEQ ID NO: 24377 - DNA, 122 bp, Homo sapiens
cgagcttaggataacttcaggttcagctgaggcctctgaactgtgactccgccccgtggccgcatgcgtcggaactcctacctgccctttgcccttctcgaggccggtgcttgactggagga

SEQ ID NO: 24378 - DNA, 122 bp, Homo sapiens
acagctgctgaccctctataaccccacaggaactgcgcttcgcttccgaggtaaagggatcggcgcctcgtgggggctggtggccggacactggggggttgtgttggctggaggagtcagat

SEQ ID NO: 24379 - DNA, 122 bp, Homo sapiens
ctgaggcagggcaggaggctggacctcaaagcaggtgacccgggagcacctgcgcgctgccggaagtcaagtcacattccagtcctgcatttcctggcacccaactggagcccgtttttcag

SEQ ID NO: 24380 - DNA, 122 bp, Homo sapiens
cctggcacatataaacagccactttggtgaagtctgcctttaaacagcaacacgggacttcgggtagagccggtaaccagtttatcacacactattagttccaataaagggtgctgctacct

SEQ ID NO: 24381 - DNA, 122 bp, Homo sapiens
tggtccccgcggttcccggggctggtgccatccgtggtggtgctgtgaccgcttgcaaagcgtggaaggcatgggaagcgagcgtgtgtttgcgtgtgtgcgcgcgcgcgggtggtggtggg

SEQ ID NO: 24382 - DNA, 122 bp, Homo sapiens
agcgtgcctcacactggcagggtcagcaaaggtctggctgcagtcaggtcctctgttcctcgcgctggcggggtcagcagacgtctggccgcagtgaggtccactgttctctgcagggctgt

SEQ ID NO: 24383 - DNA, 122 bp, Homo sapiens
cacggcacaccttcaaactccactggtgccgagtcgtatccagcctttgtttggcatccccggatgcctggacctctcgctggaactcaacaccccaaacgctgcagggtgccctctcgcca

SEQ ID NO: 24384 - DNA, 122 bp, Homo sapiens
aacagcctcacccttccaggaagccctcctgaagctgggtccactgccccggctcctcaacgacatcagcacagctctgaggaaccccaacatccaaaggcagccaagccgccagagtgagc

SEQ ID NO: 24385 - DNA, 122 bp, Homo sapiens
tctccagagaattctgccgagtgggaaaagctgacctcaaaaagcctgtacatgccatgacgctgtttatggaactggcatcatcaaaccagagaccgagaacaggttggtggtttgccagg

SEQ ID NO: 24386 - DNA, 122 bp, Homo sapiens
ggaatgggtggggcattctggcacagtccctggggggctgaggtttctcagctgagaggccgacgctcagagaggctgggtgtctgctgagggtcacacaagagtggtgggggcacagagtc

SEQ ID NO: 24387 - DNA, 122 bp, Homo sapiens
gttacccagacccactgcctgagtgaggcagaagtgcagctgtcatctatttgtagcttgcgcccacagacaaacgagtccgagagccttaagtgatttgtatgagatccctcctatggcca

SEQ ID NO: 24388 - DNA, 122 bp, Homo sapiens
tctgaggagctaacgctgtttcctccctctaggtgcctgactgacagaagttcttgcccccggggagctggtgtggacagaggaggggtgagtgttctggaggcacagacttattctccttc

SEQ ID NO: 24389 - DNA, 122 bp, Homo sapiens
cgcctcccggcaggcaggccgttaaccgtcttccggaagacgctgctagaaccctccggccgctcctgcccgccatcgtccccgaacgacactcgctcaggtacccactaacgtgcgaggaa

SEQ ID NO: 24390 - DNA, 122 bp, Homo sapiens
gctagatggcgccagcagcctgtccgggctgaaccgccttcaccctcctcgttctcagggcgaggctggcccataaagaagtgactgtggaacaacaacaacaaaacacccagaaaaggctt

SEQ ID NO: 24391 - DNA, 122 bp, Homo sapiens
gactcggggagagggaaggggaggcgaagaccgcgcgcgcctcagacgccccggcccgaccgaacgcgcttgctctgtctgcgggttcctaaccttgaagctaggccagtgaggggcgaaca

SEQ ID NO: 24392 - DNA, 122 bp, Homo sapiens
tctctgtctccctctgctcaccttggggtttctctgactgcatcttgtccccttctctgtcgatctctctctcgggggtcggggggtgctctctcccagggcgggaggtctgtcttccgccg

SEQ ID NO: 24393 - DNA, 122 bp, Homo sapiens
cgcgcctgcctcccctgctgcaacagaggcctgggagtgccgggtccccatcgctcggagcggcaggcgctcgtgaaatgttcgtcaagaggataaatgaccatggccctggtctccgcggg

SEQ ID NO: 24394 - DNA, 122 bp, Homo sapiens
ctcccgagcccagccaacagcaggaacctgtacggaagacgggaagggcccggtacgcgccgtttgcaaaccccgcagaaaccagcggcgccaccagaaggttccgtctgtggagaagggcg

SEQ ID NO: 24395 - DNA, 122 bp, Homo sapiens
ccacgctggacccgattccagaagggcccaccttctgaagacacgaagaaacagctgacgcgagaagacagaaaacaggtgctgtccgcccggctctgggtctggagtcacccaactggtcg

SEQ ID NO: 24396 - DNA, 122 bp, Homo sapiens
cacaactatttctgatgtcatctgtagcctggaatagattcacgtgtgcccggcagcactcgtgtgtaatacatgtgtgagctcaccgagcactcacagccaccctgttcagataggcacaa

SEQ ID NO: 24397 - DNA, 122 bp, Homo sapiens
ccgcccgcctcggcctcccaaagtgctgggattacaggcgtgagccggcgtgagccaccgcgcccggccaagagaaaaacattcacatttaatatgaagttttacatgacataaggaaataa

SEQ ID NO: 24398 - DNA, 122 bp, Homo sapiens
caaagcccatttagttccatgcgaggactatttcctccacactgagagtctcaacgaggccgagaatagcatatgccagttggagtgacacttatttctccctctcccctttatagaatgtg

SEQ ID NO: 24399 - DNA, 122 bp, Homo sapiens
acctgggtggtctcaggactccagcggcctgttggggtgaagtggggtggggtcggggcgcggcacagcttcccaaggaagtcacaggacctcgcctcgggatattcagaagtgctagtcca

SEQ ID NO: 24400 - DNA, 122 bp, Homo sapiens
cgttcccagccaggaccctcagctgtcctctcaggccccctgcgacagctgaagagtgtgcgggggaggggactaggggtccgggcggcgctggtcacaccctcgttgctctcactcagggc

SEQ ID NO: 24401 - DNA, 122 bp, Homo sapiens
tagctggaattacaggcacgtgccactatgcccagctaatttttttaatttttgtagggacggcgtctcactgtgtgagaccagctcaaggtggtcccgaactcctgtggctcctcaggctg

SEQ ID NO: 24402 - DNA, 122 bp, Homo sapiens
tctttgagtgtggcaaccaagtctttgtcatctttctgtttctcccctaccccagcacctcgctgagtgcctggaatgtgagaaaaactccattaatgtgtgtggaattaattatcaaatta

SEQ ID NO: 24403 - DNA, 122 bp, Homo sapiens
gagtcaaaggatctttttacaaagctatggttcacagcagagccacattcctccagaactcgtgtagagttgcttgtctccaaagccccacctgggtttccaccatatgctttcggtcaacg

SEQ ID NO: 24404 - DNA, 122 bp, Homo sapiens
gggaaagagagagggtgctccgagggggttgtgggaggtacagattccctgtggcacctccgactttttctacctatggtacccaaggtgactctttttaggtgttcctacaccattgagct

SEQ ID NO: 24405 - DNA, 122 bp, Homo sapiens
cctcactatctgcctaaataatttctttctacctcctgtatcacaaggcaactctctccacgtctctttatgtcccagcacccagaaaggtgcccagcaaatgaggagttgcttgaaaaata

SEQ ID NO: 24406 - DNA, 122 bp, Homo sapiens
ccaggtcgccgaagacccaggggtagtggaaccacacgaagctgtagagctccaccggcacgccgaccagcagcagcagcaggcccgcgagcgccaggctgagcacgtggtggcgcaggcgc

SEQ ID NO: 24407 - DNA, 122 bp, Homo sapiens
atagcaatcattgcccctgtttcgattgacctgcttactgtctttaagttgtggttgacccggagttactgacgaatgcaggggtttttttttttattccatttcccgaaggggaacaaaag

SEQ ID NO: 24408 - DNA, 122 bp, Homo sapiens
ctcccgcagctgcgagcgcagtcccacgatctcactcaacttctgcgacacatccgcctgcgagtccttcagctgctgcttcaggagggagatctcgccagccttctggcacacctgggcag

SEQ ID NO: 24409 - DNA, 122 bp, Homo sapiens
gagggagcggatgcagtgagcagcctccgcagagaaattgacaatttaaccagggacctgcggcagagacaaggcggagacactcccttgcccaggaaagccgccagagtccggcttgtacc

SEQ ID NO: 24410 - DNA, 122 bp, Homo sapiens
ccgcacggatgatcgagccggcgtcgcgcttacctcgcagtcctcgtacttgatattatccgtcaatttccaaagcattttcatggatcggcgtgaacggatatgcccctctcggtctcgca

SEQ ID NO: 24411 - DNA, 122 bp, Homo sapiens
cgggaaagagacagagaccgtgaccgagagcgagagcgagaacgagatcgggaacgagagcgagagcgggaccgagagagagaagaggaaaagaagagacacagctactttgagaagccaaa

SEQ ID NO: 24412 - DNA, 122 bp, Homo sapiens
cgagagactaggaatcaagagatttcaccccacgcccggagctggcaggtcaggtctggccgttgcgactggaggagacactcaccttcacctagccggcgggggcgggcccgcggcctcca

SEQ ID NO: 24413 - DNA, 122 bp, Homo sapiens
ggccttcccatctgaggccagcttcagtacaggcctccaagcccgggcttgttttggccgcgacgtcacttccgatttcttctttcgccttctggctaaaaaacgttccgcagcaatgcagc

SEQ ID NO: 24414 - DNA, 122 bp, Homo sapiens
gaaaggctggaaggaccagcccagctggtgctgcctggcttccatctccccgtgagaaaacggagagctgtctggtacaagagcttgcgaggtcaccactaactgatgacagccatttccaa

SEQ ID NO: 24415 - DNA, 122 bp, Homo sapiens
caccgcccaggctttcggggaatgtctcccaagtgctccgcgctagctcgtcccccatctcgggggccaaggggccatctacaaagtctgactcatctcgttgcccactgcagcagaagagt

SEQ ID NO: 24416 - DNA, 122 bp, Homo sapiens
ccgctggcctgggagaagtgctgcacgtgcgtggcgatgccctgcacctggccgtccacacgcttgagctgcttgctcaggtcctccacctggccgcccaggtccttcacttggctctccag

SEQ ID NO: 24417 - DNA, 122 bp, Homo sapiens
ccctgtgcgtggcgagtgagcattgcttttcttggcgccccttggagctgtggctgccctcgcgtgcctggcctctcccggggctgagcccttcgggttgaggcctggagcccccgggcgca

SEQ ID NO: 24418 - DNA, 122 bp, Homo sapiens
gcctggggctcccggggtaaagatgtccggcaaaggcaggatcaggccgtgccacgcggccgccggcctcaccccagtgccctccacgctgggcggcaaggagggcggccgcgagcccaccc

SEQ ID NO: 24419 - DNA, 122 bp, Homo sapiens
acctccgagaggggcgcggggagaaagggagcgccgtgggggcggggacccttcccggcccgcgccctgagccctcagcctcgcacaatgagtttagcctggctccatccggaccgccctct

SEQ ID NO: 24420 - DNA, 122 bp, Homo sapiens
gaggtactaggattagtgtttgcaaagcaaatggtggctggtagtttttcattatagagacgaatgagagtcatacattggaaattttaaaatgcattatcatgaccagccataggcttatc

SEQ ID NO: 24421 - DNA, 122 bp, Homo sapiens
gagatcctggctcattgggttaaagacaagcagtgcctcttccagggccttcttccctgccgtggagatgcgcgaccaggagtgcacagctttttcctccacatgctgaaccaccacactca

SEQ ID NO: 24422 - DNA, 122 bp, Homo sapiens
gctggggctcgcggggcactgtgtgggtggcgtggaggtggaggcggtgccaggtggccccgagtccaccccggcgcagagggggtggccgcgggagaggcgcgggtggcgaccggtccgcg

SEQ ID NO: 24423 - DNA, 122 bp, Homo sapiens
cgaggaatgttaacttaatctctcaaaagtttgtagcgggtttggctagttacgtgataccggagggctgcctctaacaaccttccccatccagttaggtatctcgtgtgcactttctttcc

SEQ ID NO: 24424 - DNA, 122 bp, Homo sapiens
atggggcggctttcagcggcctccacccgcgcacccctccaggcccacctctcggcggttcgtgcagcatgttctttactgggagtgggatgacaccatgcataggctcctgggctccgcag

SEQ ID NO: 24425 - DNA, 122 bp, Homo sapiens
caagaggcagaggccactctcccacagggccactgctcccagcaaagacttgcccttgtccgtagctccctgcgggtggcgctgtgtctcatgcattttgcattgtccatgcccttcacagg

SEQ ID NO: 24426 - DNA, 122 bp, Homo sapiens
gagccgcgagcacacagaaaaggatgtcttcatcgccaaccgggatggaacgaacccgcccgctcagggagtactgagaactaaagggtccctccagcgccggccgcagccagcatgccttg

SEQ ID NO: 24427 - DNA, 122 bp, Homo sapiens
acagagccctctatgcctgctttgaggaatccactcatgaaactgtaaaaacaactctcacgaaatgaattgcaagaacatagcactgaaaaaccccaccctctccaagtgcagacgacgtg

SEQ ID NO: 24428 - DNA, 122 bp, Homo sapiens
ttatcactgcccccttctaaaaataaataggtcacctcttactcccagtactgtgacaggcggctggaagtgagccctgcccagctgccccgcattctctctccagtcctgtgagaaggtgt

SEQ ID NO: 24429 - DNA, 122 bp, Homo sapiens
ggtcccacggggccaccgtgccttcctctctcagcctggtaactgtaaacccagtcaaagcggatgagggaggagtccaatggaagctaaggtcccatcactgctgctgtgcagctggaagg

SEQ ID NO: 24430 - DNA, 122 bp, Homo sapiens
ggggctgtgtgtgatggggatgtgtgtgcgtgtgcgcgcctctgctcgctttctggagctcgctgctatttcaggaagcctccagtctcctcctccttatgtaaataaacatgacagatccc

SEQ ID NO: 24431 - DNA, 122 bp, Homo sapiens
ggccaccatagaggaagctgtagaggccttgttcttcaggatccccttcactggccagtgcgaggcagtccaggccgccatttctgggcgctctgtctgttggctcagggtcgctgcttggc

SEQ ID NO: 24432 - DNA, 122 bp, Homo sapiens
acctagagaggctgcctccgtgctgtgagcggagatccgatgccagccgccgccccactgcgaccccagccccagccctagtgctgtcagcggtccactgggaggaaattagcctttcctcg

SEQ ID NO: 24433 - DNA, 122 bp, Homo sapiens
ctggccgctgagtctggctgtcttgcctggtgtcactccctacctgtgaactgtgcaccccgtggttacactgtgggggaactgatggtctgcccgactgctgggactctggcttatgcttt

SEQ ID NO: 24434 - DNA, 122 bp, Homo sapiens
ttttacattatcattacttctcaccatcaaatcccacgtggtttttctccagtcactgagcgttccgtctaaagccacatacaaaacagtgtgttgctgcacagttagggttgaggaaatct

SEQ ID NO: 24435 - DNA, 122 bp, Homo sapiens
gggcacagccccgctgaggcaggatgttcacgtccaagtccaactcggtgtcgccctcgccgtccctggagcaggctgactcggacgccctggatatcagcaccaaagtgcagctctacggc

SEQ ID NO: 24436 - DNA, 122 bp, Homo sapiens
acacacgcagcagcacagggtcgtgcactaggaacgggtgagcttcgcggcgtgcacactcggcgagactcctccaggaaagccggggagccgcgcgggatttagctctgcgtccagtccgg

SEQ ID NO: 24437 - DNA, 122 bp, Homo sapiens
cccagaggccctgggaaagctcttccctggcctctgcttcctctgctttctggtgacctacgccctggtgggtgctgtggtcttctctgccattgaggacggccaggtcctggtggcagcag

SEQ ID NO: 24438 - DNA, 122 bp, Homo sapiens
tcgccccgaagcaaacccaagcgccgaaacccctagagtaacccttagggggttatctggcggacctcctcattgtacagatgaccaaattgaggcctggaattccgaatggccccagtccc

SEQ ID NO: 24439 - DNA, 122 bp, Homo sapiens
ctcggctccctttctccctacttgggtaaagttctccgccctgaatgacttttcctgaagcggacattttacttaaatcgggtaactgtctccaaaagggtcactgcgcctgaacagttttc

SEQ ID NO: 24440 - DNA, 122 bp, Homo sapiens
ttagtggcaaagcgagcagggtgcgtggcgtggagagcgcccccttccagtcacgtgcagcgttcacttgttctccaggcaaggattagagccgaaggtgaatgaggcacagttcctgccgt

SEQ ID NO: 24441 - DNA, 122 bp, Homo sapiens
ctcgttctttttcgtccttttccccggttgctgcttgctgtgagtgtctctagggtgatacgtgggtgagaaaggtaatctggggcaatccactgccaggtgaaatctggggaccccaggtc

SEQ ID NO: 24442 - DNA, 122 bp, Homo sapiens
cccttttgtagagcaccgacctccctgggtgttggtaaaaatcaaaagtgggagggtgtacgtaaaatgctgaacagaatgcctaacctgagctcataatctactccctctgacctgtcaga

SEQ ID NO: 24443 - DNA, 122 bp, Homo sapiens
cgctcggaaggcgggctcctccgtgagaagccggcccctgaggtgccaggaggaccgcgccgcctgcttggcatccatccatttgttctaatgagagaaggaatgaacgggttgactctgca

SEQ ID NO: 24444 - DNA, 122 bp, Homo sapiens
acaaaagcatagttgatgaaatggttcgatgcttgaagatgtcagactgtagaatctctacgggtaagtgtgtgatttcctcagtgacatcacatttgcctgcagagattttccagtctgcc

SEQ ID NO: 24445 - DNA, 122 bp, Homo sapiens
caagtgtttaatcgggaagaagagagaagttgggaggtctctgaggtccttatcttcctccgtgtccctcaatgattcaatacaacggttcacctcgtagtggactcttccataaaaatttg

SEQ ID NO: 24446 - DNA, 122 bp, Homo sapiens
tggacagccagggacggttctgggtgctaggaattcatcaccaacaaaagacaaaaatcccgtgttcctggagctgactttccggagcagcgctgtctgctggaacattctacactgatgga

SEQ ID NO: 24447 - DNA, 122 bp, Homo sapiens
gaggccactgcatttgagacacaaaagccaggatgtcaggccctgtggccccctgggtgccgcggacggcccaacttaaccacctgcgaaaaccacgcccgctgggactctgcagcgccact

SEQ ID NO: 24448 - DNA, 122 bp, Homo sapiens
aactttaaagattccaagcactgactatattttggttcctcccactacttcagaggttcgcgacactagactaatttaacattttattctacaaaatagcaccgaacttaggcatatgtgga

SEQ ID NO: 24449 - DNA, 122 bp, Homo sapiens
gaatttcatgttcacacaccaagctcctcttcaggagaaggaggtggaattttacctcagcgtgtttaccgaaatcggcaggttgcagtggacttgaatcaagaagaactgcctcctcaatc

SEQ ID NO: 24450 - DNA, 122 bp, Homo sapiens
ttataaggcttgcagtaatggggctgtcttttaagttacagctgctgcgcttttggctttcgctaacattacatcctattaaagagctacattaaatgcatgcaaattgccggagcgacggc

SEQ ID NO: 24451 - DNA, 122 bp, Homo sapiens
aagtgctgggattacaagcgtgagcaccgcgcccggcccttagatcgtgacaaacgcgggcggcctgtcctagaactgtcagaaccactgtccctaaagaggcctcgggcgggcagtaaggg

SEQ ID NO: 24452 - DNA, 122 bp, Homo sapiens
tcacccaggattggtagaaacctaagagcgcatgcgcactgagaggataccgctaaaaatcgccttcaaaattgcttaaaaggcaaactttaacaatgcgatctaagagtcgtagtgactgg

SEQ ID NO: 24453 - DNA, 122 bp, Homo sapiens
agaggtcagacagagatttgaagatgctatactgttggctttgaagatggacccaagaaacgcaagcaaattgtagatgcgggagaaggcaaggaaatggattcttctctagcaccctaaga

SEQ ID NO: 24454 - DNA, 122 bp, Homo sapiens
gctggccggtgcccaggtgagcgacctgacgggtcgctgcccgcctcaacctcgctccttcgactagctcctagaagccgccgtcgacaagcttctgtcacagagatgctcctctccgcaag

SEQ ID NO: 24455 - DNA, 122 bp, Homo sapiens
cccatggtcctggcaagagaggagggccaggagagagcttcacccacctgctgtcctgcccgtgtgacatccgcaggtgctgccatggccacgactgttgttacactcgagctgaggaggcc

SEQ ID NO: 24456 - DNA, 122 bp, Homo sapiens
gccacccatgccactcaccccagccgaggagaacaaactttcttagggaaggcacctctgcggccgtgctggctggaccaggaggagcagacggctggacagacagggggactggggcacgg

SEQ ID NO: 24457 - DNA, 122 bp, Homo sapiens
tcggaggacacagggggttagagagctctctgcaaatgccgaagacccaagcaggcctgccgcctacccctccccgccccacaactgctaggcgcggagaccgcggcctgttccccgcgcct

SEQ ID NO: 24458 - DNA, 122 bp, Homo sapiens
gggccgggcgcttgtgagccgacctgctccagagcagctgtcggtgctgtccgtgggtcccgctgcgacctggcaagggcccactggggatgagtggaggactggaagtgtccaaatcccac

SEQ ID NO: 24459 - DNA, 122 bp, Homo sapiens
gcggcccatgcagcttcccagcggggtccatcaccacgtgcacagtaattcagtgcagcacgtgcagcttctcagcagggtccatcaccacctgcacagtaattcagtgcaggccatgcagc

SEQ ID NO: 24460 - DNA, 122 bp, Homo sapiens
gttacttttactgctatactttaaaatttcttcatttgccactttttaggtttgtggtcccgggcaagtttaatttcttttcaggattctcatttgtataatgaggacaacagctgttggtt

SEQ ID NO: 24461 - DNA, 122 bp, Homo sapiens
gcttccttcccctcaccaggtgaaggactcagaacaaaccaaaaagcagctccaagcttgcgatcgcggccagttcctcacggaaccaaccgcagagccgccgcaggttcgcaggatcggag

SEQ ID NO: 24462 - DNA, 122 bp, Homo sapiens
cgactgtcattatcttttatcaaataatctgtccaacagcaaaagcacaacagcaaaatacgtggaaagcattcaaagcatacattgtgcctgcttctattttccaatgcggaatgtaggca

SEQ ID NO: 24463 - DNA, 122 bp, Homo sapiens
cgacggcaaccccagggccaaggggagagtgagggtagttcctctgatgaggatggaagccgccccctcacccgcctggcccgccttcggcttgaagcagaaggaatgcgaggacggaagag

SEQ ID NO: 24464 - DNA, 122 bp, Homo sapiens
acccctccttctacctggtctcctttccaaagccagctgttctccagacaatggggtgggcgggggcgggtgtcctcctccttctcagggaaaatccgacgctgagcccatctccagagatc

SEQ ID NO: 24465 - DNA, 122 bp, Homo sapiens
ggaggctgaggtgggaggatcatttgaactcgggaggtggaggttgcagttagccgagatcgcgtcagcctagcaggctgggagacagaacaagaccttgtcaagacagaaagaaagaaaga

SEQ ID NO: 24466 - DNA, 122 bp, Homo sapiens
gaggaacgctactgagcagagctgtgcggccccaaggccggctccaggcaggcggggcaacgccagctcccagggcgggaggggacgggggaacagcccctgggaggcgccagggtcgtggg

SEQ ID NO: 24467 - DNA, 122 bp, Homo sapiens
gcgcgggcgagtggagggcgcgcctgcacgcaggatcccgggctgggcaacggcctagaccgcctctcgccaaacctcccacgccagcgccagtccgacgaacaggagctggtccagcgaac

SEQ ID NO: 24468 - DNA, 122 bp, Homo sapiens
cctgtacataatcagtaaaactatattagaaataaaagcttctcaaaaatcccaagtgctcgttacccaaaaaatgatgatagacgggggtcccacaaatgtgtagttgtgtatatgtcata

SEQ ID NO: 24469 - DNA, 122 bp, Homo sapiens
ataattttgcaaaggcggtttcaggacagggcaggaagttgtctgtaaccagcaggtgctcgacaatgaaaaaaggagagtaaggccacgcacagcatctccacatctaaagtcccgaggag

SEQ ID NO: 24470 - DNA, 122 bp, Homo sapiens
tcaatgggaactcacctgacattggaggcagacttgggacatatcaaattgcctatgtcacgagtacctttgataaaatgatctcagtatagctaatttctcttgagttatgtctcatgata

SEQ ID NO: 24471 - DNA, 122 bp, Homo sapiens
atgtgcaactttttctattagcaatcactgagctgcatcttagaccagattttttgtcaacgtcccagtgaaggttgagaacccctcttttccctccctttccacaacccaggaaaggtgaa

SEQ ID NO: 24472 - DNA, 122 bp, Homo sapiens
ggccaccatgacggaacaagccatctccttcgccaaggacttcctagctggaggcatcaccgccgctatctccaagacagccgtggcatcgatcaagcgggtccagctgctgctgcagatgc

SEQ ID NO: 24473 - DNA, 122 bp, Homo sapiens
ccgagagaccggggctgctcttggtgccccacaccagctccatcagctctttagtcagttcggacatgatgaggaaccggcgggcggatcttcgctttgcggactcctgccccggaacatgg

SEQ ID NO: 24474 - DNA, 122 bp, Homo sapiens
gggcctcagctgagtccaggcctcggggacagtccgtgcagcccctcctggggctgggggcgggcacttgtcccagccacgtttctgctgactgagcagccttcttcatgagctcacgcctt

SEQ ID NO: 24475 - DNA, 122 bp, Homo sapiens
ccacagagggcacctagcaagcttgctttcaaggtcccatcaacaaatgagaagggcagccgaggacagattgacagaaaccccactatgttgcttttcttttttttttttttttttcctga

SEQ ID NO: 24476 - DNA, 122 bp, Homo sapiens
cgtcaagtacacaaagtaactttgcgggatatttagggtactattcattcactcttcctgcgtagaagatatggaagaacgaggtttatattttcatgtggtactactgaagaaggtgcatt

SEQ ID NO: 24477 - DNA, 122 bp, Homo sapiens
ggctgaagagggcttggtcttgctgtctcagggtggcagaggtggaagatgcggaggaggcgggaggaaaggcaggccactcagtgtaaatttactgaaaaaaattcacatataagtggaca

SEQ ID NO: 24478 - DNA, 122 bp, Homo sapiens
gtgacaaatctgggcttcaaattcatagtctggcttctgtgtctatgcttttagccactgcgctgtgttgcttctcttacatttttacattagatctttattaaacatataaaaatgaatat

SEQ ID NO: 24479 - DNA, 122 bp, Homo sapiens
cctgacaggtttgtctggtgagggcttcctggttcacagacggcgccttctcactgggtccgcacacagtggaaggagcgagggagctctctgtagtcccttttatgagggcacaaatccca

SEQ ID NO: 24480 - DNA, 122 bp, Homo sapiens
cacctccttccggtctgaacagtgaactcctccgcatggactcacgggttcacctccttccggtctgaacagtgaacgcctccgcatcgactcacgggttcacctccttccggtctgaacag

SEQ ID NO: 24481 - DNA, 122 bp, Homo sapiens
acggcggcgccacccgggacatccagggccccgaggccctgggcggtccccacgcgagatcgcaaaccatgacaataggcagtcacccgaggtcaaataaaaacggagtgggtcccccgcgc

SEQ ID NO: 24482 - DNA, 122 bp, Homo sapiens
aagttagggtcagcttcaaaaatactcacatattattactctcaagcctattgagatcaacgatcaaatccgctgtcactcagccaggatgaactgggattggtctgccttcccccagataa

SEQ ID NO: 24483 - DNA, 122 bp, Homo sapiens
ggctccccacccccctgccggcactgcccgctcccggggggcttctggcagatcctgctccggttgatgaaaacacagcttcaagttgtaaaaagtgctgatttaacagaaggattttcagt

SEQ ID NO: 24484 - DNA, 122 bp, Homo sapiens
tgtgcagggctcaagtcccggtgggaagagacagtgtgggctgagcccccctcccccgctcgcctctccagggcggcctcccggcttacagcgagctcccagcagctggggggtgcagggtc

SEQ ID NO: 24485 - DNA, 122 bp, Homo sapiens
agcacgcctcccaggttcgtgaggcaagtccctttcctggctttttggcgtcctcttgtgcggtactgacacctactgctcttactaagtagtgcagcctcctcaggatccccggcatcccc

SEQ ID NO: 24486 - DNA, 122 bp, Homo sapiens
atacactcctggcagctgacgtagcagcaccagtggaagatgcagtggcatttttccttccgcttctccgtcctcgtgttgtggccccggccacagcagagcagatcgcagccatcgatgcc

SEQ ID NO: 24487 - DNA, 122 bp, Homo sapiens
cgaggttactcccggtcgccggcgctggggttactggggcatgtaacggggaggcgggaacgcccgcgccgcctttcgcgcgccccctaacggcgcctcccggcccgttcttaaattcttag

SEQ ID NO: 24488 - DNA, 122 bp, Homo sapiens
gtcaccccagtcagtgtgggaggggactaaataagggcatgtatcccaggaagtagggatcgtcttggatgccggctttcatgggtactcaaatgaaacaataattccatcagtgcatgctg

SEQ ID NO: 24489 - DNA, 122 bp, Homo sapiens
cgcacgagtgggcgggggagggacttatgattcttgccaagctgacagtgccccctcccccgcccctatttcttcaaccttcctgccgttttaaccctttactctcctgcttgtcaggttgc

SEQ ID NO: 24490 - DNA, 122 bp, Homo sapiens
ctttgaggaggagcaagagaggaagctccaggagctggcggagaagggcgagctgcgcagcggctccctcacacccactgagagcatcatgtccctgggcacgcactcccgcttctccgagt

SEQ ID NO: 24491 - DNA, 122 bp, Homo sapiens
ggaagctcccgtggaggacctgagaggtgtgcgggacaaaactggctcattacctctcagcgagcacaaacactgaaggcccctgcacgggaagcccactcagcggctgtcatcgcagcgag

SEQ ID NO: 24492 - DNA, 122 bp, Homo sapiens
gccagtctgttccagaagatgccttacatatatcaaggctattttagggtgcggcaggcccggcaagaggagggtgaggggctctgtgctgatctggttacgaccatgtgcagggacagtga

SEQ ID NO: 24493 - DNA, 122 bp, Homo sapiens
gcgcccagccgcgagtgtacttattattactagttttcacttacctaatttttacaggagcggcccttgcctaggtctctactctctcctaccattcttcctgtccaataattctgctcgtt

SEQ ID NO: 24494 - DNA, 122 bp, Homo sapiens
caatcaagtcctttgggctcacatagatcttggacactcccaagtcagacgtgatctctccggggtactcgacctgccacgtgaccagctgtgtggctggcaggtcaccaggctcttccacc

SEQ ID NO: 24495 - DNA, 122 bp, Homo sapiens
atgaggagacccagtgtacggtagcagcaaacaagagaaaacacttaggaacaacctaaccggcattcaggacctctgtggcccaaggggaaagccggaaggacattgttggtctaacggat

SEQ ID NO: 24496 - DNA, 122 bp, Homo sapiens
cttgtcctgtccccctatgatctgttcttatatagttgcccacgttgttttaaaatattacgtagttaatactactatgtacccagcactccactaagacttacctcaaaaattagatgtca

SEQ ID NO: 24497 - DNA, 122 bp, Homo sapiens
ggctggtgacaggtcagctgcctcgccccgagggtgggggaagggcgcgctttccatccgcgtactgggacaggagtttgggtgcaaactagtaaaggctatggtgctccctttacacccaa

SEQ ID NO: 24498 - DNA, 122 bp, Homo sapiens
cggactgtgtcccgcccctcccgtcagcgccccgccctcgtccccgccctgccccgcctccggccccgcccccgccgcaaccagccttgcctttgatgcgccgcaccggccaatgggcgcgc

SEQ ID NO: 24499 - DNA, 122 bp, Homo sapiens
cctcctcctcaagcccagattatttatcctccctccggcctgggctgctggatgcagcagcggctgggcttggtcccaggagcagggagagtgcgctcccggccctcctagccgcgtgcccg

SEQ ID NO: 24500 - DNA, 122 bp, Homo sapiens
gtggcggcgggacaccccgcgcaggccaacaaaaggaggggagccgctcgctcccgcttccgcgttttcattcaacttcctgggcctaaagcgccctccagcagcctgcgggccgccatcgg

SEQ ID NO: 24501 - DNA, 122 bp, Homo sapiens
gaaggtatccaacttcccagtggtgaatccatacacatctgtagcaacctcaattcttgccgcctcagaagaaagaatttgaccgagggtcataaggcagaaaccagacagaggcaagttgc

SEQ ID NO: 24502 - DNA, 122 bp, Homo sapiens
cactgcagcctcaaacccctgggctcaagcaatcctcccacctcagcctgccaagtagctcgggctataggtgtgcactaccctagcgaatggggccttgctgtgtttcccaggctggtcct

SEQ ID NO: 24503 - DNA, 122 bp, Homo sapiens
agaaacctcccagagaatcagttgggaggtagaaaaacctgaactacagctgacaaattccgggaaactgtgtgaacaaatctgagataaaaattccaggagaacccagtccacggaggcct

SEQ ID NO: 24504 - DNA, 122 bp, Homo sapiens
agggcttcagtcgaagctcatcccttattattcatcagagaactcataccggggagaagccgtacaaatgtaatgactgtggaaaagccttctgtcagagttcaactctgatcagacatcag

SEQ ID NO: 24505 - DNA, 122 bp, Homo sapiens
gggcgtcgaatgtctgtctgtggcttctgcaggtgcaagctgtcggtggatctactattccggggtctggaggagagtggccctcttctcgcagctccactaggcagtaccccagtagggac

SEQ ID NO: 24506 - DNA, 122 bp, Homo sapiens
cccgaggatgtcatctcagagggccgggggaagacccactgaagctgggcaggacacaggcgagctcaggtgatgccggccaccagcaatgcctggcctggtagctccgcttctgctttcac

SEQ ID NO: 24507 - DNA, 122 bp, Homo sapiens
agacagtggttcccaacaatgggttcctgacatgtggcgtatgcaatcagatattatgtacgtcccaaataataagaactcaaataataaaaatatgacaacttgaaaaatatgtacttaaa

SEQ ID NO: 24508 - DNA, 122 bp, Homo sapiens
accttcaacaagatgaactcatgtagttaaaattccagatcacatcacttctttaaaaatcgctcctagggactttgctctctggttttctgtgccttgctgtcatctacccatccttccca

SEQ ID NO: 24509 - DNA, 122 bp, Homo sapiens
ccctcaacacaagccaatttcttcacctggttttcaaacagaatcagccatctgtttcaacgctggaaaaaaggcaggttgtgctgaacttactgagacaatacactgatctccaacatggt

SEQ ID NO: 24510 - DNA, 122 bp, Homo sapiens
gagtgagactttgtctgtcttagaaaatttcagaccttcagaaaagactagtaccatagacgatatatgtcaggggcctagaatcatccatgatgaacattttgccacatttgctcactctc

SEQ ID NO: 24511 - DNA, 122 bp, Homo sapiens
tgagccgttgctgctacgagtccgcggggtgtagaagtcggggctcccggtgtcgttttccgagcccaggagcttgccctgggactccaggctggagctccggtgcctaaagtgcagtgcga

SEQ ID NO: 24512 - DNA, 122 bp, Homo sapiens
gtcattccctacacacgcctgtgtgtcctcttcacacgtctgactggagcgtcggcctcccgcatttcccggcctcctcgccgccctgccccgcctgctgctgtgtgggtgtcgggctggct

SEQ ID NO: 24513 - DNA, 122 bp, Homo sapiens
aataataataattaaaatctagtgagaaagcaaagtaaactcaaggaagtcctggctttgcgattttgttttgttattcctaagcactgcctcacctgctctagcgtgggagctgagtcgtc

SEQ ID NO: 24514 - DNA, 122 bp, Homo sapiens
cgttcccaaaggtggggtgtgaaccttatctcctctccctctgtgcctgaaaaatatagacgagttgagagttttctgcactcaagggtgagaacatccaaccgtttggaaacatgtcaccg

SEQ ID NO: 24515 - DNA, 122 bp, Homo sapiens
tgagtttacttaagtgtggttagtgcattccagaaccagtaaagggtgtgagaagggtaccgtggcaaaataactttctaaatatattgtctgctataagatcaagaggaaataagaggttc

SEQ ID NO: 24516 - DNA, 122 bp, Homo sapiens
ctctgggggtcccggtgtcctgtctgtctgcagatgcacacaccctgggcgctcctggggcgggccctggacagagggatgcagcgcagatccatcctggctgacaccctgcactgaagact

SEQ ID NO: 24517 - DNA, 122 bp, Homo sapiens
atcaatgtttaacacacaggtctgctgtcccgaccttcctgaggaggcaggaaatgcacacgggcaaagggacaagaatgaggatttcagacgcaaggaaaactgggaaggtgggaggatag

SEQ ID NO: 24518 - DNA, 122 bp, Homo sapiens
ggattgtcatttaacgagtttccctctcccagggaatctgcattctaagaccccaaaggccggcgagggtcgttgtgctgggctggacagcagagagaggctcggccttggccctcagccct

SEQ ID NO: 24519 - DNA, 122 bp, Homo sapiens
tcaagagaaaagttcatgcttgtgaggacagagctgcagctttagccctgagagacctggcgggagaggaggcagatggcgagggccccaccggcagagctgctgccctgaaaagcacctcc

SEQ ID NO: 24520 - DNA, 122 bp, Homo sapiens
tcctcaggcagatacgaaagcgcacttgctgagcacgtgttagctcatcccagagttagacgcccaggtatggcctggataaatggttaggatggggtgggagagccgaagtgggaagagcc

SEQ ID NO: 24521 - DNA, 122 bp, Homo sapiens
aatgtagacagaaactagcatctgcccccagagagtgcgtaccacccaggattgcgaaagcgctctcatcccaggtacacaagagcctctgtgtgtcttatggcttttatgattttaaatga

SEQ ID NO: 24522 - DNA, 122 bp, Homo sapiens
gaaaaaaatgtttctgtgatgacgatgatcttcaaggagtcatcccccagccacccaactcgttgccacgaagacaatgtggtagtggctgtggatagtaccacaaacagggttctccattt

SEQ ID NO: 24523 - DNA, 122 bp, Homo sapiens
caccgggccctgaaaggcactaggggcttctatcttagtacaggacacttctgccaaggtcggggcaacgacttgtgggggcaggaggcctggatgctttgtgagggctctgcgttggcacc

SEQ ID NO: 24524 - DNA, 122 bp, Homo sapiens
tcaggcttcctcttcagtgctgactgcagcagaccaaccaaattataagaaataaattaccgttaaaaaaattccccgttttaattactgcaaatgttaacgtgactaggtaagaactattt

SEQ ID NO: 24525 - DNA, 122 bp, Homo sapiens
tcccctcccacttccagcctacagggagcccttcgagcagcacctcctgctgggcgtcagcgtttcctgcattgtcatcctggccgtctgcctgttgtgctatgtcagcatcaccaagtgag

SEQ ID NO: 24526 - DNA, 122 bp, Homo sapiens
gcaacagccctctaattcagagacaggttgggagttggtaggaaagtaaaggtttaattacgggtttgaggctgcccctggcaagtcatggaatatctttgtcaacaaaacacaggggttgc

SEQ ID NO: 24527 - DNA, 122 bp, Homo sapiens
tcctgtatggactcagaagcaggtgcccattcctgtcccaaggcgaagggtcttggaggccgcttcctgcccctgcctcctccaggcgctggagtctcaggaggcgttccccgggggacact

SEQ ID NO: 24528 - DNA, 122 bp, Homo sapiens
tacttgggaggctgaggcagaagaatcacttggacccaggaggcagaggctgtagtgagccgagatggtgccactgcactccagactgcgctacagagcaagactccatctcaaaaaataaa

SEQ ID NO: 24529 - DNA, 122 bp, Homo sapiens
tcccacccgaaccgatttgcagcccttctaactatagcacacaggagcacgcactcaccccgcccttactcggaggaggcatttagaccaggcgccttaagttcaccgcccctttctctatg

SEQ ID NO: 24530 - DNA, 122 bp, Homo sapiens
acgtcacgtcacgcctccactcgcagcctcggagcacccccgcgtcccgcgcccgaagctcgggacccccgctctggcgaaacgaggaatatgacatacagcaaaacaccccttcgcggccg

SEQ ID NO: 24531 - DNA, 122 bp, Homo sapiens
gagacatattctgcaataagaaacaccaggaatgaaagaaagttacagtcagccagtggccggagatagctgcccagggaacatggagatgcttcccggagggatcctttggcagagccaaa

SEQ ID NO: 24532 - DNA, 122 bp, Homo sapiens
aggaaaagcagcttagccaggtggtgactgccatctgatagcaccctcctgatgtcatcacggctctgtattggagggggtggcaaatggcaacatagcggtcataagacatgacagtaagg

SEQ ID NO: 24533 - DNA, 122 bp, Homo sapiens
tttttgtcccgcgctccacccaaccggggtcgccgaggctccttcttcgctccccgccgccgatttacatgctaattgtgtctgggaaaagttcttaaattggcagaattaggcagagcaaa

SEQ ID NO: 24534 - DNA, 122 bp, Homo sapiens
ggagactgacgcaggagaatcgcttgaacctaggaggcggaggttgcagtgagccgagatcgtgccactgcactcccgcctgggcaattacatgcatggagatgtcctctcctgtgataaca

SEQ ID NO: 24535 - DNA, 122 bp, Homo sapiens
tttccgcccttctagctgggtatcaagatctgagaccagatgtgctggtgagtgactcagcgctttcttgcctggaaactcctccctgtgtctcccactgggaaaacagctgtggtaaggaa

SEQ ID NO: 24536 - DNA, 122 bp, Homo sapiens
tcgccatttgtttgctgtcctgccattgctgttctacacatccctggagattatgagcatcggttacagtgtggtaatggctggtcaggactagaaatgtccattgttgacctggaagcagc

SEQ ID NO: 24537 - DNA, 122 bp, Homo sapiens
ccctccccatcaatagggccgacccaagtcttcctcccccttcccccatgccgggccccacgatagtgtgaatgtcaggggcttcaggtttccctaaatataggtccctgccagaggatccg

SEQ ID NO: 24538 - DNA, 122 bp, Homo sapiens
ctgcttagtcaccactggagaaatagaaggtggaggaggaaggcaggacaggagacaagccgcaggagaaccaggctctgtggctgtaaacaggctcaacccaggttctaccattgcccaga

SEQ ID NO: 24539 - DNA, 122 bp, Homo sapiens
actattgttagacagaataatatgtgactgctgacatttcaccttttattattatagcaacgctttaagaaagaaatgtagttaaggttgtcagaatttcattttaaccccctccttcaagg

SEQ ID NO: 24540 - DNA, 122 bp, Homo sapiens
tcccccagagaaaacaggctaaagtgcaacacgatgcacttccacagaggtctcctgctccgccaagccgcagggacccgtcgccaggcaacagtggctttcattgtgaagcgagcagtagc

SEQ ID NO: 24541 - DNA, 122 bp, Homo sapiens
tagctgagcggggagaaatagcccaagaaatgcacacagccccaaaaaggccccactgcccgttctgcatccgggacatgttgaagtgttgttgtatgtgtgtgcagaggcacggactcttg

SEQ ID NO: 24542 - DNA, 122 bp, Homo sapiens
cagctcttagaaaggcagggaggggttagagtcctctttctggtttcatagttgtctttgcgggagaggaattctgatgtctgtgactcatctcaggagagaatgaggggtgagagacagga

SEQ ID NO: 24543 - DNA, 122 bp, Homo sapiens
ggcatagaaagacgataaatgccacagacaaaacctaatcgtaactgaaataaataaattcgaacaacaaattgttaagtgaatggaatgcagctagctaggatctcatgctctgttctaag

SEQ ID NO: 24544 - DNA, 122 bp, Homo sapiens
ctagaatccagattcacatattgtgggaggtagttgcatctgaggcatgaagcctccactcgaaatttattttaacaagcctttcctatgtttttttctttgtcagacaaagcactgttcta

SEQ ID NO: 24545 - DNA, 122 bp, Homo sapiens
ggagacccgcgagccggggaaggtcgccgtggagtcccgaccagaggccggggttggggtcggtgcagaccgagggctggtttccttgactgtgggagaaacgccgggagccggagtaagta

SEQ ID NO: 24546 - DNA, 122 bp, Homo sapiens
aagttaccatttgtgggcggagagcgctggggccctgcggacggaagaccctggcttgaccggactaacagtgtcgccgaagcaaagcagcccctctgggtaggctgtctgtctcgcctcct

SEQ ID NO: 24547 - DNA, 122 bp, Homo sapiens
actcagtaggctgaggtgggaggatcacttgagcctcaggacttcgaagctgcactgagccgtgatcatgtcagtgcactccagcctgggtgacagagcgagacccccgcctcttaaaaata

SEQ ID NO: 24548 - DNA, 122 bp, Homo sapiens
tcggcacccacggtgaccgttttcatcagcagctccctcaacaccttccgctccgagaagcgatacagccgcagcctcaccatcgctgagttcaaggtgtggccatgggggcggggtccgga

SEQ ID NO: 24549 - DNA, 122 bp, Homo sapiens
tgctcgggccccccgggcctgcagctttgagccttgccctccttcgtgtgcctgggactccgtggggtctttcacaggaaggtggggggtcgtgtgcattccatcattccatcagcgcctcc

SEQ ID NO: 24550 - DNA, 122 bp, Homo sapiens
aacgtccctgactgcagcatcccatgtgtgctgtccctcatcgatgctgacctggcttctcgggagtggatgatgagaagctctgctactggtgcttttctggactctgccctaggtgcctc

SEQ ID NO: 24551 - DNA, 122 bp, Homo sapiens
ggggaaggacagggggcaggatggagggaggtgctggtggggcctgccccacatgagagtcgtggccctccctgggccttaggtgagcccccgcaaaggggaagcatttaaagggaagcact

SEQ ID NO: 24552 - DNA, 122 bp, Homo sapiens
tgatgtgtcttggcgtgtttgccgtgtctgagggtgtcttggtgtgtttctactcatgaccgtctcctcctctcgttctttgtagggcaacctccagatccatcacgtggggcaggacggtc

SEQ ID NO: 24553 - DNA, 122 bp, Homo sapiens
caaacctctcccagagtcaggcgtgtaaaccagcccgagcggcggcggcagctgcaggaccgccgtgacgaccagagtagcgacccgcggggagcggcacggggtgacgctggctgcgggga

SEQ ID NO: 24554 - DNA, 122 bp, Homo sapiens
aatttcaaatgacaacaaattccctgcacagtaacactctccttccttccctctgttcctcggatgccatccatcatgccactgtggtcacacggtgaaattttcatgactgttatttaagg

SEQ ID NO: 24555 - DNA, 122 bp, Homo sapiens
atcagcattgtcagcacagcacagtacagggagatacgcgcattgccgtctctggatgggcggctggcactttcagttcaaaggcgctgaggctctgaagttggcaaggaagaggataaccc

SEQ ID NO: 24556 - DNA, 122 bp, Homo sapiens
cagcacccggacgcagccaatccggtagcggaaagccggtggcctggagatttctggagccgccaatccggaggcgggggtgggcggtgcgaaggcggggacagcggggcttgcagggtccg

SEQ ID NO: 24557 - DNA, 122 bp, Homo sapiens
cccaagggatgcgaggcccggggaaatgcggagcggggctgcgccccggacggggggatccgagccccggctttgatttgctgtacagcctccgctcctgtttccacgtcttttaacaggag

SEQ ID NO: 24558 - DNA, 122 bp, Homo sapiens
tcgatcctgcctcacccgtgcccaggtgcctgaactccgcagaagagaggagcaccagcacgtgggggaggcacccagtctttggtgcttggcctctgctgcgaagccagaggcacgtggct

SEQ ID NO: 24559 - DNA, 122 bp, Homo sapiens
gagcttgcgcgaggcttgctgggagctgtaggccaggcctaccggggtggaatgtcactccgcgggtgttggcctcaattatttatagtgacactccagtcgccagcaggaggctcctgcgt

SEQ ID NO: 24560 - DNA, 122 bp, Homo sapiens
aggcacaagacgcccaggagggactagtcgcgagagagggcaggaggccagctgggtacccggccgccgcccgtagccccagctcacagcccccgctcactcctgcaggtgcgggggcggga

SEQ ID NO: 24561 - DNA, 122 bp, Homo sapiens
tgatgtatacgatatcagagctagaaaatggcttagatacgatttgtattcagcgctgggcgggtccggccccgccaagccccgccccgacaccacccccccccctgccccgcctcatcccg

SEQ ID NO: 24562 - DNA, 122 bp, Homo sapiens
ctttctgactccgggctggggcgcgcaaagcccaatttataaagttcagatttggtgggccggggggaggaggagctttaaacttatttaaatgaggaagaggaggaaaaagaagttgattg

SEQ ID NO: 24563 - DNA, 122 bp, Homo sapiens
ctggagggagcagtcttctgggaaaggctgtgtgttcaggatccctaaaaagatagcatgcggggaaattattacctgccaagtggtgtgtgtttttacacctctctggccctttagttttc

SEQ ID NO: 24564 - DNA, 122 bp, Homo sapiens
tcagtggccttgtctgcttccaaacactgaaagctttgtcctttgcttgattgcttagaacgctcacagtgagcctcacaagacaattccctccctctgacccaccaaaactttgcatccaa

SEQ ID NO: 24565 - DNA, 122 bp, Homo sapiens
ctgtgcaagacgtgcaccacttggtggggcttggaggcctgagctcccagggtggcctttcgggctgacgcatggggccggagcaagctggggagtgggggacttgctgcctgcccatcccc

SEQ ID NO: 24566 - DNA, 122 bp, Homo sapiens
aaaggcgagagagagaatcgcccaggcggcttaggcagccagtgggccagtgggcctgcgcgccggggtcaggatggcagggcagtgtgtccatcctggcgggacagtaattgccccgggtc

SEQ ID NO: 24567 - DNA, 122 bp, Homo sapiens
tttggacaggttgccaagccacactgtaccgttttctctctataacatgaaaataatcatcgtaacacctcacagggctcctgctaatgtgaaacatttgcaagagtgtctggcagttacca

SEQ ID NO: 24568 - DNA, 122 bp, Homo sapiens
gccccccacccgtcactaacttgcagattgcagggcgagtgggcgtccagaggctgccctcgggtggagtggaccagactcggccgagaggcctagtgccttggtctgctgccctgctccct

SEQ ID NO: 24569 - DNA, 122 bp, Homo sapiens
ccttggaggttcttacaagaaggctgcgttccgggagcggcccctcccactttcccggtccgcggcgttacttacaaggctgcaacttgaccgggtgcaacttcctagcgagcctccgcccc

SEQ ID NO: 24570 - DNA, 122 bp, Homo sapiens
acaatatttccatacctttcctctaatcccaaggaaacctaaagaacttgattaaaaagccgtggccaagagttcgaagtgaaagtcagccctttagctattatttattgctttattagagc

SEQ ID NO: 24571 - DNA, 122 bp, Homo sapiens
gctgctcctgaaaatacaaggtgataaaagtgtcataaatgtggaccaatgtcaaggttccgtgcaactagaaatggtccccaaaatccggccaaagaagaatatcaaattgtgagaaggcc

SEQ ID NO: 24572 - DNA, 122 bp, Homo sapiens
taaaatttaaattaaaaaaaaatgaagtgatttactcaaaatcaagtagctagcagccctcggaaggcaggactacacacctcaggccttgtgaatctaggttagtggtgcgggggagggca

SEQ ID NO: 24573 - DNA, 122 bp, Homo sapiens
cacagccccacaggcctctcagaaccttgcatcagagtcgcccttgacctcaaccctgcccgagaaggaagtgctggtgcaaccccagcccagctgcaggaagtggtacctgtcaccaagtc

SEQ ID NO: 24574 - DNA, 122 bp, Homo sapiens
tgtgtgagtgtctatttctccacatttgactgttttctgaatatcacttttttcttttctcgatttataccaatcttaaaatcatgtttttcaagtctagaatcacaatttaaaacccaggg

SEQ ID NO: 24575 - DNA, 122 bp, Homo sapiens
ggcaggaggattgcttgaggccaggagttcaaaaccagcctgggcaacatggcgaaaccccgtatctacaaaaagttaaaaattagccaggcatggtggtgcatggctgtagtcccagctac

SEQ ID NO: 24576 - DNA, 122 bp, Homo sapiens
cctgccaagcgcgaggctcgttccggtagcgggaggaagactggaggggaacggaggggacgagcacaatccccactgagccaggagttggccactgactggaggaaggtgccaaagctgac

SEQ ID NO: 24577 - DNA, 122 bp, Homo sapiens
tcttcaggagcgggctgagctgcgctggtgtgccgcttaggactgcaatgaggagggtgacgttagaaggtctttaaaacgttacgtttactattttaggaaacagattttcaaagaatcaa

SEQ ID NO: 24578 - DNA, 122 bp, Homo sapiens
agatcctaaagaagacacaaagaagtctagagtaagactgattccaccttattccttattcgagagataacattacaccccactttgaagtaccaaaaactatcttaaaaggagtgtcttca

SEQ ID NO: 24579 - DNA, 122 bp, Homo sapiens
agttggtataaaaaaaccggacacagcgtcaggttataaatgaccctggtctcctttatccggtgtactctcgtggcaaaactgctggcgagtgtaccctttctgcagaaggtataaaaaat

SEQ ID NO: 24580 - DNA, 122 bp, Homo sapiens
atttttctttagctgagccataaagcctgaagttggaaaggagattcgtgggagagtagacgccactgagcaaacaccagctggggacagcaggatcctgaaacgagcttgctgcagttcct

SEQ ID NO: 24581 - DNA, 122 bp, Homo sapiens
aacaggccagggtcccggtggtccccatctgtgacccggagtctggggatccctggatttcggagccccacccagtctctgattcaggaggtccgggagcagcctggcaatctgcgtttcta

SEQ ID NO: 24582 - DNA, 122 bp, Homo sapiens
tgacacttgcaggcatcggttgtcttcgggcatcacctagcggtcactgttattgaaagtcgaggtgacacgggagggaggtctcgccgacttcacggagcctggggcaaccgatttctccc

SEQ ID NO: 24583 - DNA, 122 bp, Homo sapiens
cagcggggtagcgagcacccttggctcttgcggtgggtctccacaacctcgaggcacccccggccgtacaggcgggttgcctgtgcctctcatgcctgcaggtctggcctcagccccgtggg

SEQ ID NO: 24584 - DNA, 122 bp, Homo sapiens
atactgcattcagacaacacgatgacatctcaccagcaggccaacaggatattcgaacagcggttattttccacatttatcaaacccttgggcactcaagcttctgaagggggaaaaaaggc

SEQ ID NO: 24585 - DNA, 122 bp, Homo sapiens
gcagtaaacagaattgctggatcaattaattcacagttgaaggccaggcactgtggctcacgcctgtaatcccagtactttgggagtctgaggtggagagatcacaaggtcaggagtttgag

SEQ ID NO: 24586 - DNA, 122 bp, Homo sapiens
ggtgggggatgggactgacctgaggtcacctttcccagtgagtggacatcatcactcatgcggaaatgctgtatttcagggggccgcttctcagggaccgggggctgtgggccgagagggag

SEQ ID NO: 24587 - DNA, 122 bp, Homo sapiens
cccgggccgctccagataagagtgtgcggaaagcgcggcggggctgagacgcgaccaggacgcggggaggacggaccagcaggacagaccgaccgggggcccggcgggcggagggcagcgca

SEQ ID NO: 24588 - DNA, 122 bp, Homo sapiens
cgcgtcacgggcaggacacggccgcttcccttccaggtctcctgctggtgggaacaggagcgcatgtgcccgggaagctcggtggataaaggctgtcgctcgcgcttgtttgggaaactggg

SEQ ID NO: 24589 - DNA, 122 bp, Homo sapiens
ttaataattaagtgtttgaagttttgtggatccttaaggtcgctgtgctcacctcatcagcgtcggaccgccgagaagcgccaagcccgctgctatgtgcaggacgcccacggtcccccggc

SEQ ID NO: 24590 - DNA, 122 bp, Homo sapiens
ggggtgggggagggcaactgaactacgtgtgagttcagatccgagcgtggcgtgtgtacgcgtgagtgggagtgagtgcgaacttaagctcctgtgggccttaagcttccgtgtcaacgagt

SEQ ID NO: 24591 - DNA, 122 bp, Homo sapiens
gtgcggcccccttcccgctggggcctgtctgtgtgctcacctgaatgcctctgaagacaccgtgcgtgtgtattctgtattgggctccgcagaggatgggcgttgtgtggttatcgctctcg

SEQ ID NO: 24592 - DNA, 122 bp, Homo sapiens
cgacttaacccatcgtatcctaagtcagaaatgcatctgaccctcctagccttcaaaacgcggaggacggttcctgccgcgccctcgttaagccgagccatcgtaagtctggaaccacctgt

SEQ ID NO: 24593 - DNA, 122 bp, Homo sapiens
agcctccattcccatcttcgctcagactgcaagtatgtttgtattaatgtactatgtaggcggcttggagctggggaacattctttcattctaagaatttgcagatgctgacgttcctcctt

SEQ ID NO: 24594 - DNA, 122 bp, Homo sapiens
tctctaaaagatccatgaccctagccttgcctttccctcctcattacatctggttagggccgggcgtggtggctcacgcctgtaatcccagcactttgggaggccgaggcaggcggatcacg

SEQ ID NO: 24595 - DNA, 122 bp, Homo sapiens
cctcccccggccccgcgacgcgcgacctctgggaccgaggccgcggcctccctggcggtccggtttcctccaggaagcccgcctggatgacaggagacaataaaatccagaacccttcatca

SEQ ID NO: 24596 - DNA, 122 bp, Homo sapiens
gctggggctcaggcagaggcgtgtgccctgggaggcaggccagcttctgagccagggagacggtgtccagagaggaggaaagaaaagaaagatgaggagtcaactcaagtgtgcttggatta

SEQ ID NO: 24597 - DNA, 122 bp, Homo sapiens
aagtgcaagttgtagcaacctgccgggtccacgcatgggcgggtcatactccacgggttccggtttccactccctgtgaaccaaaagccagagaggcccacgcacgagtccggaagtgaggg

SEQ ID NO: 24598 - DNA, 122 bp, Homo sapiens
cgtcatgctcagccaaggcagtgggagccagacggagccaacagacagcaatcgagggcacgccgggcttcagtgtgcagttgagcagtcgccagcaggaaacccacctcatacccagtcct

SEQ ID NO: 24599 - DNA, 122 bp, Homo sapiens
ataatagctaaaactcaagacaattcagaaatcccattttattatttctccatactcacccgactcgacctgccaacagtaaatattgatatgtaacattttggagtttgcaaggcaacggt

SEQ ID NO: 24600 - DNA, 122 bp, Homo sapiens
cctaaaagccatttatacatgattccttcgatataccagaaccgcttactgtccagcactcgaaggggctgaagtataattacatagcagatgtaggatggaatagcaaccaggttgttgac

SEQ ID NO: 24601 - DNA, 122 bp, Homo sapiens
tagataaacaaagccagacactagctaaagtggtaaggacaggacaggcacagaggctcacgcctgtaatcccagcgctttgggaggccgaggcaggcggatcacttgaggcaaggaattcg

SEQ ID NO: 24602 - DNA, 122 bp, Homo sapiens
taaaatctggaaagctcgtagggggatggagggcggtggagaaatataaattattgtgatcgtctttcaggagcgctcgagttaattattgtactttcgccagctgcgttgtgccttcatca

SEQ ID NO: 24603 - DNA, 122 bp, Homo sapiens
ggtgtttgggttcggtcaactctagaaatcacaatgttttggagaaaaacctgggtttctcgaaaaacaggcagatctagaaataaaaggctgcaccatcactcggccccccgcctggcaca

SEQ ID NO: 24604 - DNA, 122 bp, Homo sapiens
acaaggctcctctgctcacggctgcgtggataaaacccaaagggaatccagaatcaagctcggcctcgcaggagtttataacttttgtacttttccctcccttgtaacgaaaagctaatcgc

SEQ ID NO: 24605 - DNA, 122 bp, Homo sapiens
ggggctctgccacttgctttacaggctaggaacggacaatgccgggaacccgagagcggccggcgcggacgccgaggcaactttacttggggcacccactactcgcaatcaactcccggcct

SEQ ID NO: 24606 - DNA, 122 bp, Homo sapiens
gccgttcacataactctttcctgacctcagagcgagctggtaaccctccaccttcgctctcggcaccttctgtccgttccggcaggcaggctgtccgtcccagtccacaccgcagcccccca

SEQ ID NO: 24607 - DNA, 122 bp, Homo sapiens
gagacgtgagtgatgcccggcagtggccaactcttctgcggtggctgtgcccacgggagacgtgagtgacgcccggcagtggcttactctttcgtggtagctgcgcccacgacttctggaga

SEQ ID NO: 24608 - DNA, 122 bp, Homo sapiens
ttcctgaggaattagagaaaggctctttcgtgggcaacatctccaaggacttgggtctggcgccccgggagctggcggagcgcggagtccgcatagtctccagaggtaggacgcagcttttc

SEQ ID NO: 24609 - DNA, 122 bp, Homo sapiens
tggggatgaggctaggaggcggccgcgtggggcccagcacaaagacctgtccccaggggccgccgcctccgccgctgctgctgccgccagcctagagccgcccgccgaagcagagccggcgc

SEQ ID NO: 24610 - DNA, 122 bp, Homo sapiens
tggttggagacatttgtagatggccccaacagagcaagaccgctgtgtttacagccaggacgtgcttagcactacatttccacattagttgcagtgagctgcccaagttagtgcagcagcag

SEQ ID NO: 24611 - DNA, 122 bp, Homo sapiens
gccctcctgtggcgtggaacgtggctgtgacgagagcttccaccggggccttctcctttccgttctcagcagcacaggcaccctcggctctttgaggctttatgttatggaaattcagcgat

SEQ ID NO: 24612 - DNA, 122 bp, Homo sapiens
cgttacgcacgccggcgactctcgcctcgcctaggcctcagctccctaggttttgcttcgcggagtacagaagctgggaggcgccagcctcccgcccccggccactatggcaacggaagcgg

SEQ ID NO: 24613 - DNA, 122 bp, Homo sapiens
agcccgaagagtgtgggagcctgagctgcatgcatttatacccactcaacaataaatgcccggagggaaaaaggcgggggcagggatatttaaatgggggcgggggcgattctgcctatcac

SEQ ID NO: 24614 - DNA, 122 bp, Homo sapiens
gccctaatgcctctgaacctgggtttgaggtaatgacctttctcctaggtctgaaggtcacgggtccgctggaggatgccccctctccactcagaggggtggaggcttaatgctactggtgc

SEQ ID NO: 24615 - DNA, 122 bp, Homo sapiens
acttctggactcaacctggccgctagaccggagcgtcctccagcgcaggcaaggattcctcgtttagagtcatgttatcttcgagtacctagagagacattttaacccacaccctagagagg

SEQ ID NO: 24616 - DNA, 122 bp, Homo sapiens
agcagggccagggtcccccacggacgaaagtgccttctcatcagcccctgcgctgggccccggggacactgtcatccctggctcgaatccagggtgcgcctctggcctgctaggggttaccc

SEQ ID NO: 24617 - DNA, 122 bp, Homo sapiens
tccgaggactgttccaggaaggctccagagagcaacgtccccagttcactcacagctggccgcccccagccccctgcccgcagcacccgccgtgtctcctgctgggaagagtggctgctgta

SEQ ID NO: 24618 - DNA, 122 bp, Homo sapiens
gctttcttatttttagatgatggatttggacatgcttctatgaagaaatgccacatggtccgagagcaaacatgtccagtaagttgtttggtgaattaacccaaggacaggagcccaggtcc

SEQ ID NO: 24619 - DNA, 122 bp, Homo sapiens
tgggaatcttttggtgatggcagagcaggctgcctgcctacttgtgcttgattgaagtggcggtgtagttgtggtggcgcgaatcagcgtccagcaacagtttgtggaaactgtgggtttgc

SEQ ID NO: 24620 - DNA, 122 bp, Homo sapiens
gcttgttgtggagtggggaggggtcttagtctatctgtttttagtaaattccaaagacatcgcagaagccacagcacaaggctctgtgatgtctggggacaatgtgttccaatcagaagcct

SEQ ID NO: 24621 - DNA, 122 bp, Homo sapiens
gaggccttcggctacgggacgcccggcggtggggttacggatggtacagccctccctccccgcctgctcgaggcaaatggtttcgcccggctacacacacctctcctgggcggcaaccgagg

SEQ ID NO: 24622 - DNA, 122 bp, Homo sapiens
atggaggacaccaggaagacggagaccatggccaggatgacgtggttgagcttggcagagcgctggcgccgtcgggcccggcactccacgtgcaggatgagggccaggcagggcagcaccat

SEQ ID NO: 24623 - DNA, 122 bp, Homo sapiens
aggggcacggctggctccctattggcttacaggagggggctagagagaggcgtgtctcaacgtcacacccgcccctagtctccttgctgctcaggattatgggagggaagggaagtccagga

SEQ ID NO: 24624 - DNA, 122 bp, Homo sapiens
ggtggccgctgtccacctctccgggaggcagggcccgggttctccacggaacgatgggaacgcgcctcaactcgctggctcgttgaccttgggccagtcatcccctgctcccggcctcagtg

SEQ ID NO: 24625 - DNA, 122 bp, Homo sapiens
ggtatggccaaagccaggggtaggtagtgataagtgacacaggcagccagaaataaatcacgagggccctggttcttactgtaatgtcagtttcctaaaacacctctgctctctctactccc

SEQ ID NO: 24626 - DNA, 122 bp, Homo sapiens
tcagggcttcctaagctgcaattcagcagggctcccttgcttgttctcactctgtgcccccggcaacgaccccgcgcgcctacactcccgtgccgcctcagctactagtccgcaacttctag

SEQ ID NO: 24627 - DNA, 122 bp, Homo sapiens
tgcatgtcaccctcctttaacttcaggtggggcacaggagtctgtcaaataaaagaatatcggagaactgatattccacgtgcatcttcgtcctgagggctgcaccttgaaggaggggctac

SEQ ID NO: 24628 - DNA, 122 bp, Homo sapiens
tccttgcagctctctttgctaggatttatattcccaaacttcttcagacgtgccctaccgcgagggaacgaactggttttcttcccgttttcacctccttgtctggagacaaaggggtgtga

SEQ ID NO: 24629 - DNA, 122 bp, Homo sapiens
ctcttgaaaggagcacctctttttatgtttgtttcttttgcagattgggaaaatgaggtacgttagtgttcgcgattttaaaggcaaagtgctaattgatattagagaatattggatggatc

SEQ ID NO: 24630 - DNA, 122 bp, Homo sapiens
accacgactcacggacatggccccagctaattggtagcccctgggttcaaccggaatcagcgcgtgagtccaagactgggagaaagaggctcatccgagactacaattcccagaatgcgctt

SEQ ID NO: 24631 - DNA, 122 bp, Homo sapiens
aagaaattactttagaggtaaattcttggaaaacccttgctttactaccaggaaaaccagcgctcttcctgctttttgataactcttatgcagctgattgtgtctctcttttcactctggct

SEQ ID NO: 24632 - DNA, 122 bp, Homo sapiens
caagcaaaatacacagtttcattgttctgaatcctgtggtttctttcagcccacttttatcgccttaacctagttaatgtatattttgaattgtgtgtatgacctcagaactgaaattgata

SEQ ID NO: 24633 - DNA, 122 bp, Homo sapiens
agtcccttgagaatgagcaagttgtttaaggcagcacagccagtgagggacgagccaggccggccttccagacgttcaccatcagtaagctcctgagaaacaccttgggtatggaaggggaa

SEQ ID NO: 24634 - DNA, 122 bp, Homo sapiens
gaatcacaggagagtttctcccaaagtcatgcatttccccaaaaagaatgctgtctgttccggagctactactgttgtgagcaactaaaagttgtcttccttgggctctctcatagtagtcc

SEQ ID NO: 24635 - DNA, 122 bp, Homo sapiens
atggggcacgctagaacaagtctccttcaagagttacttatataaacatcaatatacacacgttgatatccttccttccatagtacaagtacaggtcacaacttctctcaactgtgggagta

SEQ ID NO: 24636 - DNA, 122 bp, Homo sapiens
ctgaccgccgggcacccagaggctcccgagtttgtgccacagggctgctgcgggcagtgccgctgcataactgacaacgaaggcggtagggtgacttccccagtgcagtagcctggtgctat

SEQ ID NO: 24637 - DNA, 122 bp, Homo sapiens
ctggggtcctggaccctgggtgaggccgggccgtgcacacccttgtgtggctcttggaggcgccgagcactcagcccgtgttgggggcagccccggtccctctcctggacacacaggtcagc

SEQ ID NO: 24638 - DNA, 122 bp, Homo sapiens
ccagcattagggaaccggagatagggaagggctcctgggtgggaagatgggcctctcctccgctgcccctcgtggacacccctggtgaggcctctgggccctgcctcactccctgtgtgacc

SEQ ID NO: 24639 - DNA, 122 bp, Homo sapiens
ggcagtctgcccaccttggcctcccaaagtgcttggattacaggcgtgagccactgtgcccggcccccacatgctgtgtgcttggtgctgctttaggtacttggagaaactgtggtcaataa

SEQ ID NO: 24640 - DNA, 122 bp, Homo sapiens
gtctacatagcctcagcttctattcattccactgctcaatctcacatgactggcccagtgcggtggttcacactgtaatcccagaacttcgggaggccgaggtggaaagagcatttgaggcc

SEQ ID NO: 24641 - DNA, 122 bp, Homo sapiens
tatccaagggggtgaggcaggctgaagatgggtctctactccctccaagaccatggagggcgtcggggtgtcaccccagctgtgaaaaagggacccaggacccgcagatgctggcgaggaac

SEQ ID NO: 24642 - DNA, 122 bp, Homo sapiens
ctcccagagagagggtagtcaggaagcacactgtgggggtggtgggcctgaggggagaaacgtcctggactgttgaaggggaaccatgcatggtcttctggctttggcttcggctgcaggcc

SEQ ID NO: 24643 - DNA, 122 bp, Homo sapiens
tcagtgatcgcctccaacagcatcatctgcactgcccacttcactgctcggaaggggaagcgacaccacgcccacgtcaacgtgagctggtgcttcgtgtgctccaaaggtgaggggcctgg

SEQ ID NO: 24644 - DNA, 122 bp, Homo sapiens
tagtattaaaaagattttttttaattacatttggaggccaccgtctgatagaagggaaaacgccagcaactgactgtggagaaccaccagatttgtagtcagagcagcactggaaaaacgat

SEQ ID NO: 24645 - DNA, 122 bp, Homo sapiens
gtggagatggccaacctgctgaatctcacggaacgccagatcaagatctggttccagaaccggcgcatgaagtacaagaaggaccagaaggccaagggcatcctgcactcgccggctagcca

SEQ ID NO: 24646 - DNA, 122 bp, Homo sapiens
taatttgcagaatgctgtttttcctaggttaacttgcaatcctaacacggaaggaggttccgtttttagaagtttaaatgttgtcacacgggcgcaagaatacatacaacagccatgctttc

SEQ ID NO: 24647 - DNA, 122 bp, Homo sapiens
aggagctcacttggagctggtgtgcttggttacggctttggtgctctcggacacagcatgcgtgacaggcgaacagccgtctggatctccctggaggtgatggtcgaacgcttgttgtaacg

SEQ ID NO: 24648 - DNA, 122 bp, Homo sapiens
ccattcacgggcaaaggagggcctgtctctgcgaaggcagcgtgtagaccctcgtccacccgcaaagcagcacatggagacgcttccacggtgaactctcccctcccgaggctcggcacacg

SEQ ID NO: 24649 - DNA, 122 bp, Homo sapiens
cccaccctgtgttcttttgttgcccgcacctcacttcccgggcggtgggctagcctttcccgtccagggaagttgccagattccagctctggcagctgagagttgccggggtgtattcatgt

SEQ ID NO: 24650 - DNA, 122 bp, Homo sapiens
gtcctcagcttctattactgctgcctctgggcacccgactgcccccgctacatgcaacggcggccctccaatgactgccgcaactaccggcccccaagactgggtgggtgccatcccgtgcc

SEQ ID NO: 24651 - DNA, 122 bp, Homo sapiens
tccggagtctccagggcagagcgccccggggagggctgggccctcagagcagcaggagggcgcccagggacagctcaccctggcccagcaggcggccccgatcccggccgcgaccctcatcc

SEQ ID NO: 24652 - DNA, 122 bp, Homo sapiens
acgcccaaataaggcagacgcccagctgtagctgtttagatgatttctctaccttgcttccgtgttcagcctctaaagacttgccgctcacactgcttggcagcgctctctgagcctctcct

SEQ ID NO: 24653 - DNA, 122 bp, Homo sapiens
atctgtctgcctcagcctcccaaagtgctgggattacaggcatgagccaccacgcccagccgtgttatttcttaaggcttaaaaaaattctttgaggctgggtgtggtggctcacgcctgta

SEQ ID NO: 24654 - DNA, 122 bp, Homo sapiens
ccgccccggcttggatgggtctccctgcgccataaatgtggctgctgaggcggcggtggccgtggcccgtcgcgctgctgctgcggcgctccaagttcatctccgccccggggctctcctgc

SEQ ID NO: 24655 - DNA, 122 bp, Homo sapiens
gctcggagaaaggtgtcagacaaagcgggattagcaagaagctgttagggctggtcctaccgggatgagagaaaggcgcagaggccagccgagtggaaagagcagcggtgacgaaccgggtt

SEQ ID NO: 24656 - DNA, 122 bp, Homo sapiens
agactcgggggtggggctgggatgagagtgtggcattgcaaggaggcccagggccccaggcgagcaggacactctccccagaagcagtaaagacaggcacaaatgaaggaggatgagaggag

SEQ ID NO: 24657 - DNA, 122 bp, Homo sapiens
gggaggtgtcctctaagccaagatctttcagaacaaaggttctatcttcaccacagagagcggtccggaaagggcagaggtgacctggcaaacttggagagaggggccttgtccttgtggct

SEQ ID NO: 24658 - DNA, 122 bp, Homo sapiens
gcagcccatccgcggcaccctcggggcagtaaatattatattactacagggtgtgcagtacgtgacctgagacaggccccggggcttaagtttcccgagatggagtttgcgtactgctcccc

SEQ ID NO: 24659 - DNA, 122 bp, Homo sapiens
atgtcagaagccaggtacattcaacatggaggatatctcctctcttctctttgtcgcccccgtgtgtgggtgtcatggcaacggccaggtaaaccccatttgcataataaaagattcacggg

SEQ ID NO: 24660 - DNA, 122 bp, Homo sapiens
ctccccaagaccagccttcagccttgatatgacctgattcagctaaacaaagctggggagcgggaatgagacctgggggacttgtcggctcagtgcccctgaggtaaccattaatccttccc

SEQ ID NO: 24661 - DNA, 122 bp, Homo sapiens
gtcaccactttgtttaactacctcagtgggtccctaaactttaataaactctgtaagacccgtatgctctgccccacccatctctctggcctccttttaccagtgaaacccagccccagcag

SEQ ID NO: 24662 - DNA, 122 bp, Homo sapiens
cacctgccgtccatccactgtcgccaaggatgaagagacgattggccattcctacccagccggtttccactactaaagacacctctggcaagtgttcagtttccgtgggagcgtgtctgggg

SEQ ID NO: 24663 - DNA, 122 bp, Homo sapiens
gtttgttctccgaaaggcgggaaaagcgaactacacctcccgactggccgcgcgcggctgcgcctgcgccctgttacctgtcgccatcttgccccttcagaggcaccgcaaacaaacccaat

SEQ ID NO: 24664 - DNA, 122 bp, Homo sapiens
atcgtggttctacccgtgcaccgccaagtggacgtttatgccggcggcagctaggatcgtcggagagggcaacacagacttggccagcgtctggaacatcggggaatcctgagggacctacc

SEQ ID NO: 24665 - DNA, 122 bp, Homo sapiens
tcaggctcccaaagtgctgggattaccatcctttagcttttataagcctcatactgtccccgtgagttgggcaaggccagaattctcatcccacgccagccattgacactaccactgctgtg

SEQ ID NO: 24666 - DNA, 122 bp, Homo sapiens
gccgagacccagggccggctgatgctggagcctggccgctggctggagcagtgtgagtcccgcccgcccacggacccagcccggcccaccgtgtgccctgacagctgccctcccctcccaga

SEQ ID NO: 24667 - DNA, 122 bp, Homo sapiens
ctgctcttcctcgtcttctgaggacaaggcgcacgttctccgcagtgcagagcagcttgccgaggaccccgcgtgaagaaagccagcgaggggggcttctgctccctgagactctgggttca

SEQ ID NO: 24668 - DNA, 122 bp, Homo sapiens
agaggcgactcctttatcaagtctgatttagacatgggctcgtccaaggtcgttcagcagcgagtagcggagctggggctgcaccgaggagctcaggccccactccgtgttgcggtcaagac

SEQ ID NO: 24669 - DNA, 122 bp, Homo sapiens
tgcagaccgtgccctagtcttttccgaggatgttcttttctgtcatccatcgtctacccacgttgagcacgacagccgggccagtcccgccctgggcggttggggccttcccagaggggccc

SEQ ID NO: 24670 - DNA, 122 bp, Homo sapiens
ttatgctggcaggaggccctcttcttcatgttgatggtgtggcctgtggagaggtggagccggtgtcttgctcctagagggagtcctgactccagcagagaacatgttccgggatgtgctcc

SEQ ID NO: 24671 - DNA, 122 bp, Homo sapiens
gctgtattattccattgataggaaattcaagcacaggtgaaaacaaacttccctgtgcagcgatacacataaggtgataacaccataaagaacagccagggaatgattttcaaaaaaggtca

SEQ ID NO: 24672 - DNA, 122 bp, Homo sapiens
gattccagggctgctcaggagacgcctccatcctggcgtggatgacctcaggatcagccccgtctgccccactcagcccgcagcctggtccccgaaagcgctcagtcagaatccgagagcac

SEQ ID NO: 24673 - DNA, 122 bp, Homo sapiens
tggtccgggcggacatcgctcactcacatatccaatgggaggcggccgggtagaggttaccggtttggttttttttcacgggggcggtggcgagcagcggaaggcggggcctgctgggggcg

SEQ ID NO: 24674 - DNA, 122 bp, Homo sapiens
ctgtgggccgacggcaggacagatggacccgcggtcagaccgacagccccaccccaagggcggtctccctgacccctctgtgcccccgctcacctggagcccccagaagagcccgggtgcct

SEQ ID NO: 24675 - DNA, 122 bp, Homo sapiens
atggaggtgacggagcaggtgctgccagctctcatgaagaagagccttttgaccaaggtgcgctgcccacgccctcattcccgattgccgcgtgagacgatggcgtctgccacattttctca

SEQ ID NO: 24676 - DNA, 122 bp, Homo sapiens
tgaggctgcagctcgaagtcctggcctgctgtcgaggtgggcaccgagcccagttctctgcgcttggcaaactgggcggagggcggggcggccgacagaggctgacggctcactcctgctca

SEQ ID NO: 24677 - DNA, 122 bp, Homo sapiens
tctgctagcggaagtccctgtggaggaccagcctacttcctctttggtgctaggagtgtgcgtggcaggagaggcggggccaattttgctgagctttctcgcgggcttgcagctgcggcaag

SEQ ID NO: 24678 - DNA, 122 bp, Homo sapiens
ctggtgccagcgtgctgcgtgaagatgctgcccacagtaatgaaacaggaactcatgtgccgagcgtgcctcagctccctgcagcaagggtaccaggctgtggccatcaatcaccctgattt

SEQ ID NO: 24679 - DNA, 122 bp, Homo sapiens
gtcatagactaagtcaataactaaattcctcctgaagtgactggaacgctgagaagggaccggtctatctcagagtcactttggtgatgctggtgggtgtgacatctagcaatcagaaccca

SEQ ID NO: 24680 - DNA, 122 bp, Homo sapiens
gagggaatccggtgggctccatttctacaaggctcacaaacgcaggtgcagttcggccgccgcacgctgcctggcgggagaaacgcgcacaaaccgcagacgcgtgctcctgtagttgccac

SEQ ID NO: 24681 - DNA, 122 bp, Homo sapiens
cgccggaggaggaagtggtgaggttgttgctccttcagcgcctatcgctggctcttggggcgcagagaggggccgcagtctccgcggctgcgtcgagctcccttgcagtcccctccatgttc

SEQ ID NO: 24682 - DNA, 122 bp, Homo sapiens
ctttctcggtggctggctctgtcctctctgttccttttgtccagggaccgctctctcctgcgctcgggggagcgtgcgcgcctccggtcggtggacttggccctgcgctcgggcgagccccc

SEQ ID NO: 24683 - DNA, 122 bp, Homo sapiens
ggagtcacctgggccaatgccccatgtatacataagacttcacctgggagctgggagacacggctctgggtatggagcttttacaggagctgcaaacacagcctgtgcccctgtttggttgg

SEQ ID NO: 24684 - DNA, 122 bp, Homo sapiens
ggccggcgggcagaggacccttcctggggtgcctcccggctcctgtcccccagcgcggggcgtaggcacctgggactggccagtgaaagtcgacctcatcctatgtccaccgcactcctgct

SEQ ID NO: 24685 - DNA, 122 bp, Homo sapiens
gctccatccgcattccttaccttcattactgtccctacctccagcccctccagaaaaaagcgaaagcggcagagaaacctgtgaaaacaagacatgccaaaaatactgactcaaaataccaa

SEQ ID NO: 24686 - DNA, 122 bp, Homo sapiens
gcggtggccagctcccgcttgatgtccggggtaacgtagcacagcttctccttgatgtcacgcacgatctcccactcggccgtggggtgaagctacaggtgaagctgtagccacactcggtg

SEQ ID NO: 24687 - DNA, 122 bp, Homo sapiens
tgttgttcatagtggattaagggatgggcttgccaggaagctgcctaaggcactgatatacgttgagaccatatgtgaataatctgaaacacagggccaggtgcctctggtctccccatgtt

SEQ ID NO: 24688 - DNA, 122 bp, Homo sapiens
ccggttgaagtttatagctttggctgaggttccgctaaggcgctgcacatttatcactggcggaaaggtcctgaaatctaatccaggatgcaagtgagactagcagtagcctccatttctct

SEQ ID NO: 24689 - DNA, 122 bp, Homo sapiens
cttggggaagacagttggaagctcagacatggtgagtgtgtggggccaggcgtcctgagacgggggcgaagggcttcttagaacctgctggaaccggctgtggcgggacccgggcctccccg

SEQ ID NO: 24690 - DNA, 122 bp, Homo sapiens
ggtgccaaggagactgtgccctgccttgacaacagttgctaaggggcggagacttcggctcggttcccgagacggaatacccaggagtcgagtacttgggcgcatgcggcaaccgtatctca

SEQ ID NO: 24691 - DNA, 122 bp, Homo sapiens
ccccggcggtttgctggagagccttgctactgttctgcatgaggtgggggatgccttctgcgcggaccccgcgtccaggcaaaactctggaacgcactaggcagccaagcccggggggaaga

SEQ ID NO: 24692 - DNA, 122 bp, Homo sapiens
tgtggcggggaaagggggaggagaggaaggccagggtgagaattgggggtgcagagagtgcgggaccaagagagcccctgctactcctggagtgtcattcatggatctggcttgctcgagaa

SEQ ID NO: 24693 - DNA, 122 bp, Homo sapiens
gggcagaaaaaagctttgaagaagcactaaggcagagaaggtgcccatcctggggagcctcggcagggcccagtgaccagccttccatggccctgacagctgccctaacagaagctccagcc

SEQ ID NO: 24694 - DNA, 122 bp, Homo sapiens
acagctctagccaacacagggtttctgacggtcagtctgcggattttcctgcctctggtccgcaggcactgcccaggctgtcagccccaaaccctactccggggaccgcggtcaggttcgtc

SEQ ID NO: 24695 - DNA, 122 bp, Homo sapiens
gggcagaggggctgtgccacccccagcttcacgggcagagagctgcttagactcgggtgacgttcaagccccacccataactgcaggccccggggacatgtcaacttttcttttggttacag

SEQ ID NO: 24696 - DNA, 122 bp, Homo sapiens
ggtgggggctgcacttgacagccgccgagggaaacactgatggtgatgtggtaggcagttcgggttttccttgaagctcttactatgcttgcacttgaactccagcaccatcctggtgtacg

SEQ ID NO: 24697 - DNA, 122 bp, Homo sapiens
ggataacttgcttctacaagtataagaatttgttgtaagcttaccaaagttacggctgcgcgtttactgtcaacatgcatcacactgcaacaaaagccattatttagaaaataagatgaaca

SEQ ID NO: 24698 - DNA, 122 bp, Homo sapiens
ccgtctggacccgcatacagtcatagtgtccaggtggctttgtgagtcacccagaccctccgaaataatcccactgcgggtggggctgccttgcagtttctggccccttcccaccctgactc

SEQ ID NO: 24699 - DNA, 122 bp, Homo sapiens
agtaagtctgactctagagcccactctcttacgcactacacctgcgatactgaactgcaccggcttatgctgaagtcaattattaaagatttttgcgggggtgatactaggagaaatttgag

SEQ ID NO: 24700 - DNA, 122 bp, Homo sapiens
tataagttgttggtttatttctccccattgacagccagaattggtgctggacaacaaacccgggcctcaatcaggagtgaagagtgaggctggggagctgccttgctgtccttccagggtcc

SEQ ID NO: 24701 - DNA, 122 bp, Homo sapiens
ctccgccccctctttctccgcgccctctaggcgctcggcttggagctcaggggccggtcacgagttctccgtcacccgtggggcggagaaaacccttgtgattgtcacaggatatagctttg

SEQ ID NO: 24702 - DNA, 122 bp, Homo sapiens
tctgatcactgttaacacagggaatggtatggaccccggagccctctgctctgcccagaacgccaagaagacatcctggactctctctatgctctcaatggggtggccttcgagttggacct

SEQ ID NO: 24703 - DNA, 122 bp, Homo sapiens
aaagttatttttaatggtaaatattacatacttattaaaatacagcaggatggctgggcacggtggtggctcatgcttctaattacagcactaaggctaaggcaggtggatagcttgaggcc

SEQ ID NO: 24704 - DNA, 122 bp, Homo sapiens
agctggctaaagaacactgcagacttgggccaatttgcccctgcccagattcctgattcccggcctcgcggccccaccgctgtcttcctctcccctcccggacttcctgtcgcccccagccc

SEQ ID NO: 24705 - DNA, 122 bp, Homo sapiens
agctgttcaacagcatagagttgtcatgtaaacacaagatattcttctttggaatttgaacgagcaaaaagggaggcattaaaaatatgcaaacagagaataggggattacaacaaagggtt

SEQ ID NO: 24706 - DNA, 122 bp, Homo sapiens
gaaagaaataagggactgttactacaagaagggaaaggctgccaagtaccccccaaacagcgaaagtccaggacaaggggaagcaagcagcatagggaatttgtacctgactcagtggccct

SEQ ID NO: 24707 - DNA, 122 bp, Homo sapiens
tttaatcctccctttcaggcacagggagaaatggtcctgtcacttctctaaattttcttccgcggttgctaagcagcacgcctctgccccttccacttccctctgctcctgctttcttgtct

SEQ ID NO: 24708 - DNA, 122 bp, Homo sapiens
ctgaggtgggcacgatgatgtcaatttttcaggtgaaagactcaaggcttggagagacagcgagaaagctgggaccccaggactcctgttcctaagcttctggcacttctgatcccaggctg

SEQ ID NO: 24709 - DNA, 122 bp, Homo sapiens
ctaaagcgtttgggtttagagcttccattactcattcgccttgcccaaggcctcagcaaccgacgttcgaaagccaggagaaaaggcgaatgataaagggcgctccacgcatgcgttaagaa

SEQ ID NO: 24710 - DNA, 122 bp, Homo sapiens
ggacttcctcttggcaggcgctggggccctctgagagcaggcaggcccggcctttgtctccgcgaggcccaccccggcccgcaccttcgctttgcggtctgaccccacgcgcccccctgcag

SEQ ID NO: 24711 - DNA, 122 bp, Homo sapiens
gcacccgagctggtccagagagatcttgcggatgcggcaagtggcggtgacgtgcggccgcgggaatgacgttggccgcggccccgcctcctgctttcgcggcacttgactggcttcccact

SEQ ID NO: 24712 - DNA, 122 bp, Homo sapiens
gaggcaagcagccaggaaggcctgcagatcagccacacagtttcgcccatgtgagccaagcgataccgagaaacccaggtagaccctcgaaaggggagcgctcgccttagacagacccaaga

SEQ ID NO: 24713 - DNA, 122 bp, Homo sapiens
ggcgatggcccggcgggtgctggcaggcatctgggtgttgtcctttctgctggccacacccgtcctcgcgtaccgcacagtagtgccctggaaaacgaacatgagcctgtgcttcccgcggt

SEQ ID NO: 24714 - DNA, 122 bp, Homo sapiens
tctgtagctgaaactttggtggtacccagagttaaagaagtcagtcccagagcaagactccgtcaaaaaaaaaaagaagaagaagaagtcagcccgttttctggggtgggtaaatacctgcc

SEQ ID NO: 24715 - DNA, 122 bp, Homo sapiens
gtgggtggggccggcggggcgggtgaaaccgcctgggtgggtgcgaggagtggccgggctcggccgggtgggtgtccggtgggaagcgcggcgcgcccgagcttgggcttgcagttcccctt

SEQ ID NO: 24716 - DNA, 122 bp, Homo sapiens
tggcgggcggcacaaagagcaagccggtcttggcgcacagcattgtcagtgtgggcgccacgttctggcagatgcagcggccggggcagggctggccacgagatgcccccgcccagagcagc

SEQ ID NO: 24717 - DNA, 122 bp, Homo sapiens
aggcaagattaaaacaaaaagttcagctccaaacccaggccctggcggctgccgtgcaaccggcattccctaagagcccaggcaagaaaggtagaggtacaatctcccgggccccatctggc

SEQ ID NO: 24718 - DNA, 122 bp, Homo sapiens
gggctgatatctgtcatcgctgttagatttggggtcaatacccgtcattgctgttagactcggggctgatatcgtcatcattgttagacttggggctggtacccgtcatcgctgttggactt

SEQ ID NO: 24719 - DNA, 122 bp, Homo sapiens
gcaattcacaagaaaataaatatttgctagtctctgttttccaagagctaacattctaatcggggactcaaacatctataatagatagagaacatacatgaaaatcaaaggaataagtgtaa

SEQ ID NO: 24720 - DNA, 122 bp, Homo sapiens
ggacctccggggagagaatgaggcctgcgcaagggtcctggaaggacccaggagtcgccccggcttccctcccccaggccctggttgggcgccgtgggccgcgtcccagttgagcccggcgt

SEQ ID NO: 24721 - DNA, 122 bp, Homo sapiens
ttatgcaggaaggaatagtaagaatcagagaataagttaacagattggttttacaaaacacgttcagtatggacatggcaaagagctaggagttagaattataataagaaacaagaacaacg

SEQ ID NO: 24722 - DNA, 122 bp, Homo sapiens
aaccccgccccaaccaagcaaatacatctatctaggcaggacgcgccctaataggttagtcgcctgtcccttggaagagagcagtgggcgccttggcctggggtaggtgaggggacccggcg

SEQ ID NO: 24723 - DNA, 122 bp, Homo sapiens
caatgaaggccagtgcagtggctcccctgtaatcccagcactttgggaggccaaggtgggcgaattgcttgaaccgaggagtttgagaccagcctgatcaacatagtgggaaccccatctct

SEQ ID NO: 24724 - DNA, 122 bp, Homo sapiens
ctttgtggcttagaaatcaaatcatggaaagcaactgtctccaactccaccctcgccgaccgcagcctccgcctcagagccagatcctcttcctcttccttagtaggcatcttctccgactc

SEQ ID NO: 24725 - DNA, 122 bp, Homo sapiens
gcgataacacagcagcgcaggagctgtctgccgcttggcgggtccagcgaggctccctcgcggtggctggagctcagatgccagccactttgatttatagccaaaaataataggacttttat

SEQ ID NO: 24726 - DNA, 122 bp, Homo sapiens
tctgtcccgtacttttgtatcctaacagggttaggatgagagtgcagggaggtataaggacgtacaagaatgcttctccagttcaactctaagtgaacgatgtaattcctcaaatccacctc

SEQ ID NO: 24727 - DNA, 122 bp, Homo sapiens
acctgtctgggcacagggagacgtagagcaggagcagcggcccggcccccacgacggtggcgagggaggacctcatccaggagctgagctggcagaagttacagtagtgcacgacggcaatc

SEQ ID NO: 24728 - DNA, 122 bp, Homo sapiens
ttctgctctgcaggacaagattaccattaactaccatcatgacttcagaagatgctgtcacgatgaaattcatttctgctgcctaaccccataataaggctggctgttctctttaagtaaaa

SEQ ID NO: 24729 - DNA, 122 bp, Homo sapiens
gaaagatgtcctgaggctgggtggtgatcatggctgcattcacgcatctgagcttcatttcgtacaggacatcttccattctggtaacaattctattgcttctgcaccaggcaaagtccagc

SEQ ID NO: 24730 - DNA, 122 bp, Homo sapiens
acgtggcgctttccagccaatcccggctatgcgattgttagaccaatggctactcggggacgctatgcgacagcggcgggtttgctgatgattggtcgggaggccgccggcgaggcggatga

SEQ ID NO: 24731 - DNA, 122 bp, Homo sapiens
ctcctggcaggtaacggcttgttcccggtgcagacggcagactgcggaggaacgggaggccgagaggcagcaagcgaaccgcatcctcctgcagttgcagcaggaggccttccagaagagcc

SEQ ID NO: 24732 - DNA, 122 bp, Homo sapiens
ctccgccctccacctgccacactctctgggtaccattcccaggcaaggaagcggaagtgacgtgcccaaggccacaggactctaagtggcaaagtctgtgtcacctggtgtcaggtgaaggg

SEQ ID NO: 24733 - DNA, 122 bp, Homo sapiens
cttatgattttcttaataaccttttctctagcttactttaagaatataataggccaggaacggtggctcacgcgtgtaatcccagcactttgggaggccgaggcgggcggatcacgaggtca

SEQ ID NO: 24734 - DNA, 122 bp, Homo sapiens
tccgcagacgcagctagggtacagccttgaggacgtgcatgtcatcggccacagcctgggcgcgcacacggccgcggaggcgggcaggaggctggggggccgcgtgggcaggatcacaggta

SEQ ID NO: 24735 - DNA, 122 bp, Homo sapiens
acactgttgataagaagaactaagcagtggtgtggccatttcatcctcacagcaaagctgcgagagggactgattcttcccatcttaccccacacggaagctgaggctcagaaaggctaagg

SEQ ID NO: 24736 - DNA, 122 bp, Homo sapiens
gctgcaggatggacttgctgctctggtcaatgcactcgccagacctctgtgtccatggtccgcatgtctaggtcaggggaccagtatcaaagtgaagactgggcaagtaagccccacctgcc

SEQ ID NO: 24737 - DNA, 122 bp, Homo sapiens
cactgactacacccatgccccctaacacaccagctcacactgtaaatccaatgctactagcgccaacccaggcactccacgatatgccaccctcaaggcatagccccataacacactctaac

SEQ ID NO: 24738 - DNA, 122 bp, Homo sapiens
agagtgatcatgtgtttggaacgcagctccagcccagccaggggaccagaaaagccctcccgcttccagggaggatgtgcatggctctgccaatgcctgtctcccagggccgctggcaggtc

SEQ ID NO: 24739 - DNA, 122 bp, Homo sapiens
aaaaaagtaatcgcttcccctcgggagccataatgtaagaacaaattcacattgaaaactcgactagaaaatttgttcatataccctgtttctgatcaaagagtggagaaggtaaagggtgc

SEQ ID NO: 24740 - DNA, 122 bp, Homo sapiens
ggggcccggggtgggagttggactgcgtggctgcgcgtccccatggcgaccgggcgggtgcgcgcgtcaggggctggggcctgaggcggaagtcccgcccttgccggctcccgtgagacctt

SEQ ID NO: 24741 - DNA, 122 bp, Homo sapiens
ctgtgcgcagccaccctggccgccgtgctgcagcgcatcaaggagaacaaaggcgaggagcggctgcgctctactattggggtcgacggttccgtctacaagaaacacccccagtgagtcag

SEQ ID NO: 24742 - DNA, 122 bp, Homo sapiens
ttacaaagttcttatcatgtaagtctcaggacacaaaatgacattgagaatctagtttagcggggtttccaggaaagacgaagaaaggttatttaggtttctctttcatttctcttttgcta

SEQ ID NO: 24743 - DNA, 122 bp, Homo sapiens
acctaaaaatccccctaatgacattttatttgggttatctcattcgatttttactttgcacgtaaggaagctgagtctctgaaaggttagtgacttgtgcaagtcaaatagctataggtggc

SEQ ID NO: 24744 - DNA, 122 bp, Homo sapiens
cgcgtgtgtgtgtctccgagtccctgggagagtggaggctcattcactgattagatccagcgctgagaggcagcactgctccttctctcacgccaactgagtctcttgatctgtacatgcaa

SEQ ID NO: 24745 - DNA, 122 bp, Homo sapiens
tccccaggacctgccccaacgacgcttatcctggccctaccccaggcctcgccctcatgacgctcatcctggccccaccccaagcccccgcctcataacgctcatcctggccccgccctaga

SEQ ID NO: 24746 - DNA, 122 bp, Homo sapiens
tgccccaggcaggattagaggtctctgagtgggacaactgtaagaacaccagagaaggcacgaacggtgccggcgccgccatcggtccgtccgtggcagccaaaagtgccagatatgctaac

SEQ ID NO: 24747 - DNA, 122 bp, Homo sapiens
atcccagtaagctctagcacccgggcgcgggtaacgggaagcgcagaaccaaatccccagcgcccaggtcacctccccagacccagccttgcagggaccagggctttagggctcacggaccc

SEQ ID NO: 24748 - DNA, 122 bp, Homo sapiens
agctcagagtcatcggcctcgcttacagggacgtcacactacccgctctgtggggggcatcgtgtggtctggacttgctgagcagaaagtagccgctgccctcaacacctccctagagcatc

SEQ ID NO: 24749 - DNA, 122 bp, Homo sapiens
cgctcagcctgcagtgggtaatgaagcgtcaccgtgctctcccggaaggacaagcagccacgtgggatgggcaggtgagggaggggggcacggagcagcagagaggccgggcatgctggatg

SEQ ID NO: 24750 - DNA, 122 bp, Homo sapiens
ctgtttttgctcacattgtgaaaaaacgcaaaaagatgggttttcagtcatgagtggtggcgggtgggcctgcagggatccagtctgacctgcagccaagagtttcacttcccactttgtca

SEQ ID NO: 24751 - DNA, 122 bp, Homo sapiens
ctgaccaggcatttttttttctgagtaagacaccttctgggcctgctgtcatccttactccgaatggtgctgcaagccagagtcaaaacatgtgaaataatacatgaataggtctataatac

SEQ ID NO: 24752 - DNA, 122 bp, Homo sapiens
gcagcatatctcctgtaatcactcccactgatacttcatgagctaaactccccaatcagacgtccaaaacataccctccctcgtgccctctcactcgagggcaatatgatttctcccgctgt

SEQ ID NO: 24753 - DNA, 122 bp, Homo sapiens
actcggggctcccagccccaccccaggagaggcggatcccgtgggctggggctggggtgccggttcagcatttctctaacacaccccgcggatgtgcagggccacacggagagccatccgcc

SEQ ID NO: 24754 - DNA, 122 bp, Homo sapiens
gttgctttgtagcattctgcagctgggctgcaggcgccgtgggcctccgccagttgtgttcgagacgcggttcggccacagaagttttagcttgtgacttttggcaagtcagtggccctctc

SEQ ID NO: 24755 - DNA, 122 bp, Homo sapiens
gcgggtggaagaagatggcgtcgggtggtggtggctgtagcgcttcggagagactgcctccgcccttccccggcctggagccggagtccgagggggcggccgggggatcagaacccgaggct

SEQ ID NO: 24756 - DNA, 122 bp, Homo sapiens
gagagaacaggaacaagaccagtagggggtcccgctcagtgatccatccctcctgctgggcgctgacatttgacaggtccattagaaaaaaagacactggggggtggaagtagggaagaatg

SEQ ID NO: 24757 - DNA, 122 bp, Homo sapiens
aatagacgcggggcctgaggctcctggacttgaggtattaggctggtgcagaagtaattgcggcggccgggtgcgggggctcaggcctgcaatcccagcactttgggaggccgaggcgggcg

SEQ ID NO: 24758 - DNA, 122 bp, Homo sapiens
gctgcaccggggcccgcgcagcagcaggggtgagcagagggcggggcgggggcggccgggcggggcttactgtgcagcgcgtgccaacccctgggccagacccgctcctgccccctgcccgg

SEQ ID NO: 24759 - DNA, 122 bp, Homo sapiens
aaggctcttatgcaaatactcatgtccctaaaaaaggtaacattatgacttaaattcacacgttgatagaatactatcagatttcttccagagagagtgttttgctgtagagcaggtgataa

SEQ ID NO: 24760 - DNA, 122 bp, Homo sapiens
cctacgatgaagaagatgcaggaagcttagaggccgaggctaggcggccagacgaagtgtcgtcctctgccccggtctcggccccagggagcctggcacctctccagcgctggcgcgtgaag

SEQ ID NO: 24761 - DNA, 122 bp, Homo sapiens
ctgctcccctaactgcatgctttgcaaagcgcagacggcagctggctgcttcctctcctccggtggccttattataaaggcaggatgggggagccagcgccctcttccgaggggaaggtaac

SEQ ID NO: 24762 - DNA, 122 bp, Homo sapiens
gcggtcagctctgcagcagctccgagtccccgtgggcacagttcagtcctcacttccctccgtcgcagattaggagctgagcctgcagccaaaacccgagcgtcttgttttgtccataaacg

SEQ ID NO: 24763 - DNA, 122 bp, Homo sapiens
agtttcctccgggccacgaagcccttcgccgcccccgcctctacccctgaaatcaagtcccgaagcccgccccactgcacgaccacctcaccctgggcgcctcaccctggtagggcttcgac

SEQ ID NO: 24764 - DNA, 122 bp, Homo sapiens
tgggagggaagtagactaggaaagctgttgaaagggctccttcacttcttaccaggtaaacgtgtgctctacattgcttgggttttcttcaagatgatttctttgtactacatatgcaattt

SEQ ID NO: 24765 - DNA, 122 bp, Homo sapiens
ttttatgaccagctgcatttattggagctatatttttttaattactgaataattgcacctcgatatggggcaagggaagaattttaggaaattgatttactttcattgtaataaaaattgta

SEQ ID NO: 24766 - DNA, 122 bp, Homo sapiens
gcgcccaggtgctcgcttgctcagatatgcgccctgttcctgcctcaggatgcgcgcccacgtgcttgccccggacctgtgcacccctagctctccccggacgtgcgcccacgtgctctttg

SEQ ID NO: 24767 - DNA, 122 bp, Homo sapiens
cccagtgaagggcagatgctgagaaaatggtggtaattgctaacatttattgagggcctacgatgagtcaggcactacgccaagcattttgcttgccttgcctcgttttttttttgagacgg

SEQ ID NO: 24768 - DNA, 122 bp, Homo sapiens
acatctcagacgatgggcggccgggcagagacgctgctcacttcctagatgggatggcggcggggaagaggcgctcctcgcttcctagatgggatggcggctgggcagagacgctcctcact

SEQ ID NO: 24769 - DNA, 122 bp, Homo sapiens
tgtagataaatacgagcccacttttttttttcagcctatcctcccccacagaggctgctgcgctacttacaaattgaattaaatgagggctgaaacggcacgcttcagcatgtactgtagtc

SEQ ID NO: 24770 - DNA, 122 bp, Homo sapiens
tgagatcacccgttaccccgccctggtctacaagtgtttgctgatatagaaacggaataacggcgctgtgggctggggaggacggagttgccttcaggcttctggtctccagccgcggggca

SEQ ID NO: 24771 - DNA, 122 bp, Homo sapiens
taaatcagagttccttcatcttaactttgttatttcagaaaatctttaaaattgagagtgcggttcaaccacaagacattttaaagagagaagcaggactcaactgaattgaaatgagcgtc

SEQ ID NO: 24772 - DNA, 122 bp, Homo sapiens
tgtgaaattaccatgtttattaattgagccagacattagctttaccttttctttttaagccgtgaaaatttgcgattcagggcaaatgattctccgacagacgctgggctccacatcccacc

SEQ ID NO: 24773 - DNA, 122 bp, Homo sapiens
gcccttctcagggtacaaggaggatggggaaggcagggagatgctgcccacagggccacacgatggttcagaccctggggaccgcccctgtggccatcagacagaacgttcgcgatgtgtgt

SEQ ID NO: 24774 - DNA, 122 bp, Homo sapiens
taccattctataggtccatgaaataccgaatattaaaagtgagggccacacattaatgcacggcatcagtatctatttgtttgtttgattcactcattggtacttctcatgtaagaaacagc

SEQ ID NO: 24775 - DNA, 122 bp, Homo sapiens
caatcacatctgattatcatgacatcctatgaggctggtagtattgccactcctcttctacggatgaagcaattgagattcagggaggggaaatggcttgcccaagaccaccaagaaagtgg

SEQ ID NO: 24776 - DNA, 122 bp, Homo sapiens
gagccaagcgggaaggaaaaggagaacttcagggtttggagagactggagaagttgtgctcgcgaaggcaaaacctcaaaaacctgaaagcctaactccacgtttaccagcaatgtaatttc

SEQ ID NO: 24777 - DNA, 122 bp, Homo sapiens
gaattttttcagcaaagcaagcttcaaaaactctggagagaatttctgagaatcacaatgcgactaaagcctttttctccattgaattttaaaattctgtccttgaagaaagacgcctcaaa

SEQ ID NO: 24778 - DNA, 122 bp, Homo sapiens
agaatcgggaaacgccaggaggcatattgcgcttgcgcacggaggggccggaagtcgaggcgggagtgactctgcttccgtttctggttttgctctagtgtttgggtttcttcgcggctgct

SEQ ID NO: 24779 - DNA, 122 bp, Homo sapiens
ggtggtgagttgtgaggcgcgcccagtccctctgttcccgcctggcacttgctctggccgcgcccgccccatctgccacttcggagaggccacggctctgagctgcggccgctagtgccctg

SEQ ID NO: 24780 - DNA, 122 bp, Homo sapiens
atccaccttctgaaatagaatacgtagttttcaagaataaaacgtcatcgttgcattggccgggaatcgaacccgggcctcccgcgtggcaggcgagaattctaccactgaaccaccaatgc

SEQ ID NO: 24781 - DNA, 122 bp, Homo sapiens
ctgcccctccttgggtcccagagcctcgataccgccctgcggaccgccctgtggcttcctcgcagccctgggctacaaatgccaggatttctcaggctcagactgagggttttacttcaccc

SEQ ID NO: 24782 - DNA, 122 bp, Homo sapiens
gtcagtcgcagcgcctccctcaagtctctgagctcactgttgtgactgaggcaggctgatcgcggacctcatttgcatgccgccccgccattggctagtgggacaaggtaatgctcaggccc

SEQ ID NO: 24783 - DNA, 122 bp, Homo sapiens
ggttggctgcgccagtccagagttaaactttcagccaatgaaaaagggcgcgaggcgtgacgcacggaaacgtcatgggaattcccccctccggggggccgagaaggggctttcccggccct

SEQ ID NO: 24784 - DNA, 122 bp, Homo sapiens
gtggctcggccgccgcaggctgcgctggcgtccgcgtaggctgagtcccagtcatcgatccggggtcaagccccagttttgattccacttctgcaaatggggacgggaagggggttgggtgt

SEQ ID NO: 24785 - DNA, 122 bp, Homo sapiens
aagatgctccaccagggcacaggctgtgtctcactcaccatttacctcatcccatcggggcgctcaatctatggtagacttcaatgaaaaactggctgaacaaatgaatgtggttgcttttt

SEQ ID NO: 24786 - DNA, 122 bp, Homo sapiens
cgtgggcctgcgcggcgttcttccttttcgatccgccatctgcggtgggtgtctgcacttcggctgctctcgggttagcaccctatggtgccttctcttgtgatccctgacctaacctgtct

SEQ ID NO: 24787 - DNA, 122 bp, Homo sapiens
actgcgtttatgagctgtaacactcactgggaaggtctgcagctttactcctgaggccagcgagaccacgaacccactgggaggaagaaactgaacacttccgaacatcagaaggaacaaac

SEQ ID NO: 24788 - DNA, 122 bp, Homo sapiens
tcttcaggtttttattctggtattgcatacaccgggactgttgggtcacctctaccttcacgctcttcaaaataacacagctctgacttccttccacacctaccatcttggctccaagaact

SEQ ID NO: 24789 - DNA, 122 bp, Homo sapiens
tactgagctcatacatatgtgtcagatacctatgtgtcaggtactatacacaacgcattacgtgattgtcatgtttaatcttcacaccaatcagttgttaattaaccacattttacagacag

SEQ ID NO: 24790 - DNA, 122 bp, Homo sapiens
acccattcttccgctctccccccactcttccccaggggtcgtcaggcctctgcaaaggagcgtgcaagacagaggccttctccagtatggaagtcaccaggaggcagtctaggggctgtggg

SEQ ID NO: 24791 - DNA, 122 bp, Homo sapiens
ctagttggcaaagaaagaccgtggcagaaggaagaggccgctccagcgcatcccttcgggcggagcagaagctccacttgtggctaggccatgtgccctctccgttcctcgggccagccttg

SEQ ID NO: 24792 - DNA, 122 bp, Homo sapiens
ccgcaggctttagttactgctccgaggccctcggaccaaagagaggctgcgaggaggacgcggctcgtttagctcgctgcgaacctcaagataacccttggtttccatgcacatccccccaa

SEQ ID NO: 24793 - DNA, 122 bp, Homo sapiens
ggatccctagcgtgagaagggctcctttacactcagaggtgccgtaatggagccaagggacggcatcctcggggctcccgagccccgagtggagaagcttggggcagagggacggcgggggc

SEQ ID NO: 24794 - DNA, 122 bp, Homo sapiens
agaagttgaagggagagggcttgggcagagtatcatgtgtctccttccagattctccaatcggataagtcattcctgccgtagagaggagtgagtgtgtagaggctacatgtatttttgtca

SEQ ID NO: 24795 - DNA, 122 bp, Homo sapiens
gtgtctgcacaccaggtcagatccccatggtggcaggtgtgtggtgttcctgggtcagggcgtgcctgcactgcatgtggctgtggccagatgcccagtaagctccatgtggccgagggcaa

SEQ ID NO: 24796 - DNA, 122 bp, Homo sapiens
cgacaacatcgtgcgcaccacggcatggggaggccagctggagctgagggccctgtcgcacgtcctgaagacccccatcgaggtgatccaggccgactcgcccaccttgatcatcggggagg

SEQ ID NO: 24797 - DNA, 122 bp, Homo sapiens
attctcatgttctttatttgtaaagtttttctgggtttccaaagagtctacccctgttatcgtaggattcctccataaggacaccatccacgggtaccactgagagcttctggctgcattaa

SEQ ID NO: 24798 - DNA, 122 bp, Homo sapiens
gctgtaacccatgttcattggaagttatgactcggcacatttttcctgcacagtcttgtgcgtcaacttctgctcatttttttcagggtcagtgttcaaaatgacatttggaagatatgcct

SEQ ID NO: 24799 - DNA, 122 bp, Homo sapiens
ggcctatctcctgcagaaaaattagggtgagccccatcctcgatctgctccgccaagttgcgggaccgcggggcgtggcacgctcggggcaggcggtccgaggctccgcaatccctactcca

SEQ ID NO: 24800 - DNA, 122 bp, Homo sapiens
gagaatcctgccaggacctcagagttctggtgcaggctggaccactgagagtggggtgaccgtctgtgcctggcagggaacccccaaagagctcttgccctctttaagtcctttttcctcac

SEQ ID NO: 24801 - DNA, 122 bp, Homo sapiens
gcgcggctgcagccggcggatccctcttcccaggctccgtggtcgcgcagcgggcggaggcgcccgggaaggggaccccagtgctctcgagatcaccgtcccttcccgagaaggtccagctc

SEQ ID NO: 24802 - DNA, 122 bp, Homo sapiens
ttggcccacgtcttgtcagtgacgcacttcctgtcagtgacgcacttcccctctgctgggcgcgcggtggacggtctgaaagggagtgttcgggtttcgctggggcctcgcggctccagagc

SEQ ID NO: 24803 - DNA, 122 bp, Homo sapiens
gaactcgtttaccgaaatctaatctgaggcgtttatcagaagcaaagaaaaaataaaatacggcccacggaggcctaaggagtgaggcatccaccattaatgactctaccgggaagcagata

SEQ ID NO: 24804 - DNA, 122 bp, Homo sapiens
gacagcagatccactgaatcagaacatggcatgttccatccaggctcccgaggtgacttccgagatgtttccacactaccttaacttaggctccgcgggcctcctgcagttgctgctgggct

SEQ ID NO: 24805 - DNA, 122 bp, Homo sapiens
tggtctgtctgttgggaggcccagggagtcagcaagtctctaaggatgtgtgggagcctccgtcagtcactccagagctctccatcagctggagaaaatacagcacaatgggtttgtcttga

SEQ ID NO: 24806 - DNA, 122 bp, Homo sapiens
gagctgtgtactaaacaagctctgtaaactgtaaaactttgtctagatgcttccagcccacgtaaagatagatcaggtctcttccaagtttaaccttcagcagccgcagtccattgcacata

SEQ ID NO: 24807 - DNA, 122 bp, Homo sapiens
gagactgggagcccgtgtggccatgttcccatctcttccctaccagcctggaaggtgccccgtgccacaagagaaacaaggtcaaccacacagagatggaaggcaagggagcctggcatcag

SEQ ID NO: 24808 - DNA, 122 bp, Homo sapiens
cgggatggtggccggtggctcagggaagtcccattcgaaatagttgaaaatagccgaagtcgttgctcattttatgattaacagtatcctctgaggcctcccgcccaccctcaccgcggctc

SEQ ID NO: 24809 - DNA, 122 bp, Homo sapiens
aactgggggcgcctgcagggcgcagagaggcgaaggcaccggtgtcagggagaacgcatccgttaccgcccgcctcccgcaggtctgcgtcaaactagatcctggcttctgggttcctgacc

SEQ ID NO: 24810 - DNA, 122 bp, Homo sapiens
aaccgcctgggctctctgccccgggacgcactcggtgcgctacccgacctgcgttccctgcgcatcaacaacaaccggctgcgtacgctggcgcctggcaccttcgacgcgcttagcgcgct

SEQ ID NO: 24811 - DNA, 122 bp, Homo sapiens
gtgtccctgttccccagactagggcaacactgagggttcacgtgaatgagagactcaatacgtccccctcacccctctcatgtttctctcctcaggtccagcgtcccatccctctgacgcca

SEQ ID NO: 24812 - DNA, 122 bp, Homo sapiens
gtgtctgacttgatgccctctgtcatagtgactccaggcttggccctgctgggagatggacgcccagccactatgggagtgaagtccaactcatagggtcattttgaatgggaaaactttga

SEQ ID NO: 24813 - DNA, 122 bp, Homo sapiens
ccttggtaaagaatgagcacctaactatgggatgtcaggtgattgcacagcctgagatttcgatcatgggctgggtgttggatactcacctagctataaggttgggtgctttatttatttat

SEQ ID NO: 24814 - DNA, 122 bp, Homo sapiens
cttctctctgtggctgtggggtctcaaaaattgggggaggggttccccccaccccacccccgtcttgatgctactagttcatgacccttgaggtaccactgaagggcacagctccttagcct

SEQ ID NO: 24815 - DNA, 122 bp, Homo sapiens
ggcccagccagaagaacaggtgagcggggaaggggttcactgttgttctccatttgggagcggcagtcacctatcctgggtgccaaaggttaccaaagagatgggtggccaccttaagggag

SEQ ID NO: 24816 - DNA, 122 bp, Homo sapiens
gattcctgtctgtagtagggtacagtgcaaaatgccaggctatggagctcagctgctcttcgttcaaattccatcactgccatttgctgctgtgtgggttaaactggagaaacatgaaaact

SEQ ID NO: 24817 - DNA, 122 bp, Homo sapiens
cctcggaggctcttcctcaggagctgaagtcaggatcagaaaccaccaactgtactgcaacgactgctatctcagattcaaatgtaagagagcaaatcagagagaaaatttcttgcctttta

SEQ ID NO: 24818 - DNA, 122 bp, Homo sapiens
gtgtggcacctcactagggtggggagtcaggcgtcaagggcctgggctggactccgtccacgataaaagagcagacttttggcagggggtggtagatacatcaaattgacccagggtgctca

SEQ ID NO: 24819 - DNA, 122 bp, Homo sapiens
cgcgagggcgcagcagcggcaaggggctggaactggggtcggggctgttgggctcctgctcggggtgccccctctctggcccgatttccgggcccgctcaccatccgggacccactcagttg

SEQ ID NO: 24820 - DNA, 122 bp, Homo sapiens
ctaggaggagcagataagggatgtagcgggtcagagcacgggagtcacagggcctgggttcgagtcccgactccctctcttctcaacttcgtgagcctgcacaggtgtctctcttctgctca

SEQ ID NO: 24821 - DNA, 122 bp, Homo sapiens
ggggtcgctacctcctggagcttgaactgttggaacaaggccagcgcgtggtgcggctctcggagtatgtgtctgcacgaggctggcagggcatcgatccagctggtggggaggaggtcgag

SEQ ID NO: 24822 - DNA, 122 bp, Homo sapiens
ggccccgggctgcactccgagcagtgttcctggccatctttgctactttcctagagaacccggctgttgccttaaatgtgtgagagggacttggccaaggcaaaagctggggagatgccagt

SEQ ID NO: 24823 - DNA, 122 bp, Homo sapiens
ttcctagctcatacctgcacttaacaggggcgttcaagtccttcctgcattgtagtgggtcgctgggaggctctcggtacctcccggagggaaatgtgcctattcgtcaggagacgaatatg

SEQ ID NO: 24824 - DNA, 122 bp, Homo sapiens
gtcagcggccagcccgcctcagctccgccgccgccaccgtcgctgctgctgctgccgccgcgaccgctccacttctacagacttgattcttcgacagtctcgcacggcgcctgcgcgggccc

SEQ ID NO: 24825 - DNA, 122 bp, Homo sapiens
agatcaaagcgagatgaagggagttggaggctggggctgggggtggatctaggagtctgtcggcagcagatggcgaacctgggttctgtgttttgtaattaagtatagctgtgaattggtga

SEQ ID NO: 24826 - DNA, 122 bp, Homo sapiens
caggctgtgaccccgatggcgttcccctgccggtcccgcagcgcgtagtagggtgagctgcgctcatcgaccgcgatgttcaccagccgcttctgggcccggtcatacttcagaaccaggtt

SEQ ID NO: 24827 - DNA, 122 bp, Homo sapiens
tttgagcatggggactcttgtcttccaccacaaggtggatgtcacagcaccatttataatcggaaggcatttgtagcactttattgttcaaacaagcatctctttcaagcacatggaatgcc

SEQ ID NO: 24828 - DNA, 122 bp, Homo sapiens
cacaggcagtacggcctgggatggcgaacttttcccaccaccattttaccattctggctgcgctctagtctccctggcccgcaccaacggcagcagcgaggtgagccacggcaggctccagc

SEQ ID NO: 24829 - DNA, 122 bp, Homo sapiens
agcagaaacccagggtctcacgggaacgaggaaacccgcccacgcccagcctccaagcgacgctctccatgacaaccggcacttggtaacggcctcgccctgccccgctacgccgcgcctag

SEQ ID NO: 24830 - DNA, 122 bp, Homo sapiens
gccacttccgcccgcacggcgccctcgtagccgagcgctcagcgccgcccgccggccgagcgcctaaactgccgggcgcgccgccccgcccccgctcaccggctcccaatccgcgcccgccg

SEQ ID NO: 24831 - DNA, 122 bp, Homo sapiens
gcggcaacgcgcggagccggcggaagtggggctcgggtcccgcggcggggctggaggcagcgagcgccgtcgtctgcccgggcccgcccatcggggtccccaaccccatccggaccccgccg

SEQ ID NO: 24832 - DNA, 122 bp, Homo sapiens
ggcacagtacgctcagaatttattctctagttaataggagatctgacaacataaatgcaccgtgccccaatgtaatgaatacgatgaagtagtatgggggaataggctttcaataaaggtgt

SEQ ID NO: 24833 - DNA, 122 bp, Homo sapiens
gtgtacattctgtgggcatctcgtgtgtgtgtggactgtgtgctgggcgtcgtgcctgcccgtgtccttggcgccttggcgtctatgcgttctctgcacataggtaggtaccacgtgcacac

SEQ ID NO: 24834 - DNA, 122 bp, Homo sapiens
atttatttatttttttgagacaggttttcactctgtcacccaggctgtagtgcagtgccccgatctcggttcatggcaccccctacctctggggctctagtgatttccccacctcagcctcc

SEQ ID NO: 24835 - DNA, 122 bp, Homo sapiens
cgcacatacacgtcagcgcagctgaggcaggtgggggaggctgcgggacggtggtggctacgtcctggggggattccattttcttaagaaccataatgtgaaacctaactcctcttccccga

SEQ ID NO: 24836 - DNA, 122 bp, Homo sapiens
caggttaaaaactgcaaatgttttaagcagaagacagttggtgactgtgccacaggtggtcgtgacttaacaaatttgaggtgtgggccatggcgtcgacgcgcgggagtgtgtggtcagag

SEQ ID NO: 24837 - DNA, 122 bp, Homo sapiens
ttcacgggaaatttcaactgggctgggggcggtccacacatttcatcttgaatagggcagcggcctttactggtttctaggggaaggaaaggtcgtgtcctggcgtgcagctgggggcgctc

SEQ ID NO: 24838 - DNA, 122 bp, Homo sapiens
tggcacctgctcagcgaggcctcgtctaaccaagccatccgaattaactacccactcactcgccatcacatcaccccgatttaattcgcagcggggcactgactttacactcgtgtgtcttc

SEQ ID NO: 24839 - DNA, 122 bp, Homo sapiens
gcatgcaaaaagcaatcattgagtacattcttttcttctgcaatttcttctggtcatctacggcccaattatgtactactgctcttttgacccattttgataggtggcctcttccccaggag

SEQ ID NO: 24840 - DNA, 122 bp, Homo sapiens
ctccaggactgtatagacgcgcccttgctgcattgttggctgcgggagtttgttggcaggcgctgctgacatgtgtgccaaggggctgggcattaataagccggtggccgcgcgggggtggg

SEQ ID NO: 24841 - DNA, 122 bp, Homo sapiens
cttgggctgagggagctcaggacagcagagtcacgtgtgcggggctgtgcgtgttcttcccgtctccccgagcacctctcatgggttctcaggatccagtgagggccgctgcttcttcacct

SEQ ID NO: 24842 - DNA, 122 bp, Homo sapiens
tgcacacgctgtgctcaggatgcctggaggcgtcgggcatgcagtgccccatctgccaggcgccctggcccctaggtgcagacacacccgccctggataacgtctttttcgagagtctgcag

SEQ ID NO: 24843 - DNA, 122 bp, Homo sapiens
cgcgcccggagcttgctgcgcttgaatgtcccgcggcggcggcgcacgtgcggtcgctcgcggtccacctgctgcagcagcagcgtcagctcgcgctcgaacacctctagctcccactgggc

SEQ ID NO: 24844 - DNA, 122 bp, Homo sapiens
gggcgggggcgggggcgtggagggggcgcgcgcaccgagagcggatgggggcgttgggagcggctggagttgggggtcggcgcacggccacagggaccccacttcttaagctgcgaggccgc

SEQ ID NO: 24845 - DNA, 122 bp, Homo sapiens
cagggaggggtccgatgccccctaggggaagggggaggcctgtggtgggggctcccagggcgctgcagcagagagacagggagggggcaggaactaagtaaatccccataatctaaacacac

SEQ ID NO: 24846 - DNA, 122 bp, Homo sapiens
ttggcaaggtcaccagagaaggatccaagcccccgcggttgctcccgtagacaagcgggtcgggcccagattcccggctctcagcaaagaagcttgccggggtctcccacctgtctcctgct

SEQ ID NO: 24847 - DNA, 122 bp, Homo sapiens
tatctttcctaaaaggtcagacttttcatttgaaatgcattgtgccacctggcatgaatacgtattagtgaaatgataagatattcctgtggcattttagcttgagagtctctgggttctgg

SEQ ID NO: 24848 - DNA, 122 bp, Homo sapiens
aggggattttaaggaaaatttgggagcaaaagatcttagtagatgttatagtgtagaatgcggctttgggcatagtgagccttgatggaaaaagtatttcaataaaagagacggaagtttgt

SEQ ID NO: 24849 - DNA, 122 bp, Homo sapiens
catgtggtgtgtggatcacttgcatcagaatcacctgggagctgttaagaaagcaggtctcggccgggcacggtggctcacacctgtaatcccagcactttgggaggccgaggcgggaggat

SEQ ID NO: 24850 - DNA, 122 bp, Homo sapiens
gctgaaggaaaggcagccacgcccagaggaggaaacctaatgagggcagggcggtgtttccgttttccttggccgggttcagcaccctacactcaataagcgtgggctttctagcaggactg

SEQ ID NO: 24851 - DNA, 122 bp, Homo sapiens
gcccctcccacctttggcgtcacgttcaaaacaatcctttgactacaactcccagaaggccgagcggcttagcgagtgcacccgctctcggctgctccggcaaactacacatcccaaagggc

SEQ ID NO: 24852 - DNA, 122 bp, Homo sapiens
agcttagcgtctaggccacgccaggcaggctcccggagccgtccactgccccaccaggaacgttccgggctcttctgctgcgcgcggaagcaagtgaaatccagcctcaaagactctgatgg

SEQ ID NO: 24853 - DNA, 122 bp, Homo sapiens
gcagagagcacccgcagggtccgggctgggcagccgagggcagcctcttcctcgcggagccggtcagccagcagtctcaccaggagctggttagcccaggttatgccaagggctggggaaac

SEQ ID NO: 24854 - DNA, 122 bp, Homo sapiens
agccccacccagatgtctctaatttggcgttatcagagtcagtcaccccactgaaaagcccgcctacccatgagcttgggaagccctacatttacaggatggtcagctgtccccatgcccag

SEQ ID NO: 24855 - DNA, 122 bp, Homo sapiens
gcaattcgcgatcaatagcggcccctaataagtgtaataggttttaatcgagtaattatccgaattttgaccctataatttagatgttcggggggagtttgcaaggtgcttgaaagagatat

SEQ ID NO: 24856 - DNA, 122 bp, Homo sapiens
aacttggaaatccccagcaggcaccaattacttactgcgcagtcacttcactttcattctcgagggttttgtcacaatctgttgcagcattcctcacacagggcaccacctgctggctctgt

SEQ ID NO: 24857 - DNA, 122 bp, Homo sapiens
ttaggaatatcacttggcccacaaacttcctctggcctgagaaagatcagaaagcaacgtcgtctcttcagttccttcctggattctcaggaggagcaggtctccctctaagtgccacggga

SEQ ID NO: 24858 - DNA, 122 bp, Homo sapiens
gcgccctggggcccaagctccagggctgcaggcccagggccagatcctgacttgcccacccgccggctgtgtgaccttcagcgcgcgactaacctctctgtgcctatttcctcgaggaaaat

SEQ ID NO: 24859 - DNA, 122 bp, Homo sapiens
tggtcccagagaactgctttcagggggaaatggctctgagaagttataaatagagtgtaacgtgagctgggggctggcttaggagcccagagttgaccacatgcaaactccctccaaaactc

SEQ ID NO: 24860 - DNA, 122 bp, Homo sapiens
gggggtctccttgatttcgcttaagtgtggacctggtgcgcagcctacaccgccgaggaccgactattgtgaagccactttgggagcgggtcggagtggcggcagggggtgggggaagggat

SEQ ID NO: 24861 - DNA, 122 bp, Homo sapiens
cctacaagtaaaagcatctcaaaggcagggaccccaaaaactttgtcatttctacccaaacgtgcaataaaacattaccataattttttggcaggacgcggtgtctcaacgcctgtaatccc

SEQ ID NO: 24862 - DNA, 122 bp, Homo sapiens
cgggcggccccctggtgccacctgctggcctcccgtgtgtggcaagcactgccgctttcccgttgatcacctgttgggccactgtcgagaatcacggctggggtgagaactgtggcttggcg

SEQ ID NO: 24863 - DNA, 122 bp, Homo sapiens
tcatgcttccttgtagccctctctactgctgagaaaagtgcatgggtttctgtaaagagacgggaggtgataatgtctgtcttctccatcaagatgaaaatacatctgctaaattggtagga

SEQ ID NO: 24864 - DNA, 122 bp, Homo sapiens
gggatggtgcacgctcgcccatcattgaaaacttccgtgaaaaaaggcaccgtgaggacacgttgtacgggtatatacaaactgaaaactagaacaaaattacacatttttccttctgcaga

SEQ ID NO: 24865 - DNA, 122 bp, Homo sapiens
cactgtcttgagttaagactggtggtgggggaagcctgggggtggggcgcagactgcaggcggaggagctccctgccacctgccacttggggtgtaatcacagagcagctgacactccccac

SEQ ID NO: 24866 - DNA, 122 bp, Homo sapiens
taaaggggacatgccgggagttgcagtaccctcaggaaggtagcgtcttgatctgcgtggcgtggttctgtgccttgggaagagatgaatgggaagcggccagcggagcccggcccagcccg

SEQ ID NO: 24867 - DNA, 122 bp, Homo sapiens
cgctcagccgacccgagggcgccgggctgggcgggcggagtcgggccgtgggggcggggccgcgaggaaggcttggcctagcccaggccctccgcccatccgactcttccggcccttggagg

SEQ ID NO: 24868 - DNA, 122 bp, Homo sapiens
ggtccggacgtgggccactgtgtgcagtcactgctctctgttgtttccataggctacgggcgcacctacttgagctgcacgtctgcccacaccagcaccagcgacggcacggccatgatcac

SEQ ID NO: 24869 - DNA, 122 bp, Homo sapiens
tcaaagccaagcctgtaaagtctgtaaggcaagatctttgtcatcagggacgggaagagacggataagataatggtaggcactaaaggctggttcagccgagctctgggcagaacagcctca

SEQ ID NO: 24870 - DNA, 122 bp, Homo sapiens
accctccagccaggctccaggcctcctagggccagagtatctgagctttctctcgcttgccgggcctgtggtttgggggtttgtgtggagcctggtccaggagccctccttcctgatctgca

SEQ ID NO: 24871 - DNA, 122 bp, Homo sapiens
tcatgtttgagtgattttgggaaaatacccaaagtctgtgaaattgagagtccctatgctcgatgtgagaatggtacccatggccagggtgatttgagacaaaagttcttgccatccagcac

SEQ ID NO: 24872 - DNA, 122 bp, Homo sapiens
ctttcggaagctcggtggaaagtgtggctgtaattcttctgtcgtgtcttgtttcacagccgcctgtccagtgttatgtagtggcaacgggcagtactccaagggccgctgcctgtgtttca

SEQ ID NO: 24873 - DNA, 122 bp, Homo sapiens
ccagccgtgggtcagcaaaggcgtctcaggtgacccttagggagggcttctgaggcagcccgtgcggggtccgtcctggctgagcactgcgcggacggcgcgcccgcgagactcggacccgg

SEQ ID NO: 24874 - DNA, 122 bp, Homo sapiens
ttcctatgttcaggattctcttcgcttagtgggatgggagcatataaattggcaatgtaacgtcatgtgggaattacactgatacaggtacacagaatcccagtgaaaggtggggttgggtg

SEQ ID NO: 24875 - DNA, 122 bp, Homo sapiens
ctggcacacgcctgtattcccacaccaggtcttccgatcagtggtgtctgtgaagggtgccgcgagccaggctgaccaggcgcccgggatccagctcatccccttggctgggaacatcctcc

SEQ ID NO: 24876 - DNA, 122 bp, Homo sapiens
ggggaaacatgatcaatggcaaattttctttgtcttcttcaccaggccagttattagttacgtgttcttaggagaatttaccactattgagccttaagataggcagagctttaaaatcagca

SEQ ID NO: 24877 - DNA, 122 bp, Homo sapiens
ttccaatttttccactgttataaaggttgctgttgtgagttatcttagtgggctaaactccgattattcctctaggaagaacatggaatgatacattcttctaaagaaatgttctgtgtttc

SEQ ID NO: 24878 - DNA, 122 bp, Homo sapiens
gtgtgggtgaagcagactgggatgggaaccccaagatgcccaatggtagagtgggacagccgacctcccaccatgcccccagattgatagtttcgggacccgcagcaggagagggccgctgc

SEQ ID NO: 24879 - DNA, 122 bp, Homo sapiens
attagtgagccctgagtagatgagagctgctctatccatcccctgccagctgtcttcaggcgggacttggagtcggagctctgacactattctgtctcccatcagtatttcagtgaactgag

SEQ ID NO: 24880 - DNA, 122 bp, Homo sapiens
gaacgctcagggaactacatttcccgtgaagctctgggcgcagagggccgcgggggctgccgggaaaggcatacgtgcttaatcctggtgcagggggcgagcatggccgctccgcgaggtga

SEQ ID NO: 24881 - DNA, 122 bp, Homo sapiens
acagtgcccgatgccaagctccaggtagagctgcagcccgatggcttggtggcctcatcacgcccacacaaccctgcccgtgagcttgtttcatcaggtggtttggatataggggacacggc

SEQ ID NO: 24882 - DNA, 122 bp, Homo sapiens
gagttgctcagcgctgttttctctacatagaagattgcaggaaatgcctctcagctcctacgtttctcctacacagattctctaaagcagcttctggggtgtggtcactgcttttctctcca

SEQ ID NO: 24883 - DNA, 122 bp, Homo sapiens
cgcctcctgattggctgagagcggcgtgggctggggtggggacttgccgcctgcgtcgctcgccattggatctcgaggaacccgcctccacctcaggtgaggcgggcttgcgggagcgcgcg

SEQ ID NO: 24884 - DNA, 122 bp, Homo sapiens
aaaaattattgccttcatgagcctcacattagtggacagagtccaaaaaaaaagtgacaacgtaatgcgctactgcgacacaaagcaaagcaaggtgggcaagcaacactagttctttattc

SEQ ID NO: 24885 - DNA, 122 bp, Homo sapiens
ggtcttacttggagcctcttgatctgcaccagggctgccccttgcactgaaactgggtatcgggggcctgccatggctgtggcttccaggctgcagattcctgaaatgggcgaggacccttc

SEQ ID NO: 24886 - DNA, 122 bp, Homo sapiens
tcttgtatttaatgctataaatttacctttaagtaccagtttaactgtgtctcaccagtccgcttggtaatatgttcattatccttcaattagatatgtcctaattttgctagttgttagaa

SEQ ID NO: 24887 - DNA, 122 bp, Homo sapiens
aggggacaaagttggcctcaatcagtggtactgccttccgggtgctgagtctagcaggggcgatgggtatggctgaatgcagctctgctctggggcaatgagaatccctgccttcctcacac

SEQ ID NO: 24888 - DNA, 122 bp, Homo sapiens
tcatgtttggtgttatgggggaattatttagaaaacttcaggaactcaacatagatacgtcgctttttaagtttctcatttgaaactatgcgttacacgttctgctgagagccgcgaaggca

SEQ ID NO: 24889 - DNA, 122 bp, Homo sapiens
tttctgcacacccctgctacacccttgtaattactccggtttacaccatgtgtgctagctcgtaggacaagtccccttcgttgttattcttttgcaaaatgtagtctgttaggaatgttaaa

SEQ ID NO: 24890 - DNA, 122 bp, Homo sapiens
tcgacgatgacaacttgcgacagctgctggagaaggtgaagcggggcgtgttccacatgccgcactttatcccgcccgactgccagagtctgctacggggcatgatcgaggtggacgccgca

SEQ ID NO: 24891 - DNA, 122 bp, Homo sapiens
agagacagcgaatattcctgggtcaggggatcccaggtttcagtccactaggagtgccagcggaaggtgtgggtaaaggaccggggtggtggggggtggtgggaggtggtaggggtggccca

SEQ ID NO: 24892 - DNA, 122 bp, Homo sapiens
tacaaaccatctgagcatttggcttgccacctgtcttggtgtcctctactgcctgaaaatcgccagtttctctcaccccacattcctctggctcaagtggagagtttctagggtgatggtat

SEQ ID NO: 24893 - DNA, 122 bp, Homo sapiens
tggtgagcatctctgatgagccacacaattcagggagttaaataaagaagagatggaccacgcagaaaacactgctttctattttcagggccacagctggcacatatggagccattgttcag

SEQ ID NO: 24894 - DNA, 122 bp, Homo sapiens
ggtgcgcgaggccaccagcaatgacccctggggcccccctagttcgctcatgtccgagatcgctgacctgaccttcaacacagtggccttcaccgaagtcatgggcatgctgtggcggcggc

SEQ ID NO: 24895 - DNA, 122 bp, Homo sapiens
acgtcgctaccggagccagtaaaacagcatttcagacgctttttttttgcgacggagtctcgctctgccgccaggctcgcgatctcggctcactgcaacctccgcctccttgaagcaattct

SEQ ID NO: 24896 - DNA, 122 bp, Homo sapiens
cagggaagggggccgggggcgggaccagggcgcgcgttccggtcccggggcgtggcctcccgcaggtgagtacgctgctccttcggtttccctgaaacctaacccgccctggggaggcgcgc

SEQ ID NO: 24897 - DNA, 122 bp, Homo sapiens
cttttctgggtttactgttcgggtttatgctcctgttttcctgccgccgttaaaagaagccgtagacgggaaagagggccttaaagagtgggtaaagtggcccctttgagatttgaggaggc

SEQ ID NO: 24898 - DNA, 122 bp, Homo sapiens
ttctgcctggcctagtatggctctccttcgaactcacctagacccttgcatcaaaggactcggggactctgctgcagtcatcctagcacggtcgagaggagtaggaaggtgcccagcggctc

SEQ ID NO: 24899 - DNA, 122 bp, Homo sapiens
tcaacccaacacgcatttcagtgagtcagaactcaagcttcctcagaaacaaggttgcttcgtcgtgctcaaggtatgatcacagcagggccacagcccaagctcaagactcaaaaaacttt

SEQ ID NO: 24900 - DNA, 122 bp, Homo sapiens
ttgagcccaataggtggaggctccgtgagctgagatagcgccactgcgctcctgcctgggcgacagagtgagaacctgactcaaaacaaagaaaaaaggaagaaaagaaaggaagggaagaa

SEQ ID NO: 24901 - DNA, 122 bp, Homo sapiens
cctggcctcattcccgctcacctccagccttggccgcctctcgcgggctcttccccgccccgaacctcccacctgcgggcccactggcacccgcggcgctcagaggctctaggtggctcccg

SEQ ID NO: 24902 - DNA, 122 bp, Homo sapiens
ggcaacaaagttcatgatcaaagtaatgtcagctaagaattttgctagctaggcacagaacgcataggaaagatgaggtcaaggcaagtttcttagaagccatgaaggctgagctgaatttg

SEQ ID NO: 24903 - DNA, 122 bp, Homo sapiens
tcagcctgtaaaatcacagagcaagggatgtggatgcaggcaggggtaaagaatttgtgccgattaccagtccacaaacatgggttagtgtttgttctctaggcatccctgtcgggcccatt

SEQ ID NO: 24904 - DNA, 122 bp, Homo sapiens
ggattagaatggggctcaggcgcgtggctgatctcgaacggcgctctataccacccccaccgccccctagtaaccccagaggttattgttaattggagctgaactctggatacagagatacc

SEQ ID NO: 24905 - DNA, 122 bp, Homo sapiens
taactcattgggaaagatattagacttcaaatcacctaaggcaaaccctacttcctggggcgcgggcgcgggcgctggcgttaggagacgtcactcccgcgcataactgacatggggccctc

SEQ ID NO: 24906 - DNA, 122 bp, Homo sapiens
ccctccatggtcctcactgctggtaggtgctcccgatggccggtgctctcctgttacatccgccggcccacgctgtggctccctggctgttcagagccaccaccttccttcccacggcacgg

SEQ ID NO: 24907 - DNA, 122 bp, Homo sapiens
cccggctgacaagtgcggggctttttctctcccgcaggtcgccttttaaaaaaatccctgcggtgggtgggaaggagctggatcttcacggtctctacaccagagtcactactttaggcgga

SEQ ID NO: 24908 - DNA, 122 bp, Homo sapiens
ctcgaccacacacaggggcggttacagctcttgaggtcccgggggtcacaggacgccttccgagttggggggaggagaaaacaaaaccacaggaagaaacgaacaacgctttcgggtgggcc

SEQ ID NO: 24909 - DNA, 122 bp, Homo sapiens
gggtcctcgcccaaacacaacccaggcactaccgaccgtgctcggcaggaccggccttcacgcattgttcgctcacccaaggtttattaagggtggacacacatgcacacgtgcatgcacac

SEQ ID NO: 24910 - DNA, 122 bp, Homo sapiens
agtccgggaaggctgggtccgggaaggcagggtccgggatgggtccgggaaggcagggtccgggaaggctgagtccgggaaggcagggtccgggaaggcagggtccgggatgggtccgggaa

SEQ ID NO: 24911 - DNA, 122 bp, Homo sapiens
gttcttgtccaagcttctcagattatttgtccctcctttctgtctctgagatctgcctgccgcagtaagcatgctttcatgactcccacctccatgtgggagggtttcaaggacaggctttc

SEQ ID NO: 24912 - DNA, 122 bp, Homo sapiens
gacacaagtgggccaaagagctggggctcaagccagtcaccacccggaatctcctagaaccgagctggagaaactaccagccctagaggggaaacaagggtttcaagactccagcgccacca

SEQ ID NO: 24913 - DNA, 122 bp, Homo sapiens
gccccagtccgtgttcctccgaagcgcagggacacacatgtccttcctgccacgtaaggccggcctcgggagagaatctcccgaacagaccaaaacgtgtttccgcccggtttcgaaccggg

SEQ ID NO: 24914 - DNA, 122 bp, Homo sapiens
agcctcctctctaaaagatagtggtagcatatccttctagagcacctactgtgtgtggcacggttctatgcactttccatatgttaactcattcatgctcaagtgcgtaaatattaccattt

SEQ ID NO: 24915 - DNA, 122 bp, Homo sapiens
cccactggctcactttccatcagctctaaaagtttcctgactatccaggggccacagctgcggttgcctgggcttttccattcctgagactaaaagaatgttcacagctggaacctgcacca

SEQ ID NO: 24916 - DNA, 122 bp, Homo sapiens
gcgctcaggtctgcgcgaagctgtcgcgggagcaggcaccttgtggtcagctctgggacccgcatttgcagtgagtgcgtggagccccaggcaaggcctgggaaaggttgcaggtgaagaga

SEQ ID NO: 24917 - DNA, 122 bp, Homo sapiens
agaggaatcaaaatctcagagctagaaattgttaactgggagctgatcagactctgtctgcgtgggggagacacagtcacttagataagaggtggggatggctttcattataaaaataaaag

SEQ ID NO: 24918 - DNA, 122 bp, Homo sapiens
gacagtcctgcccggcggcggggtgggtgaggtggacaggaggccctgtggggcctgtgccgcatctactagtggccggggcagtcattgtgtttggcttcggggaggccctgccctggggt

SEQ ID NO: 24919 - DNA, 122 bp, Homo sapiens
ctctcctgcccacttcagcggcccccgctcctccagatacctcggggagttcttaaagaacgccatccatctggagcctcacaagaaggccatggctgggggccatgtgttcagaaatgccc

SEQ ID NO: 24920 - DNA, 122 bp, Homo sapiens
tgtccttgtaggacccacgtggtggtcatctcccgtcacgggggtccagtcttggctctgcgggcttcccaggggccacatagggagaggatccttcatgcatcagagtatcgcaggccaga

SEQ ID NO: 24921 - DNA, 122 bp, Homo sapiens
ccctctctgcccagcccctttgaggtacaggtgagcccagaggcaggagtgcaaaaggtccgggcctggggtcctggtttggagactggccaggtgggcaagtcagccgattttgtggtgga

SEQ ID NO: 24922 - DNA, 122 bp, Homo sapiens
aatggaggcacaccaagacagaattaaaaccctgatcaggaaccctgtcccgtcgcccaccgccctttcccaaaaggcacatggggaacttgtgctagaaaaggaatgctttctttttcttt

SEQ ID NO: 24923 - DNA, 122 bp, Homo sapiens
aactaaaccccgccaaatgttgagattccggacgtgaggggtgcttggatggggaacccccgaaagaatggacatcacgtccaccagagggtgctgtgggggcaaatttgtgccaggagggg

SEQ ID NO: 24924 - DNA, 122 bp, Homo sapiens
ctcggggcttgcgcagaggggctgcggtgagtcctgaccctgagtgggggtcacggggctcgttgctcgctgaagtgaacacggttgcagctgtgcacagtggcggagggagaggatgaggg

SEQ ID NO: 24925 - DNA, 122 bp, Homo sapiens
aaaaccaataatcttcaatgcaaaggcagagcagcctagatattcatgtgctgggatacccggaagattcaaaacttctcccctaggagggagagcatttggaccaatgcctaatgcatgca

SEQ ID NO: 24926 - DNA, 122 bp, Homo sapiens
gcctgacattctcacaacccaccgggcaccaaaacggcccgcccccgccacccccgtgtccgccaagcgctctatttatgtttcagcccagcgatttgcataggccccgcccccggccctag

SEQ ID NO: 24927 - DNA, 122 bp, Homo sapiens
gcacaccctgcacagccctaaatccattaaaccttgagtcaatacagcacaggttttctgcgagcacagggttggggctagggttacagattaacagcatgtcaaggcagaagaattttcct

SEQ ID NO: 24928 - DNA, 122 bp, Homo sapiens
tcctccacaggtgtgagccacctcctctggttctttgttgtcctcctcctcatttaaaggcgggagccactgcctggctattactttctcctcctcatcctcctttacagatgtgagccacc

SEQ ID NO: 24929 - DNA, 122 bp, Homo sapiens
cgaagcctgaagaggctggttgggccaaaatagcagtcgctgcaggcaccagtttcagcccgtcacctgagtgccggttcctgtgggcgcgccagtctcgcaggcagcgcgcccaagctcgc

SEQ ID NO: 24930 - DNA, 122 bp, Homo sapiens
ccaatctttgagtgtttggttaaatgttcaaactgtggcttcctcccggcgccagtcgcccgcctctgcccttaggttacattctcttaaacatgcctttctcccccactctttcgcaggtg

SEQ ID NO: 24931 - DNA, 122 bp, Homo sapiens
ctggagcggctgcgggctcagtctgcggagggcgccccggtgaagtgtggagttcgcagtcggacgcggccgcccggcctctcggttccgggccttcccctcccaggcactgcgttctgcgg

SEQ ID NO: 24932 - DNA, 122 bp, Homo sapiens
gccgatcccagcagctgccctgagccccttctccacccgggccctggcgctcggagcccgcgccgctccctcgagtcaggccgtccagggctctgctaacagctgtttaaaggcttttgctg

SEQ ID NO: 24933 - DNA, 122 bp, Homo sapiens
cacttaaattttttttaacagaaatttatctatcttacattaaccaaatttcagtgtaaccgatatttctttcaagtgaaaaattaaatctttaccatctgttagcctcaacactttacctt

SEQ ID NO: 24934 - DNA, 122 bp, Homo sapiens
ccaaacataacgcgttagccatgaaggagtcggagccctgggtccgaatggacccgcctgcggtctgcatcagcctctgggaaaccacagcagtgatgccagctgggcacgtcaggacctcc

SEQ ID NO: 24935 - DNA, 122 bp, Homo sapiens
accctcttaaaaattgttgagacggagtctcgctcagtcgcccaggctggagtgcagtggcgcgatctcggctcacagcaacctccactgtccgggttcaagcaattctaattcctcagcct

SEQ ID NO: 24936 - DNA, 122 bp, Homo sapiens
cctaggctctgacaaatcaggcagctagaccagatagtgcccagatcatctggggacgcacgagttcaggtctgaggctacgcaaggtcacaggagactcagtgtgatcacaggctgccata

SEQ ID NO: 24937 - DNA, 122 bp, Homo sapiens
ctgctccagcaccaggcggtaggcatgggggtggcagccaaggtcagctacctcctctcacgcagacaaccgccaccaagaaggcccagcccctccggcacaggaccacaaggacccacacc

SEQ ID NO: 24938 - DNA, 122 bp, Homo sapiens
agactctcctaccgcaaaggctttaaagactcgcagcgacactcacttcttgctcagtttcggctcgctgccatccactttcacctcggccgcctgcacggccgccatcttcccggagggcc

SEQ ID NO: 24939 - DNA, 122 bp, Homo sapiens
atctggttacaaacatatctttttattaaaaagcaatcagatcctgaagcgcttcccttgcggtttaccgctctccgcaggctgcttctccgaagccagcggtggtagcgcccactcggttg

SEQ ID NO: 24940 - DNA, 122 bp, Homo sapiens
caagggattgaaaccgctgcctgtgctggctgcaaatctggaggctggggccttttcagccgaagctcagaaccacatggcttatagggcaagttaggcttggggcacctgcccactgttcc

SEQ ID NO: 24941 - DNA, 122 bp, Homo sapiens
agagagaagccgtggctgcggaagaaataaaccatttcatggtgcagctccccagcgagccgctcccgtgagccggccacaacatgaaccgtggccaggattacggccccacctggcagcag

SEQ ID NO: 24942 - DNA, 122 bp, Homo sapiens
gccttcctctgctgggctccagagccactgaggcctgagcgagagccgacggcgggcgggcgcagctgctgccggagcgccggcgcgtgctggtgggccacacacctttcctcctcttcact

SEQ ID NO: 24943 - DNA, 122 bp, Homo sapiens
ctcgctgcttcctctagaactgagtgggggataagtacctttcgattcttcgggtgtactcgccgtacccattcaggagttaggaccttagcagggaaatctctgcaccgcggatctgtagg

SEQ ID NO: 24944 - DNA, 122 bp, Homo sapiens
aaagtcatgcaggcccatgtgtccctgagtttggaatcctgacctggcccagagaactctcgtgaggagatgcaaagggaagttttgcctattgtccttcatatcttctacattcgaaaaca

SEQ ID NO: 24945 - DNA, 122 bp, Homo sapiens
caagtatgtccaccctcggagccagacccgggatacgacctatgtcccaaacttcctcagcgagcccggcctccacacccgggcccgggtctctctaaaggacctggccctgcagctgctgc

SEQ ID NO: 24946 - DNA, 122 bp, Homo sapiens
gagaacgattttaccgccgatttaagcgttctcctttttccccttcgtggccgttttattcggcactgaaatgctgtttaacctcagcaagagtaggcgtgggaaggtggcgctcttcccca

SEQ ID NO: 24947 - DNA, 122 bp, Homo sapiens
ctttgtgatgattctgttttcacgatgctaatgtgttgagtatctggctgaccttctgtgcgcacacctcctcatcttctgccccggccttgcttctcatgtatcttattccaaagaactcc

SEQ ID NO: 24948 - DNA, 122 bp, Homo sapiens
tgaagggtagctgagaaagcggggtgggggctggggccggtggggggagtggtctctcggcgggaagccgtgcacgcctccagcgttgacactttcccggtgcactttttctggtgggaggg

SEQ ID NO: 24949 - DNA, 122 bp, Homo sapiens
gggaagatgcacatataatgaaagataatatccaaacctctgcacgccaacacgtgcagacgcaggcacaagtcctatcatattgaaggtcgcaactcactgggaagccctttccccagagt

SEQ ID NO: 24950 - DNA, 122 bp, Homo sapiens
ggtgtcactgtgccgcctgtcccgtgccaaggtaaatgaggaggcgctgcaggggttgcccggcgccctgcccgagcccaggccacaggccgcttgcagacagcaggtaccttgttggcccg

SEQ ID NO: 24951 - DNA, 122 bp, Homo sapiens
ggctcaggtgctcaggaagcgtggtccttgttttttgaaaccaacttcatttctgactctcgttgttattctgtaactcaacctccatcctgcttggggcttccccacacccaagagagcat

SEQ ID NO: 24952 - DNA, 122 bp, Homo sapiens
gcaggtcccctctgacgcctccgggagcccaggtttcccagagtccttgggacgcagcgacgagttgtgctgctatcttagctgtccttataggctggccattccaggtggtggtatttaga

SEQ ID NO: 24953 - DNA, 122 bp, Homo sapiens
ggttccagccccgggctgggcagggtctggagggaagggctgcaggggcgtccgtggccgcgaagaaaggccaaagcgccaggcacagggcccggagaaagtgacagacctgtccctggcgc

SEQ ID NO: 24954 - DNA, 122 bp, Homo sapiens
gtcgccattggctgggcggcaagctccgccccctggactgcggcgcgggtgggggttgtgcgttttacgcaggctgtggcagcgacgcggtgaggagacggcccacggcgcccgcgggctgg

SEQ ID NO: 24955 - DNA, 122 bp, Homo sapiens
cagctcaatgacgccacacccactgaaaacactcgtttctgggaagccactattagaacacgccaagaatgttcctaggattttcctgcattctgcacaatccagaatccagattttgatca

SEQ ID NO: 24956 - DNA, 122 bp, Homo sapiens
acctgatgggacgtttccacgtgtctctagagaaggattcctggatctagctggtcacgacgatgttttcaccaaggtcacaggagcattgcgtcgctgatggggttgaagtttggtttggt

SEQ ID NO: 24957 - DNA, 122 bp, Homo sapiens
ttaaacaaacagaggaaagagctatggtttaaataaatgtggttgaaaaacttcaggtcacgaaaagctcaagcaatatggggtcttctaactcttgtgatgttacaaatgtgggcagacag

SEQ ID NO: 24958 - DNA, 122 bp, Homo sapiens
cggcgagtccctattggccagccatttgcgggaggcgggccctgattggccggggggatgcgggggatgcgggcggcggggttaagcgcgtcgccaccgcccccgcctaggcgagagcccag

SEQ ID NO: 24959 - DNA, 122 bp, Homo sapiens
tcccagcgccgcgagtctccgggcgaggccgccaccctctcggtcccttgcgaaagcggccgcggggtgtgcggatgaactggagcttaatgtcaaatcctggcacaagatgttcaaaagaa

SEQ ID NO: 24960 - DNA, 122 bp, Homo sapiens
gctgagcgttggaagccattttggctgcaacctacctgaagcgatgtctgcctttggtcacgacgaggcctggatggaggccggaggctttggtctggaggctgccgaaagaacggaatacc

SEQ ID NO: 24961 - DNA, 122 bp, Homo sapiens
ctgtggaaccggggtcaagccagggctgcgagcggagccagaggctggagaggcactaggcgggggcgggacatgcgtggagggggcgaggccagaccagagaggggagggatccctcgcac

SEQ ID NO: 24962 - DNA, 122 bp, Homo sapiens
cctctacgttgcctcccactgtctaaaacccttggcttcttgcgtgaagtcaggcaaacccgggaagcagaaaagcaaggacccaagtcacccctggtagtgcagcttggaaatgagacagg

SEQ ID NO: 24963 - DNA, 122 bp, Homo sapiens
tctgtttcctaggcactgcaccaattcacacatggatacagacttccaacaaatgactatcgcccctgaactttattgtctcataagcaaagcgtcagtctttcccctgtattctatattaa

SEQ ID NO: 24964 - DNA, 122 bp, Homo sapiens
cctttttagaatcctccttcccaagcttacctgagcttcctaggatgcacatgatctgcccgctctccacgtacaaggagacatctttgaggatctgcctggtccactgctgccggcaagat

SEQ ID NO: 24965 - DNA, 122 bp, Homo sapiens
gttgggagaggtttgggaaaggaaaggcagaagcagctgtgtttgactctgtgttctgaacgccactgggcttctcctgcttggctaagaaagatttggcagcagtcagggtcatgaagact

SEQ ID NO: 24966 - DNA, 122 bp, Homo sapiens
cgagtaaacgcaggaataggcgagtacgtagatcaggaggcgggcgaaggggtaaagagtcgccatgcactgttgccttcctgagaggcctttctggagtcctcacccaactatgccggttt

SEQ ID NO: 24967 - DNA, 122 bp, Homo sapiens
ggggcgtggccgcgggcggaggggcgtggcctccttttgtagccaagcagctataaaaagcggcgcgctgtgtcttcccgcagtctctcgtcatggaatacgcctctgacgcttcactggac

SEQ ID NO: 24968 - DNA, 122 bp, Homo sapiens
cagtcagttccgaaggggtagtggatgtcaaaagaacatcaacgacgcaggtaaacaggacgacaagcatccacgattgcccaaccttccgcagagatggcatccccagcgggaagtgaaag

SEQ ID NO: 24969 - DNA, 122 bp, Homo sapiens
gtgggtacagcaatctgttttagaaaacctccaggtaatgctgatgcactctcaggtctgcgagacactgggcctgcccattataaaaatgttaaacatttaagaaaataactatctcgttt

SEQ ID NO: 24970 - DNA, 122 bp, Homo sapiens
ccttgacatgcgcagaaaatactaaattatagcgttactgggccaattggggcagatccccgagtagcgaagaaatagaacctgaggagtttcttcatcagggctgtcccatccacctgctt

SEQ ID NO: 24971 - DNA, 122 bp, Homo sapiens
ccagcccactcaggctcaccgtgaaagccgctgagctgtgggcgttctattttccctttccggcctcctctgagtcacagtgctgggaggagggggaagccactcttggagatgggccctct

SEQ ID NO: 24972 - DNA, 122 bp, Homo sapiens
caagctgggaaagcagggctgataactgaactggagaccatggactcacgagagaactgacggagggctacgcaggaagggagcgcgagctggccagggccggcggcctccagctgatttga

SEQ ID NO: 24973 - DNA, 122 bp, Homo sapiens
acatgaatactatactgaaatctgtgctctcaagatctagcagtgaccagggctgcccggcgggggctctcctggcaagtcaggaaggtttctgttgctaatataacatagaaacacattag

SEQ ID NO: 24974 - DNA, 122 bp, Homo sapiens
attactattacttttacaaagtgttttccctgacaccctctggaagtcctcccaggaaagcggatccacagcgctcctaattttagggaccctgaggggagccagctacatttccaaatggt

SEQ ID NO: 24975 - DNA, 122 bp, Homo sapiens
ttgcttgccccattcacacttagggctcaggacgcccctgtaggcagggtgctggtgggacggctgtttcaggccgcccagactcaggcaggttccaggtaggcacagtactggacaactga

SEQ ID NO: 24976 - DNA, 122 bp, Homo sapiens
ggcactggacgcgcgggggatgcggggttgttcccagagtagccgctaaggggagccggacgctagaccgccctcccgcgttcccatgacaacgacaccggcgggcgcgtagcctggagagc

SEQ ID NO: 24977 - DNA, 122 bp, Homo sapiens
tccgctctctttatttccgcctcccccgcccccgcctcgacattaaccgtttcgcgactacgtcagttggccggtctgtttgggagagccaggcgactaatctggtatagagaccgaaaaac

SEQ ID NO: 24978 - DNA, 122 bp, Homo sapiens
ggccagcttcgggggcgctgggcgtctcggcgagaggtcggcacctgccgggttgggagacgccccttccccaccccttaggggattgttccctacacgccatcctttaccattcggacact

SEQ ID NO: 24979 - DNA, 122 bp, Homo sapiens
gccgcacgtgcagttcgcggccccgcggggtccggaggggggcgcggtggctctaggagccgcaggtccacagaggaaatccggcctggccccgatttcccagctgctggcgccgccgcact

SEQ ID NO: 24980 - DNA, 122 bp, Homo sapiens
aatagtattaaagggaagaaaactgatgggccgtggtgctaggagttgggcggggggcagcgcagtgtgaagaatgaataaattggaagcgatgcttttgtgtgttggggcctcttggggtt

SEQ ID NO: 24981 - DNA, 122 bp, Homo sapiens
cttcgtagcttcttgttaggaagaacctggaggacagagtaactctcggcagtcagcccccgcctgaggctctcttgaaggacccccttctaactcgaagctggatacccagattccagggg

SEQ ID NO: 24982 - DNA, 122 bp, Homo sapiens
tatcaatcaagaggaataatatgaaccaattaaacttccaatctatcaggaaagaaaggacgaagaggacaagggagaagtgcagaaaagggagagaagaatacagaatgagaaagaaaaga

SEQ ID NO: 24983 - DNA, 122 bp, Homo sapiens
caatgttagaaaccattttctaatagtcaggtccaagctcagttataccaacagtaggaccgatgggtttgataagtggtcaggagtgaataaaggccactggggtaagaagcatggcctgg

SEQ ID NO: 24984 - DNA, 122 bp, Homo sapiens
aacgacgagtttcagaacgatggagagctcccgcgtgaggctgctgcccctcctgggcgccgccctgctgctgatgctacctctgttgggtacccgtgcccaggaggacgccgagctccagc

SEQ ID NO: 24985 - DNA, 122 bp, Homo sapiens
gctaacaatttttgaaggccgtaagttaaacatgttaaaaactgtagctactcactcagccgacatctagtaaaaaagatgcggcaagatcaacaaggcatatagcttgcgcccgccagaag

SEQ ID NO: 24986 - DNA, 122 bp, Homo sapiens
ggctgagcccaggagaggcgggactaggggtaccgaggggggcgcgtcgctgggggtccccgcgaagttggcgcccacgcgcgctggggcgggtctcgaacgccggcacttgcgcggggcgc

SEQ ID NO: 24987 - DNA, 122 bp, Homo sapiens
tttccatactcagtcttcctgccagcctcagagctgagtacaccgttggcgattaataagcgcttgcagctcccttccctggccagcctgaggggagcggcagtggcccgtatggggtgggg

SEQ ID NO: 24988 - DNA, 122 bp, Homo sapiens
aacgtttaacaagtattccgattaatgtaaacccaatgatttcctgatgacgcctcccagcgcctgggactgacgggacgcacgggcctggatccagggcacgggggcctgggagggccgcg

SEQ ID NO: 24989 - DNA, 122 bp, Homo sapiens
ctgtgaggcctcaatgagctcggactggccagaattcccttggcctctggctcttcaccccgctgccctcgttagcaccccggggctccaggaccacgtgtgtgtgaacaattgcagatggt

SEQ ID NO: 24990 - DNA, 122 bp, Homo sapiens
tgagacagcccttgccccatcctgctctggtgggttctgtgggggtgaggggtctcccttcgtgtctgagaaaggagctgagatgggaagagaggaagcctctgagggttcttccaaaccac

SEQ ID NO: 24991 - DNA, 122 bp, Homo sapiens
gctcctgggggttctgcatctcatgaagcagccgcatgatctgctgtgccgtggggctgtcgtggggaaaaccctccccagcctcttcttgttcaggctccacactgtgggagatctttgga

SEQ ID NO: 24992 - DNA, 122 bp, Homo sapiens
gcccagcgagccagagtggtggctggtcccgcgcggtgagtgggattggggcacttggggcgctcggggcctgcgtcggatactcgggtccgctcgggagcgcgctggccgcaacgagggcg

SEQ ID NO: 24993 - DNA, 122 bp, Homo sapiens
ccaaagcctgggaactagggcgagcggtgacctggggacgcacaggaagcgagggcactgcggccgcggcgcgcatgcgcgaacacgcacacagagaggggtgcacatgcgcaggaatgcac

SEQ ID NO: 24994 - DNA, 122 bp, Homo sapiens
tctgtgaattagatgcctttgtgtgtgatttggacggctagattgggggcttctttctcccgctgttttacttggcaaataaggttgcaggttgtagagaggcagctgtagccagagtactg

SEQ ID NO: 24995 - DNA, 122 bp, Homo sapiens
tttttaatcttttatttagaaactgatctgcggaaccttcaggagattggtctcaagagacgcatctgccttctcgatgggattgttggcctctcgtgttgaaaggatcgcatttcaggagc

SEQ ID NO: 24996 - DNA, 122 bp, Homo sapiens
gagcactggaccagagccggggcgagcccggaaggtgccacctccgcccccgccccgccccgcaccccgccccgcaccccgccccttggcgcccagttacctcccagaggctgcaggaagca

SEQ ID NO: 24997 - DNA, 122 bp, Homo sapiens
atttcatgagatgttgaaatttcggcagataactttttcactggacaaaatcttgccactcggtcatccttccctgtttctatgttatataccaccaccctgctttctcctttatgtcaagt

SEQ ID NO: 24998 - DNA, 122 bp, Homo sapiens
ggaagactttctctcttccagataggggaatcttctgctaccacttaagttcaaggaacccgagtcagaaactgcatataatttcttttttttattgttggtttaattgtccaaatatattc

SEQ ID NO: 24999 - DNA, 122 bp, Homo sapiens
tcctccttggggttttcatgggcaggttttggctgagtcttaggagctcagggccagagccgctgattgtgctgtattgggcggggctgctccaggcagggaagacctccagatacagtgct

SEQ ID NO: 25000 - DNA, 122 bp, Homo sapiens
tttctctgtaactttgtcattctattaaggtctagtcccaggactgtgaagacactcaagcgttagtttgctgtttcattcctacatacatgtgagccatatccaatttgctaggagttatt

SEQ ID NO: 25001 - DNA, 122 bp, Homo sapiens
ggggaaaagtggggagccctggcgaggccctcccgcgcccgggccgcggcgctgaatcaccggccaggtatttgcatccgagagcgactcgtcccctggtgatttgtctgggggtgggggag

SEQ ID NO: 25002 - DNA, 122 bp, Homo sapiens
ttaatcatctttgtaatgtaacccaagaataactacaaaacctcataagactacagtcagcgaagagagctggattatgctaacataaatttcaaatttgaaaacattactttggttgtaat

SEQ ID NO: 25003 - DNA, 122 bp, Homo sapiens
gtgcgcgcttggcctccctagtgcgggctggcagtgcgggcagagcccggctgagaggggcggccctggaggagacggaggccgcgggtgggcccgaggcgcaagaggaagatgaggacgaa

SEQ ID NO: 25004 - DNA, 122 bp, Homo sapiens
gggcgacgagcaggagcaggcagagtggcgcccgcatctgggcagccggatccgggctggcgctccccaggcggcccgacggcccaagggccccacgtcccggcggcggcacggcgggcgcg

SEQ ID NO: 25005 - DNA, 122 bp, Homo sapiens
ctcctccccagcccgctcctctggctcgctcgccaactccgggccccagccgcgggcgggcgcacggcgggcggacagcatgctgagcctcctcgtctggatcctcactctctccgatactt

SEQ ID NO: 25006 - DNA, 122 bp, Homo sapiens
agtctcaccaacgtgtgttttcacgggcaccacagagtctgttttctatgggtggggcagcggtgaacatatccctcttaatagcggtacgggtacggccagggaggcggcagaacgtagac

SEQ ID NO: 25007 - DNA, 122 bp, Homo sapiens
ttttttcatttcaggtttattgttggccaaaaccaggctttgattgaaccaggatgaatgcgggtgttggaagtagaatatatatatacatataaaattggtaagtggtgccaacacgtctt

SEQ ID NO: 25008 - DNA, 122 bp, Homo sapiens
ggggcggggaaaaatctcgcgatatttaagattccaggaggcggtgcgttgccacggagacggagcagggctactaggacgcacgcgcgagatagaacctctagtctcgtggagagattgaa

SEQ ID NO: 25009 - DNA, 122 bp, Homo sapiens
aagggcaaagcgaactcaatcaaggtctctggatgcccaatgcctttggtatttccacctcgcgtgcaggaggaaaagagcgaaatttgacaacagaagagactggagatggcctcagagtg

SEQ ID NO: 25010 - DNA, 122 bp, Homo sapiens
ccgggtccccaccctgcaaagtttctcccacgcacctacagtacggaccccgacgatcgccgcccctagaagggaggagagaggactgaccccacccccaagtcggcccgcccgccccatcc

SEQ ID NO: 25011 - DNA, 122 bp, Homo sapiens
gggaaggcggatgggcacggggcttgccggaagttgtagttcccttggccctctaggcgccgggctccgcaatttttctcaggggaggcaggaactacaactcccagggacgcccggcggca

SEQ ID NO: 25012 - DNA, 122 bp, Homo sapiens
aggcaccggccccaccaccaccacaggcaatctttaaagaaggcccgagagacttggggacgaggtgggaggctgaggccagagctgcaggcggagccaagagtccccggctagagccccac

SEQ ID NO: 25013 - DNA, 122 bp, Homo sapiens
acctccgctccatctctggcctctgctctaggactatggtgaggcgatgctaagccgtgacgttgcacaaaacagactcaaggctcaactcactggctggcctcattgcccccgggcccaga

SEQ ID NO: 25014 - DNA, 122 bp, Homo sapiens
ggcaaggaggccacgctcaagaaacccctccaggagcaaggaacagcacgtgggctcgggcgtgtgcagacgacgccagtcacgtcccacctgacgtcgaggcaaacctggaattcaaaagg

SEQ ID NO: 25015 - DNA, 122 bp, Homo sapiens
tgggctgagcaacgctgggattggaaagtaagacaagaaactatcacccaccccctcccccgcccgctgatttgaatgcttattagatggaccctggattctagtcttggggtacacgccca

SEQ ID NO: 25016 - DNA, 122 bp, Homo sapiens
ggtgagccctgggagggcccaggagccagacctcggttttgcgggctggggagcagggctcgggggcagcggccaggcccctccgcccctaacacccgcgcctcctgcagacccgagggtcg

SEQ ID NO: 25017 - DNA, 122 bp, Homo sapiens
ctcaccttccggagctgcaccccggaggccgctgagtccgttcctctgcctctctgggagcgcttttccacaggggccgccggactctggccagtcggggtccccaggctcagggccaagtg

SEQ ID NO: 25018 - DNA, 122 bp, Homo sapiens
gggctggccactggcaactggtggttcttaccagctgacaactctttggttacatgcttccgggccattgcttagtaggagtgtgaatgattacaggctcactggtcagtggtccatagtct

SEQ ID NO: 25019 - DNA, 122 bp, Homo sapiens
ctggagggacgtgagtgcgcaggcgcgcggccagaggggcggagcgtaggaaagggcgcccgccctgtcctcgcttatttgcataaccaagactgcggaaggcgcaggactttaccctggga

SEQ ID NO: 25020 - DNA, 122 bp, Homo sapiens
tgtggagcacctcggccggcattcagtgcccactctgcatgccgcccccgtgccagtccccggcaggtgaaggtgagcaagaccttgcactggagcagctctgtcaggagagtgtgcggggg

SEQ ID NO: 25021 - DNA, 122 bp, Homo sapiens
ggttctctcctggggaccatttgtaccctgtgcagggcccttcacaccctggcatgcccacggctaactcaggaccagaacctggcccatcctattaggacttttggaggactttggctcaa

SEQ ID NO: 25022 - DNA, 122 bp, Homo sapiens
cgtgacacagtttggaaaactgtctctctctatgtatgtatctgttcagggaaatggcagcgtgagattttatggcagttcttgagacttcagaaacacttcggcaccagccaaatcccccc

SEQ ID NO: 25023 - DNA, 122 bp, Homo sapiens
tttgtggcctgggaaaactgtgttataataggacatcccaaagctgctggaacatcctgacgctctgaaattgaaatacttttctgggagctgatacatttatttagctgctgaccataaca

SEQ ID NO: 25024 - DNA, 122 bp, Homo sapiens
ccactccctttttcttttcccacctgtgtttccattttctttgccgagtgtgaaaccagccggccacccacccgccccgctccgtctcgtaggtgcctccacagagccaaactttgtacctt

SEQ ID NO: 25025 - DNA, 122 bp, Homo sapiens
gtggtgacgcccaaccccaagggcggcaagggccctggacccatgatccgcatcaaggcgcgctaccaaaccatcaccatcctgcccatggagatgtacaaagagttcgctgagcacatcac

SEQ ID NO: 25026 - DNA, 122 bp, Homo sapiens
acattctgccccagcctctgcctgcaccctaactcagtagtgagaggctagagagcctggcgcagagtaggtaggcactcagtaaataattttggatcaatcactgaatgactgactgaggc

SEQ ID NO: 25027 - DNA, 122 bp, Homo sapiens
cacagtgcaaccacaccatcatcaccgtgggcaccttcggggtctgggccgcgtacctcgcgggcggggacactgtctacctggccaacttcaccctgcccaactcccctttcaacgtggtc

SEQ ID NO: 25028 - DNA, 122 bp, Homo sapiens
atttcttaaggactcatttcacgtcatacacccatccgatgctcctttttcgttagcctccgtctcctaagtgggcttatctgtctcctgctatcaggaaggcactaacttttcctttgggt

SEQ ID NO: 25029 - DNA, 122 bp, Homo sapiens
ctagccccccaaatctggacataaggctggtctgtgacctcctggctctttagttcaagccgaaagcacccttaaaaatcatctagcggccgggcgcggtggctcacgcctgtagccccagc

SEQ ID NO: 25030 - DNA, 122 bp, Homo sapiens
cattcagacagcggaaaaaacgagaagggagagtgttaactagggacgaagatgggaatgcgatggctatttgcttggattctgagctaaaaatatgaaagggaggggagaggacaggctag

SEQ ID NO: 25031 - DNA, 122 bp, Homo sapiens
aactctgttacaggatggaatctcacaggttgttcccctacccagcacatatgcggctttcgctaaaccatctgctgctttgctgacaaggacagaccaaggaatttccatgctgcggtctg

SEQ ID NO: 25032 - DNA, 122 bp, Homo sapiens
acggggcccctcaaactaggggagcaggaccgtagcgggccgctgcagtcaggcagggcccgggccgatccagttgggaacagatgggcctccgccgatccgggggtggagggtaaggggga

SEQ ID NO: 25033 - DNA, 122 bp, Homo sapiens
actatcttgggagtaacgtcatacgccaccccctggagatgatattcggatcaatatcaccgggtgggggtacacctactgcgatattgaacgtcatgtcatgctctctccctccctggact

SEQ ID NO: 25034 - DNA, 122 bp, Homo sapiens
ttaatcgatttcaaacacgcctgtggtgcggctcagtgaccccctccgctcggctgagtccgcttggacttccgctccggcgcttgagtcaggaattttgacataaacctcaatccgcttcc

SEQ ID NO: 25035 - DNA, 122 bp, Homo sapiens
cctgtagccagctcccacctcccctcccaccttctaaaatgcttgcggatctcacgtggccgaccctaaccagatacacatggggaaaggaatcaggtggcacacataccgcctttactcca

SEQ ID NO: 25036 - DNA, 122 bp, Homo sapiens
ggaaagaacactacccccattccagttgacggctttttaagtactttgtggccttcctgccgcggtgcaaaatgaggtctattttaggaactggcttctttactgcggggttagatgccaac

SEQ ID NO: 25037 - DNA, 122 bp, Homo sapiens
actttttcccctcaatgaccatagactagacagacaccctgccgagtcttgctctgcacccgatcttgtgcttgcttctgccagccaccactaacacctttgtccacccttacgatcttgca

SEQ ID NO: 25038 - DNA, 122 bp, Homo sapiens
gggaattccgaaggaggggtaggcgctgcccgcgcgcagaggccgcgcccctcctggccccggcttcttggctgtcaaacagatgcagcaacgtcggctcctgccgaggagcccaaggggtc

SEQ ID NO: 25039 - DNA, 122 bp, Homo sapiens
tattacaataagccctttcttaggtgcagagagaaagccttgctctcacattcagaggctcgtgtttgcatccagccaaagaatgagattgacctcaaggtctgatgatccaggtgggctcc

SEQ ID NO: 25040 - DNA, 122 bp, Homo sapiens
tgcatcatgggcaggcagtgccagttgacaccaatcaagtctcaacactcagcctgcacacgtgcagatcctctggaaaaacgcagcccctcccatcctcagatcctaagagaggtaggggc

SEQ ID NO: 25041 - DNA, 122 bp, Homo sapiens
cgtatggctcacggacaacacttacaagtacgaggacctggtgagaatgatgggcgagatcgtctccgccttggaagggaagattcgagtaagcagcggttccattttccttattaatcttc

SEQ ID NO: 25042 - DNA, 122 bp, Homo sapiens
catacttcctacctccttagttctccttgccaccgaattatcctgacatatgtacttacgcgtttggttatttggggcctccatcacattaaactttatgtttgatgacattatggaatttg

SEQ ID NO: 25043 - DNA, 122 bp, Homo sapiens
ttaacaaacacaaggaaaccgcagggtccatgtcaaagctgatgagctatttctgaaactcgtgcagaattgtggtttgtgtggtctatgtcacggcacccttgagggagagtgggcaattg

SEQ ID NO: 25044 - DNA, 122 bp, Homo sapiens
gcggggcgagagcgccgagggggagccggagcgctgcagaggcgcgggccggagggctggcgctgatctgcacccttctcatctggagagcggacccctggctgcccggaggcgagcccctt

SEQ ID NO: 25045 - DNA, 122 bp, Homo sapiens
acggcggccgccgcaatagcggcattttcgggggcgcacgcgcactgcaccgtccgcggccgttcctaacctcaggcagcggctgtggcagtaagcccctcgggtgcgcacgcgctctgacc

SEQ ID NO: 25046 - DNA, 122 bp, Homo sapiens
gccctgtgaccatttccctacccctccagaccacaaccctgattgggctattgaagacagcgcggctgctgcggctggtgcgcgtagcacggaagctggaccgctactctgagtatggggcg

SEQ ID NO: 25047 - DNA, 122 bp, Homo sapiens
gaaggagccaaggtgactgcttgtggagccctggagggggcagagcccttggcacagtgccgcccccaggaggccgcacccctctgccccagccaggggtcctgtgcaccccagggcctcag

SEQ ID NO: 25048 - DNA, 122 bp, Homo sapiens
caatgggcttcacagtgcgcctcgccacggccccatctgacgagcggccattcatcaggccggctggcctatcaatgacattgctcccatcggggctcctataaaatgatgctttttcccat

SEQ ID NO: 25049 - DNA, 122 bp, Homo sapiens
ggccagggcaccttgagactcagagagcctcttggggttgctgagccccctccagcccagcgtgccttggggggtgcctgatccctcagccatgcccctgacccccacccctggcagtcctc

SEQ ID NO: 25050 - DNA, 122 bp, Homo sapiens
cccaaagagttttggggtatctttctctccattctaggttattcggagccccctttttaccgttaaggagatctgagttaatggcttgctcaagttcccaggaatcggttgtggactgagga

SEQ ID NO: 25051 - DNA, 122 bp, Homo sapiens
gctggggtaggtggagccggaagaggccaagactgtgtatcccccgagcagcggggaggccggggagctggcggggggcgcctgaagggaacccttgcccaggacggtggacggcagggtgg

SEQ ID NO: 25052 - DNA, 122 bp, Homo sapiens
ggagtcatttctccattattggatattcagttgtttacagctttttgctagtgtaaattacgccatgacaattacccctgtgaaagtaatatttattgattgggtacagtgtggttcctgct

SEQ ID NO: 25053 - DNA, 122 bp, Homo sapiens
ttcatcacagctaagatgctgctgggtttaaggcactgtgactttctgtgccactaagaccgacaaaaagctgccaagtgaacgatgacacaaagaaagacacaaactgtgggacccagccc

SEQ ID NO: 25054 - DNA, 122 bp, Homo sapiens
aggtgagaggttatgcggggagcatttggcacagcacctagaacacgatcaacattccaacgttggttgttattagaactttcaaatcagttaaggacacttgcaacacggttctgaaagtc

SEQ ID NO: 25055 - DNA, 122 bp, Homo sapiens
aagccagaaagatggtggccagcacacctatggcaactatcaccacggtctccatgcttccggggagctcctgactcagtcccgttcacatcgtcctcatgggctaaggctgctggaagtgg

SEQ ID NO: 25056 - DNA, 122 bp, Homo sapiens
acaatgccagatgaaactcatccaagtccacggatcccctgaattccaaggaaagaaccgcggttccagcttccctcgaaggtgtcccccggtcccgctcaccacctcagcttccaggagtc

SEQ ID NO: 25057 - DNA, 122 bp, Homo sapiens
actgctgatcccttcataccctcagttatgtacattcactaccccttgccaagatctgggcgggagtcaaattataatgtccttttacaaattagggtttcatatggaaatactgacataga

SEQ ID NO: 25058 - DNA, 122 bp, Homo sapiens
gggaccatgctttccgcgccccgcccgggcctcctccccaaagcctgcgacccagcctcccgcaccttgaccgtgtccagagggtgaccgacgaacaccaggcacacgccgccaaagccgcc

SEQ ID NO: 25059 - DNA, 122 bp, Homo sapiens
aggctgaggtctgaaaagccaggcaactcaccaggttctggtgccagctcatttggctcccggccatgcaatgccccggagaagagcctcctgtccctctaggtgcagggcagctggcagga

SEQ ID NO: 25060 - DNA, 122 bp, Homo sapiens
ggagccttttccagccagtgttctttaacaatgatcctcactgattcgctgccacacacacgtcagtcctcgcctcaagatgagcatattgctcgccgtggattcctctctcctgttgacgt

SEQ ID NO: 25061 - DNA, 122 bp, Homo sapiens
acaccaggcctctgcgcagaaggcgcatggcaaacaccctccgtccacagatgaggcctgcgcagcacacgccacggggacccaggtgctcagtccagacaggaacaagagacctcgggccc

SEQ ID NO: 25062 - DNA, 122 bp, Homo sapiens
aaaaggcacagggaggtgcagaagcgttcctggcgccacggagccggtcagtgacagagccgggtctcaacccaggccactgccctcggcagccaagccccttctttattttggaatggcca

SEQ ID NO: 25063 - DNA, 122 bp, Homo sapiens
agaccaacagacacccacaggcaggaggcagaagtgctcagtggctatttgaagaagctccgtaatagagagatgaccctcaggaaaacgcttaaaactccttcctagctacccagagactg

SEQ ID NO: 25064 - DNA, 122 bp, Homo sapiens
tccgcacggaagccatccggatccccgctgtctgggaccaaagtcccagggcctcgcaaacggcaactagaccccttaaagggcctacggacttggatcctgaagagcctgagagagcgggg

SEQ ID NO: 25065 - DNA, 122 bp, Homo sapiens
ggggcggagtcaattatgtccgcctgacaaggcctccatcaaaacccaaaggtttctcaccggagcagggagcgctttcactgttcctggagggtggtggcctccatcaaaacccaaaggtt

SEQ ID NO: 25066 - DNA, 122 bp, Homo sapiens
tacgaaaagaatataaacctctcagggttgcagggaggatgaagctgaacacgtgaagtgcgttgcaaacagttacacaggagttagctattgtcctcagctggtgctgacagctctttccc

SEQ ID NO: 25067 - DNA, 122 bp, Homo sapiens
tcttctgcaacctggtttgggtgagctctcccatctctggagacatcttaggagtcgcaccgaatgacatcactgcccacaaggtacctggcctcacttcctatcttactagctgtcttttc

SEQ ID NO: 25068 - DNA, 122 bp, Homo sapiens
gcaacacaagcgtccgaatttcccccggactggctcttcagctttgggacttggccctggcgaaaacaagcgaactatccctcgggagattagcgcgttactccggcgagttgccaggcaac

SEQ ID NO: 25069 - DNA, 122 bp, Homo sapiens
gggcctggatcccaagcctgccgccgctctgtgctcagcccgcagttggcccggacatgccgcaccagcttccaccttgagtgccggggtctgaacaaggaggacgcagcggcacctgaaaa

SEQ ID NO: 25070 - DNA, 122 bp, Homo sapiens
ggatgtctaggagaacaatgccatactgcatctgcagctaccacctgtctccctgggccacgtcctgtggtgcaggagccagggccacctgccttggcctttagagagaagcccagcctggg

SEQ ID NO: 25071 - DNA, 122 bp, Homo sapiens
aacctccctgcctcctccccagtgcagacgcagcctataaaaccaccctgtgtgtccttgcggatcctggcccctccctggacacccaggcgacaatggcagaactgcccacaacagagacg

SEQ ID NO: 25072 - DNA, 122 bp, Homo sapiens
gggggaaaagggagagccaggtctgggacaggtttctgtggcttcctaaatctccacctccggcaggtgttcaagcaaatctgtgcttgagcctgccacacgagggttaaagcacagacttg

SEQ ID NO: 25073 - DNA, 122 bp, Homo sapiens
gcagaaggcaggggccctccaggtctgccccacagacagctacaccaagagggagctgatcgaatgcgcccgtgccgtcacggaaaaggtaaggagcagccctcagtttagagtcacaagaa

SEQ ID NO: 25074 - DNA, 122 bp, Homo sapiens
gggctccggcccaggcgtggtgctgtacttgtgccccgaggcgcagtgcgggcaaaccttcgccaagaagcaccagctgaaggtgcacctgctgacgcacagcagcagccagggccagaggc

SEQ ID NO: 25075 - DNA, 122 bp, Homo sapiens
ttaaggacaagccgggggcagggttccccaggagtgaccagtcactggaggctcgggcggcgcaaaagtcagaaagggcagaggacaatctgggggtgactcctggcccgcctgactcgtga

SEQ ID NO: 25076 - DNA, 122 bp, Homo sapiens
ggcgatgcacgtgaccggaaaagcaactaacacgccgctcaggaaagcagcaaaggctgccgggaaatcaagcctttgccacgaagcgagatgctcccaacccttaaaactgccatccaccc

SEQ ID NO: 25077 - DNA, 122 bp, Homo sapiens
cctcgagaaggtccggggacctcggggcccaggggcattaaccatcagcttaatctcccacgccaggtgtgctcagcaccctcaagaaggtccggggatctcggggcccacaggcattaacc

SEQ ID NO: 25078 - DNA, 122 bp, Homo sapiens
tcttcctgagattatcacactatccaaagaagtccggaacctcaaatggcttggtttccgcgtcccactggcgattgtgaacaaagcccatcaagcaaaccagctttacccgtttgccatct

SEQ ID NO: 25079 - DNA, 122 bp, Homo sapiens
acagggccatgggtcactatgtggctcttatggctccttgaggcccagttcctgaggccacggtgccatgtgtggcccccgtgggtgctgactggcggctgcaggcggggtggcaggtgggc

SEQ ID NO: 25080 - DNA, 122 bp, Homo sapiens
ctcagcttaaatcagggagtccctgaatggggaaaacattttcatcttgtttcttctaaccgcctactgatacttggcatttcctccaattatgagcataggctgtcagccacagtggtatt

SEQ ID NO: 25081 - DNA, 122 bp, Homo sapiens
acagcctcttgcagttccgccacgtgattctgactgtaccagctttccccaccacagccccgctccagctttctgaggcctttgagtccacttgctgtgcagccgccatcgccgtttctgct

SEQ ID NO: 25082 - DNA, 122 bp, Homo sapiens
atgcaggagagaggtctgcgtgagcgagtggaccaactttcgaggcaactttccccaagccgggacccccgctggcgagccaggcagccacggtagcagcagaaattgtggccaattgtgat

SEQ ID NO: 25083 - DNA, 122 bp, Homo sapiens
ttatgctaagcaaggtgggaagtttcaaagataaatcctacacagaccctgcccacaaagcgtccagtctagaagatgcttagtgaaaatgtgcagaaatgagagtggaagggaagggatat

SEQ ID NO: 25084 - DNA, 122 bp, Homo sapiens
tgttcactcttctcttccatccatgtgtaatttccatcagtatatcctattccttcatgacgaatgcctccccatccattcataacctcctgcaccatgtccagtccagtgttttttggaaa

SEQ ID NO: 25085 - DNA, 122 bp, Homo sapiens
atcaaggggcagattttatttgtatggtggtaaagttcaaagggctctttgctccacaatcgatccactaagaccaaaaactttaggtgtactctagagtgtcacatccaagtatttaaacc

SEQ ID NO: 25086 - DNA, 122 bp, Homo sapiens
gttcatgttccaccccattatctgtgtgtcagctgatggatgcttagggtgattccatgtcgtgtttgtttctgtgaacgatctcattgatgcctcatgcatgccacctgagtcccgcatgt

SEQ ID NO: 25087 - DNA, 122 bp, Homo sapiens
gtggctagatacgcaggtagccaggttacctgtgtaatcctggcttaccctccctgtgcccgacttttccaatctgtaaatagggaaagtaatagtagatagggatgttgtaggcattacta

SEQ ID NO: 25088 - DNA, 122 bp, Homo sapiens
gcataattttcttggccgaggtactcctcctgccccgcgctccccccttcctctcgctttcgcctaaatattctgcgcttatctgctccaggaccaacctgccgcggtcacgcaaagcgagg

SEQ ID NO: 25089 - DNA, 122 bp, Homo sapiens
agagaaaagagtggtcagtataatcagaggacgtttttttgtaggaagtaggactgaagccgaatcctgaagcactggtgggatttgaataagaagatttgccttcctttacacatgttcgt

SEQ ID NO: 25090 - DNA, 122 bp, Homo sapiens
agcccccgagtgggcgccgcgggcttcggccctggagccgctgtcaccgccactgccgcccgcctccaagcggctcggagcagcatggtcccgctggcagagcccaccttccgaagccgctg

SEQ ID NO: 25091 - DNA, 122 bp, Homo sapiens
gcccattggctccttccatggtagcctgggagaccttgacctcagcatcttccctcactccgcatccccctgcccggctctcagtgcttgttcctacccattggcttgcatgatggaatcac

SEQ ID NO: 25092 - DNA, 122 bp, Homo sapiens
tggagtggggaggagagcagagcatggcagagagcgtcaggggagagtctctcctcctgacgtcgttatgcacattgctgtgattcctaagcttgctttgttttaaatacacattcttgaat

SEQ ID NO: 25093 - DNA, 122 bp, Homo sapiens
cctccgcctggagcagcagctggatccgcctcagaaggagcagctggggagtgctcttgccgagatggaccgacagctcaggaggctggcagacaccccgtggctctgccagtccgcagagc

SEQ ID NO: 25094 - DNA, 122 bp, Homo sapiens
gagatatttcgatttgtgtttgtttgtctctgcattcagaagctaaatcttgttaccacacgtcttgattctaactcaaggtttacttctctggcatattccagcccaaattccttgcatcc

SEQ ID NO: 25095 - DNA, 122 bp, Homo sapiens
tacagtcctggaactaagtgtctgcatgcctgccttctctactgggctcctgggctctctcgggaaagggaccccgttgctatctgccttgtgtccgtagggtctagcagaaagcatgacct

SEQ ID NO: 25096 - DNA, 122 bp, Homo sapiens
tttcaactcagggaagaagattaaaattgctcagtctccttggcttgcagagatttctcgcggggatcatcaggggtgtgcttaaccctccaggcagcacagtaaaacaggcctagcggccg

SEQ ID NO: 25097 - DNA, 122 bp, Homo sapiens
tttctcaaacatgtgcccatgctcaaatgctgaaaatgcaaactggagatcagtaaggcccgttatgcacatgtattcttcatctctgaaaatggagattgtggcagtgttggaaaccgcaa

SEQ ID NO: 25098 - DNA, 122 bp, Homo sapiens
atgttacagtttataaaagtactgcccatagatcacctcatctgaagaccaatgtctgggcggctttggtgactttttggtgtctaattatttgcaaaaggatggataactttctagctaag

SEQ ID NO: 25099 - DNA, 122 bp, Homo sapiens
cccgaccccgcgtcggcgctgcggaccgtccgggagctgcagccgcgggtgcccggtgctcggtttgtaggcagtgtcattagctgattgtactgtggtggttacaatcactaactccactg

SEQ ID NO: 25100 - DNA, 122 bp, Homo sapiens
tgagttgcagcatttaaatgatcccactcagagattcacacagaagactggacacaattccgaagagctgcccagaaggagagaacaatgtcatcactacccgtgagttgaaaagtcacagc

SEQ ID NO: 25101 - DNA, 122 bp, Homo sapiens
cgcgggagtcacctacgggaagggactctccgtctggcacaggccctgtctggcctggggcgcgcatgctccgccgccgaatcttccagaaagccgtggacccgaggccccggcagacgcag

SEQ ID NO: 25102 - DNA, 122 bp, Homo sapiens
tgcactatgggattctcccagtgacacaggactcactggtggcatttattcccacagtgtcggctttgcatgggggatttgaggtccctggaaaggcccaaaaatcatgcatatgtctcttc

SEQ ID NO: 25103 - DNA, 122 bp, Homo sapiens
cgggacgctggtggcctcgctgcccgtgggtctggactttgtgtgcctgcaggaggtattcgatctgcgcagggctcgtcgcttggtgaatcgcctggcgcccaacctgggcccgttgctgt

SEQ ID NO: 25104 - DNA, 122 bp, Homo sapiens
ttcccacttcctcccagcccagtcacacagtttaaaataatcttctgttgaagtcaggtgcgtgtttcttctctcagaaaatcgcgcccatcactgagggtggacgccccggggctggtgtc

SEQ ID NO: 25105 - DNA, 122 bp, Homo sapiens
tatttgttgattctgtttccttaaaaacaaagatgagaccaattcaaatcctcattactgcgggcagcaacaaatcatccaaactctggcacttccagttctttcgagctttcctaccaggt

SEQ ID NO: 25106 - DNA, 122 bp, Homo sapiens
gggacaagaggcggccgctggtctcgcgggtgctgcggacagggtcccacacccccggaccgcctcccgagaacgaggaaacctgtcaagccggccgggacccacactccacagccccctcg

SEQ ID NO: 25107 - DNA, 122 bp, Homo sapiens
ctgcagggggaggtgcttgcctggctctgtaccacctgtggggtccctggaagagacggccgccactcgcaacccagagagcatcaccctcccactcctccactctccccaggacatcccag

SEQ ID NO: 25108 - DNA, 122 bp, Homo sapiens
caaatagtgcttaggacaatgcccagaatactgtaagcactcaagaaactgatttattttcgtcattttcacagcggccaaggtacatgaggatgtagcttatcgcccttttaagggactct

SEQ ID NO: 25109 - DNA, 122 bp, Homo sapiens
gcctcccaggccatgcactggctctgtgtctcctgcatcttcacttgtctgcctggctggcggccagcggcaccagaccaaggacccgccgctatttccctgtgttcactgccttcctcttc

SEQ ID NO: 25110 - DNA, 122 bp, Homo sapiens
ccaggccctcccagcaaagggttaacagtcttctctacctgcagttgcattttaaagacacgaaattaaagcaggtaatttattctccccacacacgaaagagcaattagttctaaacaggg

SEQ ID NO: 25111 - DNA, 122 bp, Homo sapiens
tttttctgctactccactggtcataccttcttgatctcctttcctggttcttcttcatcccgatgttaaaagttggggttcttcaaggctcagttctgggccctcatctctctgtactgtct

SEQ ID NO: 25112 - DNA, 122 bp, Homo sapiens
ggggcgcaggcgtcagcggggattcagagcggaaacgcatttcgcctgtaatggactcggcgattttacgataccaggagctagatccacggggaagtacaacacacgaccttactaagcgg

SEQ ID NO: 25113 - DNA, 122 bp, Homo sapiens
aacctgcctcttctctttctctcataggttataggttccctttctctctcattttggccccgcccccgggtcctgccaaacagccaagcaggccggggtttagggggctcagaatgaagagg

SEQ ID NO: 25114 - DNA, 122 bp, Homo sapiens
ccctgtgatggggctcctaagagccaggggggaaaaggggctggctcttactccccgtatcgcaggaggtatgtacaacccctgcgataatgggagtaatatcatcctctccccctgaatat

SEQ ID NO: 25115 - DNA, 122 bp, Homo sapiens
tttagtttctttgctctacgtgggcacctggcactaagggagtaccttattatcctacatcgcaaatttcaacagctacattatatttccttctgacacttggaaggtattgaaatttctag

SEQ ID NO: 25116 - DNA, 122 bp, Homo sapiens
tcacatcctagagtagggcgcacgggtgcgcgaaggcgctcgccaaggaggcgtagagggcgcagcacaactcctctggggggtaaccgggggcgggagcacgcccgcccgccttatgtaag

SEQ ID NO: 25117 - DNA, 122 bp, Homo sapiens
gtcctatactgtgcggcggcccctgacttggccccctctccctggctctgtactcccaaacgtcacgttgcgcccctcccgtgcgccctccagccagggtggcccggccttggccgttatga

SEQ ID NO: 25118 - DNA, 122 bp, Homo sapiens
gacgtgtgtcacttggatagttctgcaagcgattcgcatgcaataggcagtaaatgccgacgtcatgaatgaatgaagagaatactacaaagaggaaacagaaggcacttttgtccccatgt

SEQ ID NO: 25119 - DNA, 122 bp, Homo sapiens
aaaaggagaagaagccagaagtgaggacgatggacaagaagccagtggtaacatcctggacgagggtttctcaaaacacacctcatgggccacctgtgtcaacacaactgcggtggcacatg

SEQ ID NO: 25120 - DNA, 122 bp, Homo sapiens
tggccaccctccctgtcgccgtgccggtggctgggagctttcatttgagtggaatttagccgaggacttttgtagcacttcatttacatgtatgccaacaagctgagatgtgcggcaacctt

SEQ ID NO: 25121 - DNA, 122 bp, Homo sapiens
aggagccgctgtcgtctgcatatgttcatactgtggcaagtaggctccttgcatagctgacgttgcaggcatgtatgttccggtgctgcctagtgacagatgactcatctgctgggccagag

SEQ ID NO: 25122 - DNA, 122 bp, Homo sapiens
gctagcggcaggcgcccaggccaccccccagggtaagtgggttcgggtcgggcctgggagcgccgggcaccgggtgccccatctgctgagtgagtggagggacttgctcggccctgtgctcc

SEQ ID NO: 25123 - DNA, 122 bp, Homo sapiens
tcctcctggttgagggagctgagcagggcctggaggcgctcgatgtactggatggcactgcgcaggatctccaccttgggcagccgctggttggggttgagcagggtgcttctcttcagggc

SEQ ID NO: 25124 - DNA, 122 bp, Homo sapiens
gcgtctcacaaccccgcccgactacttcccagccccgccccggcctgccggccccgccctcgccctatgccgcgttagttgcctccaggccccacccactcaactgaggccccgccttgcta

SEQ ID NO: 25125 - DNA, 122 bp, Homo sapiens
agcctcggaattgggcctcctcggccgccgtcgtcttctcagctctcacagggcccgcagcggcgctataccttcggccacaggtagcgcgttccttcgctgtgctgaccgtcgatcccggg

SEQ ID NO: 25126 - DNA, 122 bp, Homo sapiens
taatccccacccacccttggagagatggggctgggcgggggagggttggtggaggtctcccgactcccaggcagtgctctgccccttacagaggactgctcagccattcaacagaaatatat

SEQ ID NO: 25127 - DNA, 122 bp, Homo sapiens
catcgggaaaggggaggctgctcccatgctgggtcaaagcctgcagttggagagggcctccggcctggtgagggggacgcctgccaggtcattgacctcttggcaggtggggtaggctttca

SEQ ID NO: 25128 - DNA, 122 bp, Homo sapiens
caaggccagcagcagtacattttttccaaggcctaggtgatattacaatgaagagacacacgagggcgccctcgctagctctcagtaagataggaaggtgacagaaacatgaaaaataacag

SEQ ID NO: 25129 - DNA, 122 bp, Homo sapiens
gtaatatagcagggaatcataattgatttctaatggcagagaacatttaacccggccgtgcgcagagagaggaacggagcgaggaggagaaaagaagctgagctccaactcccacttaaaaa

SEQ ID NO: 25130 - DNA, 122 bp, Homo sapiens
cttcccgcgccggacagggaagtgggagtgcggacgacaatccgcatcctgccagccagacgtcaccaagctgtcttccaagaggcaggcggagagagctgacttccgattgggtcagccga

SEQ ID NO: 25131 - DNA, 122 bp, Homo sapiens
taatgcattcacaggttctcccctggacccggcctccaccaccgccccagctccatgggccgcagccttggctcctggtaataggccgctttccttcagaaagcccccggtgtccagatcgg

SEQ ID NO: 25132 - DNA, 122 bp, Homo sapiens
ccttcctaccctctgttttactccccctgctggcctttggtctttcctgttcccctcccgcggagaccagtaaattacgtactttgcaacagtaggtgtgacttcaaggtcaaggctttttt

SEQ ID NO: 25133 - DNA, 122 bp, Homo sapiens
tttgaccccgccacggagtgggggcgcggttgggggcgggtgtctgccattgcccgctagcgttggcgccccaagctcggtttcactccctccggaagtgggaccagccggctgcttttccc

SEQ ID NO: 25134 - DNA, 122 bp, Homo sapiens
gtcgccaccaagaagactttggtggggtagtctcggggcagctcagcggcccgctgtgcccgtttctggcctcgctcgcagcttgcacgtcgagactcgtaggccgcaccgtagggcgagcg

SEQ ID NO: 25135 - DNA, 122 bp, Homo sapiens
gagctgtgggagcagtgactcctacgtgggttacaatgaccggtcctatgtcagctcccccgacccacagctagaggagaatttgaagtgtcaacacatgcaccctcacagccgccttaatc

SEQ ID NO: 25136 - DNA, 122 bp, Homo sapiens
ggccgcctcatgtcctcaggcctggctggggcgcagggccgtggtcggcggtggcagaagcgttggagcacgagcgaggtgcaggctccatgaagtggagttttatgctggagatgagcaca

SEQ ID NO: 25137 - DNA, 122 bp, Homo sapiens
ttggccggctctgaggagccatgcagggctctggagcggccttggaggtccggacggaggcggagctctggctgcttctgatcgctgtcccggcagatgccccagctctgtttcctctgggt

SEQ ID NO: 25138 - DNA, 122 bp, Homo sapiens
atcccggtggggcccggtctggggctgcctccagcccgggctgcctgtcttggacttagtcgtggacctggaggccagtgcccggctggcccctgtcaccctctcgctgtgacgccagcgcc

SEQ ID NO: 25139 - DNA, 122 bp, Homo sapiens
cgccgtgtccgtcacgtggtaggcctgcaggctcagctccgccaggttgggcagcagctgcgagatggccgcgatggcgtcgtcggccacgttgatgcagtcactcacgctcagcgaggtga

SEQ ID NO: 25140 - DNA, 122 bp, Homo sapiens
cctttcgggaatgagaagaggggagtggtgggcactgcattgattgtgacggggccagcccggccgtgggtacgtgtggcatgctctccagcgagtgacactgatttacagcaggataacag

SEQ ID NO: 25141 - DNA, 122 bp, Homo sapiens
gcgaggcccgccccctagagcatacattggaggaagcgggcgcagggcggggcagcgtcgcgcaggtctccccgcctctttgactcctgaacccggccgcagaacaagtccgggcatatgtg

SEQ ID NO: 25142 - DNA, 122 bp, Homo sapiens
agaaaaactgaattcgaaatgcagagagttgaacccacgtgtccaggtctggtctgcgatcggcaggcgccccagtgtccccatcaggcagctgcaggaacccgtcctccctcccacctggg

SEQ ID NO: 25143 - DNA, 122 bp, Homo sapiens
tttgtcacgggaagattctccgactcaaacctcccacgtgcaatcgctgcctcccgcgcccgccccctcaccttgttcgtgaggtaagaagccaggtagcaggtacaaaaggtgaggccgac

SEQ ID NO: 25144 - DNA, 122 bp, Homo sapiens
gtcctagttagtgaggaggctgaggctggagacttgcttgagcccaggagttcaaggctgcggtgagctatgattgcaccactgcactatagaaatctgtgtaactttgggccaggctcggt

SEQ ID NO: 25145 - DNA, 122 bp, Homo sapiens
taatttgtaaaccctaacaatttacacagttgaaaagcagaacacccagacttttaaaatcgaggacttctacactgaatctcaggtcctcaaaaagagagaaatgccataggaccaggcca

SEQ ID NO: 25146 - DNA, 122 bp, Homo sapiens
taactcaacaggccctgatgtcattgtttatctgtagcacaataaaattattcatgctcacggtgaggactctgagtcaccaaaaagaagataaaatatgtttagtcactagatgtaaaaat

SEQ ID NO: 25147 - DNA, 122 bp, Homo sapiens
tacggctggtccggctgacctcaggagacacggggtgtgtgggctgcagagaggagactccggtaggctggatgggccaggtgccttctcttggtatagagaagatacaatcctgcagttgc

SEQ ID NO: 25148 - DNA, 122 bp, Homo sapiens
aggcaatggccagatcaggaattccaggacccccgggagggtgggacactgcggctccaccggtccctgtgtctatggaatcggtgtcagcggacatcccgttcatggtgggatatgcccgt

SEQ ID NO: 25149 - DNA, 122 bp, Homo sapiens
atcgtatgtatgaactcttgctttcctccctgacgggactggaagctctttttacagtcacgatatggctctggtctgtggtcctagaccaagttttcatggtactcccctctttggcctca

SEQ ID NO: 25150 - DNA, 122 bp, Homo sapiens
aaagcgcagaagacgttagaagaaacctgcagaagcaggctgggcttgcagggatgaatacgtcacattgatgagcaatagctaagcaggtgttggtaaacggggacgcagtaagccgcgag

SEQ ID NO: 25151 - DNA, 122 bp, Homo sapiens
tccacacaggaagaagaatgttagggtggctggaaataacagacattcaaatacatcacacggtttaaagaggggcctagttttcctgagtccattccaaagtcagaaacaggatgtgaggg

SEQ ID NO: 25152 - DNA, 122 bp, Homo sapiens
gaggaaaaaaaaaagcaagaaaaatgcttgtcacgcgcataaaaagagcatgtgtgtgtgcgtacatgttaataaaggcatacaaaatggtggaccatcaaggtttactacatatttttgta

SEQ ID NO: 25153 - DNA, 122 bp, Homo sapiens
ggacctgggcagtggaagtgggagtgtgggatatgggagggcagggcgggcagaggtgggcgcactccccttgcttgtggtctgctctgtggagcaggtcctagcacagctccaagggggac

SEQ ID NO: 25154 - DNA, 122 bp, Homo sapiens
tcccaccccagtgactcggcagcgcggcagccgacgactgcgcagacgcagggcggcggccgcgcctctccaacgccccgcacccgcccccctcagaagcacgtgcgccttacgtaatttcc

SEQ ID NO: 25155 - DNA, 122 bp, Homo sapiens
attgctgtttgggcctttcagcaatcttagggaggcgagtgtgccgtctcgttttttgctcgcagaaacaatacgtggtcattgtattttccatttccgtttaccttttttttttgacagaa

SEQ ID NO: 25156 - DNA, 122 bp, Homo sapiens
tgcggtgggcagtcagggctgcctggggtgagagggctgtgaacaactgatggggctggccgcgcagctcccaggataagaaaggaacaccctaggcatgaggtacagtgagtgccaaggtc

SEQ ID NO: 25157 - DNA, 122 bp, Homo sapiens
agccctctggccccagccccgtggaggcccctgcctctcccctccagctggccacctgggcgttctgattacctctccaggtgtggctgggaaagcagctctgccctctgccctcaccccat

SEQ ID NO: 25158 - DNA, 122 bp, Homo sapiens
gaaaaagaaaaaaaaagggataagataattagtaccttcctcaaagtttaagcaacacaacgtatggatacatcgtgcaaaataacaccaagtatacacagtaggtgttcaaaaatatagtc

SEQ ID NO: 25159 - DNA, 122 bp, Homo sapiens
gtggaagggttagcaaggcatttatcagagacattgattttatctgtgggagaattctagcggctatcccaaaagttgaagtccccatcacagcttatttgtgtcagcctcagtctctagaa

SEQ ID NO: 25160 - DNA, 122 bp, Homo sapiens
gcttgcttgctttaggagacaagctattaatactaaagcatatgttagggagttgctcagcgtacttgatatctagtagcaccagccaaactagctaacagcctttccatggagataggcca

SEQ ID NO: 25161 - DNA, 122 bp, Homo sapiens
cggtccctggtgccaaaaaggctgggatcgctgctttaacggactgacctctgagcagctcgcaggtccccggggtgtaagtgatggtcttggggcggcgccggaacccagttcctttggtc

SEQ ID NO: 25162 - DNA, 122 bp, Homo sapiens
aaaacatgggctttaaacggtcaaggaaaatgcgttttgtctcctcactcaggagcacttcgggatacacgtgcagcgttgcagacaggatggagtgcaggcaagcgggttccaactcagag

SEQ ID NO: 25163 - DNA, 122 bp, Homo sapiens
ggtgcggcgaattccaagggagcggcgcgggttctcttctcctcctcctctgagttgcttcggtgcccccaaggcatcaccttcctcgaaggtggcttacccaggcgggcggtgatgctgtt

SEQ ID NO: 25164 - DNA, 122 bp, Homo sapiens
gcccggggcaaacaaagagggacctgcctccttgtttcttagcctcttaacacagaagctcgcagcctggattctaggaaggcttggggggtacggccatcctgctggaagcctttgctcct

SEQ ID NO: 25165 - DNA, 122 bp, Homo sapiens
cgggaagcaggtcacaactgcgaacaccctggaactactagaaggccatgaagcgaagggcgaggtgcctggacagcaaaaatccgagggtcctgcagttagagagaggggcgcctcagcct

SEQ ID NO: 25166 - DNA, 122 bp, Homo sapiens
agccggagattacacaaggggcgcggcgattggccaggcgggcgggcagaaggaaagaagcgtgctcattggctgcggcgcctataaaaggcaggccccagctggtggcaggagagaaacgc

SEQ ID NO: 25167 - DNA, 122 bp, Homo sapiens
ttctttcagtgcctgtaacgtcccccttctttgattggtcaacgctctatttgaaaagcccgccaagggctgcaatttgccagatagtctcatccgggttgtttttcgaagaggttctcccg

SEQ ID NO: 25168 - DNA, 122 bp, Homo sapiens
gaatgaagctgcacgcaacagcctttcccgggacccgggataggccctggccaggcgctccggcggcggcagccgcaacgcccccaacctttgaaagcgcttctctgccctcagacccccct

SEQ ID NO: 25169 - DNA, 122 bp, Homo sapiens
cctggggagaggagtaatcagtgccaagaatcccagttcgggccatacctcactgtcccccgccgcctggctccttctcccgctcagctcataattaaggctgtgcgtccgcttcgccgatg

SEQ ID NO: 25170 - DNA, 122 bp, Homo sapiens
tctagctcatgcctggccgctggcggaggctctctcctggctccatggcggaggccagagcgaggagccagttgtagtgctagctccgcctttgtcgcagctgccactactgccaccgggaa

SEQ ID NO: 25171 - DNA, 122 bp, Homo sapiens
aaactcttcattttttaagcaactgacaaagtcaacaagaaagcaaatacctagaatccacggaacaatgctcctcagagcagggctggcagaagcggcggagggctaccagtttccctgcc

SEQ ID NO: 25172 - DNA, 122 bp, Homo sapiens
cagaactgggagggcggagtgtagctcagttgattagcgagagaagacttaggacagctgcgtgttctggacaccgtgccgtctgcgaggcatcagagggacttcccgcctagccacagggg

SEQ ID NO: 25173 - DNA, 122 bp, Homo sapiens
cgccaaaccccagcccctctcccgattcctgctccttggtaaagcgccccagcctgtcttcggagtgaaaattgagcagcttccagaaaattaactagaatgtggtctatattgctttgagt

SEQ ID NO: 25174 - DNA, 122 bp, Homo sapiens
cttaacggtggtggctggttctgcgccggatccgggagaggggcgggcgccattgtgcttcgctgccgactgcatttcctcagtcacgggcctagaactccaaggagaaaggcggcggtgcg

SEQ ID NO: 25175 - DNA, 122 bp, Homo sapiens
agttatgagacctggatttgggttctcactgccagttgacagccagatatatgatcttggcgtccattcgccccgctggcctcagccttcctgctgtaaaaagggggttgacagcaggctcc

SEQ ID NO: 25176 - DNA, 122 bp, Homo sapiens
attactccccgcaataccatgcaattttaagctagggtagggctcacctgagactggagccgccataccgtcgaaccctacgaaaaatttatgcccgtaaataaacaagcccggcgcattct

SEQ ID NO: 25177 - DNA, 122 bp, Homo sapiens
ttctcagccggcgcggtggctcacgcctataatctcaacactttgggaggccgttgcgggcggatcacctgatatcaggaattgacaccagcctggccaacatggcaaaaccccatctctac

SEQ ID NO: 25178 - DNA, 122 bp, Homo sapiens
tccacactgagccgcgaaagcctgtagacgacgaagaaccccgcagccttggcctctgcgcggcttccacgccccacggctgcccgcccgagccctgcccccaggcgcgccagccccgcctc

SEQ ID NO: 25179 - DNA, 122 bp, Homo sapiens
atagacatagtgtacagggtaacagattattagaaagcaagtatccttttaagctaccatcgaagtcaagaaacatttcaagacaggcctggctcagtggttcacacctgtactcacagcag

SEQ ID NO: 25180 - DNA, 122 bp, Homo sapiens
ggccgcacagaaggacttcttctgggaggccctggacatgctgcagagggctgaaggaggcgggggtggtgtagggcccccagcccctgagacctaatccccctcatgctagcctagtccct

SEQ ID NO: 25181 - DNA, 122 bp, Homo sapiens
caaggttaaagaggcagtagctgggtcatggtcacggggagagatgctgcgcgctctctgcggtgcttgggccggggacacttgtgcttgtcaattttgagaaaaaaaatggcagggagagg

SEQ ID NO: 25182 - DNA, 122 bp, Homo sapiens
ggacccagctgcctgcggccaccaaacccaggcagccacgaagccacgtggaaagtcagccggggactctccaggaacacagagccgaaaaatcacaggtccctgagctgactcttcctgtg

SEQ ID NO: 25183 - DNA, 122 bp, Homo sapiens
ctccgccgaaagagttagctaccgtcccctcctttctcggccggagacgttaagagttcccggtgaatgacaccgtccagggtcagaagtcagtggtggctatactcggaataaggctgaca

SEQ ID NO: 25184 - DNA, 122 bp, Homo sapiens
actgacttcagcgtgaacctaaggtgccctttaggacagtctccctgggaaaatttatctcgcgaccacagcctgcctgtctggggacagctaaggaggcgcggctcaaaactagggggcga

SEQ ID NO: 25185 - DNA, 122 bp, Homo sapiens
gcatctcaagggcaggggccagggtcagaacaggaggcccctttctagtggatgcaacaccgcacagcagcgcaggacaaggctgtctcacctgctgttaccaacgcccccaggttgtgttt

SEQ ID NO: 25186 - DNA, 122 bp, Homo sapiens
ttgatggccgtcagcattgagttcagcagctgggtgagctccccagtccctttggcctgacgccccttttccataacgtagcgggtcagggtgagcatgtcggtttcgaaggggcttctgtc

SEQ ID NO: 25187 - DNA, 122 bp, Homo sapiens
gtagggaagttagcctttgtcaatcagtgtgggatgcagctctattggggaagacatggacgggagttccggaacactgacgtggggagaatggttacaattgtcaagactagtgtctcagc

SEQ ID NO: 25188 - DNA, 122 bp, Homo sapiens
tggcgctcggggcgcttccagcgcacgtcacctcatctgcgtcgtcaccactgtcgcctccgaaagcgcattccgtcgtcaaaatacaccacgaggtcccgggtgccctcaccgccctcccc

SEQ ID NO: 25189 - DNA, 122 bp, Homo sapiens
tgaacggtaggcgagcgggcagcatgaggaagtagctccaaaggggcggagccaccagcgcgcacgcgcactagggtccgaggcgcgcatttgacccgagacgaaagcgcgtgggtacttgg

SEQ ID NO: 25190 - DNA, 122 bp, Homo sapiens
gtcacgcgtcctatgtcagatgtcacacatcctatgtcaggggcgtcacgcatcctatgtcggatgcatcacgcgtcctgcgtcggatgcgtcatgcgtcctatgtcagatgtttcacacgt

SEQ ID NO: 25191 - DNA, 122 bp, Homo sapiens
tagtcggggagaagttggggaggcccaaagtctggccctccccggggctgcccttggctgcgcgtcccccacgctgcagccgcgcgatggcccgggctggggtggacgtggggctgggagag

SEQ ID NO: 25192 - DNA, 122 bp, Homo sapiens
acaggagacaatgtttagaggcttagcaacaagaggtgagattgaaacaaacagtgcaaacggtgctttgttactcctgcaggcaggcagaggaagggatgttttcaaggtaaggagtcagc

SEQ ID NO: 25193 - DNA, 122 bp, Homo sapiens
ggaggaggtgctggcttgggggggtgtggctcgtgggccatgctggcagtgggtcgtgttcgctccagtgccaacactgggcagattccccccgacatcatttagacgtgtgcctttattca

SEQ ID NO: 25194 - DNA, 122 bp, Homo sapiens
aaacgtgtccttgcacacacagcgtgaatgcactcacgcaagcctagacggtgcggctgccgcacaccaggccctgtggtacagcctgtcaattccaggccccaagcctgcataccatgttg

SEQ ID NO: 25195 - DNA, 122 bp, Homo sapiens
gggaaagccttcctgaatgagacagcaggtatttcaactgggtgttaaagtttgaaggggcgctgggtaggttggcttatgcctattatcccagcacttggggaggctaagactggaggatc

SEQ ID NO: 25196 - DNA, 122 bp, Homo sapiens
cttgtgtcccgaggtgccatccgccaccttcttcactgcgctgctctcgctgctggtttccgggcctcgcctgttcctgctgcagcagcccctggcgccctcgggcctcacgctgaagtccg

SEQ ID NO: 25197 - DNA, 122 bp, Homo sapiens
gaggatgtggggaaaagggaaccctcgtaccccgttggtgggaatgtaaattaaaacagccgccgtggagaacagtttggcgtttcctcaaaaaactaaaaattgagctaccataggatcca

SEQ ID NO: 25198 - DNA, 122 bp, Homo sapiens
gttctccggatttcctttggacgaaaacaaccccaatttgctgtgacacgcccaggagcacgtttcctcggtctttaagagcctgaaaatgcttgctacaatttctattgacagctaccgtg

SEQ ID NO: 25199 - DNA, 122 bp, Homo sapiens
gtcttctttcgggctcgatcaaacaatcaggagatctgtgtaggccacagcgtcattgcacgccggggtccttgcccgctccctctctctgccaccgctcaaagcctgggagaacgcttttg

SEQ ID NO: 25200 - DNA, 122 bp, Homo sapiens
ggcagtgcctactcctgcttcggtttgcaaggcctttggctttggagctgtttagggtcacgtttatgcatgcacagctagtgggtgagcccaggagtccagacatcattgcatgatgtttc

SEQ ID NO: 25201 - DNA, 122 bp, Homo sapiens
ctggggctgacttttctctcaggctttgctaactacacgttgggattcctgcctgagaaacgtagtccagaactgcacccaaaacattgtctaacttttaatgtggtgtttaaagacaccta

SEQ ID NO: 25202 - DNA, 122 bp, Homo sapiens
cagctatcgcaagcgaggagaggactggaatttggagcccaccccaggcaccacacatagcgcaatgttttgcccatggaatgaataagcctcagtatgaaaacttagtggtgattgccgag

SEQ ID NO: 25203 - DNA, 122 bp, Homo sapiens
gctaaaagtaatctttctaaaacaaaaatatgacaatgtcactacctggttgacaacttacgtctaactgatccattcccaagatgaggtctatcctttagccaggtatacaagagttttca

SEQ ID NO: 25204 - DNA, 122 bp, Homo sapiens
aaattactgtgtgtttacatatcacatatgaattcacacacacatagatggtggggattacgaatgcaaggaatgttattttttgagtcctttattccagtcacagtattataaactgtgag

SEQ ID NO: 25205 - DNA, 122 bp, Homo sapiens
acaaccgtctacagatgaatggtccagtggcaagcagcagagcctgagctcagaaccatccgtgtttgctatggtggcataaggacacatcacatggcacctgaggcgggatgtccagaaca

SEQ ID NO: 25206 - DNA, 122 bp, Homo sapiens
ggcctgggggtgctggggtgagcagacctctccctgctggccccgtcccctggggctgcccgcctttagggtgcagcctggtgtccctgaaaccaggtgctggattacaagcctcctggaga

SEQ ID NO: 25207 - DNA, 122 bp, Homo sapiens
ctgcatcggcgccgtcaacgaggtccgctgcctgctggggctggtgagtacggatccctccgcagctgcctgcccatttcctctcatccagccgagtgcagcctgaccgcggcgctggccgt

SEQ ID NO: 25208 - DNA, 122 bp, Homo sapiens
cggcactgggtggggccgagctccagggctggctgctgggctgctaagggaactgtgagccgctcagagccgcgcgcctcccgggcggggcggggccggccgtgggagtccgcgcgtgcccg

SEQ ID NO: 25209 - DNA, 122 bp, Homo sapiens
ttcttccctcacttaaaaagcgtctatcccacctggctcaggtcagtttggatgactgtccgatataacaggacaataccatttcaatgcaaatcaactgcaaagttcatgaagtcaaagaa

SEQ ID NO: 25210 - DNA, 122 bp, Homo sapiens
tgatgttactttcaatatcgcacggggtggacacgcccccagtgatattgttcctaatttcgacgtgggagaggatgatactacacggaatgcccccagcggtaaaaacactcctgtgatat

SEQ ID NO: 25211 - DNA, 122 bp, Homo sapiens
gcctttggtcctgttcccttactctcagagcagttcttgtaccacctcctccaggaggctcgctgtgatgtacccaggcccactgagtgtcggtactcttcctcctacaacagctctcaaat

SEQ ID NO: 25212 - DNA, 122 bp, Homo sapiens
tgtcaaatcacaaatcagctctgaatatcacttttctcacctgtaaaggggaggtgttggcgtggatcatcttatttggggtgctttcgagcaagcaagtataaaattctcagcctctccgc

SEQ ID NO: 25213 - DNA, 122 bp, Homo sapiens
gttcttgaaagacaaacaaagaaagctggaatgaaatctttattcccctcccaaataagacggagactaacaaaggagtacagcagcactctttcaaggcttgccattaaaacgaggtctct

SEQ ID NO: 25214 - DNA, 122 bp, Homo sapiens
cagaaagatcttattcccgtccccactgccagtccctccagggaccccaccaacgctacccggcacacccaggctccccaccgacgtgccccccacggtcactgccccgtgttctgcttggt

SEQ ID NO: 25215 - DNA, 122 bp, Homo sapiens
ctggcaatatggcctgcatccctttgagtcttagcaatgtgaggcagggaggctgcaggccgcagggtgcccccacctgggttccgtccccgtccaggtggaggccgtcccagggtgccacg

SEQ ID NO: 25216 - DNA, 122 bp, Homo sapiens
gcccgctcttcagccccgggcgcctcgtgggagactagcgcttgtaacgtggtgagcccgcggtgtaacgctatgggcccgccttgcagcccctgacccacttccagcccgcagggccagcc

SEQ ID NO: 25217 - DNA, 122 bp, Homo sapiens
ctccctcgctgctgaaaaattcaacattcctataaactacagtacttcgtaaaggtcacgcgccagttaatctgaacctggggtctggcgccagccccgctcacggtggctgcgaggatggc

SEQ ID NO: 25218 - DNA, 122 bp, Homo sapiens
agacagcatcagatcgggctgagggctctgtcccacaagactgtcccccactttcaatgccgattgcaagccccaagttgtgtttgttgtttttttgcttgtttgaaacagagtcttgctct

SEQ ID NO: 25219 - DNA, 122 bp, Homo sapiens
ttaagaccactcacaccttcagagtggccttgagaaagatttggggtcaaggatcatgagcgagaacaccacttaagaggatagtgaactagtctgcatgtgagacgctgagatcctatgtc

SEQ ID NO: 25220 - DNA, 122 bp, Homo sapiens
taggcatagagcatgcactctgggtttaaatacatagacttgagttaaaatactggctctcgcacttaccagatgagtaaccttggacctacttatttgacctctatgaaccagaatttcct

SEQ ID NO: 25221 - DNA, 122 bp, Homo sapiens
gagccttttgctcaaaccctttggtgagccagcccaggatttgcaaatgcagaggttatgcgggggcctaagaccagtttacaccagtgctccagagtcctgtctggttagtgcctatcaca

SEQ ID NO: 25222 - DNA, 122 bp, Homo sapiens
agtccctagagactcaccgtgtacactgagatagagctcagggtcgaggtccggccggggcggcggttcccccggtccctggcgcaacagcagtgcaccgggtctcttggccaggccctttc

SEQ ID NO: 25223 - DNA, 122 bp, Homo sapiens
ttattagaagaaacactataatgatgtcaaaaaatttagcacacggcgcgggcgcaggcgcggagaggcgcacaggagacctcaggcccaggctccactccccagctgtgaaaggaccgctg

SEQ ID NO: 25224 - DNA, 122 bp, Homo sapiens
caactccagaagttaagatcccttgtgccctatagcatgaagccctcctccctccccacacgtaagaacccaggaaattacccttctggtttaagcttctgtgatgggtgtggcatgtcatg

SEQ ID NO: 25225 - DNA, 122 bp, Homo sapiens
gtcccgaatttaagcgattctcctgcctcagcctccggaatagctgggattacaggcgcccgtcaccacgcccagctaatatttgtacgtttattagagacgggggtttcaccatattggcc

SEQ ID NO: 25226 - DNA, 122 bp, Homo sapiens
agtcccccacgccgatgcctggccttgctcggttggtcctgttccggtgcctagctcaggcgggcgctgcaagaggaagtgaaaatcgtccagtaattaattttcctgctgccggggggtgg

SEQ ID NO: 25227 - DNA, 122 bp, Homo sapiens
gcaccttgagatgattaggatgggccctaaatccaatgacaagtatccttataagaaaagcggcaggtagggcacagtggctcacacatataatcccaccactgagggaggtaaggtggtga

SEQ ID NO: 25228 - DNA, 122 bp, Homo sapiens
ccactggagtcactttctgcccaacttcaaaatggcgcccactagcttcaccaaaaggatcgaacttcccagcaccctctctggcccgtaacgtcaggtgacgcgagacccagccggaagtg

SEQ ID NO: 25229 - DNA, 122 bp, Homo sapiens
gcgaaggagcgagttgagagttttttagatggaatccattgcatttgacagtcctgactccgctgcttggccggaaagcgcgcagcaaaggaccgcaggagtcagcctcggctcctcccagg

SEQ ID NO: 25230 - DNA, 122 bp, Homo sapiens
aaaactgttgagtgcattcagctgcaaggagaaaacaaaaacacagtaggtgccgcaccccggcatgcagagcggctttcctacacacacagaggctgccacagcggcctgccccgacggcg

SEQ ID NO: 25231 - DNA, 122 bp, Homo sapiens
cgacttaaacttctaaaattttattgatttgtggtggattatctgatacttctgagtacgcggacaatgatattcagaggcttttaccacacgtctgttggaacatttgggtgatgcgtaga

SEQ ID NO: 25232 - DNA, 122 bp, Homo sapiens
aatgtgttgtcactcaggttaacaccccaaccaactctagaatgaatttcttagcagagccgcttttgaaggccgagtttaaacgaaacactgtgatgaattgtccataaggcaggaaccct

SEQ ID NO: 25233 - DNA, 122 bp, Homo sapiens
tgttggctgctgttactggagctctgtgcctatccacagccatggggttggagctgcacccgcttcacaagtgtgtgacccaggcagccacacaggcctcatgcttggaaggggctcgtgct

SEQ ID NO: 25234 - DNA, 122 bp, Homo sapiens
gaagagacattagggttacccccacccagacgagtgacagcagggcagaccccaaacttacgtttgcctgcataggagttccatctctggatgtgaagaggccaggggtgggccctgcgctt

SEQ ID NO: 25235 - DNA, 122 bp, Homo sapiens
agaagagcgctggagtcttccccgggagggagcccggggctgcagcccaggggcggggagcggggcggggctgggaaagttgagtactggtcgctcagggccgggctccgccggagtgcccg

SEQ ID NO: 25236 - DNA, 122 bp, Homo sapiens
agtaaggttctcttgatgagaaaggttcccttgtgctactcaggatcccaggctcccaggcgattcttgatctgatcctccctggtaaactcatgtgactgggggaacttgctagctcattt

SEQ ID NO: 25237 - DNA, 122 bp, Homo sapiens
gtagcccaggaggcatctacccctcccaacccgccaggattgctgagaggacagagtacgcgtgcaaggttttgcaatgtgccagagcttagtaagtgttagcacttatgaaaacagcgttt

SEQ ID NO: 25238 - DNA, 122 bp, Homo sapiens
gaaaccaaacaaatgtaagagcaattggggcttatccgtgatccacagaaatgattgctacgttccctgcagaacggacggcagtcgctggacagggccccagagcgcctgggtgcggtcag

SEQ ID NO: 25239 - DNA, 122 bp, Homo sapiens
gagaatcaaagtccataggggagggaagaactactgcctttgcccttaaactgtctctgtcgtctgcaggctacctgcctgacttaggaaactgtccacataagttgtaaagttttaaaaga

SEQ ID NO: 25240 - DNA, 122 bp, Homo sapiens
atcagggggatcctgggggcaatggaaagagtcacgagacctaggctgtgcttccaacgacgccactcagtaccttgggccttgggggctcattaacaccgggctcgcctccattacctcct

SEQ ID NO: 25241 - DNA, 122 bp, Homo sapiens
ctccctgcaggctccaggaacactcggaggtgtctggcttccttctggagtgtgacagctcggtgcagggcgcgctgcagaagcacctcgcgctatacaggatccggcggaaggtcacggtg

SEQ ID NO: 25242 - DNA, 122 bp, Homo sapiens
cggcgcgtctctaacagcggtccagaaaggctgaccctgcccgggggcgacgggtgtgaccgggtcccccgctaactttcgggcgcggtgagcgtcgcctgcgcgcgccgcggtggaggccg

SEQ ID NO: 25243 - DNA, 122 bp, Homo sapiens
cctagctgaagagggagctcgggcctcccgcggtgaggccaggccggactgagccccgcgcgccacagctaagaccctcccgggggcagccccgaaccgccccgccggccggccacgcccct

SEQ ID NO: 25244 - DNA, 122 bp, Homo sapiens
tggctctgggggtgcccacgctgcagccccgtccactcacgcgggtctggggggtgcccacgctgcagccctgtccactcacgcaggtctgggggtgcccacgctgcagccccgtccactca

SEQ ID NO: 25245 - DNA, 122 bp, Homo sapiens
tgctgcctctgcctgagatacatctgtagcgaaaatgcgtccagagtgtggagccctctccgttggcgcagaggtttcagtggtccctgcgaggccttttggggtgtctgccctccctgacc

SEQ ID NO: 25246 - DNA, 122 bp, Homo sapiens
acactttagaaaaaaacaacactaagaaaaaatacttttcttgggttttttaaattgacacgtaataattgtacatatttatggggtacagcatgatgttccaacacacctatacattgtgt

SEQ ID NO: 25247 - DNA, 122 bp, Homo sapiens
ccataattgttctttgaaggttttgttaggcatcatcaacagatgaatcaccaccaaaagcgggggaggggtaaacttgcttggagttaactagacagcagagattagcatttagaacatcg

SEQ ID NO: 25248 - DNA, 122 bp, Homo sapiens
agggccagctagtcttaggctaaagggatggtatatgggtggacacttggaggggtagttcgcagttatctcttcatccaaagcatgacctgaggccaaagcatgacctgaggccggtcctg

SEQ ID NO: 25249 - DNA, 122 bp, Homo sapiens
ccatagatattcatgcacagcatgttcaggtgagccgtagatatctatgcactgcatgtccgggttacccataggtatccatgcactgcatgtccgggttacccatagatatccgtgcactg

SEQ ID NO: 25250 - DNA, 122 bp, Homo sapiens
acatttattgagcaccggcaaatcccagacactacagaacacacagaaggcatggccccacgccgagggccccagccccttgcaaagctgccacgctgccaaaaatggtggcgcatgcagct

SEQ ID NO: 25251 - DNA, 122 bp, Homo sapiens
gtaattttaactgattatttcttttgctcttttaacttaagttattaaagtttaaaagttcgtaagtaccttattcagatctgttctgttgcattcgttgaaggtgatggtgaaaggaggaa

SEQ ID NO: 25252 - DNA, 122 bp, Homo sapiens
tgggctttttatatttttatctgccaaaggcctcaattctttatataaaaaacgaggccacgagcaacaatatatgtgataagactgagtgatctgcaaaggcaggctaagactgacttccc

SEQ ID NO: 25253 - DNA, 122 bp, Homo sapiens
gctcctgccttgaccagtcacagagtatcaccctatctcggtatgctgctctgcttgtcgcgtagtaggtctataaatacttgttttatgaatgaatgtatgaacaaagggaagttagtcac

SEQ ID NO: 25254 - DNA, 122 bp, Homo sapiens
gacatgctttgtttgcatgtctaatgggtgtatcttttactaccacaattgtttccatgacggagcactggcatacataaatagaccaacagacatatagacttatgcatatatgtactgag

SEQ ID NO: 25255 - DNA, 122 bp, Homo sapiens
tgcaatctgagcagcggtagggtctggcccccagggggctcctgagatgctccaggaggacggaagagctcttccccagctctggactcttctgggagctcttcccgcctgcatggactttc

SEQ ID NO: 25256 - DNA, 122 bp, Homo sapiens
cagagcccacggcgtcggagggccccggtcgggtttccgagggaaggcctgccctgccgccgcagctttccggccattgtccccgccacccgccccgcccctggccacctaccccgtggctg

SEQ ID NO: 25257 - DNA, 122 bp, Homo sapiens
tttctatttctaactcaatgccaggcactgagcactgtgctcaacctagtaatttggagacggaggtggatatgcatataacagaacaggatgctctccggacaaacgttctgaaggaaaag

SEQ ID NO: 25258 - DNA, 122 bp, Homo sapiens
agttcccgctgctggagttggggcagaggagccccgcctcattcaggattcggtggccagcgcagagccatttgaatagaagaagcccgaagtgaaacagaaaagctgaaaactccccggct

SEQ ID NO: 25259 - DNA, 122 bp, Homo sapiens
tgattgattgattgatttgagatgtagtctcactctgtcacccaggctggagtgcagtggcgagatcttggctcaccacaaccttcgcctcctggtttcgagggattcttctgcctcagcca

SEQ ID NO: 25260 - DNA, 122 bp, Homo sapiens
gcagtttccactggggctccaacggagcacggtgatgtcggctgtgtgtgtcaggggcatcgtgtgctgctccttgtcctgcttgttaaacaccgtcacttctccagtctcccagcccacag

SEQ ID NO: 25261 - DNA, 122 bp, Homo sapiens
aaaccgagactgagacttggccaaggcaaccgagctaatcatagttcccccaagaaagggcgacctcggcaagcaagttcacctccgtattccgatcacctggcacatagtagccgcccaaa

SEQ ID NO: 25262 - DNA, 122 bp, Homo sapiens
tctcttacagcgggaaggggcagaaagattagactgctgcctgggtctgctcagggcgaacgttttcataattttggaaggcagacagaagacaaaaaatgtgaaatattgctgatgcattg

SEQ ID NO: 25263 - DNA, 122 bp, Homo sapiens
gcagagcccacctaggaggaggctgtcgtgtcccaggagggataacaggcggcctgggcccgacctgggcagtgggaatggaggggagaaaactcacccggagccactcctaggtggaatca

SEQ ID NO: 25264 - DNA, 122 bp, Homo sapiens
taaaaaaatatatatatatatatgactgggtttcaccatgttgtccaggccggtctggaacgcctaggctcaagcaatctggctctggatgtctttaacttgtgattgaaagcgtattaaga

SEQ ID NO: 25265 - DNA, 122 bp, Homo sapiens
gcagtccacatggtggactgtcatttctcttggagatttataaggcatttagttcaaagacggggatgagtagtgtataagtgcctttcccaaatcatctcactatgcccttggtctcaggt

SEQ ID NO: 25266 - DNA, 122 bp, Homo sapiens
cccttgaacccctgctggggtggaagcaggtaagcacaaccctgccaaggcactgagggtcgtctcagtgtaaaaggccagggccacccggggctgttctgcagggaatggggagggctgtg

SEQ ID NO: 25267 - DNA, 122 bp, Homo sapiens
cacttacacgttcatgcgcatggtgtcgctcttcactgagaacgtttccgcgaagaaagccgccgtttctttcttcctgcagaaaatatagcagaaagcggaatacctcttgcgaatccttc

SEQ ID NO: 25268 - DNA, 122 bp, Homo sapiens
accccaatccacgcctgcaaattcttctggaaggattttcccccctctcttcaggttgggcgcgtttggtgcaagattctcgggatcctcggctttgcctctccctctccctcccccctcct

SEQ ID NO: 25269 - DNA, 122 bp, Homo sapiens
gccgcggagggaggagccaggccgatgagctgagagtggctaggcggggaggcgaccctgcggtgagacccagcccaggtagtagggacggaggcgtcaggggcacggagaccccagtggag

SEQ ID NO: 25270 - DNA, 122 bp, Homo sapiens
gcacagacccaagggcagtgctgtggtatcagatctactggttccaaacaggtgctgggccggtcactaaccaagaacagtatctgagccctaccctccaaaccccaccttccaggtccccc

SEQ ID NO: 25271 - DNA, 122 bp, Homo sapiens
aaccatgcattttcccagctgtgttcagtggcgattggagggtagacctgtgggcacggacgcacgccactttttctctgctgatccaggtaagcaccgacttgcttgtagctttagtttta

SEQ ID NO: 25272 - DNA, 122 bp, Homo sapiens
agtgagtgggtgggctcgtcatcagctgggagccttgggcccccagctggctgagcctagcgcagtggcaggcggtgaggggcgtgggggcaggccaggagccgagctgaggtgcccagggg

SEQ ID NO: 25273 - DNA, 122 bp, Homo sapiens
tttggcgacagtgggaagcgggaaaattggacgtaaagagctcagactatggatcctcctcgctaggaaaccagcacttgtgaaggagcgcagttttgtttactaaataactttttcctttt

SEQ ID NO: 25274 - DNA, 122 bp, Homo sapiens
cggaggggaagagcagtgctacgcctccctgcgcacccaccctgcctgcccgggcctcttcgagccatggctgaagaagcaagaaccaggccaggagccccagggagctgccgctctgggac

SEQ ID NO: 25275 - DNA, 122 bp, Homo sapiens
tctcagttaatttagaaagttcattttgagtgcggagttcaggaagctcggaccgaaggccgccactgggcgggcgcccagcctcccgcccgcgtccgcgcctcgagccccacacgctctgg

SEQ ID NO: 25276 - DNA, 122 bp, Homo sapiens
agtcttggattgcaacatcgctggctcgcgggggtgggggccggcgagcgggcttgttttcggtgccttaaaaccaaaacaagtgtaagttttcttgtgcctctgaagatgctccgctggcg

SEQ ID NO: 25277 - DNA, 122 bp, Homo sapiens
catcccctgaccaggggcctcaagaagctaagcccccttgcaactccctctcccgccccacgcccaccctctccgcctacgtcggccatcagagcctcgctcgctgcccgagagcctcgcat

SEQ ID NO: 25278 - DNA, 122 bp, Homo sapiens
tccagatttgtctgctcagagggcactcttaggtagtatctcataccatctcaagttcagcgtggaagataagcctgtaaacaaaagaaatgattgtatgtgcttccaataagtgccataat

SEQ ID NO: 25279 - DNA, 122 bp, Homo sapiens
cctagcgcagcccaggaagcggtcggaggagactgtcctggccgcggtggcagccccatccggagtggctgtgacagcagcaatggcaacagcttctacacagtgggtgatgtctcatctcg

SEQ ID NO: 25280 - DNA, 122 bp, Homo sapiens
ctcaggtctgaagaaagatctgagacccagtcacagcttaagaaaggcctgtggaaaagccgcaccatcagagcatgtctttgccattggcaccacctcccttcaaccctcccagagtccac

SEQ ID NO: 25281 - DNA, 122 bp, Homo sapiens
ggctcctggtctccacccgcctcggcctcccaaagtgctgggattacaggtgtgagccaccgcgcctggccttattcatagcttttgaatacctctgattgcatatagctacatcctaacag

SEQ ID NO: 25282 - DNA, 122 bp, Homo sapiens
gagagcatttcctgttgtgcagctgagccctgcggagacgtcattgcattcatgctccctcgggtgtcagcggacggggggccaaagttcaagccgcgtccagggcaggcagcgcgcggcgg

SEQ ID NO: 25283 - DNA, 122 bp, Homo sapiens
cacaaattgacaaccacaaatctgtgtggcctaaaacaacaaaatttattgattgattaccgtatgtcaccatcacaagtcagccttgggttttgctccatgctatgccacagcagaatcaa

SEQ ID NO: 25284 - DNA, 122 bp, Homo sapiens
tgccaggacagtcagctactttaagagcagaatcttgcttctggccctttctaaaacccccgttccatcccttcctatttcccctgtgtacttcattccatctcttttctttgcttttacgt

SEQ ID NO: 25285 - DNA, 122 bp, Homo sapiens
gttgaggcctcctgcagaccccatttgtattcatttcctgcagttctcatacctgaatcccgcctggacttctgccaagccttccaggccctcctcccccagggggaccacagatgctacgt

SEQ ID NO: 25286 - DNA, 122 bp, Homo sapiens
cagcagagaacctgccaagcccaagtctttgcccacgctagaccagacccccaggactttcgtctcaggcttcctgggggtccacacctttgaggttacattgcaaacacaatcacctgatc

SEQ ID NO: 25287 - DNA, 122 bp, Homo sapiens
ctgtgttgctttgaatttgcttcactgtctccacaaggaagaccaatgcgaactgtcttacgttagctgaggcacagagcaaaatatacttagagaagagtgacaaaggactgagtgatggt

SEQ ID NO: 25288 - DNA, 122 bp, Homo sapiens
ggccctagattcgtgaaatctatattaatcagcagaataatattagccaattccttacctcgtttttccttcccctcatttggacagctagcctggtttgtactccttatctcagagatgag

SEQ ID NO: 25289 - DNA, 122 bp, Homo sapiens
cagcagttcatttctctgactgcttccttgactctctctccaggtaggtgcacgtctcatcgcacatgctggcagcctcaccaacctggccaagtatccagcatccacagtgcagatccttg

SEQ ID NO: 25290 - DNA, 122 bp, Homo sapiens
gcaggtggctttggggacaggaaagccaaaaggcagacgtggccctcacaggctgtcgtccggtagagggacaggcactgtcctcatagtgatgcccaccattgcaaagcatgctggagatt

SEQ ID NO: 25291 - DNA, 122 bp, Homo sapiens
agaagctgggagtggaagcagtgagaatagagcccagttccaatttagttctgatttctccgccagtactgtgaacctggggaatgcgcacctccttcctcaccccatgctgtccttcctca

SEQ ID NO: 25292 - DNA, 122 bp, Homo sapiens
agctgtacctcacctgtccacctggaaggctgcccgctctccctgagggtcctgggaaggcggcacgagaccggaagtgcccccctcaggtgacgtcacagtaccgcgccggagctgatccg

SEQ ID NO: 25293 - DNA, 122 bp, Homo sapiens
gggtgaaccacagcgcatgcgccgtagggagcgacctcaacagctagggtgctgtttgggcggggcctgggcggggccagacgcgcgcgagatttgaatttcctctgcgtgcggtcagtgcc

SEQ ID NO: 25294 - DNA, 122 bp, Homo sapiens
cggtccccggagtctaaggcctctcaactcaccaacttctcttattatcaaaaaagagaacgaggaacagcttctcatcagacttggtctgcatgtgctccccaatcttcagcacgtccagg

SEQ ID NO: 25295 - DNA, 122 bp, Homo sapiens
tgggaaacctcatcatcatcccagtgggcatcaccttcttcaaggatgagaccactgccccgtggatcgtgttcaacgtggtctcggacaccttcttcctcatggacctggtgttgaacttc

SEQ ID NO: 25296 - DNA, 122 bp, Homo sapiens
cgccacagggcgcaaaggggatttgtctcttctgaaacctggctgagaaattgggaactccgtgtgggaggcgtgggggtgggacggtggggtacagactggcagagagcaggcaacctccc

SEQ ID NO: 25297 - DNA, 122 bp, Homo sapiens
aggggctgtatatatggggcagcagggcacccccacccccaacggcacccagtccctagccggatttagaaagggctgttgtcactagaagcatttcccccaggctcccccccttcccaaac

SEQ ID NO: 25298 - DNA, 122 bp, Homo sapiens
tactcaggaggctgaggcatgagaacagcttgaatccaggaggcggaggttgcagtgagccgagattgcaccattgcactacaggttgggagacagagcaagactcagtcttaaaaaataat

SEQ ID NO: 25299 - DNA, 122 bp, Homo sapiens
atgtgttctgaaattagaatcctttaggtcaaaggctccactgcgtattagctgtaagcccgttgacaacttactaaatctctttgagcctgagtttctttcttacagatttgtggtgagaa

SEQ ID NO: 25300 - DNA, 122 bp, Homo sapiens
tcccctcccaagcggttaagaggcgggcttgggcgccctctagcggtgatctgtggtaaccgttccctactcagcggcagcgccttgagttgaaaatgcatttataatgacggagggatgct

SEQ ID NO: 25301 - DNA, 122 bp, Homo sapiens
gagccctcgacacgccccctctgggaggtacttgggggtctttgaatggtgcctgccgaacgagcgaagggcagccagggagagggcgctgctccagggcttggaagaccccagatgccctg

SEQ ID NO: 25302 - DNA, 122 bp, Homo sapiens
aaggacggaggcatagattaatccggcccctcactgccccgaggaacccaggatctggcacggtcctcggcatgctcatgctgcagtgaatgagcgagtgagagtgaactgacaggcgcggg

SEQ ID NO: 25303 - DNA, 122 bp, Homo sapiens
agctccctgagggcagggccctgatccctttgactggctgtggtatcctctcctgtagaccgctggctcatgaaataatcagggagagaatgtgtaaatgatgatcgtgaggtccacttgga

SEQ ID NO: 25304 - DNA, 122 bp, Homo sapiens
taatatctctcaaagcagttcattctgaggattgctctaacaattagaaatgctttccttcggctacctagccaaaatatgttcctctgtagtttaccctcccccacccctcagtccttgga

SEQ ID NO: 25305 - DNA, 122 bp, Homo sapiens
gggccatggccacgtacagaaagaggacggcttccagtcttcaaattggaaacctgcacccggcctcccttggctaacctcaatcccataagcaatccgaaggcattgctgagcggacagaa

SEQ ID NO: 25306 - DNA, 122 bp, Homo sapiens
aatctcagcccatgttaaaaggttggactccgggcccacttcctccaggggcacccgccccgtccatctctccatcagtcaggttgtgtgagaggcctgtgccagccgctccgcacccctaa

SEQ ID NO: 25307 - DNA, 122 bp, Homo sapiens
tctcaccagaataactcctcacagacctggatacaccaatgtgtctaactccactacagccgtttaaaaagtcatatcaagaaaacgtggtaaatactcagcatggaatactatgcagccat

SEQ ID NO: 25308 - DNA, 122 bp, Homo sapiens
cgcttgctctgctggtcgctctggaagttggggtccaggttgtccactgcggggagagcccgccacaccgggagagggagggacaagtggtaagcaagctagggggcaggtggcacttcttt

SEQ ID NO: 25309 - DNA, 122 bp, Homo sapiens
gaaaggcttcatggagatgactttgaagcaagcacctggaagaagtgagagaatgaggcacgtggatgtgggccagcagcattccaggcaaagggaaccacagcaaatgcaaaacccctgag

SEQ ID NO: 25310 - DNA, 122 bp, Homo sapiens
ggggacacgcacacccagggccaccggagggacaggtggtcaggcggactcaggtcacaccggcggacgcggggccactcacctgggccggggcggggcagctcacctgggccggggcgggg

SEQ ID NO: 25311 - DNA, 122 bp, Homo sapiens
ccatctgggagacatctgtggtggaaggtagggctggcgcaggtggcagcagcagaagtccgtgtccccaggcagtagcaggcctagagcttcacagtgccagggggcaggctgtcgttgca

SEQ ID NO: 25312 - DNA, 122 bp, Homo sapiens
catggccccagttccagcctgtggtcccagtgtaaatattcatagtgtcctattttggttcggacaataatatatttgaaggtcaccctctcataggtgatgatagagagtttggattttgt

SEQ ID NO: 25313 - DNA, 122 bp, Homo sapiens
ggccctgactgtctgcaggatgagggtgtcgaggagggttccaggccagcgtgcctgcctcgcctccagcccggggtaaggagatccacggaggcctctgcgcctaaactcaggtggccaga

SEQ ID NO: 25314 - DNA, 122 bp, Homo sapiens
cggagccgaggccaatggcagcccgctgccgccgctcgcgcagaccccgcctcccgaccacgggccaatcccagcccagcagcacccccggaccgcacgccgaccccgcctcccggacttcg

SEQ ID NO: 25315 - DNA, 122 bp, Homo sapiens
gtggaaggcatgctcgtccaagtgcaccaagcggttattgaacagaagcagcttctccagcgcccccagcccgtcgaggtcgtggcggccaagcgcccgcaacgtgttagatgatagatcga

SEQ ID NO: 25316 - DNA, 122 bp, Homo sapiens
cacctcaagtctccaaggcttcgttttctgggctggttctgctagctgtagtactgctgccgggccctctgcactcagctttaacaaggaggccatttgcttcaaactaagtggcgaattcc

SEQ ID NO: 25317 - DNA, 122 bp, Homo sapiens
acagtaaccaggaagccttagctgtgtttggtaggcactcatcatttaagatgctgtatgcggccgggcgcggcggctcacgcctgtaatcccagcactttgggaggccgaggcaggtggat

SEQ ID NO: 25318 - DNA, 122 bp, Homo sapiens
ggcgccgctcctccccgcaggctaattaggtcgtgtttgtaaagcacttggaagacaaaacgcgccccaagtgttaattatcattagccccgtcccaacacgcttcccgagcggtgcggaga

SEQ ID NO: 25319 - DNA, 122 bp, Homo sapiens
ttgattttttaaaaagccgcgagactgtggttggcgtggtggccatggtggcctctggggcgtattgatcagatgctgagtctgagagatgccgggcaccctcagtccggggctggttccag

SEQ ID NO: 25320 - DNA, 122 bp, Homo sapiens
gggcaggaagcctgggggctgagcggtcctccgaaaccgagaggcaggtcctgggtgcgccggcggtacagcggagagcgtggagagaccctcgccgcagccatttcctgccctttgtgtga

SEQ ID NO: 25321 - DNA, 122 bp, Homo sapiens
gaatgggctttcctcgtggctctgagacaaggttctgagaaagtctttccccccggggctcgggcctttgtcatggagaaggttctgggtgcatttcacaagggttactctcacctcctcat

SEQ ID NO: 25322 - DNA, 122 bp, Homo sapiens
gtggtcagtgccatcgtcatcatcgtcatcagcaacggcagctcaagaccagcaaggccgcggttgtgtctgtcatgagcccgttggcatgccgtttgttttttatctttgccacagttgca

SEQ ID NO: 25323 - DNA, 122 bp, Homo sapiens
ttctcgagggaggaactgggacgcgtgcatgtttgcattctcgagggaggaactgggacgcgtgcatgtttgcattctcgagggaggactgggatgcatttatgtttgcattcttgagagag

SEQ ID NO: 25324 - DNA, 122 bp, Homo sapiens
agagcaccctggcatagcattctctgacctgggctgccttttcagggtatgagttgattccgcaggcaccaaggcatgcctgtaagccctacagggcagacgccctcaccccaatcattggc

SEQ ID NO: 25325 - DNA, 122 bp, Homo sapiens
cctggctcctaagcctgaggacaggatgtgagtgcctgccctggtgctcatgggtatcagcgggacagagatttgtgctgagctgcgtgctgctggcttcccccttgcctgtccttgggaac

SEQ ID NO: 25326 - DNA, 122 bp, Homo sapiens
cttatacctttccaaatccttattatttctgtggctccagtggcgcaatcggttagcgcgcggtacttataagacagtgcacctgtgagcaatgccgaggttgtgagttcaagcctcacctg

SEQ ID NO: 25327 - DNA, 122 bp, Homo sapiens
cacctgcctctgagccgccccaacggcctgcaccttcaccaccgccaccttccagtccttcgtcagagagcccgccccctgctcccattggtcaggccgctcgtcactcctgaagggcgggg

SEQ ID NO: 25328 - DNA, 122 bp, Homo sapiens
gggtgggcagcctgcctgacaagccccattcagtgaccagctgacccccaatacatgactcgtgctcctctcagaacccggaggaatgtggccagtgcttccctcccctgcccagaggcaca

SEQ ID NO: 25329 - DNA, 122 bp, Homo sapiens
agctccagggggtcgctgggctctgaccagcctgcagggctctgatagtaacagtgatatcgccctgcatgttcccacatcatggatgggatggagagtttgaccttgttttcagactccag

SEQ ID NO: 25330 - DNA, 122 bp, Homo sapiens
gttgggaggaaacccagccttacttagctctgagcctcaggctaattaatctgacccatacggttttatccattctcttctgggttgttcccagcaccttaattggagggatgtttatttgg

SEQ ID NO: 25331 - DNA, 122 bp, Homo sapiens
gccggccctgatcgacgagtgcatcgagaagttcaatcacgtcagcggcagccgggggtccgagagcccccgccccaacccgccccatgccgcgcccacagggagccaggagcctgtgcgca

SEQ ID NO: 25332 - DNA, 122 bp, Homo sapiens
tgggctggggccgtagcgacgtccgccgcgaacctgggccccccaaagctgcggggcgttcggtgtcgccgaagtaaacatgcaccctgagccctcggagcctgcgacaggtggtgcagcag

SEQ ID NO: 25333 - DNA, 122 bp, Homo sapiens
agatcagttctaaggtttcttactatttctaccaagagacgaccatcggcattccacagacggctcctctagctgtgcacaatgcctgttcttatcgttatcacccgcttcgcgccagcggt

SEQ ID NO: 25334 - DNA, 122 bp, Homo sapiens
ggtgacagccctctgctggcggactcagagctattccaggagtaggctgggctggccccacgaggggcagaaagccagcgcctatagatgcagctctcttctacccatctgtcctctcgagc

SEQ ID NO: 25335 - DNA, 122 bp, Homo sapiens
cgcagaacatccacgaccacttggttcctacctggacaaggtgcgggctctggaggaggccgggtgagctgaaggtgaagatctgcgactgggccccggggccccggcaattacagccacta

SEQ ID NO: 25336 - DNA, 122 bp, Homo sapiens
tttacggggcacaatgtgacagagctgggagggccctagaggtcatctgaaccaattctacgtagggaaactgaggcaggagaggggagggactggcagatagcacgttagatcagtgctgg

SEQ ID NO: 25337 - DNA, 122 bp, Homo sapiens
gccagcattggcctgggtgccactgggtggctgatggcagaatgtgaattcacttgcaagcggacatgttcgtttccatgccccaaagcgggaagaagaagggcacaaggagacttcgatgg

SEQ ID NO: 25338 - DNA, 122 bp, Homo sapiens
taggggaggaaacagccagaaaaacatggatttaaactgcaccatctatgatttaagttacgcataggcatttcctgctctgagtcctatatagcataacaaaattcactggactttgcatt

SEQ ID NO: 25339 - DNA, 122 bp, Homo sapiens
ctcgcttgcgccctctggtgtccaagtacgagaggccacgtggacttgcgcaccagcagccggtctgttctaggccactgtctgcagctcaggtggacctgggtggagctaggtctaccccc

SEQ ID NO: 25340 - DNA, 122 bp, Homo sapiens
agctccagggccagccagatgaggcttgtcacctggcccctcccccttggtctcaggcctcgcaggaggagatgtccactccggcgaagacccggcatagtcctcacctgctctttgagcca

SEQ ID NO: 25341 - DNA, 122 bp, Homo sapiens
ggggctgggccggggctggcaggcggttgctaggctccagcggctcccggccagcggggacgtggaggtgacatttctctgacccacaggactgtgggcgccctgccgagcgtcgcgcggtc

SEQ ID NO: 25342 - DNA, 122 bp, Homo sapiens
tgggtgaggggcctgtgaagcttgttggtgtgtaagagacctcggtggcatcactgtcagcgcagccgaagccaccacgctagctccagactggtcagcagatggccgcgcaccaggccctt

SEQ ID NO: 25343 - DNA, 122 bp, Homo sapiens
ggcggtgggaggacaggactctgtacccttgtaaaccccaaaccaagggcggcgggaggacggcaggaccctggaccacccttgtaaaccctaaaccgaggccgacgggaggagggcaggac

SEQ ID NO: 25344 - DNA, 122 bp, Homo sapiens
cgaaggggaccgcactgggcatgcgttgccagcccgggccccgcccccaccctcagtcctcgtgtgctggccccgcccccacagcctggccctccagttgtggccctgcccccgtagaccac

SEQ ID NO: 25345 - DNA, 122 bp, Homo sapiens
accgcagcctgaggtccggtcctgaggctgcagaaccatcacctcatttcattttccctgcgtgcctccagacggcgctgcagctcgtgtcaatcttgccagctccgacgctcctggcgctg

SEQ ID NO: 25346 - DNA, 122 bp, Homo sapiens
ggcacaagagacctgccctaaggcacctcacagcctagcaaatggtacttgaggaatcctcgactgactcccaacctgggcctccagggcttcttcactaatattttttctctaaaggatac

SEQ ID NO: 25347 - DNA, 122 bp, Homo sapiens
ctgcacatctttagttctggccaccccacgggcgtcaggggcagctcgccgcagctgtgacgcacgtttccctggtggctgatggtgtcaggcatctctccatgtgcgttggagaagcccac

SEQ ID NO: 25348 - DNA, 122 bp, Homo sapiens
aacacaagtcacacccacccacaaacaagcccgtttcaagaaaacaaatgccggcggcaacgcaaggagctgctaaaagtttccagctgccctgcagagctcgctcctgctcaaacgtcgct

SEQ ID NO: 25349 - DNA, 122 bp, Homo sapiens
ctccggcccgtgtgtggcggttgcccatgtgtggctgtgacatgtggaggcgaacttccacggcagaagtgccatgcttccgtaagctcttccgactggttggtaggcgcttttatcggcac

SEQ ID NO: 25350 - DNA, 122 bp, Homo sapiens
tcttccccgctcagcccatgcaggggcgtagcggcagcccagccaggcccggggacgatccgagcccaccttccaccaatgcattcagactccgcagaaggggtttaaaaaaaaatacgcac

SEQ ID NO: 25351 - DNA, 122 bp, Homo sapiens
gagtcaatgggaaatgtttaggtggtaccgaagttcattcctcaaatattttacctctcacgtgcaaagcactggctagatcctgcagaacatacaaagataattatgccagttaacatttg

SEQ ID NO: 25352 - DNA, 122 bp, Homo sapiens
atatttatagcagcattatcacaatggccaaaaaatggcaacaaccaaagtatccatcaacggatgaatggataagcaaaagtggtctatcactacactgcagtgttcaaccatataaagga

SEQ ID NO: 25353 - DNA, 122 bp, Homo sapiens
aaaacaaaacaaacaaacaaaaaattagccctgtgtggtgacctgtacacccagctcctccggagtctgaggcaggagtttgaggctgcagtgggccgtgatcatgccactgcactgaagcc

SEQ ID NO: 25354 - DNA, 122 bp, Homo sapiens
gagatcaatgcaggtggactagaacatgcccggttcacggccccgtttccctctcctacacgcattctgcaaagattttttgtgcacctactgtgtgccaggcaggaccatcatgagagtgt

SEQ ID NO: 25355 - DNA, 122 bp, Homo sapiens
aagagtcacattgtattgtatgcattgaatatcacgaaatcgaaaacactgaaaagctagcgtttacattcttggatcatacccccaaaggccaaggattcccactggccgcttgcagcagg

SEQ ID NO: 25356 - DNA, 122 bp, Homo sapiens
gggctggggaggggtgatgcaaacactctcttggctgctctggctggtgtctcactatgtcgcatgccccccaagtccactggtttcaagccacatggcatcagtagttgcttaggaattac

SEQ ID NO: 25357 - DNA, 122 bp, Homo sapiens
ttctaagcaaaacacttttgatttactcatgagaacttgtctttttcttttgaattcattcgccatcagaaataacatttattacccatcagagacagcatgtgttctacaagtattcattc

SEQ ID NO: 25358 - DNA, 122 bp, Homo sapiens
ccttcctggacagtggctagaggctgaaagacctctaggcttttctatgtcttattcattcgctaatcagcaccattcagccaacagcacacgtggtcatatatgcagtgccctggaaaact

SEQ ID NO: 25359 - DNA, 122 bp, Homo sapiens
ggcggctcccagtgccgcagcggggccaggaatggatgtcgctttttcggctaagacccgcgtctactccaccacagctagatgagaccctgtcggagagactatggggcctgacggagatg

SEQ ID NO: 25360 - DNA, 122 bp, Homo sapiens
tgtgtttgcgagcgggagcgaggggcgccggctggggtgtgtgctcctggtgagtgacaccgaggggaaggcgggcgggtcggcgggcgggggcagcctgcgaggggcgggagtgtccctgc

SEQ ID NO: 25361 - DNA, 122 bp, Homo sapiens
cataccatgcagggctctcatcgtaccatgcatctcagcgtaccatacatttcagcgtaccgttcatctcagcataccatacagagctctcatcgtccttgcagctcatcataccgtgcatc

SEQ ID NO: 25362 - DNA, 122 bp, Homo sapiens
acagttttattgggcagcgctgccctggtctttattttcccttgttggaacgctcttccacgctgctcccacaccatgtcccctatcaccattattatcctcatttcatctgtaattacttg

SEQ ID NO: 25363 - DNA, 122 bp, Homo sapiens
cacagctttcagaattttcgctgatgctcaagtgctctttccagcaacagcattcatacacgccaggccacttcccgcaagtcataattacaacataaagccaaattaaatgttctaacgct

SEQ ID NO: 25364 - DNA, 122 bp, Homo sapiens
tgtgtggctggggttggccgggtgctgctttccacattgacttggcgcctgccagcggtgcggtccagttctttgactgaagttctcgccagtcatggacttcctatcctcctgtttcacga

SEQ ID NO: 25365 - DNA, 122 bp, Homo sapiens
cctgcatatcccactgacacatcacaatctacatgcctaaaactgaactttactgtcattcggaaatgcaaatctcaatttgcattgctcttcaaggtgaatcatgcttttaagtacccagg

SEQ ID NO: 25366 - DNA, 122 bp, Homo sapiens
cggctaattttttggatatttagtagagatggggtttcaccgtgttagccaggatggtctcgatctcctgaccttgtgacccacccaccttggcgtcccaaagtactgggattacaggcatg

SEQ ID NO: 25367 - DNA, 122 bp, Homo sapiens
gacactgtcattggcctaggcaaagccgtaagggtggggaatcctattggcccaggggtgcggcttgtcctctcccggtgctctcattggccgagcgcggccgttgggggtgaggccgcgtc

SEQ ID NO: 25368 - DNA, 122 bp, Homo sapiens
aagaccagatttggtgttgtttttgataacctgctgtgtaaacttgggccggtttctccacgtgtacaacggaaaaaaaaatatgaactttagaaccaaatagacctgggataaaaccctgc

SEQ ID NO: 25369 - DNA, 122 bp, Homo sapiens
caccgctgcgcgcaacagatgagttcagccggaactttctggggaggtccccccagctcccggcgactttcgatagggcaaaaatgcctggcgcgctgcggatccagctccaagccttaaaa

SEQ ID NO: 25370 - DNA, 122 bp, Homo sapiens
ccgacgccattttgcagggtgggctgcgcagactcttggcgggaggccggcgcgcttgagcgggagaggacgtggaagggttggaggtggggagtgcgcgttacgactggaaagcacgcgtg

SEQ ID NO: 25371 - DNA, 122 bp, Homo sapiens
gcagacaggctggaccccgtgcatacccagcaccctccacagtgtctggatgtctaggaccgctgcccataccctctcccacctcattccaaagctgtgtgtggctcgggggcctcgggggc

SEQ ID NO: 25372 - DNA, 122 bp, Homo sapiens
cacgagttccgggtgggcacgcgctcggtaggtcccgcacttggagtggcaggctggcgccgccggcccagggcagtaaggggcttagcacccaggctagcagctgcggagggtgtgcaggg

SEQ ID NO: 25373 - DNA, 122 bp, Homo sapiens
cagcatgagaaggcggtggagctgctgaaggcggcccagggctcggtgaagctggttgtccgttacacaccgcgagtgctggaggagatggaggcccggttcgagaagatgcgctctgcccg

SEQ ID NO: 25374 - DNA, 122 bp, Homo sapiens
gactgcttggaagatgtaaaatgcacccattcctctagatctggcccgccgcagtgtctgcgccagctacgccgagaaatgtctaaaaggggcaccgtgccagagctcaggatttctgtcca

SEQ ID NO: 25375 - DNA, 122 bp, Homo sapiens
ccacacagctgacaagggaagcaagccagcggcgtccggggacggagcaagcgcagcagccgcagcgcgcggttccccctccaggccccggcgactcagcccgcacacgtgtatgcgcatgc

SEQ ID NO: 25376 - DNA, 122 bp, Homo sapiens
ccagaagttagggcaggttgagggtgagaggcctggcaatgctgagagtgaaattggcttcgtaatttgtggggactggtgcaaaatgaaaattgttcacgtttcaagatggcaagagcaga

SEQ ID NO: 25377 - DNA, 122 bp, Homo sapiens
cccgggaataactggccctgagacccctagacccaaggaggcctgtccatgccaagcatccgggaagcatggctggccttatccacccatgggtcacgtcggttcccaggggcagcatggga

SEQ ID NO: 25378 - DNA, 122 bp, Homo sapiens
tcctcctgtgctgtgatctgctctgatgagtgtgactataccaaatccaggactgcgccacgcctcctaaactccgactcctggacgacactgcagcttcctccgctgccttggggacacgc

SEQ ID NO: 25379 - DNA, 122 bp, Homo sapiens
tcagtcttaaagatagtttggaaataatctgctttctcactctttgtctgatgggaaaaacgaactgacttgcatgcactgtggagagggggtgaactaggggaaacaaaaggtgggaaact

SEQ ID NO: 25380 - DNA, 122 bp, Homo sapiens
ctccggcttttgggggatcactgtcctctctcggcagcaggtgaggctgggcctgggaggcgcgggtgggccggggcgagggccacctgtggggcggcgcgcgcgtgggagccgcgggctgc

SEQ ID NO: 25381 - DNA, 122 bp, Homo sapiens
gtaaatttgtccgagatcgtatagctggtacttggtgaacgtggtctaacccagacaccgcgttctccctggtgactccattttgtaaaaccagagctgttggcgcatggcatcctcgtaag

SEQ ID NO: 25382 - DNA, 122 bp, Homo sapiens
tagttggttcctacattttgaggattttgatgtgactagtcattctttatagttttaaaacgtttctgaaaaacactgctttcaatatggccagaggcatctttgggcagagtggatctgag

SEQ ID NO: 25383 - DNA, 122 bp, Homo sapiens
aaatccccaaagccatcagagaaacataacacgttacactggaacgtcaggaatgatagtcgacttcccgtccaaaacgagggacagatggagagagggagccaggcgcggatccttcccca

SEQ ID NO: 25384 - DNA, 122 bp, Homo sapiens
tctctaccttcctcctcaggcctaccggctgatgcaaggaagtgctttctggcctcttttcggatacgctccctctcctcagaggtaaagagagttaaaaggagctgttggcagtcttgcca

SEQ ID NO: 25385 - DNA, 122 bp, Homo sapiens
ggaagaggggctaagatgtgggacgaacgtgattattcaatgggcatgcgcttccggccacgcatcacacgcacatacaccagcgcggttatccataactctaccatttcaagtgagccgca

SEQ ID NO: 25386 - DNA, 122 bp, Homo sapiens
atgatagggctggaggaggaaggggcgggctgaagaaggggaaggtgggaagagcccagccggggctacaaattgggtgaagcgctgaggttttagtacttccgtttgaggagataggcaaa

SEQ ID NO: 25387 - DNA, 122 bp, Homo sapiens
aactgacacgcccagcactgggataggacccgcccgcccagtcctcattaaatatggcagcgagcggggccgacgtactgcggctgcgcaagttgaaactcctcctggcagctcctccccgg

SEQ ID NO: 25388 - DNA, 122 bp, Homo sapiens
gctccagaaaaactctgggcagcacatgtttagcaattaagtggacacagacaataaagacgttgccaaattgtaaaacaagacttggaaatcacagaaaatgttgctagttattgatcacg

SEQ ID NO: 25389 - DNA, 122 bp, Homo sapiens
tgaacttttaccacaaccctgtaaatttgggtgatcacagccattttgcagatctggaaacggatctgagaggctgagtgattctctgtcaatgaaccagcaaatgacaaattcaggattta

SEQ ID NO: 25390 - DNA, 122 bp, Homo sapiens
cccccggctagagcccatcccactctgctctctggcttcaaaagcttcggccttcacccccgagtctgccctcaggggtgtcccctttggtctggcagctcactttaaacggcgcggggact

SEQ ID NO: 25391 - DNA, 122 bp, Homo sapiens
ggggtggcgcccgccaaacccgctcctaaaaggagcctctctccctctgtctgctctaagcgccttgggggcctaatcgcagtctccacctgggtgctgaacttccttctcccccgcttgct

SEQ ID NO: 25392 - DNA, 122 bp, Homo sapiens
ccctctttaccacaacggcaaataccagaaagtcccaactgtaaaaagggcggcccactccgcccaaatttctctatacgatgctgagaggcgagctacaggtgaaatagactcctaggcac

SEQ ID NO: 25393 - DNA, 122 bp, Homo sapiens
tcctccactaggtcttggctgaactaggttatggggaatgcgatgagcaaaactggcagccgtaccctcccgcaaactgaaaatcgtgtgagaaagcagatattaggaaattatcccttatt

SEQ ID NO: 25394 - DNA, 122 bp, Homo sapiens
actttttgcatgtgggaactaggggaacaccccttccatcaccaacattctcaggttctacgagtcacagagatgagtggcctgcacattctgggtggccagccctgggagtgggggagagc

SEQ ID NO: 25395 - DNA, 122 bp, Homo sapiens
agttccctctgccccttatctcatgtctggagcctgggtatcttccgtggatagactcaccgccgcccaggggagccggagccggtgccggtccctcttccatgaacttaagctgaaaccag

SEQ ID NO: 25396 - DNA, 122 bp, Homo sapiens
tctgctggcctcccacgtaccccacattctggcctgacccctcagaagccagaccactgtcggcctgggaagtccaactgcaagcagacggctgctaagtcacccccaggagtccaaaaacc

SEQ ID NO: 25397 - DNA, 122 bp, Homo sapiens
ccaatggcggtagaggtcttgggcacctgacaagaggggcggtccccccgccggaaggggcggggcgaggcgagcggccgcgtcagcggtaggtggggctgtggttacgctgccgggcgggg

SEQ ID NO: 25398 - DNA, 122 bp, Homo sapiens
gcaccggggtgcgggcctgcaggatgcttccagctgccagcacctggcagcctcgagactcggggatcttggcacctgctacctctatgttctccagctccgccagggcaaagagacgcacg

SEQ ID NO: 25399 - DNA, 122 bp, Homo sapiens
agttaacacgtcacactgaccgtcacaggttagttaacacgtcacccagccaagttaacacgtcaaactgaccgtcacaggttagttaacacgtcacacagacaagttaacacatcacactg

SEQ ID NO: 25400 - DNA, 122 bp, Homo sapiens
tcattgataaaaagcgagttcattctggagactccggagcggcgcctgcgtcagcgcagacgtcagggatatttataacaaaccccctttcaagcaagtgatgctgaagggataacgggaac

SEQ ID NO: 25401 - DNA, 122 bp, Homo sapiens
tgtgagtagaggatgctagtctggtttttgaatacttgaattgtggtatttttcttttttcgagggtaggtttctgactgtttaccaatgttgaacacattgaagagtgcaggtgaaagagt

SEQ ID NO: 25402 - DNA, 122 bp, Homo sapiens
agagagggctggtcccagaccttttcctaattcccgcttaactggaaaagccagcgtgagcggggtgagaaagatgcctggatccaggaaggaaccaggcccaaagggaaaaagacttggcc

SEQ ID NO: 25403 - DNA, 122 bp, Homo sapiens
ctacttactcttatatgtcccccactctgctgacagactgaggatgcaccaggagcaccccgttcccatggcacaccccatcgcgtgtgctcttgtagcatgctccttctcaacatgcaacc

SEQ ID NO: 25404 - DNA, 122 bp, Homo sapiens
tgagcaaatgagtgatggagagcttgacaccccaggacactcccccatcccccttcccctcgcctgcagaagccccctcctggtgctggccaaggtgctgaagccgcgtcctaggctgtccc

SEQ ID NO: 25405 - DNA, 122 bp, Homo sapiens
atttcataagaaattctatggaggcttctgaccgcgggggcgtaagaatgcagcctcccccgtcctcctcccgcccccgagttgagtatgtgtactctctcacccattacaggcacaaactc

SEQ ID NO: 25406 - DNA, 122 bp, Homo sapiens
tcagcatcatcgtggctttctctctccgtcaccgctcagcaagctcctcggggaaatgtgcgtctctcctgagtccagggagtcaaaaccaggagaaagtctgtgccgttatgactggctga

SEQ ID NO: 25407 - DNA, 122 bp, Homo sapiens
ttccaggactacgcagtagccagacgactctctaagaacatgggtttccgcagtcagctccgactgcctcgttttaatgcagtttttcgccattgtaggagagcatgctggatcgaagagga

SEQ ID NO: 25408 - DNA, 122 bp, Homo sapiens
gactgaaaggggaacactgaatgtgttatactagggatccccagagacaggtagctgtgacgatctacagggaggcaagatggtctcgtcagcctaggcttcctttctcaaagcacagcatg

SEQ ID NO: 25409 - DNA, 122 bp, Homo sapiens
tataatcagagaacttggtttccaaccccttggatctacttagatgcctggcccatctcccggacctactcttctgtcagaggcaggagcctctttggacaggctcatcagaaacagaacat

SEQ ID NO: 25410 - DNA, 122 bp, Homo sapiens
ttcctctccacactacccacttaggatacaattttgggtatgaaaatatgtgctaagcagcggcttgggaacaaattgcctctgcagatagccaaagccctgcactcctgggccagtggttg

SEQ ID NO: 25411 - DNA, 122 bp, Homo sapiens
gctttgtggatggacagtcatttgccctgtctggatctcactttcctcacctgtaacacacgaggagaggggataatgccatctgcccaattaacctctttttttttttttttttttttttt

SEQ ID NO: 25412 - DNA, 122 bp, Homo sapiens
tcaccgcccgcgggagggtttgttgtccatttaactcgtcttagtaaactgtgcaggtagcgtggtcaggccgagggcgcaggggcggggcggcattgacgatcacttccccggactagtgc

SEQ ID NO: 25413 - DNA, 122 bp, Homo sapiens
ggtaggcagggagggacaggtgggccggatgcagaggccggcagctcgcgggtgaggcggcgccccgctcttcctatgggctccttggcccggtccgcgcctcctcgcaggcggaccacctt

SEQ ID NO: 25414 - DNA, 122 bp, Homo sapiens
ctgaaaggcttaagtgtgggaaatcctgactttggcaacacagtagagtgcctggcacaccgaagagcacgatatatgtgagctgttaccatcaccaccacccccacccccatcaggctaca

SEQ ID NO: 25415 - DNA, 122 bp, Homo sapiens
tcgtgttgcccaggttggtcttgaattcctaaacgaacctgccgccctggcttctcaaagcgctgggatgataggcgtgagccactgcaccgacataacgtcacttccttctgtcgggcgtc

SEQ ID NO: 25416 - DNA, 122 bp, Homo sapiens
tctgtgtgtaatgccggctccttcactcttttatggcaccatgattgtgttttaccctcccgactgttaactgccaactgttaactgttaactgcccaaggttgccctgctgatgtcatgcc

SEQ ID NO: 25417 - DNA, 122 bp, Homo sapiens
cgctcccctagaaaatactgaaggacagctgccagggatacgctgatcctcctccctcagcgcagaaatgcaaattaaaaactactccagctactccggaggctgaggccagagaatcgcct

SEQ ID NO: 25418 - DNA, 122 bp, Homo sapiens
atcggctcccgggggtcgcccagactccagggctccaaattcactgggtgcgctggaacgcggcacacagtagtagtatgccctgcttaatacatacaggacatatttgaggccccttccag

SEQ ID NO: 25419 - DNA, 122 bp, Homo sapiens
gcccgggggtcaccgcgaggaagctccatcggccgcggcggctctgtggaatctgaagcgcgtggtctcacggccacctccccctgcaccagccgtgtggcccaaggtgatgtctgtgtgcc

SEQ ID NO: 25420 - DNA, 122 bp, Homo sapiens
caaatctacacagatgaggggaagggtcaggaaatcagccctctgatcctaatgcccccacgcataccccactcacatctctggaggaagaagggatgagactataccccagaaaacctgcc

SEQ ID NO: 25421 - DNA, 122 bp, Homo sapiens
cccgaagtctgtgcagcggatggacacctctggcgtcctcactcagcagcagggcggcgccgagatggtccagtgcatggccttgtctgctatggctggagccccttggaagccggcagaag

SEQ ID NO: 25422 - DNA, 122 bp, Homo sapiens
cctaaaaaggggaggagggcggagtgggaggggggcccagagttaaacacaggaaacaagcgttgagtgtgtgccaataaaaatggtcacaaatcagggctgctgatgtcataaccctgggg

SEQ ID NO: 25423 - DNA, 122 bp, Homo sapiens
cagatttgccagcatccaggacccactaggaaatgtgtctgtcaggcagctgggctggagcggaaggatcagcttgcctgctcctcgggcttggcacctgttgtgtgttgatctttattttt

SEQ ID NO: 25424 - DNA, 122 bp, Homo sapiens
ccaggccctcagttagtttccacaacatgggagggttcctcctccgtggtctcgcccattcgcgttcccacccaccctccccggatgtgacgaccctgggctcccactcccccccatgagag

SEQ ID NO: 25425 - DNA, 122 bp, Homo sapiens
cctcccgcgcgtctttcaaaggtcttctaggaaccagtcagcgattagaggccgagtcttcggccacccaaaggcggagtaagaaaccagaagcggatctgattggttgctggaagacgccg

SEQ ID NO: 25426 - DNA, 122 bp, Homo sapiens
tcctatagatctgttgttcataggcatgaggtgaacacgcgcattttccagccaggagaacgttccgctcagcacgcacacctggagacagcccagccctgagcaggaaatgcctgctgggc

SEQ ID NO: 25427 - DNA, 122 bp, Homo sapiens
ggagccgggctgctgccgtggcaaaggatcacagccctgtggctgagcacagcacgctcacgccgtgcggtccgggggtgccaagtctccagggagctcgcaggactgcgttccttccagag

SEQ ID NO: 25428 - DNA, 122 bp, Homo sapiens
tttctcatgaatggtttagtaccttcctcttggtactgttctcgcaatagtgagttctcgcgagatctggtcgtttaaatgtgtgtggcacctccctgaccctcctgcttttgctctggcca

SEQ ID NO: 25429 - DNA, 122 bp, Homo sapiens
ttcattcaaaatgcattaattggaaatacctaaaagaaacgtgggagggggccggggggtcggaagaaagtggagaacagacatttacatatataaaaaaagggatctgatatatgaataac

SEQ ID NO: 25430 - DNA, 122 bp, Homo sapiens
caccttgtgggctgttctgctggagggctgggcaccaggctcacaggaagccaggcagtgcgaaaccctgaggggctcagagtgctcggtaggatgggaccaggctctgaccccagacctgc

SEQ ID NO: 25431 - DNA, 122 bp, Homo sapiens
agggattctttagttgacagttgattgagagagttaaactattgtccaaagacttggattcggtagaaaggaatgcttgagttaaggtttttcttatgtagataaagcctctcaggtagcag

SEQ ID NO: 25432 - DNA, 122 bp, Homo sapiens
ggaaaaatgaagcaggtaagaggataggaggcataaaataaccttttcggagaaatagatcgggggccttctgtcagaggaggtagtgtttgagcagttatctaaataaagtgaaggagcct

SEQ ID NO: 25433 - DNA, 122 bp, Homo sapiens
ctccatgcagtccttgctttcctgatttcctcatcaataaagaagcatatacttggggggcgggggaactaaagctttcaaatctctcatgtatcttctttagcttctacattcaacaaata

SEQ ID NO: 25434 - DNA, 122 bp, Homo sapiens
ggaggaagcggtgctgtttggggtccgggagcaagggcgtggcctggatgcgcgggcgcccgggacggcacgtcctcagaccaaactacaactcccaggacccagcgggcgctgccgcccac

SEQ ID NO: 25435 - DNA, 122 bp, Homo sapiens
cggcagcgacgactcaaacgacggtcgcagacgcttcgctgagactgagccgagaagagccgaatcatcggaagggaagctgctcccacctcagccaatcagcgcctgccctgcggactctc

SEQ ID NO: 25436 - DNA, 122 bp, Homo sapiens
ggctggagggtgggggaaacacgttgccgtggcacttgctggcgaggaagccgcccttcccggctgtgctggcagccggctgtatttttctatcacatccatcggcagggctcaaatattcc

SEQ ID NO: 25437 - DNA, 122 bp, Homo sapiens
tccaaacccaaagggctggcggggaacacagtgtgccgggccacttccttttgggcttcacggggtcgctagggaaggggagagagacgacccaagggatgctgccctgtgccttggcgctg

SEQ ID NO: 25438 - DNA, 122 bp, Homo sapiens
tgacatcctcggtctaaaacgcctggcaccatgtgggagcctggctccgctgcctctcaacgcactggcttgctttttgcttttgagtagcttgaatatcaaaccaagcacaaagggaatca

SEQ ID NO: 25439 - DNA, 122 bp, Homo sapiens
gagtgagtcgggcaggaggcagacgttggcagtggcaaagcagaagcttttgccaggccccgtgcccttccattcactgagcagggctgccccaccggccaggcccttgtcttccagccgtg

SEQ ID NO: 25440 - DNA, 122 bp, Homo sapiens
aggcttcaaggatcccagctgtcctcaagagtactggttccagcttcctgcttcatgaaccggtcatggcccctgcaaggtcaaggtcattataatgccagcacctgactgctaaggctatt

SEQ ID NO: 25441 - DNA, 122 bp, Homo sapiens
gccctgggtgtttcctgtttctggcacagcatggcaactgtcccagcaaggggcagcccacgggagctcctttgcacacaagccctgctgctcctaaaggctctggacacacaggagacctc

SEQ ID NO: 25442 - DNA, 122 bp, Homo sapiens
attttgtccaaagcatttgaggaggcctctgagggtggggaggtggggggccgggggccacgggccacttatggggatcccgactccagcaggcacccaccttgtcagcctcgggctcagct

SEQ ID NO: 25443 - DNA, 122 bp, Homo sapiens
caattagctcagtgctaggctcttaactaattgccaggggtaatattcctccaacatctccgtgtcagtttgcttgagaaataacctggaggagagagagtgcccaacattttgcaaattca

SEQ ID NO: 25444 - DNA, 122 bp, Homo sapiens
aggctggtgctgggggaggtggagcccactttggatctcccagacccgggcagcagcaggcgttggtggtggatggggtaggaggcgggggtgagactaggagctgagcgggcaagcggcga

SEQ ID NO: 25445 - DNA, 122 bp, Homo sapiens
ctcccaggggtggagacccgccgaggtccccggggttcccgagggctgcacccttccccgcgctcgccagccctggcccctactccgcgctggtccgggcgcaccactccccccgcgccact

SEQ ID NO: 25446 - DNA, 122 bp, Homo sapiens
cagcccttgggagggtgcagaacgggcttagccaatatgaagaggcccctcagggccaggcggacgccgcgcccccgctcccaacagccggcagcccggggtcaggccgccacttcccggga

SEQ ID NO: 25447 - DNA, 122 bp, Homo sapiens
ccccggtgagagctccttaccaagaaagagggacattcatttccctctccaaggtagcagcgttgaaaggcttctccacagcattactcagtccaactaatgatgggaaaaggagggaaaaa

SEQ ID NO: 25448 - DNA, 122 bp, Homo sapiens
ctcgctgcgcatgctcgggggaggcggattccgggtccggagttggaggctttgggcggccgcggcgtagcgcgcggtgccggggccggcggggaggcgcgcgcttagggcgcggcgccggc

SEQ ID NO: 25449 - DNA, 122 bp, Homo sapiens
ttcttaataatgaatgaaccaacgacccccaaggctggtttgcccgtgcacacgcacgcacgtgtgcaacacgtagcacttgctgagtgtttgctacttgccaggcctcatgtcaagcactt

SEQ ID NO: 25450 - DNA, 122 bp, Homo sapiens
ccagccctgttagccccttacagagtagatcagctgccgcaggcatctgagttccccaaacggacgcccgaacccggcattgcgcaaatcgtttccaagtagccccggcttatttatcccgt

SEQ ID NO: 25451 - DNA, 122 bp, Homo sapiens
actaacactatgatgacaaccctcgaatgcaccaccaccaggaagcctttcctgatgcttcgccagagaggttctctttaaacgcgaatttttcttgagttatcctagaaatgtaagttaca

SEQ ID NO: 25452 - DNA, 122 bp, Homo sapiens
tggacattgtggttgtgtgaagcttgccaggtcttgtgtttgctattttggcagctgtgccgtagtctggaatcacactgagcttgcagccaactcaaattcttgcaattttctggaaggcc

SEQ ID NO: 25453 - DNA, 122 bp, Homo sapiens
aagaaggaagaccatgtgaagacatggggaaaagacaaccgtccacaaatctacaagccacggagagagacctcagagtaaacccaacctgttgacatcttgatcttgcacttccagcctcc

SEQ ID NO: 25454 - DNA, 122 bp, Homo sapiens
accacacatgtgggcagccgggggctttcctcgaattgacaacagcttctcgctgtcgctcggcagaacatgagctgcttacataaacactgcctcagagacacctgcagtgtgggacgcag

SEQ ID NO: 25455 - DNA, 122 bp, Homo sapiens
aatgcgccgcgtcggggaggctcccacggttttcctgtgacatgggcagggtgcgaaccccgcgccagtctttcccctgcaaagcctcgcagcagccaggcaaggagggcgtggggaaacag

SEQ ID NO: 25456 - DNA, 122 bp, Homo sapiens
tggatctcaggcactgtggtttcctcaagctcgtgctgataggcccaggcggtatacaggcggaagcacttccctgcagccacccgacctgccctgccagctcgctgattggctgaggcctg

SEQ ID NO: 25457 - DNA, 122 bp, Homo sapiens
tgctgcttttgccactgcttgaccaaggagaaagaggggaggctgggcattttcacatgccgtgaggacacatcacaccaacactgctgtgggctgctatgggtccaaagggcaaggaaacc

SEQ ID NO: 25458 - DNA, 122 bp, Homo sapiens
atgaaactgacctggtccggagagggcctgtgattggaatgttgcgacctcccaggagatcgatggtggtggtgatggtggtggtggtggtaatggtgatggtcatcatcatagttgtctgc

SEQ ID NO: 25459 - DNA, 122 bp, Homo sapiens
tggagtcaaaggaagatgtatctgtgtgaaaatagtttcttaatcttctgtgctttcaaacggcctctaatgtgctggatgagtgaaaaaaatgctctcacattcagaataatcatctttgg

SEQ ID NO: 25460 - DNA, 122 bp, Homo sapiens
ggggggtattggcggcccccgcggctccagctccccccacacccccttcggcccctagaccgtgcgccagacatgcattaaggcaggagtgacttatcgagctgtcagggggagcgttttaa

SEQ ID NO: 25461 - DNA, 122 bp, Homo sapiens
cagcgggggtccccagcgctgagggccgggcgcagcccgcagccgggatccaccccccagcgccccatcatccccccaacccagcactttcccggaagaaggcggctccgcacacctgccgc

SEQ ID NO: 25462 - DNA, 122 bp, Homo sapiens
gaatttcaagtgtccgcaggggatggaaggggggattccagatcctcgcattttcacagacggcctaatccctctgcgcaatggacccgggaaagctgcctcccgttaagggcgcccaggca

SEQ ID NO: 25463 - DNA, 122 bp, Homo sapiens
gggtgggaattcctgggggccagagctgcagagggtgctgcctgggggtgctgggctggacgggggtcctggttgtccctcctggttctcctggttctccctccgcagagggagggaggcgg

SEQ ID NO: 25464 - DNA, 122 bp, Homo sapiens
ctttatctctactccttccctcctcctccccagtgcacaggtcaggcattcaagggtggacgtatcatggacaactctgatttgagttgttttctctgaaacaaatatttgcatatgtgacc

SEQ ID NO: 25465 - DNA, 122 bp, Homo sapiens
ggaaaaggggatgtcttcagggaggacaaatacctaccagcagccaggaattacaaataacgttttaagatctaagtgggaacttcttggggccaaaactagcacttaaaggtagctctagt

SEQ ID NO: 25466 - DNA, 122 bp, Homo sapiens
ctccgaaaaggtaagtcgattcccagtactcaccctgatccatctccctccttctcctgtcggtcaaggcccttcaactagtcaccagtacgattcgagacctaattgcctcttgagcattt

SEQ ID NO: 25467 - DNA, 122 bp, Homo sapiens
ctctgagataaaatcagaaatggcttccctggggacaaggagtgcctatagggctcttctcgctgtttcttctacttttttatttttctctgcttgacagtggggttatcagtcatcatggg

SEQ ID NO: 25468 - DNA, 122 bp, Homo sapiens
taaacctcttttctttctaaattacccaacctcaggtatttctttatagcagtgcggaaacggcctaactcgccccacttactgtggactcactgccttggacggctcggcctagtcttcgt

SEQ ID NO: 25469 - DNA, 122 bp, Homo sapiens
ctgaccagggccggttttcaacttgtttacaagcctgcgtcaccgggaacctttcaccgccgcctgggacaaaaggttcctctttgtaagtcccttctgggcagaaaggggattcgccgccc

SEQ ID NO: 25470 - DNA, 122 bp, Homo sapiens
caattatctaagctgcaacttaaaagcaatggcttaaacaagattaagaagctgcttccccggagcttgcagtgagccgagattgcgccactgcagtccgcagtccggcctgggcgacagag

SEQ ID NO: 25471 - DNA, 122 bp, Homo sapiens
ccccgcggggacctgctgtgtgtgggtgtgaaggtggtgtggggcaagctgtgggaaccccgtgtcaagccctccccaggccagtgatgagcccaaaagctcctctggaaaacgttgatctt

SEQ ID NO: 25472 - DNA, 122 bp, Homo sapiens
atcagttttcctttttctttggaaatatttacattaaattgagatctgaggggaagatagcgctctaactgggatcctgcttttaatataatttgaaaatagctgcaaccccaatccacctt

SEQ ID NO: 25473 - DNA, 122 bp, Homo sapiens
tcacatattttccaccagctgggttcgcttctattgtcaggaagcttggagcataattcacgttcaattacagtgtttcccttaatccctttttctgatggggacataggatataaataagt

SEQ ID NO: 25474 - DNA, 122 bp, Homo sapiens
aggaagaaacctctattttctctacaaacatcctttgagaacatttcaaacctgcattgacgttgatacgatgatcagaaaacgctcatacacaccttccattcgactcacaagcaaacact

SEQ ID NO: 25475 - DNA, 122 bp, Homo sapiens
tggaagtctggctgcatcccgggccgctgagtcagctttctggttaccacgggcaatggccgtgttttctcctggatgtcctttgcagtggattacagccacctgctgagggagccatacgg

SEQ ID NO: 25476 - DNA, 122 bp, Homo sapiens
gcgccgcgcccggacaaaacacaaacgtcacagaggcagcggcggccaatcagtggagggcgcgcgcggccgcgtgcccctcgcgctcctcgcctcccctcgcgcgccgcgtacgtgcagca

SEQ ID NO: 25477 - DNA, 122 bp, Homo sapiens
attgggagaagtactttcaaaataatggtgggaatgtgaaagcaatttaacagcgtgtatcgcagctttttcaaaagttcattctatttgacctggtagttcaactgatacgttacatcccc

SEQ ID NO: 25478 - DNA, 122 bp, Homo sapiens
agcgatccgcccgcctcggcctcccatagtgctgggattacaggtctgagccattgcgcccggcggcagtttaattccctcaagaatttatagaaaacttttggtggaactattctgggttg

SEQ ID NO: 25479 - DNA, 122 bp, Homo sapiens
aatgactaggagtgggagtcaggcatctacctttttagtaaactactcaagtgattcttacgcatactccaatttaagagctatttccctttagaattcagacaatatgaatacgccagcta

SEQ ID NO: 25480 - DNA, 122 bp, Homo sapiens
ggggaccagcccagggccacgccgcgccccgggccgccttagtgtctccggccgagcgctcgagcaggttgtctctgggacactctaacttctcggcggtgccccctccccgcggcggcagt

SEQ ID NO: 25481 - DNA, 122 bp, Homo sapiens
gtgggatcttaaagaagcagtggaagttttccagataaagaagaaagcatctcaaatcatcggaaaggcatgtgcaaaaaaggcacagagtcatgaaaaaggctggtatgactggggagtaa

SEQ ID NO: 25482 - DNA, 122 bp, Homo sapiens
gccggcgcgagtattttccacataaggtggctgtcgtttttctcctggcgtctgtggaggcgagtggtctgcgggcagcagctcccagaggcagccttggaattccagctcggactgggcgg

SEQ ID NO: 25483 - DNA, 122 bp, Homo sapiens
cgtcattgaggctcgccgccccctaggggaagggagtagggtgaaggcgacggaagttgacgtcaccctcagtcgccatgttggttgagaataaagggatggttttggaggcctgggcggac

SEQ ID NO: 25484 - DNA, 122 bp, Homo sapiens
ccaccagctagttccgcttgaaaaccacttctggccccgtgggggactcaagtcgccaagcgagggttcccctgagcgccggagctcacaggtctcgccttgtcccgaaagccccgcaatcg

SEQ ID NO: 25485 - DNA, 122 bp, Homo sapiens
cacctaaccacatctcaggcctggcttcaagatgggtttcaaaccagaaagtaatcatatcggatgattactacatactacatacattgccatcctcattttatagatgaagaatctgactc

SEQ ID NO: 25486 - DNA, 122 bp, Homo sapiens
taagagtcggggtcgggtggctgggggttctccgtgtccgccgggaggggacaacgacggcgacaggggctgcggggagccggcggcgcgcctttcttgctcgctcccgctctgcctccctc

SEQ ID NO: 25487 - DNA, 122 bp, Homo sapiens
ctgcggattcacacctgagcgcctctgtgcagggctctcactggcggtgcccaggacggacgccagatggctgcgcgctttgtcagcagtgctgtgagaagttctcccctggggtggggact

SEQ ID NO: 25488 - DNA, 122 bp, Homo sapiens
tctagcctatatactctcctcccaagccaaatcccctccctgggccaagacccaggcatccggctgcccagccacccagccttggggcgtgtaggaggaaaatgtgagtcttggaaatcagg

SEQ ID NO: 25489 - DNA, 122 bp, Homo sapiens
tgagctcggctggccctttcggaggaccgggagctctccgttggcggccccagatgctcccggaaagaagccgcagttatttcagagccagctgcaaacctgtaggtttttcttggtctccg

SEQ ID NO: 25490 - DNA, 122 bp, Homo sapiens
tatttattgagagagagggtctcactttgtcacccaggctggagtacagtgacacgatcacgagtcactgaagtctcaactgcctgtgctcaagggatcctcccacctcagcctcccaagtt

SEQ ID NO: 25491 - DNA, 122 bp, Homo sapiens
aaagcaagtcagactgaaactcaaaaacaccactatgccgtctcagacagggccagagcacgctgacggccagaaagggtaaaggagggaggcctgggagtgcgatgtgggcatgtagggaa

SEQ ID NO: 25492 - DNA, 122 bp, Homo sapiens
aagccaggtgatgggctcggtgttggagagagaaacattggctcccctagaaagggaacacggtggtcccaggactccacagtcaggtcttggccagtcttgggtggaaaacccaaacccag

SEQ ID NO: 25493 - DNA, 122 bp, Homo sapiens
gggcgtctgagcctgcgggcacctgcggccgccggcggacagcgcgtcaggtctcaccgccgcggccctcgcactggctcgccgcctccagaccctgcccctcagcgcccccggcctccctc

SEQ ID NO: 25494 - DNA, 122 bp, Homo sapiens
ccatcacgcatacttcaaattccaaaaatctctaagtggactggggaagctcttcctcctcgatattgttccttcccatgtttgtaaaaggtaatctgctatggaagtctcattcaggaggt

SEQ ID NO: 25495 - DNA, 122 bp, Homo sapiens
gagaggatgatcccagctgtggcatgctgggactccctggaagggctcgctgcaggcctgcgccccacttgctttctgttttgtaggactcacctgcaaaaaggactgcttctctccacaag

SEQ ID NO: 25496 - DNA, 122 bp, Homo sapiens
actcgggcgtctgtccccagcctcatggttgccagcagagctggcgcaggggcgcgcaggcggtgagagcaatgatccagccacctggggcagctgtgatttaccccaaccttggagtccac

SEQ ID NO: 25497 - DNA, 122 bp, Homo sapiens
cagtcgacccctttctccaggcacctggtgggagccatccagagggaaatctttcaccctcgcaggagaaagactgtggtctacgtttgtatcaggctaaggaatctctgtctttattaggg

SEQ ID NO: 25498 - DNA, 122 bp, Homo sapiens
atgcagcgggccaagttgtacctggagcattgcatctccctgaacacactggtaccctatcgctgcttcaaacgcaggttccctggcatctcacggtccacttattataattggcggcgaaa

SEQ ID NO: 25499 - DNA, 122 bp, Homo sapiens
gcctcagtgctccccgaagcacttccaagaaggcgcctcgcccgcccgctgtgtggataccgctggtggaggtgttgggtgaacagctctcaagttctaaaaatgtgcccctgacaacaaca

SEQ ID NO: 25500 - DNA, 122 bp, Homo sapiens
ggattcccacagagttgccatgggctcttcatgaaggctggaggttagctatggccctggcgtgctctcacctgccccacaacagccacctcaccctccaagcaggcctgcagctgcgcagg

SEQ ID NO: 25501 - DNA, 122 bp, Homo sapiens
gctgaaaaaattatttttattacaacatggcttgtaaagttataaaatacacctgatgtgcgctagtcaactgtcaattcgttacatagctaattgacgtagctccagacatagctaattga

SEQ ID NO: 25502 - DNA, 122 bp, Homo sapiens
ggggaaggtttggggttggctcccggtttcgcgcatgcgtgcactgcacaaaccatttggcgggtttttccggccactcagttctgccaccgtcactgagaagctcagcggtagcttttggg

SEQ ID NO: 25503 - DNA, 122 bp, Homo sapiens
gagggttggggacctaagtgtcctagagaattagaggagggaggcgaggctaagcgtctccgtcacgtggtgtcagacagaccaatcacgcgcattcttcggccacgacaagcgcgcctctg

SEQ ID NO: 25504 - DNA, 122 bp, Homo sapiens
taatcattcaagagcaccttatttagtcacatacagctagtcccctcttgcatattttctcgctttaggtttttagaaggaaaaagctgacatttctctccacgaagtttctttcccagtag

SEQ ID NO: 25505 - DNA, 122 bp, Homo sapiens
gcgaagattattccaatgcctcattcggagaggtgataatctggtctgtggtttctttttcggtggggcatggggtgggggtgagtgtcatgctttctaaggcacagggctgactaaagggt

SEQ ID NO: 25506 - DNA, 122 bp, Homo sapiens
tgtgatggccccaagtggatttcacagcactggggaatccgagaggttccgtccaatcgccggatcctggcccaaggagcacgggccctggttctttcctccaggtcccgaggccagcaggg

SEQ ID NO: 25507 - DNA, 122 bp, Homo sapiens
gcttaaggaggtacacaatgtacttatcagtcatcatctttctttttcctactgaatttacgtaatatttaaattgtttttctttgtcatatcctagaactcaaacgcacagatacaatgga

SEQ ID NO: 25508 - DNA, 122 bp, Homo sapiens
tgactaggtacttcagaaggctccattgggctctctgatatcaaataagagagaactgtacgactagtagaggctgacatttgagatactgaggcttaaaataggtataatgttacagttga

SEQ ID NO: 25509 - DNA, 122 bp, Homo sapiens
gtaaggctgggtgggggtgtctggggggcacacagagaataaccagcacacagccaaacccgtgctctctaacccgtcaacagaaacttaacaataagtgttcataacctatacgaaggcaa

SEQ ID NO: 25510 - DNA, 122 bp, Homo sapiens
gtgagaaaagaatcatgatgagtatgacacaaaacatattctaaagagaaatatatattccgattacagaatgcacatatgagacacgggtgataagacattgatcatgccattcaatagtg

SEQ ID NO: 25511 - DNA, 122 bp, Homo sapiens
aacaagctgtaatactcaccaagaaggtctgcagcgtcatttctgaggccagcgagaccacgaatccaccaggagggatgaacgactccagacgcgccaccttaagagctgtgacactcatc

SEQ ID NO: 25512 - DNA, 122 bp, Homo sapiens
agaacgatctagacgaaacactgaacttaatagcaaaaccacttctttcgagggaaaacacgatccgcagccagccggcgcgtacacatggggcctggaaaagaagagaattccggagacac

SEQ ID NO: 25513 - DNA, 122 bp, Homo sapiens
cgtctctctcgaagcggatggcttttgcctgagaggaaagggagtggctggcggcgcatgcgccacggtggccgacttgaaccgaggcttttattgctgtagtttatttccacccccttccc

SEQ ID NO: 25514 - DNA, 122 bp, Homo sapiens
ggcccaggccagttccacaggtggctctgactgcccatggtttcgcgcgagtggtgggcacgcttcggtttacctcccccgcgggtgacagcccagtgcttccaccacaaccgatgtcaact

SEQ ID NO: 25515 - DNA, 122 bp, Homo sapiens
gagacccgcctgagcagcagagaatggcttccggcttccgcacaccgagacccgccggtgcgggcttcctgggacttccattcttgatttgttggggcaagattttcttttgatttctgtga

SEQ ID NO: 25516 - DNA, 122 bp, Homo sapiens
aagcttctgtctcagtttgacttctttctctgctctctcttgttttctgttccctcttgtcgtaggttttaatcccttataaatattttgagccacctgtccctctacatctgcttccagaa

SEQ ID NO: 25517 - DNA, 122 bp, Homo sapiens
cggtctcgttctggctcagtttcctcttgccctctggcgggttcttcttgttgaaggtcacgttgaggttgggggccccgaggctggcgatcatgttctggcaagcggtggagagcgcagcc

SEQ ID NO: 25518 - DNA, 122 bp, Homo sapiens
caaggctacacggtggcagggaggaaacggtcccgcgggacggcattccgcctgacttcccgctctgatccagcacccaacacgggcagcctgaattattcaccatgtgagagaggctggcc

SEQ ID NO: 25519 - DNA, 122 bp, Homo sapiens
tgggctccttctcttcccaaagcctagagaccttggctgtcctgggtagctctgctacagcgttttacgagggtgaaagagaccagatctgcaactggaagtggggaatagcctctaggctg

SEQ ID NO: 25520 - DNA, 122 bp, Homo sapiens
gccgttgtccggttggcggccaacttcaccgcggaggccgggcccagcttccccttgggccgacccacagcccggttctgcaggggaacagacacgactggtcagatggggagactgcaggc

SEQ ID NO: 25521 - DNA, 122 bp, Homo sapiens
aagcataagtagtttcggtactcacataattcccgagtcccaaaaatgtagatggcaccacggaagagatagtaggccacagtgttactggcttcccataaacacagccctttcctggctca

SEQ ID NO: 25522 - DNA, 122 bp, Homo sapiens
acgccactggcggggtcctggctccctaccgacaactttgagggcctgtcccttgtttgccgtggtgttgcagttcattttgtacatgaaatatgttacctgccactgaatcagggaaagac

SEQ ID NO: 25523 - DNA, 122 bp, Homo sapiens
gaatgcatcatcattgtattggttgtgaatttatgcactttgcctcattgtctgtcgatgcgttcccattgtttttaacaaatcattctccattttgtatggttccttttaatgatgctttt

SEQ ID NO: 25524 - DNA, 122 bp, Homo sapiens
ccaccctgacgccgcctctcccagccggctctcctgaccccccaagccccgcagctacggcggccccacagcctgagcaaaggcctcacctcagccgcggacaatggcggctgcttccccgg

SEQ ID NO: 25525 - DNA, 122 bp, Homo sapiens
tggctctccctgtgtgggtacaagatgacccccggcgtgtcccagcacattcaggaggaacgttctgccgtctcagaatcccagcggggcacagcaggacagaaatgctttctcttttttaa

SEQ ID NO: 25526 - DNA, 122 bp, Homo sapiens
cccacttccgcccagcagaaggcaccggaagtagagctgcccctagttgcggaagtgcctcgcctggcttgctcaagtcctctcttctctttctctctccggaaacgtgagtagctaatcga

SEQ ID NO: 25527 - DNA, 122 bp, Homo sapiens
gaagaaaggatgtgacgtcactgagataaccagctcggctgttagcaactctgttagcaacgctgtttgtctttctcggaaacaacaggtgagaattccccttacagacctgcccatgcttt

SEQ ID NO: 25528 - DNA, 122 bp, Homo sapiens
gtgcaccgcgccccgcgccccgcgcctgcctccccggcccggcccggcccggccgggcgccgtccacccgagggagcccgcgccctgcgactgcccgaccctccacccgccccacgagccgg

SEQ ID NO: 25529 - DNA, 122 bp, Homo sapiens
tttgttaatcactgatggatgtttgggctgttcccagctttcagttgttgtgaatggtgccgctgtgaagtgtgcacaagttcccatgtgaacacggacagctttgggattctcttgattat

SEQ ID NO: 25530 - DNA, 122 bp, Homo sapiens
aacagggacaccatcactgatgtggaagggtttggaatcagacagacccaaattccactccggggccccatctcctgtagctgggttatggacccttcctgagttcagtgtcttagtgagta

SEQ ID NO: 25531 - DNA, 122 bp, Homo sapiens
tcttgcacacctgaaccacacaggcttcccattttctaatcatagcacaccttagaggcacggatcaagcataccctccatgaagcctccacccatgaatcaccaaaattttggcgattttt

SEQ ID NO: 25532 - DNA, 122 bp, Homo sapiens
tcggccctcagcgcctctgttctttaaaccctgccacatcctgagaccctgtccctgctccggctgcttttgccgacggaagccgtctcctgccgcctccgagctccttcccgggaggcttc

SEQ ID NO: 25533 - DNA, 122 bp, Homo sapiens
cctccggcgctggagctggttcagggcactcccctgccctgccctccccaccgatctgtgcggcagagccaggccccagggcagggccatgcctccgcagtcagcctcacctgcaacatctt

SEQ ID NO: 25534 - DNA, 122 bp, Homo sapiens
gccttcgtgctcggaggccgctggtggtgagaccctgggcactgcagtccgcctgtggttcgctgcccaaacgttggggccgccccgtgccggccttgcacgagtggctgctggtcactcac

SEQ ID NO: 25535 - DNA, 122 bp, Homo sapiens
gaggaaaggagcccccggcggcggcggcggcggcggcggcggcggcactcacccatagtacggatgcgctgcaaactgcacatgctcgcgtctgacaggcgctcgccctgccgcccggctta

SEQ ID NO: 25536 - DNA, 122 bp, Homo sapiens
tgcggggtgcggcggggggggtgggctgccctcggcggggggcataggaggaggggtggccgaagtgggagacatgagccagaacctgggcccctggggaagccatgctagggtgtggggat

SEQ ID NO: 25537 - DNA, 122 bp, Homo sapiens
agagcgagggagcgggaggggcgggctgccggtagaaggacttgtgcccaggccaatcagcgcgcgcggggtagggggagttgcggggggaggggggtacggggctttccgccctaaccttt

SEQ ID NO: 25538 - DNA, 122 bp, Homo sapiens
cttcgcctttgctgttcccttagctactccagcattggctcattctcatcttaaaggcctcggcttgaatgttgccatctcaagaaggccttttccaaacatcctgttcaaagtagccccca

SEQ ID NO: 25539 - DNA, 122 bp, Homo sapiens
cttgcctgttatcactaaagacattaaagaatactatagaaattgacctatgttcagacacgtcactcctataaaccacctgttgaatttcttgactgtcagccaaagcacaatctttgttt

SEQ ID NO: 25540 - DNA, 122 bp, Homo sapiens
aggtgtccggaggacaagctacaaagaatgacagggaagcgtcagggtcaccagccagcacgacactctgagaccccttcctagggttggaggcttgggtttagaagcagttgcctagagat

SEQ ID NO: 25541 - DNA, 122 bp, Homo sapiens
tctttctctatactttgtctctgtgtcttacttcttttctcagtctctcgtcccacctgacgagaaatacccacaggtgtggaggggcaaaccaccccttcatgtgatgtttaggccgggtg

SEQ ID NO: 25542 - DNA, 122 bp, Homo sapiens
tgggctcaggcttgccaaggaggaaacgggcaggtccatggccagggcggccgggcgtcgcggatgcatgccggccacgggtatttctagacaagacttgcagggccgcccgtcacagaagg

SEQ ID NO: 25543 - DNA, 122 bp, Homo sapiens
attctgaggattaatttggaaacaattaaaattctgtgcaaaacaagcagtgggctgggccggccagcaggctggcacgcacggagccctttcatcaccagcgcagaaatctaattagtgtg

SEQ ID NO: 25544 - DNA, 122 bp, Homo sapiens
tctcgctaccccctttctaggctcgcgcgccttccaagcccggatcctggtggggctgagcgtgcccacccgcccagcagtgcgcccgggcgcctctgcagcgccacctgcacgcggaacgc

SEQ ID NO: 25545 - DNA, 122 bp, Homo sapiens
ctcagagcccgcgattgatataaatatgtaatctgtattgatgggccaggagacgcaccccgacaccttggcccgaaggccgggagctgtgggggctgccccaacgtggctggtggggggcc

SEQ ID NO: 25546 - DNA, 122 bp, Homo sapiens
acacacgaggaagcggtggagcagagaagggcgcggctagccgatcccggttctttcgcccggctcctgctgccacagggaattcctaaagccattggggtcgaatacacttacgatgaatc

SEQ ID NO: 25547 - DNA, 122 bp, Homo sapiens
cgccagcccaccgaggatgggccttgatgggctagatcacctgtgattctgttcatccctcgccatctccgtttcagctgtctctcaccagaactaatgccggagcttcctcgctggtctcc

SEQ ID NO: 25548 - DNA, 122 bp, Homo sapiens
gccatactggctgggaagcagcccccgaaccgggggcacatcatagatgtcctgtggccccggggccagcaggtgtcgcgggatgtcgtactcgtcctgctccggctgggcggcctcgtata

SEQ ID NO: 25549 - DNA, 122 bp, Homo sapiens
gcagagccttactctactggggccccagctcaggggactgtcttccccaaacacagcagacgtgctcaggggcagcccaacaaggagggatgggaaccgctctccagctcagggaaatgttg

SEQ ID NO: 25550 - DNA, 122 bp, Homo sapiens
cctgagcaccccgtgtaggcatccctgcatgggcattctgagcaccccatggaggtagcccgagcaccgtgcgtaggcagccccgcatgggcatcccgagcacccagcgtgggcatcccgag

SEQ ID NO: 25551 - DNA, 122 bp, Homo sapiens
caaggccatccttgtgatgtatctgaccccttcccagcccgtcaggaagtgggggtcaggcgcctcaggtgtgtgcccagcagatgcatgggcctggacccattcaatgtgagcagagggag

SEQ ID NO: 25552 - DNA, 122 bp, Homo sapiens
aggatttggggacctccacgtgccgtcccatgggaaagccgagtccttgtaggggaggagcgtcactgctctcagcaggggaccgtttctctaacgggagcctgtcagtttctgggcggggg

SEQ ID NO: 25553 - DNA, 122 bp, Homo sapiens
ggctggggcggggcgggactcatgggtgccctggcgccagttgtctctcctgtgggcctgcgccggggtccccaccccgatcccaacgcctgggcctctccttctcctgtccccaggtgccc

SEQ ID NO: 25554 - DNA, 122 bp, Homo sapiens
ccaacaccggcttcccaacgtcccactgcgaggcctgatcaggctgcttgctcgcggggacgccaggacttgaaacgtcccgtgccacgaggcccatcgcgcccacaagtggcgcgggtcac

SEQ ID NO: 25555 - DNA, 122 bp, Homo sapiens
caagaaaatgaagctcaagagcctcctgctccggtattacccgccaggtacgcaccagcccggccccgtcatccccacgtgggaccctgggctcccagactgggagggtttggggcggagga

SEQ ID NO: 25556 - DNA, 122 bp, Homo sapiens
gactacattaatcctttatttatttattttttagaattgggatttcattctttacccagacggagtgtagagtgcacagctcattgcaacctcaaactcctaggctcaaatgatcctccagc

SEQ ID NO: 25557 - DNA, 122 bp, Homo sapiens
gcggggtgactccacccacagctggccgcgccaccgctcaggtttcaatttttattggttcgcagttctcaccccagggcgggacactcccagggacttgtttcccattggtttaacggaag

SEQ ID NO: 25558 - DNA, 122 bp, Homo sapiens
caaaaagtaaacaaaaaggcagtgagctggcagccaaagcagtcccctctcaaggccgaccgactagcagcagcgtgggtaaaagtcgtgggtaaaaactgctttgctttcagggaggggct

SEQ ID NO: 25559 - DNA, 122 bp, Homo sapiens
tagtatattgtaatcatgtcttgactttgatttaattggtgttaggtcaggcacggtcagcggtctatttaaaaagctccctggtgattctgattcacagccaggattatgacccactgaac

SEQ ID NO: 25560 - DNA, 122 bp, Homo sapiens
attgggaaccttacagggcggcggctgtctctgggggcctcctcgctccggttggtcggtcggtcggtgcctctgcgcctctgccagcgggctctgcatttgcatccgtcccggcttctctc

SEQ ID NO: 25561 - DNA, 122 bp, Homo sapiens
attcagagagcaagttgggattacaaataacatttttccaggtaaatcagtatattcttacgcttatttttttttttgtctttttttttcttcctttttgtggagaacggggtctcactata

SEQ ID NO: 25562 - DNA, 122 bp, Homo sapiens
tgggagggacgacgttgccatctgcccgtgttaggttggcacagtgcccgcctcaggaggcgcttgataaatgcttccctgtttgcattcttgcttggggctgtctaaggggaaacgcggta

SEQ ID NO: 25563 - DNA, 122 bp, Homo sapiens
tctccttccataacagtgcatctctctgtaaaaatctcaaaggttcttttttcactgacccggtgaggtgggtggggcgagccccgaggggctctcataccaaaatgacaggatcaaattca

SEQ ID NO: 25564 - DNA, 122 bp, Homo sapiens
gtatccggaggctacagaaagctccagatgccggcgccacagacaaggcgaggattgtcccgggcgcacgggaggcgggggaggggcggcggctcgggccggcgggcgggagacagggactc

SEQ ID NO: 25565 - DNA, 122 bp, Homo sapiens
catcgcacggttaagtctgccttgctacagctaaacagtgacttcctaggaccaagaaatcgcagccagggctagaccgatgccctaaatcgggacttgcttaggctgagaaatcacatttt

SEQ ID NO: 25566 - DNA, 122 bp, Homo sapiens
gatttgcctgcctggcctcccaaagtgctcggattacaggtgtgagccaccgcgcccggccgacagtttttaaaagtaggtaatcaaaagaaagaactgggcaatgaagaggaaagcagcac

SEQ ID NO: 25567 - DNA, 122 bp, Homo sapiens
tggagctcctctccccagcagcccaggaaaagcagctcggtcaataggggagcatgctggcgcggtcgaaaacaaaaaggttcctcctgctcgctgcgttcacgtggggggctctgcacgcg

SEQ ID NO: 25568 - DNA, 122 bp, Homo sapiens
tcagcgtcccagtggttctccttttgaactggctcatccattactggggtaatgattttccgtctgggcaacagcaaagccaaaggcctattacacaggcaacataaagttaaaaagacatt

SEQ ID NO: 25569 - DNA, 122 bp, Homo sapiens
catgatacgcctgcttcggcctcccaaagtgctgggattacaggcatgagccaccgcacccggcctaccttacatcttaaaatgactgttcaggctgctgtgtggaagagattgtgggtggg

SEQ ID NO: 25570 - DNA, 122 bp, Homo sapiens
tgcaccaaccttatatttctaaaagatcaagttgtaaacctatttgttttccctaagatccgctcttgcagagttggaataaatatgattgtttacacttaagagtccaggactacagcagg

SEQ ID NO: 25571 - DNA, 122 bp, Homo sapiens
ctcctccaaatcatggagctgagggcacccagggcaaaagcgacctcagactggggatgtcgttcctaacttcttcccacctcctacccgcgcccgccacctgccggagaaccaggctccct

SEQ ID NO: 25572 - DNA, 122 bp, Homo sapiens
aagtttgctctggctgtgtgctcagcagtattctaggttttgtgggaaatcaaaaatgtgcgaggcagtttttgccatccaataattaacaatccagatggaagttggaaactcacacatgg

SEQ ID NO: 25573 - DNA, 122 bp, Homo sapiens
gcccggctgtggactggagaaaaccgcaaggccacctgcagaaagaaaagaaggccatcgcgcctacgcagctgagcacccatactccgcccgcgcctgcgcaactgggtcccccgaccccc

SEQ ID NO: 25574 - DNA, 122 bp, Homo sapiens
tggggattgagggctatattcagcgcctggccaccagagggcgcagcgggctgggttcagcggtacccctttgagatcttgtgtctcaagacaggttgctgtcatcaaggatttgctggtta

SEQ ID NO: 25575 - DNA, 122 bp, Homo sapiens
gctcagccgaaggaaggagcactcgacacaaacaaaaccgacgctccgggtctccgtagtcgttaagcaaagaggaagaggaagcgcttcttcattaggccacaggaccgggccttagaact

SEQ ID NO: 25576 - DNA, 122 bp, Homo sapiens
ctcccacctgcacatgtcacactgaccacatctgtagacatcttgagttgtagctgcagacggggaccagtggctcccattttcattttagccattttgtcgcctgcacccactcccttcat

SEQ ID NO: 25577 - DNA, 122 bp, Homo sapiens
ggggttggcgggggagagctgcccgccaggcgaggggcggggccttggcgggggtggtcgcgggcggcggggaggtctcgcttccctcctctccacccgctcccagtcccggcctgggtctc

SEQ ID NO: 25578 - DNA, 122 bp, Homo sapiens
acccatgtgaccagtcacttttctctaggcttcagtttcttcatctgtaaatggggatgacgccctacctcagtgggtggttgtaagaattgaatagacaatttagtgtggtgcctggcaca

SEQ ID NO: 25579 - DNA, 122 bp, Homo sapiens
tctcagatcactcattcaaaacaagcactccaggccaggcatgcaaatctactcattggccgggcacagtggctcacgcctgtaatcccaacactttgggaggccaaggcgggtggatcacg

SEQ ID NO: 25580 - DNA, 122 bp, Homo sapiens
tgctcgcggccgcgagccgaggaggggacgtacagcgcccgcgcgcccgcgagcccgctccggctctcccatgcttgcccctcggggtgctccttctgcgctctccgcctggactgcaggaa

SEQ ID NO: 25581 - DNA, 122 bp, Homo sapiens
ggtggactgcaggtcccgagccctgccccgcaggaaggcagctaaggcccggcaagaaatcgagcacagcgctggtgggtccgcactgctgggcgacccagtacaccctctgcagccactgg

SEQ ID NO: 25582 - DNA, 122 bp, Homo sapiens
ttacacaagttgatgttccctcatttagaaggcaacttagaaatacattgatctgcccagcgcggtggctcacgcctgtaatcccagcactttgggaggcaaaggcgggcgaatcacgaggt

SEQ ID NO: 25583 - DNA, 122 bp, Homo sapiens
ttgcctcaagccacctcctcctcacgtgccttaccccagcaactaactccgaacgggcaacgacagcagcctatcctctacgaaacccgcccctatcaaccaatgggatgggcagggcttcg

SEQ ID NO: 25584 - DNA, 122 bp, Homo sapiens
agatgcagccaggaggaacagctgggccatgcgggaggcagaggccgggcctcctcaagtcggcctctcagacccacttgcagcctcccagcgtcctctccgggcccagctcttcctcccgg

SEQ ID NO: 25585 - DNA, 122 bp, Homo sapiens
gggctttaaaagttcacctaagaaacaccgaaacggggtggggagtgggtggcggggcttcgatggataaggccaaccttaaagcatctcggactcaaacattttaaaagccaaaatacgta

SEQ ID NO: 25586 - DNA, 122 bp, Homo sapiens
gagagtacttttggcttgctcatggccccaggcaatccggctgctgactttgctttcattcggtatatttaagtttcaggtcaggctgaaggacttaaaaaagggagagcaagtaaggaagg

SEQ ID NO: 25587 - DNA, 122 bp, Homo sapiens
ccacccagctctggcccttccagctgccatgcgggccagagccagactggagattggggacgctggcgacacctggccccttggcttgggtctgtctgcccaggtggttccttctctcttcc

SEQ ID NO: 25588 - DNA, 122 bp, Homo sapiens
gagtctgcgccccgggcccattgttagcaggctattccacggcagctttgcatctggctccggcgggaagcggaaaacgggaggcggctctcgaagcttcccgaccttcctgcgccatcaac

SEQ ID NO: 25589 - DNA, 122 bp, Homo sapiens
ctggtggggtggcaggccaagtgagcaccttcctccaccgcttggcagagcctccacacccgtggaatacagtttggtactactgctcacccaacgacttgtgtgtggcggggctgatgggg

SEQ ID NO: 25590 - DNA, 122 bp, Homo sapiens
aaaatctctggcaacacaggttctttggacacatttactgagttcctacccagtgttggtcgcaggcttgctgccaggctgttggggagtctgggacagaaatggagtgtcctgagcgatgg

SEQ ID NO: 25591 - DNA, 122 bp, Homo sapiens
ctgccccgcatcacccctgcctggctggcttcacctctcaggaggcaccgacgatgcgcacgcccccttgtgcagcccaaaggcctctcaagtcccgctgggccatctcctcgccagcccga

SEQ ID NO: 25592 - DNA, 122 bp, Homo sapiens
ggcccctgctgcttggagccggtgcggtggccaccgtgacctcacgctttccctgccagtcgctctccgccgcatcccggcctcccgccccgcccccggccgctttccagggactgaagccc

SEQ ID NO: 25593 - DNA, 122 bp, Homo sapiens
agttattggaattaaacaccctcccctttctctaaaactgttagcttcaatgagtacccacgtctcagaagctatgaccataactacactgaaaccataaattagtgagattggaattcccc

SEQ ID NO: 25594 - DNA, 122 bp, Homo sapiens
gggataatttttcatggtatagaattcctgctgtcattcttcctcccactttttctagcccgttttctcatactgcagattttccctatgctgaaggattccttgactctaccatacagtca

SEQ ID NO: 25595 - DNA, 122 bp, Homo sapiens
acacttgtttgccacgcgcctcttcactgttgggaattctgcgtggtgaggtgcataccacggtgatcttctgagacctggctcctgccttcagggagaggacaggtctgtaaacaaggccc

SEQ ID NO: 25596 - DNA, 122 bp, Homo sapiens
gtactttcgcttcaataaatctgtttcttccttacttcagttttttcttttgtttcttttcgttgctttgttcttttgttactttgtgcattgcattttgttcagttctgtgttcaacaagc

SEQ ID NO: 25597 - DNA, 122 bp, Homo sapiens
tatgcagagtgtcgacatcgcagctttcaacaagatctggcctgagtgtgtgtgtgtgcccgcgtgcatgaggccctgacacaattaaaaactgagaccggcaaaaaaaaaaaaaaaaaaaa

SEQ ID NO: 25598 - DNA, 122 bp, Homo sapiens
taagtctgggtcaccccggccgccactccagctgcctagaatatatgggtggaagggaatcgactctgtgaaatcagagggaaaatagcgcttgtccttgccatgagtcttgaggagaccga

SEQ ID NO: 25599 - DNA, 122 bp, Homo sapiens
tctgacccccggctcgtcccggcacaagccctacccacccgccgctcgcggccgcgcccccgcctcacattgcagtaacagttcatgcatagcgactcgatctcggtgggctgctgctcctc

SEQ ID NO: 25600 - DNA, 122 bp, Homo sapiens
tatatttagaatcacagttactttgtactttataatattcagtgtttgcgccttggataccgggcaaccctactccaactgggcctaagacctttggggttcacatgcccagggcaaacctg

SEQ ID NO: 25601 - DNA, 122 bp, Homo sapiens
gctgtggggacaagagaaaaagaggctaggaaggagaaagagggggattcaaagagacttcgggaggtgaaaggtcacagtggagggactttaatttccatctacctgacctctgctgtccc

SEQ ID NO: 25602 - DNA, 122 bp, Homo sapiens
ggctgcaaatggaagtggggggcaggggctgtgcgcggctctctcccctaaagcgaggttcgtgctcatctctagcccccgccgctctcgtgggccacgtcctgcttcgctccgcagcatcc

SEQ ID NO: 25603 - DNA, 122 bp, Homo sapiens
tcttatttattcaaacttaacattagaagctcatttcaagtaggcacgtctgtgtctgggcgtctattttccttctttgtatatagcaggcatttgtcaacttggtgaaaagcattactctt

SEQ ID NO: 25604 - DNA, 122 bp, Homo sapiens
gctgggcttcgcagggccccactgaggcgtggcaggtctggcctcaccgcctatgagcatcgtgcagatggagaagatcttctccgcgtcggtgttggcacacacgttgccaaagcccacac

SEQ ID NO: 25605 - DNA, 122 bp, Homo sapiens
gcttgtcggtatttcttttttccacttactccatttaagctatctcattttcctttatatcgctctaacatcccatacacaaatttaattatcataattcagtatattcttcaaaaaggttt

SEQ ID NO: 25606 - DNA, 122 bp, Homo sapiens
tatccctcagcagggttctcgtttggacaagagggcccaatcctttgctttgctactcctcgcgtcttgtagacccttcttggtctccacagagctccacaggcacagagagcaaaccgtag

SEQ ID NO: 25607 - DNA, 122 bp, Homo sapiens
tgggctgggggccggggatcgggcactcctctctgacggtttctattttatcttcgatgccggaggggagagcatttcccacaagccaggtggaggcagcgggagacgcgaggaagtggaca

SEQ ID NO: 25608 - DNA, 122 bp, Homo sapiens
ccacgaggtttctcttactttgcctccgcagtatacacgtacatccaaagccggttctaccgatccccagaagtgatcctgggccacccctacgacgtggccattgacatgtggagcctggg

SEQ ID NO: 25609 - DNA, 122 bp, Homo sapiens
ctatgctattgaattggaagaggttttggtcttgttgggggtgaggtgtagtatggtgagcgcaggctaaagcttgccagggatcccaggcctgccccagctctgttcccagccccagatat

SEQ ID NO: 25610 - DNA, 122 bp, Homo sapiens
aaaccgacagacagcagcaggtttcctggatgaagaagagagataccggggtgtgctggccgccaggaactggccgcctccagctgaagcccgggaggacccagggtcttggcccgggcacc

SEQ ID NO: 25611 - DNA, 122 bp, Homo sapiens
gaggccagctccctccttaaaatgcgtacacatctacttcacattttcgcgcggtggctgcgggtctaggaaagtctttctgaacaggaaaaagctgtacaaatgtagcgggcagtaggtaa

SEQ ID NO: 25612 - DNA, 122 bp, Homo sapiens
gggtcactctggcagaggcaggtctgcacacctgggttgttgcttttgcacacacacacccgccccattttacactgcacaccgcagaacttcaccgtttcacacattcagaaatgaaggcc

SEQ ID NO: 25613 - DNA, 122 bp, Homo sapiens
tcgcatgtcgtctgcggggaggttggggctgctcgcgcgaggcgctctgggtctcatttccgaggccgaaaatgctggctccaaagtggtgccctgggagatgagggcgactcgcagattcc

SEQ ID NO: 25614 - DNA, 122 bp, Homo sapiens
ctattaaagtggtgtattcccaaaataactttaatttttagacatcactattctacaacccgaaggttctgccatctaagtaagatgttttacatcactcatcactatcatcctgttatttc

SEQ ID NO: 25615 - DNA, 122 bp, Homo sapiens
ctccgaaggtgcctagaagcctgtgagctcagcgcccaggcaggtctcccttcctcaggccgcggagcctcgctctgcacagtagggggcgggctgttcctttccggcctgaggaggcccgt

SEQ ID NO: 25616 - DNA, 122 bp, Homo sapiens
atagatgaaaattccaaagacaaaatagatggcagtaatttgttcaaggccacacagctgcgaagtagttgagttgggatttggatccatgtctgactacaaagcccccattctcaacacca

SEQ ID NO: 25617 - DNA, 122 bp, Homo sapiens
ttgcagtgtcccctcctaccctcttcctgcttcagctctgagagtgacctgaaattgtcacgtttgatcacccagaggaaactgtgctcccactgaggacttgctatgttaaaatgagcaag

SEQ ID NO: 25618 - DNA, 122 bp, Homo sapiens
gggcgccacccagtggcctcggggcggaatcgcgggcgagctcggaggggctcggggtggcggggcgcagcgcggcgcctgtaaaacaaccctttgtcttcagaaggcgcttgtcctgccaa

SEQ ID NO: 25619 - DNA, 122 bp, Homo sapiens
ctttgctctgggattctcaaagccatcgtccccatcatcacaagaaacatggctttcacacgcccaatctttaataggttatcctttgccttacctaccgtgttaagaaagtcaaagggaac

SEQ ID NO: 25620 - DNA, 122 bp, Homo sapiens
cttgttgaataaaggggctggcaatttaccatttgcctttgatgtggttaatagcccacacgtgtctagctttgtggtcacatgcagtgcccccaactaggctacggtgcttccgtcctgta

SEQ ID NO: 25621 - DNA, 122 bp, Homo sapiens
tgaggccggggggttggagcactgcccccgcgcacagtccccgaacgcccgacgtctccgcgcaggttattgaagcagctgggcctggggcgcccactaatgtggccctgagggccggagcc

SEQ ID NO: 25622 - DNA, 122 bp, Homo sapiens
tggggagccgcagcctcccgtttcctgtgggccgccgagagctgcccgagccctcctccccggggaaggacacccatcgtcccctatgctccgcccgaagccgtcagcccctcctgcccttg

SEQ ID NO: 25623 - DNA, 122 bp, Homo sapiens
gctgtcacagagggtgatgggtaggcagaagtccagccagccaggaacccatcccaaccccgggatccagcaggagccttcctcagccctctccccagcccacagggaaggagtccagccct

SEQ ID NO: 25624 - DNA, 122 bp, Homo sapiens
cctctcacttgtaggtggggaggtggcccagttgaggcctgaagctggcactgaggtcaccggacccagggcagctcctgcctctgatgcccgacattgggtcgatggggtggagccagagg

SEQ ID NO: 25625 - DNA, 122 bp, Homo sapiens
gagagaccaggttggcttactcccatgtgtctagcttgagtgcctggatatagtgccacccgaccaaccactgtgtgtttttctccattagggaacagtataccctggggggttagaaacag

SEQ ID NO: 25626 - DNA, 122 bp, Homo sapiens
gagctctgctccgagatggcatcgagtcatcctttctgcagaggttgacgacggggcacccgcgtggagcactgtgggtcactgtggcagaggccaggcagggccagcggggctctggcact

SEQ ID NO: 25627 - DNA, 122 bp, Homo sapiens
gaacacgggagcccatccagcccatccaggaagcaaagaaacggtgctccagacaccatgcggatagcttcacccgccgaccccggccaggcccagctgctcccacagcacctggcatggag

SEQ ID NO: 25628 - DNA, 122 bp, Homo sapiens
cacagctaggaagtcgagtcggtttctgcgcatgctcattggctgcccgcatgtcctctacgtcgcagaatttggaagcagcttttggcgggaaattttgcttcctttgggctttgctgtta

SEQ ID NO: 25629 - DNA, 122 bp, Homo sapiens
aggcgcgacctccgcccctacgccgccatgagcggaaaacggggaatgtgaggctgacggcgccatgtttgaattggtcgcagcgcctcctgcaagacctggaagaaagaaaagtaacgatt

SEQ ID NO: 25630 - DNA, 122 bp, Homo sapiens
atgggcccctgctctgtgcactcctgtctaggcttggctgctcccagtagctgtggctctcgcataatctcaactctcagtgtccctctcagttgtcacctctggctttttcaattcactcc

SEQ ID NO: 25631 - DNA, 122 bp, Homo sapiens
cagggaacctggacagtctggtcgtcctgagagacgtcaaagccaagcaggcaaagcacccgggaggaaggacgcagccaagagaccatgaggaggccgcgctttccctgagcgtcaggacg

SEQ ID NO: 25632 - DNA, 122 bp, Homo sapiens
agggagattagcaggcgctgtcgggacaaatgcttccaaaatggttcctgaaatctcgggcggtgcggtctcaaaggagacgtctctgcagctggggtctccatggcaatggggcaacagac

SEQ ID NO: 25633 - DNA, 122 bp, Homo sapiens
aaactaagaccttccctccccgccgcaggacattaagagcggccgctccccgctcatccacgccgtggaaaacaacagccttagcatggtgcagctgctgctgcaggtgcgtacagcccccc

SEQ ID NO: 25634 - DNA, 122 bp, Homo sapiens
ctcattggagttacaccagagactcactactggagttcatcagccaatccaaagtccaagcgtgagagccagagcctgtaggagagacctgggcaggcctcagacctgaggagtggagctcc

SEQ ID NO: 25635 - DNA, 122 bp, Homo sapiens
gggtcagtgcgtgacgcaacggacgccggggaagcctggtctggatcccgaagtccagctcgtttacctgcaacaggctggaggtccctgcagcctggctgtgaaggaattttacccggggg

SEQ ID NO: 25636 - DNA, 122 bp, Homo sapiens
attgaggggagtccaagaccctgctcttttagagggtggggctaggagagcgtatttcgacgctgcccgccaacgaaccaatccccgcctaaagggggaggggatttaatctgtcgcctctc

SEQ ID NO: 25637 - DNA, 122 bp, Homo sapiens
cctgacacaggtgcaagccctctaagtcatccttccttgtaccatcttactgagatgccccgcggttcccacggtgctcgttttcagtctctgccacaagaaccaggtgtggctggagggca

SEQ ID NO: 25638 - DNA, 122 bp, Homo sapiens
gtgtgaatgagaactgaatgtatgataaatgttgcatgttcagttcaatgggaaattgatcgcttatttaataagtgattgtggcacaaaggctgtcttcagcaaacaccaaataactctgt

SEQ ID NO: 25639 - DNA, 122 bp, Homo sapiens
gagaagctgctgaggcactcggcactgagacagtcactcttcttgaaactccaagccacacgtttccctcttcttgcatttccagccacatgtgccagttaaacattaattcctgatggtga

SEQ ID NO: 25640 - DNA, 122 bp, Homo sapiens
cgccaccgcgggccgaccgggctccctcccgccgcccgcccgcggctcctccccctacagcggcagctgcagctccccccggctctcgagccacataatggaggcgctgccaccgccgacac

SEQ ID NO: 25641 - DNA, 122 bp, Homo sapiens
cgggctcctgcacagctaccccaccgaaggcacacctcccagcccagccagcggtggctccggaagccctggacccaggccctgagttttctttgggtggaacacttgccactcagaccggg

SEQ ID NO: 25642 - DNA, 122 bp, Homo sapiens
aaccgcttctcgagcgcgctgcggggtagggggcgcacagaggtgagcctggcatcctcgcgaagcacgcacccccgcgcgcctccccggccctggagtccctgcagcccgacgatgagact

SEQ ID NO: 25643 - DNA, 122 bp, Homo sapiens
ctggtgagactgattactattgggagacctttggacaagtttagtagccggtctttgcctcggtttccttatctgcaaaatggggatgataatatagattgaggttgggcacagtggctcat

SEQ ID NO: 25644 - DNA, 122 bp, Homo sapiens
gccgggccgagagcggggccaggctttgcatccagtgcggctggcctcacacagactcagcggctccctctccttcctcggtcccacgagctgaaattttgcgcccattggaagctggaggg

SEQ ID NO: 25645 - DNA, 122 bp, Homo sapiens
aagtcctaaagaaaaggattttgaatttcctcacagaaagcggctggatctccagggacgcgtcttgaagctgagacgctttgaaagccagggtgatgctcagacagtgtgccagccaaaat

SEQ ID NO: 25646 - DNA, 122 bp, Homo sapiens
tggattcacactcattgttgttgatgtcacagttggtcccactccacccagggtcacagtcgcacttgtacctgcaagggggaccacactgcaggtcgagggaggcccgagcagcacggccg

SEQ ID NO: 25647 - DNA, 122 bp, Homo sapiens
taggaatcatcttgaatttcaaagcacccagatgattctgatgcatcaagatttgagacacgtggctggagggataatgcactttgcttccggaagggttgaaaaaggtctctatttctggt

SEQ ID NO: 25648 - DNA, 122 bp, Homo sapiens
tgagtgggtagaagcaggaaggaggagcgacatcccacactcacccttcagaaagccacacgtctctccaagctgcctaggctggatgagagctctcttggcccctgattccatgtttggcc

SEQ ID NO: 25649 - DNA, 122 bp, Homo sapiens
gttaaaaggcacaggagagcgttcaagggaaaaaatatgtaaatacttggaaacttgcaccgcccctatttttgtagaccaggggtttcactgtctcttgcatgcacccttcagcattacac

SEQ ID NO: 25650 - DNA, 122 bp, Homo sapiens
caggtggagcgtgggcgccagagcagcccctctgccttgggtgtcttggagatgacttggcgccccccggagccccgtcatggctgtggctgcgtccacaacactgcatcagcagagtcctg

SEQ ID NO: 25651 - DNA, 122 bp, Homo sapiens
aggccccggccggtcagctggccctgccgcagctgcagcagaatgttaccaggccgcggccggccgccccatccgccccaagccgccactgtggctgccgaccgtctccctcggccggctcc

SEQ ID NO: 25652 - DNA, 122 bp, Homo sapiens
ggatgaacggggttgggggctgggtcacgggatgaaccggggggtgggtcacgggatgaacggggggggggtgggtcacgggctaaaccggggttgggggtgggtcacgggatgaacggggt

SEQ ID NO: 25653 - DNA, 122 bp, Homo sapiens
gtcggggtatgctatgaggcagaggcaacgactcctctgaggcccaggattcctttgcaacgagattcccggcttcctggtttccaaaggaggctcctgggccaggtggaatttaaccttag

SEQ ID NO: 25654 - DNA, 122 bp, Homo sapiens
gttgtcagggaaggatttcaataaaatccagagaatccatatcctccatagcatgatggacggcagctgcggtatccatagcctccgaagccagagccgtatccgtagcctccgtagccacc

SEQ ID NO: 25655 - DNA, 122 bp, Homo sapiens
ttggcaacgacccagccgcgccgcgaggagagccgggaatggaggtcgtggcgtgaggggcgccgagcgaggggaggcgcgggccacgggagttccgggagttccggcgttgcccggcagtc

SEQ ID NO: 25656 - DNA, 122 bp, Homo sapiens
ggactgaggcaggtttccagcctgttttcatgggacaagttgatagctaaggttgaatatcggaagttgttgatggttttaatttaagttatccaaggagtcttttagttagtaaaacattc

SEQ ID NO: 25657 - DNA, 122 bp, Homo sapiens
gggatgccggtacctggcctgccgggtagagtggactctgtgggcacgagggtaagggcccggatgaggagtgagggccctgccgacctggggctccaattccggagctggggtagttgacc

SEQ ID NO: 25658 - DNA, 122 bp, Homo sapiens
cggctcctcccggggcagggacccggcgacactggggaatgggcggcagcgaggtcgaaccggagccccggggcggggtgggggagctctctgggtggttaacaggatgtggcgagcacagg

SEQ ID NO: 25659 - DNA, 122 bp, Homo sapiens
ggccaggagagggagacttggcccaaataaagtgactcaggcaccctcaggaactctcggcgcccggggccccttcgggcagccttcgacccccatgcgtctttcgggtccccagggacgcg

SEQ ID NO: 25660 - DNA, 122 bp, Homo sapiens
aaaaagttccttctcacccaatcaaaacaaagcttccaagatacagcggttgagtacagccgttataaaagggaggcgaaggcccattccgccattttctctttgtggaggctgggttcgcg

SEQ ID NO: 25661 - DNA, 122 bp, Homo sapiens
ttgctgcttgaaatttttgattcggtgtattctacctagtaactgctgagaaataaggctcgacaccattggctggttcactcacacccggccaatcctggactctaaaatacttagggaaa

SEQ ID NO: 25662 - DNA, 122 bp, Homo sapiens
cactcccagcccagcagctggaggcacacaaaaggaaactgacaaaggagagacaggcgccgggccaagctcagtgattgccaccactggcccaagctcacccagccttggtgccagaatct

SEQ ID NO: 25663 - DNA, 122 bp, Homo sapiens
caggagcaaaaggactttctattttgtttactgctgtcttcccatcacctgaacactatccggcacactgaaggttgccagtaaatacttgctaaatggataaacaagtggatgctcatggt

SEQ ID NO: 25664 - DNA, 122 bp, Homo sapiens
ctcttcagcccaccgcagggccttgtgcgcggtgattggcgcgtcaacgaaagcgatggacgtctagaccaatcgtcagcaaaagaccctttggagcccgcgccccctccccctacgtcctc

SEQ ID NO: 25665 - DNA, 122 bp, Homo sapiens
ggtctccggtcccctcttccggaggcggctccaggtgtgcggccaacacaggtgaaggggcggggccgcgggaggggccggggcgctccctggctgcctgaatggccgggcggggtcgaggg

SEQ ID NO: 25666 - DNA, 122 bp, Homo sapiens
agtgatttagatgtgtttcttgtggacgcccccggacaggtttcttgcgtacttgtttgccgtcttgaatgagagcgtttggctgctgagcacgtgctgtggcccactgtttggatttgtct

SEQ ID NO: 25667 - DNA, 122 bp, Homo sapiens
gtggaggttctcaaggccgagagagcacagagaattagctttgggcatccaagtacaaagcgttcccgtggtgcgcggcagcccgaggatccctgtcccgtcggggcctgatgcggagggag

SEQ ID NO: 25668 - DNA, 122 bp, Homo sapiens
tggccagggctggacacagctgcgctgcgctgacagaccccgcatggagaacatttaaagcgggggttgggcgtgccccggcacgttctgcgcctgactgtgtatttttagtgatgacacca

SEQ ID NO: 25669 - DNA, 122 bp, Homo sapiens
gtcctggaactcttcaccagggagggagccctgcgggggccgcagctttgtggagggagccgccgtgcttctgtcacctgctccctttcttgcgtctccctgtgatgggcccttaggcctgg

SEQ ID NO: 25670 - DNA, 122 bp, Homo sapiens
tcagagattgaggcggcaagggcaaccagaagttacagagtactgaggacagagctaatccgagacaactgcagaactctgcagaggggttcttttgcatctttaatactgagtttcagaga

SEQ ID NO: 25671 - DNA, 122 bp, Homo sapiens
aaaaaaattgttcgtcgtttacctgaaagtcacatttaattgggcgtcctgtattttacccggcaaattctaggcctgagaccaaaaagtttgagaaccctgcccctaggcgacagcaagcg

SEQ ID NO: 25672 - DNA, 122 bp, Homo sapiens
cttcgctctgaaagccaggaaaaccctgaaccccgcaggaagaacaaacaattccagacgcgcgaccttagagacctgtaacacttagcgcgaaggtctgtaggttcattccggagccagtg

SEQ ID NO: 25673 - DNA, 122 bp, Homo sapiens
accaccaacatgcatgacaacgagaaccagtacgcatgtgtttgggggacagcacacccccgctctgatcctcggtttccgaatctgttaaaaaaaaaaggctccaggctggacaagcccca

SEQ ID NO: 25674 - DNA, 122 bp, Homo sapiens
gccctggccacagtggggacagcctggcttggcggggacgcaccagtcccgccgccgacgcggagttcctaccccgccgtgcgaggcagtggctccggcccttccagctcgggatggagtca

SEQ ID NO: 25675 - DNA, 122 bp, Homo sapiens
tagaagacagttttactttaacccatgcattgtctgtaccagaaaactgtaaatagaaagcgggctttgtaggtctatatgttttagatttcaacattttctaaagagtttgggagcataaa

SEQ ID NO: 25676 - DNA, 122 bp, Homo sapiens
tttcagacgggaggagggttgagagggggagagcggagatccggctccccaaaggcgcctcgccctcttaggaagaagcgcacactgggggtcagggccttttgcctggggctcatgggtgg

SEQ ID NO: 25677 - DNA, 122 bp, Homo sapiens
cccacccgcaaccattcagaggcctaaacgtctccctgtgatgctgtgcttccgcggtcacgctcctggtccactttcatgttccgccctgtacacctggctccgacttctagatagcagta

SEQ ID NO: 25678 - DNA, 122 bp, Homo sapiens
ccaccctccgcgggcctcgcggactgctgcgctgggggagtgggcggtcgggcgtgttcccgccacgcgccgccaccgcggcccctggaggtggttcactttgaggcctggatgctgcttca

SEQ ID NO: 25679 - DNA, 122 bp, Homo sapiens
ataaataaatagtgaaacgaacaccacagggacagacttccttttgtccttttttctcttcgtgcagagtaacgcggagtcttgccgtaacccaagatggcaaccatctctcaaatgtcacg

SEQ ID NO: 25680 - DNA, 122 bp, Homo sapiens
tgttttgcatccttccctctcctcgcctctccctgtctaatatatctctatcaagctttgcgtttgctaggaggcacaccattcatttcagtgatctctgctattgggtcctgcatgaaaaa

SEQ ID NO: 25681 - DNA, 122 bp, Homo sapiens
cacggagagcaggcagtgcagaagtcaaacccctaacagccacaggaaactcagggcaaacggaagcgtttccattctccagcccttctttcaatattcttaacatgagcaatccatgagcc

SEQ ID NO: 25682 - DNA, 122 bp, Homo sapiens
tggcgaggaatgagcttaaatgaccggcttccagggacgtagaaacacgctcagaacccacgtggataccctgtagccttcacttcctcttcttctggcgtcacttccggattcgtgtgcat

SEQ ID NO: 25683 - DNA, 122 bp, Homo sapiens
ccccagaccgctctcagggcatgggacagcccctttaatactgggtgctccaatactcctcgggttcagtctgaaaaacagcctcaagtacagctgttagggaagacaccaaatggcagtgg

SEQ ID NO: 25684 - DNA, 122 bp, Homo sapiens
ttccagattccttcgatatgtggctacaactttccaaattaacttttttggtttatcgcccgctgccccaatggcattcctgaggaccaaaacccctctatgtccctattgggaccttaggt

SEQ ID NO: 25685 - DNA, 122 bp, Homo sapiens
ttttactatcaatgatattaatactgttgttgttgtttaaacgagattttagtcccggttcgtccccagagcggctgcaggagtagtgcccaggactattgtgacctgctgtgccgtagctc

SEQ ID NO: 25686 - DNA, 122 bp, Homo sapiens
caaaaagcattaccctcttgaactgctcaagctgctctgtgagctcctccaccgcctgtgcgtgtttctgcctcatctcctggacctgagcctcatgggaccgcgtctcttcatccagggcc

SEQ ID NO: 25687 - DNA, 122 bp, Homo sapiens
aagtgagcggcaggcaagcgagcattactgcccaaactctgcctcttgtcagagcagctgcggcattagattctggtaggagggcgaaccttattgtaaattgcacatgagaggcgtctagg

SEQ ID NO: 25688 - DNA, 122 bp, Homo sapiens
gcaaatgtgaggcaatcacacaatgtccttgaggctctaatcccagacttgtctgagcaccgtccacaggcagctcggcccatcagaggtctgaaacaaacctcctaacttgggccaggtat

SEQ ID NO: 25689 - DNA, 122 bp, Homo sapiens
tggggccagttgaatccagcctgccacctgtttttgtacagctggcagcaagctaagaaccgatttcacgtttttttaatggctaaaaagagaatattttgtggcatgtgaaaattatatga

SEQ ID NO: 25690 - DNA, 122 bp, Homo sapiens
aggactatgctgagacctgcctggcctgcctcaccaacctgggtgacgtccacgtcttctcggtgcctggcctgcggccccaggtgcactattcctgcatccggaaggaggacatcagcggc

SEQ ID NO: 25691 - DNA, 122 bp, Homo sapiens
gtcttccaaatctgattggcaaatgggtttggcagagcctagccagatgctaggatggcccgaactgaccagaagcccccgtgcagaggtggctgctggggacagccaggtcaccccaacac

SEQ ID NO: 25692 - DNA, 122 bp, Homo sapiens
aggatggacggacagcccagctccctgtgcagcagcgcccgacgcccccacaaagatccacgtgctcagagtgaagaaagagaagttacagtctaacattctgggctgagccacgttgcccg

SEQ ID NO: 25693 - DNA, 122 bp, Homo sapiens
ccaaagtgcagcttctctcttcttatccaggtccaaagtccatggctgagctgaccctgacggggaggagtctgggggggaaggggtgtgtccaggcccctccccccccactgcagacttca

SEQ ID NO: 25694 - DNA, 122 bp, Homo sapiens
ccccggagcagctggggactgtagttctgccgccgagtattgtgggagttgtagtcctgacggtgactaagaggatgggcgctatgatggcggtctgactcgcaaaacaccttgggagatat

SEQ ID NO: 25695 - DNA, 122 bp, Homo sapiens
acagcctgagtcccagctcccatgggaccacccacacccctgcctcaggctgctgagccacgtgatagagagattgtccagtttctaaagagtcgcctctatcagctgcccaggacgccctg

SEQ ID NO: 25696 - DNA, 122 bp, Homo sapiens
ttccggccctggaagaggcaggatcctggagcagttttgtgaggcttttgtgctcccatacgccccctggtggtgagtgtaaagaagactttgcctctcacaactacatgtatgtgtggcat

SEQ ID NO: 25697 - DNA, 122 bp, Homo sapiens
gagaggcatcggggcgcgcggttccaggtatcagctcagagggagaggcatcggggcgcgcggttccaggtatcagctcagataagtgcatcggttctctatgctcgcaggaccactgtgga

SEQ ID NO: 25698 - DNA, 122 bp, Homo sapiens
attaagaattaagcaggacagcacagcattgagaagtcaggcagacagaggggagggggtcgagggggaggaagcttcaactctgagctcccttgggcagcctcagtactgaactgccttgg

SEQ ID NO: 25699 - DNA, 122 bp, Homo sapiens
ggtaccctgcaaaggcgagggggggctcgccttgaggggaggctggtgggcaggaactgccgggcccgcagtcgagctgttttccacttgtctagggtatatcacctgcttctgcactgcac

SEQ ID NO: 25700 - DNA, 122 bp, Homo sapiens
aggcacccaccacgagagctagcctggaggatgcgggctcagcacgtgctagaggaaccccggggggatggagaaacggtggagagacggggagggctccggaaaactgcgttctcacaaga

SEQ ID NO: 25701 - DNA, 122 bp, Homo sapiens
gccccactccccagaacaattgggcttgagatacatcaaaaaaaatacttcagggcagggcgctgtggctcatgcctgtaatcccagcactttaggaggccaaggcgggtggatcacctgag

SEQ ID NO: 25702 - DNA, 122 bp, Homo sapiens
ttccttctctagctcctcatggaccctgtgggacagcctcaccctcctgcctggttgacacgggctctttgagagctgagaggttcctactgacctgtattattcctgctgctaattggagg

SEQ ID NO: 25703 - DNA, 122 bp, Homo sapiens
cccgcgcccgcgccgccgccgtggaccaaggttgtttactactttccactccgaataacacgccaatcaccagggcccaccctccccgccggccaatcgctgcgttgggaaattccaccttt

SEQ ID NO: 25704 - DNA, 122 bp, Homo sapiens
agtcccgcagggacaagctgcacatcccggcgctgaccctcgagtgagtgttgggcagggcgggggtatgcggggtgcagggaggacaggatgacaactaccctccccccacgtctctgttc

SEQ ID NO: 25705 - DNA, 122 bp, Homo sapiens
ctagttacccacaaaattccatctctctaggcagattctttttatactttcaccaccttccgtctctatcctccttccctgttttctcccttaaaagttattcttccctttgaggcctttat

SEQ ID NO: 25706 - DNA, 122 bp, Homo sapiens
ggacatgaaggatgacttacgacacacaagggcaaatgcggaacgcgacctgcagcatcacgaggtacaccttcctgccagcgcagcctgtcctgcccaggctccccacctctaccccactg

SEQ ID NO: 25707 - DNA, 122 bp, Homo sapiens
ctgggcaggggatgagcttgtgtcgcgggcggcagggggaagggagtcggagagctcctgcggtccagccggatgactgatgaggttgaaagcacttccgctgcggcccccgcaggaagttc

SEQ ID NO: 25708 - DNA, 122 bp, Homo sapiens
ccgctctgccttttccgatgaggccgtgaaaccagggggggcgcccgggtcagagcttcacgggacactggctccccagccggggagtgcggctcggacccggagctccgccctcctcccat

SEQ ID NO: 25709 - DNA, 122 bp, Homo sapiens
ccccagcccctggccccatcactctaccttctgtctctatgaacttgactatctttagtacgtcacatgcgtggaatcattcagtatttgtccttttgtgactggcttatttcactcagcat

SEQ ID NO: 25710 - DNA, 122 bp, Homo sapiens
tgttttttgagacaggcaacagtttcttgttgcccaggctggagttcaatgatgtgatttcggctcaccgcaaccttcacctcctgggttcaagcagttttcctgcctcagtctcctgagta

SEQ ID NO: 25711 - DNA, 122 bp, Homo sapiens
cacgtgcgcggctgtacttacctgtccttccagacacccagacacgtctccatgcacgcacgtgcgcggctgtacttacctgtccttccagacgcgtctccatacacgcacgtgcgcggctg

SEQ ID NO: 25712 - DNA, 122 bp, Homo sapiens
ccaagctgctgattttatgaaagccgaacgcccatctgagcaatgtttatcttccctccgcggtgggcaatgctggccaacagtatggctacatagtttttcttttaactatttttgctcca

SEQ ID NO: 25713 - DNA, 122 bp, Homo sapiens
ccggccccgggagcggctgacctttcccccaaaagctttgtgccgatttctccattttcccgcggagatggggacgggagcccggccccccaacccattttccccacctcccggggctcgct

SEQ ID NO: 25714 - DNA, 122 bp, Homo sapiens
actcactttgcaaaggtgcagcctttgcagtatctcggtactgtggacagtgcctaggggcgcttgctgggctccctcctgcttggggactctgaggctgctgtccagcaggtccctcactt

SEQ ID NO: 25715 - DNA, 122 bp, Homo sapiens
agccctgcttgtaaaatgaccagaccttttctcagcctggtcacatgggactgggtttaacgcaggtcaccatcccacaggctctttctgaagctttgctgcctcaaataatgccatggatt

SEQ ID NO: 25716 - DNA, 122 bp, Homo sapiens
aaacggacaggtgatctgtttcatccaaggaaatctgccctttaaattagaaaaatcttacggaaattactatagtttagtcacagacatagtcttggatagggaacaggttcctagctaca

SEQ ID NO: 25717 - DNA, 122 bp, Homo sapiens
ggcggcgcgggcctcagcaaagtgctggtgggcgaccggggcggggggggtcacctcccccgggccagtccgacccctgcccacctccgcgggggcccatcccgctcctccgacattcctcc

SEQ ID NO: 25718 - DNA, 122 bp, Homo sapiens
ttaactttgtttgaaaaacaaactggattgagacatattttcttacttataacttgattacgtgtgttcattttcgacccagaaacaaatcgcagctgggcataaaacaaagaatagaatgt

SEQ ID NO: 25719 - DNA, 122 bp, Homo sapiens
aatcgtccacccgacccgaatgaattggcaggagccgcggccacatttaaagggccagagcgcgcgttccctcccgtccgcccccaagccccgcgggcctcgcccaccctgcccgccgcccc

SEQ ID NO: 25720 - DNA, 122 bp, Homo sapiens
tgggcatcctgaagccactgggcgcccaccctggggagggtttccacctcagctgggcatcgtgaagccactgggcgcccaccccggggagggtttccacctcagctgggcgtcctgaagcc

SEQ ID NO: 25721 - DNA, 122 bp, Homo sapiens
gtaagaatcttctaggatgccaggcaagcagaatgaagacagactgcccgggttttaatccggtctctaccaatgacaactgcgtgaccttgggaacagttctgaacctctgagttgcagcc

SEQ ID NO: 25722 - DNA, 122 bp, Homo sapiens
cctatctttaatgatctccttacagttagaaaacagtccattttccccataatcggtagtcgtttcattagcatctaaattataattccttaattataagcctatcacctattctgctttcc

SEQ ID NO: 25723 - DNA, 122 bp, Homo sapiens
cggaggccagaggggaggctccccgtgtggttggtagggtgagcgctcttgccaccgcggcgctgggaggaagattgccttcggggtcccctggtttaagacgccagctcctgcacaccccc

SEQ ID NO: 25724 - DNA, 122 bp, Homo sapiens
tgagacgcaagcaatttcatagtaccgattccctaattgcacctcgtccccagtattcatcggctcttccaggaggtggcagtcttgtccaaggtatagcaagaaaaactcagtgcaataaa

SEQ ID NO: 25725 - DNA, 122 bp, Homo sapiens
aaattctgtgtggaaatgcaggggccgtgaagctgcgggcgcatgcagcagtctgtatgtcgtcccattcatgcaggaatagagggaaacagaagagacagatgaacaggcaaacgctagtg

SEQ ID NO: 25726 - DNA, 122 bp, Homo sapiens
acgcctgcaggcggaggagctggcattctgtgccggggcacacgtattggaggacgatcacggcaaataggaagagcatcaccaaagctagcagcagcttgttggatttctcatccatgttc

SEQ ID NO: 25727 - DNA, 122 bp, Homo sapiens
agctcaggttgcagcttctctggggaactgctcacctttccggagcaggggaagctgccccgtgcccgggagggagcgggcgcaccgcggcccccaggacacgcgctgtgagtcccgcgggc

SEQ ID NO: 25728 - DNA, 122 bp, Homo sapiens
cgccttctcattggctcctgcgtctcaaccaatgggctggggccgttctggccctagggtcgccttagcaaccggcctcctggggcttccctttttagtccgcccgaaggaggtggttcctt

SEQ ID NO: 25729 - DNA, 122 bp, Homo sapiens
gtagcacagcctagtgccacacttaccatgttttgttcagcaataatacactctatgaaacgctcagggtgttctttcctgaatatctcagaaaaggtggagttcatcgtgtcaccactcag

SEQ ID NO: 25730 - DNA, 122 bp, Homo sapiens
agactttctgggaggaggcgggacaaaggggcggggcgagcgcagcgccctccgggtgggcgccgtcaagaggccgggggcggggccgagcgcggctgggcggggccttgagaggccggccg

SEQ ID NO: 25731 - DNA, 122 bp, Homo sapiens
ggaggtgggggccatgtgggtgccactttacacctagggaaactgaggcacagggagttccgtgacctctatgacaactagtcagggcttgagccagagccctctttcagcattcgggtgaa

SEQ ID NO: 25732 - DNA, 122 bp, Homo sapiens
taaaaatctctaattaagtgatacttgatattgctctagacggtttcttccacttccttacggtttgtcacgtgcggatggctttgccaaagccatcctgttaatagttgatcacatgttga

SEQ ID NO: 25733 - DNA, 122 bp, Homo sapiens
tgcaggggggaggagcttggtctcatgttcggggtggaacttgggattctatctgggaggcgagaaaccagctagcgggactctctctcgctttgctgagagtccctgtttccctttttttc

SEQ ID NO: 25734 - DNA, 122 bp, Homo sapiens
gaagcttggtgctcagaataatcagaactttctcagtggacccaggctcagtggaaagagcgctctggttccgtttattgctcccacagagaagagaggagagacccagagaggtttaaaat

SEQ ID NO: 25735 - DNA, 122 bp, Homo sapiens
atagacccggcaccgtgtaataactgggcccgtgtcctcgcctgaaaactgggggtcacacggcctgtcctgaagaactctgatgtgataaacaccatagagcagcatcacattttcctatc

SEQ ID NO: 25736 - DNA, 122 bp, Homo sapiens
ccgtcaggtcccagagacccaagttttttttcatccagtggggctgtcttaggaagcacccgggacatctccccggcgaggcggaggcggggaaggagcctcccctccaggggtggatccag

SEQ ID NO: 25737 - DNA, 122 bp, Homo sapiens
tctctacctcctccctgctgtctctctcaaaatgcagtcggtatctaagggaacagggaccgagacatccagagcaatcctgtggccacaaactcctattttctcccctcttgtacaatcaa

SEQ ID NO: 25738 - DNA, 122 bp, Homo sapiens
ccgttcacgtactctctgctccgccggccgttccgccaagtcctggccggcatggtgcaccggctgctgaagagaaccccgcgcccagcatccacccatgacagctctctggatgtggccgg

SEQ ID NO: 25739 - DNA, 122 bp, Homo sapiens
ggccatttcccaatctcctttgctgattccttctcaaccttgaaatgctagagtgccctacggctctgtccctggccatattcaagcccatgacatcaaataccatccttgtaatggtgact

SEQ ID NO: 25740 - DNA, 122 bp, Homo sapiens
ccccggatcccgaaccccgcactggcttgcgccccgagcccggcggcctgacaccggacgcggcacctccctggacactcggatcagacccgcaaactttcttccggagctcgggctcaggg

SEQ ID NO: 25741 - DNA, 122 bp, Homo sapiens
gtgccagagaaaaagaccagcttactctttgacaaccctctaaccccttcagcaacttaccgggattttcctgaggtcttcattgcttgttggactcatatgaaaactaataaaacacaaac

SEQ ID NO: 25742 - DNA, 122 bp, Homo sapiens
gcaccccccacccaccccggcgcgggggcccggccgcgggaacgccctcccggaatgaagcgcttcccggtgccttcaaggtagctcggttccggatcgggaacccccccggtcttccctct

SEQ ID NO: 25743 - DNA, 122 bp, Homo sapiens
aggatcttgaattcactctagttttccaaaaagcagctaatgcccaaattttagttccttcgctgttaatagtaacaaattacaactgggacactctaaggcagagaaccacccattctttg

SEQ ID NO: 25744 - DNA, 122 bp, Homo sapiens
ctggggtgagggtcttctgggcagtctcctccaccctcttcccgctgtccagtttacccgcgagaattgagaagggtaaggccagccacccagaaaaataggaccaagagaagaagacgttg

SEQ ID NO: 25745 - DNA, 122 bp, Homo sapiens
agaaggtgcgctctgagggccctttccttccccttttccctccaagcccgggggtctccccgaagggattagccccaagtgcggggggccttctgccctgttggacttgaagaagttccccc

SEQ ID NO: 25746 - DNA, 122 bp, Homo sapiens
ccgggcagcgcgggcccgggcctggactggttctacttgtgttctgaggtccctgaccaccgccttgggtccagccctcgtccagggggcggcggtgcaggggagaccgcgcggcccggcct

SEQ ID NO: 25747 - DNA, 122 bp, Homo sapiens
tttctcctacggaacccttggacctcttgccccgtttccctgtcactttagggagcagcacgcaggagactagaggccagggtccaagcccgcagccgtagcaggccggacgaagaaagcgg

SEQ ID NO: 25748 - DNA, 122 bp, Homo sapiens
ctaccgtctaaggtggggcgggcgacgcggtagacgggctggccacgcggctcgttcccccgctcctcggggccctccaaggtgtctccgtagtcagcaggttggaggcagaggagccgatg

SEQ ID NO: 25749 - DNA, 122 bp, Homo sapiens
gggtgtggacgccactacagttcatcaacatcaactacgtccctctgaaggtgagggccacggggctcagcctctgctaacattactttgtcagccttttccttccttccttccttcctctt

SEQ ID NO: 25750 - DNA, 122 bp, Homo sapiens
cggcgggcccgagccacggccgcgggctctggcgggtgccggggaggccacgcgcgacggcgtcgcagccggagcccagacagacgccccacgctgcgcggccttcatcccacggctggggc

SEQ ID NO: 25751 - DNA, 122 bp, Homo sapiens
ctcccatgctggcgcgcgggaccaggggccgcccaggccggagggacaaattgggggctgcgtgtcctaaggagaagagttaaaataataaaaggtgcaactgaatctaaacgcagggaggg

SEQ ID NO: 25752 - DNA, 122 bp, Homo sapiens
gcgtcccgcctaggtgagctccggaccctcccgccccaccccagcggggctgctcgactccgtcgtgcccccttgggcttccactgcaggaatgcaaggcgggtaaccttcaaagccaggtg

SEQ ID NO: 25753 - DNA, 122 bp, Homo sapiens
cgtctcggcgcccaggtggccgagaatccagtcaccaggtcactgagtcaccgatgggggcgaggacacgggcctgggccggtcagaggggcgggatcgtcacccctggctcaggggcccct

SEQ ID NO: 25754 - DNA, 122 bp, Homo sapiens
ctgagccgaacacgacacgacgatgggaaggtcctcgtcacccctgagccgaacacgacacgacgatgggaagctcctcgtcacccctgagccgaacacaacacgacgatgggaaggtcctc

SEQ ID NO: 25755 - DNA, 122 bp, Homo sapiens
aagaagcccgctgggacgtgagcgggacctgctggcgccttgtttttgtggcatggggttcgggaagctcagcgcgtgctccctcgctaacatctaggcatcctcggactgagcctccagca

SEQ ID NO: 25756 - DNA, 122 bp, Homo sapiens
atcagaaaaatccagcaaagacaaagagaagaactcctcagacttggggtgcaaagaaggcgcagacaagcggaagcgcagccgggtcaccgacaaagtcctgaccgcaaacagcaaccctt

SEQ ID NO: 25757 - DNA, 122 bp, Homo sapiens
tgaattcctgggctcaagcaatcctccctcctcggcttcccaaagtgtagggattacaggcgtgagccactgcgccctgccaaaagagggctttagggcaccccagaacgcgagatccccct

SEQ ID NO: 25758 - DNA, 122 bp, Homo sapiens
aacttttaaggtccaggttaccgccgcgtctccctagcaaccgtgccctttaatggttgccggaagaggctataatcacgtgctccgaagacttccgggtttccaacgtgacttccggttgt

SEQ ID NO: 25759 - DNA, 122 bp, Homo sapiens
ttcctatcacgtctatgcaaatgtccattttaactttaagtgcacagatgtctaatggcccgagacacgtaggttaacacccgtgcacgcgtacacagaggccttcacctacaaccatcccc

SEQ ID NO: 25760 - DNA, 122 bp, Homo sapiens
ccccgggtgccgacctcctgtggagggccctgccccgctgcggctgaggaggtcggcacccggggccctttgtcctatgacagcgtcacctggagccaccaagaactggaagaggcaggaag

SEQ ID NO: 25761 - DNA, 122 bp, Homo sapiens
aaccctccttcaaaatagctgcttctctgaaggacacataccttagtcatgctaagaagacggaaattcagaagagtttgaaactccctgagaacttcacaaactagaaaaaaaaaaaaaag

SEQ ID NO: 25762 - DNA, 122 bp, Homo sapiens
gaaaaatgattagaaagaaatctaccaaaatgttaaagttgtttatcagtgttaggacaacggatcagtgaagaactaggaaacgctgcaccaacaatcatgtgctcctgacattttatccc

SEQ ID NO: 25763 - DNA, 122 bp, Homo sapiens
ccaccaggcaatagacaggagagaggtgagaactatttttagaaggaggaaaagtagatacgcaaattgtcacaactaagagtgataatttggtagctctgtatgtatgctggttccaactg

SEQ ID NO: 25764 - DNA, 122 bp, Homo sapiens
gtggcctagcgacccctctgaaggccgctggagctccgcccctccacgccccctggcggacgcgagggatcggcttcaaggctattcctcgccgcctgagttgcctgcagacgcccgtctgc

SEQ ID NO: 25765 - DNA, 122 bp, Homo sapiens
actcaggatgccaaagtgggaggattgcttgagtccaggagttcaaggctgcaggggctgcgaatgtgccactgcactacaaactgggcaacagagtaagaccctgtcttttaaaacaaaca

SEQ ID NO: 25766 - DNA, 122 bp, Homo sapiens
cccgactcttgccagtggagggatgtccctgtccctcctctgggggctgatgcctgggcccgctgtgcatctgggatctgcattctcacatgctgcctcagtggctctgaaaatcaagtaaa

SEQ ID NO: 25767 - DNA, 122 bp, Homo sapiens
gatgtcaagcgctttacaatacctgggattgatgaggcgggcgggccaatgagctgcgcgcggcgcctcggcgcgccctccgttggcgcggcggctgagggcggggggaatgcgggcgcacc

SEQ ID NO: 25768 - DNA, 122 bp, Homo sapiens
gcctatgatttggaacttggaggcgcctaagcattttggtcatatttgctaagcagaaggcgagtgttttctgagtgatgtttggcatacacttccagtctgagggtgtcaaatgccagact

SEQ ID NO: 25769 - DNA, 122 bp, Homo sapiens
actgctcgagctaaaatgaagcttccattattttactgcttaaaacacttcagtgacccccgcccacccattgcctagggaagttctctgcccctaccaagcttgtttgctgctgttccaat

SEQ ID NO: 25770 - DNA, 122 bp, Homo sapiens
ttacttgctgacagatcagttccttagatctgaaaaacaaacccccgccccccaccgccccggccaacaacaacaaaaaaaagctggttggccggttgttgtagtgatgtgaatccagtctg

SEQ ID NO: 25771 - DNA, 122 bp, Homo sapiens
atgcccctgagagagcagccgtagactgggatagatgaggatggtcacgtggtggagaggcgtgtttttgggtaccagcccttcacctgcgtcaatcttctcaactgaaaaaacaatacacc

SEQ ID NO: 25772 - DNA, 122 bp, Homo sapiens
gccccttgcctggacccagccgcccgcccgcccccggcccacctgagcccgggcccgcggcgcccgcatcagcactgcggacagcgccccgggccccagctcgccgccaccgccgccgccca

SEQ ID NO: 25773 - DNA, 122 bp, Homo sapiens
tgactttccttctttgtgatccatcctaggtgactccaaaggattattttcctacaataacgtatttcctatattattccttcatttgaaatcctcaaagggctccttattgcctatagtcc

SEQ ID NO: 25774 - DNA, 122 bp, Homo sapiens
ggcgcgtctatgcgacactttcagctctccgcgctggacccagacagacgctccgcaaagcggccaaagaaccaaactttgtcctcgcggaagtccgcgggatcgaccacgccaaccccgct

SEQ ID NO: 25775 - DNA, 122 bp, Homo sapiens
cctgcaaagtttgggataccttaacaaagaagtgaacagctgctcccccaaccaaggcctcgctgaggacaaaccagaagagccagaggcctgtgtgaacttgttcttgattctcttttgcc

SEQ ID NO: 25776 - DNA, 122 bp, Homo sapiens
accctgttgggctaaggaatggggtgcagatggaggctgaagattctagaacttattcaccgacagtgatgccctgggttcttgacttccttagattttactttgatttctttttcctgggt

SEQ ID NO: 25777 - DNA, 122 bp, Homo sapiens
gcccgacgggagcgtgcggggcggtgggcgcagggtcacgttgggcggcgcagacaaaggcgggcgcgcgcacgtcctgacgcagcttgggcccgcggcggcggcaagggcgggagggagcg

SEQ ID NO: 25778 - DNA, 122 bp, Homo sapiens
tgagaatttcatatcccagaaaacatgcaaatatcaattcttctaattttgttcacttatcggaaggcaaaactacttactttcctgactcagaagcacaaacagaaagtaaagaatacttc

SEQ ID NO: 25779 - DNA, 122 bp, Homo sapiens
ccaacccgcggaagttcagtgagaagatcgcgctgcacacgcagagacaggccgaggagacgcgggccttcgagcagctcatgaccgacctcaccctgtcgcgggtgagggcccgggccggc

SEQ ID NO: 25780 - DNA, 122 bp, Homo sapiens
tttcctgtttacagggtgtgatactataaatatgcaggcctgtcttttatgtgggaactccgttttcctttaacagcaaaagaaaaaggaaggcaatggccactagatggcagtcttcagtg

SEQ ID NO: 25781 - DNA, 122 bp, Homo sapiens
accgcccctgcgcccggcccctcagccccgatttcccggacgaggcactggcgaccacagcggccactgcggctgccgcctccccactgcccaggcgtgaagccgttcatgtctccgagctc

SEQ ID NO: 25782 - DNA, 122 bp, Homo sapiens
cgggggcgggaggggctgaccctgaattcaccgggactaagaggccatcacacctggctgcggtaggacagcgaatcatcgatcttaccggctttggggacccggctctgcggcagcgctct

SEQ ID NO: 25783 - DNA, 122 bp, Homo sapiens
cgggagggatcggggttcagaggctcctgctttcaggatgggaggtcctgctgtgggccccgtccccaccatgtgccccacaggctctctgagccccccgacggctcccccactccgggctg

SEQ ID NO: 25784 - DNA, 122 bp, Homo sapiens
actttgccgccgagcagcagcggcggtcaacctcagcctcccttagcaacctgagtgccccgtccaggagccttactattggtctcatgcagcgagatgggcagttctgccgtgcaatccca

SEQ ID NO: 25785 - DNA, 122 bp, Homo sapiens
cccatcgcaggagggggaggcaaccccgcgagggtggggactgagagctatcctctcttccgcacctggctgttggtacccccatcgtagggggggggaggcaccctccgcgaggcagggac

SEQ ID NO: 25786 - DNA, 122 bp, Homo sapiens
gcgccgtccgccttccctgtgtccccgcagacccccatcatgggcaataccagcagtgagcgcgccgcgctggagcggcatggtggccataagacgccccggagggacagctcggggggcac

SEQ ID NO: 25787 - DNA, 122 bp, Homo sapiens
cctttggcttgctcttagggtagcaggcgaggagtggcaccagtttggggactctctccccgcgttctgtaagaatcggcggcagccagcaggcggggaggcgggggcacgtgtttggatgt

SEQ ID NO: 25788 - DNA, 122 bp, Homo sapiens
gcgtgcgtgcgctttctctgcttgtctctcacactgtctctggctccggggagttttggtcgctagcgctagcgcatgcgcgtgcgctctctgtttctgtctgtttacgaccgtcagtttct

SEQ ID NO: 25789 - DNA, 122 bp, Homo sapiens
aagaagcacgcgggtctgtgtgtccaggccagtgaactgcagggacccccaggctgcagtcgggctcaccagcaccagtgcctccggaaaacccctacctctagcttctgctttgctggtcg

SEQ ID NO: 25790 - DNA, 122 bp, Homo sapiens
tggcttttctttgccccactggtgacagtgagtgtctgcccctctgagaagctggacctgcggaggacactggacagctggctctccccacctccttcctggtcccctaaggaagaggcagc

SEQ ID NO: 25791 - DNA, 122 bp, Homo sapiens
caccctgcccgggcccagggaacttcgaagcaaagttgctccagggcggctggagagcgccggacgagtctccgcgggcctggggcgagccctggaggaagggactgcgggtggtctctccc

SEQ ID NO: 25792 - DNA, 122 bp, Homo sapiens
accagagttcagtttaaccctcaccgctttagacggcggctctcctccaagatcagggaccgccctcgtgcgcattctggttctagacgtaaatgacaacgcccctgattttgtgcggtcgc

SEQ ID NO: 25793 - DNA, 122 bp, Homo sapiens
atttggaagcttccttgccaactcactgctgtgccacagccaccatgtggaagggacttccgtgcttggatctctgtgcacacagcttactgttaagatggcaacagcagcaaacagttccc

SEQ ID NO: 25794 - DNA, 122 bp, Homo sapiens
cggaatccgtgtggctccctgacgtggtgctactgaacaagtaggagaacttccaaagcccgggaggtggcgcggggcctcggggggcggggggcctccgggcgcggggcctgatccctgat

SEQ ID NO: 25795 - DNA, 122 bp, Homo sapiens
actgtgttggacctaggtccgtagaacgccgtgatgtcatcattgatgtcagagaatctgcgatgggcctggtgacctttgaaccttaacagccctgcagtgtagtgggcactgggcagtgc

SEQ ID NO: 25796 - DNA, 122 bp, Homo sapiens
gcaatgcggtccccaagcaggtcagcctcatccatgtggtgggtggacagaaggatggtgcggcctaggacaaggccagacccagggtcagggggcaggggaggcgccgcccgcacccctgc

SEQ ID NO: 25797 - DNA, 122 bp, Homo sapiens
ctcagtccgagatcacgcgggcgcctcggctcttgtccacgccctggaccgcggggaccgcgagacccttgccacactgctggacgcctgcaaggccaagggtacggaggtcatcatcatca

SEQ ID NO: 25798 - DNA, 122 bp, Homo sapiens
aggacgtcggcctggtaaggctctctccaacaacaagctaacgcccactcctgcagcaagcgcccacagccagtggtttttgttacaaaacaacttttgtgagctcatctgtattttcccct

SEQ ID NO: 25799 - DNA, 122 bp, Homo sapiens
aaacataaccatacactcagaatgtgtttgtggactaggtatgtgtccagagctgccgctcgccccttctattttggacacctgagaccttgcacattaggtatgggcagggccacctggaa

SEQ ID NO: 25800 - DNA, 122 bp, Homo sapiens
tcattaaccaagacgtggtgaatcaagcatgtccatctgatgtttctgaatgtagtgtttcgcaaagatcttttggaagatgtggagaaacaaccacagaagcagagtcttgatcaagcaat

SEQ ID NO: 25801 - DNA, 122 bp, Homo sapiens
tgctgcgcaccttcgcgtttggggcctggtgccggctgccctttgcctggaggggtctcccggggtccctgtgagtcaccgcacagtcctgcagcagggagtcagacccacactagaccctc

SEQ ID NO: 25802 - DNA, 122 bp, Homo sapiens
ccagccccatcccatcaatcttctctgtactttgacgcagacacgatggactgttatccacgtggcaaacttggaagcaccttgaaagagagtctaagtaagttgccaagacgcccgtctga

SEQ ID NO: 25803 - DNA, 122 bp, Homo sapiens
ctgacggttcgggcctccttctccggttcgccaggggcgggagaatggaggagggccggccgctaactgccctcgaggggctcccgaagcgccctggcgacctcagcagccgcgcgtctcgg

SEQ ID NO: 25804 - DNA, 122 bp, Homo sapiens
ttgaaagagagcagcccccagttggctgtttcaaggctgagatattggcaactggggctccgggatttggggcacgagctgcggcgggaagcatcggcggccggccgggcagaggcgcctcc

SEQ ID NO: 25805 - DNA, 122 bp, Homo sapiens
agcagagttgagtggctcttttaaaaaccccacggtggctgcgtgttgagctggtgagagcgacataggcagggtggtcagtctagagactgtcgctgtaagccaggaaacgacgctgagtg

SEQ ID NO: 25806 - DNA, 122 bp, Homo sapiens
gcggtctccagtcctctttttgccctcagcattggggagaatcttcaactgctggtggaccggcccgatggcacctactgtttccgtctgcacaacgaccgggtgtactatgtgaggtgagg

SEQ ID NO: 25807 - DNA, 122 bp, Homo sapiens
aacaaataaagaagccttcctggctaggcctccctgttcagataatcccccttgatacggcgagtctcagcatgagtgggtagaatagttacagcttgagtcgtttccccttaccccacagc

SEQ ID NO: 25808 - DNA, 122 bp, Homo sapiens
tattctcagcagttaaaaaaaaaattgaatatagagaagtcaagccctggatggtaaacacgtttttgttcttggggacttcatgtgccgtagataattaacacaaggatttctgtggtgga

SEQ ID NO: 25809 - DNA, 122 bp, Homo sapiens
cgccggcggccggagtgaatcattaactggagccgggtgctccggctgcgcagccttccccgctggcgccacgcacttgcccgcccggcctcggtcccccggagctcctccctctccgggag

SEQ ID NO: 25810 - DNA, 122 bp, Homo sapiens
agcgcaggtcctcgttcagggcgatgtaatccttgccgtcgtaggcggactggtcatacccgcggaggaggcgcccgtcgggccccaggtcgcagccagacatcctctggagggtgtgagac

SEQ ID NO: 25811 - DNA, 122 bp, Homo sapiens
ggaactccctgaccccttgcgcttcccaggtgaggcaatgcctcgccctgcttcggctcacgcacggtgcgtgcacccactggcctgcgcccactgtctgggactccctagtgagatgaacc

SEQ ID NO: 25812 - DNA, 122 bp, Homo sapiens
gtccgcggtccccaaaccccggttctgcacgtttctcaggagcggtcgggtggtgtcccgcgagtgccctgcagacttccctgtggtgccctcagaagtccgctcggacccgggtgcgaggg

SEQ ID NO: 25813 - DNA, 122 bp, Homo sapiens
tatagtcagggctcaaaacagggtgagttccaatgttccacagcactagagggtgactgtcgttaacaacttataagagctggaaaagcactttggaaggctaaggtgagcggatcacctga

SEQ ID NO: 25814 - DNA, 122 bp, Homo sapiens
ccgccgcgtgttgaaagcttgactggagtttccctgcaggcaggggcacagtgtgtgcaacgctgcatcgcccgagcctggcacagggagtggcccaaaaaagctgttagtgactgaacgca

SEQ ID NO: 25815 - DNA, 122 bp, Homo sapiens
atctaggggctgggggctggaggcgggggtgggggtctgagctgcgtcctgggctcgaggcgtcccccggggagtcgcctcttagcggtgcgtccgggctagcggcgaggggccgccccaag

SEQ ID NO: 25816 - DNA, 122 bp, Homo sapiens
gcccgcccgcacgatgctgttcctcgagtgtgccggatgcacggtctgcactgacaataccggctgaaccatgtgaaacagccaccatgcaggtcgcatgctgctgacttctctcccgcatg

SEQ ID NO: 25817 - DNA, 122 bp, Homo sapiens
acagtgggtcctggggccagtcaagattttgggaccaaacacatagatgcttggtggtttcgcgaggttgcgggcaagaccccttgaggtgccaagtcctgggccgcccctccagggctggc

SEQ ID NO: 25818 - DNA, 122 bp, Homo sapiens
tcaagggaataaatctgtaagattttatggtgaatgaatacttcaacctctttggattaccgcatggtccatgctgatcccagaggcctttacttacccacgtagtgtggtggctgcagtga

SEQ ID NO: 25819 - DNA, 122 bp, Homo sapiens
actgcactcttctgaggctacgggagaggtccagcagccgggccagggactaaaaggaaacgaaggatctgttttatttcgagctcgggggcaggctgcacttctcgcagatctgaacgggc

SEQ ID NO: 25820 - DNA, 122 bp, Homo sapiens
ccatgcacgatgaggcagaaaactcacaactctttctaaggctgacaagtagacaaaaaacgtaaagatgcagaaccctcggctgccacacatgctgcggcggctgattcccaaccacatct

SEQ ID NO: 25821 - DNA, 122 bp, Homo sapiens
caagagcgtggattccgttcctactaagtgccggccacactgtgcctggcagctgcagcccgcgggatctcagctggaccttaaaagtcagcctgtcaggtagttattgtgagacatctctt

SEQ ID NO: 25822 - DNA, 122 bp, Homo sapiens
ggagcgcagccgttggcgcagtcctcctcctgatgccgctgctgttgctgcaaaattgtccgacaggcttgacggtcgctggagcagggggcagtagctccacgcggtcggggacaaactct

SEQ ID NO: 25823 - DNA, 122 bp, Homo sapiens
ggcggcacgcacgcccggtcggcccccgccacgtgaccaggctcgcagcgctggggcagccgagacttgtagttcttgtccctctaacagacggcccgggtagctccagaaaaactacaaat

SEQ ID NO: 25824 - DNA, 122 bp, Homo sapiens
attctcacaggatcagcaatgacaacagccgcctcatctcccaagtctgaaatggccagacggtcacagctgcggctgacagtaaagcactgatatgctcaaaacaaaaaacattgcacagt

SEQ ID NO: 25825 - DNA, 122 bp, Homo sapiens
cagagtgggcatagaaggtgagactgtgtacgagaaggcgcttgacaaactgagaagcggcgtgggaatgtgaggcatcattacacagggcactgggcaggcctggatctcacacgtgcccc

SEQ ID NO: 25826 - DNA, 122 bp, Homo sapiens
cctcctggatcagaagcgtaggagacacgctgctggatctggtggggtggaagtcagcagcgggtctgcaagggcagtgatcagcagtggtggacggcgactgaaagctcagctcgagccag

SEQ ID NO: 25827 - DNA, 122 bp, Homo sapiens
agctcccgggaaccgactctggggcgcttggacgccgctggcttctggcaggtctggcagcgctttgatgcggatggtgagtagaacaagccacttgcacactcaggtgtagacgtggctcc

SEQ ID NO: 25828 - DNA, 122 bp, Homo sapiens
ttttttttttttttttttgagatagggtctcactctcttgcccagactggagtgcagtgacgccagcggcttcctgcaacttctgcatcacaggcttaagcaattcccctgcctcaccctcc

SEQ ID NO: 25829 - DNA, 122 bp, Homo sapiens
caccgcgcccggcctggagtgtgtattatcccaattttatggggagtaattgtgctcactcggctcaccaccaagtcgccagagcgcgcctccgcaaggaagccctccaggcacttctactt

SEQ ID NO: 25830 - DNA, 122 bp, Homo sapiens
gcttcacagacctggctgaaactcacatccaggcgaggcgctcacgtgacccgttctaaacgcgtcatagggacacgtggttctagatacttctccccctcccactcaggggtggattgttg

SEQ ID NO: 25831 - DNA, 122 bp, Homo sapiens
taccacctctccgatggctcctcccatccctggccacgtccacctttggatgcttcttgccgtcacacagtcccacacccagctgcgcaactgagcactcacagtgtttagaatcctgcagc

SEQ ID NO: 25832 - DNA, 122 bp, Homo sapiens
acagcccaggcttggtagtttggggacagattcatcggcaagctggcagatgccccggcccgtgaagaatgatgatcactcgtgtgtgcagctcattcaggtccatccacaaaatgctttca

SEQ ID NO: 25833 - DNA, 122 bp, Homo sapiens
ggtctccgcgcagattcgctgcaagctgctcaaagtaagtgctccccgccccttccccaccgggagacctgcgtcccccaaacccgcggagtaactcgtctgagaaccagcccgggccccct

SEQ ID NO: 25834 - DNA, 122 bp, Homo sapiens
atcactgtggctgataactgcacttctggtaacccgacatttgctttgtgtcctggtgaccgctgtagccctacgtgcagtgaggcttgtctaattcaattacaggttcaagtgtatttttc

SEQ ID NO: 25835 - DNA, 122 bp, Homo sapiens
cccggctgaccccaggcaactccagcctcggagaatgtgcagcctcggctttcccagcgccggcccccgcccaccccttccgcgtgggccacatcaccgcgctggcatctccaacagccatc

SEQ ID NO: 25836 - DNA, 122 bp, Homo sapiens
ccaagaacgtgcttaggatgttcgcaaaaacacaactcttaagactccaactccagtctccgcctcccaacgagattactgcataagtacctcctacagcagaaattctagttccctccttc

SEQ ID NO: 25837 - DNA, 122 bp, Homo sapiens
gctggggatgcacaggtggttctgagtcaatccgccggggtcacggctgtgctggggggccggagccccccccctgggaaaaaggggtcaagacagcacatttcaggaagcaagggcccaag

SEQ ID NO: 25838 - DNA, 122 bp, Homo sapiens
aaaaacacttgtgaggcaatctgagttcaagatcactccagatcgttgcaatttcccatccgcatgttttacaacagtttttcaatttttttaagtggtttgcttttatcatgtctttccaa

SEQ ID NO: 25839 - DNA, 122 bp, Homo sapiens
ccaacctagttatttttctccaagtatactgacttaagagtccttgttttcattttattgcgcaaatcatttgtatgtcatttcctgaattcagttcaaaagagtcatcagcaaattcacac

SEQ ID NO: 25840 - DNA, 122 bp, Homo sapiens
ccccccgggtcacccctgcctgcagctggcgcgccccggatgcccggcccccacccccaccgggcccaatccctgacccttgccaagcggcagcaaagtcaccacgagtcacctgcgcgagc

SEQ ID NO: 25841 - DNA, 122 bp, Homo sapiens
tcaaaaaacaaacaaaaaataggttgttacttaactatggatcccagagaactattagaccgttcctgatgcaaatccacctcatccaacagctttttcttgacttttcttccagcagcttg

SEQ ID NO: 25842 - DNA, 122 bp, Homo sapiens
gtgcaccccctgcacccctcggctgctgtggctggggccgcgctcacggtcacacggctgcgtgctctttgtggtctggctttggctcctgtgatgtttctgaggctcacagagcgcgtgcc

SEQ ID NO: 25843 - DNA, 122 bp, Homo sapiens
ggaagccacccctgcattccctgtacccactgcccagcaagcggcaggggtgtggcgggccggggaggaatctgagaggggcggggcgggtcaggaatgcctgggctccgttccaacttctg

SEQ ID NO: 25844 - DNA, 122 bp, Homo sapiens
acagcaggaagtgcaatttgtttacagatacctacagatagttccccagaatgtctaatacgccaatggtgctttgcccaagcagagttctacaacatggtcctgggttataaaaagaaata

SEQ ID NO: 25845 - DNA, 122 bp, Homo sapiens
ttaatatcaatttcaatgaactagagaccgctgtagggaggttgtgggaactgttcagaacggcttaatctgggaggacacgacttccactgagaatgcatgcgctgaacgacaattcgttt

SEQ ID NO: 25846 - DNA, 122 bp, Homo sapiens
ggtgtaggatataatctcctggtgtgccggtttttaaccctgtcagaaaagcacagtattcgggtgggagtgacctgattttctaggtgccgtctgtctcccctttctttgactaggaaagg

SEQ ID NO: 25847 - DNA, 122 bp, Homo sapiens
gggactccaggcccacccagcaagctaattggctgaggccctcggctggggaccaatcaccggctctgagaaagttcggcagtggccaccacatctggttctcgttaacttttctaaggcag

SEQ ID NO: 25848 - DNA, 122 bp, Homo sapiens
cgaccccaggcggcccgacaggcaccatggccacaacctcatggccttggacttaggcttcgaccacaacgcgccgccgccttgtagggtggcaacgcgcctcttggccccgggggtgcaag

SEQ ID NO: 25849 - DNA, 122 bp, Homo sapiens
gcgtccctgtgctgaggccgctggcgtgggcgcctgtcctggagcccggggtattggcagcgcccagggggagcccagcgacccattgtggctccacatcccacaggttcaccggagacaag

SEQ ID NO: 25850 - DNA, 122 bp, Homo sapiens
gcgctcatactggcaggtcccaggagcacgtggcgggttgggatgcaccgtgtgggcagccggcccaggcccaggagcagtttcttcccccggaatcaagtcatagcctctccatccagctt

SEQ ID NO: 25851 - DNA, 122 bp, Homo sapiens
acaggcattgaaactgattttgtccagttcttgattcactgtgagcaattaatggcaaaacgaatccaggaggcactttttgatttggggtgcttggttttttaagggctagagtagcttag

SEQ ID NO: 25852 - DNA, 122 bp, Homo sapiens
catcggagccggccttcagcttcgattaggggagatgggacatgacaggtgcgatcaatacgcagccgttctataaagtgtcaagtaatgaatcaatttcgactaaattttccatttttcag

SEQ ID NO: 25853 - DNA, 122 bp, Homo sapiens
tgcggatgggtcccaccgtgtgcatgctggtggttgtgatgacagaggggccttgggtgacgggagtcaggggggcggttggggtcgttggagtatgaggtaagctctgtggagaagcctcc

SEQ ID NO: 25854 - DNA, 122 bp, Homo sapiens
tacaaatcttaggggagaattagtgcttgtgcattaaaatcaaatcatcttgcagcacaccgagaaaaaggttagatttttaaaataatttcaaagtcatgaaaagagcaaatatgctccac

SEQ ID NO: 25855 - DNA, 122 bp, Homo sapiens
atggcaggactgcccgagcccaggaccccggccgtccagggaggccggagcctggagggccgtgtagacccatgggaccatgccccactgtggtattttcccctaagtcatcctcaaaccat

SEQ ID NO: 25856 - DNA, 122 bp, Homo sapiens
gtaatgaagtaaacctacatggactaactagaaaacaatgcagacagaaaattctacacccgttctcagagatttattactgtgcataggtgtttacagaatttagaaaatgaaacaaaaat

SEQ ID NO: 25857 - DNA, 122 bp, Homo sapiens
cggaaaagaccccaggaagcgagcccactcctccccactgctcagcaacaccgcctacgacgttctcagtagccgaatccctttccaggcgcatgcgcccccgaggtgggcgagcgccggtg

SEQ ID NO: 25858 - DNA, 122 bp, Homo sapiens
aggggcggggaggcccactccacccgggagggggttgtggtgaggtgtgaatgcaggaaccggtgaggatttgccaccaccaagtcagttgtccacgtggaccacctgagaacttgggtttt

SEQ ID NO: 25859 - DNA, 122 bp, Homo sapiens
ccccctctacggtgtccttgcaaagtgtggcagtcactacaggtttgaggaaggctctgtcgctgctctggccgtaggcacagcggactctggaggacactggtttgtactgcatgcgtgtg

SEQ ID NO: 25860 - DNA, 122 bp, Homo sapiens
gacgggaggtggaggccgcggggagtcacttcttgtctcccgcagagtcgcaggaggcggcgccgttatcaggtagggcgcccaggacgcgcgattcctgccagggccgttgggccgaggtg

SEQ ID NO: 25861 - DNA, 122 bp, Homo sapiens
taggtggctggcgcggggagccggggttgtgaggggtgatgtcctcaggcggcggcgctgcggggtgcggcgaggacaccggtggggtgagagcaccggcggggcagcagcgggggccgcag

SEQ ID NO: 25862 - DNA, 122 bp, Homo sapiens
aggccagctgtgagggcatcccgagagcactcaccagaagcagacgtggaacagagctggcgtggagctggcttctggggtttgcagccagtgttttcctctttacattggatggacagcaa

SEQ ID NO: 25863 - DNA, 122 bp, Homo sapiens
ggttagcacgatattattactgatctgcctgtcgggaatatatagtcatgcattgcttaacgatggagataccttccaagacaagaaatgcatcattaggcaatcttatcatgatgcaaaca

SEQ ID NO: 25864 - DNA, 122 bp, Homo sapiens
tggcctttaaaattacaggactccttgctcctctttttgagtggaagttcaacgtaataacgatttgttgagcaccacatatgtgcaaagcacttgatagatctaagagggatgaaagagga

SEQ ID NO: 25865 - DNA, 122 bp, Homo sapiens
cttgcccaacaaagtgcttagcttttcttctccttaacagaggaaacattacaactacagcgtcgcctttttaaatgacaaaattctctagcttttctttgacatgaggaatgtagaaggag

SEQ ID NO: 25866 - DNA, 122 bp, Homo sapiens
cccgcgggagcaggcgcagaatgagatgcacgagcgccaccgccgccgccgcacaccccccgcccccccggggtggaagccagaacctgcgtccccagctcccccaggcccgcccacagggc

SEQ ID NO: 25867 - DNA, 122 bp, Homo sapiens
taaatggaagcttgctatgattttaaccaacacagtaactccaggccagaaaaggctaagcgagttcttctaagccatacaggttttagtggctgaacaaagactaaaatttttaaccctgt

SEQ ID NO: 25868 - DNA, 122 bp, Homo sapiens
ctttccttgcaaccttatcataatgtgccaattgcccatagaggtggttctattttactgcggttgcttcaggaaatctaaccacttggctcttaacttcctgtggttgggaaataatcttt

SEQ ID NO: 25869 - DNA, 122 bp, Homo sapiens
tgcatacactggccaggtaaaggcagcttctactcaccaggcaagtggccagctcaccttcggatttgccaaagaaatctgggtcctgccccatacttgttggcttggcaggcttttcaaaa

SEQ ID NO: 25870 - DNA, 122 bp, Homo sapiens
agacactgtagctctcatttcccgttggagtaaagacacagatgctcttttccatggtctcgtgttttccttgctttcagcaaggcaggtttctggctgactgggcctgtgtcctcctccgt

SEQ ID NO: 25871 - DNA, 122 bp, Homo sapiens
actccgcgggcgccgccattgttgggctgtcagggcgcatgtgcggggagggcgcactcccggaggccccgcccattctcggaggccccgcccattctcggaggccccgcctctccctggcc

SEQ ID NO: 25872 - DNA, 122 bp, Homo sapiens
gcacggctctctgccgggccagctccaggacccgtgccttctcctcatccaacgttgtcccgtagcgtgtgttcaagcacagtgccccgtactggagctggatgtctgtgtagcgtctagtc

SEQ ID NO: 25873 - DNA, 122 bp, Homo sapiens
agggttttttttgtttgatttgtttgggtttttggttgtgtgtatgtatgcatgtgtgtgcgtgcctgggagaggcaaaaaaaaaaagttgtaatgagtaaaatgacagtttatgaagccta

SEQ ID NO: 25874 - DNA, 122 bp, Homo sapiens
aacagttttctaaagtatttacatcagtttacacttccaccagtagtgtgccagaggtcccgttgttctcaatctcctgtattgatttccgtcatttctatttttctttttctttctttttt

SEQ ID NO: 25875 - DNA, 122 bp, Homo sapiens
cctcaccaaacaccaggggctgggtgcagcccggctgttgcccctggggcgggccaggcccgctttcctcaccctgctgctcttgggacgcccttggctgcagctttgtctgctctgattgc

SEQ ID NO: 25876 - DNA, 122 bp, Homo sapiens
ggctgccgagggcaggtgcgtggctgatccctgaccgcgccccacctttcattctccacccggtttctcagcagctcagagatgcggccacaaggcgccctcgctccccgccaccctcaccc

SEQ ID NO: 25877 - DNA, 122 bp, Homo sapiens
acatagttttattacacaacagataactagaaaagaaatgtgtggtatctgcaacaggatcgggcagtgaaatggatgcatgaagggcctcagatggacttcttaatagaggttgaaagaac

SEQ ID NO: 25878 - DNA, 122 bp, Homo sapiens
acaacaccagcgcgggttctccaagaatgaacagaagccaccattggcgggcagcaggggcgggaggcggagcactgtgaccaggaccctgcgggttttgtggcatgtccaggtgggggctg

SEQ ID NO: 25879 - DNA, 122 bp, Homo sapiens
actaagaagaaagcctgggctgtggcgttctggggaagtgaatagtacggccgccgggcgcgtcgccccaggaaccagaaggctttttgccgctattagtgcagaatgacttccggcaagtc

SEQ ID NO: 25880 - DNA, 122 bp, Homo sapiens
ttatttatttgatttcattctcaatgttacttctctaggaatgattcaccctcattcaaacgtttcttcatgtaaaagtgctaaagaatataggaagctttatttgagctaagaattatatt

SEQ ID NO: 25881 - DNA, 122 bp, Homo sapiens
cccaagcctttatatcaaacatcttcacagcagtcttatgaaaactggggctgggggaggcgggtggagaacacagaggaaaaaaacaggagaaaagactatgtggttaatcaaattttgaa

SEQ ID NO: 25882 - DNA, 122 bp, Homo sapiens
ccctcccccgtctggccgcaatgagaggcagatggcggggaccgagccgggggcggcggccgccgctcgcacgaatccgcgctgcccgctgccccccttcccccggctgggcccagcacgca

SEQ ID NO: 25883 - DNA, 122 bp, Homo sapiens
cgcggcggctccgcggaatgacccgtagtaacctcgccccgccccgggccgccagcgccgcgctccccggcccgaattcgataggcccagccccgcacgcgccaccgctcgcgggccaatgg

SEQ ID NO: 25884 - DNA, 122 bp, Homo sapiens
ccatgaaatttatccatggacctccagtaatgaaccccttatctagcctgatgattttgccgagtaatgggtaaaagaaagtaaagtggatcttagcctccttactctaagaaatggacaaa

SEQ ID NO: 25885 - DNA, 122 bp, Homo sapiens
gagggggcagctccatctgcagctcgctttccaatagcgcgaggctgtgctttgctgtgacgtggtcgccgtgccatgctgagcacacgatggctacaggtcacaggtgactggtcctccat

SEQ ID NO: 25886 - DNA, 122 bp, Homo sapiens
gggaggcgggggtagggggcggaacaactgggaaagatactgacaactaaccctggagcccgcgagactccgaatctagtcaaattcctggcagccaatcgggagaagggaggaatctggtt

SEQ ID NO: 25887 - DNA, 122 bp, Homo sapiens
ccactctctatgaaagagtgttcccgagcatcttattttaaccagaaccagtccctggggcgaggtggtatctcaaaaatctgatcaggtgtgacagagaacagggctctgggcagccagcc

SEQ ID NO: 25888 - DNA, 122 bp, Homo sapiens
gcctcctgcttgggcctccactctccacgctgtcctactccggcaggctgagcttttccccgaccccaggcctgtggagtgcagcagtcaaagctttattgcccacacactggagccgctct

SEQ ID NO: 25889 - DNA, 122 bp, Homo sapiens
actaatgctaataatactaaacacataaaaagatttcacaccaaacacgtatatagtgcccggtagagaattctgcacttattaaaagctgagtatctatatttatttatcgatctatatca

SEQ ID NO: 25890 - DNA, 122 bp, Homo sapiens
tcatgcagcctctttagctcctcgtcgctaaggaagagctctgtgtgaagggagaagtgtcggccacgtgaaaaacaagaagaatcagtttcgtggcgtcaatgagaatttcacagccccac

SEQ ID NO: 25891 - DNA, 122 bp, Homo sapiens
aagaaggcacagacttcattatccagaagccagtggtgctcacgtctgcattccaggagccgcctacatgagtccctccaagacttccaagtcccacttgatttttttcattgtatccctct

SEQ ID NO: 25892 - DNA, 122 bp, Homo sapiens
cacgtgttctcaatgatcaacacacagtcactagggacatgaacacattgtggcataaaccgtgtccgggtgtgaatgtccacagactccaatgtccctgtatacactcaggtgcacagccc

SEQ ID NO: 25893 - DNA, 122 bp, Homo sapiens
gatggggaatcgtggggcggaattttcatgagctgcactctttgtcagcgctcttgtagccggctatattaagatagatgcccaatgatatccctcattgttctgtcgcttatattgatgtt

SEQ ID NO: 25894 - DNA, 122 bp, Homo sapiens
aagccggatcctctccgttcccttggagtgagcaagcgggacagttctgcggaaagtttccgcccccaatcccccagccctgcgcccggactgaagcggcggcccccacctccagcatcctc

SEQ ID NO: 25895 - DNA, 122 bp, Homo sapiens
cccttttatactgtcctgatggagagcagggaggaaccctgcccctcggagagggggagccggccgcccgtgccccagccaatcagagctgcctggcccggcccccaatttgggagttggaa

SEQ ID NO: 25896 - DNA, 122 bp, Homo sapiens
tctcttgagccatttttcttttacagcatgtgatattagagaataatttacagtttatcacgagatacctttgttaggctgtgtgaaaagaaagtttaaagcccatattttgtgtaaaaaga

SEQ ID NO: 25897 - DNA, 122 bp, Homo sapiens
tggatggttggatctggatagaaatagggcctcgtactgtgtttagttccctggatccctcgtaacctatttccttttatcagcccaaaagtagctttaatctattctcctttggcagagat

SEQ ID NO: 25898 - DNA, 122 bp, Homo sapiens
cagcactccccgtctgccttcacattgctcacagggagcgtaaaccaatccagcactccccgtccaccttcacgtggctcacagggagcgtaaaccaatccactgatttcgaccactgatgc

SEQ ID NO: 25899 - DNA, 122 bp, Homo sapiens
accccaggcaccctcgtctctcagccggacgacggctgagacaatggccgcagcacccaccgccctccccaggtctcagtcggtcccagacaagggccgcagctcaccgccctctcgcctct

SEQ ID NO: 25900 - DNA, 122 bp, Homo sapiens
atctgccgaccccgtgtgggtgtgcccgcctcctcaccctgacagcagggtgttgccacgcgtgtaaatccctgccgtctggcaggtggcctgggcctcgagcaagctggtgtcatggattg

SEQ ID NO: 25901 - DNA, 122 bp, Homo sapiens
gttccagtgtcatcgtgtggaaaagagtccctgcctggctgagaaactgtcacaggcagccgggccacttcccagcatgacccacaagcccgatggtgcccctcgaatggttaagggacccg

SEQ ID NO: 25902 - DNA, 122 bp, Homo sapiens
ttgggaaaaggcttggtgagagcagcgagaagaataggtctaatttcttgagccagtgtgcggaggtgcttcccagcccaggctaagccagatcactcagccagccgctggctgcctttaca

SEQ ID NO: 25903 - DNA, 122 bp, Homo sapiens
cctcaatctccacacgcctgcctcctccactgcctctcttcaggcccatccaaaggcccccgagtgctgcctcctggcctctgtccccgataaatcctgtgccctctacctcatgtgggggc

SEQ ID NO: 25904 - DNA, 122 bp, Homo sapiens
gtgttgtaagcgcaggtgtgtgtggtgtgtggtgtgtggtgagtgtacagtgtggtgtatcggtacatgtatttggtacatgtgtgtagtatggtgtatgtggtgcatgagtgtgagtgtat

SEQ ID NO: 25905 - DNA, 122 bp, Homo sapiens
gggggaggccagacaaggctggcagtcagaaggagctcactgaagagcagccactgtggtcgtcagcgagggcagctggactccggcacaatcctgagacactgtgaccgcggaggttttct

SEQ ID NO: 25906 - DNA, 122 bp, Homo sapiens
cctagcccggcaaatctgcccggcagtgcggggaggggctgctgggagtcctggtgccgccggctgcacttctgtgtgtctttcaggaagccacagggcagggggcgtctgtgcagagaagc

SEQ ID NO: 25907 - DNA, 122 bp, Homo sapiens
cagaggaggagcggggccctcgggcagctggaagggcatcctgaaaagacgcctgcctgccgccgttctcctggcagcagggcgcgctgggaagcaccaggcaggaagtgaagaatttccgg

SEQ ID NO: 25908 - DNA, 122 bp, Homo sapiens
ccacgctcccttcccctcgccacagtggtcccaggcgggagggagcggacacgggctttgcggcacaacctggtccttgttctctggctgggctagggtcacctggagctggtgcccgtgat

SEQ ID NO: 25909 - DNA, 122 bp, Homo sapiens
ccaatgtatctagatgccttttaaatacaggcagaccatgaggtttggacactgtgtgcccgccctgctgtctttgatttggaaaagactgctgggccaggtgcagtggctcacgcctgtaa

SEQ ID NO: 25910 - DNA, 122 bp, Homo sapiens
ctccgtctcaaaaaaaaaaaaaaaaaaatgaaggctcactgctccctccccaggaggtgccgcaaccttggccaatacagccccagagttagacaagcagacagagaaagtgtgcagggctg

SEQ ID NO: 25911 - DNA, 122 bp, Homo sapiens
tagcaggagagcagcatttccgccgggcatgtccatatccaatggggcccatgggagaggcgtagtcttctgggtcttgcccagactcaacatggcggctacacgtcgcctgtcagtctgtg

SEQ ID NO: 25912 - DNA, 122 bp, Homo sapiens
ttccggtccacccccctccttccagcctgtagcttcttgttgccgtggagatggtggccccgccccgatgcagcacctgcccccccattggctgcagtggtgactgtggggctgagggggga

SEQ ID NO: 25913 - DNA, 122 bp, Homo sapiens
ggcagtggctgctgcttctacaagagaccaaaccctcatacagatgcagccggggcacctcggtggcatccaagtccccagttgagagttctgcgtgttttccgtgttctgatttgactctg

SEQ ID NO: 25914 - DNA, 122 bp, Homo sapiens
gcagcagatccgagataaggtcagctccgcccgcccgcccgtcctggggagggccacaagcgggtaaaaccggtccagctaaagcccctgctggggctcccctggatcccagctctcacctt

SEQ ID NO: 25915 - DNA, 122 bp, Homo sapiens
ttctttcgtataaactacagtactgaacacagagcccaggcgcatagcagaggcttctaccgattgattcacttactgtccaggacaactggctgggtcagttctcagcacatagcttctct

SEQ ID NO: 25916 - DNA, 122 bp, Homo sapiens
agaagcagggtcttgagatgtaggaaaggagaatgaaccccacgcgggaagaggacaggccgccctgactttggtccactcagccagggggtgagcaccacctgtcttggtgaatgactctg

SEQ ID NO: 25917 - DNA, 122 bp, Homo sapiens
gtctgtttctagtttcccatccagcctgatggggcgtctacagtttttaccacaaggtgtcgctgttgaacagattctggtgcagtctagtgcatagctgtccacttctagagtgatcactt

SEQ ID NO: 25918 - DNA, 122 bp, Homo sapiens
ccttggtttcattttggtggtgtccgggggaggccaagccacccactcgctccccacagccgtgtgcgtcaaaggccttgcactccccaaggcaatcgccaaagctcaggaaacactccatg

SEQ ID NO: 25919 - DNA, 122 bp, Homo sapiens
cgcgggccaggggcagcttgttctgcaggtctagcacagccttgcccatcttggtggagccggcattcttggctttgtgacactcgtcgaacacgatctgaggcacacgtgggttaaggagt

SEQ ID NO: 25920 - DNA, 122 bp, Homo sapiens
agggaggcaacagccattgggagccaacacagagtcacgcagcgcccaaaatacaaacaccgcagcggccagaaatcccgccacctttctcgttctcccaggctgtcctgtcgaggttccct

SEQ ID NO: 25921 - DNA, 122 bp, Homo sapiens
aagataagaaaacatctggttaggagatgccagagggcactgggctcccccacgtcatgacgctttgctcttcagtggtttaaaaagcaagaaagaggattgcggagagaagtcagggcaaa

SEQ ID NO: 25922 - DNA, 122 bp, Homo sapiens
atgagacactaagtctagttgttagaatggtccaatatgagcatcatttctccagaactccggcgatattttttgggtgtatatgaattggggtgccttgtcctacaaagtgaaaagatagt

SEQ ID NO: 25923 - DNA, 122 bp, Homo sapiens
attttgacctctggaaaagctcccaaatggaaagtgctggggttgaggacatcttcctaacgacaataaaattagcaaaggagaaccaccaaagtgccattagcccactagccatttaccag

SEQ ID NO: 25924 - DNA, 122 bp, Homo sapiens
tgcccagcgggctcatccggacggggccgaccttggcacctgcaggagaaaccctggactcgccagtgttaccggagacgggagagcgatggggagggcgggagaggaatacagctgacaga

SEQ ID NO: 25925 - DNA, 122 bp, Homo sapiens
gatggccactacaatgctgatgtcaaactggtcagtgggttcagtggaaggtttggctaccgcgggaacaccccagctctccgtcggagcacgtctgtctttggagaggtcacccacttccc

SEQ ID NO: 25926 - DNA, 122 bp, Homo sapiens
cattcattcaacaaatacatatcaagtaccgtgctcctgctgaaaatcaccctcccgaaccggagctctggggagcacaggagcacccagaagaggtctggcgcgtggtaagtgctcagtta

SEQ ID NO: 25927 - DNA, 122 bp, Homo sapiens
tgacttatcctgatacataggaaaagggttaagcaagaatcatctgtttgagatagctgacgcggaaggaaaaggatgtgaagtttaattatggacacatttcagttcaaagtgctaaacag

SEQ ID NO: 25928 - DNA, 122 bp, Homo sapiens
cttgaactcctgacctcatgatccgcccacctcggcctcccaaagtgctgggattacaggcgtgagccaccgcgcccagcgagagtcctctttatggctgcaaaactcctgatgtacagact

SEQ ID NO: 25929 - DNA, 122 bp, Homo sapiens
gcttcggtcctcgcccgggcatgcaaaagcgcagcggaggaggtagtggcggccaacgggcgggtggctggcagcccggcccctctgtccgggagagttgcatagacatggccgggagagag

SEQ ID NO: 25930 - DNA, 122 bp, Homo sapiens
cgcgcctacacgggccgagagttcgacgacctgcccctggctgaacagcgggaagcctgccgacgtgcctgctgcttcgcccgtgtggagccctcgcacaagtccaagattgtggagtacct

SEQ ID NO: 25931 - DNA, 122 bp, Homo sapiens
atattttgggaggaggtaagacagccctggtggcaataagggagtagctgtctctatatacgctgaagactagggaggataagtgactcattcagggtcataaaacaaatgagtgaggcact

SEQ ID NO: 25932 - DNA, 122 bp, Homo sapiens
catatctgatgcttattcaaccactggcagtgatgcagtgcataaaaaggtttcctatgacgttgttcctctcccaaagctggaattactccccaaacgcagaaagcaaaaggcatgtgggg

SEQ ID NO: 25933 - DNA, 122 bp, Homo sapiens
gaaaagaaggagacattatcaagatctctggcgtccactgaaggccctaatacccggccgcgatgaaccttccgaaaaggagccgcaggaaccccttttagattttatctaataaactgata

SEQ ID NO: 25934 - DNA, 122 bp, Homo sapiens
gtggacggactgtaattgatagattgattatggaattaaattgggtacagcttcaaatcccgtcttctctgtggcactgggggttagagggggcactacaggctatgaatgtgggaaaagag

SEQ ID NO: 25935 - DNA, 122 bp, Homo sapiens
ttcctccgcgttgcttccggacggcgccgaccgccggagcccaagtgacgcggagctcgtcgcatttgttataaatgtagtaaggcaggtccaagcacttacaagttttttgtagttgttac

SEQ ID NO: 25936 - DNA, 122 bp, Homo sapiens
ggatattagctctttcattctctcaagggtcagatgtaatcttccaacatctgactttcgcgtcacccatttaggaagagacgcggtccctttaaggccctggaaagggtctaagtgttggt

SEQ ID NO: 25937 - DNA, 122 bp, Homo sapiens
aggggcggagcttggcttcagttaccgcgactggagccgattttatacctaagatggctgcgcccacagccactcccattccaagatggccgtaccaacatggcagcccccacgtcacggag

SEQ ID NO: 25938 - DNA, 122 bp, Homo sapiens
gttcaaattgagcaaataatactattaaatgatagggaatgaggtacaaattacagtctccgagtttccatgagaaactgtgagaaatgtcctaagtcagatgcaggttttatctgggtgaa

SEQ ID NO: 25939 - DNA, 122 bp, Homo sapiens
cagagccatctgggggatggcaaagacttgccctaacccatctcacatgtaggactgacccggccccattaagagcctgtggtgggcggcccgggagagtgggggccagggcagcccaaagg

SEQ ID NO: 25940 - DNA, 122 bp, Homo sapiens
ggcggcggcatggagttccctgagcacggcggacggctgctgggccgcctgagacagcagcgcgagctgggcttcctatgcgactgcaccgtgctggtgggcgacgcgcgcttcccggccca

SEQ ID NO: 25941 - DNA, 122 bp, Homo sapiens
ggtgcctcggcccaggggaggctaccccgtggggggctggcatggggatgggcctcatcccgcgctccccacagccctgaacccggcgcacaatgggcgggtgtgcagcacctggggtgact

SEQ ID NO: 25942 - DNA, 122 bp, Homo sapiens
ctcttggagccagcgtggcgggcctggcggctcccgggtggtgagagagcggtccgggaacgatgaaggcctcgcagtgctgctgctgtctcagccacctcttggcttccgtcctcctcctg

SEQ ID NO: 25943 - DNA, 122 bp, Homo sapiens
tatgtcaattaaaaaaatttcaccaaattgagtttcaaatatctgattggcttttattagcgattcatgaactgggcagcatccagtctacaaagtagaaagaaactctgatgagctaaaca

SEQ ID NO: 25944 - DNA, 122 bp, Homo sapiens
cgaggcctgaggctgggtcacagagtgggttaggttcagggtcaagactagaccccacatcgcttggggaaaggaaaggccacggtgtgagagggagttggcggggagggaatggctgaaat

SEQ ID NO: 25945 - DNA, 122 bp, Homo sapiens
ggcggagctagaaagttgagaggccgaagtctgtcagctctctcaagccccgcccaactgcgtttgtaagcgcgcatgcgtcctgcggagggtcactgactagtttgagggctgaaccccgg

SEQ ID NO: 25946 - DNA, 122 bp, Homo sapiens
aacatagacagatgcctgttcagaatacaaatgttgctgggcttgtttttctctgaggagcgctccatcccagtgagttgtaagaggaatgcacttggcagtctgtcatgtaacatggctgg

SEQ ID NO: 25947 - DNA, 122 bp, Homo sapiens
cagattatgtcactcaataaaccagaaagcagacagaaatataaatccctgtttcactcccgcttttgacatcttgacatgagacaaatggtcatttaatccatggaaacactccaagtcat

SEQ ID NO: 25948 - DNA, 122 bp, Homo sapiens
tttttttttgagacaggatctcgctctgttgccctgacagagtggagtggagtgcagtggcgtgatcttggctcactacagcctcaaactcctaggctcaagtgatgtgtcccacctcagcc

SEQ ID NO: 25949 - DNA, 122 bp, Homo sapiens
catcttttttattcgggccagtatgcaatgaatcagaaaactacaactcccaaagtgccccggggcggcgaggggccgcaacggtgacgactgtggcagagaaggcccggaggggctctgcg

SEQ ID NO: 25950 - DNA, 122 bp, Homo sapiens
atattttctcctaattaacactcccaccaatggtgtatctgagagtagaattccacattccgtctctaacaatgcatattataatcctctctttagtctttgccaatttggtagattaaaaa

SEQ ID NO: 25951 - DNA, 122 bp, Homo sapiens
aatttaactaattccctctgcagcaaccctatcaccaactaagttcacattctgaggcaccggggatgaggacctcaacataggaatctggggggacacaacacaacaggtgtgccgtgacc

SEQ ID NO: 25952 - DNA, 122 bp, Homo sapiens
cgaactttttagcactcgtcaaaggacagtggcccgtcagtgtgcttgtcacggggcggccgcaggacctgcgtctggaaccgggcgggcgcccgggacggacaatgccgcttggcggtcgg

SEQ ID NO: 25953 - DNA, 122 bp, Homo sapiens
gaaggcagtggcgcagggagcggtgggagcccgggtctgcagggctcaaggtggcgacggcgaagcggtctgccccacccgccacccccacccgcaggatgcgcatcgccagtgcagcccgg

SEQ ID NO: 25954 - DNA, 122 bp, Homo sapiens
cttgtgctaaacagcttcttagggcagagagcggaggctcgatcaggcttcgtccaagagcgtggattccgttcctactaagtgccggccacactgtgcctggcagctgcagcccgcgggat

SEQ ID NO: 25955 - DNA, 122 bp, Homo sapiens
atccacctgccttggcctcccacagtgctgggattacaggcgtgagccactgcgcccggccgagtattacttttaagtaagacacaaggaaaggccggtggctcacgtgtgtaatctcagca

SEQ ID NO: 25956 - DNA, 122 bp, Homo sapiens
ggcgacgaagcggagagctgtgtccagactccggagagaaactccggctccgcggggcggcgcggggcggcgcggggcccggagctgcccaactccgccgcctcgggaaggcggcttcgggc

SEQ ID NO: 25957 - DNA, 122 bp, Homo sapiens
gtgtgcatggtgcggggaggtggtgccgaataccttgcacaaacgacacctgttcctcgacgctaaagtttcctgaggcctcccctgtgtcggatgccgcgggtccccagggaacacggcgt

SEQ ID NO: 25958 - DNA, 122 bp, Homo sapiens
aggctgggctcgggcagggtcgcaggggcgggggtggcaggggagcgggtggcagccccgcgggtcacagcgccgccgccgcccatgctgctgcccctagcctgcctgcacggccgcgtcgc

SEQ ID NO: 25959 - DNA, 122 bp, Homo sapiens
gtagcattccacatgcccaccagctgggtgtaagagttctaggcagggcgcggcggctcacgcctgtaaccccagcactttgggaggccgaggtgggcagatcacaaggttaggagatcaag

SEQ ID NO: 25960 - DNA, 122 bp, Homo sapiens
agttgggggcccggcctagagagctagccctaaactgctgctacactaaaagctaataatcgttcctgcgctacctaaaggtcagggaagggatctcagacaaacgaggcgacaacagaggg

SEQ ID NO: 25961 - DNA, 122 bp, Homo sapiens
aggtgatccacctgcctcggcctcccaaagtgctgggattacaggcgtgagccaccgcgccggccatagtgcacattctcacatgcgctgcatggccacagggaaaggcataagctttcttg

SEQ ID NO: 25962 - DNA, 122 bp, Homo sapiens
tgccccacagccgcgtgcgtctgacgtcaaggcaggggcgggatccggttggaattttggcgggttcagctgtgaacgaagaaggcgtcccggcatcgggtgaggagcgcgggccccgggcg

SEQ ID NO: 25963 - DNA, 122 bp, Homo sapiens
aagctgagaccgaggaaaatctgtacaaacaaaccttgttaagctaacccttatcttcctcgttacttctctgcccaattacctactctgcccaagctcctctgccttgtcacagtttcaca

SEQ ID NO: 25964 - DNA, 122 bp, Homo sapiens
aagttccctaagctatgtatgcctacctgtccccttcctgacttttcggttccccaaacccgaggctggacctacctttaatcagatccacgatgcgcagctcgaagggaatgtcgttcttc

SEQ ID NO: 25965 - DNA, 122 bp, Homo sapiens
cttagttgtgataccacataagagggattgctatctgatagtgcaaatcaatcctccaaacgccttgttgtttttcaaatttgtcttcaaattcttgagtttcactctttcttattaaagtt

SEQ ID NO: 25966 - DNA, 122 bp, Homo sapiens
tgctggagcattttaaagcaaatatcagacataccctttcacgcctcacacttcaacatgcggctctaaaaataaggacagtgaagaggaattttgagtcagttattgtaaaatatatgaaa

SEQ ID NO: 25967 - DNA, 122 bp, Homo sapiens
aatcttgtgggatgaagtgtgatttaggagtctgaaagattgtggagagctatctatcttcgggaggttggaacatagacaaaagcaatgagattccagggacatgtcttcagtaagctaga

SEQ ID NO: 25968 - DNA, 122 bp, Homo sapiens
ggggctgaacgctgaggtcagtggtcttgaggtccccctgcatggaggggaggctcacgtcggcctccaccttcaacgcagacacatccgctgaggcctcgatggacttgccaagggcagac

SEQ ID NO: 25969 - DNA, 122 bp, Homo sapiens
cgtattcttttcatgtccccaaactggtaggagcgaagagtgtcggggcgttattggagccgtttctcagcgctccacagtgcacaccaagagggcaggtgtcctcgcactcggtttctaaa

SEQ ID NO: 25970 - DNA, 122 bp, Homo sapiens
tagtccttaaaattccttcgagatgagttggtatttatttccctgcaaagcttatgtaaccgtaagaggatactggggctgccaaagctgtctgtggtttggatggggctcacagcggtttc

SEQ ID NO: 25971 - DNA, 122 bp, Homo sapiens
gggctggggtaggggcttggtaaatggcagtctagaaagccggcaggactgccaacttctcgagcagtgtttgctggaagggaagaaagctggcagcctaagccgtgggagggttccagtcg

SEQ ID NO: 25972 - DNA, 122 bp, Homo sapiens
tatatttcatgtcccaagaaaatgctcccaaatcaatttattcttgcttattcaggctcacgttttggcccccttggtcaagctcctgaagaatctcattccaagagtatgtatctggctct

SEQ ID NO: 25973 - DNA, 122 bp, Homo sapiens
ttcttggttttgtaaagtatttcttcctctggctccacttaggtttctttcctctttgcacgtagagacagtaattcacagctaaagtctggcgacagacaaggtgggtgatttcctcctgg

SEQ ID NO: 25974 - DNA, 122 bp, Homo sapiens
tcagggaaaacgtgtgagaaatgggggagaggaaacctgactccaaataaaccaagaacacggcagaaattaaggagctcgcaaaagctgtgagagggcagcgagttgccagttcatataaa

SEQ ID NO: 25975 - DNA, 122 bp, Homo sapiens
tcggcgcgtaacgagggggtgcgtgtgaggtcatcgcgcgggcgggcgggcggggtctggcggtttgaacgagacgaagacggaaccggagccggttgcgggcagtggacgcggttctgccg

SEQ ID NO: 25976 - DNA, 122 bp, Homo sapiens
tttataaaggttggtcttggtgccagcagccattgtcattgatgaaactactgggccgggcgcggtggctcatgcctgtaatcccagcactttgggaggccgaggcgggcggatcacgaggt

SEQ ID NO: 25977 - DNA, 122 bp, Homo sapiens
cagaaaacgtcaggagggaagcacacagctgcacaggtcgtgccccgaggctcctgctgccggcacctcccccagcctggactttggctgtgtttgtagccctgtcccagcgctccgggtgg

SEQ ID NO: 25978 - DNA, 122 bp, Homo sapiens
caagactggaggaactacttcagattaaagcaaactaaagagagacacaactaaatgcaacgtgcagtcctggattggacaattggcaaaaagggaacatggagggtggattaaatcgtact

SEQ ID NO: 25979 - DNA, 122 bp, Homo sapiens
cgcaggtagacgtagagcagcggggctcagctctggaagcgcgggatgacttctgggaaccgcacccggggcaggtcacctcgccttggagacagccctgagtcaggtcaggtggcaatcgg

SEQ ID NO: 25980 - DNA, 122 bp, Homo sapiens
tcctaacaccatcacattggaggttaggatttcaacataggatctgggggtagggggacccgaacattcagaccttagcacatggggcaggatgagagatggagctgggccctgccttccag

SEQ ID NO: 25981 - DNA, 122 bp, Homo sapiens
agttcctggggattaggggctctcctgtgcattggcaggtggcccacctgggtccacaagcggctatggaggttcctgtagacctgggggcgggcaacagggctgatggtggtctgggcaaa

SEQ ID NO: 25982 - DNA, 122 bp, Homo sapiens
cgaattcacactggaataaaaccctatacatgcagctactgtgggaaggccttcactgtgcgctgtggccttactagacacgtacgaacacacacgggcgagaagccatacacgtgtaagga

SEQ ID NO: 25983 - DNA, 122 bp, Homo sapiens
gctggtgatcagcagcttcccgataagacctccggagctgggcgagcaggctcaagcatacgcactaagaggcaaggtggcggagtttaaccagtgtatgaccttctaggaagctcagctgc

SEQ ID NO: 25984 - DNA, 122 bp, Homo sapiens
tggttttttccccccatctcacctccgctttttgcccgccgcggctttttgcccccaccccgcctcggctttttgccagccacggctttttgccccccgccgctgcggctttttccccaccg

SEQ ID NO: 25985 - DNA, 122 bp, Homo sapiens
ggcacataaacctaatgcagagacaccttttaattagcaggtcatatggccatttaaatgcgagttgcaatcgacctcataaaaatagccgcagtgttgttttattctgaatcgtcacatga

SEQ ID NO: 25986 - DNA, 122 bp, Homo sapiens
gggaaggagagtaagagtgcggaggacgtgtgcaagaagctcccctcgggatggcgcccacgcacactccgaggcacaagaaactccccctcgggatggcgcccacgcacgctccgaggcac

SEQ ID NO: 25987 - DNA, 122 bp, Homo sapiens
gagcggtagcccagggctggtatgttgagaattccgtttggaaaccagcgttgtgcaaaccggggttaggatgtggaaaactcgccctccttccaaacccagaagccttcgtcttggtttag

SEQ ID NO: 25988 - DNA, 122 bp, Homo sapiens
tccttggagctttctccacagaagtgacttgacacaccgcgctacatctggggaggggggcgggtccgctttccgggagactcaagtctttgctatttgccttttgtttctgggatgccttt

SEQ ID NO: 25989 - DNA, 122 bp, Homo sapiens
gccctcggcgggacaagcagacaccgctcgcgatccaacgccagagaatcgaacgcttgccgactgccgccgcgaccctggcccggaatctccttgcctgcccgctctccttagccgccggg

SEQ ID NO: 25990 - DNA, 122 bp, Homo sapiens
aaaccggcaccacgcactggtggcttagggcggcagcgtgggtcggtcgggcggtacagccgcgtcctctttccctagaaaagggcagaaaagccctcggcttcccccacaggccccatggg

SEQ ID NO: 25991 - DNA, 122 bp, Homo sapiens
ccacagaaatgaggcccagagagaagagggtcaggacggccacacaatttcctccagggccgtccagtgaaaaggccaccatgtcgtttgtgggctcgttattatcctggtctttgaaagag

SEQ ID NO: 25992 - DNA, 122 bp, Homo sapiens
ctggcctgttctctgccccgttgactggtgggggaggtgcccagagctgggcagtagccccgcttggatggtaaacaggacctgcccgctggcctcaccggccgccagcacgaacgcctgcc

SEQ ID NO: 25993 - DNA, 122 bp, Homo sapiens
tcctcggtcagacccgcctgcaggcccaagcgcgccgagtcccaccagcttagccacagtcgctgggcctgaggtggctggaaatgcagttcctccagcacctgccaggatcgaggcagtac

SEQ ID NO: 25994 - DNA, 122 bp, Homo sapiens
gcacctgcgcgagatgcagggcactggctccaggacggcggggcggggcggggcggggcgcggcggggcgagagcgcaaggaggggcggggcgagacggggcaagagagtggggcggggcgg

SEQ ID NO: 25995 - DNA, 122 bp, Homo sapiens
gatactggatggcagctcccacctttgcagaaaccctgtaatgtggatattgtgtggtgtcgtctcacccggacgttccctaagccttggagttaccccttccagcgccctttccggctgtc

SEQ ID NO: 25996 - DNA, 122 bp, Homo sapiens
ttcccggggtgcagctgcttcggggcccctgccaaggctccggcttctgcaggcgggactcgggctcgggccaccaccgcgagcactttcctggccagctccgttcccgccccatcgggccg

SEQ ID NO: 25997 - DNA, 122 bp, Homo sapiens
gccggggctcagtctcctcttctgtggaatggcgataactgtatgtgccgggtgactgcacgtggcgcgcggcgggtggcggggatggcagcggtgcgatcccacgcctccaggaccccacc

SEQ ID NO: 25998 - DNA, 122 bp, Homo sapiens
ggacttgagctgtgccagcagggctgcagaatgggccgtgtcctttaattcctctggacccgtgaaaaaggccgaaactgtgggtttgtgaatcttcttgggccgcttcccaccacggggac

SEQ ID NO: 25999 - DNA, 122 bp, Homo sapiens
tacccacccagcaaccaccagaggtggcagaaacccctgcagacatccttcttgcgcaagcgcagttgtaccatgaatgcggtcgtcctgctgcagaccacgcccaccaagggcggggccac

SEQ ID NO: 26000 - DNA, 122 bp, Homo sapiens
aacgtcaaacacttactatgggtcaaacactgagaagctcttaccatatcatcaaatcctcgggcaataatccttgaggcaagcttgagaaattccattctacagctgaagaaatcaaggtt

SEQ ID NO: 26001 - DNA, 122 bp, Homo sapiens
agccagctggcaggtcctgcaaagaccatctgcctgaacaagatgagagacccaggcggtcggtcacaggcctcaaagtggcaaccactgggcacagccctccagccctccattagtcagga

SEQ ID NO: 26002 - DNA, 122 bp, Homo sapiens
agggcgaggacctcatcttgcacttcctcaaccaggcgagcgaggaggaggggccctcggcgctcttcatctaccgcactatggtgccggaggaggtggaggtggagattggtgagcctcga

SEQ ID NO: 26003 - DNA, 122 bp, Homo sapiens
ggacgggagaatttccaaaggtgccgctcagtgggaaaatccctttgtcagagagtggcccgaggggcgcggaatgcagccgcgcccaccccgccccgcgtcaccgcgtcttccggaagctc

SEQ ID NO: 26004 - DNA, 122 bp, Homo sapiens
gaggaggagcagctgcgcctggaggccaaggcggaggcccaggagggcgagctgctggtgcgggacgagttctctgtgctctgccgggacctctacgccctgtatccgctgctcatccgcta

SEQ ID NO: 26005 - DNA, 122 bp, Homo sapiens
gagacagggtttcaccatattggccaggctggtctcagactcctgacctcgtgattcacccggctctgcctcccaaagtggtaggattacaggactgagccaccgagcccggcctcctatat

SEQ ID NO: 26006 - DNA, 122 bp, Homo sapiens
tgatcctaacttcttgaggctcactaaggtaaagcagtgggccgcggcaccttccccgggcgaactcacccacgtggccccagagggttgagggtgactcccggggatcttctgcttgctgc

SEQ ID NO: 26007 - DNA, 122 bp, Homo sapiens
aggccaactggccagggagcctgaacaccagccagcctggtaccaatggccacgggcaggcgagctaccagtttgcccatccactaggaagcctcagcctctatggcatcacagaaccatgt

SEQ ID NO: 26008 - DNA, 122 bp, Homo sapiens
gctcccgctcccgcttggtcgtcttcccgagttactgacccgaggcgctcccgggcggggcgtgactcagcactcgtgctggtccccgaccccgcggcaacgccccggccaggccccggaaa

SEQ ID NO: 26009 - DNA, 122 bp, Homo sapiens
gaaaactcttaactttgggctttatttaaaacactcgggtttcgaaagccgggtcccctccgcaggccaggaggcctcagtgagcatcctgtgctgcgtggggagggcctggcagctggcgg

SEQ ID NO: 26010 - DNA, 122 bp, Homo sapiens
aaaataatacttggatgcccactccgtgctgggtaccatgctagacacagagaatctaggcgggactgaacaagacaaaaagggtttttgtccacaggaaagctgtatcctagcagagagag

SEQ ID NO: 26011 - DNA, 122 bp, Homo sapiens
gcatattcatggcgaggagcaaaagctctaccccattgaaaggcttcttttcctccctggcgacaaggacacatgcattggtggccaaaagagagaggagacaaaaccgctgcagatggctg

SEQ ID NO: 26012 - DNA, 122 bp, Homo sapiens
ggattgggggaactggtgtgacagggtcctggaaagtggtgagaatgaagcctttgcagccggatagaggcatctgtttcacctgggggccctctgagaagccttcctggaggaggtggcct

SEQ ID NO: 26013 - DNA, 122 bp, Homo sapiens
gtctgagcagcggttgcggaccgagcgaacttggcccaggagcccgggcctagggagaggcgcggcggcggcgggagcgcgaacggctggagctgggtgaggggcagtgccggcgcgggggc

SEQ ID NO: 26014 - DNA, 122 bp, Homo sapiens
gggaaagcaaaaagcctggggcgcatttgtgtacttgagacgcggagcccctctcaccttcggcatcccccggggacccctcttccaccctcagccctcccctcctcttcctctgaagagcc

SEQ ID NO: 26015 - DNA, 122 bp, Homo sapiens
cctggctggggaggctcagatcattcggtccgcaccgccttggcccctgctgcagactcacggccttcctggcctaggctgtggcctgagcctccatcattggcctcctcgcccgctgcctc

SEQ ID NO: 26016 - DNA, 122 bp, Homo sapiens
gtaccaggcaatgaggatacaataaacttacacaattattgtgtaattacaaatgtgaaccgtgtcataagaaagtatagactgccgtgagcacacagtaggggattggtctagtatggggg

SEQ ID NO: 26017 - DNA, 122 bp, Homo sapiens
cagacaaccggctcatctcaggtcctgcagaggtgttcactggtacctccctgtgcagggcgcttccttctgtctctcccatgcccctttcaccctggagctgagccccgccataagccctc

SEQ ID NO: 26018 - DNA, 122 bp, Homo sapiens
gtttccagttttagatgctgttttctctaacatttccccaaatataaagaaaagccgggccggaaccctcaaagggtttgcagtctggagaggtactgagctgggtgtacatggtaatgagg

SEQ ID NO: 26019 - DNA, 122 bp, Homo sapiens
aggtgagacggacgtggtgcgcgttgccttctggggtttgtagttcacgcatggctgggacggggcgggcagggaatcgtgccctgagccctgttttgcctgggctatttgtgggactcaga

SEQ ID NO: 26020 - DNA, 122 bp, Homo sapiens
tgctaatcacgtccagggccccctacagacattgtaagggcccgagacgtcctccccccacgcacagagctcggggcaggcaggagaaaaccccagactccttctcgaagccctcgctcgta

SEQ ID NO: 26021 - DNA, 122 bp, Homo sapiens
aggcgcgggagcgggaggaggaagtcgggaagagggaaggcgggggcgcggcccgcccggcgctcgagttacacccgcccagcccgcctcgagtgacagccccgcgcgcctcgctgggagca

SEQ ID NO: 26022 - DNA, 122 bp, Homo sapiens
tggcggcggccggggttccctgcacggtgaagggtggtgcatcgtgaggagcctcccagccgcctggaacccgcctgacatgcccctcgtggccccggctccttccttccacgttttctgaa

SEQ ID NO: 26023 - DNA, 122 bp, Homo sapiens
ccctctcttctcaaattatccctctgcaaggtaatattaagccgctccttgggtcctctgcgcctgcgcatcgatggccagtcggcgcacggagggtctcctggccaagcttttagctgcgg

SEQ ID NO: 26024 - DNA, 122 bp, Homo sapiens
cggcgccgtccggcggggcctccatcttcctccagccctcggcggcggcgcggccgctcgcgtccaccatctgcagacaaagggctgaggcggcggcccggccgcaacaaaggcgccgccgc

SEQ ID NO: 26025 - DNA, 122 bp, Homo sapiens
aaggggaagctcaggagaaaattttagaaagccgccaggaccctgtagttctaagatctacggggaaacaggcacccaacggctgcgtctcaggtttccgcgggtcactaaagaataacgga

SEQ ID NO: 26026 - DNA, 122 bp, Homo sapiens
gctcgctccatctcagggctgccgggtgcaggcagctcatcagcccccgtgggaaggtcccgctcaatgccgctgtcagtggacagcacagaaacccgggccaactcccggtccggccggag

SEQ ID NO: 26027 - DNA, 122 bp, Homo sapiens
cagaagtgtacagaggcttctggcaacacggattgccgtctacctgatgacctttctcatcgtgacagtggcctgggcagcacacacaaggtgggggcccgggcgcttccagcggtccatag

SEQ ID NO: 26028 - DNA, 122 bp, Homo sapiens
cccaccgcccctcacgcccccgcgagcccaccgccccgacccacccgcgagcccaccggccgctgacgcacctgcgagcccaccgcccctcacgcacccgcgagcccactgcccctgaccca

SEQ ID NO: 26029 - DNA, 122 bp, Homo sapiens
gagagaggcggaggcaagagccagaaaggagacacagaaaaggccaagagtacaagcagccggggacgccagagagggaaaaggtgaaacaaagagataagagaacagaaagacagggctgg

SEQ ID NO: 26030 - DNA, 122 bp, Homo sapiens
ctaatttcttctttctaatggatgcatagtattccacaaagacatataatgtacataactcgtcttccattgatggatatttaagtggtgtcccagttatctgttagcacagaacaaaaccc

SEQ ID NO: 26031 - DNA, 122 bp, Homo sapiens
tactccagcaccttctgctgcgtctccagaatgcgcctcttggccttgtctcggctcttgcgcacggcgatgttgttgcgctcccgcctcagccggtactcaaggctatctttgttcactgc

SEQ ID NO: 26032 - DNA, 122 bp, Homo sapiens
gccctggagaagtgggcaggctgctgcagcatagcccaggtccagcagccatcaggttcccggggtcccgcagccatcgggttcccagggtcccgcagccacagcactgccatccccgtgct

SEQ ID NO: 26033 - DNA, 122 bp, Homo sapiens
aggcagggaagctgatcgacctaagatcataccagaagatggccaggaccttggggatgacggtgaggcagagcacgatgtccagcagggagaggaggctgagcaggtagtacaggggctgg

SEQ ID NO: 26034 - DNA, 122 bp, Homo sapiens
tgaacaaaatgcacaaagtagcaaaagaacaaagcaacgaaaagaaacaaaagaaaaaaccggagtaaggaagagacagatttattgaagcgaaagtacaattcacacagcaggagcgggat

SEQ ID NO: 26035 - DNA, 122 bp, Homo sapiens
ccctgagcgcccgcacttccggggtcaaactgcgattccgcaggagcagacaggaagtctcggcctggccccgcccccagagccgagcaaactaccgccgggaagccggacccgggttgcgc

SEQ ID NO: 26036 - DNA, 122 bp, Homo sapiens
ccgctgccggtgcccagccggcttcatcgacaagacctgcagccgcccggtgaccaactgcgccagcagcccgtgccagaacgggggcacctgcctgcagcacacccaggtgagctacgagt

SEQ ID NO: 26037 - DNA, 122 bp, Homo sapiens
tccttgatagcatgtgttgaaaagggcatcttacctctgtgatcttcccctgatatagtccgtaaggccattttaatcatgagaaaatcgtctggcaaattccaatagcagggcaccctaca

SEQ ID NO: 26038 - DNA, 122 bp, Homo sapiens
gctgcgccggctccgctgcgttttcccaaggttccagggcagtgtgtccccagggctgggcgagccactgcttccattggagacatcttcagagactgcccggacctcagcgtcctcacccg

SEQ ID NO: 26039 - DNA, 122 bp, Homo sapiens
tataaatgattagtctgagagctgtgctatcggcttttgtgcaactgcaggcagctgcttcggaacagagagctctcatcagccaggaattatcgagtctttgcatatgtgcagctggagat

SEQ ID NO: 26040 - DNA, 122 bp, Homo sapiens
gtgatgacacgtttgtgacgtgactgacacgattgaaacatggttggcatgtgtccaacacgtggctgacacaagatctacacatgatcaacacgtgattgtcacgtgattacctgtgtgac

SEQ ID NO: 26041 - DNA, 122 bp, Homo sapiens
gcaccggctcaggcactggggcgtggagaattcatcgggccagttcctcctggggtctcccgtggctgtgctcagagtgtaggctctgatgataaagactgaaaaagagaaaaacggctaaa

SEQ ID NO: 26042 - DNA, 122 bp, Homo sapiens
ggatcttcaggaacgaggagagggtataggaagagagaggggactttagcgagggcccttcgactgtgtaggcaggctgggcttccatctgcaggaagcagcttaacatgagagggagcctc

SEQ ID NO: 26043 - DNA, 122 bp, Homo sapiens
ccaggaagcttccagaatcctcctcaactctctgccctgcaggttgcaagcaggggagcccggccccgggccagccctcctccgcctccccctccactcagggagcgcacgggttctgcgct

SEQ ID NO: 26044 - DNA, 122 bp, Homo sapiens
aaagcaatcatctaacctgagaagccgtagtagttttcacagcttgtaagaaccgcagcccggcgcaagaaacaccacaagcatcctacgaaccccctacatacagaaccatctataagaga

SEQ ID NO: 26045 - DNA, 122 bp, Homo sapiens
tagcctgggagcgcaagcacccccctcgtcagaatgtccttgcagcagagcataaattcccggcccaggaccctcaatgggataacaacagtgcggctcaccgggaaaacatgagagatagg

SEQ ID NO: 26046 - DNA, 122 bp, Homo sapiens
agtcattgactatttatttactgggtagaacaaggctgctgttgacttaattaagggagccgcccagccacccctgggatcttcaaatgactaatggactctccattgccactaactcatct

SEQ ID NO: 26047 - DNA, 122 bp, Homo sapiens
ctctgaaactacacgggataaccttaatgagctcaattctcctcaatggttacttattcccgactaccacttagagcactggggaaaccattaactctttcaaactgttagtgtgcttctga

SEQ ID NO: 26048 - DNA, 122 bp, Homo sapiens
ttcctgccgtgccctgcccgtgccagctcctcggtgctcatcccggctccctgaaatgctcgcttccactcagggccagcgcactccctccacgtccctggccgcagatctgtcctgctttg

SEQ ID NO: 26049 - DNA, 122 bp, Homo sapiens
aaataaattcgattgccaaaattcttgctgttcccagcatattccactttcacctttcagcgcctttgcttatgctgatctgactgtaactgcattcccacccttctccttctgggtaaagg

SEQ ID NO: 26050 - DNA, 122 bp, Homo sapiens
cacaggcccaacgcatccctttccggagggatttaggaagtctcggcgttggtccaggaacgacagtcccaccgcgcctcacatggcgcattacccagcgactccgcttacccacacgtccc

SEQ ID NO: 26051 - DNA, 122 bp, Homo sapiens
gaactccactagaagggagaagccccaaattccaatgctactgtttcaatctaatagttccggaatacaggagataccctttagaactcagtctgcatgtctctgagcccccaccccctgca

SEQ ID NO: 26052 - DNA, 122 bp, Homo sapiens
gccgcttctgtgtgtccccggccaccctggcgcccagagcccccacctcgcccccgcccccggcccggcccccgcctccagccgcccgcccacagccaccgaagggaaaccccaccctcagt

SEQ ID NO: 26053 - DNA, 122 bp, Homo sapiens
gcttcaccatatacatttaatattttgcaataattggccttgttcctgagctgttggattcggggccgtagcactgtctgagaggtttacatttctcacagtgaaccggtctctttttcagc

SEQ ID NO: 26054 - DNA, 122 bp, Homo sapiens
agccactgtccgtctttaaacagaaagtcaaaggagccacgaagcaagcggccgtccgggcgtccgcctccgtccccttccatgttcctcctcttccttcgcttcagcctcttctgttatgt

SEQ ID NO: 26055 - DNA, 122 bp, Homo sapiens
ccagcactgtgctccttgacagccacacccatcctccggtacatgggcgactacccttctcggcaggcctggcccaccctggagctcaccgaccagatcttcacactggccctgcagcaccc

SEQ ID NO: 26056 - DNA, 122 bp, Homo sapiens
cccatcccccactggccaagtgtttcaatgcagtgtgagccactcccttctggcagaggccgacctccaaggctctgttctcccctccccgtgtacatatactcccggtttccctgcccctc

SEQ ID NO: 26057 - DNA, 122 bp, Homo sapiens
gcccgacaggaaacctcccacctggcactgcccccaaccaaagtcatgagggcaaggctccggttcctgccctcacagggtcccagaagcaagggcagtgaggacctggcccacgtccctgg

SEQ ID NO: 26058 - DNA, 122 bp, Homo sapiens
cacctgggctgctggaaggtgtggagtgagggcagctcttcagccagctcctgactataccggtcatttcctcaggatgggccctgctgggccacatggcagatgaccctgactgaaatccc

SEQ ID NO: 26059 - DNA, 122 bp, Homo sapiens
tgcccggcaagtattgatggagtgcctgtaggtgtggagcccggcaggcaggctgcacgccgccctccacccggggacggcttcactggaagccttaaaatttggacctctgtgctcgcgtc

SEQ ID NO: 26060 - DNA, 122 bp, Homo sapiens
aactgaaacagccatgcacgctcctgcctgagggcccccgcgtgtactggtccttctgcccggaacatcgttccctggatatctgcgtggcttgctagcttgcttgctttttcagatttccc

SEQ ID NO: 26061 - DNA, 122 bp, Homo sapiens
agcacttctccattctcccaatgtctcgggcctggtgagtctggatgtgagcgcatcccacggggcccaaggcacagagagagagagaggaacggggtggagggagggaagcgtgtgcaggg

SEQ ID NO: 26062 - DNA, 122 bp, Homo sapiens
ttgattatatttcttgtattgatggcaagttacttcattttgttctgtgcagatagagaacgtcacttttcaccatgaagggttcttctggaggtgttggtttaatgggattgtggaagaga

SEQ ID NO: 26063 - DNA, 122 bp, Homo sapiens
tcagggaccctgccagggcttgaagctcctggagggtcacttgccctcaaattcccagaacgcacagcaggtcactgatgatagcagtggcagcagtctgtgcacggtggtttcgagggcgt

SEQ ID NO: 26064 - DNA, 122 bp, Homo sapiens
ccgtggccgcgcggagagatgtgtgttagtaggtcagttccgagcgccgcgctacgtcgccgcccgccagccccgcgtgactggcggccgcggccccaatcgccgcgcccgcacccgccccc

SEQ ID NO: 26065 - DNA, 122 bp, Homo sapiens
cacgtttcagagaaaatcccctgtagcctctccgtgccttcgagacggcgggaaaggcaccgccagtagatgcagctctgcggccccggacacatcctgcttcacagagaaaagcgggctgg

SEQ ID NO: 26066 - DNA, 122 bp, Homo sapiens
gatgtggagtggggcagtagaaggtcggaggcttgggaccgccagatggggcctctgtttcggagacgggaccgggccgctagatgggcatggggtgggcctctggtttggggcgaggcaga

SEQ ID NO: 26067 - DNA, 122 bp, Homo sapiens
cctgacccctctcccgcttgagcagctgcagaaaggaccactgcacagctctgactcaaacgcggataacttcctgtcccccttccacgcacccgctgccccttacgcgaatccacgctgca

SEQ ID NO: 26068 - DNA, 122 bp, Homo sapiens
gtcccattatatctatttgtaaactgagtcatgaaaaagttgtcagagtacccaggtaggcgtttatgatgcacctaagtacaggccagccaaaattgttttggttttggtgcttccacctg

SEQ ID NO: 26069 - DNA, 122 bp, Homo sapiens
agatctgcggtcctcccagtgccggggaatggttgagtgacaggaccgggggggcggagccggcgcggctgcccgaggtggagccccagtggtgcgagtagctccagcggccacgctgaggc

SEQ ID NO: 26070 - DNA, 122 bp, Homo sapiens
gatgagatgacaatatgggacctgggtctggcctgggcaagtgcctgctcagcatgtgtacgctgtttgggttgtattggagctattgggcgctggaaccagcacttgtgttggagcggttt

SEQ ID NO: 26071 - DNA, 122 bp, Homo sapiens
gacccaaaaagggctggaggagactcgggagagccacccacacaacccaggccctgcacgcggcagggaaggctgccgcttcctcacgggccccacaggaggcagcccagagtgcaggaatg

SEQ ID NO: 26072 - DNA, 122 bp, Homo sapiens
cgttccccagggtttctgcgtgacctaaaaacctataatcctgagaaacacccaaatgggcggctcttatagacacttagtacaggaaatgaccggccgaaaaggaacatgagttggctctg

SEQ ID NO: 26073 - DNA, 122 bp, Homo sapiens
ccggaagagacgtgggggcggggccaacggaccgcggaggcggagccgctacagtctgggcgctggagcggtgggagcagcgctcgtccgccgttggggcccccagcccgcgcgcgtgaagc

SEQ ID NO: 26074 - DNA, 122 bp, Homo sapiens
agcctaacttccttgttctttgtacctccttacccctagttacggtaaacaaccttcccgcgggtcctaatctataactcacatctgttcccttggataccctcgctacaattgccattccc

SEQ ID NO: 26075 - DNA, 122 bp, Homo sapiens
ctttagcccgggaaggggcggaggaggtgggcggccagaggcgtggagatgcgcgcaggccgggctccaggccaccggcgcccgcccacccggagcttaagatctagagagagcacggggtc

SEQ ID NO: 26076 - DNA, 122 bp, Homo sapiens
cagtatttagagctgctgtagctgttccttcacaacataaaataggataaatgactagtacgtctttcaggtgggtggcaagcagaacatgcgtaatattctctacctggtctgtagctgta

SEQ ID NO: 26077 - DNA, 122 bp, Homo sapiens
ggcctcaagtgaggcctctcaaagtgctggaagtacaggcgtgagccactgtgcccggcccgtgagggacttttgagaggacaggagccagccatggctggaataatccaatgtacagagtc

SEQ ID NO: 26078 - DNA, 122 bp, Homo sapiens
tgtgtgaagtaccttgactttcatttcccagggaagaaagcccgtttcaattggctcaagcggaaaagagcactgtgggtccacttaatggaagagtctaagagtggcttcaggaagtccac

SEQ ID NO: 26079 - DNA, 122 bp, Homo sapiens
gcgatggccttcttcatggacgggtagatgacgctgccccacacggcgccacggccctggcgctgcaggtactcctggaacctggtgctggtccacatgttgtgtgcgggcagcagggggct

SEQ ID NO: 26080 - DNA, 122 bp, Homo sapiens
tttatttattgagaaatggacttcgcctgaggctgtttgccaattcagggttctgctgggcgcaaggaacgcactgttcaaacgcactgtttactttaagcgcacggggagaaacgaataag

SEQ ID NO: 26081 - DNA, 122 bp, Homo sapiens
tgccaatgacggagctgcgagatacggcgagagccaacgggagcggagtgagaggttctccgaccaattgggactaagtgagaggagatgcgggccaatgggtactccgcgtcccaccgctg

SEQ ID NO: 26082 - DNA, 122 bp, Homo sapiens
tcaatattaagaaattttaaaattatggcagttcctcctttaggaaaccagagctccaaccgactctctttgctacctgtgctattggagtttaccaaggacgttgttctgtttatattata

SEQ ID NO: 26083 - DNA, 122 bp, Homo sapiens
atggctgacccatggtccaggctgaatttgttcatcaaagctcctctttccctacccctacgaacccacacttcacacttagagcacgtgtgtacacacaggcttggttggatttctttcca

SEQ ID NO: 26084 - DNA, 122 bp, Homo sapiens
accaactcagacctgcctcagtgccttgacgcctgctcttctctccactggacgctcactcgaatcttcacgtgcaggctcctatttctaacagcgccgccactctgagagatgccacttat

SEQ ID NO: 26085 - DNA, 122 bp, Homo sapiens
cggcggcggcgcggcggggaggagcccgggccggaaccagggctgggccgggggcggggacgccggggtccgggagcccgggagccggagcgagctgacgagcgtcgcggaaggaccgggaa

SEQ ID NO: 26086 - DNA, 122 bp, Homo sapiens
ctataccaaacattgggtatccagggatgggacaatcagatgagaacctgccctcatcatcgaggagcccccagtcccagagctgtctgcatggaaatgtgtaccaagtgctttctgaacag

SEQ ID NO: 26087 - DNA, 122 bp, Homo sapiens
gaagagcttttggctgacttcccaaaagcaacctgggacacgcaaatagaagccatctgacgtctggtctacccagtgccatgtagattcggggaatcttcctggaggtgacaccaacatcg

SEQ ID NO: 26088 - DNA, 122 bp, Homo sapiens
taaaagggagaatcttgcccaagctagtaattacagatatcctattttacaggataacaacgaatagaaattctaaagaaggctctcattcttctctgggccctttagatggttctgtttcc

SEQ ID NO: 26089 - DNA, 122 bp, Homo sapiens
agtcgggggtgcgggggtccggcgagagaccggcgctgttagaacagtcagtcgggggtgcggggctccggcgagagaccagtgttgttagaacagtcagtcgggggtgcggggctccggcg

SEQ ID NO: 26090 - DNA, 122 bp, Homo sapiens
tgcctcaggctgccagcgagagatgccaggccatttctacatgctcatttctgccactagcgagatcatactgaggcaaaatatagagggatagagatggtttctatccctatgttctgtgt

SEQ ID NO: 26091 - DNA, 122 bp, Homo sapiens
agcactttggcccaaaagagttatcgcccgggctagaatttagcagacagctgttccacgcgggccagggcggcatgaagaagtcccgccgctacgtgcccggcacagtggccctgcgcgac

SEQ ID NO: 26092 - DNA, 122 bp, Homo sapiens
gaattatgactggcctccagtcatctccgcagaacaaagcaaagagatgcgaaagcaggtcgagcaccattattttgtgaactgataataacaagataagggtgatcttgtttttcttttct

SEQ ID NO: 26093 - DNA, 122 bp, Homo sapiens
ggttggatttctcatcccagctgcccttggaaggagagagcttttctggaaattgcagagcgtgccctggagactgcgaaaagtaaaaagtaaggctccctcagcttctttagaccaagcga

SEQ ID NO: 26094 - DNA, 122 bp, Homo sapiens
acgagaccccggggcggctccacgtcggaaaggcagaaggcgccacagtcgagcagccagcgccatgacctgcaacttgcgggctgaccctgcactacttcaggcagctacggaggcgggcg

SEQ ID NO: 26095 - DNA, 122 bp, Homo sapiens
gggccctctctaaacagctgtggggggagagcccgggcctcctcctcctcggggacggggcgcagggccaggagcctgcccagtgcccgaccccccaggcccactcccaccgcgagcacagc

SEQ ID NO: 26096 - DNA, 122 bp, Homo sapiens
gagctgcaggtgtggcggccgggccaggtgagcctggcggctgtggagcgtgcctgctgtcggcctgcactgggagaccccacacctgcctgcatccaaccccactgcctttgggggcttcc

SEQ ID NO: 26097 - DNA, 122 bp, Homo sapiens
gcgctcatttctcgggcgcggaaactcgagcccactttccccggctgccggctctgggaccgcgggctcggccacgcagtcccgcccggacccaaagagccccagtccctgcgaacaccagg

SEQ ID NO: 26098 - DNA, 122 bp, Homo sapiens
cttgtacctgagaagcctgagtccagcccgggagcctctgcggctccggctccgcgggagcgcgcccagccccgagcctctagccccgcatccagggcgcgtcaacctgactccccgagcgc

SEQ ID NO: 26099 - DNA, 122 bp, Homo sapiens
aaccgacccgatgccggggtccgagccgggccacaggaaactttgctcgggtggggagagcggggtgcgcggagggcgccgtaaacttgtcagcgggcggggcgctccggggattggagcga

SEQ ID NO: 26100 - DNA, 122 bp, Homo sapiens
tgctgtgtgctttctagaaagcctaagacatggttcctgtcctcaagaaacttacaacctcgttacagagaacacatctaaagcagttaaacagccctagcagtctgcaagcatgtatcaga

SEQ ID NO: 26101 - DNA, 122 bp, Homo sapiens
tcctcccaagggcgcctgaagtcctcctcagaaggccgcctgaagtcttcctccctaggtcgcctgaagtcctctggggagtgcctgaagtcctccggggggaacctaaagtcctctgagga

SEQ ID NO: 26102 - DNA, 122 bp, Homo sapiens
tcatgctgctggctgcctattctcgaggctgcccttggcccttacatttcccatagctatcgaatacattcctgctgcccctcaggccaaggatactgctatggtattctcagttacaacac

SEQ ID NO: 26103 - DNA, 122 bp, Homo sapiens
gaggtcttagagataggcacctctagatggcaaaaacacgactgcagaagggcagaggagcggcctcaggaaaaacccagggggatatatgatcttgaacgtacatggtgtcgaaactgcgg

SEQ ID NO: 26104 - DNA, 122 bp, Homo sapiens
taaacaactgagcgcacagaggccgagaggacatcgtgtcttcccacgcatattcgctcacggtcactaagtagctcttcttggaaagagggcgattgttaaagcaatagtgcgactgtcgg

SEQ ID NO: 26105 - DNA, 122 bp, Homo sapiens
tgattcttacaggtccgctcctctagccccgcctcccgtctgagaggttcttaaagggctcgcagcccagccaggcactttaaaagtaggtgggctttttaaaatttaaacgaattacacat

SEQ ID NO: 26106 - DNA, 122 bp, Homo sapiens
agctgatgagacctgtggctgttccccagcactcaggtgacgtccaactgcacatagcttcgttctgcgaaagcttccatttctggggggtgagagacatgcagtggggagagacatgggga

SEQ ID NO: 26107 - DNA, 122 bp, Homo sapiens
ccggtttcgcgcggaagccccggcgggagcagggttgcagcagcgcccgcggagaaggggcgctggcttcttccatattctgttcaaaatgtaggggaggtaaaatggaaattagttctttt

SEQ ID NO: 26108 - DNA, 122 bp, Homo sapiens
cgccagccacggagccctggcccgggcccgcggttccctttgcgacgcctccccgtgagtcgactgggccgtgggtatcgaggacaagcaaacagaaacccccactgcccaccgccgctgcc

SEQ ID NO: 26109 - DNA, 122 bp, Homo sapiens
gctctcctcagcacctaggaccaccccgcattcgtcaggagcccggggcgaggggactcacgtgccctccgtcattgctgctgcagtgctctacgccgcccactgccagctgccagatgtcc

SEQ ID NO: 26110 - DNA, 122 bp, Homo sapiens
tggggcggcggaagggcgcaaggaggagctcttttgtttccagcgccttgcgtctcagtgcgcctgtttaaggatagcctcagagctccgcccaggctacctgctgttctgacaattaggga

SEQ ID NO: 26111 - DNA, 122 bp, Homo sapiens
gtgcctcctaaccaggtggtccctgaagcaggctccgggaaatctccactctgcatccttcgtgttcatgagtctgcggggccatcacacttcaaagccagaaaaattgcaatcaccgctcc

SEQ ID NO: 26112 - DNA, 122 bp, Homo sapiens
ggccagtgacaaatccaggaaatgaatgttgctgatagggataaatcttgaggctgagggcgggtggtacagatgtgtatgggaaaccccaacccctatatattgtaaatagatgggctggg

SEQ ID NO: 26113 - DNA, 122 bp, Homo sapiens
gcacaccattccctcagaaacgtgtgagcacagacagtctccaccttcccaatttcacttcgcaaaaactaaggaaaagaccagaaaaagtgataagaggatataggtactcttgggaagtt

SEQ ID NO: 26114 - DNA, 122 bp, Homo sapiens
tttacttttcctttatttctgtgaggccagaaattgtcgccatccttcacattggtgaatcgggaccctaacactcattacctcaggtttattgttattgccattaacagtgttggtggcat

SEQ ID NO: 26115 - DNA, 122 bp, Homo sapiens
gagaagctgcccgtctttctcagccagctctgaggggacccgcatcaagaaaatctccatcgaagggaacatcggtaaggagcctccggaaatgtgggacgcaaggctggggtgtcgcggca

SEQ ID NO: 26116 - DNA, 122 bp, Homo sapiens
ccttcccacatcatccaccagtcaactccaccagaagaccatgcagggtgctgccctgaacgactttgccatctgaaaatagggcaccctccagcccaacataggaaaaagagttgggtcct

SEQ ID NO: 26117 - DNA, 122 bp, Homo sapiens
ttttatagttctaaatatattcccacttcaataacattaaggggccaatgcaggtgttttcgtccatgtgcatccaaatgttaggagttatttttcactgagagacaacaagatgatgggaa

SEQ ID NO: 26118 - DNA, 122 bp, Homo sapiens
gcaccgcgggcgccaggcgactgggagaaatttggagacctgtcagagtggtcagacacccgcggtgacttaaacccgcccccgcgccaagccacgcccccggaaccgggccgggggtggcg

SEQ ID NO: 26119 - DNA, 122 bp, Homo sapiens
gtgatagagagagagtgtgtgtgcgtgtgtgtgtgtgtatggcaaagtgcacaaatcgcacgtgtacacctcagtggctttttacacatttagacgtgtgtaagtgtatagagcatttccac

SEQ ID NO: 26120 - DNA, 122 bp, Homo sapiens
atcctttcctggtgtttaatgcattttggcttcaggacttgccgaggccgaagccggctccgccctgggccctgaagtcgggcggtgtccgcgatttacctccgcaccttcggggcaggtgg

SEQ ID NO: 26121 - DNA, 122 bp, Homo sapiens
ttggcccctgtgcccccaccgttcccatccccacccatgtcaggctcccagctcaggcctcgaggtcaagtcctgcctatccaggctggaaggagttgaacagagagggcctcagctgcagg

SEQ ID NO: 26122 - DNA, 122 bp, Homo sapiens
acttttccttttttgccgtctggtcatcctcgtcggtcttctgcttctgggtatcgacatcgttatcctcatcatcttcagctgcccgcttgcccgtagctgactcagctccctcatcttca

SEQ ID NO: 26123 - DNA, 122 bp, Homo sapiens
gggtgtcccctcaccaaccctctatccagggctggattaacaaagcagcagtggcactcacgagggggtggctgctagagggtccagccactttcgttaggggccttttgtatataggaaca

SEQ ID NO: 26124 - DNA, 122 bp, Homo sapiens
tagaactgaggcgagtggagcagcaccaaggcccggagatcggggcagggcagctgctgtcgccgccgccgcaggcctgagttacctgagtaactgcgggtcagggacccgcccgacggccc

SEQ ID NO: 26125 - DNA, 122 bp, Homo sapiens
ggaaaacgaaagctgggcggggtgccacgagcgcggggccagaccaaggcgggcccggagcggaacttcggtcccagctcggtccccggctcagtcccgacgtggaactcagcagcggaggc

SEQ ID NO: 26126 - DNA, 122 bp, Homo sapiens
gccagagctacgcgttcccagccaggtaatttttgaagccacgtgcaaaggtttaagcatcgtttgccaaaggtgggcattaggggaggttttgagtcaacgttttagatttgagtaataaa

SEQ ID NO: 26127 - DNA, 122 bp, Homo sapiens
aggaggatgggaaccagttgtccagggagtagcagggccagggcctctgagcccgctggccggcagagcaggcagtgccccctgcaggcctgacttcctaagagtagctcatcagaaattaa

SEQ ID NO: 26128 - DNA, 122 bp, Homo sapiens
tgggtgaggcagtgtggggagagggcaggggcacacatacctgagccgagacaccacccccgcccgccgtcagagcatccggagtgtggtgaccatgttagtattcagcacaagcgcgcgcg

SEQ ID NO: 26129 - DNA, 122 bp, Homo sapiens
aaagacaagagagcattccgtgctatgattcaggcctaattaagtgattgcgtctgggcacggctataaaccactagctgcttcaactggtaatccagtcagtaggcaactgcaggggctcg

SEQ ID NO: 26130 - DNA, 122 bp, Homo sapiens
cctgcaaaggccttcacggtatgtgtttcctcaagatagcacacccccaggaagtgtcttcgatgtgagtaatggtttcagtttcggtgggcagccagaagtctctttgggaaaatatgtcg

SEQ ID NO: 26131 - DNA, 122 bp, Homo sapiens
gatgggagaatgaagaagggctatcaggccagccttcagaggactccaaggaacattcaacgctgtcggtgagtttgggatttgaaaaaaccactgaccgttgactgtaccttggggtcctt

SEQ ID NO: 26132 - DNA, 122 bp, Homo sapiens
atctgtaatttacctagagaagcgtaatcaagatcacctggattatcaatcactagataacgctcaccgtgagtgctgttgggagacaccgctcagtctgcggaggacggcagagccagttt

SEQ ID NO: 26133 - DNA, 122 bp, Homo sapiens
tatcccaaattgaggcaaagggcaggtttttgtatcctctcctggactagtcattggatgcggtctgtcctcagggaggggcgtttttttgggcgaggctgcttcctttaatccagggcagg

SEQ ID NO: 26134 - DNA, 122 bp, Homo sapiens
tttcaaggataatcttaagtatagaagttggttttagtctaacgtcttgcctttcagaaacgacttgggagacagaaagaaagaaaaatgaacgtttaaaattttatcagagccagacgagg

SEQ ID NO: 26135 - DNA, 122 bp, Homo sapiens
aggggagaagataacgtagcccaagaacagtttcttagtctgggagccagagggggctcccggggatggggctgttccaggagactgcaggggtcggcaaaaggttaggagtggggagccgg

SEQ ID NO: 26136 - DNA, 122 bp, Homo sapiens
attggctcccttgcgcccctgacgctgggactgtccccccgccgcgccccgcccgcaccccgcccgcaccccgccccctcgcgcggccatctgcttcgcagtctgtctcccagtctctcact

SEQ ID NO: 26137 - DNA, 122 bp, Homo sapiens
caaggcagggaggttcccacaggccatgctgctcagagcccgaggatgggaacttctgcgcgggcccttggagggtagagctggtgctggctcacttgtctccaggtcccgtcgtcgccctc

SEQ ID NO: 26138 - DNA, 122 bp, Homo sapiens
gcctgcggggtcgtgctggggcggcgggtgagcctggggggctgcagagcgggcgcggggcgcgtccgaacagtcgcagccccgagcccctgggaccgccttccccgcggaggcttgggctc

SEQ ID NO: 26139 - DNA, 122 bp, Homo sapiens
cccctggccccacccacacatgctggcctttgagtgggcaggaggaggccccagatgctgcgacaggaatgtcccattgccctcgtggaagggcccatgaagagcaccagatccctcaaatt

SEQ ID NO: 26140 - DNA, 122 bp, Homo sapiens
tgctggcctcttgcccacttgccctctgcaaaggctgtgtctcagacggggtgcccaggacgccggctctgacacggagacccacggcaggcaagagcctctgggggaaagggaggagcagc

SEQ ID NO: 26141 - DNA, 122 bp, Homo sapiens
gagtttatggaggtggttgaagtagaacgagagccaagtgcctctgaaataaaatcacatcgagggaagaggctgtgaatgtgaataatcctggacacaaggcaaaaatgccatagggagta

SEQ ID NO: 26142 - DNA, 122 bp, Homo sapiens
gaaacctggagcttgctctgcctgaatgcctgtcctggagatgccctcgactcagtgctccgagcagagaagacagttcttgcctctgtgatgtcagaggaaggggattgtgatgagaggaa

SEQ ID NO: 26143 - DNA, 122 bp, Homo sapiens
ccttcctaagtattggattttcatttaaaagtcaggagctcttagcttctttcagctgggcggggggtcaggggctggtctacactcaccctctccctagctagtctttcacctgggctggg

SEQ ID NO: 26144 - DNA, 122 bp, Homo sapiens
atacttttgtctgtgaaataaaaagcaacgtcctcgcaggccgatgcgctgtacctgaaccgggtgtggccaaactgatcttcctgccaccaaagcctgcaggctgttcccactgcagtgaa

SEQ ID NO: 26145 - DNA, 122 bp, Homo sapiens
caggaggtgctggacagctccggaacccgcgcgccccctgccaaataaagcgtggagacccggactcgggctctctgggaccagcatacagcagaaggcaaggggaactgagccagggcgtc

SEQ ID NO: 26146 - DNA, 122 bp, Homo sapiens
agctctcagtcaccttctgacccagagaaaagggataccatgctacaaacaggcttttagcgtttaactttgaatttgagacaagcttcctgatgcgagatgaataaagaaaaagtaataat

SEQ ID NO: 26147 - DNA, 122 bp, Homo sapiens
agttggtccggtgatcatttccaggcctttctccctgtaaccagttgcagaaaataaaaacgctcttcctcctcagttcatctgcatctcgtcattgggccccgagaaatagccgccccact

SEQ ID NO: 26148 - DNA, 122 bp, Homo sapiens
cattggccagggacatggcctcgtggagtggtggggtcccgagggctgcctcggccccctcgcctcccagcggcacagcccgcttgggccagcacctgcagacccgagtcgtttccctggag

SEQ ID NO: 26149 - DNA, 122 bp, Homo sapiens
tcagctgtgcccagaaaccctgtcttttacatttacaaataaagtgcaggaggaaaagaccgaggatgactttattccaagaaaaagagtttcaaatggccggacgcggtggctcacgcctg

SEQ ID NO: 26150 - DNA, 122 bp, Homo sapiens
aaagacccgtccaagagcagggtcagcacctcggagagttccccgcaggccgccacggggcggggagagaattcatggggcttcgacttagaaggggaacatacaatgctgtggttttcact

SEQ ID NO: 26151 - DNA, 122 bp, Homo sapiens
cctctgggttctggaggaaagctctgaaagaagtgagcgagagggaaagagggagggaatcgaaaaggttgcttcgcaggctgcagcacccactgcgagctggatgactgaggcactgggag

SEQ ID NO: 26152 - DNA, 122 bp, Homo sapiens
aggaaagcaattgcctgctacaggtagaccctggtggaggaggctgttcagggagtctcacgttagctacatggttcttgcaataaccaaatcaggcagctggtgttgtgctcccattttga

SEQ ID NO: 26153 - DNA, 122 bp, Homo sapiens
cccgggggccagaatgaatggaccctcactgggccgctttgacagtttatgaggtgatgacgttgcagctatgattgatgaggtggcctcagtcggcgtttcggggaaccgggtacaagttg

SEQ ID NO: 26154 - DNA, 122 bp, Homo sapiens
gtgtgggtcttggcaggaggaaggcagcatagaaatgggccaggggcagtagggaggggccgcttgtgcttgtgaccgagaggctatggctcagctctaggctgaccaccagtgccagccca

SEQ ID NO: 26155 - DNA, 122 bp, Homo sapiens
cgtcccgggaagcaccgcccacagctgcccgggactccagtgatcgccgcggctcgctcgcgccccggaaactgccccttctcgggggtcatgatgggcagcaagatggcgtctgctagtag

SEQ ID NO: 26156 - DNA, 122 bp, Homo sapiens
gaagaatacctacgttataaggccatctatgggactgaactttgagacacactatgagagcgttgctacctgtggggcaagagcatgtacaaacatgctcagaacttgctgggacagtgtgg

SEQ ID NO: 26157 - DNA, 122 bp, Homo sapiens
gcccggggaggtcccgttatctgggcggctcggatggcgggcgggggaggggaggcgcggcgatctgggctcggaaaagagacagggccctgacctcctcaaatccccctcctcttccaatc

SEQ ID NO: 26158 - DNA, 122 bp, Homo sapiens
gaggtacatgtgactggttaagactcagagccccagcttgaaggaaacagctgctctcggcgtgctccggcacttggcagctggacaggcagagtgctgatgtgaaaaataccacgacaaaa

SEQ ID NO: 26159 - DNA, 122 bp, Homo sapiens
cagcgccctgcaccccatatacatccccacatttacagagggctcggaggagattcgtcacgtcggacctgcctctcggctcttggcatccaaggatgggaggagggagcagaaggtaaaag

SEQ ID NO: 26160 - DNA, 122 bp, Homo sapiens
agcccgcgctggccacatcgcgaagcccctgttcgtactgagaccccgcccgggatcacgcgcacaggccagggcgcaccaggccttggagaagctaccggcacagcccattccttgggcga

SEQ ID NO: 26161 - DNA, 122 bp, Homo sapiens
tctgctcggttgtaaaaagcgtcaggcgcttttgatttgaaaagcgttaggcctgggaatcgctgttgctccctcggtgggcacgccctgctgacacgccctagcccaccggggaagccact

SEQ ID NO: 26162 - DNA, 122 bp, Homo sapiens
ggcggcggagcgctgggcaccgcctactcgcacttgcgcactggttgacaggaggctggacggggtcaggtgggatgccgcagtttttccaagaattgtttaccttgtgtcctattaccctc

SEQ ID NO: 26163 - DNA, 122 bp, Homo sapiens
agccctcattgtgtctggtgggaggcgggcgtcacagctgtgccgagaggcctgctctcgcgtgctgtgggaggggggagacgtggtgagggagagctgggcagggaccatgccgcttaccc

SEQ ID NO: 26164 - DNA, 122 bp, Homo sapiens
ccacgacaatgaccgcattgaggctgcgcttggcctcgcgcctctcctcgaacagcccagcgtcctctggaccgtttaaaagaaaacataaagaggactctaccattaagatagtccttaca

SEQ ID NO: 26165 - DNA, 122 bp, Homo sapiens
tgcttgtgctgcctgataattactcgcacttttcccaggctagtgcaaatcttcaggggccgtccaggactacagagctgtttcaccctaccttggcttcaatctcttcccccatgctcgaa

SEQ ID NO: 26166 - DNA, 122 bp, Homo sapiens
gactgataaagcagaaatttcttgcctattaatagtttcccactgttagaaggctacagccgttggcaatcagatgtgggctcaggttttccttatcctggggcaggaatgcctggagggac

SEQ ID NO: 26167 - DNA, 122 bp, Homo sapiens
cattgaaagcttcaaagagagcagtggtgagagcagcacctccacacgccactgcctccccgccctggtgcggatgtccctgaccttccgctctgcccagacagggcctgtttctcgaggaa

SEQ ID NO: 26168 - DNA, 122 bp, Homo sapiens
gcacataccatccctttacctgagcatggtgagctctctctcctccacatattataaatacgacatcatgctggcagcaaaggacctgtaaaataaaggccatcttgttagaaaaaacttca

SEQ ID NO: 26169 - DNA, 122 bp, Homo sapiens
tgcctgacacgattgtagccttgtgagaccctgagcagaggacccagtgaggttgacccacggaaaccatgagatgataaacgtttgtgttttaagctgctaaatttgtggtcatctgttat

SEQ ID NO: 26170 - DNA, 122 bp, Homo sapiens
tgaatgacaatcccccacaggtgaccatgtctgcactcaccagccccatcccagagaactcgcctgagatagtagttgctgttttcagcgtttcagatcctgactccggaaacaatgggaag

SEQ ID NO: 26171 - DNA, 122 bp, Homo sapiens
ccctgggccattccaacataccccttagactgtgagcatgttggatgcacactggcctcccggtcatcacaggggcttcctgccctccacagcccatgcgcagctgaccagacggctgagct

SEQ ID NO: 26172 - DNA, 122 bp, Homo sapiens
taacagagaccacatgtggtgcactcaccactttgcctggctgcccagcacactacaaaccgcagtaacatcattgtaacagcagtgtttggagtgccatggtatcactatactgtgacatt

SEQ ID NO: 26173 - DNA, 122 bp, Homo sapiens
tggggagccagttttgtgaaaaacggggaattcaggagggagggaaaggtgatgagtttgcgtttttatgaggcagcaatgggttgattgtttgtgtctggaaggcagtggggatgtagggg

SEQ ID NO: 26174 - DNA, 122 bp, Homo sapiens
gctacccgcggccgccgcagcccgggccatgccgcacggctgctgaccgcacgcaggggccggccccgaggacacatgcggcggcctttgccgcctcgcccctgaccctctgccctgttctc

SEQ ID NO: 26175 - DNA, 122 bp, Homo sapiens
gtgtgacttggtggatgatgcatgtgtgttggaaggtgggatggactggggacgggaatgcgtgtttggagctaatgaatttcatctttaggaactgtctagtttgagatgcctgtgcaagc

SEQ ID NO: 26176 - DNA, 122 bp, Homo sapiens
aagttgcagataataacacctatcttggaggatagttgtggggttttgaaatattagatgcgcacatagtggtcctttaagaaatggtacttctactgttattgtcttaggtggcagaacca

SEQ ID NO: 26177 - DNA, 122 bp, Homo sapiens
cctcactgcccggggcttgcgggcgggccagctgctccgagtgaggggccgtcgagaccacgcccacccggaactcgcgctggcgcgcaagcgcagtgtgcagccccggttcccgcccgcgc

SEQ ID NO: 26178 - DNA, 122 bp, Homo sapiens
tcataggcagctggcggtgtctcagcgcgagtgaccaatccttgtggttgggaaatgtgtcgtgggcgtccgtgggctcgttttgcctttgagattaaataggaaattttcccaggacgagt

SEQ ID NO: 26179 - DNA, 122 bp, Homo sapiens
atgcgtgatcacctgaggctttcttccccttttccagtggaacgcccctagaaggtcatacgctgccattttgtctcttaatgcgcatgctcaagcccactggcccaattcctgagatctta

SEQ ID NO: 26180 - DNA, 122 bp, Homo sapiens
tccaaccccttctttctgaccaaccgggaccagagcagtgctggggccggggcgggtcaccgggtgaggaccggggcggagggtgttaagttacagggcaggagcccgggtccctccgcggg

SEQ ID NO: 26181 - DNA, 122 bp, Homo sapiens
gccttttccgtggagagaggcggtgacgttggttgtgaactcgctttttctggctgaactcggtggcggggctgacttaagtcatgcgcagctgaagggtagggggcagggaggcaattggc

SEQ ID NO: 26182 - DNA, 122 bp, Homo sapiens
cataaggattgtgctgtatatacaatctaggagaaaaaggagaaggtcaaaagctaagatcggtgaatatgtctctaggaatagttgtcctgggtcctctagacagcatgataagtatagaa

SEQ ID NO: 26183 - DNA, 122 bp, Homo sapiens
acgtcacgagaccttcatgtgagaagcaggtcacgagaccctcacgtgagaagcaggtcacgagaccctcacgtgagaagcaggtcacgagaccctcacgtgagaagcaggtcacgagaccc

SEQ ID NO: 26184 - DNA, 122 bp, Homo sapiens
ggccgtgtggggagaccaggggagcctccacgctgggcgcccgggcagggagcgtgggggcgggcgggctcactgcttgctcccgggaacatcctgcggggcaggtctgcctgaccggccac

SEQ ID NO: 26185 - DNA, 122 bp, Homo sapiens
cccatctgtccaaaggctatgcgtgcgtagagtttgagaatccagatgaagctgagaaggcgctgaagcacatggatggaggacaaattgatggccaggagatcactgccaccgtcgtgctg

SEQ ID NO: 26186 - DNA, 122 bp, Homo sapiens
gcacggagtggggggatggtccggagcgggaagcacggcggcctggggctgaggggggcacggaggctggcgggggggggggaaacggaagtcgtgaatggtaagtcgtgagtgggtacgga

SEQ ID NO: 26187 - DNA, 122 bp, Homo sapiens
cattctctgccccattcaccaatctatcattatgaaaagtgtgtgcaatgattctgccctcgttgaatctttcatgaagcgtcttctgagaggtctcactgcctctgcaccagccctacatt

SEQ ID NO: 26188 - DNA, 122 bp, Homo sapiens
gcgcgtgggcggcgatccagcaggaggaggcgcagatccacaggccgaaggagatgcagacgcggtggcgggcgaagcagcggtccaggtagtcccagtcccagagcgcgggcgcggggctg

SEQ ID NO: 26189 - DNA, 122 bp, Homo sapiens
gtccgatgcttcctgaatggacaggaggaaacagctggggtcgtgtccaccaacctgatccgtaatggagactggaccttccagatcctggagatgctggaaatgaccccccagcagggaaa

SEQ ID NO: 26190 - DNA, 122 bp, Homo sapiens
ggccggatttcccttttaaatgtgaaggcacctccatgctcatcgcgagcctgacgtccacgcggcgcccacccgcgggcgcgcctgccccgggcgccacctgcccggctgcccccgcaccc

SEQ ID NO: 26191 - DNA, 122 bp, Homo sapiens
tcccgtcccgcccggcccttcccggcccgcggcctcctctgggccgcaccctctgcggcgcgtttccggatcctcagccactctcagcgcccgccgctccgcccctcgtgcgtgcgccctcc

SEQ ID NO: 26192 - DNA, 122 bp, Homo sapiens
gaatgacagtcgccattttgctacaatgtaacagaatattgtctcagagttctaaaggttcgctcaggggaagcgacgggccaatcacagcgcgggataccggcccgccggccaatcggcgc

SEQ ID NO: 26193 - DNA, 122 bp, Homo sapiens
gagccactgccctcaaacccggggcggaggattccaggcaggctctaggagtcaggtgtccgtttgctgctatcagtgagtgggggccattgttttttgtttgtttgtttgtttgtttgttt

SEQ ID NO: 26194 - DNA, 122 bp, Homo sapiens
cctcgaattctgtcgcagcagggggcacaactgtcagccaatcagcttggagaacaggcacggccgcgtcccccccaagccccacccccgacagctggatcttgtgactgggctcctgggta

SEQ ID NO: 26195 - DNA, 122 bp, Homo sapiens
gaaatctcaagaagtagagtggggagtgaagtcagtaacaattctaaccacgaaagctgccgtggactgaacgtccactaactgccaggactatacatgtgcttcccatagatagcctcttt

SEQ ID NO: 26196 - DNA, 122 bp, Homo sapiens
ggggactcagacttggggaatggtttaccaggttggtcccggtccctttccacttgcagccggctccgccccctcagaccagacccgcagagtggacaagagggccgcgctcctcaccttct

SEQ ID NO: 26197 - DNA, 122 bp, Homo sapiens
ttttctggacatcacatgtaatgaaggatgcagaaaaaaataagcatattaattggaaaccgctacagtggtgaatgaattagatgtaagcctggagaagcttgggaactgtgatttattaa

SEQ ID NO: 26198 - DNA, 122 bp, Homo sapiens
tctaaccaagaggagccactctagatcagtttctctaccattcatcagaagatgattaaacgcaggaaatcacttcctcagcagcacatctaaaagccccaatgtgcagctcaacccttgat

SEQ ID NO: 26199 - DNA, 122 bp, Homo sapiens
cctccccgcagcaagcaccaggacctcgctctcctcctgttccgcacagcacccgttccccggggccacatgaacagcacccagctcgacgctgccacggaaaaacgtctagcaaggaaagg

SEQ ID NO: 26200 - DNA, 122 bp, Homo sapiens
ggctctccccactcctccctggaatgccgtcatgccggcgatgaatatttatgaggcacacgcggccctcccgccctgccagcctcccgccttcccgctcccggcgcatgattaatattcaa

SEQ ID NO: 26201 - DNA, 122 bp, Homo sapiens
tctgtcctcgggccttgagccgcaccagctggcgccaggctgtcccccagcgaccttcagcggctcactcagcctgacagaaacgctgtgttttcatgttccctgtgtggacaaatcacaat

SEQ ID NO: 26202 - DNA, 122 bp, Homo sapiens
acaacacgcgtgtcctcagagagcgctaactcccccaaatctctgctttcattagtaagacgaattggctacacagcaagataaccaagatgcactgctaggataggcaaatttcatagcag

SEQ ID NO: 26203 - DNA, 122 bp, Homo sapiens
tctaaacagtatggactgaaaatgaaaacttcacgtgccttcttcagtgaggtggaaaggcgttttgatgccatgccgtttactttaaggtactaagcaatgatagtacttggaaccagtct

SEQ ID NO: 26204 - DNA, 122 bp, Homo sapiens
gtcggcccctgacggtgcgcgtggggcatgctgggacttgtagtttccctctgggggggtcgcctgattggttgtgagagttcagcgccctgggtcctgcgccctccgtggaagctcctccc

SEQ ID NO: 26205 - DNA, 122 bp, Homo sapiens
ggcgcgtggggcggcaggcagcggggcgggggagcgtttctgctcgccgtgtgtgcacgccggccatggggagggtatgataggcaccaaagagcaacacgcctctcatgtacttacatgct

SEQ ID NO: 26206 - DNA, 122 bp, Homo sapiens
ggctgaggggttcaagacaaccacaaaaagtcacactctgtgaccttccgtcctacccctcgccacatgtttattccaggtgaaatatatggaaggtaaatgtggagcattgctggcacgtt

SEQ ID NO: 26207 - DNA, 122 bp, Homo sapiens
gcaggactgccggtcctgcccctggactctggccggtgttgtgtgtgccccatgctgaggcggtccgccagcctcctggagatccgctgtctgagagtgctgggctgtctgggagggcagcg

SEQ ID NO: 26208 - DNA, 122 bp, Homo sapiens
gggctgggcgcagcctgaccggaagtgcagagagcggagcggctgcgctgagaccagacccggcagaatgcacaggcgaggcggaccgggcgcgggaagcggtgcgcaggaaggggcagagg

SEQ ID NO: 26209 - DNA, 122 bp, Homo sapiens
ctgtgtctgcagaggaggctgtagttcagaggccaagcccgctgtcagaaggcagccaggcggacttgagtcccaattcctccttcctttctaccatcattctctcttttgcaaaatgggga

SEQ ID NO: 26210 - DNA, 122 bp, Homo sapiens
gcctgtccgcctggagggtgcgggatgctagagccgcagaagggtgcccagagcgtgggtcgccgcgccgaaggctgagccaggctcccggattccccgcgcggacacggacgcagaacgca

SEQ ID NO: 26211 - DNA, 122 bp, Homo sapiens
aggacaggcaggcttattatgctaaccaggctcttcttgaccagcaatgtttcatatttccgaagcttcaggacaaccagggagaatttacagatgaaattcttgttagtttcccctgattt

SEQ ID NO: 26212 - DNA, 122 bp, Homo sapiens
ccacagggcaccagctcccagaaaaatgctatggccagagacagatctgaaatggagatacgtctcaagtccagagctctggagctactaccagacagcatgccaggagaagacaacgagaa

SEQ ID NO: 26213 - DNA, 122 bp, Homo sapiens
cattaaaggaagcaagaagaggcatgggagggttggtggagactcccagggccatgctcccgtgaggtggtttaaaaaccccttgtcttggctacaaagcagatgcagctttcaaagggtgc

SEQ ID NO: 26214 - DNA, 122 bp, Homo sapiens
actcatttcacattaactcaaaagtccacagtccaaagtcctgtctgagacaaaggaagtcgcttatgcttatgagcctgtaaaatcaaaagcaactggctgggcgcagtggctcaccctgt

SEQ ID NO: 26215 - DNA, 122 bp, Homo sapiens
gcatgcacgactatgaggccctgcactacgacaaggagcagctcaaggaggcctccgtgccgctgggcactgtggtggtcccaggagacagtgacctagagctctgccgtgcccacattgag

SEQ ID NO: 26216 - DNA, 122 bp, Homo sapiens
gtttccgcttcttctcatcccggtcactgtcaccctcattactggaggagctggcagaggcgttgctgtcaaacctgccagagaacaagccaggcttagacttgaggagggaagacaggacc

SEQ ID NO: 26217 - DNA, 122 bp, Homo sapiens
cctccgggctccaaagcctgtcgagcctgcacagattttcccttgattccatctgggccccgcagccggaggcggtctgagagaagtcccagccgccctcagaccccgccctccgcctatcc

SEQ ID NO: 26218 - DNA, 122 bp, Homo sapiens
accacgccataccaggattttccagcaggtggcagccgacgcacgccagagacagctgggcgcctacactttgaactcaaggttcttccaattaagtgcaagataaggagcttggagactca

SEQ ID NO: 26219 - DNA, 122 bp, Homo sapiens
aggaccctccgagctaggtgcgggatataatctcgtggtgtgccgttttttaagccggtccgaaaagcgcaatattcgggtgggagtgacccgattttccaggtgcatctgtcacctctttc

SEQ ID NO: 26220 - DNA, 122 bp, Homo sapiens
gcaatacagcgaaaggggcgccgggggttaatgttcacactgcttgatgctgctgacttccgaccagccacaaggcaccccggagccaaaggcagatgactccctggcttgccagtgacgtg

SEQ ID NO: 26221 - DNA, 122 bp, Homo sapiens
gtcgaagtcgccctgcaaggcgtgtgtgtgatcgcgcacctgccggggtagggagtgcgacgctgcagcccgtttcgccacttcttctctggttcttaagtttttgccaatctgatgggcaa

SEQ ID NO: 26222 - DNA, 122 bp, Homo sapiens
ctgatatcagatttcccttcaaatgtgtgttttaaaacgcagttttggcttcaaacgctgcgtggcactaaggatgaaatccagtttcttcccacgacccagaagacggccgagcttcaccc

SEQ ID NO: 26223 - DNA, 122 bp, Homo sapiens
gtcacccggttccatctacctttcccccaccccaggtctcctcttggctctgccaggagccggagccctgccaccctggctttgacgccgagagctacacgttcacggtgccccggcgccac

SEQ ID NO: 26224 - DNA, 122 bp, Homo sapiens
agcttttctttctcgttttcccatgaagtcactataattgcatactcatagtaagcacaacgaaaggtcgaagtcttagattattttgagaatcattctttcttcaccttttgaggtattga

SEQ ID NO: 26225 - DNA, 122 bp, Homo sapiens
ccggcaggccatgctggagtatctgccaacctgatgaagacgaggacgtcccacaagttccggacagacgtggccgccaaattaatgaggaaagaaaaggagtctttttttttttttttaaa

SEQ ID NO: 26226 - DNA, 122 bp, Homo sapiens
aggatgcaacaccggatccgcctcggggactgggaaagttccctccacggctcccacaggcgccccgcctcctgggctcccaacggctgctttcgacgttgtgctccaccctttccgggcgg

SEQ ID NO: 26227 - DNA, 122 bp, Homo sapiens
ctagtcacgtttcaagtgttcttaccggctagcggccgggcagcagagatctaggcaaaccgaggcatacctagatcttctcaggattcttacatgcagagatgaggcaggctcatgtcttg

SEQ ID NO: 26228 - DNA, 122 bp, Homo sapiens
tgcagtagggtcaatgagacaaatggaatgcaggttgctggggaaagaatgcaggttctgcgttataaatgcacacacatttactgtgccacttgggttctgaactttgcggttaaattgat

SEQ ID NO: 26229 - DNA, 122 bp, Homo sapiens
acacgccctcctagaagcagaagggccccgtgagtctgcgctccgtgcacagggagcccgcgggtccaagagggggccctggacctgcacagaccactgcgttttcagaaaggccaccaggc

SEQ ID NO: 26230 - DNA, 122 bp, Homo sapiens
ttttgacgattttgagtgggggttccaatgacttgaacgaaaggagccagggcaccaatccgggtttgtgtagcagatgccggtgagacccgactactgcagctcgggggtggccggacccg

SEQ ID NO: 26231 - DNA, 122 bp, Homo sapiens
atccgagctgggaggtgtgggggagtcaggtgcaagagcgcctccactccttgtgactgccgagagcccgcgtccccgacttttacctcttctgtctggtaggtggcccacatggggacacg

SEQ ID NO: 26232 - DNA, 122 bp, Homo sapiens
agttggatttctgtcacttgcattaaactgatcaatccaaagtatataaaacactaaattcggccaggcgcggtggctcatgcctgtgatcccagcactttgtgaggccaaggcgggcgaat

SEQ ID NO: 26233 - DNA, 122 bp, Homo sapiens
ttccatctccagaaccttctcttcccaggctgagactgtacccattaaatgagaactcctcgttctcccctcacagcccctggcaaccccattcttctgtccctgtgagtttgataccatgt

SEQ ID NO: 26234 - DNA, 122 bp, Homo sapiens
gagccgaactcggtgccagccgcacccgggcgggttgctggtgcgccctcccctcgcccccgtccctggggtccttgacccaggctcttggggctagcctatcttctgaggagcacaaggtc

SEQ ID NO: 26235 - DNA, 122 bp, Homo sapiens
cgcgcccgcgcccatcacgcccttgcgctggttggtttctgtagggggttatggggtcagcgcggtttctggcaccccctgcattccttaacgggacgcccctcatccacttacctaggtgg

SEQ ID NO: 26236 - DNA, 122 bp, Homo sapiens
ttgccaccagcatatctcgcctccagccacagggcggttttctcctatctcagaatagaacgaatgtacaatcgggtattatactgagacattccgttctcaggggcatgcaggagacagag

SEQ ID NO: 26237 - DNA, 122 bp, Homo sapiens
tggtggggcggaagtgggtggggagaggaggccaaggtcatcgagggaggcacagcatggcgccttcccttgccaggaaaggtgaacttgcagagcttcccagagaagacacctggggcagg

SEQ ID NO: 26238 - DNA, 122 bp, Homo sapiens
cccaagcagcctccaatgacctgacctctcaccttagatgcccctatccccgagtggcctcggtagccctcttaccgggcgatctcgcacttgctgacctccaggccccgcttgggcatgct

SEQ ID NO: 26239 - DNA, 122 bp, Homo sapiens
ggctggcggggagcgggtgggggccatggccctggagtgggggtcgcggtgggcctgggtcggggccaagggagccacatccagtgtgggggctgcgggctccaggcctggtgtctctggag

SEQ ID NO: 26240 - DNA, 122 bp, Homo sapiens
gtgacagagtgagactcggtctcaaaaaaaaaaataaaaggaaatcacatttttgacccacgatttccagcaggcacagacagacaagcatgtgctgacaactagcagaagcatctcatgca

SEQ ID NO: 26241 - DNA, 122 bp, Homo sapiens
cagggagccaccagcaggaaaggcagctctgtatgcatctctgtgttacataaacaagcacgctgaagtgggtttggaagcatctggaggtgggctgcctgcaattagcagtggcgtcaacc

SEQ ID NO: 26242 - DNA, 122 bp, Homo sapiens
cagcggcccggggcgactgagcggacaaacggaagtgtaggttacggtctgagacatcaccgccaagctgggcatcggggagatggccgagactgaccccaagaccgtgcaggacctcacct

SEQ ID NO: 26243 - DNA, 122 bp, Homo sapiens
attcggagggcaaggctacttggaccgaccggctgagcccagcttctggtggatggcagccgcatggcggagcctggccggtcacccacgggcagaagatgtacccagctaagctctgcccc

SEQ ID NO: 26244 - DNA, 122 bp, Homo sapiens
ctcacaccatgccattccatgttaaaggaggtacactgggaccctcacagtgatggcacccggccattgtcagtgacaagagggaaggcactcatcagatgagcaaggtggcctagagccct

SEQ ID NO: 26245 - DNA, 122 bp, Homo sapiens
cacttttcctccccagtacgtgggagccctagaggacatgttgcaggccctgaaggtccacgcgaggtgagtgcaggcagcctcagggctttcacatcagcacgtggctgtgctactggaca

SEQ ID NO: 26246 - DNA, 122 bp, Homo sapiens
gggccccggccttggtgaagcaggaggagggcagcgggggccccgcgcaggcgccgctcccggtcctgtcccccgccgccttcgtgcagagcatcatccgcaaggtcaagtccgagatcggc

SEQ ID NO: 26247 - DNA, 122 bp, Homo sapiens
gttcggcccctccccaggcccctccccgcccccccccccccccggcccggcctcaggccccgccctctctgcgcacaggcttctttgcctacacgtgcggccgcctggtggtggtggaggac

SEQ ID NO: 26248 - DNA, 122 bp, Homo sapiens
ccccagccccctcaccattcgatccgcggcgctgccttccgtcgagcattccggttcagacgctttcggttgacactgtaaccaaacttctgcctccgggttttgcccttggccttgggcat

SEQ ID NO: 26249 - DNA, 122 bp, Homo sapiens
aggaaagggcgccctgggagggcccctcgtggctgcagaccccgcaggtcgagtctgccacggatggaactttggaaaaagctagggaaaaggagaaaccgagcttgcaagggctcatcaag

SEQ ID NO: 26250 - DNA, 122 bp, Homo sapiens
gggtgggtggggggcagagggcgagtcggcggcggcgagggcaagctctttcttgcggcacgatgccgtctctgctggtgctcactttctccccgtgcgtactactcggctgggcgttgctg

SEQ ID NO: 26251 - DNA, 122 bp, Homo sapiens
taagtggtagaggcaaaggccaaggtaggtgagcactggaaaagttattgtacataaactcgaccattctcacaagacattgaacagagaataagaggagagaaaaaggcttacaacatcaa

SEQ ID NO: 26252 - DNA, 122 bp, Homo sapiens
cgtgctcagggctctctccaaggatgacacgagcttcctatccttggaagtatctccgtgcggtctgtagccagctctggagggatgctttagagaagggttatgcataggagtggtcgggt

SEQ ID NO: 26253 - DNA, 122 bp, Homo sapiens
gcagttggctctgcgtgggggtctaggaacccaggctccttgtagcttgtcctgccattccgtagcggggttgctctcatgctcttggtcaatgttgacactccatgacctctacatctgaa

SEQ ID NO: 26254 - DNA, 122 bp, Homo sapiens
cttttcaaatgccacaactctgctggtcttgcatgataatgtgtctgctttacccctccccgatgcaactcaatgcgggacagagagaaaaacaaggactgtgtttcgtggtgagcttctct

SEQ ID NO: 26255 - DNA, 122 bp, Homo sapiens
cagagatcccatctggccagacacgccgcccctcggtcctgaaggcatctccataaaccacgaccctcaggatcctcggagaatcacatggggaccatgacctctgaccccagtcctctcca

SEQ ID NO: 26256 - DNA, 122 bp, Homo sapiens
ctcgctgctgctgcagcgcccccgccccgcgtcgcctcccagccctggctcccagtgctccgggcttgctgacggtacagggtggacagccccgagacattttcatcagatctcgtctcccg

SEQ ID NO: 26257 - DNA, 122 bp, Homo sapiens
ccccccgggacgggcccttctctcactcattcgccccctcattttccccagtgtccttcccgcactcagagggcctctctggagccagttccaggtaattctcttagcccatttcctcagga

SEQ ID NO: 26258 - DNA, 122 bp, Homo sapiens
ggaaaactctaaagggcaatgctgttttcatggcgaaacctacacccctcgggtcacttacgaggagccccagctcaggtctttgttccacccttacggggttggcaaaagctcgaaacatt

SEQ ID NO: 26259 - DNA, 122 bp, Homo sapiens
gggtgggctgcggcccggcggcggcggatgcctgtctctgccgaagccgaaggaaggctgcgtgggcagatcttccagctaggcccagagggacggccgacattcaacccgccagtcaaagg

SEQ ID NO: 26260 - DNA, 122 bp, Homo sapiens
tgattgactgggctggcgttaactgtgcggaggcaggtatgtgaggggctggggttggggcgggggcgccaaagtttagggacgggggcgggagacccgggtccgccttcccaggacacacg

SEQ ID NO: 26261 - DNA, 122 bp, Homo sapiens
gctgtgtcgctgacataaaatccagatagaaaagctaagaactctaccggtattctaccccggaataccccgcctccgctgccaggagggagagctcccagatatccaggtcagactctcct

SEQ ID NO: 26262 - DNA, 122 bp, Homo sapiens
gcccacccaaggcgtgggctagcgggagtatcctgtttatcctggccaacgttagtcatccggccaatgtctaagcctagaccatctgtgggcagttatttcaaagaatctatctccttgtc

SEQ ID NO: 26263 - DNA, 122 bp, Homo sapiens
ggaaggtcctggctgcaggcagctcgctggaggagggaggagagttcgatgacctggtgtcggccctgcgctctggggaggtcttcgacaaggacttatgcaagctcaagcgcagccgcaag

SEQ ID NO: 26264 - DNA, 122 bp, Homo sapiens
atatattcccctatccacagaaatatactctgggggaaaaaaaatagaacaaattcttgccgtcctgaccattgaacaagagactaattagacaatggggctagaaaaacctcaaagtaaac

SEQ ID NO: 26265 - DNA, 122 bp, Homo sapiens
acccgaccccaggctgcctgggtccgcagggggcccaggtgaaggaggatgggcagggggcgtgagtgggggacccaggcccatggtgagccaagcaggacagccccagccactccctcaga

SEQ ID NO: 26266 - DNA, 122 bp, Homo sapiens
ttcgggttctgcgcggacagcttactcactggagtggttcggcatcctctgtcgtccgcccgcgcttcctcaggaagcccctaatgcagcggcagcctgaaagcagcagccgaagctgctgc

SEQ ID NO: 26267 - DNA, 122 bp, Homo sapiens
ggcatcactgtgtcgggggagcgctgtgtgaaaatggctgtgatctttgtgcggtttgtccggttatacctcactgggacaccagagggcgcaaggagggccagcacttgtttttctttaaa

SEQ ID NO: 26268 - DNA, 122 bp, Homo sapiens
tttacagcctcaattagcttctcatttccttgtacaaggataacatcaaatctagccaagcgacggtagtcaactgattcctttttcgccttagctttagcttctttcacttcctttatcaa

SEQ ID NO: 26269 - DNA, 122 bp, Homo sapiens
ctctggggatactgttactattagtgagcattatttgctgcagaaattgattccttctgccgtacagtaggccagggaggcctccaggtgccttcggtgggggaaggattttagttgctcag

SEQ ID NO: 26270 - DNA, 122 bp, Homo sapiens
ggcaggaactccctaggccttgaatcaagggaatccagtagataacaacagaaaggactccgacccaggtacctgagacatctgagaccgccaaaattaacacaacaccctacgcgacagag

SEQ ID NO: 26271 - DNA, 122 bp, Homo sapiens
atgcataaattatatggagacactaaggactgcaacagacaagaagatctcagtgacaaacgggttatttagggcagcagccaactgactcccacaatgagtgggatctggacaagaaggcg

SEQ ID NO: 26272 - DNA, 122 bp, Homo sapiens
tccctctcccacgcgctcacgcagaaaatccagcccagccccagctccccagtaaccccccgcgccccttcagggagcgggatcccaaatacagtgagaaggactcgcagcagcgggagcgc

SEQ ID NO: 26273 - DNA, 122 bp, Homo sapiens
gagacttcactgaggaaatgactcaaagatgaatacgagaaaatgtttgtttcttaaagacgattgcaactcagcatatttatatgctgtaggatgcccaagcctgcagttgaagcaggtta

SEQ ID NO: 26274 - DNA, 122 bp, Homo sapiens
ggcgaacccacccctccaggcagggtttcgcccctcgccccgccccttcccccgcccggacggccatggccattcccggcatcccctatgagagacggcttctcatcatggcggaccctaga

SEQ ID NO: 26275 - DNA, 122 bp, Homo sapiens
ctggagttaggggagggtgctggaatcttctacgggccacccctttattagcataggaaacgtcctgaccaatagcaagttccaggaagtgctctgaccagcagctcttgcatgaggcacct

SEQ ID NO: 26276 - DNA, 122 bp, Homo sapiens
ctgtacctcggccgcaggcggcaggcgtcccagagccacgcggggttcgctcgtctcaggcgggtcttgcctgccaaccgctgagctcccttcaatgtcaaaaggaaaagcgttgtcgtccc

SEQ ID NO: 26277 - DNA, 122 bp, Homo sapiens
aattggccagaccgaggaccttagtgttcactaaggaatttggattttatcaagacagtgcgtaggtggcattgaaaatttttgagcagaggaggtgggctctgtgcttagacgtaagctta

SEQ ID NO: 26278 - DNA, 122 bp, Homo sapiens
gcgccgacggtggcgctaactactcctggcagcacgggaggaggcactgacgtcaagccccggactgggacccgagcctcagctgtcatttaaagagataggctgcagccgcggctcccggg

SEQ ID NO: 26279 - DNA, 122 bp, Homo sapiens
cagcctgttgtcccctctgccttgtggccatcttgttgcctcctagcacctcccttcttccgtgggaagaagctggagtccaggtttactacctgcaggttctctcataaaacacaagaaag

SEQ ID NO: 26280 - DNA, 122 bp, Homo sapiens
tgagtggtgtctgccaaatgaggagtcaaggaatatctggaaaggcagcctccaggtccccgatgtcaagaccatttagaactgaaagtgtcccaatatcggggtacaggcaataagcatta

SEQ ID NO: 26281 - DNA, 122 bp, Homo sapiens
gagaagagagtgcctgtgttattctctctttagctaggagagctctctgtctttgtcacacgcaccccctttccatgtctgaaaagggtgtttgtgtcactgtctgggcccaatgtcactgt

SEQ ID NO: 26282 - DNA, 122 bp, Homo sapiens
tccctgcctctgaggtgttgtgtgcccttgacgtcagcccgtaccggctccgcctccgggcgagttgcgacattttcagtgcttcctgagaagagtttcgcgcagttggagctacgggtaca

SEQ ID NO: 26283 - DNA, 122 bp, Homo sapiens
agagggagggagaaaatgggggaaaggaacgcagggggcaggagtctatttctggggcgtcggtaagtccttggggcaacctggttttcccctgctgacaagctgtgtcagttaactgcaac

SEQ ID NO: 26284 - DNA, 122 bp, Homo sapiens
ccccgctccgctggtcaggtgagcgctgccccgggagccatgggtcctattggagcagagcgaggatgcagagggaggaggcaagggagggggagaaaggggaggaggatggagccctcctc

SEQ ID NO: 26285 - DNA, 122 bp, Homo sapiens
ctgtgcagagtgacagagcagagttacagaatccatgaaagcaccaggccactcctactccggcctgcacaggtaggcaagggctgaaaatcactagttatggttagtgtagttaacagaag

SEQ ID NO: 26286 - DNA, 122 bp, Homo sapiens
gaccactgtactccagcctgggtgacagaccctatctcatgaaaaaaaaaaatcattaaacgtgcatttagaggagggccttggtgggtaccttggagggtaccaacatggaagcaggagcc

SEQ ID NO: 26287 - DNA, 122 bp, Homo sapiens
aggagggcttcccggaggaggtggccctgagctggtgctggaggaagccctcacgtggcccggagcctggttccggcatcggtaaattacacgtccctttccggcgcccagtggcgtcaggc

SEQ ID NO: 26288 - DNA, 122 bp, Homo sapiens
cggcaatcaggagtctgccgctgatccacgcaaaagcctgggtgaatctcagatgctgagcgaatgtaagcagatacacgcagacatacacagacgcacgcaaagacacagactgcccagag

SEQ ID NO: 26289 - DNA, 122 bp, Homo sapiens
aagggtgagctgacgttttcctttatttgcatggcttaaagctagccattttctacaccacgcgccgccgggcttgtacatgcccgtgtgcctgtgacaccgaggcaattgtttctccttaa

SEQ ID NO: 26290 - DNA, 122 bp, Homo sapiens
aaagagcgcccaggtggggccgagctgggggccgggcccctggagcgctgggaagcacagcgcgctctagtcaggttccctttcctggagccctccgcttccagactcccttctttcctccc

SEQ ID NO: 26291 - DNA, 122 bp, Homo sapiens
cccgcttctccccctgggataggagagggagagccgcgggagttccgcagccactcctggcgctgccaccacgaagcaggttcactagctaacagggcctgggacactgagccgtgtcgcaa

SEQ ID NO: 26292 - DNA, 122 bp, Homo sapiens
aatttatggcgccctgcacttcccctgagaggcaaaggaaggccctaggactggaagacacgcatctctccaatccacatggttgggtggattttatgtaccatactgaaaggaagccacct

SEQ ID NO: 26293 - DNA, 122 bp, Homo sapiens
gtactatcattaggctccatggccgacaggtctctaaagaagaacgaaggaaggaaggcccgctgttgcccagaccagagtgtacccgaaagactccctagcattaatccctgccccaatac

SEQ ID NO: 26294 - DNA, 122 bp, Homo sapiens
agggaggctgaggacagaatttccctgctcaaaactactgccctgtctcctctatagtatcgcatggtgtgagtatgccaaagtcttttctaccttcttttttgtttgtttttttaagagac

SEQ ID NO: 26295 - DNA, 122 bp, Homo sapiens
cgtgcatacttcagaaatcatgggttctcacccatacctctaattccaacccatgccctgcggctttttcttgccttctcctgttccgtacgtgtgtgctccttccccagggggaacgctgc

SEQ ID NO: 26296 - DNA, 122 bp, Homo sapiens
cgaggtgggggttaagtagtgctgggggctggtgtggggcacttaccttcatcataagcacgatggtgttgagggcgatcatggccatgatcgtgtactcgaaaggcggagacaccacgaac

SEQ ID NO: 26297 - DNA, 122 bp, Homo sapiens
ctggaggtctttgccaagttcccaggaggcagcatcctctgggtcggcactgttggagaacgctcagggtctggtgctctcgtgcctgccccttccaggcagccggctctgattgcacaagg

SEQ ID NO: 26298 - DNA, 122 bp, Homo sapiens
tgggcgccggtgtgtctttgttgctgagtgccgtcccgtcatatggacgtgcgtcgtgggcgccggtgtgtcttgttgctgagtgccgtcccgtcatatggacacctcatgatttgttggtt

SEQ ID NO: 26299 - DNA, 122 bp, Homo sapiens
cttgacagtccactctcgtagaggtaaaaggagaaaaatagttatggaagcgctttaaatcgtggacctcattgcgacacccttaacaaccctatcaggcagaacaaattgctccgcaaacc

SEQ ID NO: 26300 - DNA, 122 bp, Homo sapiens
gcggcggtggcggcgctagggacgggagcgcgcgcgggagctagagagcagtggtctcggcgctcgtccggcccgcagcttcgggtcctcaggcggctgttgctccggaacgggtggttggg

SEQ ID NO: 26301 - DNA, 122 bp, Homo sapiens
ggctcctcatcttaaagtggggttagccttagggtcgtctcggcctctggtgagccatcacggcagcctctcggcggggtctggcgggcaggaggtcctcggtgagtcttgccactgcctct

SEQ ID NO: 26302 - DNA, 122 bp, Homo sapiens
ctcccctccccttcctctcccttaagattttagtttcagtattgttcttaatggttgaatcgaatgtcaaatgctgaggcaggtactggctttaaagatcaagaagtgtgtggatttgcact

SEQ ID NO: 26303 - DNA, 122 bp, Homo sapiens
ccgggcaaggaggtctggatgctgagggcggtccctgaggggcgggcggggcccgaccggcgctctgtgtggccgaggccatgaagccgcagccgcccggctaggccccgggcggctctagc

SEQ ID NO: 26304 - DNA, 122 bp, Homo sapiens
gcgctcgcagaggctgcagccattgcacagccgagcatcccacattcaacaggaggaacccgcgggagaggagccccactcccccagcgccgcagccaccgcagccaccgcagcccgtgcgc

SEQ ID NO: 26305 - DNA, 122 bp, Homo sapiens
gaagctgtcctcctcttcccacccccaccttacttagccacttctctaataattctagtacgttttgaagggaaaggaaagctaggacctgccctttaattttcttcaagtcttctttaaag

SEQ ID NO: 26306 - DNA, 122 bp, Homo sapiens
ttgtgggcccaggttcctggcttgaggggtctttggggttagttttgtgggtggggccctcggctatgaggagacctttgtggttaaggcccattcccttctgatggccagggggctctggc

SEQ ID NO: 26307 - DNA, 122 bp, Homo sapiens
cacactgtgttgatcagtagataaaaccttcccggcagtcacagccgccgctgccactgacgaggccacagcagcgagcaagcggctctgcggaattcactaactgcctctccacctgccgt

SEQ ID NO: 26308 - DNA, 122 bp, Homo sapiens
atatcaaaaacattatggtcttacacattgcatttcttacagtaggtactaagagtggctcggatggctgtgtgctaaaaatcacattcatgtctatggcagaagtgatatgttaacttggg

SEQ ID NO: 26309 - DNA, 122 bp, Homo sapiens
gatcgccgtgaataggtttgcagccaccatgtgtgtccaacaggacgccaggacgtctatcgggtggaggcagtggtctgttcaggacacctggggacaccacagggtcctgccatgtctgg

SEQ ID NO: 26310 - DNA, 122 bp, Homo sapiens
aaggaaggttgggaggtggggcccagcagcttggggtgggggacagtggggtggatctgccgccacccagcctccacagcggggagcgaagatggtgagggaatcaggattagctccactgg

SEQ ID NO: 26311 - DNA, 122 bp, Homo sapiens
agatcctgcacccatctcgtctgcctccagccagggccctggctcgccagcctttggtctcgaactttgtttctgagaacacagcagacatacagggtgctgggagaggacaaggaagccag

SEQ ID NO: 26312 - DNA, 122 bp, Homo sapiens
ggactagcctgaggccttgtctagacagggctgagctgtttgtcgttggaaattgaggctcggccagaggcgggagcccctacagtgccacgatcaggctgaggctcaccacaccaggaaga

SEQ ID NO: 26313 - DNA, 122 bp, Homo sapiens
acagcaagtgctccatgaagcctatgaacagttgtttctgctcccttctcttccaccaggcgatgcccaggcccccggccactgtctccgccctcttggtaggccctgtgggatcaagtgtc

SEQ ID NO: 26314 - DNA, 122 bp, Homo sapiens
tggtacaagactcatgttaggacagagcgattgtcttatttctcctgctgaattagactccgtgttatttgagccacaggaaatagatatttttgcatttctgacttttcctaccatgggaa

SEQ ID NO: 26315 - DNA, 122 bp, Homo sapiens
taaaaaaaaaaaacaaacttttttttcctaggctgaagccctcttcagttccatgcaccacgctccgtagaagccccggcggaagccgtagctttccctgccacctggaggtgcatctgtct

SEQ ID NO: 26316 - DNA, 122 bp, Homo sapiens
ggaatggatagagagtctggggtcggcgtggggttgtgttttgactgcaagttggcatctcgccaggctgggccttcactctgtccccctgcatgaccctagcccactttggcttgccgaat

SEQ ID NO: 26317 - DNA, 122 bp, Homo sapiens
gatcctggacatagctcttccacttacactgtgcaatctcggcaggttatttagcctctccgtgcctcagttttcccatctgtaaaacgaggacggcatcatcttctctttaagtttgtttt

SEQ ID NO: 26318 - DNA, 122 bp, Homo sapiens
gagcaacaaggacccccgggaacccacctaagatcgtcatctctctggccatcacagtcccgccgaacaggcttgtgatgactgtaccagacgtgaggcaccgcccccactcctcccggcag

SEQ ID NO: 26319 - DNA, 122 bp, Homo sapiens
tagactgtgttttcatctgaaacatggcgttttaaaaaatgaaattgggcatgttcctttcggcagaattgtgcttaatagttggtgaggtttctatgggcgatgtggaaaacctacagcgg

SEQ ID NO: 26320 - DNA, 122 bp, Homo sapiens
gtggactgagagcactgtagggctctacaacgatgtctgacaccttgggcaagggtaggacgctgaatttgtttatgatcctgtctggatactcctcccggatcttactaatgagaagggta

SEQ ID NO: 26321 - DNA, 122 bp, Homo sapiens
ttcccaaaaccgtccttctgcagatggctcttagaacacaaccacatgtcccctaaagcacgggaagcttcgtgttttatgtttgggctgaatgaaaagaggaacgcacgctctttcctgcc

SEQ ID NO: 26322 - DNA, 122 bp, Homo sapiens
accctgtctcaaaaataaaataaaataaaataataaagtaaataaaaatattgagcagggcgaggtaagggggtattagaactctattctgtcagacagatttttcttaacacgcaagtgcg

SEQ ID NO: 26323 - DNA, 122 bp, Homo sapiens
gagaacagccactggggaggattgggtggtcagcttagaagctgtccattatgccccgcccgcggccctacaatggctgagtcaggtatcccagggatctgtgacgagggagctggggcatg

SEQ ID NO: 26324 - DNA, 122 bp, Homo sapiens
ccgcaagccgagccatgtttccggggcctcgggagcctgcagcccaggagccggagggggcgggggccagaaaaggagactctggtggccccgggcagaagggcagtggggaaggggcagga

SEQ ID NO: 26325 - DNA, 122 bp, Homo sapiens
ggtataaagaggcctaagtggagcgtgggtgggacagcggatacttgtaaataagcgcaacgcagtgataacagacttaagatccaggcctgtaagggtgtgggcatacacacaaaggaaca

SEQ ID NO: 26326 - DNA, 122 bp, Homo sapiens
agcttttaaatccacagttgtggctttgtgctcactccactggggtaatgaggctgcggtcggcgcagtgcaggtcagttctccgcgcctttgtcccgtggttctcacggtcacgggggcag

SEQ ID NO: 26327 - DNA, 122 bp, Homo sapiens
gctcacaaggcagtgacgaagcaaactcacatccgcggctccttttttctccttgaacgccgggctctgcggaggctcaggccctgcaggaatcgcccaaccagacagaaggcagctcgctc

SEQ ID NO: 26328 - DNA, 122 bp, Homo sapiens
cgcaggaaagcctcgccccagccaggcaagggcagtccctgccggctccttgagttctgccgtctacagcttgccccatcatgagcctggatgtgaggcctgagatcctcaccccactggca

SEQ ID NO: 26329 - DNA, 122 bp, Homo sapiens
aaaggcccttagagtttgggagaatttcacagactgggagggcacttctcccaaatcaagcgagcttgcaaaccacaatttaaatgcctgtgacattaccacactgaagacaggagcgagcc

SEQ ID NO: 26330 - DNA, 122 bp, Homo sapiens
cttctgtgggatgtttaagctctgccatagccacgtggtgaaccggaagggaagccgacacgtgcagtagcctacagtcagttacccagccatgggacccatacatttggccttacacacct

SEQ ID NO: 26331 - DNA, 122 bp, Homo sapiens
acaaatagttgctgtttttaattaaacccaacatggctacttccttaacttagaaaaaagcgactagcaatgttatgctttgatagattggaaaccatgggtgtgtgatcacacttaagaaa

SEQ ID NO: 26332 - DNA, 122 bp, Homo sapiens
atgttaaaactggctcccccagacttgtagtgctgtcttcagggggctgcattccttacacgccacctcttgtgacataggtcattggtcaagccgctggaatgctacagaggtttttttgg

SEQ ID NO: 26333 - DNA, 122 bp, Homo sapiens
gctacagaagtgaataagacacacatggccccctgcctcatggggggagacatgcaaacacgtgagccacaaaagaaaaaaaaggcagggtgatgagagagtgagtcagaaggcaggacagg

SEQ ID NO: 26334 - DNA, 122 bp, Homo sapiens
ttccgctgcagcccttccacaaggaccacggcctcctcaccgctctccggctgctgctcgcgtacccgagcctggatctcccccggcagcacagtcaggaactgctccagcaccagcagctc

SEQ ID NO: 26335 - DNA, 122 bp, Homo sapiens
aaagcatccactttgtgctctgcgttttgccacgttccagttgtatgtgagctgcagggccgcggagcgtggtgcaggggacggggttcatggagcttatgacggtttccccagtggcattc

SEQ ID NO: 26336 - DNA, 122 bp, Homo sapiens
ctttttttttttttttctgagacagaatctcgctctttcgcccaggctggagtgcagtggcgctgtctcggctcactgcaagctccaccacccgggttcacgccattctccggcctcagcct

SEQ ID NO: 26337 - DNA, 122 bp, Homo sapiens
accggtgtccctgagcctttggggcttggctgcgatcctatggttttcctaatccctgtgcgaggtgccctgacaagtagagggggtgagggaggagctgagttggcaggattctccagggc

SEQ ID NO: 26338 - DNA, 122 bp, Homo sapiens
acacctgtctacagcaaagcctcctctctctctctctctctctctctctctccccctccccgcctcagtctttctggttctgtgaatcagctttctcatggtgggaagcagctgcccctttt

SEQ ID NO: 26339 - DNA, 122 bp, Homo sapiens
ttctggaagaaaaagccacaaaatgagacttggaagggaaattgatcaacatctacaaaacggcttcttaaaggaagcggccctcagacaggacagagttgagggaaaggacagaggttatg

SEQ ID NO: 26340 - DNA, 122 bp, Homo sapiens
gatctgcggggtcccaagagtgggcgctctttctctttccgcttgctttccggcacgagacgggcacagttggtgattatttagggaatcctaaatctggaatgactcagtagtttaaataa

SEQ ID NO: 26341 - DNA, 122 bp, Homo sapiens
agggaagggaggagttggcaagaatttggctcacccattccccctgcaagcctccagcgtcgcggtaagtgatattctcccgggttgtgcagatgggctaggggtgttggaatcccaattgt

SEQ ID NO: 26342 - DNA, 122 bp, Homo sapiens
ccctccctggctgcccccggggggcagagagttcggaggtgaccctgcgaccccagttggcgcgatggccgcatgggcggagaccggcaaccctgcgcatcgctgacccccggcgctccgtc

SEQ ID NO: 26343 - DNA, 122 bp, Homo sapiens
agccgatgttgtggcaatggggtctgcagtactggagctgcaagagcccaccacacacttcggccccactcactgtggtgggctggaggaagctgagccctgctcattgcagtgggctggag

SEQ ID NO: 26344 - DNA, 122 bp, Homo sapiens
aagacccctgtcattgactggcataggtgagtggctggcatcatgggccatgagccaggccgcgtgaggtcgccaagggtcagccttcgggaaagaagggtttcctcagggagccaacctga

SEQ ID NO: 26345 - DNA, 122 bp, Homo sapiens
gagctttttcagatggggacccagtgacacggggacggtgcagccgtggctgaggcctgtcgggacgtgtgaactgtctcctccctccaggtgtgcggcagctacctcctccagcgaggcat

SEQ ID NO: 26346 - DNA, 122 bp, Homo sapiens
agtcgctcctggcctggctctgtggcctccccagaggtcagatcaggaaatgttgcgagccgaggaatgttctgaagcggagggcctctgcccttctggcctccacctgtgcccctaacact

SEQ ID NO: 26347 - DNA, 122 bp, Homo sapiens
gcacagaaagtccagtagtgcctcctggctcagctctcgggccatcgctgccttgtcctccgccccagaggtgtctgagtctcgccctcccggggctctccccagccagaggaaaccctggc

SEQ ID NO: 26348 - DNA, 122 bp, Homo sapiens
gccagcctccaggtctagaagctcctgccacccagtctggtggcaaccagactgggagatcggcccgagctccctgggcttctatgcagccagcaccgagtaggcgcgtgctgtgtgcctgg

SEQ ID NO: 26349 - DNA, 122 bp, Homo sapiens
caaaggaggcatgtcgctatactggcggcacaactgtgtaactctaccaggaacctagagcgacggcaggaaggaaacactgtcattgaatggaaaatacctctaaatcaatgcacaagcct

SEQ ID NO: 26350 - DNA, 122 bp, Homo sapiens
gggcgcggccggttgggggcacggcctagctccgggtgcgggcggggctggaggcggggccggccaccgcccggttcccgccctcgctctcctcccccagcgatcaggccccgccccgcgcc

SEQ ID NO: 26351 - DNA, 122 bp, Homo sapiens
agagtcataaaccatgagtttgaaagaggagactccaaagaagcttgacttggagggacgcggaggtcatccggcttgactttgtgcttagcttttatttatgagttatcttatttgccaga

SEQ ID NO: 26352 - DNA, 122 bp, Homo sapiens
agcgccctctgcaggctcagagagctcagtcctcgggctgcctctgacccgttactccctcggttcatgcttcttgagcacttattatgtgccaagcagttttatgtgcttaggatgcagca

SEQ ID NO: 26353 - DNA, 122 bp, Homo sapiens
gccccacttagccttgtgggacctcctcacttgattgaggtacatgtgtggtgatcaatccgaatccactctggcaccagcctccttcccaccataccaggcaggctgacagcggtcacgtt

SEQ ID NO: 26354 - DNA, 122 bp, Homo sapiens
ctcccgcgaagtttcccgctacccaagcgccagaatgcccctaggggtgagagtgccatccgcctccctccggggtggctcctagggctagagctttgtcgcttcctgcacttctcgtccgt

SEQ ID NO: 26355 - DNA, 122 bp, Homo sapiens
ggcagaggttttctaatgactctcccagctctgacatcctctgacttcactctgggagaacgtgggctggtggactcctggcagaagccgacacacagttgggccataacaaagagccctgg

SEQ ID NO: 26356 - DNA, 122 bp, Homo sapiens
ctcgccaacattattagatggtataaaaatgaatgtctttcagccgggcgcgctggctcacgcctgtcatcccagcactttgggaggcccaggcgggcggatcacgaggtcaggagatcgag

SEQ ID NO: 26357 - DNA, 122 bp, Homo sapiens
cggggaatgtgggcgggcgtgagcgagtggggcatcgggggccatgcggtgagtggatgtcgtggctgggagggtggggcagggaaaggggcggtgctgagtaggtggggctgcgctgattg

SEQ ID NO: 26358 - DNA, 122 bp, Homo sapiens
ctcaggtgatccgcccacctcggcctcccaaagtgctgggattacaggcgtgggccactgcgcctggccataaactttcaatgcgtagaaaccaaattaatttagaccttaaactagcagca

SEQ ID NO: 26359 - DNA, 122 bp, Homo sapiens
cacggccggaaagggcctcagtgcgcctagccaggcgttttgggtttgtttttaaagaaacgggtaaatcggcagcgagacagccccctgcaaataatgctggcattccctcacccatgcca

SEQ ID NO: 26360 - DNA, 122 bp, Homo sapiens
attgaagacactattctaatgtaggcccttttgaggaggcagcatgaacagaagaaaactcgcagcaaaggcttgaggggggaatgaatccaatccagcctgaaaaaatctgcaccaggttt

SEQ ID NO: 26361 - DNA, 122 bp, Homo sapiens
aattcaatcaatacctctcctggctgaaggaaatggctcacggaggagagcgaggcagctcgggctgtgcctgttgggccagggcattgcagaaccaggcccaccaagaggcacaggcagag

SEQ ID NO: 26362 - DNA, 122 bp, Homo sapiens
ttctcatctataaaatggagaatatactacttcagtgttgtgaaaactagatttgataaccgactggagccttcagtaatcccggtatgtaataactgctctgtcaaagtctgttgctttta

SEQ ID NO: 26363 - DNA, 122 bp, Homo sapiens
acaccaccacctagaattgcatccagcatttcagtttctctgtacatgccatgacattcacgatgatagacactggatacagcagctactgactgaacgatggacaggattttcagaggttt

SEQ ID NO: 26364 - DNA, 122 bp, Homo sapiens
gaccccaccaccgccgtccccaccccggggcgcgcaggtcgaggaggaccccgctgactacgaagagtttgaggacttctcgagtctgccagacacccgcagcatcgcctcggacgactctt

SEQ ID NO: 26365 - DNA, 122 bp, Homo sapiens
agcgaccacatgactaagcaaaggcagcggagagtggacggacggtgatggacgcggccacggagcccaagcgcccacaatgcgcattcctgtcttttctctccccgctcacctcagagcgg

SEQ ID NO: 26366 - DNA, 122 bp, Homo sapiens
atgtacccacaacctcatggaggctcgaggttgagcgggtgctgtgatgctcggttgagacgaggcatggaaaaacctgggcaaggtgcctggcacacagtaggtgccccagggggctctgc

SEQ ID NO: 26367 - DNA, 122 bp, Homo sapiens
gacagaggtggctacaggcagctgcactcatctctggagcctctgcagcccagggaggtgcgtctaacctcatgaccctctgaacccctagaagtggtcaactcgctgaagaacattgacct

SEQ ID NO: 26368 - DNA, 122 bp, Homo sapiens
ccaagtgtgtcccgtaagaacctttttttttttaacagctgtttttgtccattgtatgcacggctggatcatgttgattcaagcagggcccagcttaaaggcctttgtttcttcttttttat

SEQ ID NO: 26369 - DNA, 122 bp, Homo sapiens
ggagctcagttagtgccccctcccccgactcagactccagactggttgaaagggaggacccgaggaagcattgcggctcttcctgactcagggtgcaggcagagtcccccagaggtggccct

SEQ ID NO: 26370 - DNA, 122 bp, Homo sapiens
atcagaacagatacggtaggtgcccagctagtgacgggcttaaagactgtgagcctggaacggagattttggatcacattctgactctaacgctgcactaggggctcatccctcacttgcag

SEQ ID NO: 26371 - DNA, 122 bp, Homo sapiens
tatctcccaggctctacattctcgggagcggcgcctcccaagggggtcctgggaccttctcgcgctcctcctggcctctgagggatgcgtcctacccgcgccatcgccccgtggcccaggac

SEQ ID NO: 26372 - DNA, 122 bp, Homo sapiens
tggggtggctgccattcccttggttttcctaagccctttctaacgagagtctcaaacaagcggaggcgagggccaattcaaccccattctttccagcgccccgcaccatagcacctgcccac

SEQ ID NO: 26373 - DNA, 122 bp, Homo sapiens
gtgccgtggctgggagcactctgggaaggagacgtgctggcagagagggatcgggatctccgtcactcacatcataggacaggcatttgaggggcctagaggcagggcagggggtctgcaat

SEQ ID NO: 26374 - DNA, 122 bp, Homo sapiens
aaaaaactgaagcccttctcagaaaagcctccagtgaggaggcctgagtgggaagcctggcggctgaccctctgcacgtctctccctgtcctccgcagatcccctgacccccacgccgcccc

SEQ ID NO: 26375 - DNA, 122 bp, Homo sapiens
gaaattatccatttctttttcaacaaactgagaacacagctttaaaagttcattttaactcggtgtttatcaagagcttttatgttttgttttgttttttttcctttttttttgagacggag

SEQ ID NO: 26376 - DNA, 122 bp, Homo sapiens
tcgcggaccggcgagaagcgaggtccaagtccttggctcctaagtatgctgtgtgcggggcgcggctgactcagctctcccgggctgaggacaccccagccaccgtctccgggtctccccag

SEQ ID NO: 26377 - DNA, 122 bp, Homo sapiens
ggcaggaatcagaaccctgtgggtgaaaacattgcacaggagcccagggccagagcacagcgtgtcagtgaacagaagctgctgccatgatttagtccaccttcttacctagatcagccttc

SEQ ID NO: 26378 - DNA, 122 bp, Homo sapiens
tctcgggtcgggaacgccgcggatgtggggtcacccggccgcgatcccgctgcgccgctccggccaggccctgcctcccgcccgggcctcagtctcccgcatgtacaggacggggttcgcgc

SEQ ID NO: 26379 - DNA, 122 bp, Homo sapiens
ggtgctggagggctgtcggaagcatactgagttgtttgctgagtttacaagtgtttcctccgtgattaggccagctgtgtttgctaattggctctcagggaagttaggctcctaccctccca

SEQ ID NO: 26380 - DNA, 122 bp, Homo sapiens
aacggcagtgggaagacctctcagctggtactaaggcacacaggcacagcacagagaaggcgcacaaatattggctgctggaatgaagggatgaacctcctgacagttaattctgtactact

SEQ ID NO: 26381 - DNA, 122 bp, Homo sapiens
actcctgcttttgggaaaccctacagaaagcttctggttttgaattcgacagatatatcccggggacttagcacttctgaggcactgtaaccagagaagctggctcagggacaagaccaagt

SEQ ID NO: 26382 - DNA, 122 bp, Homo sapiens
gctgggctcggggagggaggagccgcaggtgtggggccaccccaggtgggcagagaaagacgctgggaccgcctcgggctcctcccagagccccagcccggctttgaacctcctcctagtcc

SEQ ID NO: 26383 - DNA, 122 bp, Homo sapiens
ccccagagtcaccctccagggcaggagcccgaatggctccatagccatgcccccacccaccgggagaagtggattcagtgactgtcaaagcaacccgggctgtgtcctgcagctgccctcgt

SEQ ID NO: 26384 - DNA, 122 bp, Homo sapiens
gccattcgccaaggaggcggtgagcgagagagcaaccttgcgcatgcgcaggactcgcagcgtcctcggcgcccggggacttgggggttttggggttgggggctgcttagtgaacgctgttc

SEQ ID NO: 26385 - DNA, 122 bp, Homo sapiens
cggtccggttcccggcagccccgcgccccgcccgtccccggcccccgcagcccgcagggccgccccgccaccctccccaccgcgggcgaccgggcctcaccgagtcagctacggaggtgcgg

SEQ ID NO: 26386 - DNA, 122 bp, Homo sapiens
gaccagcaccccgcgggtcagttgccttcgtgccacctgggctccaagtcctcgccctgccggatgaagcaatggtctatttctttatggcagtgtaggtacatgggagtgtgcatctctca

SEQ ID NO: 26387 - DNA, 122 bp, Homo sapiens
gctgagtacacgggggtgggggcggggagagcaggagaaagggctttacatgaatcctaacgtgtgaatgtttgcactgagagccagacttagccatctctttttatgggcctaggtgcctg

SEQ ID NO: 26388 - DNA, 122 bp, Homo sapiens
cgtgtcagcggtcggcagctccgccaggtgcgcaggccggccgcccagcgcggctagcagcgtggccatgctcttgagcagcgtggagatcttgctgcaccaggcgggcaggctggcggcgc

SEQ ID NO: 26389 - DNA, 122 bp, Homo sapiens
tctcttctggatactgctagttgcccgggacttcaagtaaggtggcaggccctttcactgcgttgccacagccccaggaacaaatgtgtatgaggtgaatttattctgtcccatgtcaccac

SEQ ID NO: 26390 - DNA, 122 bp, Homo sapiens
gatattaattttggattctactaaggacgacgggagccagctcaaggtttttaagtgactcgatcagattcacgaggttggttcacaaggaacttcgataaccccaaagtctagtgagcata

SEQ ID NO: 26391 - DNA, 122 bp, Homo sapiens
cacacgggtaggtggggccagggttcaagccaaggcatccacatccttcccaccatcccacgttgccactaggatgccaattctgggggacacaaaccactttctctggtttgttctctgct

SEQ ID NO: 26392 - DNA, 122 bp, Homo sapiens
gccgcaagctggagaggtgcttcccggccaagtgcccgctgctcaggctggagggtcaggcgcggagcctgcagcgccagcagcagcccgaggccgcgctgctcaggtgcgaccaggccctg

SEQ ID NO: 26393 - DNA, 122 bp, Homo sapiens
ggtcttgtacgtgcctaagttctagagcctcctgacgtgagcatggctgagagtgaggaccgctccctgaggatcgttctggtagggaaaactggaagtgggaaaagtgcaacagcgaacac

SEQ ID NO: 26394 - DNA, 122 bp, Homo sapiens
cagcaatttcatatgtttcagcctaatccatggggttgtactgatctttctgaccattctcggctgaaaattgacatggtcaaagtccttgcccttcagtatatgcatcgtattagcccttt

SEQ ID NO: 26395 - DNA, 122 bp, Homo sapiens
tgattttgaaacctgggtcaccttactagctctacattcatttgtgttcctcagctgactcggatcttgtttgtatcttccctagaatgctgaagccctgatggaagatgaatagaaaccgg

SEQ ID NO: 26396 - DNA, 122 bp, Homo sapiens
agagttctgaattcattttgaagaagtaacttcatttggtcacatttttgttcttattcccgtgagcaatagtttccatttaattgggaagatataaaggagagttcccatatatccccaca

SEQ ID NO: 26397 - DNA, 122 bp, Homo sapiens
ggtcgctggcaataaaaggactccagaattagtctcagagtgtggcatttctctataactcgctcggttacaacactatagccaaagattacattcataaagatatttttacaatataggtg

SEQ ID NO: 26398 - DNA, 122 bp, Homo sapiens
acaccacagagttttaacaattacttagttttcccatccacattcactgattatttatttcgagcattatcatttattgagcacagcagggactggggtcttgtccccaccttagagggatt

SEQ ID NO: 26399 - DNA, 122 bp, Homo sapiens
tcttgggttagatgatccattttatatattctaatttattgcttcccactcgttatttggcgcatctttacttactttactccatgggtataaaatgcgaaccattaacagcatttatacgt

SEQ ID NO: 26400 - DNA, 122 bp, Homo sapiens
gctctggggtcccagggtggggtgggcaactcaagtggggcaatgcgagaggaggctctacgcgtggggaagtttcctggcagcctgaagtgtacacctgacgcctgcactccctccctatg

SEQ ID NO: 26401 - DNA, 122 bp, Homo sapiens
taggcatgagccactgcaccggccttatgcctttaggactcttatttatttattttgagacggagtttcactcttgttgcccagggtggagtgcaatggcgcaatctcggctcattgcaacc

SEQ ID NO: 26402 - DNA, 122 bp, Homo sapiens
ctctcatctttccgctcttagctgggagtgctccgcctagtcacttttcttaaggtggctcgtcgaggcctgacttcttccccgaaatcacgtccctagacagcctcctattttaccactaa

SEQ ID NO: 26403 - DNA, 122 bp, Homo sapiens
ccttcttgctgtgtcctagcatgatggaaggcatcatatggcagaagggcaaagtgagggcgagagaaagacaaagaatgaactccttcatttaaaaggcaccactctcaggataaccaact

SEQ ID NO: 26404 - DNA, 122 bp, Homo sapiens
ggccgagccacacagcccctcccggtctgggaggccaggactcccgagtgtcaccaggcacgtccccatccatgtgacaagggcatgtgaccagtatgctgctctggagcgggccaccggca

SEQ ID NO: 26405 - DNA, 122 bp, Homo sapiens
tgtaactgttctcctttcccagctcctgtttgtgaagggcgtctgttatgctcctgcagtcgccgaggccttggatgtgcagccaggggaggagcgtcctgccggccccgcagggcccccag

SEQ ID NO: 26406 - DNA, 122 bp, Homo sapiens
caccccacctccctagccccaccctggcctcaccagcctcatggggcaggtatgggaagccgctggtgttcgacctgcgagaggaagacctgttcccagtcgtgcagcggcagctggaggcg

SEQ ID NO: 26407 - DNA, 122 bp, Homo sapiens
ggggagaagtgagtggaggatgagatcagctggcccagggacgaaaggcccgcctgccttcggggagggacacggggtggggtggggaggttccacgcgtaccctgcaggctctggtacatg

SEQ ID NO: 26408 - DNA, 122 bp, Homo sapiens
caatttcccctgggcgcccgccccgtcctccggtcactgcagcaccgtctcagagctcaccgtccaagtcctcgtctggagccgccgccacccggtgctgcacttccccctgtaccagaggg

SEQ ID NO: 26409 - DNA, 122 bp, Homo sapiens
cagttttagtcctttacggtgatttgtaagcccaggccttcttaactaggcaaatgctgccgccaggtggcctaggcctaaccccagagccgttgtcttgacgcttaagcttccggggaggg

SEQ ID NO: 26410 - DNA, 122 bp, Homo sapiens
gccggcagcgaaccccgcgcccaggcgggtagctccccggcgcgtctcggttggcccggccgctcggactcaccacaccaagtcgccgagccgcagactcacagccgccatcttaccaccca

SEQ ID NO: 26411 - DNA, 122 bp, Homo sapiens
gagacaccagggccaaccagagggtcttttcctctcccatgactcccctttgaagcccatcgtccttcccaaaggaataagagagcttaactcagactctcttcactggctgaacaggatat

SEQ ID NO: 26412 - DNA, 122 bp, Homo sapiens
caaggtgccttcctggacgggtgtggttcccagagcgtcgcggcccggggttgactggctcggaatcccggggccttgggcgcctcgcgtctcctgggacctgggttccgcgctggagggca

SEQ ID NO: 26413 - DNA, 122 bp, Homo sapiens
ctccaactccaaagctgtgccagggagacaccgctcttggggaagttgggctgcagcccccgcacgtgctaggaagataagtgaaggtcccaacacatcctgtccccttagagcccctgggg

SEQ ID NO: 26414 - DNA, 122 bp, Homo sapiens
ttccggagagcctgaggtgctgcttctgaactgctccttcccctggtgtgcaggtgtcttcgtcacagtaggacctgggagaacagttccataggtccgggggcttctctccagctggcgag

SEQ ID NO: 26415 - DNA, 122 bp, Homo sapiens
tcctttgtcaggtgaattagggagccgaggctggtgatggacatttactgctggtacccacggtagggcagggaggcagggacactgttgcctgaggtgtcctgcaaataaatgactcggct

SEQ ID NO: 26416 - DNA, 122 bp, Homo sapiens
agcgaccccggccccttccccaatttagcccttcctcttacctggcctaaatattctaggcgccaggcccagaggtgggacgcgcctcggggtcacgaggcttttggggaggcagatcgggg

SEQ ID NO: 26417 - DNA, 122 bp, Homo sapiens
ctacccccagaagccccgctccaccagcaggcactcaggccaggctgcaccggccccacccgaagccactcagcagaggcagcgcagtgtctggtgtccactctgggctcttctcactgtct

SEQ ID NO: 26418 - DNA, 122 bp, Homo sapiens
ggatttccaggctcgctccctgacctgctgcaccctttctgctctccatctttgcaaacacgaagcagaggtctcctctaaaggaagttaatttctggactcaaaactctgactttcactaa

SEQ ID NO: 26419 - DNA, 122 bp, Homo sapiens
gccccgccccgcctggggccgcctcctgcccgctcccctcccctaggcgctgggccgctgcggactgcgaggttagcagttaaccacacacaccaataataataacataacgaacaactcag

SEQ ID NO: 26420 - DNA, 122 bp, Homo sapiens
ctccgggcacctctgagtattttcctccattgaaaatttcaattacatgactgcttgacccgcctaccttaatggaagggtcatgaacaggcacagaattagaacctgcacgaggccccatt

SEQ ID NO: 26421 - DNA, 122 bp, Homo sapiens
catgggaagcagatgcggaatctctgaggaggctgttggctctccccccatgatagctgccggccaggtcgctcggagggtctccctacccaggagacaacctcacactgccccctgctcct

SEQ ID NO: 26422 - DNA, 122 bp, Homo sapiens
taatggaagacttcccaaaagattcgtaggcacaccctaatctgaaaagggcagcgctgtcggtatttttcagacaagtagtgtttcttttcatcgtgactgcagagaagttgttaataagg

SEQ ID NO: 26423 - DNA, 122 bp, Homo sapiens
ccccagtctgcagctggcacaaattctaaccactgcccctacctcaggccccattctgcacgcagccccttagcttgatgccaactgggtcacaggtcttcctgaactgggccacaagaggg

SEQ ID NO: 26424 - DNA, 122 bp, Homo sapiens
cccaggggactccacgcttacccggaagggaaagcgttctctgccctcagaaacatacaccgtggacgctgccttgtacggaaatacagaacacacttcccatctgcaaggtgtcagagcgc

SEQ ID NO: 26425 - DNA, 122 bp, Homo sapiens
gaccccaggctgagacacggtggagctgggtggctccactttatctccaccgaggggtgacgcctgggttcgtggaaaccaccagaggaaatgtcacaggcctttcccacccctcctgtcca

SEQ ID NO: 26426 - DNA, 122 bp, Homo sapiens
gttccaagaaatctgccaccagctccaagcctcatgtcctgaagtgccacctcattcccgcggggtgagccagcagcctctgaaaagaggaagccattgaacagatcacactgtgcctcccg

SEQ ID NO: 26427 - DNA, 122 bp, Homo sapiens
cctggatcccagccacctgtaggcctttctgggcaaaaccagtttagactgagaccagaacgctggagcaggaagccgccagcaggtgtctcgctccccggtcccagcgccctcaggaagag

SEQ ID NO: 26428 - DNA, 122 bp, Homo sapiens
ctccacaccggtcagcttatatagctggggccgggtgagataatcttccaacctgggaaccgaagtaacactcccacccccattaggagccaactcagaggcaggtgaattttcattccaga

SEQ ID NO: 26429 - DNA, 122 bp, Homo sapiens
ggccgcgataagcgccctgcgacccggctgaaagcgcacacgtgtcctgccgcgctgagccgccagcaggactggtaccaccgccctccctcggggctagggtcaccctgccgtgacacgca

SEQ ID NO: 26430 - DNA, 122 bp, Homo sapiens
attgagcagccagtagggggcggctgtggcctctggttctgcagaacacaccattgtccccggttctgtacaaactccttgaggccctcaggcagggcccaggcctgtgtgtgtgtctcagc

SEQ ID NO: 26431 - DNA, 122 bp, Homo sapiens
agactattgaatcagaagctgcatttttatttagcaaggcccccaggcgactcctgtgcacgattatagttgaagggctagtggactgtggtgacaggaacatatttggtgcttgtgcaggg

SEQ ID NO: 26432 - DNA, 122 bp, Homo sapiens
gtaacttccgaacctgggagctgcgccgagccgcggcggctagccgccttccccgggccccgcaccccagtgcgggatgccccccaaccccagcagccacacaaatggagtaggcgtcgcac

SEQ ID NO: 26433 - DNA, 122 bp, Homo sapiens
caagcatattccttggctcctcccagacacactgaatctgaatctctaggattctgatttcggagcccaggaatcctccggtgcaggagttcccaggtgactctgatgcaccgggaggctgg

SEQ ID NO: 26434 - DNA, 122 bp, Homo sapiens
agggctctgctgccgtcgtggaagcaggatttccgcggttgtgtaacggcctgtcgcaggcgtgcagggacctggactccgcctcgtccccggggctcgggcagccgagccatggcggggaa

SEQ ID NO: 26435 - DNA, 122 bp, Homo sapiens
gaagagcgtgacggagaaggccagcgtgccagtgcgcacctcgaaggggcggccctgcaccgcccagtacacggcggccacagaccaggcgacgcccaggccaaggaacacgttcaccgcgt

SEQ ID NO: 26436 - DNA, 122 bp, Homo sapiens
tacggctcctctaaatagaccatgtttaatcatcactgtcaggcggtgaggagcagccgtcggtggcctggtggcagtttataggcccagggccatatgtcccagagtgacatgcagggttg

SEQ ID NO: 26437 - DNA, 122 bp, Homo sapiens
acacatactaagtttatttcagtcacagcaagtaccagggccagttcaagtgctctagcacggcactctaattctaaagagaaggaaacgcggcaccggggcaggaaacagtgacaagtggg

SEQ ID NO: 26438 - DNA, 122 bp, Homo sapiens
cctctgtgttagaattggctgaagtgtttttgtgcagctgacttttctgacccatgttcacgttgttcacatcccatgtagaaaaataaagatgccacggaggaggttgtaggctcagcctc

SEQ ID NO: 26439 - DNA, 122 bp, Homo sapiens
tctcactcgccagctcttgccccacacaggtttccttggtggccagactaatgaaactaacgttcttttctacttggttacactgtttcacattgtaagtaaacaacctggggccatctctt

SEQ ID NO: 26440 - DNA, 122 bp, Homo sapiens
aagcagcccttgagtggaaagagggctcagttgaggagggtcacactgcagttcaggcaccggcaatagcactggcagcaggtaggagagtcctttagaaaccctactttgcttcactgtgt

SEQ ID NO: 26441 - DNA, 122 bp, Homo sapiens
agtcggcctctccacgtgcatgtgccaggccggcaggtccagccccctctgcttcctccgcgtgaggagggctcacagtccctgcagggcctgcacagcccgggagaccagcgatagggcag

SEQ ID NO: 26442 - DNA, 122 bp, Homo sapiens
ccaagttgtgaatggggccggatgggtgtgatgggcagacacgatgctcaggatgaaggccggggcacagccgaactcctcccttttcccagccttgctgtctcgggtgacctgggaccgga

SEQ ID NO: 26443 - DNA, 122 bp, Homo sapiens
gcgcggcagggagggcgtttccaggagggagcggcctttgctcagcgcgagacggctgggcgccgagtgggacagcgctggtgcggagactgcttccggactccaggtaccgcgcttggcgg

SEQ ID NO: 26444 - DNA, 122 bp, Homo sapiens
gcgacgcccgctctctgggatcagcctgggggcgagggtcggcgggggcggctgagtcatcgctttccagctgggcagacgggcggttttatttaccctcttcctttaaagggtttaataga

SEQ ID NO: 26445 - DNA, 122 bp, Homo sapiens
cccgggctgtcagagacgctgtggaggggccgcggcagccgcacgcagaggactctcggccggcactgccccttctgcggcgggccccgcccactgcagacactggccccgcccccgccgcg

SEQ ID NO: 26446 - DNA, 122 bp, Homo sapiens
cttcgactccatgatctgcatctccctggtggcctccatctgcaacctcctggccatcgccgtcgacaggtacgtcaccatcttttacgcgctccgctaccacagcatcatgaccgtgagga

SEQ ID NO: 26447 - DNA, 122 bp, Homo sapiens
gcccgcaggccaagaccgcaggaaaaaggcacgcagccgctgttgtatcttcagagtccacgcctctggcctctggggcctccggttcccctctgtggaatggggcaaaccttccagagata

SEQ ID NO: 26448 - DNA, 122 bp, Homo sapiens
gcccgcctcgcccctgcaagtttaaattcctcttagcaagcccagcatcgcagccaataacgcatcagggggcggagccgtagaggcttgcgccccgcctcgctccgctattggaaggaaag

SEQ ID NO: 26449 - DNA, 122 bp, Homo sapiens
gccttattatcaaacaggtgcatggtccccttgtgggggggtgcccgtcacctgcgtccccgtgcgtcacggcgttgccgcacaccattaacacatcaaaacggaaaaggaaatgtaagcag

SEQ ID NO: 26450 - DNA, 122 bp, Homo sapiens
gaggagcgcctctgcccggtcgcgaccccgtctgggaggtgaggagcgtctctgcccagccgccccatctgagaagggaggagcccctccgcttggcaaccgccccgtctgagaagtgagga

SEQ ID NO: 26451 - DNA, 122 bp, Homo sapiens
gcaagggcatcaataaaggcaaaaaagtgcttctctaaatcttccaaatcagagaatggccgctgggaccaaacagcagctgcaatcagaggacatctctcagtggcattcccaaacacatc

SEQ ID NO: 26452 - DNA, 122 bp, Homo sapiens
gtggcccccagccctatcctgacttgcaattggctgaactttcagggggcggggctcacccggtccggtccagttaaaagggtgggagcgtccgggggcccatctctctcgggtggagtctt

SEQ ID NO: 26453 - DNA, 122 bp, Homo sapiens
gtctttctccacgcgcgtgcaacgctcacacacttaggcccagacccccacggcgtcacacgagcatatccaggtacacaagcaagggtgcacacagacccgctgacacaggcaggcgcgca

SEQ ID NO: 26454 - DNA, 122 bp, Homo sapiens
cacctctcatcgtccttccctgcctgccagcttgaatgacaacgacttggtggactcagacgaagatgagcgcgctgtgggctccctccaccccaagggcgccttcgcccagccccggccag

SEQ ID NO: 26455 - DNA, 122 bp, Homo sapiens
tcctcgggaagaaaaaaaaaattgcggcaatccggctaaaattcagcagctttcagggaccgattcaggacattatccctgtggttccctcagtgaaaggagactcgaagcgcgactagaag

SEQ ID NO: 26456 - DNA, 122 bp, Homo sapiens
ttcactaagtggttcattagaataacaatccactggtagcagtgctctctcctgaacatacggagcttgcctttggggcttgtatgtgccttgtgatagatcttgcttgaagtatttatatt

SEQ ID NO: 26457 - DNA, 122 bp, Homo sapiens
tattattgcggtaaaagatacattaacccagatgaccttgccgggggccagaatagagcccgtgaggaaggagagcaaggcaggatcggccgggaggcgagagggattttgttgaggagcaa

SEQ ID NO: 26458 - DNA, 122 bp, Homo sapiens
gctggaggccaggtgccgagagtcggaggtttccggagaagcgatgaagcccagccagcccggaggtgacgtcactcgacaacccagtcgatgatgtcatcattggatgcgagaggggcggg

SEQ ID NO: 26459 - DNA, 122 bp, Homo sapiens
gtagttaagagtcagagagacctgggttgaggtcttagctcctacacttaactgtgtctccgggcctcagtttcttcatctgcaaaaatgaaatgacaccatttaccttctagggttgttgt

SEQ ID NO: 26460 - DNA, 122 bp, Homo sapiens
ccgggattagtctcataaatctttcactggcttccctggaaattctctacccttgagcaacgggggtgtggggtgaggggaggagtcagatcactcctgactcattagcgtgtttccacgat

SEQ ID NO: 26461 - DNA, 122 bp, Homo sapiens
gggggtgctgccgggactgccatgcccacctgagaggggcctggggtggccgtcctcggccggttagggaatttggggtgaggttcctcaggagccctcactctgcctgtggacgctgcacc

SEQ ID NO: 26462 - DNA, 122 bp, Homo sapiens
ttccagcctgggtaacagagcaagaacctggctctaaataaataaataaataaataaagccgagtttgcagctatcacagactctcagctgaaaaaacccttaaagatcacctaatccatcc

SEQ ID NO: 26463 - DNA, 122 bp, Homo sapiens
atcttcgccctgactcctataaaagtgtcacttcaccgtgagtgcaaaggtggccctgagcgagtgcctaaccaaggcccctctgccaggcttctccagctccggactctaaaggcttcccc

SEQ ID NO: 26464 - DNA, 122 bp, Homo sapiens
gcagcggccgccctcggagagccccggcgccccgccgcccggccccgcagacgccggaggcgccatggccgccaagcccggcgagctgatgggcatctgctccagttaccaggcggtgatgc

SEQ ID NO: 26465 - DNA, 122 bp, Homo sapiens
aggcgtgaacttttttttaacataattgttgccatcaattttctcagtaaagggagaaaacgggctatctgctgaagaatgggtgatcattcagaatatacagtaaggagaatgatggagga

SEQ ID NO: 26466 - DNA, 122 bp, Homo sapiens
gtgcacatgcacacccacgtgcacacacgcatacacataaatgcacatgtgcagatacaccggctgacagtgacagcacacttatgtgtgtgaaatgctttatgtgctcaatttcttttaaa

SEQ ID NO: 26467 - DNA, 122 bp, Homo sapiens
accattggcgccaatggggctgggagatgggggagctgaggagggcgcctatgggccacccgctgagactccgccccaccccccacccccacccccccgggctgcggtccggtagggtcttg

SEQ ID NO: 26468 - DNA, 122 bp, Homo sapiens
cgggcggcgcagcttcccgacatgccgctggaggagctgggccagcaggtggactgtgaccgcatgcgggggctgatgtgcgccaacagccaacagagtcccccgctctgtcacgactacga

SEQ ID NO: 26469 - DNA, 122 bp, Homo sapiens
actctcagcagagggtccagctgacctggcccacagagagggtgagataaaaattttacacgttttatggcactaagtttgtgttattttttaatatatcaatggaaatctaatatagtgtt

SEQ ID NO: 26470 - DNA, 122 bp, Homo sapiens
tatcagtgccgacacagaacattctgaatagttcaatgcctctttctgttaaagaggagacgcctcactctgccgctcaatcttggacttgtttgtgcacagaggtccttgcttatgtaaca

SEQ ID NO: 26471 - DNA, 122 bp, Homo sapiens
ttgtggagaaccactgtttccttggccttcttagaaagtatcagctaaaatcatgactgtcgcctgacagtgataataagacactgtcattcatgagaagcagcccaatttcagaaaggtta

SEQ ID NO: 26472 - DNA, 122 bp, Homo sapiens
taaaggaggggggacgccagcaaagcgggggcacaggggaggggcgcacgcacacgcacacgcacacatgcccgcactcacagatggagattctgtattggcaacttatccggaatctcaac

SEQ ID NO: 26473 - DNA, 122 bp, Homo sapiens
tgttttaaggcagagatggaacttgggcgatgggcggggggtgggggaggtgggaagggacggcttaggacagggcaggattgtggattgtttctgccgccttggttgcccatactgggcat

SEQ ID NO: 26474 - DNA, 122 bp, Homo sapiens
gatccgatcccagttcctccaaggggcctgggtgctggggaggggtcaggtagtccagtgcgtccacctgtatccacctggggccctagctgggcccagctcctggacagtgtcctatggct

SEQ ID NO: 26475 - DNA, 122 bp, Homo sapiens
gtagctggtgatagaaatttctaagaagcaaagcattcaagaggtgcttctaacaacctgcggctgcttctaacaacttatgcttagatgtggcaaaaatgacttaaagttggaatttacat

SEQ ID NO: 26476 - DNA, 122 bp, Homo sapiens
gttttccgtatagccataataaatggcaagttctcgtactctggtatttcctcataatggcgtatattttcatactccggtgcacagaggcttgtaacagacttgtaaggtgcctgagatga

SEQ ID NO: 26477 - DNA, 122 bp, Homo sapiens
ttttactctccatgtggccatcatggacgaggacgaagagggacttgatttttcctttaacgagaagaatgtttaagctctgaatttttaaccaatttttatgctcgttactctgctgtagg

SEQ ID NO: 26478 - DNA, 122 bp, Homo sapiens
gaaaagaatattaccatcagaatccaagacctccgaacttccctgctgaaggcacgtttacgtctttggactctggtgtaccagggcctgaacaagctataacaccatggtattaccaaata

SEQ ID NO: 26479 - DNA, 122 bp, Homo sapiens
gatccactgagcccggagagagcaactccgcaattttacctgagcggaagaattcaagaccgcattagataggggcggctgcggatccccgacacatcaggaatcggctggggccttctcct

SEQ ID NO: 26480 - DNA, 122 bp, Homo sapiens
aaattggtgggctgaaaagggggaaccttggtcctcccgcccactggaggcaccccaaagcgacaaaaggccctgaagtgaagctccagatcaaaaggggaatgggaagcagctgtggaagg

SEQ ID NO: 26481 - DNA, 122 bp, Homo sapiens
gtctatcctcccccgggtcccctcagtccattttcccccgagtatcctcagtccatcctccgcgagtatcctcagtccatcctccgcgagtatcctcagttcatcctccgcgagtcccctca

SEQ ID NO: 26482 - DNA, 122 bp, Homo sapiens
aagaattcggtctggccccgtgagactgaattctccctttcctctccccaagtcccggctcgtccttttagcaagtaagctagttacaggctggacagagatcccccttctctgcccatgac

SEQ ID NO: 26483 - DNA, 122 bp, Homo sapiens
cccagttttacaaaatactcatacccatctatctacgacggggcgcggggaaaggggagtcgttttaggaagtgctgcttattgctgcctggtgtgggaaattatgagtcttattttctgtt

SEQ ID NO: 26484 - DNA, 122 bp, Homo sapiens
caggtttcttctactgtggcaaaaagcctgaactgatggccttccagatgtgtattaaaacgatgtttctgaatgggcaaaataacataactgctgttttaactcaggcatagcataacagc

SEQ ID NO: 26485 - DNA, 122 bp, Homo sapiens
aaggacctttgtcaataagacggaatggatggccacacttggttgtaatcagtgggctctcgagagccagaggagtaaaagggagagaagcaatccattttgtgaataacacggccctccct

SEQ ID NO: 26486 - DNA, 122 bp, Homo sapiens
actactgccccctttagctgtgcctcagaacccacagttacatgctccacaatatggaggcgaataagcctaagtggactacaattcccatcatgcctcactgcaggcgccgccgacgtgtc

SEQ ID NO: 26487 - DNA, 122 bp, Homo sapiens
caaccctcaaggaactgaattctgtcaacaaccacatgattttggaagcagaaccttccccggtcaagctgcagataagatccccagccctgactgactcccggattaaagcaccgtaagag

SEQ ID NO: 26488 - DNA, 122 bp, Homo sapiens
aaagcgttgagccacctgagagcacgatgttggcgaacagcgtccggcgcaggtccatgtcggacttgtgtatggcgaaggccaccacctcatggagcccctcactctcatccccgacaagg

SEQ ID NO: 26489 - DNA, 122 bp, Homo sapiens
gggtgaggaactgagggtggggggcgcccagaggcgggactcggggcggggcaggcgaggcggagggcgagggctgcgggagcaagtacggagccgggggtgtgggggacgattgccgctgc

SEQ ID NO: 26490 - DNA, 122 bp, Homo sapiens
cgccatggccgagcgaggccgcctcggcctccccggcgcgcccggcgcgctcaacacgcccgtgcccatgaacctgttcgccacctgggaggtggacggctccagccccagctgcgtgccca

SEQ ID NO: 26491 - DNA, 122 bp, Homo sapiens
acacaaacgggattgggccaggtggcccggaagtgcctgggtccccagatggcttggatccgtgtctgtgggtctggcgggcccctcatgtatgccggctcccccggcagccccttggcctt

SEQ ID NO: 26492 - DNA, 122 bp, Homo sapiens
gcttcccatctccctcgccttcgtttccatccgcccacgcggccgcctacacccccactgcgctctggcaggaagggcccctctgcctgcgtcatgccagccacgtcaccaccacagccgct

SEQ ID NO: 26493 - DNA, 122 bp, Homo sapiens
tgcataaacccaggccacggttcctattggctgagtcctctgagggtgacgtcatcgggacgtactaagactagggttgggccgagagtcggagccattactgcaggaaaaggtcccggaga

SEQ ID NO: 26494 - DNA, 122 bp, Homo sapiens
cgcccccaaaccgacgtgaccctcctcccctgcagggcgccaggtgtgggtgtacacaggcgcgtcggtgctgggcccgaggcgtctggacaagctgggcctgggagccgacgtggcccagg

SEQ ID NO: 26495 - DNA, 122 bp, Homo sapiens
gtcccaccccaagggctggccgagctacagacagggggggcggccacaagctccccgagccgggaaggacccagcaggggaaccagaaagaggtccagagatgcagcttctgaagaggccac

SEQ ID NO: 26496 - DNA, 122 bp, Homo sapiens
gaagttgcagggatgtggctgagcccagctcccagccacagaggtgggtgttgctgagcccggggagcccccagacagtgcaagatgttagggtggtcggggtgctaaagccactcccgttg

SEQ ID NO: 26497 - DNA, 122 bp, Homo sapiens
ataaggctgaggtctgggaaggtcccgaacacaaagcttccgtgcctctccccacggaatcggagtacatcaccctcttgacacatcagtgtttttggtcatcaggaagctccattagtttt

SEQ ID NO: 26498 - DNA, 122 bp, Homo sapiens
ttaatgcatgttgggtaagctacaggtagaaattaactcaaggaaagtccttcaattaaacgtgtcataaccattggaatttcataagttgttttgattgttgattattttagaatggcatc

SEQ ID NO: 26499 - DNA, 122 bp, Homo sapiens
agccccatttcacatccgcccctaaatgggtgccatctgcccgtctgcttggagccccatcggccggctgcagtgataacagcagcagcctggatccagcaggctctctgggaaatcattag

SEQ ID NO: 26500 - DNA, 122 bp, Homo sapiens
gccggacgcgaggggcggggggcagtggccggaccgcacagccgcctacggtgtcccctgcggggaagcaaacccaaaaggcaggaggccactcataacctggtgccccaccctggcccggg

SEQ ID NO: 26501 - DNA, 122 bp, Homo sapiens
aggcgggttccaagataacccttaaagaatggggtgggttgagggaagggcctctcaggccgagtgaacagcaaatgcagaggcctggcctgaggaacaacaggttcagcgcgccagcggtt

SEQ ID NO: 26502 - DNA, 122 bp, Homo sapiens
cgggggaggagggaactggcgcgcggcttggtttccattagagacgcaaagtttctgctccgggaggaggcggcggcgccgcgggctcgtcgcctgggggagcagaagcgggtgggaggtgc

SEQ ID NO: 26503 - DNA, 122 bp, Homo sapiens
agtggaggctcattcactgattagatccagcgctgagaggcagcactgctccttctctcacgccaactgagtctcttgatctgtacatgcaatcccaggcagctcgcgaacacaaacccggg

SEQ ID NO: 26504 - DNA, 122 bp, Homo sapiens
ggcggtgtgtgcgcgtgggctcagggctcgtgaccctctgttccggcccacgcttctgaccggtgattagaaagcggcacgttctatcctcggccctgtcagccctgcagggcgcaccagct

SEQ ID NO: 26505 - DNA, 122 bp, Homo sapiens
agcgggggggaagggatgaatcgcagagcatggagggtgtttacggtagagagggcaaaccggtgcagccactgtggagaccagaatggcgatatttcaaacagtatttcaaaaacttatat

SEQ ID NO: 26506 - DNA, 122 bp, Homo sapiens
cctggaccgttagccggcgccgacgccgccgcatccccggcgcagggcgggcggccgggacgcactggccacttttctggtcccgggtggagcggctgttgcttctttccgcacttttcccc

SEQ ID NO: 26507 - DNA, 122 bp, Homo sapiens
cgttttgtcacatctccggtttcctttctttgcttcagcttccatgcgaccccctagctgcggacactccacacgctgagagtcagctgagcttgaacaaagagacctttctcctctgcaga

SEQ ID NO: 26508 - DNA, 122 bp, Homo sapiens
ccgcctcccccgcttgtggaaggaactgagcacgtgtttctaattgtggaaaagccgcttcggcttggcctgtccaaccgcaggcgtttccagatctaggaggtaagcagtgccggctgcca

SEQ ID NO: 26509 - DNA, 122 bp, Homo sapiens
tctttccacaacagctgctttccttaaacatcagcaattttaatctcacaaggcaaactacggaagaaaagccaaaagtaaaatcctgcttccctttaaaattcaaacagatgttctgtgta

SEQ ID NO: 26510 - DNA, 122 bp, Homo sapiens
agtcttgcagagaccagaggaaaacttaccagtcgcgagactagaggaaaactcgccagtcgcggtggcagcgctgaatcagtggggcctccctccggctcgcaggctcacaagcctcccct

SEQ ID NO: 26511 - DNA, 122 bp, Homo sapiens
tctttggaggaacagaggcccaggcgtacctcccacagcaaccccagaggaatgactgcacgcagggcccacgctcccggcctctgggacgctcacggcagccccacgagaatgatcacacg

SEQ ID NO: 26512 - DNA, 122 bp, Homo sapiens
cccaaaaggccacaaaggggccaccactacgcatgcgtagatccctcccgttagctttggcgcctcagcgagctcttctcgcgcatgcgttctccgaacggtcttcttccgacagcttgctg

SEQ ID NO: 26513 - DNA, 122 bp, Homo sapiens
gaactcctgaatcccagttctggcctgatcgcagtccatagttccacactaagagaagtacggctgctttggacacacgaggcctcttctttctaacttttattaatactatggttgaatgt

SEQ ID NO: 26514 - DNA, 122 bp, Homo sapiens
ggaaccgatgcctaattgaaaatcattaggctgtaaaccatttccatgttccaatttcttcgtttatagaacagaaatgatagtgtaaccacctgaaaatccttcacctagacttccaaaac

SEQ ID NO: 26515 - DNA, 122 bp, Homo sapiens
ttaagaaggcatatagaagaccactgcatgcaagaacaataccccattagtggattcacccggtgatagcctcctgcttagtcctgccaagacctaactgactaatcattttccccttcttt

SEQ ID NO: 26516 - DNA, 122 bp, Homo sapiens
ttgataaatgactgtaagcatcagtaggataaagcaccaaattcctgccaggagttggaacgatgccctcagaggtgcgaaaagctgaccgaaaggtgtggaaatgactggcggactcagca

SEQ ID NO: 26517 - DNA, 122 bp, Homo sapiens
tggagtgtggggccaggggagaaccttcagatccctgaaatatgccccagatatggtttgcggaactcaacggcatctttttcaccttcaacccaacctgtccccaatgtcagctctcagct

SEQ ID NO: 26518 - DNA, 122 bp, Homo sapiens
tatttaaattaaagctctcacaagggcgtacatctatccatcactttgcaatataatgaccgacagggctggaatgcaccccagtgtagaagccaggatggaatgctcacagtcaggacaat

SEQ ID NO: 26519 - DNA, 122 bp, Homo sapiens
ccagtgtatgccttacccacgtggcgaacgttgtctctgacgggcgatttattcattcctcgtccccctcttaccctcctcctccccctcttaccctcctcctcccttttggagtgtctgtt

SEQ ID NO: 26520 - DNA, 122 bp, Homo sapiens
agagtccccaaatcattcgagtccctggcattcttttttcaaggctttcttcattgtaaccggttcctgatggtaattggttgaatcagatttaacaatgcagtcagataaacagttgtggc

SEQ ID NO: 26521 - DNA, 122 bp, Homo sapiens
gtcggcttggcagtcgcgggcagacggctacggattcggggtttcgccccagcaggggtgcgtccttccaacccacgccggggtggctgcggccccttatccagcaacgatcgccgctccga

SEQ ID NO: 26522 - DNA, 122 bp, Homo sapiens
aggggcggggaaggggaaccggccaagcagggcaagggacaggcaccgagctgcgagcttcgaactgctccgggcagggcggcgcccgcggggacacatttctgtcggagtgagcagctacg

SEQ ID NO: 26523 - DNA, 122 bp, Homo sapiens
ctcaccgccacggtgtaactttcactccacataatccgcttccgggtttgcgcgcatgtgcgcgcgcagtacagaagccaggtctgggcggggcccgcgaggtgggcggggcctggatgagg

SEQ ID NO: 26524 - DNA, 122 bp, Homo sapiens
catacctaattaaagcataatagtgcccctttatatgaagtatgtttcctacggaaagatcgggcaatgtgctaaaagcatttcattttctagcatgagatgttcttgttttcatggcctgc

SEQ ID NO: 26525 - DNA, 122 bp, Homo sapiens
taggaaggggagatatcagaggacgggcaatgagagagaggaggagccccgagagagatgcgctcacctggacagatgctgcctctgaggttctccagcaggtgcgtcatggtgccgaagtc

SEQ ID NO: 26526 - DNA, 122 bp, Homo sapiens
aaacacaaaaatatgtaaatgaggacctaagagacagaatccagtattccaccgagggagcggagccacttgccagagctgcttcacgcagtgctttccacctctccgaacacacccagtgg

SEQ ID NO: 26527 - DNA, 122 bp, Homo sapiens
ctccagggcgctgggcgatgagaaatggcttatccaagtcctagggcagtggagggacttcgccctttcttaaatgggtcgtaatcagacagcatattagaggtgccatctgcaactgatca

SEQ ID NO: 26528 - DNA, 122 bp, Homo sapiens
atattctgcagtggagaagggacgctgtcacccctgggacccgggtcggcctgatcccaccgcctcctgccgggaccgtgctaagggcattgcctgcatcaccccagtgtttgcggaattcc

SEQ ID NO: 26529 - DNA, 122 bp, Homo sapiens
ggaggcaggtggcgtcactgcaggacagagtgttatctgcgtgcgatagaaagtccttcccgccaccaccgccgggcgcagtggctcacgccgtaatcccagcactttgggaggccgaggtg

SEQ ID NO: 26530 - DNA, 122 bp, Homo sapiens
ccctgagaggctctttggccatcttaccatccccagtgctccttgtcacattctgagccccgtagaccgggtcctgtcggctgaatcatgagtgtaacttcctgccatcatttcggtttttc

SEQ ID NO: 26531 - DNA, 122 bp, Homo sapiens
gttgcagtggaggcgggagttcagcccagtatagaagctgctcatctggcccaggtccaccgcgttgccgtgcgagaagaagaccgtgtacctggcaccaggcacgcagcgaacatacatgc

SEQ ID NO: 26532 - DNA, 122 bp, Homo sapiens
ttttttttttttttgtctctcccctgacactagataatgttgcatctaggcacctcttatcggccaatgctattgatggttcatttgtatttctgtcttggaaacatgttcattaagaacct

SEQ ID NO: 26533 - DNA, 122 bp, Homo sapiens
ggcagtccagagcaggggtggaagcggccaccttcccaggacctcttgaaggtatgagtccgtctgtatgtacctttgaatcatgtagatgtattggcagcttcagaagttaaattaaacat

SEQ ID NO: 26534 - DNA, 122 bp, Homo sapiens
tttagacctgaggagagtcattcaaacattaattagaagacagattaatcagttaaagttcgtggagttaagacattaaacaatggggcaattaaacatgctagcatacccggagtctgtgt

SEQ ID NO: 26535 - DNA, 122 bp, Homo sapiens
cagggatggggtgcccccaggtgtgtacagcgtccactctgtgggagggacctgccctcacgtctgggcctaggtggaggcagtgtccccacaatgcattcctgcagggccgggcctgttcc

SEQ ID NO: 26536 - DNA, 122 bp, Homo sapiens
cttcctgcctttcacaagatggttttccaggctcccacgacagtagggtgggcagtgggccgccaatttctgagaaaatcttcaagaacatgtttctggtttgttttccagaagttcaggaa

SEQ ID NO: 26537 - DNA, 122 bp, Homo sapiens
ttgagtccttacataaggaactgcaacctacgttagaacttaaaggaagcgaaagcctaccgtaggagtatactcttataacatataagtgagcctcaatccattacagcagctaggcttca

SEQ ID NO: 26538 - DNA, 122 bp, Homo sapiens
cgcgtgggcaactacctcatcggcagcaggaagctgggcgagggctcctttgccaaggtgcgcgaggggctgcacgtgctgaccggggagaaggtgagtctcccgggcgccgtggggctggg

SEQ ID NO: 26539 - DNA, 122 bp, Homo sapiens
tccatcgaaggcaacattggtaagggccggaaagcggctgccaagccttggcctccgccacgcaggcgacagaggctgggaaaggagctgggcccggaatggcctgcgtctgatgcggccgg

SEQ ID NO: 26540 - DNA, 122 bp, Homo sapiens
tgccccggacgctgaccccgcgcccaggggccgcagtgctgcgatgagcggccccgagcccggcagcccctaccccaacacctggcatcatcgcctgttgcagaggagcctcgtgctcttct

SEQ ID NO: 26541 - DNA, 122 bp, Homo sapiens
ccccttgccacccatctttcctgtcatagcgagggcagcgttgaagagctttggggtgcccgcccggggtggaaggatcagcacgctcttctcctccttgggcttattgttgcttctcagca

SEQ ID NO: 26542 - DNA, 122 bp, Homo sapiens
actcagcaccaggcagcagggaggatgttctgtggctcaggagccaggaaaggccccagacgtggagcgtggccatcacgggtgggcctgcccctgccaaccctccctcggggctgagcagg

SEQ ID NO: 26543 - DNA, 122 bp, Homo sapiens
ccccagtctcgtgattggcggggcacagcagacgcccctgggctgcagcatgattggtcgcgggttgctggtcctgggtcccgggccggagccccggtgcccgatagatgggccggaagggt

SEQ ID NO: 26544 - DNA, 122 bp, Homo sapiens
gacaacacctggaccagtggggctgacccagccagcggcaggagtggaggcaggcagggtcggcaccgcaggtgtcctgaccctggacccctccatgttgggtccctgccttctgtgccccg

SEQ ID NO: 26545 - DNA, 122 bp, Homo sapiens
catttccgcggctccccaattcgcccatgactttgaaatctgtctctggccgcttatcctcggattattgttttcataatcgctgtttttgtgtgtatgtaaactttaaaaccaaacgtttt

SEQ ID NO: 26546 - DNA, 122 bp, Homo sapiens
acctcgggtgccctggagacccgggtcggccaaagcctgggaatgagccgcagttgggagcgggaaaccgaaacagcaatcctggaagagcgtcggcccagagaaggcgccgcggaaacgcg

SEQ ID NO: 26547 - DNA, 122 bp, Homo sapiens
aactcgtgaagcgcagggggaggcagaggagagtgggccgcgcttccttcccgcatcacacgtttatttgaggcctactatgtgccaggaacaactggggttaccaccccagcaaacaggca

SEQ ID NO: 26548 - DNA, 122 bp, Homo sapiens
tgatggagccgagagtgtccagcagggacagcgccttccgtgcagggtaaaaagccactgcgagccagggacagctggcctccaaaacccccaaggacgcggtggaggtaccttcagttaaa

SEQ ID NO: 26549 - DNA, 122 bp, Homo sapiens
cccatcagctcttccttcacctgaactgccccggcctcgctgagacgcggattttaaaaccgccctgcacctatgtgctggcagccaggccctgggaacttcctccaaacactcccatgagt

SEQ ID NO: 26550 - DNA, 122 bp, Homo sapiens
gatggcatttgtagtctatctagattccagcttcagataatatgtactccactggcagcacgagaaataaatacacaggaaaatacaatatagcacaaaccaggagctgagggcgaatgaag

SEQ ID NO: 26551 - DNA, 122 bp, Homo sapiens
gaagggaaaagaggaatgtgaccacaggaaaaaatagggagtcactgagaacctgaggcacgaagtcaaactgaaaatgtgaacatatccagaatacaatctcaacggctaccacccttgtc

SEQ ID NO: 26552 - DNA, 122 bp, Homo sapiens
acgggaaattaaaactcacagaactcacactcttagtgaggttcaggcatttgaacagctcgaggagcatttccagagttctgaaaaagttgatttttaggatttttgccagtgttctgtta

SEQ ID NO: 26553 - DNA, 122 bp, Homo sapiens
cgaagacccccgcaggctgcgcttccggaagtaacccctggcgcatcccggaatccagagcgcccactacggcctttggccaggccccctgggcgcgttccgggagctcaggcctgcggcgc

SEQ ID NO: 26554 - DNA, 122 bp, Homo sapiens
gtcacgggagtgggcggagtgcacgcagggacggagtcgggggcgagcagcgagagaggccgggcttgacccttgaggcggggtgggcagcgtccggggagcgcgccgagccgcttctagcc

SEQ ID NO: 26555 - DNA, 122 bp, Homo sapiens
gacctgagctgggcgcacggtgccggaagtcgtccttggtgaggatgcagagggcgcgtccgttcatctcgaacccgtgctccgcggtgcatggcagagagtactcctgctctgcccagcgc

SEQ ID NO: 26556 - DNA, 122 bp, Homo sapiens
gaagcagcttctgtacaagtctgatttctcctgcctggcctgggtgatcacagtgggtcccgggatgtttaaactgatggtagagtcaaccatcagcatttatttctgtgtttacagtcttc

SEQ ID NO: 26557 - DNA, 122 bp, Homo sapiens
catcctgcccacgcttgtgccctggtatttctggggtgaaacttttcaaaacagtgtgttcgttgccactttcttgcgatatgctgtggtgcttaatgccacctggctggtgaacagtgctg

SEQ ID NO: 26558 - DNA, 122 bp, Homo sapiens
gcccagcgcctccccacggcacagcgcctccccactgcccagcgcctccccactgcccagcgcctccccactgcccagcgcctccccacggcacagcgcctccccacggcccagcgcctccc

SEQ ID NO: 26559 - DNA, 122 bp, Homo sapiens
gtgcgtggcaggggcgcagcggcactggcagagggcacccccattccagggcagggcaggcgggctccttggtggtcccccagccgctgcacatctgatcactgtgtcttcagctccctgtg

SEQ ID NO: 26560 - DNA, 122 bp, Homo sapiens
actcaaaaggagccatgagcaaggcctgatattaccacaaataatctggtttctgaaagtcgaaaatgaaccagatggcttttaaggaaaacaggacacacatcggattccaattatattaa

SEQ ID NO: 26561 - DNA, 122 bp, Homo sapiens
ttgtcctcgcccccttccagactctgaatgcatgaccccgcctccttctctacccggccccgcccacaggctgcctgaaggggctgcgcctgggccacaagtgcttcctgctctcgcgcgac

SEQ ID NO: 26562 - DNA, 122 bp, Homo sapiens
aaaccatacaaacgtaaggtttgtgacaaggctttctgggataattcatgcctttcatgccgtaagagttcatactggagagaaatgttacacatgtaacgaatgtggcaaggcttttagta

SEQ ID NO: 26563 - DNA, 122 bp, Homo sapiens
gccgccattggcccgcggccctagcccagccttgttcccattggccagaggccgttcccgcggctgtccatcacctcttgtttaccctgtctgcgggcaaatccaaccaagccgccccatca

SEQ ID NO: 26564 - DNA, 122 bp, Homo sapiens
ttctttgaagctcttttttcgcgttcttcctctttctctcgctctagccccaaggccccccgggggacgtcttaatcccagatcagctcctctgccaggagtcccgccggagacccactgcc

SEQ ID NO: 26565 - DNA, 122 bp, Homo sapiens
cgtccttgaagcgagtgtgaacgggcttcggaatcgactcctctgggtggtcgaacggctcgaagagctctagatcgccaaaatacacctctgcggccattttgggctgtggaaaagattcg

SEQ ID NO: 26566 - DNA, 122 bp, Homo sapiens
gaggaaggctctgagacccgctttgtgaccgtgacccgccaagcgtcgacgcgccgcggtcgtttgtcctgttttgctttgtgtagagtctgatggagccaccagtgcccagcgcggccaga

SEQ ID NO: 26567 - DNA, 122 bp, Homo sapiens
tccacccctggccgggccccgacggctcaggctgcgcggggatggggcagggggccagggcgcggccgaggccgcaatcccctctgctggcccgggcccaaggcccagcattgtggcttccg

SEQ ID NO: 26568 - DNA, 122 bp, Homo sapiens
tcactgtatcacactaaccagcagagggtgcacaataaagaagagaagcctctgactctgcgggaaggtctctcacagaaccaaggacgttgccacccttggctgggtgtacttgaccaaag

SEQ ID NO: 26569 - DNA, 122 bp, Homo sapiens
cagagggcctcaggcgttcatctttccataagcatttatcaagaacctggtggctcatgccggtaatcccagggttttgggaggcggagactcaaggattgcttcaggccaggagtttgaga

SEQ ID NO: 26570 - DNA, 122 bp, Homo sapiens
atgggctcccagtagtaatggggatggaaaatcctgaaataagagatctcaagtggaggccgtcaactgtcagcaggaaggagggtgcaatgatggaaataattagagaagtcacaatgcta

SEQ ID NO: 26571 - DNA, 122 bp, Homo sapiens
ttacgagaccccttctcagtaaaatatttttctggtctctcttctacctccttctgctgccgctccagctccttcatggggatctcacgagcctccgcgcgggcctcccgttttgcggcgag

SEQ ID NO: 26572 - DNA, 122 bp, Homo sapiens
gctgcctcctgcctgacccttcatctcctgccttctctcgccagatgccggtgcagctgacgacagccctgcgtgtggtgggcaccagcctgtttgccctggcagtgctgggtggcatcctg

SEQ ID NO: 26573 - DNA, 122 bp, Homo sapiens
cgggaaagctgccaatctagtctggccagcagaatttctttcagtaggtctaggctccctcggcattgggaatccagatgtaaagaaaacttacgccataaacttcaaggtagatttcagtt

SEQ ID NO: 26574 - DNA, 122 bp, Homo sapiens
gaggttaggtgagtgcagttcttctcattccagagctgaccttgctcctcgctgtctgcacgttgcttcaaggatggcaaatcatgttcctaaactcaagtgcagcaagactataattgctt

SEQ ID NO: 26575 - DNA, 122 bp, Homo sapiens
catttgtattgaaaatatctgcaaggtgccttctctagtgttgccgggcaacctcccgagcggagaggggagggcgctgggcggctgggccccgctggctcatgcacgcagggacacttcag

SEQ ID NO: 26576 - DNA, 122 bp, Homo sapiens
actaaatggttagaaaggaccatggtcccatttagaaatctctagagaaagactgtctcccgtgtatcacaattgaggctttctccttcaggttgcatatgaataacacaacccatgtacca

SEQ ID NO: 26577 - DNA, 122 bp, Homo sapiens
ggacgaagagcagggatgagtagaaaagagagcgaaggaaagccgcgtggaggattcgttcgaacgagctgtcaatcaagagcagcccgccctcgagctctcgacttcccttccccctgcgg

SEQ ID NO: 26578 - DNA, 122 bp, Homo sapiens
ctgttatgaaaacaggacacaggtgcaaataaggggctgtatcttctaactcaaggaacacgccacggtgccgggcgggtgtcgtccccagcatcccagaagcaccacagcaagtcagccac

SEQ ID NO: 26579 - DNA, 122 bp, Homo sapiens
cttacaggctgtagaatgcactctagaccataaagcacgtcagacccaattacaatttagcgccaagctacgtgagttttaaggctattacgacaggggtaatgtgaagctcccacgggaac

SEQ ID NO: 26580 - DNA, 122 bp, Homo sapiens
ggcataagacattttttgtctctgccttctgttctctgtttcttgctccttttgtctctccgtccatccttccatctgttctaccctccctcccctggctttttcctccctttctccctccc

SEQ ID NO: 26581 - DNA, 122 bp, Homo sapiens
aaagcataaatccttgtagggctgttgtgaagaacaaggtaagaaatgcacataaagtaccgtgcacagcacctaaaatgaggtaagcacctagaaaatgcaagctggtcttcttcatatta

SEQ ID NO: 26582 - DNA, 122 bp, Homo sapiens
ctactctgcaagctctgccatgatctctgttggccagtggctgtcttgtacagtccttgtcgagcgcctgacgcctggttcttagtgtcatcttatggttttcttctctcaacatcatcctc

SEQ ID NO: 26583 - DNA, 122 bp, Homo sapiens
cctgccggtcctccccgccgggctccctcgcagctcgcagctcgcagctcggggaaagggcgggctgcgccctcaggacctttctcagcagccacagcagcgcatcccagcacctcctccag

SEQ ID NO: 26584 - DNA, 122 bp, Homo sapiens
attccaaagtatttaaactgtacctcaaagaagctctcagagagaatgcacgggagtggacgatggcgggcacaagagctcgtcaagagcactgttgtgaagaaaagcagagaggcggcggc

SEQ ID NO: 26585 - DNA, 122 bp, Homo sapiens
cagggggcggtgctgagctcagcccaggcgcccaagttttgagtctgcggcaaagcagtccgagtcccatttgcccggggctggagtcactcggggttggagtcaggcgcctggaagaccct

SEQ ID NO: 26586 - DNA, 122 bp, Homo sapiens
gctggggagaaacaggacaacctaacaaaacagggcctggactcctccctaaacagaccacgtttttctccgctcttccccttcccactccctgaaatctagactaaaactcttttaagata

SEQ ID NO: 26587 - DNA, 122 bp, Homo sapiens
ggacacggtgatggcaggagagcaaaggaagtgggcagattctggctatacttttgcacgcgagacagtgggacttgccagcttgagcaaacagatgaacagaaatatttccaagatgcaga

SEQ ID NO: 26588 - DNA, 122 bp, Homo sapiens
ctttacttccgctttggcctcagccttctacaagtgttcttattctgtgggctgccttcccgcacttactctcttgctgtcctgttccattcattttattggaccatctcactttcattatg

SEQ ID NO: 26589 - DNA, 122 bp, Homo sapiens
gttttctggcttctggatacactttcaaagggccagagggcacgaggcttccgccttggccgccacctccccggccagctgcggtgttcgcggccagtgttgccgggcacttcctggttccc

SEQ ID NO: 26590 - DNA, 122 bp, Homo sapiens
aggatgaagcttcctgctgccaccaggtggcggcagatcttacttttacactcagggcaccggctcgcacacacctgataattgtcggtggcatcccccagaagcccaccaaaggtgatcgc

SEQ ID NO: 26591 - DNA, 122 bp, Homo sapiens
ctgtcgcctaggctggagtgcagtggctcggtcatagatcattgcagcctggaattcctgcgctgaagctatcctcccgcctcggcctccggagtagcttggaccacagttgggcccatcac

SEQ ID NO: 26592 - DNA, 122 bp, Homo sapiens
gccggctctgcggtcagctctgagctaggcgctgtgagaacgctcagtaagacagtgtctcgtctggaaatgtacaggcgagattcaaaccgagaaactgccaaaggttgtgtgcagggcag

SEQ ID NO: 26593 - DNA, 122 bp, Homo sapiens
cactgtgctgggagcaagggggtggtatctggtaaggctggtaggggatgagcctctttccgggactatcttggacctggggagtgtagggctcctttgccttgcattgagaagtagtagtt

SEQ ID NO: 26594 - DNA, 122 bp, Homo sapiens
aggccaggtaggtcagctctgaaagcacccggtgctgcggggcctgccttcctgtggcttcggcttgggcgccatcccaagccgggttggccagaactctgcctgtgcagccccgcccccag

SEQ ID NO: 26595 - DNA, 122 bp, Homo sapiens
tcccatcaaccctcgccaaaaacgccggccccctcatagggccgtccggccacgcccctccgtgccctaaccacagagccacacgttacgccgccgccccgttacgcccatccggctcccgc

SEQ ID NO: 26596 - DNA, 122 bp, Homo sapiens
taccctatgtctgcaagttcaaggactagggcaggtgggaagtcagcagcctgagcttggcgtgcagctcatcatggacatgagaccagtgtgaagactcaccctggaagagaatattctcc

SEQ ID NO: 26597 - DNA, 122 bp, Homo sapiens
aaaaatcacccccaagtccagtcaccaccccccaggccccacacccaacactggggattacggttcgacaggagattttggggcacactgatccaaccatctcaacagcaaagagtgatctg

SEQ ID NO: 26598 - DNA, 122 bp, Homo sapiens
gtgtgcagtgctgttctcactctgctgcctgctgggctctcttccagtggtctaccatcacggcaacagtgcgacgggcggccattacactacagacgtcttccagatcggtctgaatggct

SEQ ID NO: 26599 - DNA, 122 bp, Homo sapiens
aagagcatggatttgagtgtggccctggttctcctttgtctttcttacctcttcctcctgcggtttggctcactcctccagacacggattagacccacgttcccttcaggcaagctgggctc

SEQ ID NO: 26600 - DNA, 122 bp, Homo sapiens
aagccaggctccgagccggctgctgggtagagtgccgcaccccagggaacgctcagccctcgtggactcacctctgggcttgcccagcctaagccccgcagtaacagctggggtgaagcctg

SEQ ID NO: 26601 - DNA, 122 bp, Homo sapiens
cgggcgcgggcgggaccgggtgggcgcatgcgcgctgggctggctgggcggggtctctcgcgccgggtgagggcgctgctcccaggaacctgcgcgcggccccggcggcgtttcccgggggc

SEQ ID NO: 26602 - DNA, 122 bp, Homo sapiens
cgccccgctctccagtcatctgagtggtagagggccacgcccacaggcgcctccgagcaacgcccactgctccttagaccccggagcggggttcttagagccccgcccactgacccgctagg

SEQ ID NO: 26603 - DNA, 122 bp, Homo sapiens
aacctgatgaaatacctaccagaggcaagggtggcatccgcattccttgtgttatctggtcggacgcccccgcaggccgtctaacttattcaaaggcgcggctgagcgtttgcagcgcggtc

SEQ ID NO: 26604 - DNA, 122 bp, Homo sapiens
cggtcctggaagtaaatgatccaaggctccaggtgctgggaagagagcaggaggggagggcggcccatggcactgccatctagaagggtagtggctcttccacaggaatgttgaggatgaca

SEQ ID NO: 26605 - DNA, 122 bp, Homo sapiens
acataacctagcggaaaatgaagacctaaaaccgctcgtgagcaaacacaacactttagacgtaaacctcttccaaagaagggtggatctcagcactctgggtgaaagcaatctcagccagt

SEQ ID NO: 26606 - DNA, 122 bp, Homo sapiens
tcatcaggcacaggctctgagggagggtcctggggccacatgactgcagccagcgagggccgagcccccagaatccaggtcagctcctggtggcaggggacctgcccgtcaaagccgtccaa

SEQ ID NO: 26607 - DNA, 122 bp, Homo sapiens
tgaatcttcctatagctagagaaatccttttgggaataaggcagagtataaataaacagacggtgggtggatagttagataaatacatacatgtgtaattctcaccgtggcctggaaatctt

SEQ ID NO: 26608 - DNA, 122 bp, Homo sapiens
aaatcttaccttctaactggcagaaaattttcacctttgtttatttctctcctttgggaacgtctctcccctggttcaaaggaaaagtcattcctgtgcccactggcaacctccttttcatt

SEQ ID NO: 26609 - DNA, 122 bp, Homo sapiens
cactgtgaggaggggatgggggtgtgagagcaagtcttagccatgcctcatccccagttgcggcccgctccaagacatatgcctctcctcctggcgcagtcgtgtctggcctggtctcggtt

SEQ ID NO: 26610 - DNA, 122 bp, Homo sapiens
caaaacaagcttctttgtaacttccacctactaaaaccattccattaccaccaactaagacggattctccacctgcccatcccaaacctacccccaggtgtcccgtgtctccttgtctcctg

SEQ ID NO: 26611 - DNA, 122 bp, Homo sapiens
ctgagcatccggccgggggacttctctcgctccagggggcggccaggagacttgtccctgcgcagctcggtccgcccctcgcggtagcggtggggtgtgcttggctctcgcgggtggctggg

SEQ ID NO: 26612 - DNA, 122 bp, Homo sapiens
ccgccccctggatctctccctaccctcccagtcttgccccggccccatgggatctgtccccgccctccgacttctgaccctcgccactgggatctgtcctcgacctcccagtcctgcctccg

SEQ ID NO: 26613 - DNA, 122 bp, Homo sapiens
cgttccatgaacctgagggccaggaagaaccgctctcagatagtcctgttccagaaacgtcggttccagttcttctgttccatgagcggcagggcttgggtttccccggaggagttggagga

SEQ ID NO: 26614 - DNA, 122 bp, Homo sapiens
caaagtaacctattgtctgtttacatgccacatgacatgaaactctattttaatcaggaccgtcacagataatttctgcaataacatatatctagggatggttttcaaatggagttgtcatg

SEQ ID NO: 26615 - DNA, 122 bp, Homo sapiens
tctttttgtaatagcagcaggtgcaactttttgtattttaaaaatagtgatttttattttcgtgtgggtatgtaggggggctttatccaccaagctatgctctattagggcgccaggcgggc

SEQ ID NO: 26616 - DNA, 122 bp, Homo sapiens
tcgcaattcgtcgcttgctagcagccgttgtctcgctggtgcctacgctgtcaaaggagccgctctaggcttttgggaggccgtctgcattgcgtggggaaggcttggacgacgcaatcgcc

SEQ ID NO: 26617 - DNA, 122 bp, Homo sapiens
tccttacacagaaggaatttgctgtgtgaagtcctgggacctcttgagtcatcctgaccacggccctgccttccagcccacctgtaccggagcccctcatgggagggtccctgtgaagccac

SEQ ID NO: 26618 - DNA, 122 bp, Homo sapiens
tgctgacttactgcagaaggcccaagggccagtgcagttttcatactgctgttgtagtggcgaacggagccacgagggaagggagcgccgccggcagctgccgggacaccaggataccacgc

SEQ ID NO: 26619 - DNA, 122 bp, Homo sapiens
ttgaaagagacaagctggaatagagatacatccacttgagtcaagggaactgcaggagagcgggcctgcagggagcctctccagcattcctattcaagggccagaagagaaagaatcagctt

SEQ ID NO: 26620 - DNA, 122 bp, Homo sapiens
gtgtggctctaaggtgggcagggagagccagtggcaagctcagaagacttccagaaccgccggcccgtggcagcgggagtcggctgcgaggctgtcccaaggccgggtgtcctgcagggctg

SEQ ID NO: 26621 - DNA, 122 bp, Homo sapiens
acttccttcatttccgtgttagctcatacctgacattctgatggaatcaacttttccattcggtgtgtaaccaacagtagatggggattacaacagaagtttgaaatctaggccacgcacgg

SEQ ID NO: 26622 - DNA, 122 bp, Homo sapiens
cgggcagcctgtcattaggggaagttgagggactctcccacttcaggtggtgttggagagcgtggaatctggagtccggtccctggattcgaatgcgagcttcacaccaattgtcagctgtt

SEQ ID NO: 26623 - DNA, 122 bp, Homo sapiens
tgacccggcactggatggcacacccgttgatgcggatgttctcctgccgcaggcccaggtcgggtaggctcctgccctcagccacgtggatctgagcatggaccaggtctacgctgtagggc

SEQ ID NO: 26624 - DNA, 122 bp, Homo sapiens
tcttgagggcacgcagggcactgatatcctcaggcaggccccgcagccggttgctggacacgtccagctcctccagggccaccagctgcagcagctgccgggggaaggcagtgagctggttg

SEQ ID NO: 26625 - DNA, 122 bp, Homo sapiens
gctgaccccccctgagaccaaaggctgacccccctgcgagaccaaaggctgacccccccccgagaccaaaggctgaccccccccgagaccaacggctgaccccctccaagaccaaaggctga

SEQ ID NO: 26626 - DNA, 122 bp, Homo sapiens
gccgtatttatgaagctttttttctctcaacatctattgaaagaacccaccgccatgttccggatttctaggccacaccttgaaaacatgcagagctcacaatccctgcatctgcctcctgc

SEQ ID NO: 26627 - DNA, 122 bp, Homo sapiens
gaacattgttcctggaagcctctgactggtatacaaaattaccttgtacccagaagccaccgagaattaaagacagataactttaagcagtgcagatacttgtttatgtatcaaaactatca

SEQ ID NO: 26628 - DNA, 122 bp, Homo sapiens
tttaccaagataggttcctgcagaggtcgtgaagctgctgtggtcatttgctggcagcgacgtgaagatagaattctttcctgactcaaccaggggcactctcgtctcctccccgtgagacc

SEQ ID NO: 26629 - DNA, 122 bp, Homo sapiens
gagaagatcactggatcaaaccccgagtgtggcgtgggtgaggtgcaggagcctaaccaacggtaaggggtgctcccaaaggaggtggagggcagaaaaaaatacgtgaaggaataaagcct

SEQ ID NO: 26630 - DNA, 122 bp, Homo sapiens
gatttccttttgagaatgtcaagtcatcacggacagcggctcatgagtcagacctcaccccgtgtatcatcgtcagaacaccatccatggtggtttggaccattacgcagttttaaattgtt

SEQ ID NO: 26631 - DNA, 122 bp, Homo sapiens
cggagattcagagggagggagactcctgcctcgatgcagctggaggtatgtcctggcctccgcggagaccagggcagaggaagaaagatcaactgcagagctgcgccaaagaaaaaaggcca

SEQ ID NO: 26632 - DNA, 122 bp, Homo sapiens
cctaatattctttatcagaccctcagacaagaggctgacttctgcccccttgtcaaggagcgaggccactttcctctccaccccatgctagcgaggataacttatttctcttctggaattgc

SEQ ID NO: 26633 - DNA, 122 bp, Homo sapiens
ctgttccacgcgcacctctccgggaatgctttccttggggcacttgctacgcaagcgacacgtgagcttgctggcttcctgtcccgcctcctgtcccgcctcctgtcccgcctcctgtcgcg

SEQ ID NO: 26634 - DNA, 122 bp, Homo sapiens
ggggccggcgtgggtggggtcccatggagtactccagcacacgcaggtgagacccgggatcgtggggtgggacatgtgggatcccccagaaccgagtctgagggacccaggacaggagaagg

SEQ ID NO: 26635 - DNA, 122 bp, Homo sapiens
ggcggcgctgcacgcgcctcccgggatcccgggtcccctcgcccgggaagctgtccttgccgcatgatagatacttagaacccctccagccgaccccagcctccgcacactagtcagccaca

SEQ ID NO: 26636 - DNA, 122 bp, Homo sapiens
aggagacttgcccactgcccatggacactcagttccaaccaacagtccaagctctacgctcgcgactggctgagacaaacccttgatgccctggttgctcccagagctccaagtcctgcctc

SEQ ID NO: 26637 - DNA, 122 bp, Homo sapiens
aaagcgcccgctcggaggctctgctgtctccctggacggagttgggggctggggtgcggccggcgcggggtaagaggctgtcacgggcagcgtatcgaatgtgaaagcaattaaagccacca

SEQ ID NO: 26638 - DNA, 122 bp, Homo sapiens
gacaccgtggtgcccaagtctttggagtctttaagaattagctgggatttatgtaatgggcggaggatatgaattccagcatctgaaagggctttgtataacctcctccctttaaaaatggc

SEQ ID NO: 26639 - DNA, 122 bp, Homo sapiens
tcatcatacctaacaaagagtgactacgttttaatctttgacaactgacagggtttaggccgtcacccatcccttccctccccccacactttgctctagtgggaagtttggaccccacagcc

SEQ ID NO: 26640 - DNA, 122 bp, Homo sapiens
aagccgaaaatggcgagaaaggggcttcagtggagcgggggcctgccagcacctggatctcggacttctggcctccagaaccgggagagaaaaatgtgtcttgcttgaaggccccgatttgt

SEQ ID NO: 26641 - DNA, 122 bp, Homo sapiens
gagccgcaggccagctccaccaggctccgcgggcatcccgcaccggaggccgctaactctcgcccactgttgttctttttgctgaaataactggctgttttgagtcttttgtggttccatat

SEQ ID NO: 26642 - DNA, 122 bp, Homo sapiens
tccggagaaaatggaaagacatttgctatgttcaagataatctgcctttttttctgaaaccgtctgttgacaatttttacatcctaatgactgaaggtgcactggacagagagagcaaagct

SEQ ID NO: 26643 - DNA, 122 bp, Homo sapiens
cattatagccactaaaagtctgcagaagtgacaatgctcttgcaggtgagggtagtgatgcgaggagtcattttcatgctagttaagaaatatctatcagggctgggcacggtggcttaagc

SEQ ID NO: 26644 - DNA, 122 bp, Homo sapiens
aagctggagtgcaatggcatgatctcggcttactgtagcctcaacttcttgggcccaggtcgtcctccttcctcagcctcccaagcaactgggagtataagtgcacaccattcacacccggc

SEQ ID NO: 26645 - DNA, 122 bp, Homo sapiens
ctccgtgttaagggtgggagagctgtcctgcaaatcacctcctgatctccgctaaccccccgtcactgcttctgcagacatgaattccattttaggctaaagttgagacatccccactgtcc

SEQ ID NO: 26646 - DNA, 122 bp, Homo sapiens
tgagaggccccgctgccaccaccccctccaccactgctgtcaggcacggtagctgtagctcgttcgcgaggaccatctccatgcaagccatccttacgggtcgcgccccgggctgcacggga

SEQ ID NO: 26647 - DNA, 122 bp, Homo sapiens
cgctggaggaccagaccgccaacagaagcttccggagcatgctgggccaaggcagatccccgtttcttttagtctggcgtgggctgctaagtccgagggtgcgggagtgtgtgggccctggg

SEQ ID NO: 26648 - DNA, 122 bp, Homo sapiens
ggggccagatatgtctcggaagtcaggatttttcagaacctcagacagatgctttagtaccgatgctgtgtttgacacgacaccccagcggagtcgggggcagcacccgataaccaaacacg

SEQ ID NO: 26649 - DNA, 122 bp, Homo sapiens
cctctctgcggctcatgagtaagccagagacttacataggacaacacataccctatcacccgaggatgagacgggatgacacacacgaagtgccccgcacagcgtcgttgtaaagcgttggc

SEQ ID NO: 26650 - DNA, 122 bp, Homo sapiens
taagacagcattaagcactgcggtgcccgcccctccattgagtgcagcgctagatgaaagcgagaaggtcccgggcagagccgcttgtcagtcgcagcgcctccctcaagtctctgagctca

SEQ ID NO: 26651 - DNA, 122 bp, Homo sapiens
aaggggcggagctgcaggggtggttggctgaggctggcttctgcgtggtgcagctgcgcacgtgtttcagccggcagcgctttaagatttccggggatggaatccgaaatggaaacgcagag

SEQ ID NO: 26652 - DNA, 122 bp, Homo sapiens
gaagcccagcaaccagagcccctccgcagcctcgtgccttacggtcagtgtttcacccgccgggcagggcccacccccagtgcctcctggattcaggtgcaggttgctcaattctgaagcaa

SEQ ID NO: 26653 - DNA, 122 bp, Homo sapiens
ggatattctgtacttaaccagttaggagacaaagggcttcttctgcctggtgcgtgcgagcggaccccagcgagcaagggagctagtgccagagagagctgcggaggctccggcaggagtgg

SEQ ID NO: 26654 - DNA, 122 bp, Homo sapiens
ataaatgggtcccatcagcctttgaccttcaggttgctaagggcagtttctcagccctctcggttcacttgtttttcttttatacatatatccttatttatttttactgtacctatcgattc

SEQ ID NO: 26655 - DNA, 122 bp, Homo sapiens
cgtcctggtttcgcggatgggaaagcgagtccctcagggagcgcaggtctcggtggtggacggaagtcgaatttgaacccgtataggttcaactccaaaccctgttttcactaaagctacct

SEQ ID NO: 26656 - DNA, 122 bp, Homo sapiens
agtcactgtcacctgtcactgtcactgtcacctgtcactgtccatctttttgatgcttgacggttccacctttggccggtggccacctcagtctggtggtgtcttttgccgtgttctggcgt

SEQ ID NO: 26657 - DNA, 122 bp, Homo sapiens
aaacgtggctgccacactccgtgtgagctgaggcaatgagaagacactgaggaagctcctcggccccccaggaagcaatccacccagcctggccctgagaatttcaccaacggccagtgcac

SEQ ID NO: 26658 - DNA, 122 bp, Homo sapiens
accctgcgagctgtgttcaagaagtatgggagcatgggcgacgtgtacatcccctgggatcgcatcactagacagtcccgccgcttcaccttcatcctcttccacttcaagcaccaggtcga

SEQ ID NO: 26659 - DNA, 122 bp, Homo sapiens
gtctccctgagccccgcccctgggtcccttgctggagccgctcaccccctcccccgcaggcgttgtgctgggcccggggcaacttccccagaacgtccggccaccctgcgcggaagcacgcc

SEQ ID NO: 26660 - DNA, 122 bp, Homo sapiens
aatcaggcctatgtagaaaatacaggtaagaaaattaaggagaaccgcaatccaccacaccgagctttccgttggatttggtcgtatctgttttcagttattcttgttttcattgtgtgatg

SEQ ID NO: 26661 - DNA, 122 bp, Homo sapiens
cggcgagtgagggaggaggcgcggcggcgggggaggaggcagggcgagcggcggcggcggcggctgcaatcccagcagcagcagcagcaacagcaacagcagcagcagaagcagcgcggagc

SEQ ID NO: 26662 - DNA, 122 bp, Homo sapiens
tgttgttaccttcccgtctgtgaacatggatcacatcatctctgtgggtaacccagtcctcgttgtatgacttgtcaaaatgcagttccacttgtattaatattgaccctgttcatcgtcac

SEQ ID NO: 26663 - DNA, 122 bp, Homo sapiens
tctgtctcaagactcaggctcacaatgttggtcttattgcccacctgtgcaggagcttctcgcagactgtctcgaagtcctcccactctagaatgttacataagcgctttaatttttttttt

SEQ ID NO: 26664 - DNA, 122 bp, Homo sapiens
tctgcagcagcgagagggtgggtgtgggagtcggtgaattgtctcttacgccttcctttccgggttttcctggagaaggctgcctcactgggtctttgcagttggcgtgttccccggtgcca

SEQ ID NO: 26665 - DNA, 122 bp, Homo sapiens
cccggacacacgccagaattcacgcttaagcgcctcaaagcctcaaggcctcgacgctgccgctgcctggcaggaaatgtgaaatcacagcaaaacagactcatccttggccacccggacac

SEQ ID NO: 26666 - DNA, 122 bp, Homo sapiens
gggacaccctcacgattctgattttggctacacaggagactagaagatccgggcgagcaccgtgttccaaggcccatgcggagcccaactccactaaagaacctctctagggcggccggcca

SEQ ID NO: 26667 - DNA, 122 bp, Homo sapiens
aggtgttaacattctcaaaaagcaaacagtccaaagagagttcttcatggtttgtacaagcgctagagtggacagacaagagacagggcagtattttacttcactgggctccaaacactcag

SEQ ID NO: 26668 - DNA, 122 bp, Homo sapiens
ggcggagggcgggctgaagcagctgaagcggcggtagcggcggcggctcgggcagaggggcgggagctgaggcgggagcggacaggctggtgggcgagcgagaggcggcggaatggtggact

SEQ ID NO: 26669 - DNA, 122 bp, Homo sapiens
accgacgtggtggaggacaagatctaccgcgggaagctgctggacaacggaggtgaccaccgattgctgccaggcaggatgcacacaggcggagcgctcaggcgctaggggccacaggtccc

SEQ ID NO: 26670 - DNA, 122 bp, Homo sapiens
cacctgagcccgggacaccgcgcctgtgcccgggacaccgcgcctgagcccgggacaccgcgcctgagccagggaaacctcacctgagcctgggacacctcgcctgagcctggtgtattagt

SEQ ID NO: 26671 - DNA, 122 bp, Homo sapiens
cggtattttagggctggccaggactaatcagggaatccctcaattggtaaatgtagaggtcggcggaaactgacttgtcacggccgcagagtagactctgggacccatgttttccctcggaa

SEQ ID NO: 26672 - DNA, 122 bp, Homo sapiens
catccactgggaggttgggaaccctggctctaatctcagctctgtcctgggcacactgggcgacaaagggtgagtccttcttcctcttcgggcctgtttcctcgtggtgcactgggggatga

SEQ ID NO: 26673 - DNA, 122 bp, Homo sapiens
cttccgggttcacgccattctcctgcctcagcctcccgagtagctgggactacaggcgcccgccaccacacccggctaatttgtttgatttttagtagagacaggatttcaccgtgttagcc

SEQ ID NO: 26674 - DNA, 122 bp, Homo sapiens
aagaaatgcttgagccaggaccgattgattagcagcggtttagagatcttatctgtcaaccgcatccgtagaaggagatcgttattgccataattggaataccggtgacggtgtgacaagag

SEQ ID NO: 26675 - DNA, 122 bp, Homo sapiens
atccgagtctggttttgatgtttgctgtatcgcttcaggctgtgttttctctcacctttccgtgtgccagaggcttcaagttctctggcattcttgcctttgtctcccatctttaccttgtg

SEQ ID NO: 26676 - DNA, 122 bp, Homo sapiens
gtgcccgtgggcggagcggcgccgggactgagtggctggcagctatgtctgcgagagcagcggcatcaccctggatggaagcctctgagactccgcctaactgacacccaaactctccctct

SEQ ID NO: 26677 - DNA, 122 bp, Homo sapiens
aggctgaggctctcaagaaaatgtatttcccctcagtctatggctaatacaggccatgtgcgatagctcagcacccagcctgtaatcccagcactctgggagtctgaggtgggatctcttga

SEQ ID NO: 26678 - DNA, 122 bp, Homo sapiens
gggttgcgggatgtgcctgcggtggcagcagctgacctcctgggctcgtgggcccccgggcgtgtgtggaagaggcctgtgtcccacagacccacttagagacgagcctctgggctgggggc

SEQ ID NO: 26679 - DNA, 122 bp, Homo sapiens
agagaacgagcgggtcaggctcagcgtcggccactctgtcggtccgctgaatgaagtgcccgcccctctaagcccggagcccggcgctttccccgcaagatggacggtttcgccggcagtct

SEQ ID NO: 26680 - DNA, 122 bp, Homo sapiens
cctcaggtgatccacccgcctcagcctcccaaagtgctgggattcaggagtgagccacggcgcccggcctcacactgaagtatttttgatatattgagttaaatgaaacatttaaccttttt

SEQ ID NO: 26681 - DNA, 122 bp, Homo sapiens
ctaaaatgagacagacggagtcccctctcctgtccacaaactacaatgcctacaatgcctcggtgtcagcatttactgtgattcaagcactgtgctaaagtgtttgtatgtattatttaatc

SEQ ID NO: 26682 - DNA, 122 bp, Homo sapiens
gcgtctcccgagaaacctccaagagtatctgaggttgccggaaaatggttagagagcagccgaaatcagccgaatgccattcgggatgctccggagcttctcgaggcacattcgggccctct

SEQ ID NO: 26683 - DNA, 122 bp, Homo sapiens
atccctccagtttcaaatatgacacggaagtaacttaaatgaaaaattcctttcttattccgccatgcgccaggggatttttcttcccctgaatgaaagtgtcagcatctcatttattaaca

SEQ ID NO: 26684 - DNA, 122 bp, Homo sapiens
aaacaagggttcacacacaaacattcaggaagcagcactggtgtagacccactttgatcccgtaaagtgtcctgagtgtccctcttcacatggccacttcttttgccaggttctttggttcc

SEQ ID NO: 26685 - DNA, 122 bp, Homo sapiens
tcgatttggatacaaacaggccagacccaaactggaaacggcgaagggctggattagcaccgaagggattcgaggaggcaaacgggaagtaaaaatgctgtgtggagctgcagagggcaagg

SEQ ID NO: 26686 - DNA, 122 bp, Homo sapiens
gtaaatagacattgtgagccttgtatttcagctgtgcatgatgcaacagcttcttgccagcgaaatagaggaaccctaaataggcaacagttgcagttacaatatttgctgaatccaataca

SEQ ID NO: 26687 - DNA, 122 bp, Homo sapiens
ccacctccctcctggggtcgtcgccctcaagatgattatcgtaggagtagtcctccacctcgtcgcagatctccaagaaggagaagcttctctcacagctggagcaggtccctttctagaga

SEQ ID NO: 26688 - DNA, 122 bp, Homo sapiens
ccccaccccacagctccgccccgggacccccttcctccgaggcagtcaggctcctgcccccggcaccatccttccggcctcggtcaagactgcccggacaccacctccagggccttgctgga

SEQ ID NO: 26689 - DNA, 122 bp, Homo sapiens
tcccttcggggccctcgggtaccccatgaggactccgtagccctggctttggtttctgcccgccggggactgggataggcgcggaggttctcacttctgccgcttcgggtgaggcaaggcaa

SEQ ID NO: 26690 - DNA, 122 bp, Homo sapiens
cgccccgcccgccaacctgggatccctcgcgcgtcacctgcgaccccggcgcggggccgtcgccggctctcggcccaacttcagctgcggccgctggcaccctctcgccccccggcccgacc

SEQ ID NO: 26691 - DNA, 122 bp, Homo sapiens
ggaatctgaggctcagtaaaagtttgtaagagttgagatctagctatcagaaagcggcagcggcatccttagagaccctggggacaaaataaatgggtctcccaccagttgaatgacaagta

SEQ ID NO: 26692 - DNA, 122 bp, Homo sapiens
gcctctgggaggatgcgtccaagctaaacatttccatggagacacccagtgtctgtggaacgggcagctttgaatctggaccaatagctctgaaccatttgcaggaaggaagcccagcactg

SEQ ID NO: 26693 - DNA, 122 bp, Homo sapiens
gaagtgtcctgggaggcagtttagcttaaggcatttgggaaagaaaactgtgccaagtatcgtacattgattcagtgtgtagtcctgtttggggccagttcgatgctattctagggattgga

SEQ ID NO: 26694 - DNA, 122 bp, Homo sapiens
gtgggagtggtatggggagagtgccggtccttatccaatccttggcgctggagcggcaaccgcccaatcaagcgcgcagttgaagaggagtgcatggtttccggcatttggctgggcctttg

SEQ ID NO: 26695 - DNA, 122 bp, Homo sapiens
ctcaggagaagtctgggaagtgcgcggggagggggctcccgggtagacaggtctggaaggcggctccccgagagccggagcgcgaggaacagcttttgagataaaaaagctgttacactttc

SEQ ID NO: 26696 - DNA, 122 bp, Homo sapiens
cggcggccaggccgtggcctgcaacctgcagtggccacacccggcctggtcggcagtcttcgtggtctacactttcctgctgggcttcctgctgcccgtgctggccattggcctgtgctacc

SEQ ID NO: 26697 - DNA, 122 bp, Homo sapiens
atgcaatcggcgcgttacctggggcgcaggctacattaccagcccggcccccgccaggcacggccagaaccagtcagcccgcgccctgccggccgccccgcgcctccagctcttccccggcc

SEQ ID NO: 26698 - DNA, 122 bp, Homo sapiens
tcaaagcaagagtgccgcgcatcccccaggagccagagtgggaggctggcacagcctcctcgggcaggtgtgggcaggtggccccgacctctacaaggtcatgcattttttttttttagtct

SEQ ID NO: 26699 - DNA, 122 bp, Homo sapiens
cttttattaaattcctgatacgttgtcaatattgaaaaaactcaacaacttaaatgtacacgcacagtttgaaaagctggaaaatagtgaaagaatatccccatacccacctttcgtaccag

SEQ ID NO: 26700 - DNA, 122 bp, Homo sapiens
gtgaagagggcggggccaagaatacacccccggaatgcgcagtcgggagaacggaatgggcggaactcagggtggggcaacttcctatttcgagtctaaagtaatcttggtctcttccggcc

SEQ ID NO: 26701 - DNA, 122 bp, Homo sapiens
cccagcttccctgggcggccgcgacctcccgcctccccgtctgccgctgagggcccgcggcgtacacaataggcttcccagaagggttaagaggcagaggtagaagaaatacggactttaat

SEQ ID NO: 26702 - DNA, 122 bp, Homo sapiens
caggccccagctggccctggagcaagagcactgccccctcctgtgcacttggcctcaaaccgacccaggacaggctacactgggctaatctgacccctgaagtgggtcctctgcctgggtgt

SEQ ID NO: 26703 - DNA, 122 bp, Homo sapiens
acgatgggcctaaagacagggtgacgcggagctcggatgatgcgtgtgaaatactccatgcgcagcgcctgagacctacaaactcgccagccgccatcaccaccaactcacaccgacagagc

SEQ ID NO: 26704 - DNA, 122 bp, Homo sapiens
gccccagggctgtggggaagggttgatgaatagtattcccacgcagtgctttgcacagtccgggcaccacaggatccctgtcattgtgaaacatctgtcacggtgaacaacttgccactccc

SEQ ID NO: 26705 - DNA, 122 bp, Homo sapiens
ttccaccgggaactagagaagcttgacttgtgtgatcacctcctgatgaatggactggggcggaacacagatccggaggtgggggcttctcttcaccaagcgcaaagcctaccttccagaag

SEQ ID NO: 26706 - DNA, 122 bp, Homo sapiens
ggagggcgggtcggggaggagggatgcggttcggcggaggcggccgccacagggacttgccgccatcacccctgctgccaccaccgcagcctcgggctcccagggcggacacggccaccgcc

SEQ ID NO: 26707 - DNA, 122 bp, Homo sapiens
gttctcccataacctttttggggtggggacccacctgtggctctggaaaggtgttggctccggctctggggctcagggggagggggccattggtgggcaaaacaagcatagtgaaaactgag

SEQ ID NO: 26708 - DNA, 122 bp, Homo sapiens
ggcctcccttgaccactccacgctgtccgagagctcaaaggccctcacggtatacactcacgctgggcatccagtccacatgggacccacagccctgaatggccccaaccacgtgagtgtgg

SEQ ID NO: 26709 - DNA, 122 bp, Homo sapiens
agaggccaagcgactcgcccgccgccccacagcggctccagcgctgctgcctgtttacagcgcggggaaccggcggctacacctcccgcccggctgtccctttaacgtttctagggcatccc

SEQ ID NO: 26710 - DNA, 122 bp, Homo sapiens
tgaccccatttcacagagggggaaactgaggctacagccacaggtctgctctccagacctcgtctgccaccctacactcaggcaggagtggcccagactgaagggaagggggttccagaacc

SEQ ID NO: 26711 - DNA, 122 bp, Homo sapiens
cgggccccgccgcggggtaatagtagctgtcatagctgcgctgcatgtctgcgccgggcccgggcccgggcccgggtccgggtcccgggccggggggcgccgggtgccgcagtaacggctgc

SEQ ID NO: 26712 - DNA, 122 bp, Homo sapiens
cgcagccccccggctctcaaacatggtgtgcattgaagtcacctgggaagctttaaaaaccgtggatgcccaggtcccaccctataaagtctgatttagttggtctggatgcaatcagagcc

SEQ ID NO: 26713 - DNA, 122 bp, Homo sapiens
ccctaatgtaaatggtggcctctgatgacatgtcaatgcaggtatacctactgtaacaaacgtgccactctggtgctaatgttaacagttggggaggctggggggtggatatatgggaactc

SEQ ID NO: 26714 - DNA, 122 bp, Homo sapiens
acacaagacttccaagtttgaatgggcagcgcaaaacccagacaagttttccggtagtgccgccaacccctgtcaggcacagaagacacagcgagaaccgtgagccgttacgaaagcctaaa

SEQ ID NO: 26715 - DNA, 122 bp, Homo sapiens
cgccttccgcacctcgcctaggctgcccttgtgcggccgccctcagtccccgccaccttgcggggccccaggcggcactggcatcttcttgtggttcttcctgaccggggctcggtgcgctc

SEQ ID NO: 26716 - DNA, 122 bp, Homo sapiens
tcgcagactctcctctgcatgggcttacatgaggcgtttgggggctgctcgcccttcccccgccacccgcccacccacctgggcactcaccccagtgttgagcttgacagcggtgcgctcct

SEQ ID NO: 26717 - DNA, 122 bp, Homo sapiens
gtacttccgctgcaggagggcgaagcagccgtcatctatcccctctgggaggtgagtcagcgcggaacctctgcatctacggcgagctttcctggcctgggcgttggactcgcaggtgcctg

SEQ ID NO: 26718 - DNA, 122 bp, Homo sapiens
cagcacacccagcccactttgattggctctgagtgagagcaaatgggacctaggcacaggcgggaggggagaaaacacagagagaaaagggtatagataagcctatggctgaatcctggccc

SEQ ID NO: 26719 - DNA, 122 bp, Homo sapiens
ctcaagtgatcctcccacctaagcctcctgagtagcagtgactacaggtgcttgtcatcacgcccagctaatttttttgatttttagtagagatgaggtctatgttgccctggctggtcctg

SEQ ID NO: 26720 - DNA, 122 bp, Homo sapiens
agagaaccggaggcaaactgcctttctctaagagcctcctgcccctccccccaccctgtccggcttgggggggaaagggctgccaaaatcatggtcagccccacaaagatactcctacagcc

SEQ ID NO: 26721 - DNA, 122 bp, Homo sapiens
ggtggtcaggctgcctgtgtgtgtcctctggaggtgttgggacagaagggcagtcttgtccgagctgactggagtcctcccgggctggctctgaactcatctcccacggggatgtttcggta

SEQ ID NO: 26722 - DNA, 122 bp, Homo sapiens
ggcaggcttcctaggcttggccaccagctggggggtgtggggtctgtccctggagggggccgtggggtccatccctggaggggtgtggggtccatccttggagggggccgtggggtctgtcc

SEQ ID NO: 26723 - DNA, 122 bp, Homo sapiens
aaaaggaagtgataaactatgaggacattgaggctctcattggcccgccgccccatgggccgaagaaaatgatcgcaccgcagaggtggatcgacgcccagagggagaaacaggacttgggc

SEQ ID NO: 26724 - DNA, 122 bp, Homo sapiens
cccggccgtgtgatttcttttctatcgatctcaggtcccttgactgcaaactcaaatcaacggcagtgcgcattttcatgatgtctggatgggataagctatacagccctcacgtgatgcac

SEQ ID NO: 26725 - DNA, 122 bp, Homo sapiens
accacatagaagcggctgcttgactggtaaccaaagacgaagccggcatagtcgtcgtcccggtcagtgtttacgtagaatgtgccactgaagtccacagacccaaactcgtcaaaacctgg

SEQ ID NO: 26726 - DNA, 122 bp, Homo sapiens
gcgggatccagctgtgtggcagggccccctaccgcccgtcctgccctgccagagtctgcccggctgctcacccccaggaagatcttgatggcccgtgagcatgtgaccccggagttcccaca

SEQ ID NO: 26727 - DNA, 122 bp, Homo sapiens
cctacagtgaggtctgaggagagcagtcttgttcttccccaggcctggtgactcacgtatcggaaaggcagcagcaaggctgtgacagccgccaggtcagccagagtgggggcctccccggc

SEQ ID NO: 26728 - DNA, 122 bp, Homo sapiens
cttactctgcaaataaatcatggggacagaagaccttttctcatggatgtgaccagtcttcgacctttgcaaggattaatctcactctttgccttacatcagcattagcgtgacttagctct

SEQ ID NO: 26729 - DNA, 122 bp, Homo sapiens
ataagcctaagacaaagcacgggaggtgggcttcacatggatggacggaaccatctgtggcgtcccctgcaactggtgtgtaggagactctgaatggcaataaagttaattgtactttttct

SEQ ID NO: 26730 - DNA, 122 bp, Homo sapiens
gtcggtccttgcttcctgcttcgcctccgcgcctcgcgctatgggacagagcccccgatccgccagcaccacctgaggatccagaaaccgccccagcgatggaagaggatcaggagctggag

SEQ ID NO: 26731 - DNA, 122 bp, Homo sapiens
aaaaaatggttctgtgatcctcaatggtggtgaagttctaggtaagagctttaagcgaaacgatggaaaaaagcaagaactaggagctggtacgttagaagcatctactgcattcaaaccct

SEQ ID NO: 26732 - DNA, 122 bp, Homo sapiens
cccttgtgctgaatgtttgctctgtgtatctacgacactggagttcaatctgcgggtgtccgattcgtctttgaacacgccttccatgacagccagaggggcccggcccacagccttgtgct

SEQ ID NO: 26733 - DNA, 122 bp, Homo sapiens
agcccatacacctgtctcccaccagcggggccctcctggcagggtagggaaggaggaccccgggcacccccctcagggcctgactcacgtactgtagtttgcactggacgcccgggccctcc

SEQ ID NO: 26734 - DNA, 122 bp, Homo sapiens
ccatgcctggtacaggggttctcagatggggcctttgatgccctttggtcaccactcatgcgctccttgtccccaggagaccggctggtaaaggtgaatggggaaagcgtcattgggaagac

SEQ ID NO: 26735 - DNA, 122 bp, Homo sapiens
cttctctgtgcggatggcccgatttcccaccccaagtcggagcttgcggttgagttgaagcgcaaaccacacgtcggagcgctcgggagtcaggtcccatgctgtgtccccctctttgttcc

SEQ ID NO: 26736 - DNA, 122 bp, Homo sapiens
ttcagccttatttagtgtctctgacaaaaccggccttgtggaatttgcaagaaacctgaccgctcttggtttgaatctggtcgcttccggagggactgcaaaagctctcagggatgctggtc

SEQ ID NO: 26737 - DNA, 122 bp, Homo sapiens
taatatacccacagctcaactttttgttcttgagcttgaatcacatcactggcaatcggccgtagtactctcttacctacatcatggttctgctgcttggaccccaaagacaatgacatgga

SEQ ID NO: 26738 - DNA, 122 bp, Homo sapiens
gccttaatcacccccattccgtgcggtggtatctcccaggctctacattctcgggagcggcgcctcccaagggggtcctgggaccttctcgcgctcctcctggcctctgagggatgcgtcct

SEQ ID NO: 26739 - DNA, 122 bp, Homo sapiens
gaggacaataagagagaaaccagatgtctcaaaaccactaatgctctattatctaggaggcgctgtagccttggtatgcatcttactggggccagctgatgatgaggcattttaagttcgtt

SEQ ID NO: 26740 - DNA, 122 bp, Homo sapiens
tcccggccctttctggcccttaaggcactgtcagaaacaccatcacgagcttggataccccgaatgactgtggctcactcctctctggaaacatttgaaatctgtcctctatgcgtggccac

SEQ ID NO: 26741 - DNA, 122 bp, Homo sapiens
aggtgcccaattgccagatctttaacctcgcgctctcccagccttcaaagttctccaacccgcgcctgccagccccagcgcgccctcttgtccagatgccagctcggttcagggttcgccct

SEQ ID NO: 26742 - DNA, 122 bp, Homo sapiens
gacagggtttcgccatgttggccaggctggtcttgaactcctgacctcaggtgatccatccggcccagtttatttttgtcctggctgtaagtcattgatgaggaaggagaggggtttcacct

SEQ ID NO: 26743 - DNA, 122 bp, Homo sapiens
ggggcccccacggaagggcttccctgggctagaccacaggaagcatgcgtttggggcccccggagctgcttgcatccatttccttctagaacgagttctgcctcttggagttaaccaccaca

SEQ ID NO: 26744 - DNA, 122 bp, Homo sapiens
gagcggggcggggagccggcagcgcagtgagaaccaggctttccacccttaccccttacgcgactgtttcagacagtgtcgtccaactttaagttggccacttactccagcgccgctgggat

SEQ ID NO: 26745 - DNA, 122 bp, Homo sapiens
ttcttcctactatcaccccagggagcctagtccaagggagatcagggacccaagactaggcgacacgcagcgaagacactcagaaagagatgggagacgggaggggaaggctcaaggcagtc

SEQ ID NO: 26746 - DNA, 122 bp, Homo sapiens
aagcatacacatctgcaaattctcagaactcataatctcatttctgggaatggaatacaacgaaaccatccccaagcaggggaaatacatgtgcatgaagatgttcacagcagtgtaagttg

SEQ ID NO: 26747 - DNA, 122 bp, Homo sapiens
gaaagacaacagcgacaacctcaagccagtaatctagtcaaaggagcaattcccaaggcacgacatgtggggaattcacattcattggcactacagtgattgctgataacgccaacttaatg

SEQ ID NO: 26748 - DNA, 122 bp, Homo sapiens
gccaggggctgtgaggttctggcaggctgggagtcctaacacatcatcgcagtggttcctcgtccatttggaacaggagtcacaggtctgctcagagatggtgactctcccaccagcacgtg

SEQ ID NO: 26749 - DNA, 122 bp, Homo sapiens
tcgccctgtggtccccggagagggtcctccgaggactctgaaagccgcttccatggttggcgccgagcacaggcggctccctctggcttccgcaggcacggacggggtttgcccagagacac

SEQ ID NO: 26750 - DNA, 122 bp, Homo sapiens
tggacaacaaagcaagacccctctctctacaaataatttttttacaattcaaaaataggccgggcgtggtggctcatgcctgtaatctcaccactttgggaggccgaggcaggtggatcact

SEQ ID NO: 26751 - DNA, 122 bp, Homo sapiens
gtgacggggcggggcctctggagcggggaggggccgagggtggcgttcgggcgccccctgcgggtctccgccactgctacgttttgacctcgtagggcagctccggagctcgctccccgggc

SEQ ID NO: 26752 - DNA, 122 bp, Homo sapiens
gcgtgctccgcagggacaaagggtcgggaaacttgagctccggccagtcccagagaaacccgggctggtggtcgccatggcaacggagtccgaccctccgaggcctgccgccctggcgcggc

SEQ ID NO: 26753 - DNA, 122 bp, Homo sapiens
gcttcccgacagcttggcccctcttcctcggggtccatccccagcgcacacccaggctcccgccccaagccagtcacctgcgccagccgctgtcggttcaggacaagtctgtgacagatgcg

SEQ ID NO: 26754 - DNA, 122 bp, Homo sapiens
tacatttcagtgttcattactgaagttttgttggagtgcagccacgctcttctgtcggcacgtcatctgcatagctgcattcgcactgcaaaggcagagccgagccgtcacaggctgtgagg

SEQ ID NO: 26755 - DNA, 122 bp, Homo sapiens
tgttttctctgggtgtaatctctgttgcacatggagttcagacaatgtagatgaccctgtcgtccacggacagagttctccgtcaagacattgttgcccctcactgggccaaagtcccattt

SEQ ID NO: 26756 - DNA, 122 bp, Homo sapiens
cggtgtccggctggcgcgagggccctgaggttcaagttgtctcgtcgggacgttcacgtccgattgacagacttgctggactcggcttggggctgcgccctcgcctcttccctctccctcct

SEQ ID NO: 26757 - DNA, 122 bp, Homo sapiens
gccggtcggtgtctggagctgcctgcctcacttcagcagctggtgcgcctggctgtgtgccgtggccggattctgcgcttgtttgctcacacacccttcgccactccacgcctagcccaccc

SEQ ID NO: 26758 - DNA, 122 bp, Homo sapiens
cctgcacctgggcagcgcccccactgttcactgaggacttgggctcactttctacacttccgttaacagcaagaataaatcagtcagaaggccagcataccttagttatatattttgtctaa

SEQ ID NO: 26759 - DNA, 122 bp, Homo sapiens
tcaagttctgtctgacatgccattaaagcactggctcagattgcaggcatattttcaaaccggcagtaactggatagtatcacttcacttataagtgttcattgtatcatcaagtgaaataa

SEQ ID NO: 26760 - DNA, 122 bp, Homo sapiens
actgccagataaagtgaacatggcaaatgataagagctgagagtgtaggtgaagcctatgcgttgtactgttttctggcagatttcctgctggtttgacttttaacagtgcaaagctgcggg

SEQ ID NO: 26761 - DNA, 122 bp, Homo sapiens
cgaaaacaaaggccttgtcaggttgtgatgacctacaggtgctatggtagttaatagatgcgatgaggacctcagtttctattaaagaatgcttccaagccccaggtgacagccaagatggc

SEQ ID NO: 26762 - DNA, 122 bp, Homo sapiens
tttcaagaggaaggaaggacagagaacgatgccaatgaaatctgttgagagtttatcatacgtcttggcacttggcacatgtgatgacatgggattgtcacacctcctgtctgtaatgaggg

SEQ ID NO: 26763 - DNA, 122 bp, Homo sapiens
gcagcagagcctgcagcgggaatatggcctggccatgagctgaaagtacagccgcggagccggcctcggcttctccaccgccccgaacaagatcttttatattgacaggaatgcttccaagt

SEQ ID NO: 26764 - DNA, 122 bp, Homo sapiens
ttggatcgtacacagggtaccatattgagatgatgtatgtgaaggcactttgaaaagaaccggaggcatgctaatgtgtgttatgtgatttgatttaatttaatttttaaatgttttgaggt

SEQ ID NO: 26765 - DNA, 122 bp, Homo sapiens
atttggcttgcataagccccatattagaacttcctcataatatacaacatgccaaatcatcgaaactgcgtcacccggagttcaaacttcatgagcctggattagggtctgggttccaatga

SEQ ID NO: 26766 - DNA, 122 bp, Homo sapiens
gttatttatttgggaagcgcccggacggcggagcttggcggcggcggtggtggtggctgccgcagactgtggttaaaaaaaagaaggcggcggcggcggcggcggcggaggcggaggcagct

SEQ ID NO: 26767 - DNA, 122 bp, Homo sapiens
aagagcgtgaggattgcaagaatttgtagtacaccttccactcagagatcctcaaaggtccgctccgcataagataggtcacaccctcaaatttcggctccacatctaggttgttgtccctc

SEQ ID NO: 26768 - DNA, 122 bp, Homo sapiens
aggccgttcgcgccatctttgttgagggcgagtgccagaccatgaggggctgggcggggccgggtgctgcccagtggagccaatggctgggaaccccggggaagagggacccacaccccctg

SEQ ID NO: 26769 - DNA, 122 bp, Homo sapiens
gttctcttccattccgtctgctctaactgggatgacaggctgcagacaaactgcaccttacgggtattacctgaattgctgatagtatctgagaagggcaaaacactctccttacccgggcc

SEQ ID NO: 26770 - DNA, 122 bp, Homo sapiens
cgcgcgtctgttcagcgtcgacagcctggtgaacctgcagccggagctagcggggctgggcgcccccgagccgccctgctgcgccgcgcccgacgccgcagccgcagccttcccgccctgcg

SEQ ID NO: 26771 - DNA, 122 bp, Homo sapiens
agctgccaagatgaggtcaccaagcagagtggggaaatgtacacagtgggtcctcaaactcgagagacctggatagagcaccccactgggtagggatctgttaagagggtttaggaggcagg

SEQ ID NO: 26772 - DNA, 122 bp, Homo sapiens
gagggggactcagcctgccattgggccaggggcctcgatgacaggagcgatgagcagtttcgtgtcacctaatatagtcatacggcaaaaaaaaaaaaaaaaaaaaaaaaaaaaaaaaaaaa

SEQ ID NO: 26773 - DNA, 122 bp, Homo sapiens
aggattatgattttaggaatcaggtgcagtcagaatgtcagcttgagcatgtggtttgtacgtctactaacattttctggggaagtatattggaaatgcgcctcttctttctttctgttagt

SEQ ID NO: 26774 - DNA, 122 bp, Homo sapiens
cgcagcgtgtgcccgtgtagccaggagcacaggcacatgagaagctggcgatgccatccacgcagcgaccatggtggcatgggtcaggggagcagtcgtccacgttgcgatcacacagcgtg

SEQ ID NO: 26775 - DNA, 122 bp, Homo sapiens
gccaactttggccttcagaacttactggggcttcccgatggcttcacatgttaactcaagcgcgtccccttcccgggttaagccttgtagaggataagtcatctgaatgtgcacttgaggct

SEQ ID NO: 26776 - DNA, 122 bp, Homo sapiens
tgtgagccgacagggcagctccgccagggaaccaggggcccgtccctctggggtcatgggcggacaggcacgggagctgagagaggggaccgggcctaggccacaggccctccaaggaagcc

SEQ ID NO: 26777 - DNA, 122 bp, Homo sapiens
tattgttattttactgcgggttcccaatgagtgccccactgtcacgcacatgcatccccccggatcccacacccgacccagctccctctggatgggcacaccaccagagtcctgtcttttcc

SEQ ID NO: 26778 - DNA, 122 bp, Homo sapiens
acatgactcaaactggagaaagcaggaatcacttgtatcagccaagcactcaagagatgccggtaaacaggaaaagactgaagggtgctcagtaggtgactcttcactgatgtcctcctctt

SEQ ID NO: 26779 - DNA, 122 bp, Homo sapiens
ccagctgtagcccagagaaggctcaggaggtagagggcaaaccaggccatctcactctctcgtctatgtctctcatccacaggtaccgcgatttgcaagtggaatatttctttaccttctct

SEQ ID NO: 26780 - DNA, 122 bp, Homo sapiens
ggctgagacacgcatcttaatgaaaaatgagcattgaagcaaaaacaaaggcatatttaacgactattgcaattatgaagatagacaattccagtgttcaggctgcaagtcattgaagactc

SEQ ID NO: 26781 - DNA, 122 bp, Homo sapiens
aacgcagctaccagaaaccctgtggcacacatacacagacactggtgaggatgttctttgcggcactcgtcaccatagcagagaattggaacaacccaaatgtcaatcagtacgggactaaa

SEQ ID NO: 26782 - DNA, 122 bp, Homo sapiens
gcaacctccagagtgcataaagttggggggagggggcagaaaataaagggtgtcacttggcgacatcagggcaagtattcccccaagaacctgaccctcacagaggaagttttgcccaagtg

SEQ ID NO: 26783 - DNA, 122 bp, Homo sapiens
agtactcgcagggttgccccttctgtccctctcccctggtcccagaacgggcagggtctgcgtctggcccctgctcttggcattcggtctggtcagctctgggcctccatccacccccctgt

SEQ ID NO: 26784 - DNA, 122 bp, Homo sapiens
ggctcaagcaatctttctgccttggtctcccaaactgctgggagtatagttgtgaaccagcgcgcccagcctccctcactctcagtctctgtgtttctgtgttcatctctctctctcctctt

SEQ ID NO: 26785 - DNA, 122 bp, Homo sapiens
tatactgagtgcctacttgtgcaaagctctggtggagattgcagagtttcctagtaaactcgggctccagttctgcgtccctgcttttagttgtcagaggtcagacagtaccctaatttctc

SEQ ID NO: 26786 - DNA, 122 bp, Homo sapiens
cagccgcagcatgggcaacctcttggagaaagagaactacctgagggcagggctcaccgtcggccaggtcaggccgctggtgcccctgcggcccctcactcagaacagggcttccaggtcct

SEQ ID NO: 26787 - DNA, 122 bp, Homo sapiens
aagctctgggattgcaggtgtgagccaccactgctggcccattgcctcccctttgctgtacgaccttcacttggcttccagagcatctcactcttccagtttctcttcttgctcatcggcag

SEQ ID NO: 26788 - DNA, 122 bp, Homo sapiens
tggcagcagcagtggaggaggcggtgggggtcctggaggaaggaccgggccaggacgaggcgacaagaggagctggccctctcccaagaaccgaaggtgggtaggaacaaacaaatttattg

SEQ ID NO: 26789 - DNA, 122 bp, Homo sapiens
tggattttgtctgcttccacagtttaggttccttggctcacttccttgctccaaaaccaacgtctctattgacttttatattttaaaattaaattttaaatatatgagtgatgctaccttgc

SEQ ID NO: 26790 - DNA, 122 bp, Homo sapiens
agcatcactgcgctaaaaaaaaaaaaaatcataatgatgtggattccccctatttctggtcgttataagaactgctcacctatctttaaaaggtaaaggtggccaggtgaggtggctcatgc

SEQ ID NO: 26791 - DNA, 122 bp, Homo sapiens
agggcaagcacgggaagaagcagctggacccgctcaccatctatggcatccggtgtaagtcgggccccatcttgggggactggggtgtgcggggagctgggtcaggacccacatttcactgc

SEQ ID NO: 26792 - DNA, 122 bp, Homo sapiens
ggacagaaatcgatcttcttgactccaggcaattaaaataaactcagaacagcgccagcacgggtcagcctgtccagctttgtctacaacagaacttctaagagggggggcaggaaatgaaa

SEQ ID NO: 26793 - DNA, 122 bp, Homo sapiens
ggttctcaatacctgtcctccagccccacaggctggagtcatgggctgggccgggcggggcgagaggaggctgttaccttacaggctccaggcagcaagtgcagcttgacgtaggggtcggc

SEQ ID NO: 26794 - DNA, 122 bp, Homo sapiens
aggctcgggcggcccgggaaggaagtcgcagctgcagtcattcactcccgccgccggccgcgttcatgctggggacagcgctcccggacccagagcaccgcctgcggcctcacctaggggag

SEQ ID NO: 26795 - DNA, 122 bp, Homo sapiens
ggcttcactcctgaagccagcgagaccacgagcccaccgggaggaacaaacaacaccagacgtgctgctttaagagctgttaacagtcaccgcgaagggctgcagcttcactcctgagccag

SEQ ID NO: 26796 - DNA, 122 bp, Homo sapiens
tcggttgcaaatatgctgcttggggttaaggcagtttcagttaacgggaaccagattttacgtggtgtttctactttgaaggtacagtattgttacattacaaactgaaagacagaggtgga

SEQ ID NO: 26797 - DNA, 122 bp, Homo sapiens
ctcgctcgggcgtgttcctgcgccgaccggacggccggactccagcaccttggcccggcccgcgaacgctgagcacgcgcggaaaccctttaaaggtagcacatttttcgggtgtcgcgggg

SEQ ID NO: 26798 - DNA, 122 bp, Homo sapiens
ccgagaggttctggggcaaagctgccgagcagatcagctggtacaagccctggaccaaaacgctggagaacaaacactcgccctctaccaggtggtgagtgacttctgtgccaaccctgatc

SEQ ID NO: 26799 - DNA, 122 bp, Homo sapiens
caccccttgcctgcaaggtctgtttcctaacagctgctccaaccacacacctcggttctgcgggagcccctcctcttcctccctccctccctcattcaggggtgggactgaagaagaaggct

SEQ ID NO: 26800 - DNA, 122 bp, Homo sapiens
ccggctccaccttggctcccaggccggcacccccgggctgagcacagggccaggggcaggcgggttccagagggagcatttccaagggaggaggaaaaccaaagtgcctgccaggcaggggg

SEQ ID NO: 26801 - DNA, 122 bp, Homo sapiens
gctgtcacctcacagccctgtcattaccattaactcctcagtcccatgaagttcactgagcgcctgtctcccggttacaggaaaactctgtgacagggaccacgtctgtcctgctctctgtg

SEQ ID NO: 26802 - DNA, 122 bp, Homo sapiens
cctcggcacggcgcagcctgggctctcttccccctcccgcttgggagtttgcagtgtggacgctcggcaagcacagtaagttgtcccccagcgaactcgggcccgggcggagtggagccgcc

SEQ ID NO: 26803 - DNA, 122 bp, Homo sapiens
tccacactctaaaatgcagaggaggaacacaccttctgtcttcaaaccagccccacatcacgctaaccctaggccaagggctagtgtgcctacagtcagagggtggccgacctgaggtgaga

SEQ ID NO: 26804 - DNA, 122 bp, Homo sapiens
cttcggaacgtctcgggtttcttccacctctgcgcgaagccgctgggaacccaggagttgcgctggcagagaggggcggccccagaaaccacttccagatgtgctcggctggccggctcgga

SEQ ID NO: 26805 - DNA, 122 bp, Homo sapiens
taatattattttgtctcatttttggcatatgtttaaaattctccatagcaaaattacttgcgggttttggttttgtattgtattgttaaaaagaacaaataaagcccaaggcccaggagtcc

SEQ ID NO: 26806 - DNA, 122 bp, Homo sapiens
atggcagacatttcccgttcctgaacaatttccttttttccccctaattgcaaatggtcacgatgttttgctgaggtattaattgacataggaacctacctaaaaaaatgggctgtgtctct

SEQ ID NO: 26807 - DNA, 122 bp, Homo sapiens
cggacgagtgacgcagcagacactgcctccctgaaggcatggcaaggtgggacgcttggccgccacctgcaggggcctcacctgaccagtccccagcctcaggaggcggaccccagcagctg

SEQ ID NO: 26808 - DNA, 122 bp, Homo sapiens
gatacagtgtgttctttgaatcatctcttgagatggtgaacctgcctttcacagatgcagcgcattctgtcgtgtaactgttacgtttggttctaatacggccaacccactccagccctttc

SEQ ID NO: 26809 - DNA, 122 bp, Homo sapiens
tgcccctcccaggaacgctcacggcttactttctttccctgcggtgaggaactcctggaccgtgtcgtagaggccgatcctgagagaggcggagctgatttgccgctgaagccccgcaggca

SEQ ID NO: 26810 - DNA, 122 bp, Homo sapiens
gcagtggcttatgcctgtaatcccagcactttgggaggctgagacgggcggatcacaagacgggcggatcacaaggtcagccatttgagaacagcctgaccaacagggagaaaccccatctc

SEQ ID NO: 26811 - DNA, 122 bp, Homo sapiens
gcccttcactgtctccagcaggagttcctagggcttggcctgccttgctccacagtacggcggaggcagccctgcttgtcactgaggagccctagacaaggccaatgggttcatcaatgccc

SEQ ID NO: 26812 - DNA, 122 bp, Homo sapiens
tctaataaattccaagttgcttcctccacagaagctagaaggacactggctcttttcgaacgtccttttttcctgctggaagggttctggggacagtttacaagtgtggtaacctaaaattg

SEQ ID NO: 26813 - DNA, 122 bp, Homo sapiens
cgcaggccacgtgaggcgagagctggttccaggaaaggggggccagagaccccgcagagtcgatgcgtcaggctgtggagtggggaatcatccttaaaccccacaatgtgcctagtgacctc

SEQ ID NO: 26814 - DNA, 122 bp, Homo sapiens
ctccaatatttgttttcctttaagcaaacagcaaaatccaagtctacactgggtcactcacggtttttataaaagaaaggagtgcccagcatgtctcactaaaaccccagggtctctgtaag

SEQ ID NO: 26815 - DNA, 122 bp, Homo sapiens
acaaccaaaacctggagcttgccccgcctaactgtgacccacagctcactaaccttggtgcgcacaacagccacatcttgaatatctgcaccctgaaccactccctagatttcaagaccggc

SEQ ID NO: 26816 - DNA, 122 bp, Homo sapiens
ggcatcggatcgcactttcgcctcctaggctggggaagatggtgcacatgcgttgtaatgcgcacgtgttactggcacatgactcccggtcccttgtgagccgaaacttggatcctaatgac

SEQ ID NO: 26817 - DNA, 122 bp, Homo sapiens
cgaggagaacaagctgcccgagccggaggagctggacctggagccagagaacatggagagcgtccccctggacccctcggcctcctcgtcctccctgccactgcccgacagacactcaggac

SEQ ID NO: 26818 - DNA, 122 bp, Homo sapiens
gtcagagatcccagtagccccgggagagctgttagaagtctgagaaggattggtcatcatcgcataccatacataggtggagggcttgttattctcagtttcccgcctatgagaggataccc

SEQ ID NO: 26819 - DNA, 122 bp, Homo sapiens
cactcagaagacaaacatgactcattgtgtgtgggaactcattccactgttcacaaacttcggtttgagggttgggaaggtctggaaaagattctagtgtaaagcctaattcagaagggtac

SEQ ID NO: 26820 - DNA, 122 bp, Homo sapiens
gtttacaaacactgcaaatgttgtcatcattcaaatcaatgtttacaaactgctcctcttcgttcatagtgcccctattaagaaacagaaaaggaaagttacacaatttcatgaacctgcct

SEQ ID NO: 26821 - DNA, 122 bp, Homo sapiens
aggttgaaaactaaagtgatgcaatgccaataagttctaagtccctcccctaaggtacctcgggcttggaagaacgaaagagcatccttaaagaaatatcaatacattcacactctgatggg

SEQ ID NO: 26822 - DNA, 122 bp, Homo sapiens
cgctttggaaggctgagacggggttatctcttgggctcacaagttagagacaagcctgggcgtgggctatattgctagatccaggtctctgcaaaaaacaaaaccactcagtttttagtcat

SEQ ID NO: 26823 - DNA, 122 bp, Homo sapiens
aggaggaggaggagactgaataggtattgaaatgcgctttcaataatgcatgtcctcctccgcacaggcctggggcttgctggggaggagaggatccttaaagggaccgatcctcctgtccc

SEQ ID NO: 26824 - DNA, 122 bp, Homo sapiens
aacctattgctttattttaaaaacataatttgtgttttctatttgtaagatctgacatttcgaggcaataaaaacttctcagaaagtggtctgccttatcattcagtggggcagagatggct

SEQ ID NO: 26825 - DNA, 122 bp, Homo sapiens
tacaaagttcttttctaatttgactagcctgatttgtggatgttttaaatgctgccctaccgaatctctcctctatttacttgctgataggcaacgaaatagcttaccattcaaagcatcta

SEQ ID NO: 26826 - DNA, 122 bp, Homo sapiens
ccactcctccttcgtctcctcctcagctagtcagcgtgaagacaacaacgatgaagacttcgatgatccactttcacttaaggaagagaaattgtgttttctcttccatatggttttcttaa

SEQ ID NO: 26827 - DNA, 122 bp, Homo sapiens
gcgcccaagccggcctgcccctccccacgcactcaagggtctctgtccagggcccacaggcgacccagcaagggctcctgtgacctttagaaacaccctttcgtcgtggaagtcttcaaacc

SEQ ID NO: 26828 - DNA, 122 bp, Homo sapiens
atgcacgaagccggtgccagaggctgctccttccgctcccagccaagtggccctcccactcggactctcccagctcgcggggagccaagcacgatttttggctggccttgtagaggcaacat

SEQ ID NO: 26829 - DNA, 122 bp, Homo sapiens
ctccgcatccctcgctgaggacagagaccggtcaggcacacttcccccccgcccccgagccggtccctcggcccccagccctacctggcgaccaactgcacccacggaggcttgaactcgtc

SEQ ID NO: 26830 - DNA, 122 bp, Homo sapiens
ccctcacttttgctcacataaacctccacagatactgatgatagcttccagaagagcaagcgccttccacaactttttcctcccaggggcctgtttttgggacagtaaaagactcaccggcc

SEQ ID NO: 26831 - DNA, 122 bp, Homo sapiens
ccctccccaccactgggctctgcagcaggcgcggggaaacttccctctgcgcgcgggttccgtagtgggaaaagtgaggcccaagtgtcagccagctttcccaccatattgggtttcctggt

SEQ ID NO: 26832 - DNA, 122 bp, Homo sapiens
ggcacccggtcctgccaatccaccactggaacagctggggggacagcagacaggcacggtcggacagacttgacagatcaggcatcaggccctctgcgctggtcccgggctctttaagcagg

SEQ ID NO: 26833 - DNA, 122 bp, Homo sapiens
acaccgggagcgcctcccactcccagcccgccggagagccttgcaattttcaggaatcggcgtcttctctggaaagccgccaaaggttttaagagggtttcgccttaagggcagatgttttg

SEQ ID NO: 26834 - DNA, 122 bp, Homo sapiens
aaagggagctgatggatgggatctgtctgtgggcccctcaaggccctccagtactactctcgcctgcctcaggttcctccgactgattcagttctgcacgctcctcctcttcctcctggttt

SEQ ID NO: 26835 - DNA, 122 bp, Homo sapiens
ggaagacagctaccctggctggaaaacacgtacccctgaagatctgaagatcgagaaagacgccgtgcgggtactatgtagcagtcaggtcagactgggacacttcctgtttacagaggact

SEQ ID NO: 26836 - DNA, 122 bp, Homo sapiens
tgttctttgttctgtggtgtgctgaaaagagagttaatggagtcctggctgtcagttcaccgtgagtcataagaggatgtgtcctaatgtttcagatttgtaactggggatcccctggaaga

SEQ ID NO: 26837 - DNA, 122 bp, Homo sapiens
agaaaatgaataaataaatatatgaatgaaaagaaggcaggaagccaaaacacatgcccccggctgcctctatctgatgcaaattacacataggggccttcctcacagacagcccaagctta

SEQ ID NO: 26838 - DNA, 122 bp, Homo sapiens
cacttttatcaccgaggcctcgcaaacagccagcctgcctccagtgagggctgttttttccgccagtgccaggccacagtgcctcctcccttctcatcaaccttgtcaccccaaacattttt

SEQ ID NO: 26839 - DNA, 122 bp, Homo sapiens
gtggccacaaagcaccggccaccctggggctgcggggctgcaacgctgcgctccaggggccgactagagcgaggctgggaagcgctcttgcccagggcaagaatccagctccgggtgaggac

SEQ ID NO: 26840 - DNA, 122 bp, Homo sapiens
tggggaaaggcagcgccagggtcagaggcgccgaaagaagagcttggagccgtggtccagcgtgcactcgccggggcccggccgactgggctgcagctggcgcagggcgtccctgtcctcag

SEQ ID NO: 26841 - DNA, 122 bp, Homo sapiens
tccctttccagctgctactccgggcctcgccttggttacctacggggcccggagactcggcggagaggtacaaggcccaaagagaggcagccacagctcaaggccagggctggaaattagaa

SEQ ID NO: 26842 - DNA, 122 bp, Homo sapiens
ggtgggagtcgccgagactcttgcaggctctgggcggcctatgtccccctccctgcctcacgccccccaatttacctgggcgccgaggcccgggccaggagcgcctgctcagcggcgccgcg

SEQ ID NO: 26843 - DNA, 122 bp, Homo sapiens
cataatagtgaaaccttctgatttctaaaaatggaagtacatctccctggctgggtctcccgcgcaggcccgacccacccctcactgaggtcaagagaggagacctggagcccacctaccct

SEQ ID NO: 26844 - DNA, 122 bp, Homo sapiens
atgaaggcgcggagcagtggaggggtaggctggaggagcttcgtggaaaaagggaaggggcgacaccccatgcctgtgaggcctcctgccctgagtgactggagcacctctagggtacctta

SEQ ID NO: 26845 - DNA, 122 bp, Homo sapiens
catcccatctgggaggtgaggagtgcctctgcccggccaccccgtctgggaagtgaggagcgtgtctacccagccaccacgtctgggaggtgaggagcgcttctgcctggccgccccatctg

SEQ ID NO: 26846 - DNA, 122 bp, Homo sapiens
atgcagcaagggtctggaggctgaggaccaggcagacagacattcagagttgctggaatgcgacagagacagggagtcagactggtcatgcaagatcctgggcctgcccttgggtcctgggg

SEQ ID NO: 26847 - DNA, 122 bp, Homo sapiens
tgggcttctcagatggcagggagtggcctggtcactgttgatcttgaagggtgtgggacccgtgaaagtgaaggaggaaatgctccaggcctgacagcaaccgcagtggggagatggggcag

SEQ ID NO: 26848 - DNA, 122 bp, Homo sapiens
tgaatagggagaacttttgaagtctcaaggtcactggaaggtttggtctctggtcttttccgagtggaaactacaggttctgatttactctctggtttggcaccttggtcaacagactcaga

SEQ ID NO: 26849 - DNA, 122 bp, Homo sapiens
acgcaccgtctgcagtcaggaagtcccaggcggcgtgcaaggcggttgcggcgtgcgggccgccgacctgcggagtgcgcgggttgggctaggggctgtccctggagcgccgggtggccctg

SEQ ID NO: 26850 - DNA, 122 bp, Homo sapiens
ttgcatgttccttttcatttcctcagtcaggaccagtattattccatctagtaacttctccgcagtactaatagccttgcaaatgtcgttcaggagcctctgctggttccggtgacaagaga

SEQ ID NO: 26851 - DNA, 122 bp, Homo sapiens
tagtaggtccgtccggccggccgcacctggagagggaaagcaggcccagttactccccgccgcccagacacttggctctgctggttcattttcacctcgggtttcctcaaagacaaaaccta

SEQ ID NO: 26852 - DNA, 122 bp, Homo sapiens
acccccctggacgacttcttatcacccctgcacctattcagctcctagaacacacaggcccgaggcccccacctctgtgccaccctgggctcaggcccctctgacccagactgccatctcca

SEQ ID NO: 26853 - DNA, 122 bp, Homo sapiens
ggtccagctcagccctgccgggagacccctcacattacgtcacagcgcgctggcgctacacgcccgctaaaagaaggttgatttctaattggccccggtcggccaatagaaaaaagataatc

SEQ ID NO: 26854 - DNA, 122 bp, Homo sapiens
ggctatgaggaatttggggctcagttgaaaagcctaaactgcctctcgggaggttgggcgcggcgaactactttcagcggcgcacggagacggcgtctacgtgaggggtgataagtgacgca

SEQ ID NO: 26855 - DNA, 122 bp, Homo sapiens
cttaaatgtacagttgcagggacctgcttgggaattagtatcctgggagggttgtgggcacgttgcctcttcccctcctggacccttccccttcctggaaaccttggcctggggcggggttt

SEQ ID NO: 26856 - DNA, 122 bp, Homo sapiens
gggagcagaggatgaagggcgagaagggggcatggggctgacaaagccggggtggcagcccgtcccaccccactcagtgtgggttcccgcggtctgttcggcgcagccacagggtcctccca

SEQ ID NO: 26857 - DNA, 122 bp, Homo sapiens
gcctcagcgaccagctctaccgaaggcagccatctccttcactgcctgcccctgcgcccgcggcatcccaggcccgtcttctctggcctccaggcttgcaacagcccaccgaggttgggggt

SEQ ID NO: 26858 - DNA, 122 bp, Homo sapiens
ggtcacctggcaaattggatacagaacccacttactgaatcactatactaccttataacacgtaaacttaatctcatttaagcttttcaatctcatttagactgacaacaaccttgatatca

SEQ ID NO: 26859 - DNA, 122 bp, Homo sapiens
gggggccaggcgcctggaaggcgtaaagcaggtcgagtgagcggccgtcgtagaaggccacgcggccccgctcccagtccaggtccacgcgaatgcgccgcggcgggggctcaacaccgccc

SEQ ID NO: 26860 - DNA, 122 bp, Homo sapiens
atcatttcaccagtatacttagttgtgaaaaagggcttgttaaaaagatcttcattgagacggttcccaattcaacttctcttgtagtcttgatgtggtgtgtgtgtgtgtgtttgtgtgtg

SEQ ID NO: 26861 - DNA, 122 bp, Homo sapiens
acagcctctggctccgccccccacgggggcccacccaggcggctctgaccccgcccccctcgctgggctcctcctacaaagcctgggcccgtgggggacgcacatggtcctgttcgtactcc

SEQ ID NO: 26862 - DNA, 122 bp, Homo sapiens
aggtttgggtctccactctttcgggtatacgcagtacaggcactccacgttctaagcggacggaagctgcccatcgagcagacaggaggaagcgcagagcgtaaccatccgtgctgttgcta

SEQ ID NO: 26863 - DNA, 122 bp, Homo sapiens
acattgtgttttcaaagacggtggggagggctagagaaaaatcctagaagctagcaagaccgcactacaccgaaacgtcgcgggcaacggactcgccagtcaccatctagcccagggacgac

SEQ ID NO: 26864 - DNA, 122 bp, Homo sapiens
ctcctgtcggggaccgttgaaccaccgagtgggcggtcatccgggtgtctcagagcagaccgagagcaggtgcgcagacctctgtggacggctacttccggtgcgctcccaacaggtttccg

SEQ ID NO: 26865 - DNA, 122 bp, Homo sapiens
gctgcgcatggcgctcgcgagctagcgcaagttccaggtggttgcgggcttggcaggcctcgcattcggggcagcgggctggccccaggcagtgaggggcttagcacctgggccagcagctg

SEQ ID NO: 26866 - DNA, 122 bp, Homo sapiens
acgtgaaggagactggcttccacttcaccatcacgaaccagggcgcctcggttgcgggcccggcttcagcctcaagttctggcaaggtcagagccgactccaagtcatggggaggattcagc

SEQ ID NO: 26867 - DNA, 122 bp, Homo sapiens
ggggctggaaaggagccccctgggcctccgtctggggggcgtgtgtgaactgttttctcccgtcacaaaaaaggcttcctccacatgcgtttgcacgcccggcagaattcgcccacagcaag

SEQ ID NO: 26868 - DNA, 122 bp, Homo sapiens
ggcaggaggattgcctgaggccaggagtttgagaccagcctgggcaacaaagtgagacctcgtctctaccagaaaaaaagaaaactaggccaggtgcggtggctcatgcctgtaatcccagc

SEQ ID NO: 26869 - DNA, 122 bp, Homo sapiens
accctcggccagcaggtggtcgcggatgacgcagcagcggcggccccccacgctcaggcccgcctgcaggaaggtgtgcctgtccggccccgtgagcacgcccacctcctgcggcgagatgg

SEQ ID NO: 26870 - DNA, 122 bp, Homo sapiens
gggcacgacttcagcaccttggagagcggcggcgggcggagtgcggggaggcaggcgtggcgcttccaaggtgtcccctccggagttgcggggaaggcagctgccttcccggggatctgggc

SEQ ID NO: 26871 - DNA, 122 bp, Homo sapiens
agaacagatttattcaccaaaacattcagagaaggtctacaaggactagccaggcaagggcgttttaatacacctggtattaacctgggcacctttaacatacaagcacacacaaacatgta

SEQ ID NO: 26872 - DNA, 122 bp, Homo sapiens
gcagcctcaccgcttttctcccttcctcccgattcgggaaaacttctctaatcctggcaccggcccctgttactgacacaaataaatgactagcgcgtaccctgacccccttccgcaccaat

SEQ ID NO: 26873 - DNA, 122 bp, Homo sapiens
acagtgcactgcagtggaagccgaggagtgcatggacttcttcagggttcgaggctcggccgtgggcggaacgccagtgcctgtggtcggggtggtcaggcctggacacggagactctgatc

SEQ ID NO: 26874 - DNA, 122 bp, Homo sapiens
cgcagagagccctctctttttctgccatgcggggataatgaaagcagccatctgcaacctcgaagaggtccttaccagaacctgaccgtgctggccctgatcttggacttccagactccaaa

SEQ ID NO: 26875 - DNA, 122 bp, Homo sapiens
ggcgggaggctcactgcgggcaaggcggggcctggctgcctcagggtgcgcttcaggtggcgcttcaggaaaacggtctccaagtccctagataccctgagaacagtccttctttgtccctt

SEQ ID NO: 26876 - DNA, 122 bp, Homo sapiens
aatggtcccacacttcttcccaagtgttcatttgtttttttttttttttcctgtgaggaacgtcactgtttcagaaatctgctcctaaatttccctgcagggagcatcagccacagagaaga

SEQ ID NO: 26877 - DNA, 122 bp, Homo sapiens
ttcagggggggaggggaaagattgctagagcagactgttatttccctgcagaaggactgccggtttctctctaatgttcatcgcaattatagggatttttttttaggatgcattttaacgtt

SEQ ID NO: 26878 - DNA, 122 bp, Homo sapiens
gttcatctctttgcagacaacagcatagaaaggcagagaggcttctgagtatttaaatgacgctgggctatccagggaaaatgaagactgcagggcagagggtgtcaccaggaaaggcagat

SEQ ID NO: 26879 - DNA, 122 bp, Homo sapiens
cgggctggcgagattgtacgcccggggcgctgtgggtgaagagcgccgggggaacctttacgcgaggcagcaatgacaacgcgcgattttaaaggcgagtggtgaggacatccgcatttcct

SEQ ID NO: 26880 - DNA, 122 bp, Homo sapiens
gggagcccattggactggggctggtgtgtggctgatggcagagttcaggccgggccagaccgggccagtccagagggagaagccgctactgcaggagacagagcgatttttccgctgcaaat

SEQ ID NO: 26881 - DNA, 122 bp, Homo sapiens
ggtaagaagaccttggacagcgtccctggtactggagctgaggtctgggcttaaggctgccgcaaaagcggcagccgcatctttcccattcctgccagcctgcggtgagaaaggggcgcagg

SEQ ID NO: 26882 - DNA, 122 bp, Homo sapiens
acggccagcccggaagtggcggtgttgcttccgtgggttccattggcccaccggcagtcacgtggctgcccatagcagaaacgtgtgtggggttgcgggggaacaatgtgaacgcgtgtgga

SEQ ID NO: 26883 - DNA, 122 bp, Homo sapiens
ttgtctttgaggtgtggctcacacgtgtctctctagcaactatgctgctagtgacagagacgtatgacatttgcatttggttgttagcgcaggcagtttggcacacacttgatacaaccagg

SEQ ID NO: 26884 - DNA, 122 bp, Homo sapiens
ttcggctcagactgacaagcatgaacggaacggaattattccctcttctaactgcagccacgatttggcgttttaacaccgggctcaaggtagcctgggtctctcttggccaaagagcccag

SEQ ID NO: 26885 - DNA, 122 bp, Homo sapiens
gctccgtgtattctgaggtcgcagagcacaagaggttgggggtgtgatacggaccgacctcgcccatccaggaggaatggggctggtaacagagctttgtaacccctcagcaccggtagagg

SEQ ID NO: 26886 - DNA, 122 bp, Homo sapiens
tcctgctggatgaggcgggcactcagctgcagttctgcatccaggcggttccgttcttcccgcaactgctgcaactcaaggctcacgtctgtgaccggtggtggtaggggacagctgggacg

SEQ ID NO: 26887 - DNA, 122 bp, Homo sapiens
ttactttcctctgtaggagaaattatgggctgaagtggtctctcttggccttgagttgtgcgtacttggaggagagtattagggtaaaatgaaactgtgtttcttaccctcttcaatgcatc

SEQ ID NO: 26888 - DNA, 122 bp, Homo sapiens
tgttcgactgttcttataatggctgattttctctttctttggaagtagacagaaaccatccggggctgagagcgtgatgaagaatacaagtgccgaaggaggggtgtggccttttagagcac

SEQ ID NO: 26889 - DNA, 122 bp, Homo sapiens
taatcaggaggctgaggcaggagaattgcttgaacctgggaggcagaggttgcagtgagccgagattgggtgacttcactccagcctcgacaacagagtgagactctgtctcaaaaaaaaaa

SEQ ID NO: 26890 - DNA, 122 bp, Homo sapiens
ggacagatgggagggaattacggtatttacagctgctcttcgccggctcttgctcccccgcgtgtcgacaaccgaaactgcagcgaggcccagaggcctctgcccactcccctcggagttcc

SEQ ID NO: 26891 - DNA, 122 bp, Homo sapiens
cctcgattttcctaaaattgcgtcatttagaacccaattgggtccagatgttatgggcatcgacgagttaccgtctcggaaactctcaatcacgcaagcgaaaggagaggaggcggctaatt

SEQ ID NO: 26892 - DNA, 122 bp, Homo sapiens
acgtaagaaagttgggttctgtggagacttggcatatccacgccacctggaaaatcatcacgtgccctccggggcaagaccaaggcctcaagtcacccctcgcagcccagtggacctcccgg

SEQ ID NO: 26893 - DNA, 122 bp, Homo sapiens
attacagttgacttagcaaaacctgctggctgttcctggggaagtcccatgttgcagactcgaaggtattatttattgtagcctccaagttacggaatttccctctgctcctctttttttgg

SEQ ID NO: 26894 - DNA, 122 bp, Homo sapiens
cacaggcgcaaaataaacaagactgacacctgtttcataactctggtcactattttcatccgcatctgtcacttctgatgcgtctctaacatttataagatttctctggggagggatttgac

SEQ ID NO: 26895 - DNA, 122 bp, Homo sapiens
gagccctgaaggtcttggcccatgttctgggagctgctgtcaggagccataggagggtctcgaacagggttggtggcttggcctgatggggatgccaaagagatggggcgccccatgggccg

SEQ ID NO: 26896 - DNA, 122 bp, Homo sapiens
ggaccatctccgtcatcacaggaagttctgttgcgtggcactggtctgtaacaagcctcacgtgtctccagtagcagttgagggtggccccactattcttgcttattttcttactcggctta

SEQ ID NO: 26897 - DNA, 122 bp, Homo sapiens
ctttttcagcttgtgccgggcccgcttggcggccctggcgctgttggggactttgggctccgtgctgttgatgaattccagcagctcatccacatctcggtggtccacggcgggctccccag

SEQ ID NO: 26898 - DNA, 122 bp, Homo sapiens
gaggttcaggcagtgacgtaacttgctgccttaggtggccttccgctctggcggctgtcgcgacgggggttcagggaatatttactgggcctctccgctccctctgctcttggaggtgccat

SEQ ID NO: 26899 - DNA, 122 bp, Homo sapiens
aagcgaatgacccgggtatcagaccagctcagaccctcacaccagaaccctggggtccgccgggccccgcagcagcagcctcgaagggacaagaagagccaggagaaaaagaggacggacaa

SEQ ID NO: 26900 - DNA, 122 bp, Homo sapiens
agtgagggtcttgtttccactgggcaaggcttccccagccctagctctgcagtcctcaggcgtcagagcttcgtgccactctggaaactcttcatccagcccctgcttgcagatgaattggt

SEQ ID NO: 26901 - DNA, 122 bp, Homo sapiens
tcaccctcagccgtcttccacatcgccaccctgatgcccaccaaggacgtggacaagcaccgctgcgacaagaagcgccacctgggcaacgactttgtgtccattgtctacaatgactccgg

SEQ ID NO: 26902 - DNA, 122 bp, Homo sapiens
cccaatagcgatgaaagccactcgagtggggaccgcgccacaccaaaggggttccggcagcggaagatgtggccccagaacaggccgatggaggacatgggcctcactctgcagtcaggtcc

SEQ ID NO: 26903 - DNA, 122 bp, Homo sapiens
gaagcagaaacattgcgaatcgggggtggcggcagcagcgacatgagatcctttgccctccgccccctgggctgcgggacccagtgacttcgaggaggagcgcgagcgcagccgcgcggggc

SEQ ID NO: 26904 - DNA, 122 bp, Homo sapiens
ccagttcttcatccttcttaaagagacctacattgcaaactccttaatgctcatgcctctcggctgcagtcccaaagggccctgtcatgggctgcttaattaaagatggaggtggtgtggtt

SEQ ID NO: 26905 - DNA, 122 bp, Homo sapiens
tggctctggagacagccccagagcagggtgttgggatactgcagggccaggactgagccccgcagacctccccagcccctagcccaggagagagaaagccaggcaggtagccagggggacta

SEQ ID NO: 26906 - DNA, 122 bp, Homo sapiens
tctctttcttgtagcctacagcctggctcccgcgacgccggaggtgaaggtggcttgctccgaagatgtggacttgccctgcaccgccccctgggatccgcaggttccctacacggtctcct

SEQ ID NO: 26907 - DNA, 122 bp, Homo sapiens
gtgtcattgtgaaagagaagattgtttccaacatcctagcaggagcccataactgccagacggcaggatctccacacacacctctgcactagctgggaggacctgctcatagtgctccttca

SEQ ID NO: 26908 - DNA, 122 bp, Homo sapiens
aggcaacttaatttctattcagactccattctgtcaagcggtggaaataatccgggtccccgtttctctccactgctgtcccatggatgactaagaaggcgaggagaggggcgcgtggtccg

SEQ ID NO: 26909 - DNA, 122 bp, Homo sapiens
ggaaataaaacaactcggcaactgcttttctacccgaaagtcgggagcaaggagtgggggcgagaagttaagtttcccaaatgctctcggcactccagcgagcgcaccaagacgcctagcca

SEQ ID NO: 26910 - DNA, 122 bp, Homo sapiens
tgtgttgttaacatgttgtgcagcttactcagaatgctacatcagagacatcctccttgacgtccccctaccccaggtaaaaggaagagaccattgatttactgtaataagtttcccaaaat

SEQ ID NO: 26911 - DNA, 122 bp, Homo sapiens
agggagcaggggacggagaagcgtggggtcaagagcgtggccctgagcagggggctgcagcgaagaccaaggggattcataagccagatccagggagggggtctcccagccccacctgctcc

SEQ ID NO: 26912 - DNA, 122 bp, Homo sapiens
tatgggcaaaaatgtgatttcttcatctgggctttaagagctataaataaaacacatggccgggtgcatgcctatagtcctagctatttgggaagctaaggcagtaggattccttgacccca

SEQ ID NO: 26913 - DNA, 122 bp, Homo sapiens
cccccatccagccccctgtgggaggagccgtgggaggggtcgcctcttgcccggcgcgtgcggcagtagcgtctctgcgttcggccccgccctacccagggccccgcccccttcctggcgcg

SEQ ID NO: 26914 - DNA, 122 bp, Homo sapiens
catgaatgtaacgagtgtggcaaggccttcagccacagttccaatctcatcctccatcagcgcatccactctggagagaaaccttatgaatgtaatgagtgcgggaaggccttcagccagag

SEQ ID NO: 26915 - DNA, 122 bp, Homo sapiens
gactcttctggacagttgttacttcctgtacagactgggttgaaactgcagctcaaaagacgataggttaaaagccaaactagggaactgcaagataagattgtttatatatacatgacata

SEQ ID NO: 26916 - DNA, 122 bp, Homo sapiens
gccgcatgttacaaggtcccactcatagcatgcactgtggaacctaaatcatgcctcttgcgggatttgaaccaaattgggatctgtagctcaggccaaattccttcacacccaggccagat

SEQ ID NO: 26917 - DNA, 122 bp, Homo sapiens
ccttattctggaaggtgcctgtctgtatgaaatcattacctggatccttgttgagagcaccgtctctatctgatttctggtgaggatcttttcatagtttgccctgatctcattgagtagct

SEQ ID NO: 26918 - DNA, 122 bp, Homo sapiens
ccttcaacgcttttgccccaacccagccgtcgcccaccccgccaaaataaggcgcccgcgcgccccgactcccggctctcgcctcccgccgcccccgccccgggcgcccccagcccgccggc

SEQ ID NO: 26919 - DNA, 122 bp, Homo sapiens
gccagttagagacatagatgctatacctctggtgctaccagcctcaaaaggtaacttctacgcctgaggatggacaccttttagaattaaaagaactctcactgtggaacatcttgctggcc

SEQ ID NO: 26920 - DNA, 122 bp, Homo sapiens
agacagggggggactccaggctcagggtccagtcaccagctagaaaaccacggaggaacccggggtcagactccagggccccgagaatcctgccgggctggagggagccctcggagcaaccc

SEQ ID NO: 26921 - DNA, 122 bp, Homo sapiens
gaactggaagggaaagaacttgcccaagctcccccagccagctgacaggggtggatcgatcgccaacctccctcgcctccccttctcctctcctggagccaaaaagcagccagaaagaccct

SEQ ID NO: 26922 - DNA, 122 bp, Homo sapiens
tccagttaagaggatattaggtatataattctcttcttaaccgaatgtcagatggtcttacgccacagggtgcaggtaacccttggtctgtaagcaccaccgatccagggatcattgtctaa

SEQ ID NO: 26923 - DNA, 122 bp, Homo sapiens
gtgccggggtgggctggggagggctgagggcaggcctttatttccccaagtctcacttgccggggcgccgtatcccggcacggcttcagctgcctttctcggtttctgtcgccaccgccctc

SEQ ID NO: 26924 - DNA, 122 bp, Homo sapiens
agagtaggagagaggggggaggcagatagagaagaaaatgacgtgcacctgaagtgttctcggcaggagcagttctagaatactttattacatatctatggagacaatggcatggactgtaa

SEQ ID NO: 26925 - DNA, 122 bp, Homo sapiens
ccaggagacctcagttcccccatcactcctggattgtgggaagggtctgaggttgaactgcgatgcacggcctggcttcccagcctgtttccccatctatggagtgagcccaaagatgccct

SEQ ID NO: 26926 - DNA, 122 bp, Homo sapiens
tagaaattataggtcctcactggagaacagaaactgattctgaatcatttccagagcctccgaaaaggcacttcctgttgttagagatctgttgtgctgaggttagattgtagctgctggtc

SEQ ID NO: 26927 - DNA, 122 bp, Homo sapiens
ctcaacaaaactcgcatcccacctcgcacctactgtcgagtccacgttgggcatgttgttcgctttggaggcagcacccggctctttatcctgcaggtaggtagaaaaacctagaattgaaa

SEQ ID NO: 26928 - DNA, 122 bp, Homo sapiens
atctcggctcactacaacctctgcctcccgggttcacgtgattctcctgcctcagcctcccgagtagatgagatcacaggcacgtgccgccatgccgggttgacttttgtatttttagtaga

SEQ ID NO: 26929 - DNA, 122 bp, Homo sapiens
aggatgctaaatcccggttctgctgctttgggtaccaaagtcttgcgaaacgacaccaggcgaactataggtcatctgggctgtatgtccccaactctctaagttgcttcactgtttccgtt

SEQ ID NO: 26930 - DNA, 122 bp, Homo sapiens
aggagaccccagcagggtggggcagcaagcaccgggtccccactacattgcagcggaccgcgcccccgggtcgcgtcccggtgctggccccgcctggcgggcgaggggtcgcccccgccccg

SEQ ID NO: 26931 - DNA, 122 bp, Homo sapiens
ggcgcgcgcggaggggtaggcgcgggggcggggcgggcggggggcccggcagtaggggcgcgcgcgcggtggcgcgcggcgggcgcgagtcatcaattatgcaaggactcgggcggtgcggg

SEQ ID NO: 26932 - DNA, 122 bp, Homo sapiens
aaagtttgtgcatctattccagaagcccctatggctacagaaaaatctgtttcctaggctcgtccccaaaaccttgaaaatgacctttccaaatattctgtaacaattcatttaactcattc

SEQ ID NO: 26933 - DNA, 122 bp, Homo sapiens
taaaaccatgtctcttcctctgcctttgccccatgggctgctactgctactgctcagcttcgttcagtgtaaatccttgattattctcaaaggatcccatctttgtctaatttggaaataca

SEQ ID NO: 26934 - DNA, 122 bp, Homo sapiens
attgggtgttcccgtgtgagatgcgccaccctcgaaccttgttacgacgtcggcacattgcgcgtctgacatgaagaaaaaaaaaattcagttagtccaccaggcacagtggctaaggcctg

SEQ ID NO: 26935 - DNA, 122 bp, Homo sapiens
aaagccacacacaaatgaaccgcactcttagcagaaaggtagagctgaatacaagaggcacgcagcgcttatcctggagcttgctaaccattaaccaaaggcactcttttatcccaaactgt

SEQ ID NO: 26936 - DNA, 122 bp, Homo sapiens
aaagtaatatttgtgggaaatcttagttggaactgtagatgaactaatcaaaatcactcccgaaaggagttgttaggtgattttaggctcccctcgtggctacagcattgaacacacattag

SEQ ID NO: 26937 - DNA, 122 bp, Homo sapiens
atccccaggaacgccaggcaaggtctgggggaacaaaagaggaagctgcccccagagagccggagcctgcgactgcactcccggggacaccctctcccggacccactcggggaggcggcggc

SEQ ID NO: 26938 - DNA, 122 bp, Homo sapiens
aggatcacgccccgttagctctgcacgagtccacagttggggatgtccactccgtcgcctcgctcatctgttggcagcctccacaggccagtccagccgtgagcctgcggggtcggggtgct

SEQ ID NO: 26939 - DNA, 122 bp, Homo sapiens
tgggttggaggaggtggcggccgctgaggctgcggcgtgaagacggcgggcatggtggggcgggagaaagagctctctatacactttgttcccgggagctgtcggctggtggaggtgaggga

SEQ ID NO: 26940 - DNA, 122 bp, Homo sapiens
gcccacttcttgataggggaggccctcaaacccctagggtgccctatgttcttccataaccgggggatgactcatgcctctgtaatttctttctctagagggcttgaggacctcctgggcag

SEQ ID NO: 26941 - DNA, 122 bp, Homo sapiens
ttgagaaactgcgtttaatgaccctcagaaaagccagtgtggctggaacgctgggttgggcgggggttgagcgtggagaggggctttggagcagctcggtctcccactaaaaccctaggccc

SEQ ID NO: 26942 - DNA, 122 bp, Homo sapiens
tttatgggtttggggggtggggtgcgcttaaaaaatccacccagctaatctgcagggcagcgttttctgcccatgctgcagcccgcgctcgtcagagctgctgggagatcccccagcagtgc

SEQ ID NO: 26943 - DNA, 122 bp, Homo sapiens
ctagattgcaaactctatgagagtatggactatgtttgtttagtttattatagtattctgcgtgtctggcactcagcaaatactcagtaagtatttgctggctgacagactgatccctgtaa

SEQ ID NO: 26944 - DNA, 122 bp, Homo sapiens
tgaatttcctccaactttgggtaggcgctccagctttcctgctggggctaagttgacttccgtcattagttccgtctagacacttcaaagaatacagactccaaaattcttgcaagaaagag

SEQ ID NO: 26945 - DNA, 122 bp, Homo sapiens
tcctctccctgagtgccctctcccacttcccaggtctctgcaagggccacagtggcagagcgtggaggaggcgttcccccacatctactcccacggctgtgtcctgaaggatgtctgcagtg

SEQ ID NO: 26946 - DNA, 122 bp, Homo sapiens
gaaggagcccagctgcaaattcaactccgaaagaccctggactccgcaaacgtctggccgcggctcttgagctcttctattaagtttcggtttctgaagcttacgtttagtttcgatttctt

SEQ ID NO: 26947 - DNA, 122 bp, Homo sapiens
cagttgttttgtcttttcctgaagctttgcgtttccacgtaaattataaagggggcttgtcgctttccactgggatcctgctgactctcagccattcagggagttgggcgtccttgttgctg

SEQ ID NO: 26948 - DNA, 122 bp, Homo sapiens
ctgggcgcctgggatgcgggcgcgggcgcgggccctagggtgcaggatggaggtgccgggcgctgtcggatggggggcttcacgtcactccgggtcctcccggccggtcctgccatattagg

SEQ ID NO: 26949 - DNA, 122 bp, Homo sapiens
aaggctgggcctctccggagcacctcccaacccagctcccaggcccagtggtgcgaccagcggctacacaaaggccaacacagaccacagtggggccagagaccctcatctggaggagagct

SEQ ID NO: 26950 - DNA, 122 bp, Homo sapiens
agccctccggaaacgtatatttttcaaaaatggaagcgttccagttattattccttccagcgccgtctctgtacacagcagggctgttttcctaggctggaagtcagtcaacaaccttaatg

SEQ ID NO: 26951 - DNA, 122 bp, Homo sapiens
tctgccatggctgcttcagacacctgtgtaaaaaggagaaaatgagtgacttccccatgacggctacgttcatgtgtgatttctctcagcatccagtgcatggcagtcatgcaaagaaatga

SEQ ID NO: 26952 - DNA, 122 bp, Homo sapiens
ctgtagtgtgtaaatgccaactcagcgggagggctctggctgtcgcccagagccgtttctcggctctttcgcggttgccggcgcgctcgggacaggaggaacccgcagcccgcgggagtcag

SEQ ID NO: 26953 - DNA, 122 bp, Homo sapiens
ctgctctggccgctgctcctcgcctgagctgccggcgcgagcccaggcgcgcgccatccccggctcccaccttgtccccatggcaaccccgggcccaaggatgctcagagagagagcgcgag

SEQ ID NO: 26954 - DNA, 122 bp, Homo sapiens
gagagcacacgattcccaacagttacacaacaccccgattaaactaatcagtcttcgagccgcatgataccgtgacccgagagaccaaggcagcacctcgctggagagactgggacacacag

SEQ ID NO: 26955 - DNA, 122 bp, Homo sapiens
aaagatcttcccagactgcccaatttaaggtggcccacaagattaatcagggaattggggcggctgaattaagatggaaatactgtctgcaactcattctaaaaggcgaaaaagaaaatgac

SEQ ID NO: 26956 - DNA, 122 bp, Homo sapiens
gacccccctcagaggggacatttcacagcctcagaaacatttctggacttggcacccgctcggcccccagccccgcagtggccgagggaagcctgcatagacgaggggaaggacgaggagag

SEQ ID NO: 26957 - DNA, 122 bp, Homo sapiens
cggttaagacactaggataggctcctctccaccggaaaaggcgggatttagatcacgtcccgcaggccggcggaagtagctgatactctcattggttgcaaaaccttgatctgtgaaagcgg

SEQ ID NO: 26958 - DNA, 122 bp, Homo sapiens
cacgtccaccttctcgcagaagggcagccccagcaggatctcaggggcccggtagaagcgcgactggatgtatggctccttcacgtagcgcacctcgctgaaaatgctggcggatccgaagt

SEQ ID NO: 26959 - DNA, 122 bp, Homo sapiens
agaaaccctccgcccagaaagtaccctggttttctgtggcccgtggcccacgtgtagttacgttctcgaccacagtgtccactacagagtgctcagggctgacccacacattgcgtttaggg

SEQ ID NO: 26960 - DNA, 122 bp, Homo sapiens
gcaggttataatgctgagcctttatcgcacacttaggagggcctggcttctggaaggttccgtgctgctgctggaggggccgccccacggagcccctgctgctctgcttgtctcttggctgt

SEQ ID NO: 26961 - DNA, 122 bp, Homo sapiens
ccgcgagggacaggcccccaacggagatgctgatgaggccggcagccttccagcttccagcgccatcttccttgggagtttgggaaactcagtgcctccaggggccccgcaggtggcgtcaa

SEQ ID NO: 26962 - DNA, 122 bp, Homo sapiens
ggtgcggaacggtccgtggaagcgtgcgtgcaggcccctgcaccctgcaagaagccctttcgagccaggaatcctgcctgacttcataccccctacagtacccagcgcgccctcaacacaga

SEQ ID NO: 26963 - DNA, 122 bp, Homo sapiens
catattcttctggacccacaagatggcacttgaggatctacaacagcaaaaccataccaacgtatttagaataaaagaatcatccacagggacagattaatgatgcatctttctggcctaac

SEQ ID NO: 26964 - DNA, 122 bp, Homo sapiens
aagacaatttttcactgggctcttaagcagaactcccgggtggcaacagagaatagctcacgggccagccggtgcaggtgggataagaggttcctgtccaggctggcggcatacatgaagct

SEQ ID NO: 26965 - DNA, 122 bp, Homo sapiens
cagccagcctcagaggaaagaaatctctagctggcacaggcagccagtgagtgaggctggcggctgcaggggcacagcctttagaatgagtccttcagtgcacaggtcccagggtatacggg

SEQ ID NO: 26966 - DNA, 122 bp, Homo sapiens
tgctggtgtgagtgccctcaggggttccccaggaatatcgatacaacaccaacaggtaaacgcgcgcgcccgtgtgtgtgtgtgtgtgtgtgtgtgtgtgtgtgtgtgtgtgtgtgtatgtg

SEQ ID NO: 26967 - DNA, 122 bp, Homo sapiens
tggccagagctctttcctgtacagtgtgcagaagggctatgcaagacaggcccagagagacggaagaaggctggtcccatcaacagctgggatgggcgtgggcagggccagggcccagggga

SEQ ID NO: 26968 - DNA, 122 bp, Homo sapiens
cgctcccctttctccccagccaggacgtcccaggctctccccctgttccccgcacctggacgggactctgcacagaagagagtctcccggtctcgtgtcaggctctgagttcatccagcttc

SEQ ID NO: 26969 - DNA, 122 bp, Homo sapiens
cacgtgggctgggtgctgacacaagtgtccagagctgtccttctgctcagccagggaggccggaggaactgatctgggaggcaaagggtgcaactcgattgatccaaatatatacgtccact

SEQ ID NO: 26970 - DNA, 122 bp, Homo sapiens
tactctacgggggccgagggggcgccaagagttctgaaagtgacagaggcgctgatggcgcgctgggctggatccaagcgagcacgatctcgagtgcgctggagattttaaatcttctggag

SEQ ID NO: 26971 - DNA, 122 bp, Homo sapiens
cactggcggagggcggggaggagccggcttgaggccccccagagggtctgacgcagcagccggcgccactgagccggcagcaggccgggtggagtgggggtggggtgggggacactgcaggg

SEQ ID NO: 26972 - DNA, 122 bp, Homo sapiens
agaagcagagagcatttctcccagacatttattccatcttctggcccctctcccaggcttcgcacttcctagagagttgtagggagcaattctgcatccctgcccacaagttttcatggtac

SEQ ID NO: 26973 - DNA, 122 bp, Homo sapiens
ggaggcggccccgcgaggcagcggggctgagggcacctggttaatatctaactgcaatctcgcctccagcctggctcgcagttctgtgaacccggtgaggaggctgcacggtgatgacaggt

SEQ ID NO: 26974 - DNA, 122 bp, Homo sapiens
ccttcccgggggggggctgggagagccgccgttaggacagttctgagctggtggtcccggcggtccctgctggaaaggaagcccccctcacccctagcaccactgccagtggagcagggagc

SEQ ID NO: 26975 - DNA, 122 bp, Homo sapiens
tttccctacacccccagcaataaagctctccttaggagaatacgatcaccctcactggggcggcctgagtgagtgtgtgtgtgtgtgtgtgtgagagagagagagagcgagagaacgcgaga

SEQ ID NO: 26976 - DNA, 122 bp, Homo sapiens
ctaggcctgggctcagagcagaaggcttgtaggacttctcagtcagtcggcacctgtcaccgctgcgaaacacaccctcagtcagtctcacccatcaccgctgtgaaacacaccctcagtca

SEQ ID NO: 26977 - DNA, 122 bp, Homo sapiens
gtcctcccgacccccaaggctgggcttagccccaacctctgctcccccacctcacaccctcggcagcctcccagctccaactgccaatctagatgtgacaacactccaactcctacctccag

SEQ ID NO: 26978 - DNA, 122 bp, Homo sapiens
gtctgttttttccttttttccaacaaacaaaaccaaaacaaaacctagcccagaactgcacgtgacacatgcgctcacaagaaccagactacttgacagtattcttttaaaacaggcaaatg

SEQ ID NO: 26979 - DNA, 122 bp, Homo sapiens
ggcaccgaggaccctgggacagagtccttgattggcagaactcttcttggtgaacttctgcgtgtcctgtgcctaagtcggcgcgctacgaccccgggagccgttttagcccggagccgcgg

SEQ ID NO: 26980 - DNA, 122 bp, Homo sapiens
ggtgctgtggaaggaggatgaaaacaggtagaagatgtaatctcatcctcaaggggtgctcggtagaatggaggaaacaatacatagattcctgaagatgagcaccaaagtgattggggtgg

SEQ ID NO: 26981 - DNA, 122 bp, Homo sapiens
ggccagggaagagccatcctggcatcaacatctggtcttggatgtgggcatggcacatcacgcttacagagcctcttctctactatgtatgctctaaacaaccgtgtgaagggttgttggct

SEQ ID NO: 26982 - DNA, 122 bp, Homo sapiens
gcagaaggtcttggagatggccgacatcagcttgggtttggcccccttcagcactgcctccggctcctccgcaagcacctgcgtccaagcagcacccaccggctcaggcactgcctggggac

SEQ ID NO: 26983 - DNA, 122 bp, Homo sapiens
gggcaggcgggactcggcccctgctatggacaaggtgcaagctccaagaagcaacacgcacggtctgctgaaaccacacggctctacggagcagctgtgctggagaccgggcagcagagacg

SEQ ID NO: 26984 - DNA, 122 bp, Homo sapiens
gggcaaaaagcagcaaaaagcccaggcgtaggggcaagaagccgtggcaggaaaaacctgcggctggcggggggaaaaagccgcagcggcgggggcgaaaagctgtaaaatgccgcggtggc

SEQ ID NO: 26985 - DNA, 122 bp, Homo sapiens
cgcagccacccagcccgcgccccgggggccacccatgctgccgccgcggcagagccgcagcgccggagaatgcccattcttaaaaagtaaaaaaataacaggtgctagcatggttgtggagg

SEQ ID NO: 26986 - DNA, 122 bp, Homo sapiens
caggtccaggttgaggctcttttcagttcagcgagagggaacttcatgcatttactttcacgtgggccggtggctcacaggctcctcccttgtcttccagggcctgcacctgctgggaagga

SEQ ID NO: 26987 - DNA, 122 bp, Homo sapiens
ctgaccccgggtaccctctcaaggtccgtggcggggaccggagcccggactccagctcagcgaacagcaccctcctaccgccccggcgccccactcagctcgctcacctggcaagtagcctc

SEQ ID NO: 26988 - DNA, 122 bp, Homo sapiens
ttcccttagcatgggctatttgtgctagtgcctattttctaacatctgtacctgcacccacgtaaatggaagaatatgtttctcatatgatactggaatgtcttcacttaacacttttaact

SEQ ID NO: 26989 - DNA, 122 bp, Homo sapiens
ctgaaagaataacaaggaggtggctggaaacttgttttaaggaaccgcctgtccttcccccgctggaaaccttgcacctcggacgctcctgctcctgcccccacctgacccccgccctcgtt

SEQ ID NO: 26990 - DNA, 122 bp, Homo sapiens
ttggttgaactgtgggggcatttctgtgattcctagtgaacagctcttgccttctctaggcgagttcctttattccagaaatctgggaggccctgaagcagtaggtccccatccccaccact

SEQ ID NO: 26991 - DNA, 122 bp, Homo sapiens
ctgctcccaggagtgcctgcagccctgtcagtttccaagagtgtctccttcaagcagcctcgtcaggtcgagccacccccagtgccctctctcctctggcagccgcgctccctgcccttcct

SEQ ID NO: 26992 - DNA, 122 bp, Homo sapiens
attcacagggacaggaggcaactgtctaagaggtggggtttgagggacccccttcccagccgtctacccttggccgagactataacaggctcaatattccaccactaaaaattcatttcctt

SEQ ID NO: 26993 - DNA, 122 bp, Homo sapiens
tctccccagctgtatttccaaaatgtcgctttctaacaagctgatgctggacaagctggacgtgaaagggaagccggtcgttatgagagtcgacttcaattttcctatgaagaacaaccagg

SEQ ID NO: 26994 - DNA, 122 bp, Homo sapiens
cagcccgaggagtgggcactcggctccggacactgtaactcttgctctctaccttgctcacggggcctcaggcttcagtgcttacctcgatgtctcatacctctgcagcggggtactgctcc

SEQ ID NO: 26995 - DNA, 122 bp, Homo sapiens
ggagcggtactactccggcctcatctacgtgagtgggctcctgctggggggcgcgtgcggcggagttgctgccggttggggaaccaggtccaccacccggctcccctgcattaacttgaggc

SEQ ID NO: 26996 - DNA, 122 bp, Homo sapiens
ttcacagtcactggaaatgatcaacacaattagatttgcttcttttgccccagaacaaagcgggtttgttgatgtactgaatcggacacattactttctagctgaacactcagcttcatcca

SEQ ID NO: 26997 - DNA, 122 bp, Homo sapiens
tggggcccaggtatcagcatattttaagagcttccaaggctgagaaccgctgcttgactgcgccgcagaggcaggagggagggaaggaaaccacttagcctctttctccccccaggtggagg

SEQ ID NO: 26998 - DNA, 122 bp, Homo sapiens
agtctaaaactcaacagatctgatgtcccagtgattttctctctcagattataggtaaatcgctggctgtttttaagaagcctatgtagagaagtggaatatttagaagcttctgaaatact

SEQ ID NO: 26999 - DNA, 122 bp, Homo sapiens
taagtaaatagctgaaacgttaccaaaaaatcatgctcttgaaaggaggcagaaacctgacgctgagctccagagcagctggggtgactcagacagtgtcagagacatgggttccaacctcc

SEQ ID NO: 27000 - DNA, 122 bp, Homo sapiens
ttcccctcccctccctggtgcttttgtctggagggtgttatgggtttgtgtgtgtatgagcgtgtgtgtgtttttggatttcagactaattttctggagtttctgcccctgctctgcgtcag

SEQ ID NO: 27001 - DNA, 122 bp, Homo sapiens
gaagagtaaggtgtccggccgggctgtatctcgtgggtggcgagggaacattgcctgtctcggaaacagttcccaagacaacgcgcatcccagacgcccggcgaggctgccttcctacaggt

SEQ ID NO: 27002 - DNA, 122 bp, Homo sapiens
ggaatgaatgaagtgagcttcagggggacgccaagccgctgccaagcccggaatcttccacgggcacaaagcccagggaacacaaaccacgtctgcccagaaaatgccccgtgtccttggga

SEQ ID NO: 27003 - DNA, 122 bp, Homo sapiens
ttcagtttttccatagggcagagaatctttgaggaaaggaggtaaagggagtacccggcacgcagaatacctgccaagtaagcattacacgaatctgttttcttgggtagtgttttcatctt

SEQ ID NO: 27004 - DNA, 122 bp, Homo sapiens
tccagatcttaccagatctgcggtaagatctgaaggtctgtgaattctctcactgatctgcgagggctcccttccggactgcaccccacaatggacagcaactgctggaaattgaatcaaaa

SEQ ID NO: 27005 - DNA, 122 bp, Homo sapiens
aggccatcaggctggagtcagcacctactctcccagggaacagcctggactatgcttggccgcattgcccacagaaagaagtgcgaccaaggcttggaagtcactgcaggtttcttactccc

SEQ ID NO: 27006 - DNA, 122 bp, Homo sapiens
ccgttttgcagaggacagtggctttgatccacaacggtgtccccaaggctgtcacaactccgagggcacatgcaaaactgaacactccggccatgcaaaaaatgattttcttctgttggctt

SEQ ID NO: 27007 - DNA, 122 bp, Homo sapiens
cacggggtcaaggggatgtttgatggggaacttctggccgcgtgggagtgaaaacagcagcgtatacactgcctggaccctcccttgcggtgagccacggccagcctgtctgcagcagcaaa

SEQ ID NO: 27008 - DNA, 122 bp, Homo sapiens
gagaggcagtgttgagggctgggagtgttactacaatgactcatctgctgctggcaagatcgctttggagaacgactgggcagtaatttgtagcactgaagttaggcatcccttgcaatgtc

SEQ ID NO: 27009 - DNA, 122 bp, Homo sapiens
tagtttctcgcatctccagaatccaaagaccaagacaattccccagggtaatgctgtcggcgcaggacccgagactcctgctgcaggcatcttctttggctcctcctgaggtgggtgctgcg

SEQ ID NO: 27010 - DNA, 122 bp, Homo sapiens
aataagtcacaggatggagccaggaagcctgaggcaggtgaacctatgaggcaaatgtcacgtgcaacaaagtgtaattggctctggcagccaaaaccaattggacatcttggtgagacagt

SEQ ID NO: 27011 - DNA, 122 bp, Homo sapiens
cttatgggtataggctttctcgtagcagcataaacatagtttaaaattagatcgtgttggcggttgcaccaccctatgaactgtatggtttgtgaattatatcttcataaagctgtttaaaa

SEQ ID NO: 27012 - DNA, 122 bp, Homo sapiens
aactgaaaaaaccggaagggatggaagcagcggatcatctcgcgatatctggagcgtctgcgcctgccttcctgacctgggacttgtttccagctctcgcgagactttcaggggtcggagcg

SEQ ID NO: 27013 - DNA, 122 bp, Homo sapiens
caggctcatcgagaaggcgtctgcgagaccatggagaacgggtgaggagggcaccaggcccgcaggacccttggggaggggcaggtgctgtgacccgggaacctggcacactgggcccagag

SEQ ID NO: 27014 - DNA, 122 bp, Homo sapiens
gggccccgttgcccacagagaattcctaaaggcctatccatatgtccctgtccataaagacgtcgagtgtggaggacaccctggaggaggagatggaaccctcctgtttgctggggctcggc

SEQ ID NO: 27015 - DNA, 122 bp, Homo sapiens
aaaaggaaaacaacaaggacaaatttcccgtttcccggcaggaggtgaaggacggggaaacgaaaaaggaagcccaagagctggaggaagacagagccgaaggcctgacaaattaacttcta

SEQ ID NO: 27016 - DNA, 122 bp, Homo sapiens
tagaatctgaagtgtctctcattcctttttattggggaggaatcctatctcctatcaagtcgagacagttgcctcatccaattggaaggggaggcagcagtatttttcctctgccatcttga

SEQ ID NO: 27017 - DNA, 122 bp, Homo sapiens
aaagaaaggcgcaccggaagttgtggtacccaagccatactctcataaatccagccaggtcgcgctgaaacagtttccggaagcacttctcctagatcgcaccgcctcttcctcctggaagc

SEQ ID NO: 27018 - DNA, 122 bp, Homo sapiens
actactgtagccaagccacctaggctggagcccttcagaatactgtcattgtccttggggcggggtggttgcagtagtgtcatcaacccccccatccccattaaattaatcccaacatgcat

SEQ ID NO: 27019 - DNA, 122 bp, Homo sapiens
tatttttgcttttgtacaaaacccgacagctacagcaaaactttcagccctccccatcatcggtacaaggcaacagtcccaggcaagcaaagctaaacaaggcgtcccaacttgggggtgcg

SEQ ID NO: 27020 - DNA, 122 bp, Homo sapiens
tcagtatgcatactctctggtgtggtttctgggcatcagatcccttaatatataggttggcgctaaagtaattttgtaaacttttaatggcaaaaaccacaattacttttgcttttaatggc

SEQ ID NO: 27021 - DNA, 122 bp, Homo sapiens
ttttaaaaatattatgtaataatttaaactctggaaagccccatactcatcccagcagctcggaaaacggaaagcaaaattcgattagctccattgtacctagccaggctaacgtgcaagat

SEQ ID NO: 27022 - DNA, 122 bp, Homo sapiens
gattaaaggtatgttatggtaaatattaaattttcatatacattcagacatacacacacacgcaaatgtatattatatatatatacttttatataataaacttaggtaaaagacttttctat

SEQ ID NO: 27023 - DNA, 122 bp, Homo sapiens
aggggcgggggtctccttggagcgccctgcatcccaatcccaaagcctggcagaggttttcgtgccgcctccgggcagacctgcccttggcccccggccctgcctcagaggtcctggcagcc

SEQ ID NO: 27024 - DNA, 122 bp, Homo sapiens
agaatttggcttctccagcagaggtaagtagctccagctggttgtcatttttggctgtggcggcgggttaaggtagcatcagaaccctggacgcggagtcagggctggcagatagctagaga

SEQ ID NO: 27025 - DNA, 122 bp, Homo sapiens
gaacatgtgactctcagcattggaaggacagagctaggatgatggctttccggtggcactcgttcaggtttttgcccaagtctcagcttggccaaggcctgtcactgactggtttaccaaag

SEQ ID NO: 27026 - DNA, 122 bp, Homo sapiens
tggagcttacactatagtaggaggcagccagtacttgcaagcacggggtcgcgggaactacgacctcacccaggccaggcgacctttctctcaagaaggagatgtcagaggcccctcgtgac

SEQ ID NO: 27027 - DNA, 122 bp, Homo sapiens
gagccctagggaggcagcgggggaggctgcgggtgcgcagggaggcaggcaggccgctcccggctgcaggaggagaagttgccaccctttcagctgttccggcctttataaaggagaaggga

SEQ ID NO: 27028 - DNA, 122 bp, Homo sapiens
ccatatgggcttggcacgtcacgggcagcagctatcacatgagagacggtgattggcatgcgtctgcactgggggagagccggctcccccgggacccgccgccatctgtcactctctactcc

SEQ ID NO: 27029 - DNA, 122 bp, Homo sapiens
cagcaggatgggggcgtgcagctcaccacacagcaggggggtaggtaggtgccctccacacgactgtctgggcggcaccacctgatacgggtgctcacagctccactgctgccctcctggcc

SEQ ID NO: 27030 - DNA, 122 bp, Homo sapiens
ccaagtaccaggcatagagccaagtgtgagggctcccatcatgggagccctaggacagcacgtggcatctagtagggatgtcattcattcattcattcgttcattcaacgtcccatttttat

SEQ ID NO: 27031 - DNA, 122 bp, Homo sapiens
aatgaagggtggtaggtcagccctgtgtccctgtccgtgggttggatgctctgttttttccgtagggtcagcctgggtttgactcaaggccgccctttctgaagtatcttgtgattttggtg

SEQ ID NO: 27032 - DNA, 122 bp, Homo sapiens
ttggcagttataaagaatctcagtgataaaatactgaaatactcctccctactggggcagcgggtcctatacacaccccttcccttcttgatatgtcactgagaatgggacgtgatcaatga

SEQ ID NO: 27033 - DNA, 122 bp, Homo sapiens
ggtgcctgggcgcagcggtgcacccggacccggaacattctcaggcgaaagtgtctcttgcgtgcgtgggccggaggttagtgtgcggggcccgccgggcggttgaaaagtccgagagaatc

SEQ ID NO: 27034 - DNA, 122 bp, Homo sapiens
ccctcttggctcaagaatgagctggaaagtcagacagctgagctggtcctggcttctggccggcccctgcccccatgccctcctctggtcaccgctttcggcagttccaatccacccccacc

SEQ ID NO: 27035 - DNA, 122 bp, Homo sapiens
ggcgggtcagctttgtttacgtcgccgcgcaatgtgctgtgtaagcatttccccttgtcccgcggccaagccccccggggccgccgccgcgcttaaccccctccacgccgtgctcacggcgc

SEQ ID NO: 27036 - DNA, 122 bp, Homo sapiens
atgcggaggggccaccttcaccatgctgcctattgcccacttcagaaatgctacactccccgctgccctgtactggtggcaaacccagtggggacactccagatgtcttcatcagctaccgc

SEQ ID NO: 27037 - DNA, 122 bp, Homo sapiens
gccgggccccgggacggggatgacggacatggatgccgctgggcccagggacggggatgccggacatggatgccgctgggcccagggacggggatgccggacatggatgccgctgggccccg

SEQ ID NO: 27038 - DNA, 122 bp, Homo sapiens
atagggaccagactcactctgacctgctgtgaggcacacaagagcccaggcagaggctgccgccttgagaagactggcatgggggaggccaggctctcggtctcagctctgccacccaccca

SEQ ID NO: 27039 - DNA, 122 bp, Homo sapiens
tctctcgccgccgggaacgggctgcaccaatggccaggtgaggaggcggcggtggtcgcccgggaggagggggtggtgccgactccgtgtgccaggagtgcgtcccggggacgctgcctccc

SEQ ID NO: 27040 - DNA, 122 bp, Homo sapiens
gctgggtttagtgaacttgcttggcagtgatatttcagcttggacattttacccttcagtcggcccaagaaatcaaaataaaggaaacacatttcatatactgcaggtaacaaaagtcaaag

SEQ ID NO: 27041 - DNA, 122 bp, Homo sapiens
ccgtcagagcgtcaggagaaaacttcacacagcatggccccagttcaacaagctggaaaacgctctgagtcacggagggaccccaaaggcaatcagccgctccccgccatcctgaatcttct

SEQ ID NO: 27042 - DNA, 122 bp, Homo sapiens
ttcttgccttgctaacacttactggcctagtattttttgacattttcattctcagtggggcggaatggctaagtgtgtaggtggtggaatcagaatgcctgggttttaatcccagctctgct

SEQ ID NO: 27043 - DNA, 122 bp, Homo sapiens
gccggcgcaggctgtgcaggtcctggaaagtgtagtccagcaggattaccagcttgttctcgctcaggtccagcagcgtgaggttgtccaggcgcgtgaagaccccgggcgggatgagcttc

SEQ ID NO: 27044 - DNA, 122 bp, Homo sapiens
gggaaaccattgcagggttttaagcaaaggagggtcataatttgacgtttttaaaacgtccgtctggctgtggagaatagccaagagaagtaaggtataatcaagaagctattgcaataatc

SEQ ID NO: 27045 - DNA, 122 bp, Homo sapiens
gccgcgcgccgtccatgcaaatgaggccccgcccccatcatttgctcctccacctccccacgccagcccacgtgtctggcccttgccctttgtgggggccatagagaagggatggtggaaac

SEQ ID NO: 27046 - DNA, 122 bp, Homo sapiens
gcctcctgttcaccagggttgtcaccacgcagggtctgactcacctgcctggagctatgccggttcccagcccaggctggcggccgtgttctgctgggacctgggacctgggctgcctgccc

SEQ ID NO: 27047 - DNA, 122 bp, Homo sapiens
atctctaagcatgggctcttcctgctgtcctatgcttcctatcccctagggttagtggtgcgtgttgggtggtggagcgagggatcccttggagcaaggttcttagagaactttgggtctga

SEQ ID NO: 27048 - DNA, 122 bp, Homo sapiens
ggggcggagcctgaccctttgaatccacggcggggggccaaggtgccagccccttgactgcgcctgtttcgccccacctgggccctcgcttgggcgcccgacccagcctctcggccttcccg

SEQ ID NO: 27049 - DNA, 122 bp, Homo sapiens
tcctcgcaacaaatggaagtggggcgagaagtttgggagggcggtacgacggggcgggggcggtggaggtcctctgatccttgaaaaggaatattatgataggggatcattgggaaggaagg

SEQ ID NO: 27050 - DNA, 122 bp, Homo sapiens
gagtggctggcacagacgagaagctaaacagaggcctgcttgccttagcccacggatgcccgcaccccctacggacgcccacaccccaccgacagatgcctgcaaccccccccgacacctgc

SEQ ID NO: 27051 - DNA, 122 bp, Homo sapiens
gaacaaggtgacatggggagcgcgcagcaaggaccaggaagatggagcgctcttcggcagcgacaccgagggcgacccggagaaggccgaggacgacgaggagatcgacctggaaagcatcg

SEQ ID NO: 27052 - DNA, 122 bp, Homo sapiens
tcagttcttcagtagcagacttcaaggtgcgtggtgccaccaggattaggagcagttgcacgcggtgcaaatgtctacctggcgtgctgttttgttgcgataatgtgaagttttatccttct

SEQ ID NO: 27053 - DNA, 122 bp, Homo sapiens
ggacacccgcatctggagagtccccgcggggtgcgggtccgaagggtgggttggaggagtcggagcttcttttgtttgaatggatttggggacaaaagctgaagagctcccctgctggtggc

SEQ ID NO: 27054 - DNA, 122 bp, Homo sapiens
ctggggagcctgctgcctgcccggccactcctcagctgtggctgtggctgtgggcatggccggacggcgtgcacactgggccgtccccttttgcgcagggtggaagggggaaggagggtggg

SEQ ID NO: 27055 - DNA, 122 bp, Homo sapiens
cgccgtcgctgctccagagactgcatgtccaggcagacagcgctgacattttctctcctgcgtggggaccagcgctgagccatacaggctccctcagggtggggtctcttgcgcgcccctcg

SEQ ID NO: 27056 - DNA, 122 bp, Homo sapiens
gatgggcctcccgcgccgccgcagctgtcacttccttcgggaaaggctagcgaccttggacgcgcaggctctgaaaaccaaggtccagacccataccgagcgcccaaagaccgcatttgaat

SEQ ID NO: 27057 - DNA, 122 bp, Homo sapiens
gaactaaatagagtgagaacccactcatcaccacgaggaaggcaccatgcatgagggatccgccctcgcgatgcagacacctcccttaaagccccacctccaacactggggatcagatttca

SEQ ID NO: 27058 - DNA, 122 bp, Homo sapiens
gggcacggagtgagctgtacaagcaaagcccaccctcaagttcaagcatgcccagggccacgccgagcccctgcaccccagctccataaaaaagcagtgacaatggcccacatacttcctgt

SEQ ID NO: 27059 - DNA, 122 bp, Homo sapiens
gggcagtgggagttcagggagcaaagtccaggcggaggagcgtgaggcggggcttccgtccgtcccgcacacttctgggattgttttctctttcagaaagcgctactgcggagtgaaccggt

SEQ ID NO: 27060 - DNA, 122 bp, Homo sapiens
agctagcgagcgcccgaactggccaggacccccgcgcccgccgcacagcgcgcagccgggcgctcaacctaaggtcctcttcgaaggtggtttgcattcttaatctggcatcttctccaggc

SEQ ID NO: 27061 - DNA, 122 bp, Homo sapiens
tcccgttccgagcgcgatgtgctgcttgatgagccaccgcaaggtctgtacgatgcggtgcgcctgcgtgagcgtcctgtgtctggccaggacggcgagcctcgcagcccgcctggcccttt

SEQ ID NO: 27062 - DNA, 122 bp, Homo sapiens
cttcgccgttaccttcttgctggcgttggtgggagccgtgctctacctctatccggtgagcgccgtcttggctctctggggccccgggcgccgccccagtctctctgtcgccggcatccagg

SEQ ID NO: 27063 - DNA, 122 bp, Homo sapiens
ggcttggtctcttgctttccacaacgagataaagtctgaagcctgtaactctccctgtcccgcgggagcgtgcaaagggagggaagataagcggcgtgggtgaggggtggcggcgcagaacc

SEQ ID NO: 27064 - DNA, 122 bp, Homo sapiens
atgaggatgaacaacaagtgatggtgggtggctgggagcatggcttttggttcctgcctccgagcccattagtcctcagatgaggaaaagctggctcatacatgacatgctggccatgagaa

SEQ ID NO: 27065 - DNA, 122 bp, Homo sapiens
acccgccgcgtgtaggggaaggcggcgccagggagagggcgcagtctctgaatctttccacggggtccatcctagggcccctccaggttcaacggtctcctaacctgtagtcacccacaaga

SEQ ID NO: 27066 - DNA, 122 bp, Homo sapiens
ggagaggactcttttctgtaagtggccctccaagagccgaagtcccggtcccgagagatgcgtgtcatgtgtgtggccttgtgacagagccgctggggttctctgtctacttctggatcgtc

SEQ ID NO: 27067 - DNA, 122 bp, Homo sapiens
gcagtacctcggcgtgacgccatgacgcagccggagagagcttcacgcacaccatctcttcgttcttcctgaactctgtcacggagggggcctttgtttatttatttttggttggtgctctt

SEQ ID NO: 27068 - DNA, 122 bp, Homo sapiens
gagcaggtcacctcgactgccccatgatgtccacgaggcttgttcctgtcttactacgatcgagaagacagcatgtgattttatgaacaccccgtaaagaaaacctgaaaaccgtgttcaaa

SEQ ID NO: 27069 - DNA, 122 bp, Homo sapiens
agaccttccagcgacacagattaacccaactggaagtttctgtttgtttttctctggagtcgttttctggaggttggttccctaaactttttgggcgaggggcacggattccggagataggt

SEQ ID NO: 27070 - DNA, 122 bp, Homo sapiens
gtcgcttcacccactaaagaggcatttacattccagacttggacgacgtcttctcggtcccgaacactgacactaactcctattacttcatcatctgaggggaagacaggaaaaaaaaaaaa

SEQ ID NO: 27071 - DNA, 122 bp, Homo sapiens
gacttgggttctagtggtgggtagagccaagaggaatgtgtgacgagtggcactttcaagcgggaggtagaaagcccagactggcacaagtcaaccatgctcacagcatgagctgctgactt

SEQ ID NO: 27072 - DNA, 122 bp, Homo sapiens
ccttccagcccgtccgacggcccgacgccgggcgggggcggggctgggcgggggggcaggcgccccggtctacgccgtttcccattggtcgctgcctcctcgcgtcatccctccgcgccggc

SEQ ID NO: 27073 - DNA, 122 bp, Homo sapiens
ctctgcctttgaacatttcacacccatgggatcagccgacaggagccaggagagcggcaccgtcttcctcctcccgcgggtttctccacatcgctgccccctcccattcccccctcttcact

SEQ ID NO: 27074 - DNA, 122 bp, Homo sapiens
cctttagtggccatcattgctcctgttcacttggcactagctggtcagtcagcatgtgctcgatgagtcaactctgttacgaagtggattgctgacagccaatcccagtaacttggctgaaa

SEQ ID NO: 27075 - DNA, 122 bp, Homo sapiens
tggatttcttcttgctctgtcacccccagcagtgaggctcactctagagtttagatcctgcgtgttctttttcttttaacatctggtagaaaaagcaccccctggcctcttccacttggttt

SEQ ID NO: 27076 - DNA, 122 bp, Homo sapiens
cccaccgggcgccgagcagccctcggccccaggcttcttcggctcccggctgcccgcggacgccctcccacagtcatgaacccccctgagggagcagcggaggaaggaggagcagcagactc

SEQ ID NO: 27077 - DNA, 122 bp, Homo sapiens
gtgaggctggtgtgagggatggctcaggttctgaaggggcttaaaagctagttaaagcgacgcaagtttaaggcattatgttttcagagccaataggattccaaggtcgtgatcatttctca

SEQ ID NO: 27078 - DNA, 122 bp, Homo sapiens
tcttcagagattcccttgaatttacatatatttattctaattctgataataaccctctgacgtaggactgatgcacttcatttccagatgaggaaactggtgttcacagaggcgagagatgt

SEQ ID NO: 27079 - DNA, 122 bp, Homo sapiens
ccgggcgagtctcacttccggcctgtgacccgctgacctgtccttgtcccaccagtcgggcggtgaattggactgactggtgacccctggcaccaggcttccccatgggcaccggagcaggc

SEQ ID NO: 27080 - DNA, 122 bp, Homo sapiens
gagtccggcctcaccctacgccggcgcactgagaacgcagcccgggtcgccgttagagggcggggaaagagctcgggctccgcccctaggcccgccctcagacccgatccggtgtctggccg

SEQ ID NO: 27081 - DNA, 122 bp, Homo sapiens
tctatagtattgttattggatagaagccagttgaaactaccagaaatatttttagccttacggtatttaatactgaaccatttgttctgacagcatagttagcagggccagatatatattga

SEQ ID NO: 27082 - DNA, 122 bp, Homo sapiens
atattcaggaacaactgatgggttagaagttggaaacacaaagacaaacaagatagttcccgtaccaagagctcagtctggataatgagacacataaaaagaggatatggcattgagtgata

SEQ ID NO: 27083 - DNA, 122 bp, Homo sapiens
cgcaaaacgtggcacatttcagggagtcacagctgtcccgcgcaaactcgactttacctgcgtgctactcctcaaaggcgcccttgcagttactcagctgcatggtttgagactgggcggga

SEQ ID NO: 27084 - DNA, 122 bp, Homo sapiens
gattaattatttgattaaataagtataacatccaggagaggccctgccattccaatccagcgcgtttgctttgaatccattacacctgggcccccataattaggaaatctaattattcgctt

SEQ ID NO: 27085 - DNA, 122 bp, Homo sapiens
gttttgaagttaaactccctgggtctggatcctacttcttccttgtaaaatgtgtgatctcgggcatgctgggtctacttcctcgtctcaaaaaaagaggataaagagagtacatatcttta

SEQ ID NO: 27086 - DNA, 122 bp, Homo sapiens
taacttttaaagctatcactgtcttttccattttccctgaccaaccatttagttctctctcggtagcaggagtgttttcctcagctaggtcgaggagacacaaacagacctcgtcacgcaca

SEQ ID NO: 27087 - DNA, 122 bp, Homo sapiens
atggtgatggcatagggcaggcagccgtgttgtcggctcagtgccagcatcttagcgtagcggggtgccacggggaatgtggccattgtccggcccagcgcagtgatggggcagctcagccg

SEQ ID NO: 27088 - DNA, 122 bp, Homo sapiens
gctctgctaaaaatagtacccggaggttcagctgccaggactggtggctgagccagggagcgtggcagaaggtgatcgggaaccctgatccctgcacgaacacaatcgttgtgattaaatga

SEQ ID NO: 27089 - DNA, 122 bp, Homo sapiens
accgtggtcaggttgatggcaccttaacccattctctcctgatgcgtgagttggaggaggcgcgtgggatcccttggggtctccaggcagcagggccagttggcattactggggatggtatt

SEQ ID NO: 27090 - DNA, 122 bp, Homo sapiens
cttcccatttcctccctcacccagtaactcccgttctgccgtctgtttatatgtatttggcgttttcaagattccacatgcaggtgagattgtgcagtatttgtctgactttgcctgactta

SEQ ID NO: 27091 - DNA, 122 bp, Homo sapiens
gcagcccagccgccatcttaacggtgcgccgcttgtgtgggcccaccacccccggaaacccgaaccttcgacacttaggttccgcttcccgtgcctggcgtcccaccaggctaagcgccgat

SEQ ID NO: 27092 - DNA, 122 bp, Homo sapiens
caggcccctcatcttgctcctgatcctctgggggtgctgtgctgagcagcagtggcccctcgaggactgagactcgggcctgggggcctggccaaggtccggggctccctgcggctgctgtc

SEQ ID NO: 27093 - DNA, 122 bp, Homo sapiens
gccagccagcagagcccggcatgttcagatgcgtgggggagcgggcacgggccaggccgccgcccgcctgagctcgcccgaggtccgaggagccctgacgcacccgggcccctgggcggcag

SEQ ID NO: 27094 - DNA, 122 bp, Homo sapiens
aaattgaatctcagaaaggtgaatcagttgtcccagtcatggggctcataagcacagagacgggacatgaatgcagataggtgtgccctaaaggaggctggtaacctcccaggtcccccatc

SEQ ID NO: 27095 - DNA, 122 bp, Homo sapiens
aatgccagctctcactttcttttgcctgacattttttaaaacagtttctacagaatgcaacgtggaaaagcaggtcagttaattcaagtcattattgaagacttaccagacatacaagttcc

SEQ ID NO: 27096 - DNA, 122 bp, Homo sapiens
ggtaaggactcattaaatcatctacttctctggtgacagagctgagactggcttcctggtcgccttctttttttttttttttttgtgagacttgttgcccaggccggagtgcaatggtccaa

SEQ ID NO: 27097 - DNA, 122 bp, Homo sapiens
tagcgtggtggtgaagacaggcagtccggagccgccctgctgaatgcccgctccattcctcgctgcctgtgtgaccttagggagttaacctctctgtgcccgtttccttatctgcaaaatgg

SEQ ID NO: 27098 - DNA, 122 bp, Homo sapiens
caagtcaaaccatcaagcacagtgatgtgctgctttttgaacaaatatggctcaaaactccgtatttccctgaataaagtcgattatctgcactttttaaaagccctaccccctgtggtctg

SEQ ID NO: 27099 - DNA, 122 bp, Homo sapiens
agggaccctatcatggctatggcagtcatgtcctgtgaaaaattccattaatgacctccacgttttatgatgtgtagagcaaaatctcagtctccctgagtaaggcctgctccatgtggaca

SEQ ID NO: 27100 - DNA, 122 bp, Homo sapiens
atcgcggatccatgcctgccgcagtacagttgtgagccaaatgagactgagactagttcccgccctccaagagcttgcaagacccgcagtggcgtaaaaacactaacatcttttagtgatcg

SEQ ID NO: 27101 - DNA, 122 bp, Homo sapiens
agaataggtatgttgccagattttctctgcatctcctttccccattcagtctgcactctgcgctggtgtccagtacccctcttaccaatagttgaacagccgaaaaataagaagataaaata

SEQ ID NO: 27102 - DNA, 122 bp, Homo sapiens
cagggggccgtctgccgccaccaccgccgccgcggcggccagggccgggctctcgcacggcggctgcatcttgacggagcccacggccatcctcatgccctgacggcgctgcggcgccgggg

SEQ ID NO: 27103 - DNA, 122 bp, Homo sapiens
gctggccagaataatgaaggacagtaaaagaaataggagtcatgagtccaggcccaggagcgatggacagatagaataaatgcaggacaagggagggcacgtgcttgcagtagcaggcctag

SEQ ID NO: 27104 - DNA, 122 bp, Homo sapiens
gacagtgatccatctctgcctcatgcagttatcattatctctatttcacagatgatgagccgaatctcagggagggtaagtgacctgtgagaagtcacacagccaggagccctatcttactg

SEQ ID NO: 27105 - DNA, 122 bp, Homo sapiens
gctacacagcttgcagatcatgacgccctgaacatcacagtgacaatctcctgtgccctccgcctcagcgtgttctgctaagggtgatatactatccattcggaagcttaggcgggcacatc

SEQ ID NO: 27106 - DNA, 122 bp, Homo sapiens
tccgcgactcggcgctgagcccgccaccggtccagcgccccaggacccgccgccggctgccggcttgccgaagccccctcaggtgggtttccgatacccctgcctttggccgcgaggctcct

SEQ ID NO: 27107 - DNA, 122 bp, Homo sapiens
ccgggcggccagagtcgcagtcaagtcgctctttgcacagagcagctctgtgtggactggcgggggtgtggccggtgctgtgtctccaccgcccgccccaacgcaagcacgcgcgcacatac

SEQ ID NO: 27108 - DNA, 122 bp, Homo sapiens
cttatgagcacaggcaacagagcacagtagtattggcagttcttgataatttgcacccaccggtattttcatgtcacatttcagtttgggctattatctcaaaataccatttgcagacatca

SEQ ID NO: 27109 - DNA, 122 bp, Homo sapiens
ctcagttatctcctcctacgctgagcacatggcatctatgttcaccttcgctgcctctaacgtcagtccagccttactcagaaccactcctcggactgcagcgtgctctgcaccgcatggcc

SEQ ID NO: 27110 - DNA, 122 bp, Homo sapiens
agacaactcccttacgttccaattctaggcttatttcagcaagactgatgctttcctctgcgaggctccccgctggccaccagccctgctctcgcgacctgccgctccgactgacgggaaac

SEQ ID NO: 27111 - DNA, 122 bp, Homo sapiens
gcctctcctaataagaaacacactgatgaccaccctatcccacaaccccggtaccccttacggtgctgagaacttttggtactgagccagttcagaaagcagcacacacgagagccaaatat

SEQ ID NO: 27112 - DNA, 122 bp, Homo sapiens
ccatatgaaggcagtatcagagtggaggagcttggaatgctgagcaaacacacggaggaacgctgctgtggtgcattacatggactccagcaggcttcgcatgagtgacaaatacacttcag

SEQ ID NO: 27113 - DNA, 122 bp, Homo sapiens
cccaaatgatgatgctggtgatgacaccaaaagtgacggtccgtgcccgcaaggcaaacacggcgtggacgatggccaggtacctgtcaatcgtcagcaggatgatgaaaaagatctcgctg

SEQ ID NO: 27114 - DNA, 122 bp, Homo sapiens
cttcacgggtgcctggagctcagcgttacagagcgtggagatgccccaggctgggagactcgggcctccgccatggccctgccagggtggacagcaggggtctgggggaggagcctctggtg

SEQ ID NO: 27115 - DNA, 122 bp, Homo sapiens
tccatggtgacgggttccgcgaaggttttcctggggtgaagaggcagggcgttgaataatcgccatggcgacagcagcagatgacggtgtcccttctgagtgctcctacctagagttaaggg

SEQ ID NO: 27116 - DNA, 122 bp, Homo sapiens
atcccctccctctgcaaagcagcctgggctcagcgacctactggttggataaacaaccctcgcatcccgctcctcgccaggctcccacctcagggccgccccatccccccaaagtgcaccca

SEQ ID NO: 27117 - DNA, 122 bp, Homo sapiens
gcacacaccacccgcgcccgcagccccacttaccatcttgcccgcgcggcccccgccgagcggcccctacgcacccggactgcgctccccgcacacccggttaagactgggcaggtccctgc

SEQ ID NO: 27118 - DNA, 122 bp, Homo sapiens
tgctggagaggtggccccagtgagtccgcctctgggaggggccttgccgctggaggcaggcgagcgcgtgtccacggggcctggagagcgctccctgggccgcctaggggggggcgaagggg

SEQ ID NO: 27119 - DNA, 122 bp, Homo sapiens
ggccgaggccgggccaggaggagtgtggcggcccaggaggcctggactgtgggccctgctcgcccgcccgccgcgggccgcccggagcccgcgcgcctgtcgcgcagcccggctgtaatggt

SEQ ID NO: 27120 - DNA, 122 bp, Homo sapiens
tccatcctctcccagcaacagtgggatctaacaggcagtgtgaggtagtgggtccgagcacggagccgagctcccaccccacctggtgtctacaaggcagaaggtggtggtaagaggtggta

SEQ ID NO: 27121 - DNA, 122 bp, Homo sapiens
cttgccctcaccatctgttttctttgtgttttgcacagtgccttctcccagtgccttgctcgtagacaaccccacacctttcggaaatgcaaaggaagtgattgcgatcaaggactattgcc

SEQ ID NO: 27122 - DNA, 122 bp, Homo sapiens
gttttcgcggcgggggctcagccccagatcccgggactcaggaggagctgggccgagctgcgggaggcgtggaagccccaggagagggttttgcactacgaaaaaaccatatgcaaattgcc

SEQ ID NO: 27123 - DNA, 122 bp, Homo sapiens
cttttctaatacttcaaaatccaagccatgtggcatctctcagggtgtctgccagggctccgagcaggattcctcacccctctctcctctgcggttgcctgcgtggggtgttgcacgctgct

SEQ ID NO: 27124 - DNA, 122 bp, Homo sapiens
cagtgtgaacaggattgtgattcctggctttgctgcttttccacatacctccatgaaatgcgtgaacacaggtgcgcagattgtcgtgtgcagaaaagggcagtgtgtgcaagcactcggga

SEQ ID NO: 27125 - DNA, 122 bp, Homo sapiens
tggatttgtctcgtttagtcgctgcctttctcctctttctgaaggatgagctgagagtttcgagttccacggaggcctgactgccgtctggccgccttcctggggatgcacgccgcgtggaa

SEQ ID NO: 27126 - DNA, 122 bp, Homo sapiens
cccaccgcgcggtctcctgggaattgtagttcctccgtgagcggccggcagcggcgaggccgccggcggactccagcgcctaggaagccctgcgcaggcgcaagcgtttcccaggcaaccac

SEQ ID NO: 27127 - DNA, 122 bp, Homo sapiens
atgacgccgagaagacagaaactcagagcgtccgacgcctcgcgtctgggcggtcgtgcccgttcactcacacgccgctctgagtggtttggcgaacctcacacgtgactccctgggccctt

SEQ ID NO: 27128 - DNA, 122 bp, Homo sapiens
ggtctgataggtcacccacagtggcgtctccttgaacttaagagcaggctgcaggccaggcgcggtggctcaagcctgtaatcccagcactttgggaggccgaggcgggtggatcacctgag

SEQ ID NO: 27129 - DNA, 122 bp, Homo sapiens
cgtgcagatcctttcctcccccttctgctgccttttttgttaaagcagaagtgacaacgacgaaacgttcggaagatggactacagtgtcccatggcagttgggagtcagccatccaggggg

SEQ ID NO: 27130 - DNA, 122 bp, Homo sapiens
caagttaacatcaccaggaatgggacaggccagcttcaccaccctccggatggacagcctcggtagcagaactcctgccaaagacacagctgtccagggtcgaatcatccggagacacaggg

SEQ ID NO: 27131 - DNA, 122 bp, Homo sapiens
gctactgccgcaacccgcccggcctgccgcgccgctccgctcctctccgcgcccaccgcgcggcccgcccgcatgttctgactcataggtgggaattgaacaatgagaacacatggacacag

SEQ ID NO: 27132 - DNA, 122 bp, Homo sapiens
tgagatagagaggaggtaaactgaaaatccagtaggattgctttggtttctgtaaagtgacgagaaaaaagaaaaggtttcaggttgcaagaggacccagttaaggtgggacaacaggaatc

SEQ ID NO: 27133 - DNA, 122 bp, Homo sapiens
ccagacagttgcgcgcacagaaggctggcgtagcaggtaaagatggcagctaccatgttccgggctacgctgcggggatggagaaccggtgtccagcggggctgcgggctacggctgttggt

SEQ ID NO: 27134 - DNA, 122 bp, Homo sapiens
gtttccatgcctcattttcctcttctataaaaagggaataatagtatgtttgttctaaatcgcttgggtacttactaagcacttaataaatattagttgttattgttttcttttttccgttc

SEQ ID NO: 27135 - DNA, 122 bp, Homo sapiens
ttggcccctggcctggtgggagctctgggcagctggcctacagacgttccttagtgctggcgggtaggtttgaatcatcacgcaggccctggcctccacccgcccccaccagccccctggcc

SEQ ID NO: 27136 - DNA, 122 bp, Homo sapiens
ttacttacacacgtgaaaaacatgatttcatgcctcaactctgtaccctgtgaggtaaaccgcaggtcctgactatccccttacctgtcctggcaaacaagtcatttcagactgacacccgc

SEQ ID NO: 27137 - DNA, 122 bp, Homo sapiens
cttaatatgctggttccattcattgctgcaaatgacacgatttcattccttttctatggccgaatagtataacattttgtatatataccacagtttctttatccattcatccactgatggac

SEQ ID NO: 27138 - DNA, 122 bp, Homo sapiens
tggggggtgggctccttttgcctaattgtccctagtctccctatggggacaggaggccttcgctctcctcagccgctgtctccgggtggctgtgaagatccaaagagataatccccggaggg

SEQ ID NO: 27139 - DNA, 122 bp, Homo sapiens
gggcatagattgtggacaaaacagtgatggaagaagacctcaggctgtccacagaggttccggaaaaagccccagaatcgggcaccactcacttctgactgtgggcactccagtcccagcac

SEQ ID NO: 27140 - DNA, 122 bp, Homo sapiens
attatctcagcatgctgtaagatcactgtatccataaaagtcttcatgaaggagccccgccgagtctccataatggaagcaggatttggagaaatgacttctgcaaactttgtttagtataa

SEQ ID NO: 27141 - DNA, 122 bp, Homo sapiens
tgggctccgtaggttccatgggctccgtgggttccatggactctgtgggctcgggcccgacgcgcacggaggactggaggactggggcgtgtgtctgcggtgcaggcgaggcggggcgggcc

SEQ ID NO: 27142 - DNA, 122 bp, Homo sapiens
tgtgctttttccctgatggtaaaacttttgaaagttttttcttatgtccctgtgtccctgcgaagcccttgagtcaggccacctgcaagggaaaaccttgaccgattcacaaggacacattc

SEQ ID NO: 27143 - DNA, 122 bp, Homo sapiens
actgctcacacacgtactaggtaaacgtactaggtactgctcacacacgtactaggtaaacgtactaggtactgctcacacatgtactacgatgctctacaaactgccttgccctaacttta

SEQ ID NO: 27144 - DNA, 122 bp, Homo sapiens
gcagcgcctgctcctacagaccatttcacccctcccagcgaagtcccatctgctgtgtctcgatggagccaggtccagttagcagaggccacttccaatgacccagtgtggcccaaatctcc

SEQ ID NO: 27145 - DNA, 122 bp, Homo sapiens
cactttccttcaggcttttagttcctttatttccctccaccttctttgctgtcctctgaacgggttctgcctcgctctcctcactttcttccctggcctgcttcctactgactgaggccttg

SEQ ID NO: 27146 - DNA, 122 bp, Homo sapiens
accaccaccctagagagcagcttcttggacctgaaagccaggagtgcatgagacccagctcggaaatcatggccctccccgtgctcccagatacccctcacagtccagcccattcacagttc

SEQ ID NO: 27147 - DNA, 122 bp, Homo sapiens
aaggtatcctgtttctactggtgaagacatgaaaccttagacctgaacagaggatgccatcgtgtatacaccaaacaagaaccagagcagcacagctcaccttggggccactgacccaaaca

SEQ ID NO: 27148 - DNA, 122 bp, Homo sapiens
gtagctgggaccacaggcgcaagccaccaagcctggctgattttcatattttactagagacggggtttcaccacgttggtaaggctggtctcaaactcctgaccttaagtgatctgcccact

SEQ ID NO: 27149 - DNA, 122 bp, Homo sapiens
gataagccctggggagcgtttttgtgtgtgtgtgggtgggggggtggggccgggggggggcgggggtggcacatataagtgtggcagctccaatggacatttcctccccataggaagtagac

SEQ ID NO: 27150 - DNA, 122 bp, Homo sapiens
atggctggcttacagcaggattgcacccagctggcccatccttcctcccgtgcccccacccgcccctaggggattaaaaccaagggagctaaaaccccaggttggcaaccgtgaggtattgg

SEQ ID NO: 27151 - DNA, 122 bp, Homo sapiens
tcaaatgcattggagcagaaaccagaactccctgtcaagctgctctgtgggtttttgaagcgaagtgtgttgctcttcactggctgctctgagctgctcagagcgggggacagaagctgggt

SEQ ID NO: 27152 - DNA, 122 bp, Homo sapiens
tttttttcctgggggaagttccagaactacaaatcccgtgagccagtgggctttcgcctgcgcacggagaagccgattctccttggcccctcagcctgcgcctgagaggtaagagagggcgg

SEQ ID NO: 27153 - DNA, 122 bp, Homo sapiens
acatgtgtaatcccagcacttgggaggctgaggcagctggattgcttgagctcaggagttcgaaatcaggctgggcaatgtggtgagatcctgtccccacaaaaaacacaaaaattatctgg

SEQ ID NO: 27154 - DNA, 122 bp, Homo sapiens
ggggcgcacgagagcagggcttggcttggggccctacttgcaactttgcaggctaaaacacgtggagtgtccctactgtgtgctaggtacacggcgttagaggggggtagggatggatgtgg

SEQ ID NO: 27155 - DNA, 122 bp, Homo sapiens
cgggggcgaggcagttcagcgagtgaacccagcgaatgaaggcgaccagggtgcgaattccgagtggaagtgtattctcttctctcctccagtgtttctgcgatgttacgttagaagtactg

SEQ ID NO: 27156 - DNA, 122 bp, Homo sapiens
cattcaatatgacactctcatttctcctgaagggttcgtttgtacttttagagccccaaacgcattccttctttggaaatttctttacaccctttactgagaagaccctggattttgagtgt

SEQ ID NO: 27157 - DNA, 122 bp, Homo sapiens
cgcggctgaggggacggcgccgacacaggcccccgcaggggggttcagctgaggggacggcgccgacacaggcccccgcagaggggcgcagccgcatttccatgtggccccagcagccccgg

SEQ ID NO: 27158 - DNA, 122 bp, Homo sapiens
gataggctagacgtccattcctggctagacgtccattctgattggctagtgcctgtgcagcgccgattgctacatattttgaatattactcctgcacatggcctggccaactgcaaggaaga

SEQ ID NO: 27159 - DNA, 122 bp, Homo sapiens
ccccactctcccttctcatttactttgtgaatgagagctcaccaacagtttaccgtcttccgagtgctgcggcctcaccgcccgacccgcagcaggggtgagggcttgcaaaggccatgcaa

SEQ ID NO: 27160 - DNA, 122 bp, Homo sapiens
ttttctggtcttagttaactcctttgaaatcgcagactcttggaattcaaatagatgacacgcatgggaaatcaaacatagaactgtccttgtaagtaggaagagttagaagccctttgcca

SEQ ID NO: 27161 - DNA, 122 bp, Homo sapiens
tatgagctgtaacactcaccgcgaaggtctgcagcttcactcctgaagccagcgagactacgagcccaccgggaggaacagacaactccagacgcgccgccctaagaactgtaacactcacc

SEQ ID NO: 27162 - DNA, 122 bp, Homo sapiens
aggacagtcctctgtacctcttccatgccacaaaagattctcaatagctgctaagcaacacggtggtggtgttggggggaagggcatgggcctaggtctcacaaaacaggagcttctagtcc

SEQ ID NO: 27163 - DNA, 122 bp, Homo sapiens
tggcaggactgtgatagagtcagaaactgactctgtgacctggcgcacccactgcaggtacggaaagttcccctgttccacaggcaatgcaattacctcggccacttcgtaagggtgcacag

SEQ ID NO: 27164 - DNA, 122 bp, Homo sapiens
tatttacatggttgcaatcagataattcatgtaaagcatagtattagcccatggtaagtgcgaaataaatggtagctatgaggctggtgatgatgaaagctctaggagagcttttatgcctt

SEQ ID NO: 27165 - DNA, 122 bp, Homo sapiens
attggctattaggaaaataatactcctaacttcagggtggaaaaagacaagaccaatattcgcctagcgaaaggggtataacccacaatcctagaggaaatgtcagtgctaaaaaccccaga

SEQ ID NO: 27166 - DNA, 122 bp, Homo sapiens
aggacagtcgcgtgcgacaggcctgtaaggtggcatccgagtccctcccgcaattaaggacgccgggctccaggccagcgccagggacagacccagcaccagggcggcccccggagccggcc

SEQ ID NO: 27167 - DNA, 122 bp, Homo sapiens
cctcacagctgccctaggagatcagcatccccgtttcacagctggggacactgaggctcacgaggtgaaggaggggaactatagcctccaggtaaccacaaccatcccagagctcaggacac

SEQ ID NO: 27168 - DNA, 122 bp, Homo sapiens
ccctactccgtttctgaacgcacgcgggggcgctgccaatgtaaggctccctgttaggaacgggtcctagccctcagcggagggtcacaaagaaatgagactttcctggcaagactgtggaa

SEQ ID NO: 27169 - DNA, 122 bp, Homo sapiens
ggatagttacactactgtccgggacttcctagccgtgccgcggaccatctcaagtgcttccgccacactcatcatggcggtggcagtaagtcacttccgcccgggaccggaagtgtgggata

SEQ ID NO: 27170 - DNA, 122 bp, Homo sapiens
ccacagcccgaccagggaggcagcgggtctccccaggttaagaggccagcggaggacgcgcgcggtctccttgggggagggtgcgggtgggccgggcgcgcatgcgcatgggcgccatcgcc

SEQ ID NO: 27171 - DNA, 122 bp, Homo sapiens
acggcatctccatatggcgagactctctctttcaggccgtgtggtgtcacagcaggggctcgtgggttaaagctgctgtgaccgcacattccccagggagggtgcaaggccaaggggcagaa

SEQ ID NO: 27172 - DNA, 122 bp, Homo sapiens
gcaaatggagatggacaagacaggtaagtgtctgctctcaggaactgacttaacatgccccgactcttccccttccggatgctttcagcctttgttcactccaccaccacttccggagacct

SEQ ID NO: 27173 - DNA, 122 bp, Homo sapiens
aacaaagccaggcaagtccaaagcagtagatggcagaggcaagaatcaaattcaagtctgcgtgattccaagttccagtgatgtgctttcctatgttattgtgaccctcaaaaagcctcacg

SEQ ID NO: 27174 - DNA, 122 bp, Homo sapiens
tagtgccccgtttccccccgtcccccttgccaaaaaaaaaaaaaaaaaggtgtgggagagcgatagttgggaaggcaggccagatagaaacaggcaaaaaaaggcagtgaccggagccgagc

SEQ ID NO: 27175 - DNA, 122 bp, Homo sapiens
aaactgatgtcatcatcaatcagcaaaaaagcagaatgtgatctaacaatgaaggagacccgtattaggacagaaggggagagaaaaatatctgaagcccttcattttaacaaccaaagtta

SEQ ID NO: 27176 - DNA, 122 bp, Homo sapiens
cggtacatcgccattgtacaggcgactaagtcattccggctccgatccagaacactaccgcgcagcaaaatcatctgccttgttgtgtgggggctgtcagtcatcatctccagctcaacttt

SEQ ID NO: 27177 - DNA, 122 bp, Homo sapiens
gtctctttaatgatggaaatgtgatgttttagggttttttatttttatttcattttaggtcgatacaagtgacatagaaatttgagttaggcagttccctcaccaggcacctgcctcttctg

SEQ ID NO: 27178 - DNA, 122 bp, Homo sapiens
gaggcgcaactgggtgacgaggcgcgattgggtgacgaggcgcgattgggtgacgaggcgcgaatgggtgacgaggcgcgactgggtgacgaggcgcgattgggtgacgaggcgcgaatggg

SEQ ID NO: 27179 - DNA, 122 bp, Homo sapiens
cttacagttcaggagcaggcagctttggcactctagccacagccccagtgtttttgctcacgcccagttaggtctaactgggagggccatgatgtgagtagaataaacatctgggtgaagag

SEQ ID NO: 27180 - DNA, 122 bp, Homo sapiens
gagctggagggagataaaaagcaaggcaggttctgcacttgagaagcttcaggccaggcacggggctcacgcctgcaatcctaacacttgggtggccgaggcgggtggatcacttgagcccg

SEQ ID NO: 27181 - DNA, 122 bp, Homo sapiens
cctttgggagccccaggggctggagtaagcacgctaccacccactatacctctcagtgcccgcggcacaggagccgcactcgactttgcatccccccagggcctgtacacgccggaaaagct

SEQ ID NO: 27182 - DNA, 122 bp, Homo sapiens
tctagagcttgatgaggatttgcatgcaatgccttaggaagatcaagtctgttcctgaatcggctgcatccatggcaggagcatgtggtttccagcacagctactgtaaacagtatttttaa

SEQ ID NO: 27183 - DNA, 122 bp, Homo sapiens
ggaataatttttctggcagaaatggcagtatatgaatgccatctaaaaccatagcttatacgtacctggcaggggagattatttcaaccctaagaaagaataaaaaaacaccataccctaaa

SEQ ID NO: 27184 - DNA, 122 bp, Homo sapiens
gctgtcccaagtgctaagctcctcaccgtcctgggccggtggtgcaggccgctccgagcgcgaggcttatctgagcctactcccacccggaactcgcgctggcccgcaagcaccgcgcgcag

SEQ ID NO: 27185 - DNA, 122 bp, Homo sapiens
gttcccagagcggggcggacggggcggtgccattggccggtgcggagtgaggggcgtgctcggggcgggacggagagaccggggcggcacctttggccgtgccgggcgagaggcggggagcg

SEQ ID NO: 27186 - DNA, 122 bp, Homo sapiens
ccaggaccgcacgtgggaagggactctgcagatgtgtccggggcagggatggtgagaccacgggcgttcctgcattatcctggtggcccgctacaatcacgcgggtcttcacacgtcagaaa

SEQ ID NO: 27187 - DNA, 122 bp, Homo sapiens
atctatttgggaagttggctggctggcgaggcagagcctctcctcaaagcctggctcccacggaaaatatgctcagtgcagccgcgtgcatgaatgaaaacgccgccgggcgcttctagtcg

SEQ ID NO: 27188 - DNA, 122 bp, Homo sapiens
ttgtttgctacctcagaatgttctgcctatgcaaagaacagtttcaaatcaacctggattcgagagctcatgaaactgatcctcagccttcattttcagccttttcctcaatcctcccctgc

SEQ ID NO: 27189 - DNA, 122 bp, Homo sapiens
gcccagcgctgggtaacattcatcctgtaccttccagggttcagccgtgccgcctcgttacgatgaccagtgtggttaagacagtgtatagcctgcagcccccctctgcgctgagcggcggc

SEQ ID NO: 27190 - DNA, 122 bp, Homo sapiens
tgacaatgctccagaaattacaatcacgtctctcacaagctcagtcccagaagagggcaccgttggaagagaaattgctcttatcgacgtgcatgaccgagattctgggcagaatgggcagg

SEQ ID NO: 27191 - DNA, 122 bp, Homo sapiens
gcagagctgacacagcattgcctctggcccccagggagagcaccactctttaggccagctcgccctgcctgcagacagaaaatgcccagccagagccacttaccactctggagcccttctcc

SEQ ID NO: 27192 - DNA, 122 bp, Homo sapiens
cggctgcgggacgtaaatgtttatttactgcctgcttcctgattgagaacatacctggtccgtggcttcagatggcttttacacgggggacttacggccacttcctgttctccagacacaca

SEQ ID NO: 27193 - DNA, 122 bp, Homo sapiens
cgccccctgcccttcccgagggcagcagccgcggcccggagataagcgctagtgcggcgccgggctctgcctgggctagtggcaccgacttgggtatgtttcttatgaatattacacgcgga

SEQ ID NO: 27194 - DNA, 122 bp, Homo sapiens
atgttcccccaaaatgctggtgaataaagcaaaaggataccatacagtgctctcttcctacgagttagccagcctatccaagtacagggcgatatacagtacttaatgctggtagaatttca

SEQ ID NO: 27195 - DNA, 122 bp, Homo sapiens
ggccacctcgccgtctgtcacttaaatgattgtcctccgctccgctcagtgcggtcagtacgggctgttaacaggcagttgcaatcagtttccgaaaggtcagccaaggtcctccggctctc

SEQ ID NO: 27196 - DNA, 122 bp, Homo sapiens
ggactcaatccctacccaggtgattgtggtggtcgtggaagaccgctgccttcaccctcccgctaaccagcttgctgccccccactcgggtcatgccagcgcctccctgagccctcgggcac

SEQ ID NO: 27197 - DNA, 122 bp, Homo sapiens
ggaagaagccgcggcggccgtggaaaaagtcgcggcggcaaaaagccgcagagtagggggcgaaaagacgcaaaaagccgcggcggcaaaaagccgtgacggctgggagcaaaaagccgcgg

SEQ ID NO: 27198 - DNA, 122 bp, Homo sapiens
ccaggaaggccccacagacactgacttttcccccctcagggagagcacatctgcctgatccgcaaggtgaacgagaactggtacgagggacgcatcacgggcacggggcgccaaggcatatt

SEQ ID NO: 27199 - DNA, 122 bp, Homo sapiens
actttgtctcaaaaaaaataaataaataaaaataaaaataaggccaggcacagtggctcacgcctgtgatcccagcactttgagaactctaggcaggtggatcacgaggtcaggagcagcct

SEQ ID NO: 27200 - DNA, 122 bp, Homo sapiens
tctcccccgccacccgtgtccctcctccccgtttctaattaaaaaggagataaagccgcacgcggcccgagtcaatcggctcgagccaatcggccctactggcttcctggatgctgaatgtg

SEQ ID NO: 27201 - DNA, 122 bp, Homo sapiens
ctttattgggtaaatttccaggaaacctggttttgcatggcgtaaaagcacagttaagtccggaaacacaatacggggagtgttttggtagaaaaacctgctaagcgtagggggacccctct

SEQ ID NO: 27202 - DNA, 122 bp, Homo sapiens
tttctcctaagtcatattctgtgggagcctcccactatttgtaacagtactcattaagttcgtacttaacaagtaagcaatgagctgctgtctttggcctctagaaagattcaaggtgaacc

SEQ ID NO: 27203 - DNA, 122 bp, Homo sapiens
acacctctgggctgggggtggctgcaaagtcaggcactcacagacccagacacaaaacctcgcgggtcccgcgcccaggctgcgggtgcccggaaccgccgcgaggccggcgcgctccgacc

SEQ ID NO: 27204 - DNA, 122 bp, Homo sapiens
cagcagtcgctgcccggaggaaggtcctaaaatcaagacaggaaatgactcaacaaggaacgcggcaccagctccacagccactcaataatcagatcaacacgaacacttcattcgttccta

SEQ ID NO: 27205 - DNA, 122 bp, Homo sapiens
gctgctttttagctggtgacttcacagcacattccatggtgacggtactaaatgattcatcgtaatccttgtgaaccagaggcaacagcatgcaatctaaaagaaatgtctctttaaaaatt

SEQ ID NO: 27206 - DNA, 122 bp, Homo sapiens
gctgtgccccacgggggcggggctcagattcctgtcagcggcggcggcggtggcggcgaccgtcagttttcgctgaggagaaacacgaaacggaccctttggctctcccccttccccttccc

SEQ ID NO: 27207 - DNA, 122 bp, Homo sapiens
cttctaaaagcactgttcaagccctaaaattaactcagttaagactcagttgtttaataacgtatcaggaaccacctgtccctcagactaaaaatcacttctcattttaactactctagcac

SEQ ID NO: 27208 - DNA, 122 bp, Homo sapiens
ggttgttgggcatgaacttgtgcagctcactctttttgtagcaggggtcataatggtaagcgctgaggcaggcgtcacatgagacttttgaacactgggtgcaggtgttggtggcgcctggg

SEQ ID NO: 27209 - DNA, 122 bp, Homo sapiens
ccagggggattgctttaagcgtactcgggtgtcctccagctagttttccgctccaaccatcgctccggcgacccttcgacctggattcgagcccccacaaaagggcgccacttgccgagacc

SEQ ID NO: 27210 - DNA, 122 bp, Homo sapiens
gtcagctctgtctacaaaatagactcagcgcagcagcattttaggcatctgccgctttgacgtagctttgacgtagcagctcacagataggactctcatctgcaaatacatgcataccgaaa

SEQ ID NO: 27211 - DNA, 122 bp, Homo sapiens
gcaaacccctggggtgttaaaattggaaaggaaggagtgggtctgatctttaccaaagaacgggtcttttataacagtatttgagaattactccagtggctatctgatggcatcttgcccag

SEQ ID NO: 27212 - DNA, 122 bp, Homo sapiens
cggcgtccgggcagggcctgcgagagcggcgggagccgggactcccgggccgaggccgggcggacctcagttcgcaggaacccgcatccatgcacgcccagcgcctcgcccctcgccccgtg

SEQ ID NO: 27213 - DNA, 122 bp, Homo sapiens
gtggccccagcggcctgtgtcactttgctgttcgcagctttgctttctggggtctgcttacgtaaagggaagtaagggtacaggtagccggcgccctgtaaaagttgccccctggtaccttg

SEQ ID NO: 27214 - DNA, 122 bp, Homo sapiens
caggaattttaatataaaactctccctcttccttgtcattctgaggtttcaggaagccttcgggcttatcgtgcagaggcacacagcacagacagggcttggggaggtgagaggtgatttcc

SEQ ID NO: 27215 - DNA, 122 bp, Homo sapiens
tcagctcaaacgcagttcccggttccccactgagattcccactcccgcctggaggggagacgtgcctgccttttgaatgaagcgttgcacactagacatagtatcacaggcagaattgtcat

SEQ ID NO: 27216 - DNA, 122 bp, Homo sapiens
tcgtgctcagcctcgtagtggcgcctgacgtcgcgttcgcgggtagctacgatgaggcggcgacagaccaggcacagggccccatcgccctccggaggctccaccaccaaataacgctgggt

SEQ ID NO: 27217 - DNA, 122 bp, Homo sapiens
gcgggccagctggagttctgggtgggcgtgggcttggctgaccccgcacttggagaagcccgccagccctgtcggccccgggcagtgaggggcttagcacccgggccagcggctgcggaggg

SEQ ID NO: 27218 - DNA, 122 bp, Homo sapiens
tggtcagggcatatcttgccgtgaatcacagtcatgcgtggcaatccacactcatgccaacgttcagctccaggaagtttgctctgttaatgatgtgactgtattcccatctgccatccctg

SEQ ID NO: 27219 - DNA, 122 bp, Homo sapiens
ctccctcaatgcctcccatgcaggtagccagcccaggcacttggaaggaaagccaagctccgcaaagcaggctgcaggacagatctggggtgcccctgctgcctctctcaaagcactgctat

SEQ ID NO: 27220 - DNA, 122 bp, Homo sapiens
ctgctgcaggggcggcgggcgccctgggtgggccacgaggcagggacagccgaggctccgcgctcaccccacccgcaaggggccaagcgcagactcaggggagccagaggggccggaccgct

SEQ ID NO: 27221 - DNA, 122 bp, Homo sapiens
ggcgccgggagcgaggagcgagctacttcaaagccaccaggcctggagcggggacagaggcggcgactaggggaaggtgaagccgtcgctgcaggaggaggagcaggaggaggtgacgcagg

SEQ ID NO: 27222 - DNA, 122 bp, Homo sapiens
taaattagggtttttcttatccacaaacctgattgcgctaccgagggttggtggggggaacgaggtgagggggctgattgcaaacagagggttctcgatttggagaaagttagagaggcggg

SEQ ID NO: 27223 - DNA, 122 bp, Homo sapiens
agcgcggacccttcactacaaacctcacgtcagggttacagccacatttaggaacctcttcggaaaagctgagaaatcactgttttgcaaaaagccttctgtactgtgatggggctttgtgg

SEQ ID NO: 27224 - DNA, 122 bp, Homo sapiens
tgttaagggcactccactaacttctggatgagatttcttgaagttagctcctcacctcatcgtctcccacccccataccttttctctttcctacggaaaacaatctcaattcctccaagtgc

SEQ ID NO: 27225 - DNA, 122 bp, Homo sapiens
caatcaacagtctttttgctcgtcgccaggggaagtgcttcctgctgacaggtcagctcacgtgtcagtcagagtctgcctctcagggcctctgccgaaagcgtggggcacgtgactgtgac

SEQ ID NO: 27226 - DNA, 122 bp, Homo sapiens
cctcgtcagcctccgcctcagctgccgccccgactgcagccgcgggcagcgggtccatcgcgcggccagtcatgtgagcccgcgctcccacgtgacttcctcccgcgccacccggccgcgca

SEQ ID NO: 27227 - DNA, 122 bp, Homo sapiens
agcgcctcgctgggtgcaggcagagaaaaccctctcgatgttctccttgggttggtagtccgaacctccgggcgaaattctccttgccaaacgtgtcttttccgctccattctggtaactgt

SEQ ID NO: 27228 - DNA, 122 bp, Homo sapiens
cagcgggtgactgtgatgcgtgggcactgccaccagcccgatatggagggcctggaagcccggcggcagcaggagaaggccgtggagacgctgcaggctgggcaggacggccctgggagcca

SEQ ID NO: 27229 - DNA, 122 bp, Homo sapiens
gcatctgaggaggcacccctgttgttttcattgtttaaagctgtctgtgtgtgtgcactacgtgggcagactgtgctgtgctcgtcacagcgtcgccagagccagcccaaagcctggcaaac

SEQ ID NO: 27230 - DNA, 122 bp, Homo sapiens
ctggggactgctgggagggccggaccctgcgagaacgggtgggcgtgtgcccggtgggcgcgggaggggcccgggctgcacgagcgcgcgtgcgcgtcggaactggagccgcgggaggaggc

SEQ ID NO: 27231 - DNA, 122 bp, Homo sapiens
cgacttacctccatcccaggcctgacatctcaaatagaggcaaaagagcttgttccccatcgctcttccaatcattcctcatggtgccctgttgctttttatgggatgcctgctgccacaat

SEQ ID NO: 27232 - DNA, 122 bp, Homo sapiens
gaataaggttacccttctgtcactcacatttgattactcatagacttttctatttgaagacgcattaaggaaaattttccttgcaaacaaatgttgtcaaatgaattgaccaacatgcatac

SEQ ID NO: 27233 - DNA, 122 bp, Homo sapiens
gccttcaggggagaggacattcggtcaaagagctttgcagaatctggaaatccagctcagcgtttcctcagcctgcaaccccaggagactcgagccacaacaatactgcagtcccactggcg

SEQ ID NO: 27234 - DNA, 122 bp, Homo sapiens
gctcacattgctcactgggctggtgctcagggagctggtctgcgtggtgttgctggcccccgaggtctgcgccgagctgttgtagttggaaaggttgccccaggctcggagccggctgtgga

SEQ ID NO: 27235 - DNA, 122 bp, Homo sapiens
agtccccgtgaaagtcacggagccggaagtggctcctgggctcccagggctggattccagcggtcttcaacatctctttccactcagttccggaattcaatagttacccaaaacgttgcaat

SEQ ID NO: 27236 - DNA, 122 bp, Homo sapiens
cagagccagagctgctgggaactgggaaggcagggtctccgctccggcgattaactctgccgatctgcaacatcacggctaattagggaaggtgtaaatcactgggaggaagcgggcaggca

SEQ ID NO: 27237 - DNA, 122 bp, Homo sapiens
tgagggctgtgctcagtcacggactcagaggctttctgaaattctgcaggcaagaaaaaacgagcaaacatggagtcttatgtttgccactctgtctcacccccttggtgttggaaacttga

SEQ ID NO: 27238 - DNA, 122 bp, Homo sapiens
aaaacttcaaagcaggggaggctcaggttagacattagaaagaactgccagcctggcccacgacacagtccccagaggaacctgaaacccagcacaggagatctcgtccaataggctagatt

SEQ ID NO: 27239 - DNA, 122 bp, Homo sapiens
acttacacctaagaaaacaatttgcttagaagaccttaggatataggatctacatctctccgcatcctgtgtttatgctcctgtatgttccaggttggcccaacaagccagaaggaagagcc

SEQ ID NO: 27240 - DNA, 122 bp, Homo sapiens
tggccgttctctccttcgtatttccagcaagttgcagttgtggctgagcaagttcctgtgcgactgcatgaaagtgatttgttggggggcagatgaacagcatggccagatgccttggagcc

SEQ ID NO: 27241 - DNA, 122 bp, Homo sapiens
tggggaaaaggagaaacctgtgttaatgtgtcttcccaacatcccactctcttcagcaatcgctggaacagccatgggccatccctgctgagtcaggaaagaagctgagggaagagtcggga

SEQ ID NO: 27242 - DNA, 122 bp, Homo sapiens
tggccatgattgggaacttcacgtatggacttggtgtggttttaaaggcaccagctgctacgtgtcacaagaatacttactttgtgcatcatcttccttggcttattgcaagttttggaatc

SEQ ID NO: 27243 - DNA, 122 bp, Homo sapiens
cgagcattcgaaaccaggtctgccaggcagcaaaggctaaatggtattttaaaaaggtgtcgcttctgagtgtatgtgttcaaggaatctctaggtaaaatacaagcatagcttccatgtag

SEQ ID NO: 27244 - DNA, 122 bp, Homo sapiens
ccttggcgtcgcagcaatattccggatgcctgtgcccattgccgtaccagggctcccgagcgtactcctccatggcgctggcgtctggccgcgcagtcaggccacgcccccagcgtagacgc

SEQ ID NO: 27245 - DNA, 122 bp, Homo sapiens
ctccttcagactttaaaattttaaaaatttaaaaaggaattaaaaaaaaaaaaagacttccgtcgtaaagaaacctattttcagaatgcagatgcgttccttcagagctctgggacgggaca

SEQ ID NO: 27246 - DNA, 122 bp, Homo sapiens
tgcctctaagccttcactgtatcgagattttctgttcatggggtcattatggaaggggggcgcagcggggagaggaatcaccattgatagtgtttgtaaaatgtgtcattgatagtaaaatg

SEQ ID NO: 27247 - DNA, 122 bp, Homo sapiens
tgtggtgacgtctcgtattgatttagggacacggggcggctgtggctgtggcccacggctcgtggggagcccgagtctgtgcgcagggaacgccgctgcgtggcctctctcgggcctgtgcc

SEQ ID NO: 27248 - DNA, 122 bp, Homo sapiens
agcacctggaagacatgccagatccatgtgcagtaatgcctggtggctccaggtctgccccgccgtcctgtggggctgtgagctttcccagcctcctgcccgtgtttgtgaatatcattctg

SEQ ID NO: 27249 - DNA, 122 bp, Homo sapiens
ggtcgcggcgtgctcgcgcccgcagacgcctgggaactgcggccgcgggctcgcgctcctcgccaggccctgccgccgggctgccatccttgccctgccatgtctcgccggaagcctgcgtc

SEQ ID NO: 27250 - DNA, 122 bp, Homo sapiens
gcggggcaaagtagggccttcctgtcctgttggccactggcgggtcttcgttggaagaagcgacgatggtgtgggcgttgtgagaaaaaggccccgtggggctgggccggctgttcgcccct

SEQ ID NO: 27251 - DNA, 122 bp, Homo sapiens
actgttagcccctcccaaaccttatgtaaaaaaatcccctaagaaagtgacttctgaggccgggcgcggtggctcacgcctgtaatcccagcactttgggaggccgaggcgggtggatcacg

SEQ ID NO: 27252 - DNA, 122 bp, Homo sapiens
actccgtcagacactgcgcatggtcagtggtggctgtgtcaacggctgcgcagctcatgacggcgccgggctctaacggccagaacctgtagtttgggcgagggaatattctttcctttaca

SEQ ID NO: 27253 - DNA, 122 bp, Homo sapiens
agagggcaagaactataaacactcattaattctagtagtctccccatggccagacaatggcgattgttatttaatgagcttttcctttcaatggaattcagctctcacattagtatgatttc

SEQ ID NO: 27254 - DNA, 122 bp, Homo sapiens
tgcctggcttggagccagagcctgggggcccacaggctggggagccacccccaccactggcgggcgacaagccccacaagtgccctgagtgtggcaagggcttccgccgaagctctgacctg

SEQ ID NO: 27255 - DNA, 122 bp, Homo sapiens
cggcccgggccggagggacctcccctggagccccccggggcctggggaactctcgcgccccggcctgggtctggctccgtccatgcagccattcctggcagtgtagtcaccgagaagctaca

SEQ ID NO: 27256 - DNA, 122 bp, Homo sapiens
tctcgtcttcatttctgtgtcctttgttcttagaggcccagcctgtgtggccctgtgacccgcagatattgggagatacacagctaagactccaggaccccctggaagcctagaaatggtga

SEQ ID NO: 27257 - DNA, 122 bp, Homo sapiens
tctgtactgttgccaacttgagcagtaggtaaagtcctaaaggttcacttatcctcacttcgagctaatataggcgtttcggggcgatttgtcaatgactgactcggaggagggtggcccgc

SEQ ID NO: 27258 - DNA, 122 bp, Homo sapiens
gctgtgtatggcgggaggctgtggcggtcccttggtggggaagctgttgctgttgctagacgacgggaactagctctcgtcacttcctcagcccgccgtctgcccactcctctagccggaac

SEQ ID NO: 27259 - DNA, 122 bp, Homo sapiens
tggggcgtggaaggcaggggacattgacctctccttggggtctgagatctgcaccaaccacggtgcaggcaccggccttgaggaccccctccccaaaactgtcccccacagcaggacctggg

SEQ ID NO: 27260 - DNA, 122 bp, Homo sapiens
ctaatgctttctgtccactctgaggtgctgctccagatgtggggccctcccagagggcctcggagacaccataggggaacagggagaggggctcggtccctgggcctgacacagcactgctg

SEQ ID NO: 27261 - DNA, 122 bp, Homo sapiens
accctccaccatccccaggtcacacacctcccacaggacagccatggcctgttgcctccccgaagggcatatgtgccctagactagcacaggactggcacagaaggctttggctccaacgtg

SEQ ID NO: 27262 - DNA, 122 bp, Homo sapiens
ccactggaatctacactggtcccagcccctcattcaactcccgtgggacgccaagcaatacggagttcggagtttgagaagcacggaaatctcctgaaccccaccacgagtccacactaggc

SEQ ID NO: 27263 - DNA, 122 bp, Homo sapiens
tcgcgcacggccccggctcacgtcgcgccgctctttggccggctctgcgtttccgggccgcgcaaccctacgctaccacggccgacctggcaccgccgccgctgtcactgggcagccgccgc

SEQ ID NO: 27264 - DNA, 122 bp, Homo sapiens
aagggcctcatgcacagagtgtggttgggagctggagtgggaacccagttcggtctcttccgaaggcttaggacccatgtgactgaatttaggggctgtccccttgcgagggcactaggaca

SEQ ID NO: 27265 - DNA, 122 bp, Homo sapiens
gagggcagaggaccaaggacagagccatcagcatgaggaaagcctgtccctgggaacgggcgcctttgccaagccctccctccctgacatcaggacatccaccctacaggctacagggggct

SEQ ID NO: 27266 - DNA, 122 bp, Homo sapiens
tttaagatcaccctaaaagtagtgacggcctcttcattactccaaaccccagatttaagtcggtaggacgtcttcgcgttgacttgtggggaatgtagtttcgatgctgccggcgcgttttg

SEQ ID NO: 27267 - DNA, 122 bp, Homo sapiens
tgggcagcttgcagggcttgctttcgagggacgcgacacacgaccgtgggctctcgctcccgggcacggaggcaccaagctgcctggctcacctgggtccatctccaccaaggccttccacg

SEQ ID NO: 27268 - DNA, 122 bp, Homo sapiens
ttgaggagctcctgttggggcccagcctgtggcgccgggagcgggatcaggtaggggcagcgtagacaaggtcctcaaataaccttttcaccaggtagactggaataacggggagagatgcg

SEQ ID NO: 27269 - DNA, 122 bp, Homo sapiens
ggactccggttccaactctcctggcccagaggctctagggtggtcttgtctgtctcactccgggggcagagaggacgcagacagaccccaacaccactgctcggccgcgatggtgccttaga

SEQ ID NO: 27270 - DNA, 122 bp, Homo sapiens
ttgagacgaagtcttgctctgtcgcccaggccagagttcagtggcaccatctctgttcaccgcaacctccgcctcccgggttcaagcgattctcccgcctcagcctcctaagcagctgggac

SEQ ID NO: 27271 - DNA, 122 bp, Homo sapiens
ggaaatgagtgagtcaaagacacagactcacaggcagcggttggcgccgggcacacgaaccggccgagccctcctgctagccagcttcgggcacctttagtgcgccctgagactgccgccag

SEQ ID NO: 27272 - DNA, 122 bp, Homo sapiens
cgagctcacccgtgcagaaatggagggtcctgcaggaacctcccaggggcctatgtctgccggtgccctgcaggcttcgttggagtccactgtgagacaggtaggggctccctccagtgggc

SEQ ID NO: 27273 - DNA, 122 bp, Homo sapiens
atgaagttggagctgtactctcagctactcgaagctggtccctgctttaggctgcgctcccgcgtgctccccattttctgggccccaggtcccgccttctaaatctccccaggtctccagcc

SEQ ID NO: 27274 - DNA, 122 bp, Homo sapiens
cgtcggatcaggccgggtgggagcgagcttgcgggcaggtgccgctcccggagggtgggccggaggcgaggcgcccaccgcgcggctcgcgggccgggctcggcggaggggccgctcgcgca

SEQ ID NO: 27275 - DNA, 122 bp, Homo sapiens
gagagatgggagatgttgagagcaatgtcacatttcaattttgaggactttattccattgcgcaggctctatctgctctgaatttagcagtgacagtgagatttagcaaacagaagagggat

SEQ ID NO: 27276 - DNA, 122 bp, Homo sapiens
atgtctctgatttccaagcccatgcttccaaccattacattttacactttttttttgaaacggagtctggccctgttgcctaggctggagtgcaatggcacgatctcagctcactgcaacct

SEQ ID NO: 27277 - DNA, 122 bp, Homo sapiens
ggcgggcgggcaggtaggagagcggctacacggcgcggggaggctggggtcctgggggcgcgaggccgtcccgccccgccccgccctcggccctcgccctcccgccccggccgccgctttcc

SEQ ID NO: 27278 - DNA, 122 bp, Homo sapiens
gggcagcacaggaggcccgtcctcggggggctgcgcacatcacgctccttgccgggcgtccggcacagctgcggtcaccaaagcaggtgctggccctcggacctgagagcccagccagggcc

SEQ ID NO: 27279 - DNA, 122 bp, Homo sapiens
atggtgctcacctctggtgcctgcttaataaatagcacccagggttcctacagctgtggccgtggagcctgcatctccctctcccctggtggcttcccctcttttacaaggtcaccagggag

SEQ ID NO: 27280 - DNA, 122 bp, Homo sapiens
aggttggagcagtgaggcctactgtgtctgaagtgttaaagctccccagagaaccgggcacggtggctcatgcctgtaatcctagcactttgggaggctgaggcgggcagttcacgaggtga

SEQ ID NO: 27281 - DNA, 122 bp, Homo sapiens
tggtggacagtttttttttttttccctttcagcatcttaaacacactacaccattgtcttcgcacttgcattgtttctcatgagaaatctgctgtcatctgtgtctttgttccttcatacac

SEQ ID NO: 27282 - DNA, 122 bp, Homo sapiens
gtcgtccctgaccctgggcttatttcggatcaacgagtctgccgaaggagagatcatcatcgatggcatcaacatcgccaagatcggcctgcacgacctccgcttcaagatcaccatcatcc

SEQ ID NO: 27283 - DNA, 122 bp, Homo sapiens
cgcacccgcctccccgctggcctcatctgggggagccactgtggacccgggaaggacccgcggagatgggccaggggtctagacagctctacagaggcccagaaactcttcagactcacccc

SEQ ID NO: 27284 - DNA, 122 bp, Homo sapiens
aagctgttggcctaggaccaggcacttttgtttttctcatttgcagtgcaaaataaatgccgatttcttgttgacaacctgcggtgcacttgaagcagtccgtgatttaagcactgtcctcg

SEQ ID NO: 27285 - DNA, 122 bp, Homo sapiens
cagccagtagatcggcagtatccagcagcagggcgaggctgtagggcagctgcagcaccacgaaggccgccaccagagccaccacgacgcgcagcgcacgccggcgctcgggccccctggcg

SEQ ID NO: 27286 - DNA, 122 bp, Homo sapiens
gtaagaattgcagcatccgggacctagagaccagcggatcaggggatccagcgaatacggcgatccgattcgggaaccaagcatttcccctgaaactatttcaggcaccattcgggctgcag

SEQ ID NO: 27287 - DNA, 122 bp, Homo sapiens
tattcacataatagaagctcagttaatgcctgcagaattgaatacacaaagatgagtgaacgtacatgtagtttatgcagtttatgtagttaccatgtggccagagcctggaagtcttgatg

SEQ ID NO: 27288 - DNA, 122 bp, Homo sapiens
tgggaaggaggtccactagggccccaggaggggtctgagggcagcaggagccggctccggcgggaggggctgcttggaagccggcccaccagggccatggttcacaccactccaggacgccc

SEQ ID NO: 27289 - DNA, 122 bp, Homo sapiens
tggccgaggtgtcgtctgggagtggctgagcgacgatggctcctggaccgcctatgaagccggcgtctgtgacgatctggagcagcaggtggccaggggcaaccagctcgtggacttggccc

SEQ ID NO: 27290 - DNA, 122 bp, Homo sapiens
gctcctactactctttcaaacactgcagcaagttgcagcaaggcgggcaaataccgacagcgcgcgtgggggcgggcggcgggcgccgcggggcccaccccctccccggtctccccgcgccc

SEQ ID NO: 27291 - DNA, 122 bp, Homo sapiens
cttctggcgagctgaaagcgctcacctgtgcgctttaaggtgtaccgtctttgtctttggcgagtgtgccttttaagacgcttccaagataaattgaataagaaatgatgattgttttctcc

SEQ ID NO: 27292 - DNA, 122 bp, Homo sapiens
cgactatccagggtcggaggcgttcccagcgtttgcgcagatgcaagatggccgcgccctcgtcgccttggctccatgggggccgccatctttgagtatctgacgtacacaaggcaaagggc

SEQ ID NO: 27293 - DNA, 122 bp, Homo sapiens
tagcaaccgaaggcgtccttagcagcagtggccgctgagatgtacgaacttccggttctccgggcagctgccactgctgtagcttctgccacctgccacgaccgggcctctccctggcgttt

SEQ ID NO: 27294 - DNA, 122 bp, Homo sapiens
gaagttacttgcctaaagttactgctgcagctaagtaattcactgtaatcattaggttgccgctaaatccagaaaaaacaattttagattgaaaatgatggagaagttattttgaaataaca

SEQ ID NO: 27295 - DNA, 122 bp, Homo sapiens
ggccaggagcctctcactccgcaaacccagcagctgtggagccatcctggccgtgctggccgccatctctgtgcccttctgcgcagaggcaccggaaggcagctgggcatggtgaggctgtc

SEQ ID NO: 27296 - DNA, 122 bp, Homo sapiens
aattccgccccagctggaggcgtgcgggtcctcttgcaaaccagaccaaggatgtcgccccgatccccagatggtggaggctggttgagttcatgtcaccagcaaacaccgcgccagctgcg

SEQ ID NO: 27297 - DNA, 122 bp, Homo sapiens
tgactacaaaataacatctacctcctgatagcaaaagaactgaggaagctctttccactacggctgtattgcactggtgagtccgggcccatggatgagaaattgatgcgaggatcaataca

SEQ ID NO: 27298 - DNA, 122 bp, Homo sapiens
ctgctggccttctatgcgctgccacgtttatttctcttccctcctcctctcaaaacaggacggaatgtggggtgcgggcctgaatattataaacaaaaccaaaaaacactggctggaaagga

SEQ ID NO: 27299 - DNA, 122 bp, Homo sapiens
gtgaggacgtgggagtgaggtagcaaagctggggccgggcaggggcctcccaactgggcccggaggcagcagggggacaagggctaggagagggcatggcgacggcgcggcgggaagcgaag

SEQ ID NO: 27300 - DNA, 122 bp, Homo sapiens
ggtgtgggcacaataatctgtaattttctttgtttatacttcccctgatgccactggttccgatgccactggctggggggcctgctttgaaatgcttgtctgcagagtcacagcagccatga

SEQ ID NO: 27301 - DNA, 122 bp, Homo sapiens
ctgcgccagctgaggtgtgagcagctgccgaagtcagttccttgtggagccggagctgggcgcggattcgccgaggcaccgaggcactcagaggaggtgagagagcggcggcagacaacagg

SEQ ID NO: 27302 - DNA, 122 bp, Homo sapiens
ttactttagaaagattatggtaagcatgctggctcagtcttgaacctttgtcacccctcacgttgcacaccaaagacataccctagtgattaaatgctgattttgtgtacgattgtccacgg

SEQ ID NO: 27303 - DNA, 122 bp, Homo sapiens
tctccccatttagaacagaactgccaaggcatcatctctaagcactggagatgaaattcacgatcagttcaactggaatggatatgcagaaagtcattgcacactgctgcgtgagacaaaat

SEQ ID NO: 27304 - DNA, 122 bp, Homo sapiens
gcccgagagtagacccggagaggtcatgtcgcctgccttttgtatgccgcttccagcccccggcctgggtttggggagaaaactcagaagtaggcagatgatcccagccaggtttggtttat

SEQ ID NO: 27305 - DNA, 122 bp, Homo sapiens
gagccccgcgccgggccggtgaagtctggtgctgccgagcccgcttagaaagcacggccgcgcgctgtcggacgcaggcccacaggcccagccgacccaggcagcaattttcctagccccgc

SEQ ID NO: 27306 - DNA, 122 bp, Homo sapiens
tgagctagggagaaaaataaagcaagaaagaaggatgaagaggcagttgggtgtatttttcggtagtgtatattgtggtagtgtagttacaaaaggctcactgagaaatagtaaagattgaa

SEQ ID NO: 27307 - DNA, 122 bp, Homo sapiens
agaggagcgattgggtccagcgccagagtaattttcattttcagcttcgctgttcctcctcggactccgtgctggagagcacacaaagctgcccagaaggcaagaagaaagcttgtttgtcc

SEQ ID NO: 27308 - DNA, 122 bp, Homo sapiens
ggctgtagggagctgaggagaggcattaagaagccatgcctcataaactttaaattcttgcgcaggggtttattactggctggctaacaaactgcaactcagccaacctgtaaaaatgtgaa

SEQ ID NO: 27309 - DNA, 122 bp, Homo sapiens
ctgcatgcgagtctgccgaacttggagccgctggtgagtggcctggacaggcctgcgttccgtggccagcaggcttcccgcttgctgggtgacctgcggtaggtctctggccctctctgggc

SEQ ID NO: 27310 - DNA, 122 bp, Homo sapiens
accttgcaccctaagaataaagttgacttgatcatggtggattcactttttgatatgctgcgggattcagttcttagtattttttgtggatttttgcctctatgttcatcaggaatattggc

SEQ ID NO: 27311 - DNA, 122 bp, Homo sapiens
ttccctcgtgcccgtccacgctttggttacaggcagtgaagccgctgatgtcagcgggaccgcggctgcccctctgaggtgtctgtggcctgccaccagagcagcgggcggggtggcctccc

SEQ ID NO: 27312 - DNA, 122 bp, Homo sapiens
ctcccccggcagcccggggccagccttgcacgcccaatcggcgggctcggggccctgcggcggcggccacggcccagcccctcggaaagccctggcctagccgcaggcccctccccccggcc

SEQ ID NO: 27313 - DNA, 122 bp, Homo sapiens
ctcgccttagacctctgaactccggggcacagaggcgactttctcctcacagactttaggcgccactgctgggtccggaaaagaaagagaaaggacccagtgcggtcgcttacagaacccag

SEQ ID NO: 27314 - DNA, 122 bp, Homo sapiens
tcttgcacactgccttagagctggtgtggcttgttgaaccccgttgcagacgcacacgcacgtgggtccccatggctcctcgggacatggaggctgcccacgctcagggaagagtccttgtc

SEQ ID NO: 27315 - DNA, 122 bp, Homo sapiens
cgcggacgctgctgggtgcctgggcgccgctgaggcggacagggggcggctcttgagcggcgccggggagacgggacgggcggagaaggtggccacgctcgcacaaacgttgcgagtattac

SEQ ID NO: 27316 - DNA, 122 bp, Homo sapiens
cagtggtttcctatctgaaaatcaggctctccaggacactgcctctgagacagagatgatcgcacagtaagtttattgggaagtgctctggtgatcaacctctgtggaggactgaagaaggc

SEQ ID NO: 27317 - DNA, 122 bp, Homo sapiens
ggaagggttccagagtgggctcacaggggacctcctcccctggcctcttggagtccaggtcgtcgagggcgcaaagctgcacgccatcctgggcaagctgggcccgcagcgtgggcgcggtg

SEQ ID NO: 27318 - DNA, 122 bp, Homo sapiens
gagggtctttcctgcccgggtttcggacactgttggagtttcagggagcttgggcgcaggcggcgatctcaaagcgcagcaggctccgcagaagaggcgggctccgggcagagaccgctagc

SEQ ID NO: 27319 - DNA, 122 bp, Homo sapiens
tttagttgggatagcttcactagagctgcctgccaaagacttccttccacaggatcttgtcgcaccagcaactgacaggagcttgggagctcgggagcttgggagagggcttatgtttttaa

SEQ ID NO: 27320 - DNA, 122 bp, Homo sapiens
gcttgggttcttccccgccccctctttttttcggaccatgacgtcaaggtgggctggtggcggcaggtgcggggttgacaatcatactcctttaaggcggagggatctacaggagggcggct

SEQ ID NO: 27321 - DNA, 122 bp, Homo sapiens
agctccagggaccctaggttttctatgggattcccaatctgcagcagagatttacccgagcgtgttgcggcagcggctgggcttgcaaggcgcgatccaagagggatttaagcagcccagag

SEQ ID NO: 27322 - DNA, 122 bp, Homo sapiens
aggctcaggttattcatttccggcggcggaggcggcagtttcctaagcttggcttctctccggtccgctgaccggcgtcagggaccaggttttggtagctgtgggtagcctcagttgtcctg

SEQ ID NO: 27323 - DNA, 122 bp, Homo sapiens
ccaattatcacagactgtggtagcctaaacagaaatgtattttctcatagttatggaggccggaaatccaagggcacagtgctggcaggattggtttctggtgaggcttcacttccgggctt

SEQ ID NO: 27324 - DNA, 122 bp, Homo sapiens
agatatagaaggtttaaaggagaaaggatttcaggtttccttctgaattcctgtgtatgtcgttaggaccccaaattgtaggttttttgttttattaaacgataattatgcacttgtctaat

SEQ ID NO: 27325 - DNA, 122 bp, Homo sapiens
tctccggtaccctcaatcccgtagatgcaggtgggcatcctccagccccagcaagtactgcggaccagttgggctggctggcccctttcctgcagaagcagacaacacccacttctaccctc

SEQ ID NO: 27326 - DNA, 122 bp, Homo sapiens
ttgctctcgtccaaaacagagcgactcccccgctgccgaggaaaagccagttcaagaagccgggggaagggtggggccccgcgtgccccggagcagcgcccctcgaaggcgggggcaggaag

SEQ ID NO: 27327 - DNA, 122 bp, Homo sapiens
ctgggtggccagtggggcggcatgcccatgtccttccagatgcaaacgcaggtgctcagccggctgatgacgggccagggcgcctgcccctacccgcccttcatggccgctgcggccgccgc

SEQ ID NO: 27328 - DNA, 122 bp, Homo sapiens
cgtggagggggagaggtttgtgctccgtccctgtgtgctgtctctccctccatgctcacccgtggctgtggcttcctcaaaacacagcgacctcacttgacattcaggcgtctcttgctccc

SEQ ID NO: 27329 - DNA, 122 bp, Homo sapiens
agacagtgagatagtcctcaagcaaatatccctggtatggaattttggttttaaaatcaacggaggatgttttgtctgggctcatattctttagccatcttttccaccttcatacttgtaaa

SEQ ID NO: 27330 - DNA, 122 bp, Homo sapiens
gggtgggaccagcctcaggctatgggccctgcacctacttgatttttaagggactttgtccggttcctcgaacttaattggctcctgggaggttttagtaataaattgcgtgagaacgggag

SEQ ID NO: 27331 - DNA, 122 bp, Homo sapiens
cctctgcggaagctggcgcgcggaagagagcgcgagagagggcccgagcgggagactgctcgcccgctttgatactttctgcctgaacttcaattacttgatcaaggacttcaattcagcag

SEQ ID NO: 27332 - DNA, 122 bp, Homo sapiens
cggatcctttgccccgcccaccgctgctacgcaacccggcggaagctcgtcaccaaaccccgcctctttgtttaactcagcccctacaccagcagccaggagctgcctacgaggagggacga

SEQ ID NO: 27333 - DNA, 122 bp, Homo sapiens
atcgcgagacgcattgcctgccagctcaaggatttctgctgtgagatactctaacactgccgccaaatacactggtgcgcctgcccctatccgctctgcatagtttcccttacgaagcagac

SEQ ID NO: 27334 - DNA, 122 bp, Homo sapiens
ttgtttgaggccgtcttcatgtatgtcttttatctgctctaccctggctatgccatggtgcggctggtcaagtgcgacgtctacccctgccccaacacagtggactgcttcgtgtcccgccc

SEQ ID NO: 27335 - DNA, 122 bp, Homo sapiens
gcggagggaggcagggctgggagacgttttttgtatctatgagttaacaacaaacccagccggaaccccaggctcagatctgctcagaagacggaggggaagcagcaaatgctggcgtctga

SEQ ID NO: 27336 - DNA, 122 bp, Homo sapiens
aatgaagccggcgcgctctgattgggtgcttttaatctctgggagcccgccttctcctcccgcagccttccaactcctttccccagccccaccccccaccctccttcgggccccgcccctcc

SEQ ID NO: 27337 - DNA, 122 bp, Homo sapiens
gtgcggaggggatcctggctgttcccaaatctcgcctgcctgcgaggagccagcgtggcccgggcagctgatctcaacctgtgattgtgacatcacccctacctgaggaagcctcttccagc

SEQ ID NO: 27338 - DNA, 122 bp, Homo sapiens
ggggcggacgcggagggaatgcagctggagctcgagaactgcggcggtcgctcctccgggcgcgcagcgcgggcggtgcggggaggtgcgggcgccgtgctcgctcgtcctcgccgggggac

SEQ ID NO: 27339 - DNA, 122 bp, Homo sapiens
aagcatgtggactataagcccattttaaacagtggataattttcaaagagtgaacacgagcgtggaagggaattcagttgctaggaaaataaaataaaataaacataatcttcctccctctt

SEQ ID NO: 27340 - DNA, 122 bp, Homo sapiens
actacacctgttttctcttttctgcctcataccaacagcctgaactccactactggtcaccgcatagtatgaaccagaggaactcattttcccatttgaatcctggttttcttagctgataa

SEQ ID NO: 27341 - DNA, 122 bp, Homo sapiens
caaagccgcctggctgacgttggttagggtagagacgccctccctaaaggctgtccaagccgtctcttcctttcattagcggtgtaatcctgtgttcccgccggagcctggcacggaagtgt

SEQ ID NO: 27342 - DNA, 122 bp, Homo sapiens
ctagatcctctctaaaagggtgataccaccatttccctcctcctgtctactaggcatgtccgacactgacttccaggaatcaactatctaaggagtctgacaaccttcaggaatgttgcctg

SEQ ID NO: 27343 - DNA, 122 bp, Homo sapiens
tttatgaccgacggagcgtacacttgagttgacgaccgacggagcgtacactcgagatgacgaccgacggagcgcacacacgagatgacggccgacggagggcacacacgagatgacggccg

SEQ ID NO: 27344 - DNA, 122 bp, Homo sapiens
tgcgaatttgggattcgattgggagggaccgctcactcgggggaaatggattctttaccacggctgaccagcgttttgactttgctgttctctggcttgtggcatttaggattaacagcgac

SEQ ID NO: 27345 - DNA, 122 bp, Homo sapiens
gaggccggggccgccaaccccggtcccttcatcctctggccccttcgcccgctcctcacacggacgggctgtgcctgtgtctgctccactggcagccggtcgatacccccgggcgtgcggag

SEQ ID NO: 27346 - DNA, 122 bp, Homo sapiens
ttacgcaacctcgtcttgatgtgaccagagaacaccatgtacaggcaaagcccagcccctcgggcccgcagaagacaaatagcagggaggaaggagcataggtgctgccccgggcaggtccg

SEQ ID NO: 27347 - DNA, 122 bp, Homo sapiens
aagtgtcaaaacacaactcccggagagtcagatttaaactgtgtttggaggtcccttctgcggcagggcagggaactgcatccaccaatcttattcaccggggtgtgaagaccgctttatac

SEQ ID NO: 27348 - DNA, 122 bp, Homo sapiens
tagggcaaccggcccacccctcaccaggcaggacagactcgatccagacaggcccgtggccgcgaagtgtgaagccgaagctcttgttgcctttgtagactcggacagtcctgggggaaaaa

SEQ ID NO: 27349 - DNA, 122 bp, Homo sapiens
catagaagggaatatgtttccgccacagcaagggacgccgcactgacacggggaaccgcacgggtgaacctcgagacaccgtgctcagtggggttcgccagacacagaaggccacagagcgc

SEQ ID NO: 27350 - DNA, 122 bp, Homo sapiens
agagagagacacagaaggagacagaaagcaagagaccagagtcccgggaaagtcctgccgcgcctcgggacaattataaaaatgtggccccctgggtcagcctcccagccaccgccctcacc

SEQ ID NO: 27351 - DNA, 122 bp, Homo sapiens
acaccaagtaaccaatgggaaacctctacagggtatttaaatcccagaaaattgtgtcaccgggcccttcagcctcatgggctgctcccaccttgtgggtgtactttcattttcaacaaatc

SEQ ID NO: 27352 - DNA, 122 bp, Homo sapiens
ggcatggcccctacgcgcccggcagccccatccctccaggcaggcgccggccccgccgcccgcagcccagtctgctcccggcagccttgggcgcagccccacgtgaccccgccctacgcccc

SEQ ID NO: 27353 - DNA, 122 bp, Homo sapiens
agactccacagcccgcctgcctcacgagatcacacgctcctcacttacaggggttcgcgccgtccgccactatcagcattcgcagagaggagaggttgatgtctctctgatctctgtgtgct

SEQ ID NO: 27354 - DNA, 122 bp, Homo sapiens
ggaggctgaggcaggagaatggtgtgaacccgggaggcggagcttgcagtgagccgagatcgcaccactgcactccaggcccgggcaacaaagtgagactctgcgtaagaaaaaaaaaaaag

SEQ ID NO: 27355 - DNA, 122 bp, Homo sapiens
cgcagttactctgccgattgtgacgtcagctgacgctgggggcgggtgggggaatctggccggaaatccctcttcctgttgcagataagcccagcttagcccagctgaccccagaccctctc

SEQ ID NO: 27356 - DNA, 122 bp, Homo sapiens
gcagcgcggacggcgccggcctcccctgcgggcctcccgtcactcaccggccggcgcggccgaaccgcggcccaggccctagctgccctggacgccgtgcccagctgctccgctctgtcccg

SEQ ID NO: 27357 - DNA, 122 bp, Homo sapiens
gggagacggctcccaggctgaggttgggacagcgacggtggcggagaactggggcactcacggcctaggggcctcgtggggccgctgaggccgggcctgttcggcaccgacggcgtcacctc

SEQ ID NO: 27358 - DNA, 122 bp, Homo sapiens
ccggcccgcggctgcccagcagcatgaggtggtgctggcggctccgggtcgtggcgcgaccgctgcggcggcggctgctcggggggcgctgaggtagccccccggagcggcacggaggacgc

SEQ ID NO: 27359 - DNA, 122 bp, Homo sapiens
cggcgtcccctcctaaggggagctgcgaaagacccattccggaggcatttcacggggccccgtaacacccgggcgagtgagctactgagaactgcatggctccttctggggccaggcggtcc

SEQ ID NO: 27360 - DNA, 122 bp, Homo sapiens
acaaaaacctgagacttccattttgctggaaacttcttttcctcttgcacactcactctgcgactctgtgtggagagctccatgtgacaagggaggtctgcagcctaagcaactgagacctc

SEQ ID NO: 27361 - DNA, 122 bp, Homo sapiens
tctgcttgggaatctggggatgtctctagccatttctaaacttctacagtgcttcccccacgaactaaagataacaggcaagcagtttccattggaactgtgttaaatcgacatctgaaatg

SEQ ID NO: 27362 - DNA, 122 bp, Homo sapiens
gcactgcaggtccttcctatggtatgtccccaaatgaccagaaaaactgggagctgggctcgggcatccccagatgtaggtagaccccaagagggcgtggagtcttttccacacagaacctt

SEQ ID NO: 27363 - DNA, 122 bp, Homo sapiens
taagcccattgattgagttgcgtgcacgtgctctctctgcagtgctcagctgtgcctctccgggctgtctgtcctccatggtgacctcaggctgcagaagggcctctgagacctcccgccca

SEQ ID NO: 27364 - DNA, 122 bp, Homo sapiens
ggagatagagaccatactgactaacacggtgaaacatgaaaaccttgtgttataatcaaacggatggactatgagggggtaagctgttaaacaatagagtaatagaaagggggaacaaaggc

SEQ ID NO: 27365 - DNA, 122 bp, Homo sapiens
ctcaccctgcggcacatcaacaagtgcccagaacacgtgctgaggcacacccagggccggcggtaccagcgagctctgtgtaaatgtaagtcccagtggacccccatcagtgcatcgccatc

SEQ ID NO: 27366 - DNA, 122 bp, Homo sapiens
aggagggtgggccgccggcagtggacgaggtgttggatgaggctgtgcccgagtaccgggcgccggggaggaagagcctcttggagatccggcagctggacccggacgacaggagcctggcc

SEQ ID NO: 27367 - DNA, 122 bp, Homo sapiens
gtatcctcactttacagaagaggggcttgggacctagactaagtgacttgttctaagtcgcgcaacagtgagttgctgagaggaggccagcaggcaaatttcataggtttcccaagacacca

SEQ ID NO: 27368 - DNA, 122 bp, Homo sapiens
caggaaggaagactgaggagtgtcaccacacctaaacagactttgtcacaagctattgtccgtttataggtcccatacaatttcctaaaagaatcattgacacactattgtctgttcttttt

SEQ ID NO: 27369 - DNA, 122 bp, Homo sapiens
tgcctgtggcatttgccgatcttccctaacaggagtgtttccctgaactgtaaaacttcccgcaaattgcacacacagagagagaggacaggagacatagtgaccacggatacaaaggaaag

SEQ ID NO: 27370 - DNA, 122 bp, Homo sapiens
agaggacaggaagccccgggggttcagccgtgtcaggaatccaggaggaaagcagctatgcggcactcaagaaaagtggggaaatctcagagactcaggggctgcaataatgacgccacatc

SEQ ID NO: 27371 - DNA, 122 bp, Homo sapiens
gcgactggccggtttgtagatgtcgaagcaccagtttccaggaattgaaagcatggctcccgcagttgcgcgcggggtgagctgcggaggcacggccccgaagtccgcgtgctccagttccg

SEQ ID NO: 27372 - DNA, 122 bp, Homo sapiens
tcattgcctgcatcacaacaggcgtcgtccggctgatagcttatcgcaggctctgaggggcgggacccaactgattgtcaaaggcggcagattgtagtttttgttttggccggaaaggctta

SEQ ID NO: 27373 - DNA, 122 bp, Homo sapiens
ctggataaagtttggttgtttgctcttggtgtgtgtgtcttctgtcctggtcctctgtagcgtccctccatgtgaggtcctcccattctatctcattgtgcctcacgccctgctgctggcct

SEQ ID NO: 27374 - DNA, 122 bp, Homo sapiens
gccgcgcggcgctgctcggggactgctactttgcaaggcggcggctgcccctgcggggttcgggttgcagggtcaagtgtcacgtcctccgcaatctccaatattcctgtaatgtatttaaa

SEQ ID NO: 27375 - DNA, 122 bp, Homo sapiens
tgccatcctccccctcaaccagacgggcatggcgtctggttgtccgtcctgtcttctcatcgtctcagagcccttccctgacccctaccctctctcagaccaacaggatgatgacaggaaga

SEQ ID NO: 27376 - DNA, 122 bp, Homo sapiens
actgcgctgaccttctggccgttaaagccgttatccactgttatcaggaccaggtagtctcgcccaactgggacagagcggtcgcccgaggaccggatctgcgcggcgcagtggcctaaaaa

SEQ ID NO: 27377 - DNA, 122 bp, Homo sapiens
tttggtcacaatcacctaactttcaaatccagacatatagaaaagaacaaaggtagcttacgtgcataaataagaatatgaatgaggggtgctatgtaagtgtggactgaaaagctggagac

SEQ ID NO: 27378 - DNA, 122 bp, Homo sapiens
gtacctactcaacacaaatgagagaaaaaaactgatcatcccggtatttatagctgccctcgcgttctgattggacagtagactgtgccatgccacgtctcacacacggaattggctcccag

SEQ ID NO: 27379 - DNA, 122 bp, Homo sapiens
tacacaaattgtaacaatggcagtgttggtctgtgggtgcacccaagaccaccttcctcacgtcacatccattttaccacccagctgtcttcagaatgcttcaatttcagcaaacctccttg

SEQ ID NO: 27380 - DNA, 122 bp, Homo sapiens
cagtttttaaataatgaaatgtgagagactggggagattacactctgtcatccatgcctccggcttttttcaaaacccatgggtctgggaaatctgatacaattctgcatagtctgcaagac

SEQ ID NO: 27381 - DNA, 122 bp, Homo sapiens
ttcagaactgaaaatagcccctcgtaacttcacagcacgaaacccagagctctcaggacacgtgcccccaactcatctccccatcctgggtagggccagactgcggctctgacaggttctgc

SEQ ID NO: 27382 - DNA, 122 bp, Homo sapiens
tcagggcaattgaagttccggtcactactcccccccagagcaataagccacatccggcgacgtgtggcaccccaccctggctgctacagatggggctggatgcagaagagaactccagctgg

SEQ ID NO: 27383 - DNA, 122 bp, Homo sapiens
gaaggcacaaactggacgatggtagagcagttgactggcaaagagggcccctgggtggtgcgatgcaggccagtcctctggcctgggaagcctcattagcatctcctaacgcctgcgctgag

SEQ ID NO: 27384 - DNA, 122 bp, Homo sapiens
taactaacaggaggtagactgggaaggagcatggcaaagtcaccccttttcacagggcaacgctccaaagaccacgctcaagctggggtggcagggctctgaacatggggccccgacccggg

SEQ ID NO: 27385 - DNA, 122 bp, Homo sapiens
gcggggcgttcgggctccccggggacgggcagagccggtggcacaagtttgcaggtctcgcgggcacgtgcgctgaccgggcttctgcgggctgcgctgcgctgcgcggggctggccgctgg

SEQ ID NO: 27386 - DNA, 122 bp, Homo sapiens
aggcccctgtgcgcaggacagggagtgtggcactggaggctggactcacacccgctgtcacgggagccagggcgagtctagcagtggggtccaggccatgtccccagcaccctcaagcctgg

SEQ ID NO: 27387 - DNA, 122 bp, Homo sapiens
aaagacataaaatgccatccgtggggggtgtggccggcgtggccacctcggggcccctcacgtgatctcctcggtccgtggttttctgtggattctctgtccagtccgtctcttcattgccg

SEQ ID NO: 27388 - DNA, 122 bp, Homo sapiens
gacgggagagctttacgtaaggggcccggcccggagcaccgccctgacggccttgggcagcggcaccttcactccccaggaccgtggtcgttgccacatttgctgggccaggtgctgacaga

SEQ ID NO: 27389 - DNA, 122 bp, Homo sapiens
gggccgggccttcccctttccttggtcgctgggggccctggtgcctcgaagggcgggggccgtcccgaggggacacttctcctccttcgggagcacggtcagcgacctttctaaccggacct

SEQ ID NO: 27390 - DNA, 122 bp, Homo sapiens
gtgtgctcggcagggccaggcatggttttcggattatgccctttagctcttacaacagcccgtgaggcaggtaatgtcatccccattcttactaggagaaaaccaaattaagtagtttcttc

SEQ ID NO: 27391 - DNA, 122 bp, Homo sapiens
catctttacagtgctgctcaccccagcagggagtgcgcagggctggagctgctttaatagcggcagctgcctgagtcaggctttctgtgttcccaggaaagggtgggagcgtttgcatcaca

SEQ ID NO: 27392 - DNA, 122 bp, Homo sapiens
cttgcctctgcccgttgccttttccacccctgcactgggtgtgcataggtgcgcagggcacgtgtgtgtcctctgcggtcactgacttgattgtctgcctttcccaggaggacatgggctct

SEQ ID NO: 27393 - DNA, 122 bp, Homo sapiens
ctgggattacaggagtgagtcacttttcccagctgcatttggctctttatttgacctcaccgtatttcagttttctcatcactaagagtggggccaatgcaatattaacttgatagggttaa

SEQ ID NO: 27394 - DNA, 122 bp, Homo sapiens
tcggctcggcccgtggggcttccgccgccctgggcttgcagctgggactcatttccagatcggtcgaaggcaggtcttccttctagggaccggtagctcagaggaaggaccggcggcaaccg

SEQ ID NO: 27395 - DNA, 122 bp, Homo sapiens
ccaagaagcctaaggctcaagacctgatcctgaccgggtgtcacgtcgcctgggagcaggcgatcctgaccgggtgtcacgccgcctgggagcaaccctgggcctatgcactcttccctcca

SEQ ID NO: 27396 - DNA, 122 bp, Homo sapiens
ggggaggctgcgtcttctgcctggtcctggaatcctgcaggtgtcacccttgtcttaaggcgccgtcgccccctacgtccctcctcgtgccgggccctgctgctcccgtagtcttccctctg

SEQ ID NO: 27397 - DNA, 122 bp, Homo sapiens
tgaaatttgaaatactttgagtgctgacatgaagccacaaatggaaaattccacaactgacgtttcagatttcagattaggaatgctaaacctgtacaggtattctggtgatgtgcttaggt

SEQ ID NO: 27398 - DNA, 122 bp, Homo sapiens
aagtccagtcttggcagttagaaagttctttcttaggcagtatctctcctagttttaaaccgtggggccatacagaacaaatctaattctattttatagagccagatttaatggctcaattc

SEQ ID NO: 27399 - DNA, 122 bp, Homo sapiens
cgttgctcgcgtctggctggtactgctcctgctgactgtccaggtcggcgtgacagccggcgctccgtggcagtgcgcgccctgctccgccgagaagctcgcgctctgcccgccggtgtccg

SEQ ID NO: 27400 - DNA, 122 bp, Homo sapiens
tttttgaatattttatgaaggtagttaaactagaaatcagtactagtgtcatccaggccacgtctgttagtctttggggaacagatgccaccttagctgagattctgactcccgttcttgtc

SEQ ID NO: 27401 - DNA, 122 bp, Homo sapiens
tctcatgaggagagggaacatgccgagaaactgatgacgttgcagaaccaacgaggtggccgaatcttccttcaggatatcaagaaaccagactgtgacgactgggagagcgggctgaatgc

SEQ ID NO: 27402 - DNA, 122 bp, Homo sapiens
ctgatcccttgaccggctccgaagggttgaggcagggacacagtgacggagagacggcctcggccacaggggacactggtcccgcctgatgctgagctgaaagtgagtgtggccgagtggtg

SEQ ID NO: 27403 - DNA, 122 bp, Homo sapiens
ccaatcacaggctctttagtctgtcaatcttctcagacacttctctgccctcttggggaccgggaacttctgactggcttccccacagtaaactgaggtgagtaggaatccgggtggcttcc

SEQ ID NO: 27404 - DNA, 122 bp, Homo sapiens
gactagaccaaggtgacctcacaggtcactggcaaagctggacaaagaagtccatgggggcgccatggcttcatcagctactttagccctgttgttggaaagaaaatggtccaagtggtcca

SEQ ID NO: 27405 - DNA, 122 bp, Homo sapiens
tcccctctctgggccccctcagcgccctctcctaaccccgaatgggcctgtcttccagcacggactggggagggggcttctacccaacagagactacaacctgccagctcaggacgagagct

SEQ ID NO: 27406 - DNA, 122 bp, Homo sapiens
agccacgctgcagtctctgttgccaccaccaaccgcagcgaggtgggccgcagtgttgcacgctccagcctacagctggggatttcccattcctggtcctctaagccagagactgagcaact

SEQ ID NO: 27407 - DNA, 122 bp, Homo sapiens
agcgagcgcaagaggggcgagcacgagaggcgctctggagaggaacgcacaaaagtgtcccgcaagtcgaaatgcgagtcctctccgggggctgggatcgagggctggtttgggggtggggg

SEQ ID NO: 27408 - DNA, 122 bp, Homo sapiens
actccatgccctttttacccacctctgttccctctggtccagcaaataagcatctgtgggcgggtggtgggaagtcaagtaatgaagagttgcaaggtgtggggtaggtataaagtgtctca

SEQ ID NO: 27409 - DNA, 122 bp, Homo sapiens
ctcactctctccccctgggcctgacctcagaatgccaggttgtctggtttggagttcctgcggcccgacgcagcctggcttcctgctgaagctcagtccctagtgcttttctttgaccttgc

SEQ ID NO: 27410 - DNA, 122 bp, Homo sapiens
agtttagtttgggacctacagacaaagcatcctgaagccgtgagagggagcagagctggacgtgcagatttgggaggctccaacatacaggaaaaattttgcttacaatgatgtgcctggac

SEQ ID NO: 27411 - DNA, 122 bp, Homo sapiens
gagctattgggtgccgttggtgggtttgagtgagtggggtcaggaagtgactcactcctccgagggcttgtgggagcctcagctcaggggcgggcagggggcgtggggaagtctgcagccga

SEQ ID NO: 27412 - DNA, 122 bp, Homo sapiens
ctgctcttctctttttctctgtctccagatctccatgacccacctccaggagaatgagatcgtagtgtccagggcagctgcagatgggcctaggcccactttctggtgactcagtacaagtg

SEQ ID NO: 27413 - DNA, 122 bp, Homo sapiens
gaactaaacttctcactcatctgacttcctgcggtttacgacaacagactttggttgcaccggaaaagaacagattctcttccgtcgcagagtttcgccatggtaagaccgatagttcctaa

SEQ ID NO: 27414 - DNA, 122 bp, Homo sapiens
cgcatgcggatagaccagacacttcttaggcctccctcggatgggagctgctagctgtggcgaaagtgacggtgacttgtctagggctgccgcagtctgtgtcaaataccctttttcctggc

SEQ ID NO: 27415 - DNA, 122 bp, Homo sapiens
aaatatgtagaagtatgatttctcttattgcaagaaatcttgacattataattttcaggtcgtgttagtagtgagaaaggcacaagggacaacctttagataaagggtaatggaaatagtgt

SEQ ID NO: 27416 - DNA, 122 bp, Homo sapiens
acaaaagttgcatctagacagaggtgaacgaaacaaaaccaaaacccgaacgtgttctctcgcaggatgggcgccgcccgtcccgggcccttagcccgacatctcctctcgctgctccttgt

SEQ ID NO: 27417 - DNA, 122 bp, Homo sapiens
ttaggactctgagcgccgctgttcacctactaggagagaaaacgcagccagagctcaatccggattctcagggcttcaactacacaagccccacaaaccggctgctgggctgcagggaagct

SEQ ID NO: 27418 - DNA, 122 bp, Homo sapiens
agcactgactgcaaaaatagaatgacctggggactcttgagaacagtagtgatggctgcccgctgtctgctcagctctaagttaattgacttgtgatgagaccctgcatccatgcttttaaa

SEQ ID NO: 27419 - DNA, 122 bp, Homo sapiens
tttagtacttgctggcagcaataggaagctgctgaaggatttcacctaggcagagatgtacgcaattagcattcaataagactcctcctccaggaagccttcctggatactctagtttggtt

SEQ ID NO: 27420 - DNA, 122 bp, Homo sapiens
gtcaggcgacctgtcaccagtaaccacagctgaggcccgcccgcgccccgcccccggctccggaaagccagctccagccctctcaggcccagaagcctgcagtctccgcccatgccatcccc

SEQ ID NO: 27421 - DNA, 122 bp, Homo sapiens
ctcacggtgccctacttggggcccgcggctgcccccggctccaggcggccagtcatggcgcggccccagcagccggccgccacactcatgctgcgctggccccgctgctcgccatccgcctg

SEQ ID NO: 27422 - DNA, 122 bp, Homo sapiens
tcgggcgggcagtggagaatgaatgggctggagctggccggtggcgcacattgttccggccgggtgttgaggggcgcagtcagcgcccgccacctccccactttggccggccctgctgggcg

SEQ ID NO: 27423 - DNA, 122 bp, Homo sapiens
tcctcggcgcactcccgcggcgcgggaagctgcaggaaaacaaagttccacttccacgtgcgtagtgacttggtaaggataaaggtacagggagccaggattgttcctggaatatcaacaga

SEQ ID NO: 27424 - DNA, 122 bp, Homo sapiens
gggggctggcacgagtcacagcacctcgtgcgtcacttggcggcgccggacgttgggctgcgcaggatttgagacgctcccctgaccaccacttgctctgcgctgaggtgctgggacagcca

SEQ ID NO: 27425 - DNA, 122 bp, Homo sapiens
aggagagagtcgcgcgcttatgacgtctaccactgacggcccgcccctccgagccagacccgttttctattggttaaatcatttttgacggacaggcccacgttattgacttcttttcgacg

SEQ ID NO: 27426 - DNA, 122 bp, Homo sapiens
aggaggaaggaaaagcactttacaggtgggtcattccaagcccaaatccagcaaacagatcggctgataaacaaaaccaagaaatgagagagaagaacacccccctcctcctcctcctcctc

SEQ ID NO: 27427 - DNA, 122 bp, Homo sapiens
gcagtgggcactccttcacttaaccctctcgtatacaccctgaggaacaaggagataaagcgagcactcaggaggttactagggaaggaaagagactccagggaaagctggagagctgctta

SEQ ID NO: 27428 - DNA, 122 bp, Homo sapiens
tgggattgttgaccttcttcgttatctgggaagggtagaggctctctgccagtgtaatctcggaggcatttctagacaggagttgtactgatggatcttggaccttgatgggaacacagagc

SEQ ID NO: 27429 - DNA, 122 bp, Homo sapiens
cttcttggggacagtgattcagatcttctgctttccctagtagtatccctttttggagaccgagactgagattgcctcctttctcttgcaatatccttttttggggactgagaacgggattt

SEQ ID NO: 27430 - DNA, 122 bp, Homo sapiens
tttttttttgcagctgcacgtgtatttttgtttagggtgaatatgacagagtaaagaccacgggacctaagaaaccaaagggaaggagtgagataatctcaggtttgagttatgggaaggaa

SEQ ID NO: 27431 - DNA, 122 bp, Homo sapiens
tttctcggttttttggaagaggcagcgttgcctcccatttattcagtcccctcacagcagcgcggctgtagcgcgccgcagaagagcgccccaacgctgccggcccctgttttgtttcttct

SEQ ID NO: 27432 - DNA, 122 bp, Homo sapiens
agcaggcacgggcctgaacttgggtgtgtttgcagtgggatctatcaaacagaggaagttcggggcatgtctgtcatccgcctgataacattggtaattagtccagccgtgcgggtcacaga

SEQ ID NO: 27433 - DNA, 122 bp, Homo sapiens
catcatcatcatcatcatcttccggattccctgagaaaataccaggttcacagatttcaccgccagaaaaatccatccgccaaaagagaagtggaccggggctgaaacagcacacgggacac

SEQ ID NO: 27434 - DNA, 122 bp, Homo sapiens
gctggtgtgagtaagtggaaagccattttagagaagccagaattgggttgccatctgtcacgcatgggctttgctccttacacatattggtgaataaaatgtttaacaggctgtagccggaa

SEQ ID NO: 27435 - DNA, 122 bp, Homo sapiens
gctctattgattggagagagctggaggaggcggtctctcttccagagcgctagttgggagcggagcctgcctgtcattggtcaccagagccaatggaaaggggctgccgcgcggccgtaaag

SEQ ID NO: 27436 - DNA, 122 bp, Homo sapiens
ccaaacagagggcatggctttgtaaaccggctcatgaatgaatgcgcaggacgggatgggcgtgctcagtcctcgggctgactgcagaacaaacgccaaagcatttcctctcagatctgagg

SEQ ID NO: 27437 - DNA, 122 bp, Homo sapiens
cctgttagaactctctcttaccgtctgtcagaaagacaagctttctattgagaaagattacgccaggtcccactcggtaagcactgaggcggtaacctaacactcttgcgaggtgctttggg

SEQ ID NO: 27438 - DNA, 122 bp, Homo sapiens
atcccggctgagtcacctggcctggatgtccatttcatatcctctctgttactcattgaccgagaatatgacttaaatccctgtgggcaatagccactaggctcatgaggaaatggataatg

SEQ ID NO: 27439 - DNA, 122 bp, Homo sapiens
ctaaccccagagacataataaagttcacttgcagtgcttctgtgagtgctgagaggatttcgcggctgcttctcatccctggagcttctcatcgcctcctcttgtcctgttggttagtcgtc

SEQ ID NO: 27440 - DNA, 122 bp, Homo sapiens
tccaggggtctccctggcttctgattccctcttccctgtggggtgaacatgcacgcctatcgcacctctctctttcaaatcggaaactacacaacacctgcccactgaaatttaatttgttt

SEQ ID NO: 27441 - DNA, 122 bp, Homo sapiens
gggccgcagcctgggccggactccgggggaaacggctccagaacagaaactgcaaaatgccgcctcggttcagggtccggagccctccgggcggtttttcgctcttagtgtttgtgggttta

SEQ ID NO: 27442 - DNA, 122 bp, Homo sapiens
ggcggtctgtcggcactgctggttcccagtctctcgcccaggctgccagtgacactgcgacgccatctgctccaggcagggacacactggcatcacgtgcccgcctggcaggaccgggtgca

SEQ ID NO: 27443 - DNA, 122 bp, Homo sapiens
ggggtttcaccatgttagccaggatgtatttcctacatcttaaggactcttttctataaacgctgaagccaaatgtgtctctagagttgagacgttccctcccagtgctacctctttgctaa

SEQ ID NO: 27444 - DNA, 122 bp, Homo sapiens
cttggacacgcccctcttccctggtctcacacaggaaggtgcccaggtgagtccagttcccggctcggacacgcccctcttccctggtctctctcgggaaggtgcccaggtgagtccagttc

SEQ ID NO: 27445 - DNA, 122 bp, Homo sapiens
tgtggttagaaagttgaaggaatttgattttaaattttagggatactgttcttggtgcaacgggatgaattagaaacttaaggtgtgttaaggcgaacaaaatagggaaaaatgaaattaac

SEQ ID NO: 27446 - DNA, 122 bp, Homo sapiens
acctctggccagctggcttccgcccttggtggggaagcagcagaactaggttctgagccacgggtcagggtgccaccctgctgctggccccactgtgtcacagagctgcctggcacaggtcc

SEQ ID NO: 27447 - DNA, 122 bp, Homo sapiens
atggataatggaaacatggcattccaagcagcacattccaaggccctgcaaccccctccccggctgccactccaactctagcctcccaggccctgttctacagatggtggagccggccgccc

SEQ ID NO: 27448 - DNA, 122 bp, Homo sapiens
tgtaacttgccccaaacatgctctggcctcagcactcctaaggccagctggtttggtggccgggtgggagcccatgggtacggaactcggaagcaaataacagacccaattagaagataggt

SEQ ID NO: 27449 - DNA, 122 bp, Homo sapiens
aacatgcggtggtcaagggcatccacctctttaggcaaaagcatgttttcagcccagagacgattccacccaactttacaagaggatagcccaaagatagaagccagggactcagacttcct

SEQ ID NO: 27450 - DNA, 122 bp, Homo sapiens
cccctaccccgccttgtgtcgcagacggtgaccagtgcttggtcttgcccttggagcacccgtgcgccagcctgtgctgcgggcacggcacgtgcatcgacggcatcggcagcttcagctgc

SEQ ID NO: 27451 - DNA, 122 bp, Homo sapiens
tacaggtgacgtacacagcatgggtgtagtaggggagcgcaaaaggttgcctccggcaggcggaaggccaggaagaaagggagggaagaggatttggagggtaccggcgcatggctttcggg

SEQ ID NO: 27452 - DNA, 122 bp, Homo sapiens
cttatctgcccacccctatagccacattctcacttaaaatactgcctccaaatggcttaacggaatgcctctgaaaactgaacaccaaatcgacactgccaaaaaacacagtcagccctgaa

SEQ ID NO: 27453 - DNA, 122 bp, Homo sapiens
caaaaaaagagtcaagtttgggatataggtaggagtttgagagatcaggagtttaattagcggaagatgagaggcctctgtaaaatcaaaagatgtcagttaggcagctgaatcatggatcc

SEQ ID NO: 27454 - DNA, 122 bp, Homo sapiens
ccctaaccaccttgcaaacgagaaactggcgcgttgaacttagcaagcgccggcacctagcggatagcgctggtattgccaaacaaatatccgttttggcgccgtaaagggtgctgctaaag

SEQ ID NO: 27455 - DNA, 122 bp, Homo sapiens
gaggatgaggaggaccgactcgctaagggagggaggtgactggccgggagggctcactgccgaggttgatttgctcttgttccaacttccactacgggactggagccagaaaccgtgtatcc

SEQ ID NO: 27456 - DNA, 122 bp, Homo sapiens
aggagctgggagctcttgtctccaaaaggcagcctagcagtggttgaagcagctgctaaacggctggatgacccagctcagagcagctacaggcccatttgggaaactgacccagccaaaaa

SEQ ID NO: 27457 - DNA, 122 bp, Homo sapiens
aagtgggggtgatcccacctctagcggggctgtgaaggcagggaacctgggctgcagaggcgcacaagcaagggctcacttccttcctttcttcccagcccaggacccagacctggacccac

SEQ ID NO: 27458 - DNA, 122 bp, Homo sapiens
gggtaagacggggcccagggggagggggcctctgcgtcgtccgcaggcaaggacgaagcccgggggtggttggccactagggcaggagcaaagattacaataataataatgacgataagtaa

SEQ ID NO: 27459 - DNA, 122 bp, Homo sapiens
agggagcgcctctgcctggccgcaacccagtctgggatctgaggagtgtctctgccccgccgccaccccatctggaaggtgaggagcgtctctgaccggccgccccgtctgagaagtgagga

SEQ ID NO: 27460 - DNA, 122 bp, Homo sapiens
gcttgatttatttagtttgcaaagtgactctgcaggacttcccagtccccactgcctccacgttgcaccgggagtgccgcggcaacgccgagccacctcccaactctgcccctcgaattccc

SEQ ID NO: 27461 - DNA, 122 bp, Homo sapiens
cctctgcagcctgaagcaggctctgggcagctacccgatctggtggtgagtgagcctcctcgcgttcgcccctgcccctgtgcgccgcgcccgcagcagacggtcccctcgggcagggaccc

SEQ ID NO: 27462 - DNA, 122 bp, Homo sapiens
ccatcggctgcaaaaaccagcgaagtgggcggctccgccaggccgaggacccagtgcagtcgccgcatttcgctcttcaccctccaggtggcgctagcgggggcggagcgcatatttgtatt

SEQ ID NO: 27463 - DNA, 122 bp, Homo sapiens
ttaaaatcataaataaatttatggctcaatttcaggttccttatcagtaaaatagaggagcgttggtgtaaatattctaaactcagctctgtgcttcagtgggcttttcactacctttagtt

SEQ ID NO: 27464 - DNA, 122 bp, Homo sapiens
gaaggagcggtgggccgaggggttggaggtggggccccaggaggacctcgggctgtgggccgggagagcggagtcggggagtggggcgggggagcgaggtggcgccggggagcctgggatat

SEQ ID NO: 27465 - DNA, 122 bp, Homo sapiens
tttcttatagtatctgaacttgattcaacattttatagcacatttggtacattatgatcacgaggaattatacaatttactggaagtaaaaacttttaaaactattactaaccaccatgtgg

SEQ ID NO: 27466 - DNA, 122 bp, Homo sapiens
atcgggcagtatttatcaccgtacaaattcaagctcggatttgccttagagtttagaagacgcgccgggacggcgggagtttcggtagaggcagggatgtgcgtgctggacttcgggtgccg

SEQ ID NO: 27467 - DNA, 122 bp, Homo sapiens
cattattattttataaatgctgctttctttctctatctgttcttttcagtacttagccagcgtgcagagaagcttcccagttaggaggtgaagaaacacaaggctgcactggatgcggaggc

SEQ ID NO: 27468 - DNA, 122 bp, Homo sapiens
tattcaggaggctgaggtgggagaatcccttgagcccaggaggcggaggttgcagtgagccgagatcgcaccactgcactcctacctaggcgacagagcaagaccctgtcttcaacaacaac

SEQ ID NO: 27469 - DNA, 122 bp, Homo sapiens
cagcggctgagcctgcgcttcggaagcatggatgtgcgcctgcgctgcgctagggcgcggcgggcggtttgaattttgcttacagagtcccgtctcaccatcctgggcttccaacggagact

SEQ ID NO: 27470 - DNA, 122 bp, Homo sapiens
actttagggagtctcagcctgaggctggcagcctggccacccagatgctcggtctctttccgccctaaccaagccccctgcccagcttccaccacttccagggccctcctcacattggctga

SEQ ID NO: 27471 - DNA, 122 bp, Homo sapiens
cctcgtcctcgtcaggggactggaagacactcgggcggtgcgccacgggcagctgcttggcgtgggagtagctcttcacagggcccggcaggctggccagccccaggcctgtccgcctgctg

SEQ ID NO: 27472 - DNA, 122 bp, Homo sapiens
acgacgtaacgtcaggccgctgtgggctctgggaattgtagtccagagctagatcggccacggacagaatggcgttctcttatctctgagtcggggcctggctcgttttgacatttttgcgc

SEQ ID NO: 27473 - DNA, 122 bp, Homo sapiens
cttaggactagaacccgggccaggcgggagtgaccagccgggacactcagggcctccgcgcgttccagctgggtgaccttgaccctccaacttcagccccctgcgcccggctgctctcccag

SEQ ID NO: 27474 - DNA, 122 bp, Homo sapiens
aaccagagatgatggcactgtggcagaaagcataggtccatctttccaagccctccttcccgatagcctgcctgaattcagggtctgggcatcagctccaatttaatcatagtggcgttatt

SEQ ID NO: 27475 - DNA, 122 bp, Homo sapiens
tccctccaactcttcccagacccaggggccctccctcgggccagtttcgggacaggcccccgctccggaagagcacggaactctggcaccccggtcgcccgcccctgcttccccacgcgccc

SEQ ID NO: 27476 - DNA, 122 bp, Homo sapiens
catgcattagcaaaagaagtgcatgccgcgtgcacgtgtgtgggtgcagcagcagctctccgcagcaagaggtaaacaagacaagcactacggtggttcaagttgaagctggaggtcatttt

SEQ ID NO: 27477 - DNA, 122 bp, Homo sapiens
ttcggtctcttttcggggtgggaggtctcccactgggaccgacacagacgcactggatgccgcggggtcccgggctccgagcggcggtgtccctgtccccttactcctacccacccccaccc

SEQ ID NO: 27478 - DNA, 122 bp, Homo sapiens
gctccatgaaggggaggaagctgtgggatgatggggagggttcccacaaagatggagcctcgtcagcctttctccagcaccggaaaccacaggaaaccaggtcagtgtgtggggcccgctcc

SEQ ID NO: 27479 - DNA, 122 bp, Homo sapiens
cagagcggcgtgccagcccagctctcgggctccctggcaaggctggagccgcaaggggctcgagtttcccctgcccgcagcccccataactggaagctggctcgcccagtgccctgatccca

SEQ ID NO: 27480 - DNA, 122 bp, Homo sapiens
gcgagagctgtggtgtgctggccttgtcgtaggtaagtttagaaaccggagcagctcgagcggacttcacactgtccccaccacagggtggggtgcgcccacctgccctgtccatgtggcct

SEQ ID NO: 27481 - DNA, 122 bp, Homo sapiens
ggccgtgaggagccctcgctggccggccaagatggccaccttcacatggccgaccgccaccggctccctgccacccggcatctagaggcgggacggccagaaagaccccagccgcagcacaa

SEQ ID NO: 27482 - DNA, 122 bp, Homo sapiens
aatgtcagatctttcaaggactggatcctaggggttagaggtagagtcagaattaatttgcgtggaggctgagagggccagactaatgaccagcttatgggttctgaggcccacagctagag

SEQ ID NO: 27483 - DNA, 122 bp, Homo sapiens
gtttacacttgacactacaaggaacatttatttcagacatgtggctacatcaattaaatgcgatgtgtattcacaacattagtcactccacacagcagctcattagaatgcatgtgccttgc

SEQ ID NO: 27484 - DNA, 122 bp, Homo sapiens
cccgcagggccggcagttggaaaatgtcctatcaaaggccagagcaggggctgcccctgccgtgcccacctccccgcccactctggcgacacgattggagagggtcaccgtgctcaggaggg

SEQ ID NO: 27485 - DNA, 122 bp, Homo sapiens
agataaaatcttcttgatgttattaatcctacggattaatacgaaagtgcaggaaattatcgggtcatggaagagtcacagaaagtgcaggaaattatggggtatattttaataaaattact

SEQ ID NO: 27486 - DNA, 122 bp, Homo sapiens
attgtttttgccgctgcaaagccgctttgggtgtgtgaagacctggtccatgtgaggagacgcgtcggtcccggagcaattgaaatctcatccccatcctgagcggcctcttttttaggatc

SEQ ID NO: 27487 - DNA, 122 bp, Homo sapiens
gaagaaagtgaagttagatgcccacatgtgacttggcatccagaggcacattccagatggcgacccggggctccctggtgtggtctgggggccggtgggggccgaggggctgctgtgggtct

SEQ ID NO: 27488 - DNA, 122 bp, Homo sapiens
aaagaaatttgcccactattatgcagccagcaagtagacagtcagggttcaaatccaagccgtcggttgcagagtttctgttcttaaccgctgtcccatacagcagcatcagagtcacagca

SEQ ID NO: 27489 - DNA, 122 bp, Homo sapiens
aagacctggtctgtgctcccttctccaagtgcaaggctctcaccaaggttttggcagaaacgctcgaactctaaccgtgagcactgggacagcgtgtgcctctccacagtgctttcctctct

SEQ ID NO: 27490 - DNA, 122 bp, Homo sapiens
gtcgccccccactcagtcccgaatctgagtgttacataaagtaccgggtagtactccgctcggggtaggtcggccgcccccgcccagccccctccggccctcacttggagctggacaccgag

SEQ ID NO: 27491 - DNA, 122 bp, Homo sapiens
tgacctcgtgatccgcccacctcggcctcccaaagtgctgggattacaggcatgagccaccgcacctggccataaatggggcagctttaaggtaacggtccagtgtgccctgacctcccact

SEQ ID NO: 27492 - DNA, 122 bp, Homo sapiens
gtctttttgtgactgtaagtgcagagagagcccacgcaaaccgcaggacaccagagccgccgccctgcccctccaagctgctggcactcgggctcaccctctctggaggagccatcattctg

SEQ ID NO: 27493 - DNA, 122 bp, Homo sapiens
aatgggcccgcctacttctgcctcgcggcgtcccaggcagatagctggttattcaggtttcgttggaagaaatacgttctcgtccccctgaaaggcccagtccagtcaggtgatggactcct

SEQ ID NO: 27494 - DNA, 122 bp, Homo sapiens
ttggcaagggcgcagaaggcgagggcacgcaggcacagcggagagaattcctgggtcccccgacacggcttccggggcgtgggggagcagggcgaccctcgcggggacgccggcactgccag

SEQ ID NO: 27495 - DNA, 122 bp, Homo sapiens
aggacttgctttaggaatctagtaatacagtcagcactgtatgtatttgagtttgtctcccgtatgttccggaattctggagttttgacattgtgaagcaacaatttaattttattgattca

SEQ ID NO: 27496 - DNA, 122 bp, Homo sapiens
gttttaagaaagtttacaaatttgtgttgtgccgcattcaaagctgtcctgtgctgcatgcgggcctcaggccatgggttggacaagcttgatctagatctacatagcctggagaggtggct

SEQ ID NO: 27497 - DNA, 122 bp, Homo sapiens
ccacacaggcctctccctcggtgcggtagcgagggttgcgggcccaaacgcccgcgcccacggaggcgcctgcgacgactagaagcttccacagccatatgggggcaaagacggcccagtag

SEQ ID NO: 27498 - DNA, 122 bp, Homo sapiens
tccccacgcttccagctaacaggtctagaaaaccagcttgtggctaacagtccctgtggccgtccctgtgaagatgacattagcattgcccccaacctcattttagttgcgtaagcatagcc

SEQ ID NO: 27499 - DNA, 122 bp, Homo sapiens
ggctctcgggtctcagtcttcgggtctgccgagtgggcgagtggggtgcctcactccctgcggtctcttcccggtccccacagaacatggagaaggcgactctgccgtcggtgacgctcatc

SEQ ID NO: 27500 - DNA, 122 bp, Homo sapiens
caagtaaaagtaaactaatattcactggccaactgtgactccgcatgagagatggaatatcgttagcttagccgttggcttatttatttagatacaggtttcactgttcccagctatttctg

SEQ ID NO: 27501 - DNA, 122 bp, Homo sapiens
gtgtatgaaactgaaagtaatagcttctgctgtgcaaaatgattagaggaatttgtgaagcgcttggcaacatactaggaccccagtaaataaatgcgggtggttaactttcctccaaatct

SEQ ID NO: 27502 - DNA, 122 bp, Homo sapiens
ctgggtagtacagataaaagcgtggaaatggcagatacttggagctgcataagtgaactgcgatggaacagaagacctcattttggacttggaacaaaaggaaagaggcaaggaatacaaaa

SEQ ID NO: 27503 - DNA, 122 bp, Homo sapiens
ttctgaacgaagtctgggttcgatggaaacccagacttcacaatacggagcttctcacaccgagaacatgtccgcccggctttcgattgatcattccccgttaggtggccgagccctgcggt

SEQ ID NO: 27504 - DNA, 122 bp, Homo sapiens
cagaagggaacaccgtcactaagcgacacaggactctgggtaggtgttctgacgttggggcgtatagacatgggcacacgccacattgacactcatctaaaaagcatgtgtctctgcacaca

SEQ ID NO: 27505 - DNA, 122 bp, Homo sapiens
acgcactgcccattggttggaaggcccttcgctctagctgggaggctgacggcccgcgggcgtaagcggactgcagccgcgagctcctggaggcggcgggatggaggcggcggccggtgagt

SEQ ID NO: 27506 - DNA, 122 bp, Homo sapiens
agcaagagagtgtggcatgaggacagccaggacagagccggcagtggatgctgagcagcccggacagatctccctttgggactgaaagacttttttcccttggctgctagctgacaaccctt

SEQ ID NO: 27507 - DNA, 122 bp, Homo sapiens
tctagatcagctgtgtccacaggggcactggcctcctcgtcacagtcccttccccgggcccgtcactggtgctgggcaccacacttaggcctggccgtcctctgcccaggagaaaaggggga

SEQ ID NO: 27508 - DNA, 122 bp, Homo sapiens
ctggcgtggcaggaaagcgcagactggacacaggggtcggagcctagggaaccatcgagtcgcagcggccggacccaccgggggtctcaacagctgaggactgtctgactattgcctcaatg

SEQ ID NO: 27509 - DNA, 122 bp, Homo sapiens
tttaccctgaccacagttgatgtggcccaccaggcccagcagctggcacccatagctgcccgtcgtgtttgctgtgagcaggcaggccctcctgcaggccttccactccatccaacagccaa

SEQ ID NO: 27510 - DNA, 122 bp, Homo sapiens
gcccattctctcccttaaaggagttatgtttattttcctgaactgtaatatttcccaggccggcgactggcctgggctaccgaacggccccttgggaaaagtagttcgagttcacttccagg

SEQ ID NO: 27511 - DNA, 122 bp, Homo sapiens
aattcgtgggcccgggaggaggccaggcgagcaccggctgcctggagcactgggctggagcgcggggagcgcggcggggggcgcgggcggggcggggctggtgcgcagagctgtccagcacc

SEQ ID NO: 27512 - DNA, 122 bp, Homo sapiens
tgtgatataaaggaaggacagttgcaaagccttggctctgacatccataacctgaggagacgatgccagcaaccgcctatatctagacttctcaggaggagagaaaagtaaagtctctgact

SEQ ID NO: 27513 - DNA, 122 bp, Homo sapiens
tggctgcggattgccgcgctgcccctagaggtcagtctgatccagggattgtctcgaatccgcgcagctctggacccgaaaggagaggctcagggagaggataatgcggttgccaagtgcca

SEQ ID NO: 27514 - DNA, 122 bp, Homo sapiens
gagttagaacactgggtctgagccctggagctcagccccttacatcagcaccctgttccacgtgggcctgctcaggagggctcaagaaatagaaaagtcagaggctgtggcaagaatgctga

SEQ ID NO: 27515 - DNA, 122 bp, Homo sapiens
cagagggtgggtgctgtggataaaggcagggagaggcaggggagacagcagtctcctctacgccacatggagacaccccgttagtaccgaaatccagggcgaagagaggaactttaaataga

SEQ ID NO: 27516 - DNA, 122 bp, Homo sapiens
gggtctacatctgcagacaacaggctcaggcagataaccaaggctatggagattgttccacggacttctggctcacatacttgccatgaagagagccccaatgcgggagctaggaggacact

SEQ ID NO: 27517 - DNA, 122 bp, Homo sapiens
gctggggtttcccagattcttcccagacgggcatcgctttcctctaggaatgacagtttccgccttggctcgcctcagaggtgcgcatcagagccagctcaggaagccactacctgtcacaa

SEQ ID NO: 27518 - DNA, 122 bp, Homo sapiens
accttacttagactcccagcgcacgtggagcagtctgccggtcggttgtctggctgcgcgcgccacccgggcctctccagtgccccgcctggctcggcatccacccccagcccgactcacac

SEQ ID NO: 27519 - DNA, 122 bp, Homo sapiens
ggcactgaccatgcggagccagcgccggaaaagatggcgattgtgcgctgacgtcacttccgctccgagcctcgggccgggcggggctcctgggttcgagtttcagccacataggacccagt

SEQ ID NO: 27520 - DNA, 122 bp, Homo sapiens
ggcgacggtcccgggcgccacctgcgcgtcggtgggaggctggtccacgcccgggtcccccgacgcccactgcaaagggcagtgggaatgacagactgtaaaccctctcgcctgcgtcccct

SEQ ID NO: 27521 - DNA, 122 bp, Homo sapiens
atgtggtaaaatcaatagtcagccctgggacttgtgtttgcaaaatgctttatccaggtgcgacaccgctgacgtcctggattccccaccctctagcacccagttccctctcctgtaatgag

SEQ ID NO: 27522 - DNA, 122 bp, Homo sapiens
ggctgggacgcaacaggcagcgacatcttcaaccttctaccagaagagcctcaggtccaccgcactgactgcggcaaccccggccctgtgggttgaaagggcagagggtgtctgaggcctta

SEQ ID NO: 27523 - DNA, 122 bp, Homo sapiens
ccagcagcgggaccgtgaactggatctttcgggggctgttgtcttgctccatggctggggcggcggccggtgggcccgcgctgcggcgggagggaaggcggcgggactcggggctggggcgg

SEQ ID NO: 27524 - DNA, 122 bp, Homo sapiens
gagggcagcagagtgatgtgaccagggcggtggtggttcctcccacaggcctccccagcccggctgccccgccttcatcatcgtcaagctgagcccgctgcgggaccgcctcgtggtgacgg

SEQ ID NO: 27525 - DNA, 122 bp, Homo sapiens
ccatctacgaaacatgtcatcaggactgtcctttaatagtcttcctcctctctgcagctgcgggaaagaggactggccaagaatttcaggtggggtcagtgtgactgcagggtcaccgcaac

SEQ ID NO: 27526 - DNA, 122 bp, Homo sapiens
cgggggatctcgactccctctcggagacggagaggaggaggcccgctccgtgctccccggcgctcctgccttgcctgcttttccgctcacccggcccctggggtccggaagggttgccctgg

SEQ ID NO: 27527 - DNA, 122 bp, Homo sapiens
cacccttttcctggccccctaatggggcctgggccctttcccaacccctcctaggatgtgcgggcagtgtgctggcgcctcacagccagccgggctgcccattcacgcagagctctctgagc

SEQ ID NO: 27528 - DNA, 122 bp, Homo sapiens
ggagaaggggagcaaatatctgtctactccctcaactccacccagccatggcttgtcccacggccaagttgcctgggtccttgggatcaccaacttcttctgactctctacacacacacccc

SEQ ID NO: 27529 - DNA, 122 bp, Homo sapiens
tgatttattaccctacatgcttccatgtcaattttcctccacaatgagtacatattcctacgctacttacaaagtaaaaaaacttaatgattaaccaacttataatacgatatccataaagc

SEQ ID NO: 27530 - DNA, 122 bp, Homo sapiens
tgctagggacgcggaacagtgtattagagactgaaaaacaggccgggatcggtggctctacgcctgtaatcccagcactttgggaggctgaggcgggtggatcacctgaggtcgggagttcg

SEQ ID NO: 27531 - DNA, 122 bp, Homo sapiens
gaaccccgaacaccgctggggaacgcgtgcgagcaccccagggctggtttgagaggatggcgaggacccaacttggaggccggctgaaaagcatctccttcacttcctccctccctctccca

SEQ ID NO: 27532 - DNA, 122 bp, Homo sapiens
gggagggtaaggcccggcagcttgggaggcaggtggcgcaggtggggtcccggccgaggtcgcggcgctgaccctttgtctctcgtcgccgcagtcccggcaccagaagcgcgcccgcgccc

SEQ ID NO: 27533 - DNA, 122 bp, Homo sapiens
atacaaaaaattagctgggtgtggcagcgagcacctgtagtgactacaccactttgttgacggccgtccggacctgcagctgtccgggccaggtggctgcccccgcctccccccggccgggg

SEQ ID NO: 27534 - DNA, 122 bp, Homo sapiens
agaaaattcatttctcgttacctactgttggattggaaagtgggggtggggatgagcgttcggagtgtgcacctgcgcttggtttatttattttttaaacgtacctggccttgtgtctggta

SEQ ID NO: 27535 - DNA, 122 bp, Homo sapiens
ggccaccgctacgcgaccctgagtgcaccttcaagaaggccgggcacgtttctgggcgggcgtggggggtgcctgatatctccgctctattttacagttactcccctgctggtgcctccctc

SEQ ID NO: 27536 - DNA, 122 bp, Homo sapiens
atatagccctccgtctatcccagttagcatggagggattttaggtaggtcatacagaaaccgggtaatgatggcaggtgtggaggaacagaatgtaccactgaatgggaggtccgggggaaa

SEQ ID NO: 27537 - DNA, 122 bp, Homo sapiens
tctagcgttgccggcccggtccagcatctgacagccgcgaatccaaagctgccggcctctcgtttctaagcagcagctcacagcgccagccgccctcccgcagaaggggaacaaagcccggc

SEQ ID NO: 27538 - DNA, 122 bp, Homo sapiens
cacccactaaatgctgagctctgctcaacgctcggaagaagcaggccctgccttatcatgcgcacactctaggggaaaacaagtaacagcgagtaaacaaaggaacagacgacatcagggta

SEQ ID NO: 27539 - DNA, 122 bp, Homo sapiens
ttgtaccagcccaggggtgaagaagcccccggcctgagaaagaaggaggagtgggggaggcgaacagtctcgttgctgcctctgtgtacgctgaggggggaggtaagttataaaatggcgga

SEQ ID NO: 27540 - DNA, 122 bp, Homo sapiens
ttccccgtggccgtcatctgcctcttcctcaacactttcgtgccgggactgggtaagacacggctgccgcgacccttgcgacccccaccccgccgcgggagggcgtggggggagagaagggc

SEQ ID NO: 27541 - DNA, 122 bp, Homo sapiens
gaggtaggctggggctgtaggacaggggaggccagcagccccaccttccttctggagagacgctgcctgtctgtcattgcccctctcctgcacctggccgctggctggctgctcttccctcc

SEQ ID NO: 27542 - DNA, 122 bp, Homo sapiens
cggcccgcgcctgtcgggctgaactgaggtgaggcacgggtcctgtcatggatcccggggcgaggggcggatgaggcggggcatgacagtagcgtcgcgagggcaggaagaggttaaagacc

SEQ ID NO: 27543 - DNA, 122 bp, Homo sapiens
gtttcagaacacttccaggtggagcctggctctgagcaattcagtttgccagcaggagctcgactgccactccgtcgtcagcctttagtattcctgccactgtccatccttgtctgctgtcc

SEQ ID NO: 27544 - DNA, 122 bp, Homo sapiens
agctgagcctgtccggcagtgcggcggatgtacggatgattcagtggctggcaggaagcccgccctgcccgcccgccagtgtcagtggtgttggcatcagcttgggcaggtgtgcgggctca

SEQ ID NO: 27545 - DNA, 122 bp, Homo sapiens
ggcccgtcctgattggacagttctttcgggttctggccactaggaagctttgtttaggtccggaaggcgggctttcctgggagtgggtggggagggggcgttgattcttgaccaatcctttc

SEQ ID NO: 27546 - DNA, 122 bp, Homo sapiens
aatcttacaagtatgatattgtctttgtcaatacctcatttgtaaaacagacccattagtcgtgaatttccagctctttcaaaaataaatgtttatgtgagaaaataattctctaagtcctc

SEQ ID NO: 27547 - DNA, 122 bp, Homo sapiens
gccatggtgcaggttgaacggggacattgggtcaccgggatgggtggaattagggtagggcgagtgaggcactggcttctggcacagaatttaaggagacaccccaaaatttagtaatcagg

SEQ ID NO: 27548 - DNA, 122 bp, Homo sapiens
ctgtgttaccctggtgtgcccccctcacctgcagcaggccaggttggggcatagggttgccggcccctaccagccctgggggtctggagggcggctggggaagcagaccccctgtccttccc

SEQ ID NO: 27549 - DNA, 122 bp, Homo sapiens
ctgcccaccagacttggaacacattaagcagtgaattctcgctgggatgctaatcctcagcgggacacagcaccttctagtaaacatgactacatgggttgctggctgggtgtgggctcctg

SEQ ID NO: 27550 - DNA, 122 bp, Homo sapiens
aaaaacggagaggaaaagccacacacagaaatggagtccttggccgggagcggtggttcacgcctgtaatcccagcactttgggaggccgaggtgagtggatcacctgaggtaaggagttcg

SEQ ID NO: 27551 - DNA, 122 bp, Homo sapiens
gctagagcgacaagttagacaagagtcactgaagacctagtggagtttagaaaccatcatcgtgtagtggtgtccagctataatctgctataatctggcaaggtatctacagaaatatagct

SEQ ID NO: 27552 - DNA, 122 bp, Homo sapiens
tatactaaaaatacaaaatcagccgggcatggtggcccatgcctgtaaacccacctactccggaggctgaggcaggagaatcattttaaccaaggaggcagaggttgcagtgagctaagatc

SEQ ID NO: 27553 - DNA, 122 bp, Homo sapiens
gttcccacacacggaattccctcacagggctgggacttccttcctcataccttcactgagcgaacccaatgctcagtggcctttctggtcacctccttttcctctctgggaggagccactcc

SEQ ID NO: 27554 - DNA, 122 bp, Homo sapiens
tccacggcagccccagggtttctttttcaccccaggactctggtttaggaaagacctttgcggaagccagttggtagctggaggagttctagtcaaatctgttgccttggtcttcctgtgga

SEQ ID NO: 27555 - DNA, 122 bp, Homo sapiens
cagcagagtccagaggagactcccagtccagcgccctgctctctctctcagagccatgcccgtcccagtgctgagcgcaggcaccccagggacagcccagagcccttgggacccgagcaggc

SEQ ID NO: 27556 - DNA, 122 bp, Homo sapiens
agacacattcgcacactcacacacgtgaatatagtacatgcacacacacgcatacacactcgtgtgcccagacccacagacacacacattcgcacactcacacatgcgaatatagtactcgc

SEQ ID NO: 27557 - DNA, 122 bp, Homo sapiens
ggagggagagggtgaggcagagaataaataaccctgaccagggaggtccaagggagtaggcggagacagagaggctgtatttcagtgcagcctgccagacctcttctggaggaagactggac

SEQ ID NO: 27558 - DNA, 122 bp, Homo sapiens
tgccgctgtgattccatccatcttgaatttgacgtcatcccacaccagggatgaggtcatcgcaggcatcgctcgtcacgtgcgcggcactctgattgggcgccgggcgccggagggcgggg

SEQ ID NO: 27559 - DNA, 122 bp, Homo sapiens
agttggctctggcgcccgggtacccgccagtgccggctgccgatgaccgattcacgctcccggtactggggccccctctgcccagccacccctacccagagcacccgggctgcgcggccccg

SEQ ID NO: 27560 - DNA, 122 bp, Homo sapiens
aggtgcctccatctcgctggaaacataggaagcccgactcaaacgctctatgcctatggtcgtttcatgggaaagcaaaattaagggcaacattgaggaagctcattaatatttagtttaga

SEQ ID NO: 27561 - DNA, 122 bp, Homo sapiens
ctagacctcagggctactgttggcaggccactcagtagtagatctaagacctcttgcctacggcacgaagagaatgattatgagctgaagacatcccagctagctcatgaaagactaaagaa

SEQ ID NO: 27562 - DNA, 122 bp, Homo sapiens
gtgtttaaggctgtagtctgcagggacgggaggaaaaaggctcaatgagatgttggcacgcgttgtctttaacttcagcacttgatgatatgagtagtcgcattgatgatctggaaaagaat

SEQ ID NO: 27563 - DNA, 122 bp, Homo sapiens
ttttgtttgggcctgggtggcactttgaggatcagaatttggggcatcgtcttctgcctgcgtcctgagcctatgctcccagccgcctgctttaaatagcctcttcctgttcactgttctta

SEQ ID NO: 27564 - DNA, 122 bp, Homo sapiens
tcagagaagagctgaggctcagcctgtcctgccctctggattaattgccctggttgatcacgtttccttgggttctggatctgctcctccagcccccatattttggaaacaagtgtcattta

SEQ ID NO: 27565 - DNA, 122 bp, Homo sapiens
actcctgccctggaaattatgtcaccactactcacgagggagacaaaagaaacttgtgttcggagcccagaatcccagtgaggttgccaaacaactgcagaaacaagaagagaatgacaagg

SEQ ID NO: 27566 - DNA, 122 bp, Homo sapiens
gcattgagcagcgtccgcagcaccgaaacccatgtggagcgcgtgctgagcctgcagttccgagaccagagcctcaagcgctctcttgtgcacctgcacttccccacttggcctgagttgtg

SEQ ID NO: 27567 - DNA, 122 bp, Homo sapiens
tgggctactaatacttctctcagcagttgatcaaatacaatagaccatgtaagctggggccgctcatccacttccagtttgctggtctccctgctagaaaacacattgtactgtgctttttc

SEQ ID NO: 27568 - DNA, 122 bp, Homo sapiens
tataataacctgctctcatgataactgagactgcattaaacccttcatgactgcattaatcgcttcatgatccaaatgccttttaaaagtcccaccttttagcaccattacattggcaatta

SEQ ID NO: 27569 - DNA, 122 bp, Homo sapiens
attggtctggtggtggggatgcctcggagtttcccaggctgacgtcagggttatacctctcggaggttctagggcagggaagtggggaggggaggttccctgagatctctgtctttgagttt

SEQ ID NO: 27570 - DNA, 122 bp, Homo sapiens
tctgtacccgccgcctcccaggcccgggacagctgccgggattgagggtctgcacaatggcgagcctgtccggaggggcgcgccgcggccagacagccatgctctgtgcggtgtggacagag

SEQ ID NO: 27571 - DNA, 122 bp, Homo sapiens
agaggtttcaggagctgctagtaaccttgcagggggttccctaagcccatcccaggaaaacgagttaactcggctctgctaactccgaagcttccagcaatgaattaaatcccgagctgcag

SEQ ID NO: 27572 - DNA, 122 bp, Homo sapiens
gccaggcgtggtgacgcatgcctgtaatcccagctacgaggtaggctgaggcaggagaatcgcttgaaactgggaggtggaggttgcctgagccgagatcatgccattgcactccagcctgg

SEQ ID NO: 27573 - DNA, 122 bp, Homo sapiens
tgggcttttagcagcccacaggtgatcctaacatatcaggccatggactcaggacctgcccggtgatgctgttgatttctcaaaggtcttccaaaactcaacagagccagaagtagccgccc

SEQ ID NO: 27574 - DNA, 122 bp, Homo sapiens
taacgtcagttgtcagtttggaagtgaccttcagccatgcaatatgaagtcagagacattcgagccatacacagtgcacatcatcccagggtcctatgctaattaaatctgttcaggggact

SEQ ID NO: 27575 - DNA, 122 bp, Homo sapiens
agaagaagcgaaaatgggcggttagcagcagggacccggagccggaggagccgagagcagcgcgtgcgccgagctctactgcctcgcgggaaggcggaagggtggggagggcggcgctcggg

SEQ ID NO: 27576 - DNA, 122 bp, Homo sapiens
tcagaatgccactcccacccttcctcacccacccctttcccgggtccttcctaccacttccggaaccccagactcactgcagggccaggggggccagacggaccttcattccccttcaaacc

SEQ ID NO: 27577 - DNA, 122 bp, Homo sapiens
agcaatgacctttgtaaagtattgcctgggaaggaccataaggaagcccttctggggtgtcgataatatccagcccccacccaccccctgcagcctcgactgcagtgaactatgctcaaagg

SEQ ID NO: 27578 - DNA, 122 bp, Homo sapiens
taattccagagaaaaatggagagtaaaatccaagatggcggcgcgggccgcagcaccgctcgctccctccgctgacgggaaaaatgagtccccgcagcgtccgagccccccgcccccaaccg

SEQ ID NO: 27579 - DNA, 122 bp, Homo sapiens
ctgccccaagtctgcgacgggcctggaccgcgcagggcaggagccccagctcctccagggcgagccacatctggctttgtgcctcgctgtcaggccctggtgtactccagggtgggagggag

SEQ ID NO: 27580 - DNA, 122 bp, Homo sapiens
ctctcagtcactgggagacgaaagtgctgctggttagcacagaagaaactgctgctgctgcggcttctactgttgtctgccatctctgttaccatcgagaccggggctgtgtatgctcgagg

SEQ ID NO: 27581 - DNA, 122 bp, Homo sapiens
cccttcggagccctctttggtctccctgcctcccctggctccgcacatctcccagtcccccgctggctcagaatcctcccgtatgctgcacgcttctgagcactcccgccccctcccgcacc

SEQ ID NO: 27582 - DNA, 122 bp, Homo sapiens
tatgttgaataaaagaaataagctgtgtgctttttacattgcatatctgtattctacatgcgtttgggtactgttatttccccggagcagggaacagggatagaaatgatccaaaagcttta

SEQ ID NO: 27583 - DNA, 122 bp, Homo sapiens
gagtcatcgcatgaggtaagtctgtctcctctcctcacccataggctgcagccacaggtccgcacggaaaaccaggagctccaagactgccgcacactcaacatccaactcgcggggccgcg

SEQ ID NO: 27584 - DNA, 122 bp, Homo sapiens
cacgcggctcctcccgccttgcagtgggtgggcacacctgcctggaggtccatgcggaggcgcgggaaccgctgaggcgactcaggcccgggtgcggggatttgggtgtctctcggaggtcg

SEQ ID NO: 27585 - DNA, 122 bp, Homo sapiens
cttgaaagctttgggaaacccagcggtcttttgggggcaggtggcccaaaaagccttctgcgcgcccaggggacgaggaggatgcgcggaccgcgaccgcgatagttttgtttgcttttctc

SEQ ID NO: 27586 - DNA, 122 bp, Homo sapiens
tgccttttggatccaattctttattactttatggcttcagagtttcgtgaccaactatcccgccatggcagttctgtgacccgctcccgcctcatgagcaaggagagtggttcatcaatgat

SEQ ID NO: 27587 - DNA, 122 bp, Homo sapiens
cagggttgtcaatgggcataccccaaacacctcacccagaaatgccctaaggccccagcccggaaatggacctctgctgccctctaatggtggaaaggcagcctctggagctacctgctggg

SEQ ID NO: 27588 - DNA, 122 bp, Homo sapiens
gcgttccagacacttaggagagcgactgacacagagcagggcttgactgattacatccctcgctcatttctcccggccccgtcaccttagttcatgcccaagttttcctcttgtcgaattca

SEQ ID NO: 27589 - DNA, 122 bp, Homo sapiens
agccgcaggtagtagtcggggctcccggaggccctgggcacttgcaccagaatcgccttgcgcctccggtccacccagtagctgagcttccccgctgcaggaggcggcaagtcggggccgcg

SEQ ID NO: 27590 - DNA, 122 bp, Homo sapiens
ctccaccgaagcctataaatagaccgtttcttaagccttcatatgcattctcataacaaccgaatctcaatgtacatagaccctctttcttgtttgtcagcatctgaccatctgtgactata

SEQ ID NO: 27591 - DNA, 122 bp, Homo sapiens
cgaggaggggctgtcagaggccatttatctctcgccagagtggaggctcagctcccacaccgcccgcgagtaacaatggcagcgatcagcagctctgcacgcgcttcagtgcatgaatggat

SEQ ID NO: 27592 - DNA, 122 bp, Homo sapiens
ccgggctcaccctaaatgggggccggcccctggctcctggtaaaatgatggctgaggcctcgggtccgtgagcctcgccatcgggaggggaccgcgagtgcgggcagagcggcccggggtcg

SEQ ID NO: 27593 - DNA, 122 bp, Homo sapiens
gcgccgggctgtgggcactgcaggaggcccctgtgcaggtggagatcgccgcggccctggcgggactccttgctggctcttgggcgcgctgatgcccatcatctccctgagtttctgagccc

SEQ ID NO: 27594 - DNA, 122 bp, Homo sapiens
aggaaaacgaatgcagtcactcttcctgtataagtaaccgcaacccgtgggaggagatgccggggacctgggccgcgctgccaggacctctgctgtgtctcgcccaccctgtgccctggcgc

SEQ ID NO: 27595 - DNA, 122 bp, Homo sapiens
cagtaaggcatttgatccacatgtatcccagaaggcttttattgttaaattatattctttcggaaaaaccacccatgtcctattttgtaaacttgatatccatacacttttgactggcattc

SEQ ID NO: 27596 - DNA, 122 bp, Homo sapiens
tcctcatccggagacacaaacacctgcctcaggattaaagcgaggagctgtatttcagaccgtctcaggagaaatagcaagaggctgcctcactcctttgcccttgtgagagctatttcttt

SEQ ID NO: 27597 - DNA, 122 bp, Homo sapiens
agggagagtggcgctgtggttgcgcgtctgtatgcacctgtgtgtgactgcgtgcttatgcgtacgtgtggctgttgtggttgtgtttgtgtgtgcaccacgtggtcgtacatctgtatgtg

SEQ ID NO: 27598 - DNA, 122 bp, Homo sapiens
tcggggtagggggagacggggtgattgcaaattattccaggacgagatccagttctccagcgggaaaggggcaaaggaacgccgcgcgttggaagggccagggacgcagctccccttgcagc

SEQ ID NO: 27599 - DNA, 122 bp, Homo sapiens
acaaatccacaaagtggacggtgcctccaagtagtcaccagaatgatcatccagtaggttcgtaccagtccgctactttgtggccatcaactgacattcaattcctgccttaaatttaacta

SEQ ID NO: 27600 - DNA, 122 bp, Homo sapiens
gtagctagtcaatcttcaggtaaatagccgagtccttttgcatgtgcagctatggcatttcggtgacagggcgtttctgtttcaaagtgtcaatgagggataagacccctcgttttacattg

SEQ ID NO: 27601 - DNA, 122 bp, Homo sapiens
gatttcacaaagtacatttgggcagatctttagttcttgggggggtggggctggaatctgcgggtgtgaccgccactctaggtctgtgctgtccagcaaagtagccattggccacatgtggc

SEQ ID NO: 27602 - DNA, 122 bp, Homo sapiens
taggaggtctgaagtatcagaagtccttgggccagttaagcctagcaaggtcctgggaggcgatctcagctgtccgctgcggtgggggtgggatgcctggtaaggacaccaagtccgtggtg

SEQ ID NO: 27603 - DNA, 122 bp, Homo sapiens
aactttgaaacaaatgctcccatggccagatgtcgcctctccggctcctgccagcacccgcgccccagtcctgccgagccattcagacttggtttaaagtgtcctttcagcatactttaaag

SEQ ID NO: 27604 - DNA, 122 bp, Homo sapiens
ctctcctggcttgtgctggagccaagcaggctatggctaccaatcagcgctcagaaaagacgcatgcgtcttcgaacgaacgcgacgtacggttaactttgacccaaagacaacctcttctc

SEQ ID NO: 27605 - DNA, 122 bp, Homo sapiens
tagaaattaccagaaaacctttcctgtttggtcttaacaaatctatcatagcccttaccacgtcgtatacaagtcactggtttatgtctccattaactttaagctcctttatatcaagatgc

SEQ ID NO: 27606 - DNA, 122 bp, Homo sapiens
cgagctcccagagactctctgggggtgcagggccctgggctggagggcttcttagtcccccgccaagttgggtcattaaaaaccacaggaaatcaaaaccaagcccgaaaagcttcaggcag

SEQ ID NO: 27607 - DNA, 122 bp, Homo sapiens
gtccccagcccggagaccctagggctccacagagtttccactagtgctgtgtgtgggtctcgaattggaaagcagtgcttgcgcccactgcattgcctccctgcaccaggacaatcaagggt

SEQ ID NO: 27608 - DNA, 122 bp, Homo sapiens
ctgaagattttaggtgagttttttcttttcttttttctttttctcttggagacagattctcgctctgtcacccaggctggagtacagcagtgtgatcctggctcactgcaacctctgcctcc

SEQ ID NO: 27609 - DNA, 122 bp, Homo sapiens
gttcattttgaaaggtaaattaacatgtctctccttagaattgatgtgactttttagtcacgtttgcccaagtgtagagtcgttctcaatttaaaacttgcaggatgcatttaagatatgca

SEQ ID NO: 27610 - DNA, 122 bp, Homo sapiens
atgcttcattttcactgattgatttctttttaatatcaacacaagttaatggaggcaaggcgcgctctgattgaagggctgcccccgcccttcgactcgggctggctgtgccgggggtcttt

SEQ ID NO: 27611 - DNA, 122 bp, Homo sapiens
agccaagtccccctccaaccccaaggtcctggcagcattggcctcaggcgtgggaggacccgtgtcctgggtggagagccttaaatcactttcactgtgtgggttcctttttctctaaattg

SEQ ID NO: 27612 - DNA, 122 bp, Homo sapiens
aagcattaaattgccaaaggacaaaaaattccaagcaaacacagaggcaggaaagcattgcgattgtaggattcaagcagaggaagaaaagcgaaatgtctggagcagcaggttgaggagac

SEQ ID NO: 27613 - DNA, 122 bp, Homo sapiens
ggcctctgcagcctaccttgggcgttggggctgcagtcctcggtgccggtcactcgccagcgggggtccccagcacatgagcaccatcccagcaatgtgcagacgtggcccgtgcacagtca

SEQ ID NO: 27614 - DNA, 122 bp, Homo sapiens
aaaatctagcccatcagtcttagattcttttttttttctttttcttttttgacagtctcacgctgtcacccaggctggagtgcagtggctcactgcaacctccgtctcctgggttcaagtga

SEQ ID NO: 27615 - DNA, 122 bp, Homo sapiens
ccacttgtgagccttcttcccccaccatcagcctttgctgaggatctgctgtaaaaggaccggcctattggtactgtgaaactgtggtcgaaggactgtgtgctctctggcactgccacctg

SEQ ID NO: 27616 - DNA, 122 bp, Homo sapiens
aacccagcgagtgggcccaggctccctgcagccacagaggctgcctggggtctggggatccgtggggcgggttactggggtcttgcttagacctccaggagtaaaatgagggcgataatgga

SEQ ID NO: 27617 - DNA, 122 bp, Homo sapiens
agcacttacgttaattattctattcataaaatctaggttgatccatctcatagcaaaatccgttagtataattttaccttcttctttttaaaaagccaacaaactataagtggtgcttctat

SEQ ID NO: 27618 - DNA, 122 bp, Homo sapiens
gctgtcgggacactggtgagcctgctctgtggggagtcccttttcagctcagtcagcaagcggctcttctctataaagaggcaggggatgaacctcctctctagttttagcagcagaggcca

SEQ ID NO: 27619 - DNA, 122 bp, Homo sapiens
catatgttcttatcacgcggctaggaagcggcagagccgggttcccacccaggtcttcctcgactccgaaaccacatggaggcggctctgcaaaagctgttaaacgcacaagccaacaaaga

SEQ ID NO: 27620 - DNA, 122 bp, Homo sapiens
ccatgcagtttcctcctcctcccagaagcgaggccctgccaggcacagctaccatgactacgatgaaccccctgaggagggcctgtggcctcatgatgagggtggcccaggccgccatgcct

SEQ ID NO: 27621 - DNA, 122 bp, Homo sapiens
tcccaaacgcctgctggcctcccaccgccttttgggattacaggcgtggcccaccgcgcccggcctaaattcttaatctgtttaatagggtgcagcaataacaagcacacccaaaatttgtt

SEQ ID NO: 27622 - DNA, 122 bp, Homo sapiens
gcgccaccttaagagctgtaacactcaccgcgaaagtctgcagcttcactcctgagccagcgagaccacgaacccgccagaaagaagaaactcggaacacatctgaacgtcagaaggagcaa

SEQ ID NO: 27623 - DNA, 122 bp, Homo sapiens
cgggagccgccaggcaggatcgggcccgcgggggcgggctgctggaggtcgcgaggtttgcggcgggagggaagaaacgtggggggcgccaggagtggagatattcagttacgggggacaca

SEQ ID NO: 27624 - DNA, 122 bp, Homo sapiens
ctcaagtgatcctcctgcctcagcctcccaaagtgttaggattacaagcatgagccgccacgcccagctgagggcagttaccttgactgtctagctcaccaagcaggatgcctgaggcatag

SEQ ID NO: 27625 - DNA, 122 bp, Homo sapiens
accctgagcaggttgcctgggagatgacctctttcgggtctctttgaatctccgctgtagcgtcacctggaaggcagatctaacagagaacctggactgtctcctatcatgattcccgggaa

SEQ ID NO: 27626 - DNA, 122 bp, Homo sapiens
gccatcacctcgcgggcgggctgacagctgaagccacagggcccccgctgccctcggcgtcgcaaagagagagctccccggcacccctgagactgggagaagccggccctccccggtctgcg

SEQ ID NO: 27627 - DNA, 122 bp, Homo sapiens
cgactgaagctggagcagagagggggtatgtttctgcaaaaccacatacaaaacggactacggaaatcttactaccgaggcttgcccaggcaggagagaaaggtgtagcatccctgaagtca

SEQ ID NO: 27628 - DNA, 122 bp, Homo sapiens
attgcagagtaacagtggaggctgctgagctttcattttaggagatacctggcttattctcgtagagccctacacttgcctaaagaggcaaggatgtaaaattatccgttactgttaactgt

SEQ ID NO: 27629 - DNA, 122 bp, Homo sapiens
ggggtcacacactttctgatcctgagcaaaacagagaccaatgtctactttgtgagtagacgccctcacccttcatctcccccagacccccccttcccctatctctcatgatgaacacatat

SEQ ID NO: 27630 - DNA, 122 bp, Homo sapiens
atggcatctccctatcttaggctggtctggaactcctggactcaagcgatccgttggtctcggccacccaaagtgctgggattacaggcatgagccaagccgcctagcccagaaggcaaacg

SEQ ID NO: 27631 - DNA, 122 bp, Homo sapiens
cacgagtagttgtaactactcatctcataaactacagccccctcctgatcacgagctagacgcccacatcaccactgcccctagttgcccgtggcaaagtaacacaatcactactttcccgt

SEQ ID NO: 27632 - DNA, 122 bp, Homo sapiens
tgcgtgcactcaaagtcttatggggcacagagggcatctgctcagtagctcacatgacctcgctgaaatgtggcttctctgtccccttggccaaacaactgcttctcctttgtgtccagaaa

SEQ ID NO: 27633 - DNA, 122 bp, Homo sapiens
aggagcttctttacaaatgaacctttgtctgccttgtctctggcctgggatcgacagactcgctgctccagccaggactgtggggaggaggggagtggaaggagacaaggctgcaaggactg

SEQ ID NO: 27634 - DNA, 122 bp, Homo sapiens
gatggggtttcaccatgttggcctggctggtctcaaactcctgacctcaactgatccactcgcctcagcctcacaaagtgcagggattagaggtgtgagccaccgcgcctggccgagaatca

SEQ ID NO: 27635 - DNA, 122 bp, Homo sapiens
gaaaccaaatggcccctgtgtgataaacacaaagccacccgcggctctgtgtggcagaagcgaaaagagcactggatgaccgtggagagatctgggctgcgttcccggcacagccacggctt

SEQ ID NO: 27636 - DNA, 122 bp, Homo sapiens
tgctaagcccctcattgcccggggccggcagggccggccggctgctctgagtgcagggcccgccaagcccacgcccacccggaactacagctggcctgcaagcgcctcgccgtagccccggt

SEQ ID NO: 27637 - DNA, 122 bp, Homo sapiens
tcgggcccctcctctcccggccaccctcctgggcactgctctgaacatcccccgcctccccgccctccatcgctctttatggcagtttcaaagctacagccgccactcgagcagctgcggcc

SEQ ID NO: 27638 - DNA, 122 bp, Homo sapiens
gaaatgcgaagccatccgagcacaagcgctccatgagggtgggccacctctcccgctcgtcgtcttccttaatcgtcggctgcaaattgtagcctgcagccgtatttcagctcgccttcggg

SEQ ID NO: 27639 - DNA, 122 bp, Homo sapiens
ggggcgctgcggggaaggcgatggccatgttcatctccagcatctgcagcaggtccactgcgggcacagggcggcgggcgcccggtgagggcctggaggacgcccgccccgccctgcgccgg

SEQ ID NO: 27640 - DNA, 122 bp, Homo sapiens
cttcccctctttgcatggcagaactcatctgtaagatcattgccaagaattgctagggcacggagtcagagcatcagaacatttgggccactcctcaaagggccaaaagataagaccaagtt

SEQ ID NO: 27641 - DNA, 122 bp, Homo sapiens
ggggcggagccccgcgggagcccgccccggggctctgggtctcctggcgccctgacccgccggccaccccgccgccgccccacgcgcctacctgcgcccacctgcgcccacgtcgcccacct

SEQ ID NO: 27642 - DNA, 122 bp, Homo sapiens
aaaattggctgtgacactctggtctgctttattgtctctgggcaggcccagtcctgtggccggttgaagaatcaggcaggagccagggctctgaggggaggcgcctgaggactgcagatctc

SEQ ID NO: 27643 - DNA, 122 bp, Homo sapiens
catcttttcatttgactgtgcctgtgagagggcgcagcacaacgcaagcacacagtgggacgacaataaaacttgtcatactatgcagggaggcacagtttagttcagagcattaggtgatc

SEQ ID NO: 27644 - DNA, 122 bp, Homo sapiens
acccgacgggggctggggagtcaacagagccaggtctgcacaggcacccatcacccaggccgtgcacggctgcatcctgggaggccccgtctctctcagtaaagcaatggaaatgtgactgg

SEQ ID NO: 27645 - DNA, 122 bp, Homo sapiens
aaatgtctccgaatcgccttgagagagaactaaagaaggtttgtttctagggttttgtgtcggtagaaggtgagaagagttctccgctaagataagcaaagaagaaacaccctcctccccag

SEQ ID NO: 27646 - DNA, 122 bp, Homo sapiens
tgaaatcaggttcataaggcaataaattcatgttttcacccacagccaagtctgtgggtacggcaggaccatgggccaaacatgggctgtgacagtgcacagccttggcagccctgggccca

SEQ ID NO: 27647 - DNA, 122 bp, Homo sapiens
ctaccagagccgggagagctgctcggagacgcctccggggtgcgggctggacatgagcagcggctgccggtcctgggactaggccccgccattttggatccgctgacaggtcagcgaagtct

SEQ ID NO: 27648 - DNA, 122 bp, Homo sapiens
ccatgtgaagagagccctgagatgggggctgtttgtccaaggaggctgtatacagtcctgcgggttggaagtaatctgggagaagggcctgcacgcacggaaggactcccagacatccgtgg

SEQ ID NO: 27649 - DNA, 122 bp, Homo sapiens
cttcctcccctccaaaggagctgaggctctccatctcctgcagggtagtgccctgctcctcggccaggcccaccaaggcccccaggcccagccaccctgcttctaggctcttggtccatcaa

SEQ ID NO: 27650 - DNA, 122 bp, Homo sapiens
cggctcccggaggtggtggcttcactttccaggactcaggggcagccacagcgacagccgcgggcagcagcctcaggagccggagctggaacggccgggggcggcggcagcggcggcgctga

SEQ ID NO: 27651 - DNA, 122 bp, Homo sapiens
ttccacccgctgcggcttttctgagcacctggaagcatcggggtgtgaagtcaaaccagacgtgggtgaggagagtgtggcttgccttccctgccgggcagaatttcctgaaactgggctaa

SEQ ID NO: 27652 - DNA, 122 bp, Homo sapiens
ggctcagtgcattcagtgatgatgcaactgtggctgagcgccaagccctccggcaggcaacgccggacaggcagccctccaaacccacagaggagcgcgacccctccccatgtctgcacccc

SEQ ID NO: 27653 - DNA, 122 bp, Homo sapiens
aagggtcgttgtacatttgtccaaacacatggaatgtacagcttcaagaatgagccctcacgtaaaccatgggctgtgggtgacactgatgtggcagtgcaggtccctcatgcacccctctg

SEQ ID NO: 27654 - DNA, 122 bp, Homo sapiens
gagaggctgcttgtggagggagctgtgtatgctaggagcacacggcagccacaggcttctcggctgtgctccaggcttcctggcccggcaggcagggctggctgcccttgtaggagccggaa

SEQ ID NO: 27655 - DNA, 122 bp, Homo sapiens
tgaggatattgctgagtcatggccaggcccaagcctgggaggggcgaggggctggacccccgccagtaccctgatcccaggtgcagaggctggagcccaggcctgtatgagtgccagggccg

SEQ ID NO: 27656 - DNA, 122 bp, Homo sapiens
tctcctccggcctccctggagattgggtctcctgatcagagaagcttgactggctacactcgccctttctcctgtgctggccttgctgagatgtgccctgggcagggtattgggcaggaagg

SEQ ID NO: 27657 - DNA, 122 bp, Homo sapiens
gccgcggactctaggccaatgacgggccaggacacgggcgatttctgcgggccagggcggcggaggtgggacttccgcttcgtcgcgtgacgtcatctccgtgagcaggattggccctggaa

SEQ ID NO: 27658 - DNA, 122 bp, Homo sapiens
aaacgtggtgtcatctgatgcatttggaccatatgctgccagactgcagaacgggggagccggggctcagggcccctgactgcatggtgcatgagtgatctcagcctagcgatgccgctggc

SEQ ID NO: 27659 - DNA, 122 bp, Homo sapiens
tcgttccgattataatttgagttctcaaacatttgaattacacagtctcttggttcactccgacaggtgtttaaacaggtgtgcgtaggtctttctacttcagctctcagagccggtcttgt

SEQ ID NO: 27660 - DNA, 122 bp, Homo sapiens
gcactgtggggtctcatgtaaagctgcgtcctgcctctctcaggtcacggagctgctggacgtctccatggagctgggctgtttcctggctggagcgctcgtctcctctcagggccccgtgg

SEQ ID NO: 27661 - DNA, 122 bp, Homo sapiens
gaggggcggggatcaagagattgcttattctaactactactgaagaaaattacaggagggcgcagtggctcacgcctgtaatgccagcactttgggaggccgaggcaggagaaacgcttgaa

SEQ ID NO: 27662 - DNA, 122 bp, Homo sapiens
ggcaccatgatcagtccttcagatccttacaacagtcctgcaacatagagataactgccccggcctagatgatggccaagtcatttgcattcttgggcctcagttttccatctgtaacataa

SEQ ID NO: 27663 - DNA, 122 bp, Homo sapiens
cggcctttgagtccgcttctgcgcagggccggggctggaggcggggcgaaggggcggggccgcaggcgaacgcaagtcccgcttcgctctcgggggcggactcagcggcggaagtggcgctg

SEQ ID NO: 27664 - DNA, 122 bp, Homo sapiens
ttgtccatgtaagagttctgcctaatatcaaggggtagagataggtcatgtgaattaggtcggagttagatgtatgtttgtaactattaacattagacctgagcaagtattggtttatgcaa

SEQ ID NO: 27665 - DNA, 122 bp, Homo sapiens
ctcgggaaggggcaaacgggtccaagcctcagcacacacccacagtggaggccacagcctcggagagccccgggcggactgttttctttgttaggacttagagttcccaaagtccttccagt

SEQ ID NO: 27666 - DNA, 122 bp, Homo sapiens
ggctctccctgcaggtctccccctcacataaagcccctttgaaacaagaaagagggtccccgggctacaaaactgaaagcacagcctccaggatgtgaaggggaatgatggtgctgtgttca

SEQ ID NO: 27667 - DNA, 122 bp, Homo sapiens
ctccagtgtcatgcaaaaccaagtgaatacttgcatgcattgggaagctgtggagttttacggaagagatgaatatacctgtctcaccaactggctctatctggcaacaacgggcaatcgtg

SEQ ID NO: 27668 - DNA, 122 bp, Homo sapiens
cctgcgtcttgcataggcgcttctggtaaaatcactcctttatctcagataatgagttggcgctggatcgctgcgtcctcaggtggggctcgaatcgtgacttttagagaaataggttttct

SEQ ID NO: 27669 - DNA, 122 bp, Homo sapiens
gtaatttacacttaaatcttagagatttaaggcgatgtgcagaaactacatcctttgctgcgttttctaccggtgttggctctttatccctaaaagatagttgctcttcaagtgttttaatt

SEQ ID NO: 27670 - DNA, 122 bp, Homo sapiens
atgaaagtttagcaaagtttaacttttagcataccccatgtcttcatgattactctcacccgcaactgacacatacttttggtattctgtctcccagtcactccagaccatgcaatcttggc

SEQ ID NO: 27671 - DNA, 122 bp, Homo sapiens
aatacaattttttaaatgttctaataattagtactttcttaacaccttccatcttgaaaccgttgtcatggttgctttactaactgaatgataatgtactagttcccgggcaactcttgaga

SEQ ID NO: 27672 - DNA, 122 bp, Homo sapiens
ggggacgcggaggggacccgttagggacgcggaggggcccgttggggatgcggtggggagcgggcgtggtgcattcgggactcggcgccaggacctctatctacttccccccaggtgcccgg

SEQ ID NO: 27673 - DNA, 122 bp, Homo sapiens
agagaacctaggatccatgcacaagctgggcaggtgctgccccacagcagtcaggactaccgcggctgagggcccatcctccccgggctctgcggccgtaagcccagggctcagccatggct

SEQ ID NO: 27674 - DNA, 122 bp, Homo sapiens
tgaagatgctgcacctttagccttgaggccaggagtttgagaccagttgggtcaacatggcgaaatcccgtctctactaaaaaatacaaaaattagctgggcgtggtggtgcctgcctgtaa

SEQ ID NO: 27675 - DNA, 122 bp, Homo sapiens
acggtgagcaccgcggggatgagtgagcgcaaccccaggtcgtagccccacacagagtcgcgatccaccaggcggaagaagcaggagatgttctgtgactggtagcctacgcgcacctccgc

SEQ ID NO: 27676 - DNA, 122 bp, Homo sapiens
agctcaagtgatcggcccacctcagcctcccaaagtgctgggattacaggagtgagctaccgcgcccggccagaattgtgggtatttctaaataatatttatgttgtgtaatgtactaaaca

SEQ ID NO: 27677 - DNA, 122 bp, Homo sapiens
cccagctgagccccgcggctccaccgcgcagaaggtgcgccggaggccctgccagtttcccgccctgcagggtactgagaaatcaacgatttgtaaaaagaacttccccatggaaaaaaatc

SEQ ID NO: 27678 - DNA, 122 bp, Homo sapiens
tttgaaaaaggccctccttcctgagcagaattaatggagctcaggtctggggagggtgagcgcactcttggcaggcagctgtcttgtgtgacttgtgctgcactcatctgtgaaacatgttg

SEQ ID NO: 27679 - DNA, 122 bp, Homo sapiens
gaatgtgctggcatcgctgggatgattttctcacactacatgaataatatctccagacgtcgcgaatatgagccacttgcagagttaaagtaggcatctctttgctgggaaatttatcaaat

SEQ ID NO: 27680 - DNA, 122 bp, Homo sapiens
ctaaaattttagtgagtgccttttacgggcggagcatcgagctggcagcgtgacgacacgcggccctatggagcttacattcatgcagtccacacactcttgcccgactatattccaggccc

SEQ ID NO: 27681 - DNA, 122 bp, Homo sapiens
ggatgtcggaagccaagggacgcagaggccggcgggtggcggcgatggagaggacagatccggctcccagaggaggtcgtgagcgcggggcctgcgccggccggaggagggacccggggggc

SEQ ID NO: 27682 - DNA, 122 bp, Homo sapiens
acgcttcaagaaatacagttgcaggatcccagaaagaataataacaaggctctgggctgtcgaccaccagttcacgtagttatagtttgattggataaggaaaaagtcagccattttcctca

SEQ ID NO: 27683 - DNA, 122 bp, Homo sapiens
cgaggttgggggtcttcacggtgttgtagaggttcttgggcgtcctggggggcatgctgtcgggaccgccgatccccggggtcagggagctgcttcgggcccggtccgggcgggtcccaggc

SEQ ID NO: 27684 - DNA, 122 bp, Homo sapiens
tcctaaaccaccacctgattcttctgcttccacttcatctcacgcactcgccaggagccccggcttcaatccagcgccccacatcatcattccactgaggaaacctcagatccatagccttt

SEQ ID NO: 27685 - DNA, 122 bp, Homo sapiens
atgggcttacagtgttcacatttcttatcttgtatcaactaaagtttaaccatagttggccgggcctgatggctcacacctgtaatcccaggacttacggaggccgagatgggcagatcacc

SEQ ID NO: 27686 - DNA, 122 bp, Homo sapiens
gctggcctggctgttactcattaacgctccccacggcggagactccggcgactccgtctgcgtttttattacttaatctggctgggtttggctgcagggaggctcgtggatttgctggccgg

SEQ ID NO: 27687 - DNA, 122 bp, Homo sapiens
ccgctccttgcgcacacgccaggcagcgccgccgcagccccacggcgcgcaggccacgcccgtgccacgcccactctcacgcccctcctggcggccccgccccgcgcccccgctgccgcccg

SEQ ID NO: 27688 - DNA, 122 bp, Homo sapiens
cccatcctgaatagttgtgatgttgttgcctggctgtgctgcaggttagcccacactaagcggtcccgggctgttgtgtgggcttgggcgtgtgaaaagagggagcagatttacggtgcggt

SEQ ID NO: 27689 - DNA, 122 bp, Homo sapiens
gactctagcaaggggtattttggcctgggtgtaggcagtccccactctccacttattagtcgctctctggcctgtggtcagaagcctccaagggactgtcccatgtgcagtgttgtcagcag

SEQ ID NO: 27690 - DNA, 122 bp, Homo sapiens
agaaggcggcagccgctgcactgaccctgtcccgacctcggcgccccggcctgcgcagggcgggaatcagcaccagctcgttctccggagccaccagttcgacctcaccacacagccccgga

SEQ ID NO: 27691 - DNA, 122 bp, Homo sapiens
ctgaagcgggtggagcaaagcagcgccatgagcgtttgtcgttgctgtgatctgtttcaacggagaatgggctgggacatgttgtagatttgcacgatttcacacacacacacacacacaca

SEQ ID NO: 27692 - DNA, 122 bp, Homo sapiens
tgcatcaaaaactgagtgctggaaaacacatctgagaatagggaggcaggactagataggcgttgatattctccgactctgtggtcagtgtgcatgcagaaggaagcagagccccatccctg

SEQ ID NO: 27693 - DNA, 122 bp, Homo sapiens
ggtcctggcacttctcgtggcacttgacaccgcactcggtgcagcgcatgccctgcctcgcgatgccccacagcagcccctcgcactcgtagcagtaggtgggcgtggtggccgtccacact

SEQ ID NO: 27694 - DNA, 122 bp, Homo sapiens
ctgggcctggtggacggaacttcggtgcgacgctaaagtgtgcgcccgggaggatgagtacgctacacccggaagtgtcttcagggagaggaagccggcggcctcactgctatgggccgcaa

SEQ ID NO: 27695 - DNA, 122 bp, Homo sapiens
tgagcatagagcacgccagctcctgctgcacagaaacctttctgactctctggaacaactcgctcccctcggaagtgactcacctgaacccgcacctgctctactacgttcaactcctctag

SEQ ID NO: 27696 - DNA, 122 bp, Homo sapiens
ctgcactgctattctggcagcactgtctgctcagtagtcctgagtgctgcacacataggacgtggcgctgctgaatggtaatccggaattcacaaaatgctgacggaggcagtaaactgata

SEQ ID NO: 27697 - DNA, 122 bp, Homo sapiens
gagctggccttgctggagctgagatcgtggggctgggctggctgtcggcatgtgccctggcgcaggcccaggtctcatcacgcaccctctgtccctgccattgttctgcaattagttaagag

SEQ ID NO: 27698 - DNA, 122 bp, Homo sapiens
gatcccgggctttcagttccctgcaactcctgttcaccaacactgcagagccacgtggcgcggcactgtgtggactgcgtgtgtccctaacgagacgagcacaatcccgtgagctgaacaga

SEQ ID NO: 27699 - DNA, 122 bp, Homo sapiens
aacaatgatcctccctgcaaaacccttaaaattgccccttgattccctagcagcaagaggcgagcccttattcgctgagctgaagcctcctcccccctcctccccattactctctgctctgg

SEQ ID NO: 27700 - DNA, 122 bp, Homo sapiens
gatatggaaatcccacccagatctattcaacactaagggtcaccctcttcctctatagtacgtgcaaggggtataagattaaaacaagtgtctttactggtgcttgaaaaataacatttttg

SEQ ID NO: 27701 - DNA, 122 bp, Homo sapiens
gacagagactgaaagagcatcctgggggagatggaattgtgacaaactaaaccagtgagccgaaattaaggctagccctgtggcatgactggctcttgtgcaagtgacattattatgtgaca

SEQ ID NO: 27702 - DNA, 122 bp, Homo sapiens
agctagctcgcctatctggttcctactgcctgcccgctccataaatggcaggcactctcccgacaggggatctttagagaggcagcctctgctgcttggcagagccctggtggaggcctccc

SEQ ID NO: 27703 - DNA, 122 bp, Homo sapiens
cacagattgtaattagaaggcccctttcaaatatttatacctcagacatctagttttatccggcagggagacgacttggatttgatgagatctgtcaacagctcatccccgtggcccggaat

SEQ ID NO: 27704 - DNA, 122 bp, Homo sapiens
gatcgcaaaccatgacaataggcagtcacccgaggtcaaataaaaacggagtgggtcccccgcgcgccgccgccccccgcgtccctggcggcctcccccgaggcccccggcggcctcacgag

SEQ ID NO: 27705 - DNA, 122 bp, Homo sapiens
aaataagggacccgaggctcagagaggtgaagtaactttccagacagcccagctcgtcagcggccagcatttgaagtcacactccagagcctgtttttaacataatagccgctgtgaccgca

SEQ ID NO: 27706 - DNA, 122 bp, Homo sapiens
gcctgggacactccatcttaagtccctgtgcctctgctgtgtgttactgagtgcctaggccgtgccagcctgtattcatctgtactatgacctgaagaggcagaggccatcactgttggtcc

SEQ ID NO: 27707 - DNA, 122 bp, Homo sapiens
ggagggttgatgcaagttatttcccggtggtgggaaccctgtgtgagaaggggctgtttgcgggcctgaggccatcccatcatctccagctccagcccctgaaccagcgcggcagctagtcc

SEQ ID NO: 27708 - DNA, 122 bp, Homo sapiens
tgacgttgtcttcctgtgacgttgtcttcctgtgacgttgtctgtagccagcaggagacacgacggcacggtggcgtgcccggcttcgggctgggtgtcctgggcgtccaggcaagtgaagg

SEQ ID NO: 27709 - DNA, 122 bp, Homo sapiens
cgaaacggctcctggcccagggccgtcgcagtgacaactcgagtggctttttgaacctggcggcgccaggaggacccgcgcggccccggcggacgcgagcggagcaggcaaggtctctctaa

SEQ ID NO: 27710 - DNA, 122 bp, Homo sapiens
tcagcgatacgcagaatgccttccttcctgcaagtccagaggatactggaacctgcctctcgttctcatctcccccgccccccagcagaagctggctcggctgtggaggcctggccagacta

SEQ ID NO: 27711 - DNA, 122 bp, Homo sapiens
tgctcatactgaggcttgtaaggtctacaccaggtgccaacagagcttcagatatgaggacggcaatggtgagtgctctcccatgtcaggactgggtacaggggcaggggaggcgcctggtg

SEQ ID NO: 27712 - DNA, 122 bp, Homo sapiens
ttgcatgactggcggaagggtcagacacacaggtccccgctggcaacacaattcaggtctcgcgtgaggaggcggaagaggttgaaggtgacagaggcctcgaggcagccaggggactcctg

SEQ ID NO: 27713 - DNA, 122 bp, Homo sapiens
gcgattagtgtactgatggtgctgggattatagttcagggatagaccgtgcagtggttaacgctaaggccctggctcgagtctttgattggtcattggttgctctgtgaacttcggcagttt

SEQ ID NO: 27714 - DNA, 122 bp, Homo sapiens
caggagcagaatggcgtcataattcatttactctataagtcagagagaaaaatgatggcacgaactgcaagggatttgtgtgtaaaatttgtgacagtaagaaaaagaaactggaagggaat

SEQ ID NO: 27715 - DNA, 122 bp, Homo sapiens
ttgcagggtgtgattatcaacatggagtttttaaaaaggaagcctgagtggccaacctatcggagtctgttcatccagatctacctaaggatggaatcagaatattctggcctctggaaagg

SEQ ID NO: 27716 - DNA, 122 bp, Homo sapiens
ggctcacaagcccaggctgagtctcagctgcccaggtttttgtgtctgactttccaaggacgtttctcatttctgcaggggcataaccagtccccaggcccagcccttccccagaaatccct

SEQ ID NO: 27717 - DNA, 122 bp, Homo sapiens
gcattcaagtcactctgctttttcatgcgaaagactgtggttctgaaaatctgggccaggcgtgatggcttacacctgtaatgccagtactttgggaggccaaggcgagtagatcacctgag

SEQ ID NO: 27718 - DNA, 122 bp, Homo sapiens
ctcctcagccctcgggtggtcgatgggactgggcaccgtggagcagggggtggtgctcgtcggggaggctcaggccgcacaggagcccatggagtgggtgggaagctcaggcatggcgggct

SEQ ID NO: 27719 - DNA, 122 bp, Homo sapiens
taaacattgagtacatatagacacagagaacggaacaatagatactggggactgcttgatcgtgggagggtgaggagagggcataggttggaaggctatctgtgggtactatgctcactatc

SEQ ID NO: 27720 - DNA, 122 bp, Homo sapiens
ataggtctgtggtttgcagcttcttggggtcctgagagaacaggcccctcccccttttcacgacagtgtgtgcatatgcacactcacttctgtatccagtttcagaggttctcagatctgag

SEQ ID NO: 27721 - DNA, 122 bp, Homo sapiens
gagggagagcacccaggcccggggtgaagctgtcacctggagcctggccagctttctggacggcaccactggcttccttaggaaggatcctcctcccttatggggtggagcctggtttctgg

SEQ ID NO: 27722 - DNA, 122 bp, Homo sapiens
gtcagggccgggaccttgtctggctcgtggctgctcccacgacgactggcgtggcaggcacgtggtcagtgttccgccatcgactgactgggcggatgaatgatacataaatgaattcgcga

SEQ ID NO: 27723 - DNA, 122 bp, Homo sapiens
caggaggacacctccatgccagaggtgactcatcttacctcccagaggaaggactggggccggtcccttggccttgccaggacagcctccacaacgagcagctggtatggttacagggctcc

SEQ ID NO: 27724 - DNA, 122 bp, Homo sapiens
agctttccacacaactcaagaaacccagccttggggctctgtactccccaggctgacatacggcgacctcgtgtttcggctttgctttcgcaatgcacggctgtgcgctcgggcctggctct

SEQ ID NO: 27725 - DNA, 122 bp, Homo sapiens
agaaatgcagggaagaaagtaatttctctccacccctcctagttcccagggggaagcgttcgctttgggtccttctttggctattacatttctgtatgtattttgtttttctacagtggggt

SEQ ID NO: 27726 - DNA, 122 bp, Homo sapiens
caggcgcctgcctcccgctgccagccccgccccgccccggcaggcgcgggccaatcaccgcgcagctcaccgcccacgccgccgccacccggcccggcaggcaagtcccagtgggccccaga

SEQ ID NO: 27727 - DNA, 122 bp, Homo sapiens
gcccatctcacccagctcccaacaaatgctaaattggctggtgtgaccacacagacttcccgatgaaacccaagatgcaaacgggttaacctttaaaaacaataccgggctttcttaaacgc

SEQ ID NO: 27728 - DNA, 122 bp, Homo sapiens
ggctgtgtccagtctatctgcacatggcctttctgcgttcccattatgcatttgcaagcccgactggtccttaaacggcactgctgctcaccatttgttcttctttccacttgccagcaact

SEQ ID NO: 27729 - DNA, 122 bp, Homo sapiens
cttcggtttcgcgaacttcctggccgcggagctttcccttctacttaatgcttgctagctcggccgcaccgctccccgccccccgcccccgcccccgcccccgcccccgggatcgggcctct

SEQ ID NO: 27730 - DNA, 122 bp, Homo sapiens
agcgcttgtacacgtacttgtagaagagcagccgcttgtcggccatccaggcgaataccacgcacaccgggaagaagaccagggtcagcagcgcctcccacacctgcgggcggcgggcgtca

SEQ ID NO: 27731 - DNA, 122 bp, Homo sapiens
tgagaaggcaggctgtaaccagcctctactccagaagcaaatctgcctgtgtgttctgagcgttgagcataattgtaaacagctgaaaataatgaaaatgcatagaacccctaccctgaaac

SEQ ID NO: 27732 - DNA, 122 bp, Homo sapiens
gttcgcccgagtccgcgactagccggcctccggcctccccggtaggcggccttctgtctccgcagtgggttggcgctttggggccctctccaggcagggctgcacaccccacccttcctcca

SEQ ID NO: 27733 - DNA, 122 bp, Homo sapiens
aaaccactccaaaggttacgtagatcagtcttcggtgtcttggttaggtagtgacaatctcgttagctttataaaaagcctggataacattaaaagtattaaacacgccttcatcttaagct

SEQ ID NO: 27734 - DNA, 122 bp, Homo sapiens
gtgcaatttgtacatgtattgtaggcagttcacaaaacctcactttggtgtggatactaacgttgagtcatggttgattgtctaatcccaattagttgaagtgtgcaaacagattttctgta

SEQ ID NO: 27735 - DNA, 122 bp, Homo sapiens
atggcctcaatgagaagatgacctctgagcagacacctgaaggaagtgaaggcctgggctcgaggatacctggaggaaagcgcaagggccctgaggcagaagcatccttgttaagctaaagg

SEQ ID NO: 27736 - DNA, 122 bp, Homo sapiens
gtgttggcttttggcagcttttacaaatagtggtatgatgagaaacacatggccgaccagcgcttggtgaatggttatgagggttttgctgccccctagagaaccagaaggccaggctgtcc

SEQ ID NO: 27737 - DNA, 122 bp, Homo sapiens
acgtaaaggacgaagattaatgtgcaattcctatgactgagagacgccgaggccccaaaccgggccagaatacaaaagtctgcaggaagctcaattgagatataggtgttttctccaatcaa

SEQ ID NO: 27738 - DNA, 122 bp, Homo sapiens
gagggcagctgtcgcggggtgtggaggacgtgcttcagactccgcctgtggacgtttagtcgcttccgtgtgggctggggcgacgcccctgttcctctgcaaggagctgtttcttcttgccg

SEQ ID NO: 27739 - DNA, 122 bp, Homo sapiens
cttaccacataggtgagctccttcctcagtttcactaaaattatcccttcctgtgagaatcgcagaatttatggatggtttcagggggacatggaaggtatatctcattttgctccatagcc

SEQ ID NO: 27740 - DNA, 122 bp, Homo sapiens
gccgcgcccgccccggcgagccccttaccggtgaggcggccgcccccctcgccgtgcccgcggcgccgctgcaggatgaagtagcagctgctcttctgggtcacccagagcttcagcgcgtt

SEQ ID NO: 27741 - DNA, 122 bp, Homo sapiens
agctccacctcctgggttcatgccattctcctgcctcagcctcccgagtagctgggactacgggtgcccgccaccacgcccagctaatttttttgtagtttttagtagagacggggtttcac

SEQ ID NO: 27742 - DNA, 122 bp, Homo sapiens
ctgctaggtgcctgcttgggctgccccctcatctggaaggggtgctaagtgccaggacagcgccccaggtccggggcactcatgagtgacagcatcctccaggtgtggactacagggtagtc

SEQ ID NO: 27743 - DNA, 122 bp, Homo sapiens
ctctaccattacctcactgtgtggcttgggcaccttactccaggtcttagtttccccaagcgtcaagtgaagaagctggacatgggtgacctccataaaactttccagctccgacaccctga

SEQ ID NO: 27744 - DNA, 122 bp, Homo sapiens
ttgatcagctgggcatcccgaggcgctgtttccaggactgggtcgatcagaacggcctcccgggactctctgtcacccagcaggtacgtgaaggtgcagctcacaggctcgaacatctggga

SEQ ID NO: 27745 - DNA, 122 bp, Homo sapiens
agttgttgaatgaatacatttttttaaaagccatggagtttccttttcctttcaaataaacgacataagggtgtggggagtagaagggggaggtgagtaaatgacagggttcaagggacacc

SEQ ID NO: 27746 - DNA, 122 bp, Homo sapiens
cctgtggtgactgcctagcccagcactgtccagtatgaatgatgaatgtaatctgagtcacgaatgtgagccacttatatatttttaaattttctagtagtcacatttaaaaagtagaaaga

SEQ ID NO: 27747 - DNA, 122 bp, Homo sapiens
gcgaggaccgcttcggccctgtttccctctcttctggaccctcccgcggggccctctgcccgcctgttcgcacctgccccagcacccgcctctcgaggggctctggccccgaccctgcgcct

SEQ ID NO: 27748 - DNA, 122 bp, Homo sapiens
aggcttttccggaaatcgccaccggaggatagaacgctcctagggtgaggggcggggcctcgacaggaaatacctgaaagagtcccctctgagtgggctgcttggcgcccagcccgaggaat

SEQ ID NO: 27749 - DNA, 122 bp, Homo sapiens
gataagattctgaagactgagaaactaggccagagttagcctagttacgccatttgcaagcgcataatggggttgaacctgcaagacacattctcccatcgagctgggtacccccaaagtta

SEQ ID NO: 27750 - DNA, 122 bp, Homo sapiens
gttcatctcactggggagtgccatacagtaggtacaggagagtgggtgcagcgcaccgtgcgcgagccgaatcagggtgaggcatcgccttacccgggaagcgcaaggggtcagggaattcc

SEQ ID NO: 27751 - DNA, 122 bp, Homo sapiens
gaatatgaaaatactcctgacaccagcggcaaaaaagccttggaagaccacttccacttccggtccgacttctagcacctcccctttgtaggctgttgatatggcgcatgctctgaataaac

SEQ ID NO: 27752 - DNA, 122 bp, Homo sapiens
gcactggctctccaccctccatccggccctggcgcccagtcgtcaggtgttcgagaggttcgtagcgtcacaagcgctctccctagaaagtgagtggcagtcaagcattataaacgtgtttc

SEQ ID NO: 27753 - DNA, 122 bp, Homo sapiens
gactgaacgagacttcatctaaaaaaaaaaaatagagaaaccctgagttagatagacctacgttcaaatcttaacttagcaaccacttcccagctgcgtgaccttgagtaagatgcttcacc

SEQ ID NO: 27754 - DNA, 122 bp, Homo sapiens
acctcgtgatccacccgcctcagactcccaaagtgctaggattacaggtgtgagccaccacgcccagccgttagtcttagaatcaggcctgggggcccagaaggtaaaggagatacatctaa

SEQ ID NO: 27755 - DNA, 122 bp, Homo sapiens
caagccctgtcggtagcaaagggcaagcaggggcctcccagcacagcagctggtgcccttcgccactgctcacccctccctgccccaacacctggccttggtggctgagggcgattgggagg

SEQ ID NO: 27756 - DNA, 122 bp, Homo sapiens
gggacgggcctgacatcgcgcatctcaggtcttctgtgcaggcagaatccacggcgaagacgtgccttgttcatcacctgtgcagagaacgaagaaagcaaccttcatgcttccctttctca

SEQ ID NO: 27757 - DNA, 122 bp, Homo sapiens
tcagggcctgaaggggcgggcccttaaaccgtatccaatcagacacgcagaactgggaaccgtccaattaggcacacatttggagcggcgaggacggcttccgggatgtggctgggccattg

SEQ ID NO: 27758 - DNA, 122 bp, Homo sapiens
gctcccagccatgctgctggctgcttctgccgtcctggcttgcagagactctgggtcatgcggggaagagggcagagtcctcctccctgctcaggcaagagaggatccagcaagatttcttc

SEQ ID NO: 27759 - DNA, 122 bp, Homo sapiens
caaaaggtggagtatctacctgacgaaatgggcacgttgtatttgtctgagtaccgcctgcggatgggtcccaccgtgtgcatgctggtggttgtgatgacagaggggccttgggtgacggg

SEQ ID NO: 27760 - DNA, 122 bp, Homo sapiens
cgtcgcgcggaggtcagaagagtcgctgaggaccgggtgcggcgggttcttattgctcgccgcccccttcctccgacaactcggaagcctcggaagccggagagccgcgagttcgtctgcct

SEQ ID NO: 27761 - DNA, 122 bp, Homo sapiens
caggctggcggggtggggggagagacccttgggacccaccagggccgtccccggctcgctcgccctacctgaggtgaccccctacccgcgaggtatctcccagccgtggtgccccgggggga

SEQ ID NO: 27762 - DNA, 122 bp, Homo sapiens
atgggaactgctgaaaggtgacgccaccgtgtctgtatacgtgacatgcgtcagcttcaccgccagcgcctcccaactaccactgcgcagcactgagctcctgctgtccctgtagaaactcg

SEQ ID NO: 27763 - DNA, 122 bp, Homo sapiens
tagatactaaggtgaggacccctagtggggacgtagggaccagcgacgctagaacagttacgtccagaagcgtaccacccctgccgtcagcccggaggccacgggctgccggatgtggctca

SEQ ID NO: 27764 - DNA, 122 bp, Homo sapiens
tgtgtagctgtgtatgaacttggctgttggtttctcttgccagatgaaattatgattaatcggggctcagatgtcagttgttttatgttgcttgtgctctttgctaacagctgcctatttca

SEQ ID NO: 27765 - DNA, 122 bp, Homo sapiens
tcagtgagttttgtctatattcccaacttgtcaagttcaattatcaaatgtctttcaagtcgcatttctaaccgatgttttattagagataacagcactaagaagataaaatatcaaacagc

SEQ ID NO: 27766 - DNA, 122 bp, Homo sapiens
agcaagctggcacgggaagaggacagggcctctcgtgtcccctcctcccttcccgcccatcgcactggtcctgcagagatagctgtccccttggggccccggggctcccgctggcgcatctg

SEQ ID NO: 27767 - DNA, 122 bp, Homo sapiens
tcatgggtaaccttaattctgtctgcaacacaccttcacagtagtatttagattcatattcgattgaataatcagagatgagaatcttgggaggacatctttaaaattctgcctaccacagt

SEQ ID NO: 27768 - DNA, 122 bp, Homo sapiens
cgcctggggctcggtggggggcgctcagctcgaccccagctaagggagcactaggaagtgcgggcgtccccttccctgcacccttgcggggcgggaaccgtcgacctagaagaaaaaaaaag

SEQ ID NO: 27769 - DNA, 122 bp, Homo sapiens
cctcgcaagatccaggaacgaatcgagcacctccttgctgggggcattttcggcactgcccgcggctcccacggaggcgttgatggcggcggaggcggcgcccggctgcagagccagcgcca

SEQ ID NO: 27770 - DNA, 122 bp, Homo sapiens
tcctctagggcgaaaatgcttagtcctgatagaaaaggcaaatcaggaaatgtttgcaagcgttatgataatactctgtcctcgtggtggtgacttaggaaagcaatacacccactgcaaac

SEQ ID NO: 27771 - DNA, 122 bp, Homo sapiens
ggggccagtcctgggaggcctttattgaacctccgctgaaacaagtcagtagataactctcgtaacctttgtttttttgagtgtctcttgaagtaccaacccttaaatatgggtagtgcaga

SEQ ID NO: 27772 - DNA, 122 bp, Homo sapiens
tgcagtaaacccgattaatctcctcaaactcaggtgccatttccttggaatagtatttaccgcggggcgcggtggctcacgcctgtaatctcacgctttgggaggctgaggtgagaggatcc

SEQ ID NO: 27773 - DNA, 122 bp, Homo sapiens
ggctggtagagaattctgggagatgtagtataaccgtcctcagccataagcctgtcccatcgagacgtcgggacaccgaaaactaccattcccgccggcaaagcggctccggcctctcagca

SEQ ID NO: 27774 - DNA, 122 bp, Homo sapiens
aaatcgtctgcagggcctcctcaaaacggcgaagaactttaggagggcttggccacttcacgtgcttcccgtagtctcgcatggtcttgacgccatggaagcgtctggccacctcgtggatg

SEQ ID NO: 27775 - DNA, 122 bp, Homo sapiens
cctctcctataggccagaagagaaggaaatgggtggggcagatgatgggaggtggtcaaacgtatggtacagcagggaggcatccaaagaaccatgaaggtcctcactgaactgggtcactt

SEQ ID NO: 27776 - DNA, 122 bp, Homo sapiens
cagctgccgagagagttcatcagacagacccccacattccttctggctgtcctcagaggccggatttcttcctcttttgaggatgaagagctttctctgccgaggctgggggaggaggtcag

SEQ ID NO: 27777 - DNA, 122 bp, Homo sapiens
cgaagccctgtgtttcctacagtcttgagcagcttgctgttacccttgttgaaagctcatcgaaggcacacagctggtggtcggattcctcccccacgcgccccacctccgacctcaactcc

SEQ ID NO: 27778 - DNA, 122 bp, Homo sapiens
caaccagttcatcctgggagctgctgcgggttcttccgggaatccgcgccactgcgcctgcgcgctgagaaatcagcctctcacttccggactacaagcccctgaatgcaatgggcagcgaa

SEQ ID NO: 27779 - DNA, 122 bp, Homo sapiens
accctcacccagaaaatggggacgcagttgttgagatgagatgaagcaatactgtgaaagcgcttagagtagtgcctgattccgaccaagccctctctaaggtgagctgttgattcggcatc

SEQ ID NO: 27780 - DNA, 122 bp, Homo sapiens
ttcctcctcaatcacccggtctgcttgaatcaggtcagcttcctctgcgatctctatcagcgaactctcctcctccccttcttcctcctcatccccttctgcctgggctaagagagagaaac

SEQ ID NO: 27781 - DNA, 122 bp, Homo sapiens
gggtgggggggcatattttcttagaagctcctgccttcctcagttcattactgtaaaccccgtaccttaaaagactcggcttcttctcactaacaaagaaaaaaagcaaaacaaaaccaaaa

SEQ ID NO: 27782 - DNA, 122 bp, Homo sapiens
ccaagaggaaggtcagctccgctgaagccgctgccaaggaagagcccaagaggagatcggcgcggttgtcagctaaacctcctgcaaaagtggaagcaaagccgaaaaaggcagcagcgaag

SEQ ID NO: 27783 - DNA, 122 bp, Homo sapiens
agccgtgacgttgcacaaaacagactcaaggctcaactcactggctggcctcattgcccccgggcccagagttaaccctgtggctctgaaaactgcctgtggcttcaccctctggtaatctt

SEQ ID NO: 27784 - DNA, 122 bp, Homo sapiens
cccagacggtgtggggtcagggcccaggcttctgggggatgctgccaaggcgggagccagcgtccccagtgcccggtggattcgtgatggcttgcagagggtttcagtttccactgtccagc

SEQ ID NO: 27785 - DNA, 122 bp, Homo sapiens
aaacaaaacttaatttcttagtctccaggtgacacaggcttggtcctctctgctgccctccgaacacttgtcactggccaagatggtagtttctcttgtttagctcaggatggatgttagtt

SEQ ID NO: 27786 - DNA, 122 bp, Homo sapiens
cgctaccttgctttcccgcgctcgcctcggtgcctactgcgcctgcgcgagctgtgagggcgggacccagagacacccgccccaactactggcgtgcgccctctgctgtcgcctaacggaac

SEQ ID NO: 27787 - DNA, 122 bp, Homo sapiens
ccaggaggagcaagaggaacaaagagctctcattcacatccgcaatgctgacgggacgtgcgttttcctcagcaaactggcaagctccctggaaagggaagattaatacgagcagggaatac

SEQ ID NO: 27788 - DNA, 122 bp, Homo sapiens
tcagccgacactgctgtctcagtagcccctggtgcaacacaagcctgatattttctaatccgaggttatttttcaggtcatcaattctattttcaaacatctgacagactctggtgttctta

SEQ ID NO: 27789 - DNA, 122 bp, Homo sapiens
tggtctgaaaatattaaatggaaaattccagaaaaatgaattggtaaattttaaattgcacgctgttctgggtagcccgactggtaggtgaatcatccctttgcccagtatatctgtctata

SEQ ID NO: 27790 - DNA, 122 bp, Homo sapiens
tgctggtcctgcagagtccctggcttcctcttgggcaccactgtgaaggtgttgctgccccggggctgaagctctgccacgcacccgggcctggcagggtgcagaggcctggcagggtgcgg

SEQ ID NO: 27791 - DNA, 122 bp, Homo sapiens
gtccggggctgggaggcgcgtctgtctctgggcatgctcagtgcaggggcagggctggggcgggggtggctgaaagttttgagcggtgatccaggctcctccctccggctcggcgaagcagg

SEQ ID NO: 27792 - DNA, 122 bp, Homo sapiens
atctgattatttctcttcccccaatgcacagttaccctggtagatggctattggtctcttcgggggaaataacaatatacatttttggcaatgtagcagactccttcctcaagaggatccag

SEQ ID NO: 27793 - DNA, 122 bp, Homo sapiens
gaggagcctgtggcctcacgttgtcctgcattgcactgtctcctttccagaaaaggttcacgttttatccttgcataacccaaagacctattaaaatcttttcctaaaaacaaaagggatta

SEQ ID NO: 27794 - DNA, 122 bp, Homo sapiens
caacatcccatctctacaaaagaaatttttttttatatattagccaggcatggtggcacacgcctgtagtcccagctacttgagggtggagaacagattgagttggagaacagattgaaccc

SEQ ID NO: 27795 - DNA, 122 bp, Homo sapiens
tgagcagtgtcccctgagtggaggcatacctcgtttctccagtcgcccacagatggacgtcggggctatcgtggctagtgtactgtttgtgaatatgcacgtgcctgtgtggacgagggtgt

SEQ ID NO: 27796 - DNA, 122 bp, Homo sapiens
cgtcaggcgacatttcgcgtgcgtgtcaaagggctgcctttcccgtcagcactcgaacagcgtaatatccgaatgtgaaaggcagcccaacgtgtatcgagctaaagtaataagggaaaagt

SEQ ID NO: 27797 - DNA, 122 bp, Homo sapiens
tattgtaaagatcgaatgcctcgaggtaatgtaaggggtaattgtgaatcactacggcgtcgtccaagcaaaagggaaaagagaaaatgccttgcaaagcaaatgacactaatgtcaggttt

SEQ ID NO: 27798 - DNA, 122 bp, Homo sapiens
tggaggtgccagcccgggggccctggagagccatggcagagtttacagctctggaggctgcggtgtcagaaagctccctctggcggtcagggggtaacagcgcgggatgctcgcccgtgtgg

SEQ ID NO: 27799 - DNA, 122 bp, Homo sapiens
cggctgctgggagccaggagagccctgaggagtagtcactcaggtaagggcatctgtgtccgcatgtgccctgccccttggcatacgtggcaggaggacacttctctgctggggagtggtgg

SEQ ID NO: 27800 - DNA, 122 bp, Homo sapiens
gtggggggctgagtggtgaggaggtggcatcagacgggagagttccaaggcacccagccacgtgtatcctgtgctgtgattttccttggaggtgtaattttccgagttccattttggttacc

SEQ ID NO: 27801 - DNA, 122 bp, Homo sapiens
gcctgagggctgcggggcgggaccgagcagggcggggcgcttaggtggcctcgggggaggcggggcttggaggctccgcccctcaggccccgcctcctccccggctagtctttggccgccgc

SEQ ID NO: 27802 - DNA, 122 bp, Homo sapiens
agacgcggatgccggcgcgaatgccggcacggatgccggcacggtgggcagccgccgtggcgtccagcaccaggtcctggctgcagccattggtgagcagtatggccacctgcttgtaggcg

SEQ ID NO: 27803 - DNA, 122 bp, Homo sapiens
ttcctacttagatgaggaaactgaggcccagagaggtggtagaacttggccatggacacacggaaatgagatgcaaggccaacctgggccccacttagacttgtggtcccatcccagcaaca

SEQ ID NO: 27804 - DNA, 122 bp, Homo sapiens
gtgattgccgcagacatgctgggatcctacggctccttggctcgtttccgcaacatctctcgcattatgcgagtcaacaacagtaccatgctgggtgcctctggcgactacgctgatttcca

SEQ ID NO: 27805 - DNA, 122 bp, Homo sapiens
tggtaaacccttcagtcccaggcaaatcagggtaaatggcaacaccatcacagagacactcgatgctttctgaatcccagtggactcctttttctacccacctgctttggtctagctctgca

SEQ ID NO: 27806 - DNA, 122 bp, Homo sapiens
tgctccccatttcaatgctaggtgccacaggctcagggcctcttgggctctgggaggagacgcagtggaagacaaggccattatgaggtcacaccagagtcgcctagcactgttgccacctc

SEQ ID NO: 27807 - DNA, 122 bp, Homo sapiens
gaaatccagaaaacaggatgaggaatcaaacttggacaaaagaaagggtatctatcatttcgaaataagaagaaatgaggtaggggtagactagaggaggaggcaaaaaactggcaggatca

SEQ ID NO: 27808 - DNA, 122 bp, Homo sapiens
ttgcactgagccatgggcatgtctgaacacaacaaggaagaggccagagcagcaacagcacgcaaagggttgatgggcatttcttttaagacagagcagaaaactcttagatactttgcgtc

SEQ ID NO: 27809 - DNA, 122 bp, Homo sapiens
cacaatgtccgggcggctccctccctccgattggctgcggcggcagcgcggacctggctgcgctttcgccacaccacgcagcctgcgcatgctcagtgctggctagggaaaatgtgctctca

SEQ ID NO: 27810 - DNA, 122 bp, Homo sapiens
gcgcagctcctcaagccaacggcactgataaggaaaaacactgctgaagagactgcacgccgtgactgagacacaccctgatttcaggtgtgaaaagtttcaggagaaaaaaatgtgcaact

SEQ ID NO: 27811 - DNA, 122 bp, Homo sapiens
tctgtaccaggagttagtcttgatcaggattttcttttttttttttttacagtccatttccgtgtggtacgggggtgtgtgtctagtttgcacctgtctccccagtgactagcacagtgcct

SEQ ID NO: 27812 - DNA, 122 bp, Homo sapiens
ctaagaccacttctagggtaatctggatttgccctaagggttcagggcgtctcagcctttcgagggggggctcttctccgggtaatggggcatctaagatttgccctggggttgggggtttc

SEQ ID NO: 27813 - DNA, 122 bp, Homo sapiens
gagtggggactgttgtcttgtttacctctctcccctcaactcgccccgctccccgcccttcggagggcagaggagtagcccagtggcaaagtttggctggtaaattgtacctcctttccccg

SEQ ID NO: 27814 - DNA, 122 bp, Homo sapiens
caggtatatgtaaatatctaacttaatcagtaattttaaaatatatctaaaggaagactacgccacagaaggtactgacagtaggacagatgtgtattgccttggcacagggagaagaaatt

SEQ ID NO: 27815 - DNA, 122 bp, Homo sapiens
tggctaaaattgattgcagtgaaaagatacacagtaaatcagcaaagataaaagacacatcgggtgatgttgggggaagccaggcacacgctccaagaatcttctcccagtggaattgcaca

SEQ ID NO: 27816 - DNA, 122 bp, Homo sapiens
ggaggctgaggcaggagaatggtgtgaacccaggagtcggaggttgcagtgagctgagatcgtgtcactggactccagcgtgggggacagagtaagactccgtctcaaaaaaacaaaaaaca

SEQ ID NO: 27817 - DNA, 122 bp, Homo sapiens
cagcatgcggggagggttgcatgtccctcagagtcactaagtgtagcgaagcgaagggggcggcttcacgcagcccaaagtcccctgcatctcttgccaccagtctgcgtcgcgttaccggc

SEQ ID NO: 27818 - DNA, 122 bp, Homo sapiens
aagatgccgcaggctcatgttaaagttagggcacaccatcacagacaaacggaaaaccgacggtgaccgcgaccaccgcagacaacacacattagaggattttaggtactgttctttggtct

SEQ ID NO: 27819 - DNA, 122 bp, Homo sapiens
gaggatgggtcccctactccagcagttctgggatattctgggcttcaagaagcctccagtcgtgtcaagcaggtttttgtttaagctctaacttgagagtgaaaataaatgttcatgggaaa

SEQ ID NO: 27820 - DNA, 122 bp, Homo sapiens
ccccccttccctaccgtctctggcccgctggcttatcctcaagaggcgacccccccatcacgcccaaaaaggtaaacagacaagatgacccggggaagcagaagcagcgcgcggcctcggcg

SEQ ID NO: 27821 - DNA, 122 bp, Homo sapiens
cgctaggttttgcaggatgttaagaacaggtcccaccttgcctagggctggggactgcctcgcaggaccttaaccctagcaacccacctccgtccccatggcaaccggggcggggcccgacc

SEQ ID NO: 27822 - DNA, 122 bp, Homo sapiens
ggtggtgctgctgctgcttctgaggcactggggctggggcctgtgccttatcggctggaacgagttcatcctgcagcccatccacaacctgctcatgggtgacaccaaggagcagcgcatcc

SEQ ID NO: 27823 - DNA, 122 bp, Homo sapiens
atagttccactcatgacattgtctggaggtcaagatgagatagttcatgatgacccaaaacgagatccctggtgtctgggacccaggggctgccccatgactgacatggttgctgagggagg

SEQ ID NO: 27824 - DNA, 122 bp, Homo sapiens
agttctttttacttgctttttagcttgagaagtgtttatttactctgtgtgccaaatgcccgaaggggagttgggaatgcctcacctcagtgccagcccactgcccaatgctcacactctcc

SEQ ID NO: 27825 - DNA, 122 bp, Homo sapiens
ttctcactgtatagtcacacacacagcccgtcacatgtatcacgtcgtgaaacaaatatccgtggtgtggatgcacccccactaacttagccctttagcagcaagaaaatcccatttatcct

SEQ ID NO: 27826 - DNA, 122 bp, Homo sapiens
ccgtgcccacctatttcagtaactcgcagcgccaggccaccaaggacgcgggggccatcgcggggctcaaggtgctgccgatcatcaatgaggccacggcagcagccatcgcctatgggctg

SEQ ID NO: 27827 - DNA, 122 bp, Homo sapiens
cgcacagccgcccccgctccgcaccccgcgccccgccgggccgctcaccgactccgccgccgagagacaatcatccaaacgccgccaccgcagccgaccgccccgcgcctacctcccagctt

SEQ ID NO: 27828 - DNA, 122 bp, Homo sapiens
gctttctgaattccgaagagcggaagagcccggccggcggcgctggttgtgaagatggagcgccggcagtcacgcagccgggggaggctgcagattacattttcaggcctcccgggcttttg

SEQ ID NO: 27829 - DNA, 122 bp, Homo sapiens
acgggcaggaatctgttgtagaagagttgctgccgggacctgctggtgaattggctccaccggatccggctccgcagaaagctcactgcttcctgtggctcctggatttccaagcctctggg

SEQ ID NO: 27830 - DNA, 122 bp, Homo sapiens
ccgttcactcgcctgcccatccgcatggccaaggggctgggcaacatctctgccaagtatcgctggttcgccgtcttctacctgatcatcttcttcttcctgatcccgctgacggtgtttgg

SEQ ID NO: 27831 - DNA, 122 bp, Homo sapiens
agagatcgagaccatcctggccaacatgtgaaacccagtctctgctaaacatacaaaaagcggctgagtgtggtagcacgcgcctgtagtcccagctacttgggaggctgaggcaggagaat

SEQ ID NO: 27832 - DNA, 122 bp, Homo sapiens
gctagggctcggtggccgtgcgcgtgttgggtcgagctctggtgtcaggcgtgccgggtccgcctcccccatcccgcggatctgcagatctgcaaatgctccgccggcagccacacgagaga

SEQ ID NO: 27833 - DNA, 122 bp, Homo sapiens
tgcccggaggttccctctgacagccgcagcagcagggctcaaaccggcggggccgtgtaccgctccaaggacaagctctgccgaggccgacatgaaaagccagcacgcgggtcgcctagagc

SEQ ID NO: 27834 - DNA, 122 bp, Homo sapiens
ataagttccttgaaaatgtgaaaaagctccatcactatagcatgcctctttttactgtaccgtagagatggcaggctcaattgcgcaaactggtttaatatcattagtgtaacagccaaggt

SEQ ID NO: 27835 - DNA, 122 bp, Homo sapiens
tccgtagactgacagcaggggtgcgtcacactcaggcgagctcccagccagcaggtaaggcgagtagatggtggccagcccgtgctctgtgtaaaagtgaggcgggtactctgggattgtgg

SEQ ID NO: 27836 - DNA, 122 bp, Homo sapiens
cagtgctgtccgcgcgcaccccctccgtcgccgtcagggtcgtgctccttaggtttcctgcggtttttctgctgctctgagacggtctctgggaccaagttctcacagcatcgtcttctcct

SEQ ID NO: 27837 - DNA, 122 bp, Homo sapiens
ttccagggagacgagggcgcctgcccgacccgggacttcgtggtaggagcgcttatcctgcgctccatcggcatggacccgagcgacatctacgcggtcatccagatcccgggcagccgcga

SEQ ID NO: 27838 - DNA, 122 bp, Homo sapiens
gccctagtcagcctttagcccaagcaatgctgagcccaatccttcggccttccgtagtctcgctcggtttcgcgagatcgaggctgagctccgccgcgccgccgtgggggcgaccccagaac

SEQ ID NO: 27839 - DNA, 122 bp, Homo sapiens
ccggagccccgggcgcgaacatggggaatgcgcactccaaaagcggggacaggcacagcgcgctccccggccgccccgagctgtctttttacggctctttccccaggaaatggagcgagaac

SEQ ID NO: 27840 - DNA, 122 bp, Homo sapiens
gtttgccaatagcctgattcctaaagttgcaaaatggatacacggaagccctgctggcctcgtgtgtgcagcaagagcctgctggtaggttcacactgcattctcatagcccccagggacag

SEQ ID NO: 27841 - DNA, 122 bp, Homo sapiens
tgcaggaagcatcacacaccagcagcatgtgagcagagggaggcagttggggttgaacttcggaactaggccgggtctcctgacagatcacaagacaccccagaggatcttcagcagtccta

SEQ ID NO: 27842 - DNA, 122 bp, Homo sapiens
atgcatggactatgcacacaaatctatgtacacacaaatcggcctgcacttgccgctctccgctgaggaaggaaggtagctttggagtcagaactaacagaaagttatgtatgatcttggac

SEQ ID NO: 27843 - DNA, 122 bp, Homo sapiens
ccattgacttccttgcatgaatctcaaaaacaaaaaccaactcttagcaattatagaaaccggaaacaaaaatgaaacacaagtaggaagttaaataacttcactgcatccaacaattgctt

SEQ ID NO: 27844 - DNA, 122 bp, Homo sapiens
accactgaggttagaatcataaggcttttatttaagaattgcttaagatgttcttcagtgcgcaaattccagcagagtggcagaggacagccagcatgaagacccccacagaggaacgggat

SEQ ID NO: 27845 - DNA, 122 bp, Homo sapiens
gggtggtttggtgcagggacaactgtcctcttacgggatcatttgttaactaggtatttgcgaggtcaaacttgcttttattttaggaggcacacaagagttttataaattggaaatcccag

SEQ ID NO: 27846 - DNA, 122 bp, Homo sapiens
gtctgagaggccggaagtgccccttagcgggtgggggaagctggtaggcacgggcggctccgcagtgaccggactcgggggaggtgagtgatttgcctaagtaaaagggaaagataattgag

SEQ ID NO: 27847 - DNA, 122 bp, Homo sapiens
gaagggcgcctcctccgcgggtatgaacagcacgccaacgatggcaaggattacatagcccggaactaggacctgcgctcctggaccgcggcggacatggcggctcagatcaccaagcgcaa

SEQ ID NO: 27848 - DNA, 122 bp, Homo sapiens
ctttggcagcacatctgaggaacaatctcctttgctgtcttttaggttagtgatttcctacgaagcggctgtcccctcttctgcatccaacttgtcgctcattatttgaaccggcaaatgat

SEQ ID NO: 27849 - DNA, 122 bp, Homo sapiens
ggaggcggagcttgcagtgagccgagatggcgccactgcactccagcctgggcgacagagcgagattccgtctcaaacaagaaaaaaagaaaatgttctaggccaggtgccgtggctcatgc

SEQ ID NO: 27850 - DNA, 122 bp, Homo sapiens
gacgccgcggtcgcttgacttcacaatcacaggagcgtgacgcctacagcctaatgttgccgtgtagggcacagacttcttaaaaagaatcttcaggggatgtcgccaggtgatggcgggaa

SEQ ID NO: 27851 - DNA, 122 bp, Homo sapiens
acagcccagggcagccacatggggaggctgggttggggacagcagccccggcgcctctcccggagaagcagcctccccaagctgtgcctgagccgagggcaccgtccaggtcatctcagcca

SEQ ID NO: 27852 - DNA, 122 bp, Homo sapiens
ggaagcttctgggccacggactgccggaccgttgggctgtgaggcagcgtctcagcgaggcggcacccggagccatgtcttcacataggaggaaagcgaaggggaggaataggagaagtcac

SEQ ID NO: 27853 - DNA, 122 bp, Homo sapiens
gcctttaccttttcaaacacactgacgcgggccagccccagccctacgcccgcaggggcacgcagaaaagacttagttaccacggccaagtacgaagccttcgagatagcgttcttcttacc

SEQ ID NO: 27854 - DNA, 122 bp, Homo sapiens
ctcgcagcccggcgcgcacggttgcgcctttggatacctgcgacaggactcggccagaaccgtgtcccagggcagagaaaaccctggcaacctttaacgttctccctgacgcggagaatcct

SEQ ID NO: 27855 - DNA, 122 bp, Homo sapiens
gcgtcgcctcccctcccccaagccgactctttgtcaccgagcgccggcccgagcccccggcgaaagcccacggcagcactggcaccaccccggcgccggggactcacagaccgggaacgtgt

SEQ ID NO: 27856 - DNA, 122 bp, Homo sapiens
cgggactcgcagccggaggccctgccggctgcaagaggcggaggccagaggcgtcaccagcgccggggcagctgttcctggtccccgccacctcgctgaagtggggttttctgagattccct

SEQ ID NO: 27857 - DNA, 122 bp, Homo sapiens
cacacacagctggcagttgcgccttcacctttagaataatcacaggcatccagatcacaccgtgtccctttcctgactcagttgacataaacttaaagttgatttgtttaagtgatgacaca

SEQ ID NO: 27858 - DNA, 122 bp, Homo sapiens
ggcagcgggggcttggctggagggtgtcccaggctgctggcagggggcagaggcctccgccggggtggatggctgggtctgaggcctggcctggcccctccactgtgaaccaggcctcctga

SEQ ID NO: 27859 - DNA, 122 bp, Homo sapiens
gaacccggagtgggagaaggcccgtcaggccctggccagcatcagcaagtcaggagctgccggcggctctgccaagtccagcagcaatgggcctgtggccagtgcacaggtgagaaggcctc

SEQ ID NO: 27860 - DNA, 122 bp, Homo sapiens
agctctccgccatgggcctgttgggagagggcaggggcttcgaggggctcccatcttgaacgcccccctcttggccaagatccctgagcagtatggaaattgccccgagcccagcactttgc

SEQ ID NO: 27861 - DNA, 122 bp, Homo sapiens
atccctgattctcacttccatttccctcccctaacagggcacccactcccatatctttgacgcatgcctttggatatatgtgtgtctttataaaatgtgcatggcgttgatttgtgtgtgga

SEQ ID NO: 27862 - DNA, 122 bp, Homo sapiens
caaactctgagggtgtccagtgtctatgagcttcctgccactcacaatatttatactagacgttgccaggggaagagaagagagtccaaaaatatgtccaaatgctgccctgtgaaggttgc

SEQ ID NO: 27863 - DNA, 122 bp, Homo sapiens
gggcgggagcagttgagccgggccttcatgaatgtggtccatgtgtcctccagcaggaatcggccccccacgtcattcttgcacacgcgggccacgcgagagtacacggtgcgtccacagtc

SEQ ID NO: 27864 - DNA, 122 bp, Homo sapiens
gtcggccaggggtgtgtcccggaacagctcccgcaggtccagcgggagcatctggacattcgggaagcagctcagaagtgagatgcccaggtgccggggcagagaggcgttgccacccggaa

SEQ ID NO: 27865 - DNA, 122 bp, Homo sapiens
ggatgctgcagtcctcactcacgtagccttcccaacagatgcacacaccgtcctggcacacgccgtgctggctgcagtcattcgggcactgcctcacaccgcaatcctcgccagagtagccg

SEQ ID NO: 27866 - DNA, 122 bp, Homo sapiens
tatgctatctttcttcaaaagctgaacaaggagaagaatgcacccattcaaattataacccgaggtacccaaagatgaaaaaatggcaaatatttcagtttcagaggaggaaactatgttat

SEQ ID NO: 27867 - DNA, 122 bp, Homo sapiens
ccgcccccggtccggcgtgcgctgccaactccgaccccgcccggcggggctccctcccagcggaggctgctcccgtcaccatgagtccctccacgccctccctgccgggccctgcacctccc

SEQ ID NO: 27868 - DNA, 122 bp, Homo sapiens
gaagcgacggggacacttaggggaaaactttgccaacttcgctcttggcgcggaagaggccgctggccggaatggtgcagcagcggcggcgggccgcgacgcgcagggtgggccccgggcca

SEQ ID NO: 27869 - DNA, 122 bp, Homo sapiens
gctggacacacagggccacctgatctgcgactgtcggcatggcaccgagggccctgactgcggccgctgcaagcccttctactgcgacaggccatggcagcgggccactgcccgggaatccc

SEQ ID NO: 27870 - DNA, 122 bp, Homo sapiens
gccgccgccgccgccccgcccccgagtgcctcatctgcatagccccaccccagcgccgcgcggtgtcctgggaaactggggcccacaacaaagggcaaagcaccgccccgcctccgcgcagg

SEQ ID NO: 27871 - DNA, 122 bp, Homo sapiens
ccgctgaattacagccccttcagccaatcctcgcccagccccagcctggccgaggcacgccgtcatgcataattcatgaaaggccagctcgttcggccacccagaggtcccagtgcgtgtgc

SEQ ID NO: 27872 - DNA, 122 bp, Homo sapiens
tgcacactctgccctgggtgtttccatattatccgcctgcccttcctcctgggtgcctcccgtagccttagtaagggctctgctttcctgggcccctagagctgagccatgctttgccataa

SEQ ID NO: 27873 - DNA, 122 bp, Homo sapiens
atctcttcatttccctgatgggcttgggccctgcgtgcaggtgacaggtgataacaatctcggcccggcctgggattagtcgctggcaaagcacactttccaaaaggaaagacagaaataga

SEQ ID NO: 27874 - DNA, 122 bp, Homo sapiens
aggttttcccaggtcgtcacacgggaaggcctgggctaaggagctgattaaacccagttacgattgaccgggcgcggtggctcccgcctggaatcccagcagtttgggaggccaagacgagt

SEQ ID NO: 27875 - DNA, 122 bp, Homo sapiens
aacactccccacacacgcccccccctcccaaagtgctgggattacaggcatgagccaccgcgcccggcctcaaatgttggctttttgttttgttttgtttttgagacggagtcttggtctgt

SEQ ID NO: 27876 - DNA, 122 bp, Homo sapiens
gagttcgatgttcaaatgggaaaaaaaactaagtgcgccgcccgggaatcgaacccgggtcgcaagaatgggaatcttgcatgataccactacaccagcggcgctgtctaagacagttgctg

SEQ ID NO: 27877 - DNA, 122 bp, Homo sapiens
gtatgcgcccacggaagtcctctgtgcatgcgtgtctgtgccataggcgtgggaacacctcgtgcacccatggtacttgcccggagagtaggaagccagcgagggagcggccctgctccagg

SEQ ID NO: 27878 - DNA, 122 bp, Homo sapiens
acctctgggccaaagctgcactaagtttctggtcctgcctcctcctcccctccgtgatttcggtggcatcccaagtttgcccaagctgctagctctgagcccattacagagatggggccact

SEQ ID NO: 27879 - DNA, 122 bp, Homo sapiens
gatgtaaataaaaatcatgataggtaatagagagcagagaattaatgagcaaagactattcgaagcacagataaagacacagaatgtggaaaattatagaatgtggaaaataataattatcg

SEQ ID NO: 27880 - DNA, 122 bp, Homo sapiens
agacagacaaggaggggagaaggacagactagaaggtaccagaaaccagccaggagggaccgaatgcaatggtccttcagagaacagatacagtttctgaccaatgagctatatcccttgac

SEQ ID NO: 27881 - DNA, 122 bp, Homo sapiens
attttctaatgtttctagaagaaatatacatgtattatataaaaatattttttaaaccaacgtgtataaagggttaatctgaagcatataaggagaacttaaggaatttcagaaatgtaaaa

SEQ ID NO: 27882 - DNA, 122 bp, Homo sapiens
tattgtttgcttccccctactagaaactaagctctataagaatattttgtttgattgcttcgctgctgtattctattcccagtgtctagaacgtgcctgaaacctagcagacactcagtgtt

SEQ ID NO: 27883 - DNA, 122 bp, Homo sapiens
cgggcgccgccctcttccccaggcggcctgcccccaggccctccggcagcaccaaggagacggagctctcagcccgggccccgccaatgccagccggcaccccctcacttcctgcagccgcc

SEQ ID NO: 27884 - DNA, 122 bp, Homo sapiens
acctgtaatcagccatcagaggctgaggaaggtcagattatcttgtgtcttccttatcatcgccatcactatcagcagcagcagcagcagcagcagcagcagcagcagagttctctgtcaca

SEQ ID NO: 27885 - DNA, 122 bp, Homo sapiens
ttgcaagggcagcggctatcgggtggatgcctgtggcctcggggcctatgccggctcccccgaggcaggagaggaaaaggacccaagatgctctcattgtgctgaatgtgagtggcacccgc

SEQ ID NO: 27886 - DNA, 122 bp, Homo sapiens
gctgtccgccgcccaacacccgctcttcctcctgcaccgaacacttcgggctcactgacgcgccgtctccatcctaagccccaaaccttcaaagtgcaggagacaactgtcacgtcaccctg

SEQ ID NO: 27887 - DNA, 122 bp, Homo sapiens
ctaagcatgtacacggctaatggccaaaccacctgcaaaagttccatttgcggctgggagcggtggctcacacctgtaattccagcactttgggaggccaagaagggggatcaagaggttaa

SEQ ID NO: 27888 - DNA, 122 bp, Homo sapiens
caagcgctccagctgcagcgagagacaaaggccccgccaaatcccggaagccgccctgtccgctccagttgcgtgcctgattggacggtccccagctcagggtccctgattggaaaacgtct

SEQ ID NO: 27889 - DNA, 122 bp, Homo sapiens
agacggtcattcattggcagaggtgtatttgcggggggccaggtatagagtaattcaaggcggacaaaggaggaatgtcccagtcttcaggaagctcagtgacatgtttgcgctgtcttatg

SEQ ID NO: 27890 - DNA, 122 bp, Homo sapiens
tgtaagaaacaactgtcccttctcccccgttgacttatttccttcagtttggactcatatcgtagtcaaggttataatccgttgctatcgctgtttatttgaatctcacactggttccgctc

SEQ ID NO: 27891 - DNA, 122 bp, Homo sapiens
caactgtgggcattttccttcacagataactgcgacctccacttcaaggtggcccgagatcggagtagtggctatccgctcacaattgagggctttgcatacctgtggtcaggagcccgtgc

SEQ ID NO: 27892 - DNA, 122 bp, Homo sapiens
ctagctgacgccggaaacggctctcctggaagccagtggaggaggtggccccgggggtcccggagctgttggagcgcagcagccgcaggtggtccagcagggcgcccagcgtgtggtctcca

SEQ ID NO: 27893 - DNA, 122 bp, Homo sapiens
ccagactgtcgagcaggagctaagactccttttcccctctgctgaccgccactacaggagcggttgaagccagacgaccaccttgtggagttaaactccgtaaccagggagcaccacttccg

SEQ ID NO: 27894 - DNA, 122 bp, Homo sapiens
ccagtgccttcagggaggtggccccagatgcccactgtgcgcatctccccaccgaggccccggcagcagtcttgttcacagaccttaggcaccagactggaggcccccgggcgctggcctcc

SEQ ID NO: 27895 - DNA, 122 bp, Homo sapiens
aactccatcgtatatacattggctcccctgggaggagacgtaggacatggagaatgtcagcgctggaaaggaccttagctatttctgacctagtcctttgttatgtcatggagaaactgagg

SEQ ID NO: 27896 - DNA, 122 bp, Homo sapiens
ggtcctcgctaggggcgcccacccgtcagtctctccggcgcgagccgccgccaccgcccgcgccggagtcaggcccctgggcccccaggctcaagcagcgaagcggcctccgggggacgccg

SEQ ID NO: 27897 - DNA, 122 bp, Homo sapiens
aatcagtcctctcaagtttaggaactctatattaggttacattttacagaattggcatttcgcagctcaaaaaatggtgtaatgttggcaatttcatatggttcaacccaatgtactaggac

SEQ ID NO: 27898 - DNA, 122 bp, Homo sapiens
ggcgcgtgccgggtgcctgcggggaaggcgcgtgccgggtgcctgcgggccgcggcgcgccgacagccttcgcgaaactgggctgccttgccgctgccactcctcccgccgcccgagctgct

SEQ ID NO: 27899 - DNA, 122 bp, Homo sapiens
ttgagcgggactgctggctgtccctcgtcaaacccctgacctcagcatccctccccgccacgcctttcccccagggtccgtgtatccccagctcctgatcccgctgctgggcgctgggttgg

SEQ ID NO: 27900 - DNA, 122 bp, Homo sapiens
ctttccgcggagttcaaggtaggcagcgctgcgccgccgaccgccctgtccccctggtttcgcctcttgaaaagtgtgtgcacgatcaggaaagggttttcttggggccttctttaaatgcc

SEQ ID NO: 27901 - DNA, 122 bp, Homo sapiens
aaagaaagcaccacgccaaacaacacagtagtacgctgcctgttgcacggagtgtagatacgactgcctgtctttacaagcagcagcacaggaagaataaacaagacaacaattagattagc

SEQ ID NO: 27902 - DNA, 122 bp, Homo sapiens
tgcctggcctggagaaggggccctgccccttccggggcaggtctccgggaggggcaggtccgcggcgtgcctccaacccggcgcctgcagccccggggcaacaaggtgtggggtttttaatt

SEQ ID NO: 27903 - DNA, 122 bp, Homo sapiens
tcccccccaagctctgcctccggcttgctgtgtgaccttggacaagtccctttccctctccgggcctcagcttgctcacccacagagtgaatgggtgggtggtagatgctctttgagttctt

SEQ ID NO: 27904 - DNA, 122 bp, Homo sapiens
aattccttcccagtgcaccctgattttcctcatttgcagaaacaaagattgtgtgtggatcgatgatgacttccatatatacattccttggaaagctgaacaaaatgagtgaaaactctata

SEQ ID NO: 27905 - DNA, 122 bp, Homo sapiens
gaagagacgcgggttgaggaagagggacggattgcccatgcgcttgggcgcacagcggcccgcttctgtgtggtctggaggtggagctgagaggggaatcacactctataaaggttcgcata

SEQ ID NO: 27906 - DNA, 122 bp, Homo sapiens
ttcttccttctggtgggtttgtggtcttgctggcttaaggagtgaaactgcagaccttcgcgttgagtgttacagctcttaaggcagcaagtctaggagttattcgtttctcccagtgggct

SEQ ID NO: 27907 - DNA, 122 bp, Homo sapiens
gccccaagccccaggatccaggtccaccagccaactcagacagtgactcaggccacctgccgggggaggaccctgaggatacccatgctcaggtagtagagtcgtgcccttcctctgagacc

SEQ ID NO: 27908 - DNA, 122 bp, Homo sapiens
tgagccctcgcgcctgggccactcagctcgacctctctccagcgttagcaataggtggagcgcgggccaatcggaagaggccggaggggcggggcgggcagtggccctgggaaggcgggtcc

SEQ ID NO: 27909 - DNA, 122 bp, Homo sapiens
tcctcctcactaggagcactttgatgtaaaccagaatagctttaaaaagacaaaaaggatcgtagatctgatttttaaatggttggttgctctgacagatctgaacactttgcttcatgact

SEQ ID NO: 27910 - DNA, 122 bp, Homo sapiens
cctgggacgcggcaagccatatgtcagcccgggtgctgacagcggggaggacactgggcacgcggcggcgtcggggaggcggccggggtaagacaggcctgaggcgggaggggagcggcggc

SEQ ID NO: 27911 - DNA, 122 bp, Homo sapiens
cgggcggctcctggcactctggcgccctcttctggccgctctcgcgcacctccgccacgccgggcccaggcctgcgtagctctcacatgtcctggcccaggaggtcgctatcccttgcccat

SEQ ID NO: 27912 - DNA, 122 bp, Homo sapiens
cgataaataatccagtcacacttccgggccctttggttggggatcgccaggcgctgctttcgtcaactgtcaatccgcctgggtttgagtagagtgtgactgttctggtggactttcccctc

SEQ ID NO: 27913 - DNA, 122 bp, Homo sapiens
tgtaaatggcccgagcacacattttaagtgagaaccatttgaagactccgagtttgcctgcgaggattcccaaagggatctgggcagctggtggccccgccccctctcttatcggagccccc

SEQ ID NO: 27914 - DNA, 122 bp, Homo sapiens
cggtgcccggcactcccggcacgcccagccccccgcccgcgcccggggttcccgaccgcgcgccccgcctgggcagcgcacgcttcgccagccacgccaccttctcgctgtccggccgcggc

SEQ ID NO: 27915 - DNA, 122 bp, Homo sapiens
ttccattgtctaaaacttagctgtagtagtggctgggaactatagtcttttttcttttttcgcccaggtaaaaatcatgggtcttgtgtctagggaacaagggggaacagagattgggagaa

SEQ ID NO: 27916 - DNA, 122 bp, Homo sapiens
cagaagaccgcaaggccgagtctcccaaacgttccgcgccaaaggcacaagccaggcacacgaaactagcaggcactaactgggtcaaagctttgggcctggggaataagggaggggaccat

SEQ ID NO: 27917 - DNA, 122 bp, Homo sapiens
cgcccgcgtcctgcccgagcgcccgggccagtgggcctgccctgcctgtaccctgctcaacgcactgcgggccaagcactgcgccgcctgccacacgcctcagctcctggtggcccagcggc

SEQ ID NO: 27918 - DNA, 122 bp, Homo sapiens
cgggcggcggacgaggctcagctgctgcacggtgagggcatctgtaagtggttcaacttgcgcatgggattcggcttactgtccgtgactgcccgcgccgtggtcgcgctcgacccaccagt

SEQ ID NO: 27919 - DNA, 122 bp, Homo sapiens
gtttaaagaaaaaaaaacccacgtagtcttagtgctgtttacccacttccttcgaaaaggcgtgtggtgtgacctgttgctgcgagaggggatacaaaggtttctcagtggctggcaggctg

SEQ ID NO: 27920 - DNA, 122 bp, Homo sapiens
gaacaggctactgcgctccatggccacgcaggccatgtcgaatgctctgtacttctccaccggatcctgtgcggaggaggagttccatcattacggtgaatcataccatattcctatgtgtg

SEQ ID NO: 27921 - DNA, 122 bp, Homo sapiens
gcgccagctgccaggcggggatcgggcggcgccgagctgaggtggtgagggactagctcccggatgtggagaagctggggagaaggcgtgggaggaagatggactcggtggagaagggggcc

SEQ ID NO: 27922 - DNA, 122 bp, Homo sapiens
cagacagctattgcatgaagaacgtgtgtgttcctaattgaaggagacggaaattttaggcggcagggagaggaaggaatggcactaaagctaggtaccaaggcccacaggaaaggttttcg

SEQ ID NO: 27923 - DNA, 122 bp, Homo sapiens
cggctatggatcataccccacgatcaatcacgccccgcaatggatcaggccccgcaatcacgtcccgcaatcgatcacgccccacaatcgatcgcatgctgtgcatcccccacgagctgcct

SEQ ID NO: 27924 - DNA, 122 bp, Homo sapiens
caacatcgctatcctgaaaagcccttgctgcaattttgtttctctttcaaaacaatggctcgaaaatttccaaggaaatagcaagagggcgattcccttcttgaagtatttgagggagcaga

SEQ ID NO: 27925 - DNA, 122 bp, Homo sapiens
cgcaggtggggtgagcagggaatccgcaggtggggtgagcagggaatccgcaggcttcagcggcgggggttgaccggcagctggcgtcgagaggcgcttgggaaatggggtctaatttattt

SEQ ID NO: 27926 - DNA, 122 bp, Homo sapiens
tggtccctttctcccaccctcttcttggagtagctcatttcttctgaggggtctgcacctcgtcatcgtccccaacccaacacccgccctcttcccacttccctccatctcccctgggcctc

SEQ ID NO: 27927 - DNA, 122 bp, Homo sapiens
gtgcccgtgcccagctcgcggggcggggcctcaactggagggggccaatgggggtcagcgcggcggaaccgagtggcagaccgaaaagccaatcgagatagagtactgggatgatgggcggg

SEQ ID NO: 27928 - DNA, 122 bp, Homo sapiens
gcccagcacacccggactctccgcgcacctcgctgcccctcctggaggcctgcacccaggcgctcataactctccaagttccccagctacagagcgaaaacccagtggctccgagttctggg

SEQ ID NO: 27929 - DNA, 122 bp, Homo sapiens
taagtgatgactgtgaccaaacttggatcaccaagcctgcacccagggagcgctcagtaacgcagcgctgaggagtaggccaccccggagggctccaggtttcagcgcaggcttccgcggag

SEQ ID NO: 27930 - DNA, 122 bp, Homo sapiens
cctgtcttcctttaagtaagtagcctgtaatggatgtactactttgccactggaataccccgggtctgtgccaagggactgaagaagtgtaagatggggagaactgtatgtcatggagtcct

SEQ ID NO: 27931 - DNA, 122 bp, Homo sapiens
ggcctcggccctcttgatgccctcggaggcagtctcaagcagctggtctgagtctggaggcggtttgtcagggggagatgaagaggacactcggctccttcaactcctccgcactgcccggg

SEQ ID NO: 27932 - DNA, 122 bp, Homo sapiens
tggacggcatgtggattctgctgtgggcacctgtttggatgaagggaacgaaggtggtggcgcctggaagcttgaagatgccaggaaccatagaaccccaaagggagtgtcacagccctggc

SEQ ID NO: 27933 - DNA, 122 bp, Homo sapiens
catatccccagcacagagctctgtctcccatttctctgctctgtgtccaaccctgttcttcgcccttctctggcaacctccctcctctggctccccttgagagctgccagctgggtgtggag

SEQ ID NO: 27934 - DNA, 122 bp, Homo sapiens
ccactgctggagttaatgatccatgagcaaaacactgagcccatccacactggccgctggcggatggacaccgccatgctagatctgtgcggtcgcccggggagcaccgggccattcctaac

SEQ ID NO: 27935 - DNA, 122 bp, Homo sapiens
tcctacgacccccgcgcgctttcaggaccactcgggcacgtggcaggtcgcttgcacgcccgcggactatccctgtgacaggaaaaggtacgggccatttggcaaactaaggcacagagcct

SEQ ID NO: 27936 - DNA, 122 bp, Homo sapiens
tgtctcatgagccagctccagctgccaataatccttgtagaggccaggtgcggtggctcacgcctgtaatcccagcactttgggaggccaaggcaggcggatcatgaggtcaggagattgag

SEQ ID NO: 27937 - DNA, 122 bp, Homo sapiens
ctgcaccaactacgacacgccgctctggctcaacaccggcaagccccccgcccgcaaggacgaccccttgcacgaccccaccaaggacaagaccaacctgatcgtctacatcatctgcgggg

SEQ ID NO: 27938 - DNA, 122 bp, Homo sapiens
ccagaagagacgcccaggaccccacagcgggggaattacccacccacccggggcaacacccgagagagcagggagcaaagacattcacttccaggacagaaggccacgctgccgcactcgta

SEQ ID NO: 27939 - DNA, 122 bp, Homo sapiens
gctgagcagcctacgagcctgggacggggcgaggtggcgcagcggctgcttgggggagcgcgggagcattgagtcgggggcagagagcctggggcgccggggctgggcgcagcgaggcgcgg

SEQ ID NO: 27940 - DNA, 122 bp, Homo sapiens
caccagaaactactttctggtttcaagggggaaaagaacaactgtggaatcagactgtcacgacgctaatcctatggtaaatctaaaatcattaatgaggccaggtgcagtggctcactcct

SEQ ID NO: 27941 - DNA, 122 bp, Homo sapiens
ctctgccttctcccacccccaatataccccagggctggagttaggtcctacccatccccgcgtagcaggctgcccacccgcccaccccgcctggaagctttctgatttctctgttcgccccg

SEQ ID NO: 27942 - DNA, 122 bp, Homo sapiens
ggcagtgggtgcaaggagtttggtttgtgtctgccggccggcaggcaaacgcaacccacgcggtgggggaggcggctagcgtggtggacccgggccgcgtggccctgtggcagccgagccat

SEQ ID NO: 27943 - DNA, 122 bp, Homo sapiens
cttcactgcctgggaggcgtgtccggctcgctggcctcagggacgttctgagaccacacccggacccttgtacctttcctgagggctctgagcatgtgccaaggactcactctgcctaacac

SEQ ID NO: 27944 - DNA, 122 bp, Homo sapiens
ccacgtgccggagttatcgcgtggaaccctcggacccacagccacgtgccagagttatcgcgtggaaccctcggacccacagccaagtgccggaattatcacgtggaaccctcggacccaca

SEQ ID NO: 27945 - DNA, 122 bp, Homo sapiens
tctaaaaagcagtcaagagcatggaggttacaggttattttggtggcttgttttcctcagcgtgtgaggggtagggtggtgtgagggtggaaatagggctcattacgcctttcagtttattc

SEQ ID NO: 27946 - DNA, 122 bp, Homo sapiens
gaagcgggaagtctccaagggccggttcttcagcaccagagcccgaagagcccgcagcagcgtctcctggagctgctccaccgaagcggaattctccatgcccgagcggtctgtggggaaga

SEQ ID NO: 27947 - DNA, 122 bp, Homo sapiens
aataagccctcggggactggggttgtgaaaagcgaggtcgtgaagacgccggcctcataccgaagggtaggacggtgaggtcagccccgtcccactccaactaaaatcaacctgacaggtat

SEQ ID NO: 27948 - DNA, 122 bp, Homo sapiens
cctagaaattaatctaatgcttttgcaaacaaacaccacacacttttatttcagagactgcgtgaagggtgggtgccagggacagtctggaactggcctcctcatattatcacaaatcttcc

SEQ ID NO: 27949 - DNA, 122 bp, Homo sapiens
atggcaacctcagtaacacagtagtaattaaaaccctaccgataactgagttaataggcacgtacaaaatgatgaaaagcaggattttattctgaccacaggtgttgtcagagacataatgg

SEQ ID NO: 27950 - DNA, 122 bp, Homo sapiens
ccgatctgcgtgagcacgatctccctcatggccaaggcgggattaggacggcaggagaaacgtgagaaggaggagcagacgcgcagcgacccagcccgccctccgccaacgtttaaatagcc

SEQ ID NO: 27951 - DNA, 122 bp, Homo sapiens
gcgcccgggcgggaggcaaccgggatgtggaaactctcgcgggaagatgcgtcgttgcctcggtaaccgcgtcgcagtcgccgaagatggcggggcgaagtctgtgtctcacggtcagttca

SEQ ID NO: 27952 - DNA, 122 bp, Homo sapiens
accgcggctcccagggatccctcagccgcgggagcggcaaactaggggaaagctcagtcccggaactgctagaacgaaccattcgcatatggagggggtgacccaccatctcagaacattaa

SEQ ID NO: 27953 - DNA, 122 bp, Homo sapiens
cgtggaaacccccagcccagtggttatggactttcttggggcctcaactctccccaagagcgtgatcctcactacgggggagcggcgctttatccggcggggcgggtggacactcctacaga

SEQ ID NO: 27954 - DNA, 122 bp, Homo sapiens
tttcgttacatggatatatgccatattggtgaagtcagagatttcagtgtgcacatcacccgaaaaatgttaactgtacccattaaagtaatttctcatcccccatttcccctcaccacatg

SEQ ID NO: 27955 - DNA, 122 bp, Homo sapiens
aaataaaattactaattaaaaaaaagtaaagcacgactatatgaaatttctagggcccctcgctgaaccttgtaaagggctgtgcaagggaaggaacttgaggtcaagtttcattagtctca

SEQ ID NO: 27956 - DNA, 122 bp, Homo sapiens
tgggccgcggaaggcgatgggtactgcaaggcagcggccttggtggtggccacgatgccgcgcaggaggtcgcacagcaggttgctgtagtgggtcacctggctgcgcacgtcagcagcctt

SEQ ID NO: 27957 - DNA, 122 bp, Homo sapiens
cctccctgggatgaagagtccccctcctggcagaatgtctgggctttgcagagcaggccccgggggtgaagtcgcagcttcacttacaccagctgctctgtgagcaaggcttggtgccctgg

SEQ ID NO: 27958 - DNA, 122 bp, Homo sapiens
tgagagacgctacggtgcgtgagcgccagtgttttcctgcagtataattccaccaggtttcgagaacgccgaagcagcattttaaaaaaagaaaaacaaaacgtgtatctagagttctgcgg

SEQ ID NO: 27959 - DNA, 122 bp, Homo sapiens
ggggctcaaactggcggcggctcagcagggggcgaggggtgctgggaaacgccggggctgcgaacttacggaagaaaatgtactcggtgtagctgctccagatcttgtcgtcgcggtactgg

SEQ ID NO: 27960 - DNA, 122 bp, Homo sapiens
gttctacaaatgcaggtatgtttcacaacttcaggttttttttacctgtaagatgagaagcgttgcaatagtatcaaactggaatggagtttgatacatagtatggcgcctagaagaagcaa

SEQ ID NO: 27961 - DNA, 122 bp, Homo sapiens
agagccggaggaagggccactctgctgacaccgggatcccggacgtctgtcctccagaggcggaggaagggccactctgtgacaccgcgatcccggacgtctgtcctccagaggcagaggaa

SEQ ID NO: 27962 - DNA, 122 bp, Homo sapiens
cccgcagccccgcccctcgagagcggacactggtagcctgggcaggtactggggcaaagccgcagccgccgcctcccgggagcaccccttcccaggcacgctgatgcactctgcagcgggct

SEQ ID NO: 27963 - DNA, 122 bp, Homo sapiens
ctgctgaaacgtgggagttgaaaaaggtacagcacctgcctagcaatgaccagctcctttcgtcacaaggaagatgacatttttagaaaacatgtcatgggttttcactagatctccatgtt

SEQ ID NO: 27964 - DNA, 122 bp, Homo sapiens
caggctcacttcatagtgttttctgggatgactcttcaccttcatcctgggaggctttaccgcctgtcttctggtttggatcctcagtttcctaaattcctcatcttttccttacttgactt

SEQ ID NO: 27965 - DNA, 122 bp, Homo sapiens
gggcttgacagcgggccgggcagcccgttggtcttaaggccagagtccccaggttggccacgtttgccacataagagaataagggatgaaaaggaggaactggaggatctgtaggccgagtc

SEQ ID NO: 27966 - DNA, 122 bp, Homo sapiens
aggaataataacaggagataactcatccagcagcacgaagtgcgtataaatgtcccggcacggagtctgacacatcctaagtgctggatccgtgctgggcatgtttatataattgcacatga

SEQ ID NO: 27967 - DNA, 122 bp, Homo sapiens
gggcgagggccaggcgctgggcttcatcactgcgtttccgttttctgtgaaatcaaatggcgcctttccctttcccgggaagtcggtgtcaccgcccgtttgctgtgaaatcaaatggcgcc

SEQ ID NO: 27968 - DNA, 122 bp, Homo sapiens
aggggtgaactggggctaccatgcatgtacttggggctgtccagcggcaggtcacttttacgttgcgttgagtgagcttcaaacgcggtttggaccccgtggcttcggcgatttcggaagct

SEQ ID NO: 27969 - DNA, 122 bp, Homo sapiens
gcagggcccggtggtgctgtggactgggaccgcagggcaagacccggtggcctggagcagcgcccaggctggtgtccgagggtccgacaaactggggatccagtgggccgccaagagccgaa

SEQ ID NO: 27970 - DNA, 122 bp, Homo sapiens
tcgtgctgggagctgtagaccggagctgttcctattcggccatcttggctgccacccaatcgattgccctaatttttaatggataaaaaggatgctcagaagaaaaacttagctccataatt

SEQ ID NO: 27971 - DNA, 122 bp, Homo sapiens
ctctcccctcttccccatacccacacaagtccagccactccggcttccctgctgctgctccgggacaccagccttgctcccgcctccatgcctgctgcactctctacgtggcttgctatcct

SEQ ID NO: 27972 - DNA, 122 bp, Homo sapiens
tttcttattcacttcttctccatgatggaatcaggtattctgctggccatgagttttgaccgctatgtggccatttgtgaccccttgcgctatgcaactgtgctcaccactgaagtcattgc

SEQ ID NO: 27973 - DNA, 122 bp, Homo sapiens
agggggtgctgggcgctgagcggtggctctggcagggcttggtagggtgggggacggtcgcggggcgatctgtcagggagggggtgggcgtgaggggcgccgtccgcctgaggggctgcaga

SEQ ID NO: 27974 - DNA, 122 bp, Homo sapiens
tgctattattagcacagcaggtttacagtttataaaccacactgacatcatttcctcccacgttttccatgtaacacatctatgagataagtaggatggatcggattctgttttaacagaca

SEQ ID NO: 27975 - DNA, 122 bp, Homo sapiens
gccattgactctctctgtccagggaccgccatatgtgacttgtgctgtctgtgaccaggacgcgggctcttgaaggagcagcgaggagcaagagagaggggagcggacgccccgactcgcgc

SEQ ID NO: 27976 - DNA, 122 bp, Homo sapiens
tttgtattcggaggatcccgtgtgagctgcagctgttggcgtgtgcctatgtgctgggggcggatgcaggggctggggaccatcaaggatgatgtgtggctggggtgggaggagcagtgaca

SEQ ID NO: 27977 - DNA, 122 bp, Homo sapiens
gagttcagctccaaaggcggcctggttcgcaggctcctttccctaagatcctttagaaatcgttcccatcccagaaaggaagctggggcgcagctgtgagcgcccccctctccccccgcctg

SEQ ID NO: 27978 - DNA, 122 bp, Homo sapiens
gctgggggctcggctgtggagcaggaagaggcccatgaactctgctctcctcttgcttggcgcactggcctgacctgcactcagcggccacaaccttccattacagcttcctcggggcccag

SEQ ID NO: 27979 - DNA, 122 bp, Homo sapiens
aacagggcccctcagcgctgcagtgtgtcacatgtccccagtttcccctcgtggtgctcacgccacacccctggcacggaggctggaacccaggtgtcagtcctggctctgaccatgacctt

SEQ ID NO: 27980 - DNA, 122 bp, Homo sapiens
gctcacagtcccgggcttcctgcaaccaggccgggtctccccgggcctcggcgccaggagcggggctgggggcggcgccatggggcctcgcagccccgatcggcggccgccaggtccctgga

SEQ ID NO: 27981 - DNA, 122 bp, Homo sapiens
ggtcacaaccctagatggtgactgaagagaggacaacagccagcggtccatacgctgagacggatgggagaagagacacacagggacgaggaagccagcctgggtactaagtatcccctgga

SEQ ID NO: 27982 - DNA, 122 bp, Homo sapiens
cagtcttcacgggctccagactccgcccatggtccgtccttcaggccttgactccgcccacgcatcgacgtagaatttcccggccgggctccatgaagtaccacccacccgcgacgccgacg

SEQ ID NO: 27983 - DNA, 122 bp, Homo sapiens
tcagggagtgcagaccactttcacatgcagcttctcatttcgttctgataacctagaggacgggcaaatcatcgtaggacgatgagcgctgagctacagtgaatgtagcttgttatcttacg

SEQ ID NO: 27984 - DNA, 122 bp, Homo sapiens
ctgcgcgatagaggaaaggagcctggtagcgaggagagcggctgaggctcagtgcgcctgcgcggcgcggatgggcgaggcgtgaccgaggggcgaggcgtgaccgaggggcgaggcgtgac

SEQ ID NO: 27985 - DNA, 122 bp, Homo sapiens
aaaataactggatttctggttaattggtgacatcctcaagagctgtggcaagccatgtctcggccgcgtgatggggcagacatggtgggtcctgacggccttgtcttcaccaagtgctccta

SEQ ID NO: 27986 - DNA, 122 bp, Homo sapiens
cagtcctgcttggagcggtgactgggaagacagacgtaccctgaagaagcacagaggaatcgagaccaattgtttttgccttattttcctagttaagtatacaaaggagtgatatcaataaa

SEQ ID NO: 27987 - DNA, 122 bp, Homo sapiens
cccaactgtagcctaactgtaggggaagccatactgtggccgtggcaactgaagacatcccgtcccaaactctggaaaggatgagggagggggctgatgcctaggcctccgtggggaggagg

SEQ ID NO: 27988 - DNA, 122 bp, Homo sapiens
agcagaatgcaggaggaaaccaggaaatggccaggcgagtctacattagcttagtgtttccgtaatggcccaaaacagactgaggtcttctgcaaacactgatggctagttatcccaaatac

SEQ ID NO: 27989 - DNA, 122 bp, Homo sapiens
gagcggcgatcctcgcctggaggtcgttggttttcacacccaggtacaggcaagacaccacggccaccactgacaggagggccgccaggacggcacacgggggcatggtccgggcacaatgc

SEQ ID NO: 27990 - DNA, 122 bp, Homo sapiens
ctttgggagagcaactttgtgcaatggcaagtgtgtggtattacctgtaaaggcaaaagacggaacgtacctaaatgccaatctagagggacttgggaaaatgcatgatcattcttctctaa

SEQ ID NO: 27991 - DNA, 122 bp, Homo sapiens
ggggcggggaagggatggcgagctcggggtgcaccgcctgtttcttttctggttaggtatcgtccttggagaagatggaagcggagaggcggccggcgccgggctcgccctccgagggcctg

SEQ ID NO: 27992 - DNA, 122 bp, Homo sapiens
ttatccggggtccttccgggaaagtggctgatggctcatggctcacttccctcagctccacgcaggcctgggtggcccgctggggaatgagcagaaaccctgcccagggcaccctgacactg

SEQ ID NO: 27993 - DNA, 122 bp, Homo sapiens
cccaattaccggcagactgcaaaggagacagatgcagatggctccagatgcggggaagtgcgctccggtcgagggccgtgattggggatgatcatcgcctacagcggcctttggtcctttat

SEQ ID NO: 27994 - DNA, 122 bp, Homo sapiens
tattggatcagggtgggccattataagaggagggaaattttgacacagacacatgggagacggccatgtgaaaatgctgtcagagattggagtgaggcatctacaagccaaagaatgccacg

SEQ ID NO: 27995 - DNA, 122 bp, Homo sapiens
aggtctgcagcttcactcctgagccagcgagaccacgaacccaccagaaggaagaaactccgaacgcatctgaacatcagaaggaacaaactccggacacgccggctttaagaactgtaaca

SEQ ID NO: 27996 - DNA, 122 bp, Homo sapiens
gtcggggtgcataccctcattccctttctttcctccccttcccaccccagctgctctactcgcaaagccacctgtcagcccagagacagaggccggaaactcctggttgctaggcaacccgg

SEQ ID NO: 27997 - DNA, 122 bp, Homo sapiens
agccttgcaatggctacgaagatggctgagattccttctagcccatatgagccgggacagcgaggcatgaaggatactcagagaggtgatgcccctcaaagaggaagcccagagccccgaat

SEQ ID NO: 27998 - DNA, 122 bp, Homo sapiens
agggagccaattctcagccaagggctggggtggagggtggagaagcttcaggtttacgggcgtggggagcgaggatctccatgctctatgctttgacagtcctctcctggctagtgggcttg

SEQ ID NO: 27999 - DNA, 122 bp, Homo sapiens
tagcaatttccgccgggaagccgtgaacatcggcagccactggcgtttcctccgagtcctcggaactccggaaactctgggagcttttagcccgcccaccaggggaaagcggcccggagccg

SEQ ID NO: 28000 - DNA, 122 bp, Homo sapiens
ctctacccctccaaaggggactgggccctcttcagggtaagtgtgatccccagaggctcccgggggggaggagatgtggtgccatttcagcttcacagccagttcttcagccccaaaccctc

SEQ ID NO: 28001 - DNA, 122 bp, Homo sapiens
gggccactccctggcaggccgctgcagctccgtgggcagccggcagagggtcctgggctgcggtcacttccaggcactgggtgtcctggaatcccgcctagtcgtgccctcagccagtatgc

SEQ ID NO: 28002 - DNA, 122 bp, Homo sapiens
gcaggtagttcatggctgcgacttggggcagggggtcctaggggtggtctggccaggagccgcgggggcggactgcgcggtgcccaggagcacagctgcgctctcaggcacgacacgactcc

SEQ ID NO: 28003 - DNA, 122 bp, Homo sapiens
ctgccaatgtttttatgtaatcctctggctctccccataaaacagaccataacaccatggcgagcacacttcaatagagccatgtgctattgccgggcacaccgccttccgggagatgaatt

SEQ ID NO: 28004 - DNA, 122 bp, Homo sapiens
acttgtaacattagggattaaaatacaatatgagatttggaacaaatatctaaactatatcgtatgaccattggaaaaacagatgaaacattcatggtttctactgtccagatactttcatt

SEQ ID NO: 28005 - DNA, 122 bp, Homo sapiens
caccccccttcctgcgcccgcgctgccctcagaaactctctgctcaggttcagctcggcgcggggaagcaactcgacctagcaggaatggtgccaatatagccaccccggaccggcgagcgc

SEQ ID NO: 28006 - DNA, 122 bp, Homo sapiens
ggcagcagcaccagcaggctcagctccttcctggcgtagggcagctccagcagctgcgcgcgcacctcgcccacgtgggcgagcttaaacgtggcctcctgatacatcatctgcactggcct

SEQ ID NO: 28007 - DNA, 122 bp, Homo sapiens
ctcccaaccctgctgtactgtgagtcaattaaaactctttcctccccttctgcgcggtcacgccgagccagcgcctgggcctggaaccaggccacagccccccagcttcacccaccacctcc

SEQ ID NO: 28008 - DNA, 122 bp, Homo sapiens
ccattgaagtgggtcaagtgtgttgtcgaacgtagtgcacacgtacaacggcaggtctgtcgcacacggacgacggcaggtctgtcgcacacgtacgacggcaggtctgtcggcacctgagg

SEQ ID NO: 28009 - DNA, 122 bp, Homo sapiens
tggaaagattgcggggtcattgtggggtcaggctgagggggccgggcccagccctattcacgtgacccggtcccagggagaggagtttgttcacccaccagagggaacgcccgacgcgaagg

SEQ ID NO: 28010 - DNA, 122 bp, Homo sapiens
ttctggtctggctcagccctatcaaaaattgtcaggcttctgtgaactttcattaagtcccgttcagaagactgcacaacccaggttactttagcagctcgggaagggcctggagcagccgg

SEQ ID NO: 28011 - DNA, 122 bp, Homo sapiens
aagcagtggcgtctggtcagccctcaccccaagtaaaggccgaacccggcacgttcgcgccgcttgtctttgcacctaagcttttactcttgtatgcggaaggagtaggaaagggttagatt

SEQ ID NO: 28012 - DNA, 122 bp, Homo sapiens
tcagatgcattcatgtgatgtccgccccagtatccgggaaaggcccagcggcagcaggatcgaggtttctgagttcagggattgagttcagggagcggggccagctggggtatccgtttggc

SEQ ID NO: 28013 - DNA, 122 bp, Homo sapiens
cacagcactcagtgctagctagaacttactagctatgtgaccttgggcaattgtggaaggcgggataatgcttccgcctcaggatgtccacatcctactccctggaacctgtgcgtttgttc

SEQ ID NO: 28014 - DNA, 122 bp, Homo sapiens
aatgtctaatgttccgctatgttccagatttgttcgcgctgttggtggaggcgcaacagccgggaagcgcttactgggctccacacggactacacacactgtatcttgtcatttcgtcctca

SEQ ID NO: 28015 - DNA, 122 bp, Homo sapiens
cctgggcgggactgtctcgtggcacccggtggaaccgaggagaacgtggagcgccgggagcggcgaatatggacgactacagcctggatgagttccgtcggcgctggcaggaggagctggcg

SEQ ID NO: 28016 - DNA, 122 bp, Homo sapiens
gcctcagcccactccggatcaggctggccctcccagctctctgcctccccactcctgtcccgtgtcccccagcccagcagccagagtgacccggctacagcacaaatcccagcacctcgctc

SEQ ID NO: 28017 - DNA, 122 bp, Homo sapiens
ggaggcggggaggggtacacaacaagggcagcctaggctccggttgctgtgacaaagaagcggagtggccctgctgcattcttttgctggcatttggcataagcctgtgatagataaagagc

SEQ ID NO: 28018 - DNA, 122 bp, Homo sapiens
ggcatgccgggacttgtagtccatttataagagggttgcgcttgcgctgtagccgcccagcgacctgtgcgcggcgtctgagcgagctgcagccggaagaacattcggttgttgatattgcc

SEQ ID NO: 28019 - DNA, 122 bp, Homo sapiens
cgggaacgtgagcgacgacggctgcagactggccttggcatcctcagctctctttaatttcgcgggcccacctggtggcaccccaggggacgcgggctccggagaggggcgcgcgagagaga

SEQ ID NO: 28020 - DNA, 122 bp, Homo sapiens
ggcctccaggtaggatcaggaagccactcctcacctttgctcggacctcttctgtgttcacgtagagtggacttttaaaagcctgacccaagtgcctcacgatgcttagggggaagccgctg

SEQ ID NO: 28021 - DNA, 122 bp, Homo sapiens
ccccgaaccgaccaccgatcgaccggcaccgctgttgcctcgtaagccatagcgcatgcgcgctctcaggataaacaggccctgcctgggacccacacgcctctgtcttttctgagcctcct

SEQ ID NO: 28022 - DNA, 122 bp, Homo sapiens
gaagctggctctgtgtgtaccgatgtgggactgtagccaagacacacagaagcatgcaaacgcaaggtgcagggtggtggctcagcatgctgccatttgtgtgtttgtttaaagagaaatat

SEQ ID NO: 28023 - DNA, 122 bp, Homo sapiens
aaggttggtcagggtgaacccagctccttggaaaatagttgcacaacagatcagctcccccggtttcagggctgaggtgggggatggaatcattagttggcagtaaatgaagttgacctagt

SEQ ID NO: 28024 - DNA, 122 bp, Homo sapiens
ttttttaattgattttgaacaatgggatctctgtctgtctccgattaaaccacgtggatccgccttccttcctctttttattccttcaatcacccagcccccctcccccaggttttttttta

SEQ ID NO: 28025 - DNA, 122 bp, Homo sapiens
ttgccccttctggatgtttatacagatggaatcttaaaatctgtggcctcttgtgtctggcgtctttgacttagcacaatgtttttcaaggtccgtccgtgtcgcggcgtgtatcgttgctt

SEQ ID NO: 28026 - DNA, 122 bp, Homo sapiens
gcgaaaacaggcggctattcacgacactgcaaaagatgttagactgctggaggctcagtccgcctccaggttccgagtgccgcagagaacacaggccaggttgattcagggcaagagatttg

SEQ ID NO: 28027 - DNA, 122 bp, Homo sapiens
ccatcgctggcgaacccagagcttctgaaccagcctggagcgccacctagtggccgtaggcggggctagccccgttccctggcgaagctttgtgatggcccagttgggcgatgctgtgggtc

SEQ ID NO: 28028 - DNA, 122 bp, Homo sapiens
aactggcccaagtctaggtattgactgggaacttcagagtagccttaaggtggggacccccggggcagagggttgggcaggagtgtctacacgtgtgcagcaaccttccctccaggccggat

SEQ ID NO: 28029 - DNA, 122 bp, Homo sapiens
gccgaggggggagcagccctgctgggggcctataaatacatctcctcaggccactagagtcgcccctggaggtcccgcggcgtgtggggcagtgggaggccatcaaaaccagctgacagctg

SEQ ID NO: 28030 - DNA, 122 bp, Homo sapiens
tggcccggggagcaggaaggtatgagcctcagctgagcgaaaccctccttgcagccaccacggagggacggggcgcgtctccttctgaatgacgcaaggggcggggcgcgtggtggggcggg

SEQ ID NO: 28031 - DNA, 122 bp, Homo sapiens
gcagccctggccccgctggtggcagctcctccccgtcccagccaaggccgcctggcaggacgggagtggaggacacaggctcaccctacggacagccagggtccacgcctctgtggggaagg

SEQ ID NO: 28032 - DNA, 122 bp, Homo sapiens
gtggctttgggggcaaaaagccacagcctcaaaaaaccatagtggtggggcaaaaagctgcggtggcggggacaaaaagcagcaagagcgggggcaaaaaaatcacaaaaacccgcggagac

SEQ ID NO: 28033 - DNA, 122 bp, Homo sapiens
tgggatgggagctttcctggccccagtgccccatgggttagtgaactctagcaggctggccgggcctctggagagctctcctgggccctgccctgcctgtggcagaggcagacccttccctt

SEQ ID NO: 28034 - DNA, 122 bp, Homo sapiens
ctcaggaaaacactttctagaattttgtccgagtgtctgttgggaaacgcgcttacatcccgcagaaggcggtaaggacacagcgcacaactctgcattatacctgcgagttaaaaagccaa

SEQ ID NO: 28035 - DNA, 122 bp, Homo sapiens
tgacaaaggccaggcactggaggccacatgggacaggtgctcaggaaggccccaggcacacgcacagcaacctaaacaacactgactacacccatgccccctaacacaccagctcacactgt

SEQ ID NO: 28036 - DNA, 122 bp, Homo sapiens
cggttcgaagagctgttttctgcaggtacttgcagtagcagctggcctgggacccacccccgggcaaagtccgctccggagtctgtcacttcccggcgcgggccacccagcccctggcgccc

SEQ ID NO: 28037 - DNA, 122 bp, Homo sapiens
actccaaaggcgaggtgggtagtacttgtctgcatatgacagctaaagaaactgcaactccgacgttggtggcgctgggagtctcagtggcggcggggcggggcagggccgggaccgaggcc

SEQ ID NO: 28038 - DNA, 122 bp, Homo sapiens
caacaaagaagactgagtggcgctaccttctttggtgcccaggatggtttgggaaagtctcgccttcatcctcccccacagttttgcgattttgaaacgggatctcgctctccgcggaagac

SEQ ID NO: 28039 - DNA, 122 bp, Homo sapiens
tggaacagccactgtggaaaccagtctgaccgttcctcaaacgatcaaacgcaaagttaccgtatgaccctgcaactccactccccagaacagacccaagaagaactgaaaatgggtgtaaa

SEQ ID NO: 28040 - DNA, 122 bp, Homo sapiens
cgcggaagagcaccccgggccgccgccctgctccctctcccagcctgggcctcctggcagcgtaggccacgggagaccctgcagcacccagggtgggagtgcgtctcaaccggacccagagc

SEQ ID NO: 28041 - DNA, 122 bp, Homo sapiens
gcgggcggagaaaggacatcacgccaccgaaggggcctctggcctgcggtgacctcgcctcggcactcccagggccagagttcaccccagtgcatttgcagagggtccctcctcaggcagtt

SEQ ID NO: 28042 - DNA, 122 bp, Homo sapiens
agcaggttgatgtctgcgtggtagctcgctggagtggacttgtgggtgttctcaggcctgcgagcgggagaggcctcgttaggagctctcctttgtggtgagcttatgctgaattaaacagt

SEQ ID NO: 28043 - DNA, 122 bp, Homo sapiens
agcctcgggtcggcccggcaccgctgcttcggctcagagtccttgcaatcgcttggcctacgaacaacctaaatgaaatttagggttttattgaaaaagtcccctggggcctaatttagcct

SEQ ID NO: 28044 - DNA, 122 bp, Homo sapiens
agagccgagggctgggcaggagtctgggaaggagcgggtggggtccactttccccaggtgcgctggactctgtccctccatggctcatggacaatgattgacctgaagccgctccaggaagt

SEQ ID NO: 28045 - DNA, 122 bp, Homo sapiens
agctgggaaactgaggtgatcacaatgtcagagggcttgcggagtcatcatcattaaacacgcatcgaatgcctactttgcaagagaggcactatgctagggtctcaggatcaaaaaagaaa

SEQ ID NO: 28046 - DNA, 122 bp, Homo sapiens
gacccaagaaatgcagtagtgtcattccagtctgagtctgaaggcctgaaagccaggagccgagccaatgggatggtgtaaatcccagtccaagagtggaagattgatgtcccagctcagaa

SEQ ID NO: 28047 - DNA, 122 bp, Homo sapiens
aatgagtttccggatcaaaaaggctcactaaatacccagcacaatgaacgaaaatggatccgctccgagacacatcaaaactggcataaagtgtgaagattcattagtgagaagcacataga

SEQ ID NO: 28048 - DNA, 122 bp, Homo sapiens
aaacatttaccgtatatctactagacataaatatcctttgcatcataaacgtataaagcacggggtatctcctaaaggattatgggatgtgataggtgcctaagtacaaagattcatagtca

SEQ ID NO: 28049 - DNA, 122 bp, Homo sapiens
agagtacttcccaagtacttcctgaagaggaaattctaaaaaagtggagatcttaaggtccgaagaagacaacagaatgacttagaaaatacaactggcatgaattaaagagacacaggtcc

SEQ ID NO: 28050 - DNA, 122 bp, Homo sapiens
cccggagcttcacctggaggttagggcagaactttgtccatcaggaactgggggttcagccgtctccacccctccccatcctgccctgggagcagctgtccccaggctcaggggctcctttg

SEQ ID NO: 28051 - DNA, 122 bp, Homo sapiens
tggtgtccagggcactgggaatcgcagccttccagccctcgaaatcggtgacgtctgccacgaagagcccttcgcagagcatcagggctttgttttcgtaggcaatggtgcgatctgagccg

SEQ ID NO: 28052 - DNA, 122 bp, Homo sapiens
ccgcagaggccgcgccgggccgcgctctgattggctggaggccgcggccctcgcccaggccgcccgcccagtctgcccgccccgtccgctaagtgcctgggctctcccgctcgcgtcccagt

SEQ ID NO: 28053 - DNA, 122 bp, Homo sapiens
actctccaagaaggtctcagggctagaggctatggcacacaagtacacttactctttcctcgccttctgaactcccaatcttttctcaggacttagaggacagtacacacacaactccaatc

SEQ ID NO: 28054 - DNA, 122 bp, Homo sapiens
ctagacccttccagatggcccagccgggagcctggtacaaccctggcagtgaggccagagcgggcacaggcttctggtccagcccccaccactccctcacctgctgcatctggggctgcatc

SEQ ID NO: 28055 - DNA, 122 bp, Homo sapiens
cgcggcggcgcgcccgggggtgggtggctgaggcggcggcgggcccaaggcgtgaggcgccgcccgggtgtccccgcggcgcaggaggcggtggagcgcagagcgggcgagcgcggtgagta

SEQ ID NO: 28056 - DNA, 122 bp, Homo sapiens
tccccggggtgagtgagagggcaccatccctggggcaagggcccccaggcgcaggatgcacgaaccgagggacacaccgccgccagactgacctggtgtggcggtcgggcggggccgggcca

SEQ ID NO: 28057 - DNA, 122 bp, Homo sapiens
aataaaaagaagatgctttttcagggagtctacaagaccttttacatagatgtttcaaaacgatgatggtgatgcttcagctagtgaaaaattatcagaaagatacaaaaaatgatgacgat

SEQ ID NO: 28058 - DNA, 122 bp, Homo sapiens
gtccacgataggtgagagggctcattccctgtaggagaagtgagctgaaaacactttccccgcaagatctccctcgttttactcaaggtagtcgcggcgttgagaacgcctcgcagctcctt

SEQ ID NO: 28059 - DNA, 122 bp, Homo sapiens
ttccgcaggttcacctaccgtggcgtggacctggaccagctgctggacatgtcctacaagcggctgatgccgctgtacagtgcgcgccagcagcggcggctgaaccggggcctgcggcggaa

SEQ ID NO: 28060 - DNA, 122 bp, Homo sapiens
aaggtgcggaaaggggacttttccctcaggaaagccggcaacagcagaggccctagcccacgtcgccacacccactccgcgcgcgcccctcgcctcccagggccggctctgctcggccccgc

SEQ ID NO: 28061 - DNA, 122 bp, Homo sapiens
aggtttgcggacaagggaggacagaactcacggcaccccgtcggcagaggaaggcagcggcgcttcccgcgtgcacacaacagtccctgcggcccgcacacccctggctgtcatcggggagg

SEQ ID NO: 28062 - DNA, 122 bp, Homo sapiens
ggattttgaagcagacatccacatgcccactgcctgggctggacagctcacaggccactacgattcaccacacagccagccagccaccattgctccaccaatcatgcatctgattttaaaaa

SEQ ID NO: 28063 - DNA, 122 bp, Homo sapiens
acatcccacgcaggagatgcaagagccaatgggcgggtctgctaagcccgcgaactctgccgcgttaaattgcctagaagctcccacccttctgactgttgccacgtagttcttagtttccg

SEQ ID NO: 28064 - DNA, 122 bp, Homo sapiens
gctaccagaatgaagagtaggagagccaagtagatttttattctcctgggtctggataagcgacagtgttgactaggattctatcactaatcaagagcacccagacagccaagaattagcac

SEQ ID NO: 28065 - DNA, 122 bp, Homo sapiens
aaaaaaatagaattgatgcaaacagcctgttccttccggggttttgggctggaactgcagcgcttagagagctcggtggaagctgctaaaggcggaggcggggctctggcgagttctccttc

SEQ ID NO: 28066 - DNA, 122 bp, Homo sapiens
gagcaaggtaagtatggtggccttcaggacagggcaggaagaccaaagcctgaacccttgcgcagccatgggagaagacagcacattagagggtagcccctgagacccaggagaacagggac

SEQ ID NO: 28067 - DNA, 122 bp, Homo sapiens
tggaggtcacccgcaatcttttgctaaagcaaacaaggctgccaccaggatccctgcacacgcattcgtgcctgtgtgcccgtccagctgtgggacaaactgaaagtggaagtgcgattgct

SEQ ID NO: 28068 - DNA, 122 bp, Homo sapiens
tatcccagagcttcagcttcacccgctggccgtccagcaggatggtggtcgtcttgtagtcgatccccccgagatggctgtacggggactcagctgcaccatcctgcaggctctccaggatc

SEQ ID NO: 28069 - DNA, 122 bp, Homo sapiens
cagtttcctttttatacaatagggaaattggattcagtaatctctgatgctcctgcctagcgctgactatgagagtcaagaatcggatttttccatcccttctgaggacctcacccagtgct

SEQ ID NO: 28070 - DNA, 122 bp, Homo sapiens
aacccactgaattgtacactttaagtgggtgaattgcacagtaagtaagtggataaattgcgtagtgagtcataccttaaaaagctgtctttcaaaaagatatgtgcagttttacttgacaa

SEQ ID NO: 28071 - DNA, 122 bp, Homo sapiens
tacaggttactggcacactttccttaaaagtagtgaagatactaactcaaccaagaacttcgacttattaaatgtttgcctatttacatctagccagttccatcaaaacatctaagcaatac

SEQ ID NO: 28072 - DNA, 122 bp, Homo sapiens
caagctccttttttcaaatgcaattcccagtttgagagcagaggagtaaagaagaaaggacgatcattcatattttagggagaatgtgtctattggattatttcctaagaaagaaagcccga

SEQ ID NO: 28073 - DNA, 122 bp, Homo sapiens
gcttctctccactttcccatagagaaaccctgactggccgctgagggctagctacacacacgccctcacgcccggcgagcccgcgaggtaggcgccccccatccccagccctccctgggcgc

SEQ ID NO: 28074 - DNA, 122 bp, Homo sapiens
cccccacaaaaaaataggaagcgctaagctctcccactcctgtcccaaacgtggaagggtcgcggacttgtatgggacgcggtctgaaaaaagcgagccccggggcgacgctcgggtttcca

SEQ ID NO: 28075 - DNA, 122 bp, Homo sapiens
ccgccgcagccgccgccagtccgcgcggcctcgggtggccggagctcagcctgcgcgcgccgcgccctgtgtctccgggtggggcagaagactcgccccttgaacctcccgcggggactctc

SEQ ID NO: 28076 - DNA, 122 bp, Homo sapiens
cgcatgcgcagagaccgccttcggcgaatagtgtctcttagcaacggctttgagtccctccgccaggggcggagcctcggaagccaccacggggaagctgtaaggggaagtgagtgagacca

SEQ ID NO: 28077 - DNA, 122 bp, Homo sapiens
ggggcggggtcgcctgggggcggggcctggggtggggcctgcggaccgagggggcggagccggccgccccggggtcctcagtccgctccgggagagttagggctccgagccgagcgcgcgga

SEQ ID NO: 28078 - DNA, 122 bp, Homo sapiens
tatgaatgtatttgagactcctatatgctagacggtgtgcggggcacctgggatacccagcggaataataaaagattcatgccttccaggagggcacagtccaggtggagaaagagaattac

SEQ ID NO: 28079 - DNA, 122 bp, Homo sapiens
attggttagaaactttggcgtcatctgaggatttaagccctacacgccaactgtataccccgctttttattccattaccaagacaaagatttggggccaggcgccttggaacacgtctatta

SEQ ID NO: 28080 - DNA, 122 bp, Homo sapiens
acattatgcaaataggtagaactgcccgaagaatgcctacgctgcgtggtgcggacgaaacgcttcccggggcctttggattggtctgtctagccacctcatttgcatgacgtaatataata

SEQ ID NO: 28081 - DNA, 122 bp, Homo sapiens
tgcacgcttccttccacgctcgttgggacatcgtaggcatattctctcaggactgtgagtcggcttgcccggtgtcctttacttctgtttttatggtggcggcttgagtgcacatttgttcg

SEQ ID NO: 28082 - DNA, 122 bp, Homo sapiens
atctccctggtcacacctccttagcaaggctatgatcacctccttcagcacagaaaagaccgtgtggcttatgacactgtatgtaaaaccatgggaccatgatgtcagagtgaaaaaaacaa

SEQ ID NO: 28083 - DNA, 122 bp, Homo sapiens
tctcaagatcgggatgaacctgggaatgacgctaaatgatacaaaaataacacacatcaccgcaaaagaaaagatgcatgcacggacgttcagagaaactgcaaaccctgacacccttatgc

SEQ ID NO: 28084 - DNA, 122 bp, Homo sapiens
ctgtgggaaagcctctccccaccaggtgcaaaggtgacaggagttggcccatcccaacctcggctgaggatctgcagatcctgggtcctgtatcactgtaagacaagtccaagagctcatta

SEQ ID NO: 28085 - DNA, 122 bp, Homo sapiens
ttaatttatacgtgactaattgagacccagaaaaactgagtggcttgctcaaaccatacacgtggaattgaaaccagaactgcagacacttggttcttggtcaagtcttgtttccaacatgg

SEQ ID NO: 28086 - DNA, 122 bp, Homo sapiens
gcgccttcggggaggaggggctgtctgggctcggggcgcggcggcagtcagctctatgttcgcggtcttaacctctcctctggccgagtccttgcaagaagtgaattacccgaccctggtga

SEQ ID NO: 28087 - DNA, 122 bp, Homo sapiens
aaatgtccagatgaatgaacaactgcaaagcacctgttgtcaacagctgatttttgtctccgcgctttgattatgaagagcttgagaatactggaggttgttttcttcttctaaaaccttgt

SEQ ID NO: 28088 - DNA, 122 bp, Homo sapiens
taaattaatctagtaatgccatatgctggacaccataactcatacccttttgtacaacaacgtatagccaatcacgtatcaatgttatttctgtaaaccagtgagaattcctgaccaaaaac

SEQ ID NO: 28089 - DNA, 122 bp, Homo sapiens
gccagcccgggctcaggagctgggtgggaaacaaagccgccagaaaatgacaagtaaacacgcagccgcgggaagccactgggcggagcgggcgctaatgagcgcgcagcggggccgccacg

SEQ ID NO: 28090 - DNA, 122 bp, Homo sapiens
cgtttcggtgtctcccgtcatgcaagcaaatggtatggctctcggccgcctttgaataaacgagtgcttcgaaccctttaccaggagggactaggcgcacaaccacctccgacactcctcgg

SEQ ID NO: 28091 - DNA, 122 bp, Homo sapiens
caggtgtgggctctgatcctggctttggtggagggactagccgagctttgggaggaggctcgccttctgcacttggcttgggtcatctgaggacaaaaggaaggagcccctcatccaccttc

SEQ ID NO: 28092 - DNA, 122 bp, Homo sapiens
ccgccagccccgctccgccaggtgcagcgcagcgcaggggtgggcgggggtggggctcggcgcgcacgttcacggggcggggagggggcgggtcaggggcgggaccacagccggctgggccg

SEQ ID NO: 28093 - DNA, 122 bp, Homo sapiens
cacacttggctcacacccatgacactagccttgcacacacatttggaggtgatggcaccccggcactgatgccttggggatgctgagcttggacgaggcacgctgctcctggtgggggcttt

SEQ ID NO: 28094 - DNA, 122 bp, Homo sapiens
gttgatttagaacggcaaaccggattaggctgctcatggctcccccggctctgggatggacgcttgttaagtgggccccggctgctttccgtcagctgctttttaaaaagtcaatctcatgt

SEQ ID NO: 28095 - DNA, 122 bp, Homo sapiens
gagtgagaggggaaggggcgccaggcgagcacccgggagccagcgggacctgggcaggggcgcccggagcaggcgcgcatggcgggccccgcgcggggatccggctggaagagagcgtagca

SEQ ID NO: 28096 - DNA, 122 bp, Homo sapiens
cgccactcatggagcagtacgtgccctgcccggtctgcgagacagcctgggcccagcacacggaccccagtgagaaatcagaggatgtgcagtacttcgacatggaagactgtgtcctgacg

SEQ ID NO: 28097 - DNA, 122 bp, Homo sapiens
gactgtccttcacaggatgtgtgtgtgacatgctgccatgatcactctgtaatagtgtcacggggtggatgggggaggcctggctcagcagcagctcagggtactgagtcgtagatgacagc

SEQ ID NO: 28098 - DNA, 122 bp, Homo sapiens
tgggagtgatacttgtgcttgcttttcctacccacaaagattattgtgagagctataatacggtgagatacagaatcctgcttttaaaaatacaaagcagaatcaagatgtcaataataagg

SEQ ID NO: 28099 - DNA, 122 bp, Homo sapiens
ccgaataaacacgcacaggtgagttgtgtgggaaggtcatggagcttccatgccctctcccgcatgccaccccccagggacctcagatgtgtggaagcttgtcaaatcttgttcaagagttt

SEQ ID NO: 28100 - DNA, 122 bp, Homo sapiens
tgcacttgggacaggcacagacacctctggggagtgtctcgtgagcttttctgcagaaaacgtttcaggagtagacatttgccagtaaaaatcaatctggcacgtgcagaaagatgtgtcag

SEQ ID NO: 28101 - DNA, 122 bp, Homo sapiens
agccgccgggtacctgttggcggggcgctgagtgctaccgtcctttgggaattgtagtcccgcgctcactgggtcccggccagcggtcctcatactgcgcactcatctggggcggggcttgg

SEQ ID NO: 28102 - DNA, 122 bp, Homo sapiens
tggttaaattgaaccaatcaacctacttctaatggcagcttcagcaataaacaaatcaatcgattcaggccaccagtgttagaaacttgctaggatcagctcaactcctaatcaatcgtgta

SEQ ID NO: 28103 - DNA, 122 bp, Homo sapiens
ggcctgggagaggtatagagccagcgagagagcgcgttgcgcctatcactgaggcaggagcggtgaggtggagtcacctgctgtgcctcacccaagcgctaatgtcttaaagaaatataaag

SEQ ID NO: 28104 - DNA, 122 bp, Homo sapiens
gactgggcacctggacttcatgaagacggtggaaggaatatgacctaaaagtgagtgtttcgtgctcagaagttgtcactggctaaaacagcaatgtgtggctcctggtccctccaccactc

SEQ ID NO: 28105 - DNA, 122 bp, Homo sapiens
cacttccctcttgagccagtggacaggccaagggtccaggtttcctaactctggtgctctcgactttccatgagcctctcgcagcgatgcctaccaaaaggaatgacactcacaggtacaca

SEQ ID NO: 28106 - DNA, 122 bp, Homo sapiens
gcctcagggacgggtcttttgaagtgcctggtgtgacccatcttccgtgcttgaaatcgacgtagtggaccctggctagcatatttttccctgccaagattattgcaaaaagacgatgtggt

SEQ ID NO: 28107 - DNA, 122 bp, Homo sapiens
caggatgggatggccgagtatgaagcgaccccggatgagaagcggaaggcatgtgggcggcggctaatgcagaattttcttgagccacaggttcctgacctcatccctgaggtccccccggc

SEQ ID NO: 28108 - DNA, 122 bp, Homo sapiens
cgaatccgcccctctctccaagttccgttagctcgcggcttcgctcctctcccagactctcgcccccattggctgcaggccacgccgtcgccccgccccccggtccttccagcgcgccaatt

SEQ ID NO: 28109 - DNA, 122 bp, Homo sapiens
ggcccgagtagttggaggctttggtttttgcataatgggacccctattttccacttaacccgaaccaaagcggaatcatggaaggcctcaatgcaggcagccctgagggcgcaagaaagttt

SEQ ID NO: 28110 - DNA, 122 bp, Homo sapiens
gggctttctccgcaagcggatgaacaccttctggaggccctgccatttctcggccctagccgcatcttctggtggatggtgcaaggcccactgccccacaagactcaccaaggccaggccgc

SEQ ID NO: 28111 - DNA, 122 bp, Homo sapiens
caaaccgtacccggcacacagtaggtacgcagggaagatcccatggattcattcttccctcgcttcctccttcctgcatcccctcatttcgtgactcatctctcttttcctggcccccgcgg

SEQ ID NO: 28112 - DNA, 122 bp, Homo sapiens
aaacaatagcctgggacaacgctcttctgggctctgggtgtggtgtcaccttccttcctgcgatatgcatcaatttcccatggttagtgagacatctggggaagagattcacaacagttgaa

SEQ ID NO: 28113 - DNA, 122 bp, Homo sapiens
gtgaagggtctagcgcgattcctcccatggtaatgacttcctacagttaagaatcttccacgacaacctgtgccgcggggctgcctagctggaagtgagagccttcgcagcgagcactgagg

SEQ ID NO: 28114 - DNA, 122 bp, Homo sapiens
gcacgaggaggggctgccagactccgggagctgctgcctggctgggattcctacacaatgcgttgcctggctccacgccctgctgggtcctacctgtcagagccccaaggtaaaaaggccgg

SEQ ID NO: 28115 - DNA, 122 bp, Homo sapiens
ggcgccgggtgggccgtttgctgaccggatcgcggctacccgccagcgtgtccgcggcgccgccgccagcatgggctgtgccccgagcatccacatttccgagcgcctggtggccgaggacg

SEQ ID NO: 28116 - DNA, 122 bp, Homo sapiens
ctttcattgaaagagcccgtagggatcacgtgaaagaacactgcagagtgcgtgacgtcacgacgctcacaccaatgggagcctctgtttatgtcgggagccatcaaatagtcatcttcccc

SEQ ID NO: 28117 - DNA, 122 bp, Homo sapiens
ctcaggctcttaagagcatggcgtttggtccaggctgtacccgctgctctcagctgggcccgtgggtgggccgggcgcccctgctatagccaggaggtcaaggatccactgggaatgccatg

SEQ ID NO: 28118 - DNA, 122 bp, Homo sapiens
tccctgtaggaaatggtgaagcatagctctgggtctcctgggggagaccaggcttggctgcgggagagctggctgttgctggactacatgctggccactgctgtgaccacgacactgctggg

SEQ ID NO: 28119 - DNA, 122 bp, Homo sapiens
cgaagccacagaactacatttcccagcaagacccgcgcagcagggcacgcagactgtgtgcgtaagcgaccagatttccgggggagccgggggcgggacttcagcggaggccggagcgaggc

SEQ ID NO: 28120 - DNA, 122 bp, Homo sapiens
tccactttcgtcaggtactggagagggctgccggccggatgccagggcagaggggcagggcggacggctaggagttcaagaaacatcctggtctgagggaaaggctgcagcctgcaccgcca

SEQ ID NO: 28121 - DNA, 122 bp, Homo sapiens
cagcttcccctttgcctgcacaggtggagaagccaaggacgggctcagggaaccggagaccgagaaggcgctgtcctcttcactgcacgtgccctggaccagtgccggccctgatcgtgcag

SEQ ID NO: 28122 - DNA, 122 bp, Homo sapiens
gcagggctatggagtgagacaagcacaacctgtggcgtcaggaacgaggcacctgaaccccgccttcgccgatgatcagcaacggctggggatgagacgccggctctgcatgtgctggcctc

SEQ ID NO: 28123 - DNA, 122 bp, Homo sapiens
tattgaataactgcccttaggttaactttgatttgttactcaattccctttttaatgtcacgttcaactttttacttatcattcagtttattttttttctgattaaaaggattgtcttttct

SEQ ID NO: 28124 - DNA, 122 bp, Homo sapiens
acctcacgtgactttctcgagccagtgaggggtatctgtctgacttctcggcgatttttacgatctaacttcgagataaaacccctatccatttgacatctaaatgtcatagcgacttttgg

SEQ ID NO: 28125 - DNA, 122 bp, Homo sapiens
actcctagatcattaatgaaagagctacaccaggtcagactgagctccaatagcaccctccggtgcctccttcatccttcccagttgccttttctccttcccctttgtttgtgcttgttact

SEQ ID NO: 28126 - DNA, 122 bp, Homo sapiens
tgtttgtttgagggtggggaggatgaggtgaggtgtgggggaatgtgttttattctgatacggggcctctaaagccactgaattagaaagtcccaaaggggaaggaaaaataaatagacaac

SEQ ID NO: 28127 - DNA, 122 bp, Homo sapiens
ttcctaaagtaaactcataaatagagacaaccaaactttcgctctcagcccagagaacgacgctctcctcccaagaggaacctcggctcttccgcggcagaagctgcacggaaccaagaagc

SEQ ID NO: 28128 - DNA, 122 bp, Homo sapiens
gctgaggccgctggggcagctggctcaggcactttccagcaccagggcatggtacattagcgggtggaggtttggcccacccctgacctggcagaaaggcgcctgtgggcgtgggcataagc

SEQ ID NO: 28129 - DNA, 122 bp, Homo sapiens
ggcgattgaactccagccagggcaacacagccagaccccgtctcaaaaaaaaaaggggggcgacagactggagaaatgtttaggacagagcagctggacttggtgagatattggggcaaaaa

SEQ ID NO: 28130 - DNA, 122 bp, Homo sapiens
catctgtgcctttacataccaggggccatgtagaaagagcttaccttatgacctgggagtcgtcttcctccactgggacccccagcccttctctctacttcaccctacccagtgccgccagg

SEQ ID NO: 28131 - DNA, 122 bp, Homo sapiens
aagtaagactgacaaaacacaaatcaacaagagaaaaacaaacataagtttatgagcatacgcatcataaatacacatgggagcactgggagatgagtaactcaaaggtgtggttagaagtt

SEQ ID NO: 28132 - DNA, 122 bp, Homo sapiens
acaaccgaagtaacccgcaatgcggaagggcgaggggattgcgagtcaccgagtttcccgcgcggcttgaggtactggggaaccggaatcccccaccggcccaatcatgttgctgctggggt

SEQ ID NO: 28133 - DNA, 122 bp, Homo sapiens
aggaggaccaggaggacatcactgcctttgacctcagccctgacaacgaggtatgtggggcggggcctggaggggacccgctccagcgcctccctcccagactgagtccaggaagatgtgag

SEQ ID NO: 28134 - DNA, 122 bp, Homo sapiens
gctctcgcagcaacaagggaagagccggaggaaagaggcgtccacgccgctcactccagccgaggcccccgcatatagcagggccaggccccgtcgccagggttcccccagcgcgggtcccg

SEQ ID NO: 28135 - DNA, 122 bp, Homo sapiens
ccagggtggagattaaggagcgaccactcaccctgggcagatacaaggggtgaagtcagccggtcgcgccctgagcagtgatggacggccgcctcggtcagagatggtgggggcggggctcg

SEQ ID NO: 28136 - DNA, 122 bp, Homo sapiens
aagcgggaagcggaagaccgagcgaggcaagaggaagagcgccggcggcaggaggaggagcgaacaaaacgagacgctgaagaaaaggttatggtcctttaagggcagctagaattttacca

SEQ ID NO: 28137 - DNA, 122 bp, Homo sapiens
cttcctctggagcgcttcacgtgcgagcccgccgtctatttataacagttgggcacttgtcgccacaatggctgattgtgtggcccagctgtctgtgtctatcaagaagggcaggagtggac

SEQ ID NO: 28138 - DNA, 122 bp, Homo sapiens
gcggacccttcccgatccggtaatgggcctgggagatgccagattagcgtggtgcctgtccggagagacgggccagctgatgcccaggtcggggccctgccgctggccacactgggctccgg

SEQ ID NO: 28139 - DNA, 122 bp, Homo sapiens
ggccggagcccgggccgttggccactacctgcgggggctgccccggcgggggcgcggcctcggcgctcccagcagcaccgcctggctcagccaggtccaggaaggcctggcgcagcagggcc

SEQ ID NO: 28140 - DNA, 122 bp, Homo sapiens
gagcccccagagcccccacttacttcatccagctgtctcttcgtctcttcttccatccttcgaatgtcgtccatggtcaggtcaacccacttatcgagccaacagaacagctgcctgtggaa

SEQ ID NO: 28141 - DNA, 122 bp, Homo sapiens
aaaccagacatatatggacaatatatttgtatataaacctgcaacaaagagatgactaaacgaagagatgactaaccttattaagaaataatatggtatttagaggagaagaaagaaggaaa

SEQ ID NO: 28142 - DNA, 122 bp, Homo sapiens
cggctccggcgccgtccctcctccccggccgggcgccgcggccccggcatgaggagcgggcgatgatccccgccaacgcctccgccaggaaggggcccgagggcaagtatccgctgcactac

SEQ ID NO: 28143 - DNA, 122 bp, Homo sapiens
attcctgacctcaagtgatccacccaccttggcctcccaaagtgctgggattacggaggacgtgagccaccctgcccggccatggctctaagtttctttgtttcactttccttgcttctaat

SEQ ID NO: 28144 - DNA, 122 bp, Homo sapiens
agagttctccgtggcttaagtaacccgaaagccatagactcgtggggaaggagcggctctcgctggcgtctaagacttccggcctccaacctcctggttggttaatatgagagatagattaa

SEQ ID NO: 28145 - DNA, 122 bp, Homo sapiens
cacctagacagacacctggtttcaggtgatccctttctggacaaggtcttttgttttcagcgcccccccaccctccgccccaacaatggcatctcctcctcagcccagccagcagccccagg

SEQ ID NO: 28146 - DNA, 122 bp, Homo sapiens
agacccttctgcggaataaaactctggcacttcgccacctcctaggctgaaccaagatggcgcgcggcctcaaagcggcgctctcgtcacgtgcccggacccgaggcgcttgggggcgggag

SEQ ID NO: 28147 - DNA, 122 bp, Homo sapiens
acctggaaaattgggtcactcccacccgaatgctgcgcttttccgacgggcttaaaaaaacggcgcagcacgaccttatatcccgcacctggctccgacggtcctacacccacggagtctcg

SEQ ID NO: 28148 - DNA, 122 bp, Homo sapiens
ggctgaagggagaggtttccaggggcgggatagggtgccttcgtcacagaggacagcctccgaaccagtttattctctggggaccttcctcccagatcccgtcctccctgagccgagagcct

SEQ ID NO: 28149 - DNA, 122 bp, Homo sapiens
cgcagtaaaagagcaagatggtgaactttaactggtataaaagctgcctctgggggcgctcgaccaataatgccgagttgccgctactgagcatgcgcatgactagtaaccacactacgcat

SEQ ID NO: 28150 - DNA, 122 bp, Homo sapiens
gttgcttattgcaggtatatacgaaagtgctgaattttgtgtttgcatcgtcatcaggcgcgtgttgagccctttagtaatgtagcagtgtattagcttcgtatttctaggtagacggtaat

SEQ ID NO: 28151 - DNA, 122 bp, Homo sapiens
ctctgcgcgttgggacaggggcggaaccccaggtggtcgggacaggctgttgcgggagcgcgccctcagcgaagcaagtgaggcatctcactgggaaagtcgaatgtgtgtggcggccgccg

SEQ ID NO: 28152 - DNA, 122 bp, Homo sapiens
aagaggaaaggtagaggaggggtggggcagaggcggtggcctgtggcttacacccctcatcggagctcctctgtttggtagcactgtggggttgactgtcccatgggtcattcctcagaaac

SEQ ID NO: 28153 - DNA, 122 bp, Homo sapiens
ggcggcggcatcagtcgaggccctgctccgggagctcatcttgtcccctttcgcccctcacgccccccagctctgactccaggccctgtcccctgagctctgccctcggatgtccgaccgcc

SEQ ID NO: 28154 - DNA, 122 bp, Homo sapiens
gcctgagcgacaggctgagactccttctcgggtggcggggcgggggacgggaatcacacacgggcacaggaacacggacacacttgggatcaggaacacacagacgtgcatgcgcacacacc

SEQ ID NO: 28155 - DNA, 122 bp, Homo sapiens
cgaccctccctcctccatctcagcctccctcctcctgccccacacctcaggcctgggactcgcagatgccaaaagggcctggcagatgccaaagccagaaagtgcagggggactgcatcccc

SEQ ID NO: 28156 - DNA, 122 bp, Homo sapiens
cgcacacacacacacacacacacacccgctgttacggcccccactgcagaccccagatcccgccagtccccggactcctcccggcgccccaggtttccacggccgcctgcagctcctcggct

SEQ ID NO: 28157 - DNA, 122 bp, Homo sapiens
cccgccccccggcagcccgccgccacccaccgaactggcaccagtcggcgggctccagggcgtccatcactttgtagaagcggcacatgacccagggcggcacctcgtacaagaagtgctgg

SEQ ID NO: 28158 - DNA, 122 bp, Homo sapiens
gcccagcctcggtgagcacacacgccctccctgtctctcgccttcgcttccctgcatctgcgctgattggtaagtgcttcagatttttactccaagaacttttgtggtgagaaaagcaagtt

SEQ ID NO: 28159 - DNA, 122 bp, Homo sapiens
gggctccagattgtagggcagggcggcgcttctcggaaagcgaaagccggcggggcggggcgggtgccgcaggagaaagaggaagcgctggcagacaatgcgacccgaccgcgctgaggctc

SEQ ID NO: 28160 - DNA, 122 bp, Homo sapiens
tttgttttttaaaactagatacttttacaagaactctatttgcccaggatacagcccttccgttttcccagcctctccaactggctcctccctctcccccaccccgctttcaaagccgcctc

SEQ ID NO: 28161 - DNA, 122 bp, Homo sapiens
gtgccctctctccgtagagcccgtgttctggtactacgtgaaggaggtcctcaacaagcacgagctgcagcgcttctactccctgcgccacatcgcctcagacgtgggccggggtcgcgcct

SEQ ID NO: 28162 - DNA, 122 bp, Homo sapiens
atttcaaaatgcaagcagatgttgatgaagcatacgaaatgggcaactccgtttctatttcggagccgcagcgactccgactttgtgccccaaccctgtaaagggcaaaacctcatcccttc

SEQ ID NO: 28163 - DNA, 122 bp, Homo sapiens
agactctgcgcagagcactttgggtccggagggcgagactccggcggaagcattcccgggcgggtgacccagcacggtccctcttggaattggattcgccattttatttttcttgctgctaa

SEQ ID NO: 28164 - DNA, 122 bp, Homo sapiens
gggaacgcgatgaatggcgaaagagggtgggggatggacttggcgtgaaccgggaggcaccgctctgtgtgacccaaagaggaggcttggcaggcgattccagtctccgcctttcaacctat

SEQ ID NO: 28165 - DNA, 122 bp, Homo sapiens
gcgagccgatgcacagacacccagcaacccagcttgtctccgcttattaggtgttcagagcgacagtggtcccacactatttcagtccaggaaaccatgaactccgttagtggcaatgcccc

SEQ ID NO: 28166 - DNA, 122 bp, Homo sapiens
ctgcttcatccgccagtgtggggcggtgaagacgtccacttcttcaggaaagggcgccatcgccactgcctcagcctccgcctcagcagccgcggccgccgcctctccatagacaccctcgc

SEQ ID NO: 28167 - DNA, 122 bp, Homo sapiens
gcgaagagtccgggggcctcgcctgggctcggcttggtccggatgcgcgctgtgtccgggcgctcccctcacattgaggaggaggcggcccccaggcccccccaccctatctcccccccacc

SEQ ID NO: 28168 - DNA, 122 bp, Homo sapiens
ccacaaacctcctgccttctaaggtgtagaaaaattcaacctctcattactggggttggtcgggaggaatcttcccttcaggcttcacctataatctgggagactcaggctccaactagaat

SEQ ID NO: 28169 - DNA, 122 bp, Homo sapiens
caggggcgggcgcggcgagcccctgccagatccggggatgataacgtgcctgctccatgtcgcggcttctagctgtccaggctccgccccctgtgagtgtgtaagtgtgtgatgctgccgcg

SEQ ID NO: 28170 - DNA, 122 bp, Homo sapiens
cgccgccgccggccgaggaatgggctccgggctctggtaggaagcgctgggagcggggggcgcttttaaaacaccgatctgggttttttaaaaacctcctttgaaaaaataatggcaaactc

SEQ ID NO: 28171 - DNA, 122 bp, Homo sapiens
cgctgacggtgaccttgcagtgtgccgggatggaattgggccccaagtccttagcctgcacgtccagttcgtacacgtgcccctcttcgtagtctaaagcgccagtgacagtgaccaggcca

SEQ ID NO: 28172 - DNA, 122 bp, Homo sapiens
aatatttatgccgactttgaaggtgctgaccagaaggcatcagtaacacacacacgcacacgcacacacaccacacaccatgtctgtttggtttgattctgagcctgagatcctggaaatat

SEQ ID NO: 28173 - DNA, 122 bp, Homo sapiens
cagagaggagcctggcccttcctcttcctgtgtagaacccgggattttaaaactgcgaggcgagaagcgcaccaccaggggttctggctttgtggagagtcgctgtttcccttttatccttt

SEQ ID NO: 28174 - DNA, 122 bp, Homo sapiens
tgtattaaatcatgggacgcaatgtacttttcacaccaacaatcctgaggccctgaaggtcgacgcgttaatcctcacaacagacccatgagatgagcgtggttctcgcttttacagaagag

SEQ ID NO: 28175 - DNA, 122 bp, Homo sapiens
tcccgtcccagcccgcgcagcctcgccatcctgggacccgctccgtcaggagtggccattcgggtggcaccagcagatgtctaccctcgaggggagccacaaggttctgtgcaaactctgcc

SEQ ID NO: 28176 - DNA, 122 bp, Homo sapiens
atgtcacctagaaccggccagctttccgacctctccggtcaaggacgcattcctaagagacgaagggagaatgacagaagttaaaaacaaccaaacaaaagccaggttgaggcctctaggtg

SEQ ID NO: 28177 - DNA, 122 bp, Homo sapiens
tgtctaaagttttgatctgacttaaatccaaagcaacacatccctttatggcctcccctacgtcttgcgagatgaaatggacaacaggagaaagtgaaaatacatgagatgatttattttga

SEQ ID NO: 28178 - DNA, 122 bp, Homo sapiens
ccgggggcttcgagggcagaggtccctgcctagaggaagatctgctggtctgtgtgtggtcgttgcaccctgggcactcggcccggagctgggcctgggcctgggctgtgcttcctgattca

SEQ ID NO: 28179 - DNA, 122 bp, Homo sapiens
ggcccacagtcactgtgatcatcagcaaacacagcagctccctgcagcccggtctgacgacggctccaagcagggtgggcagagtgtgtacacgtaacgacattatggtcgcctctgagtct

SEQ ID NO: 28180 - DNA, 122 bp, Homo sapiens
ttgaacctgtttcctcatctgtaaaatggggctaaggatagcatccacctatttcagggtcgttttgagggaatcctggagagaaaactagggttttcagcaaaaggatcggcacaaagtag

SEQ ID NO: 28181 - DNA, 122 bp, Homo sapiens
agccaggagcatgcaatatgagaccagttcatgataagttagtcctttcttgcccctttccgtttctccctcctctgaacccacacaagagggccagggctcatgattcagctggggaaagc

SEQ ID NO: 28182 - DNA, 122 bp, Homo sapiens
cacctccatatccaccacaccaggctgacgttggttgtgcctgaggcagagaaaggggctcgtgaggaccctgagacccggtgggtatttgaggcccaccacaagttttcagggtcttggct

SEQ ID NO: 28183 - DNA, 122 bp, Homo sapiens
agatgtggccaccgcgcaggttctgcagcctcatcagcttctgggcatgctccattttgtcgtccgacaggcgcaggaagtagcggaagaagttctccagggccacgtcgtcccggttgaag

SEQ ID NO: 28184 - DNA, 122 bp, Homo sapiens
ttcctgtatgtacgcgcgcgtgtgttcctgtatgtacgcgtgtgtgttcctgtatgtacgcgcgtgtgtgttcctgtatgtacatgtgtgtgtctgtggtctccgagcgtgtctgtgtgctt

SEQ ID NO: 28185 - DNA, 122 bp, Homo sapiens
gccaggagcgcatgtacctgccgtccggcgccgccgccgccacgggcgcctgggggtgcacgtaggggtggtggtgatggtggtggtacaccgcagcgggtacagcgttggcgcccgccgcg

SEQ ID NO: 28186 - DNA, 122 bp, Homo sapiens
cactaagcaagacaggtgtttggagcaggaagaataatataggccgatcgccggggttgacgaccttatggaactttgttgcccggtgccgggaatctggatccagcagtgttcccctgctg

SEQ ID NO: 28187 - DNA, 122 bp, Homo sapiens
gttttctttttagcctttgcatagcgctgagctttaaagcgtgtcttggtaaggggcacacgttgtggtcaaagtaaatgggaaacagtatgaaattgctggaagctgattctgggggtggg

SEQ ID NO: 28188 - DNA, 122 bp, Homo sapiens
tgagtaacaggagtctctaaacaccatgcagggaggagaggctggtgaagagggaaacctcgagtcacgactgaaaggcagtggagggtgagagctgagttctattctctaggccttaggga

SEQ ID NO: 28189 - DNA, 122 bp, Homo sapiens
caggagagaggctggtcaccagaaagaccaactgcatgattagagagctttgagtcagcccggctctggagagtacaagggggctgagactgagctcaattatacggcagatgattaggtca

SEQ ID NO: 28190 - DNA, 122 bp, Homo sapiens
agcctaacacgcttctgtggactgtgaaaatgggccttctcctgccagcagtgggtatcccgggcactgagcttgccatctgatactagtgccttgaccttgcagaaccacttggcttgcag

SEQ ID NO: 28191 - DNA, 122 bp, Homo sapiens
ccaagccatgcaaagtgtccaagacagaggccacccaccacgcattcccagactcttaaccgtgtcactccagaaaccgagaggacttggatttccagattgctaacgtgatctgaaggcac

SEQ ID NO: 28192 - DNA, 122 bp, Homo sapiens
agaaaggggggtgccggagccgcctcctgatgtcaaggctttaaaggggccggggagccccgcccctggccctgaccccgcctccctcctccctagcagccaatccacgttcagcctggatg

SEQ ID NO: 28193 - DNA, 122 bp, Homo sapiens
ggaagggggaatctctaggcaaaggctgttacagtcaaatctctgcgaacgattgtgatccgacagcggtgcaaaaggaaagagcgaatgcagtccacgccgcggaaatctaggggtagagg

SEQ ID NO: 28194 - DNA, 122 bp, Homo sapiens
cttcccgccactcccctgggctttgcgatcttccctacgccccccgggaagggggcgctgcggccaccgaagacaccgcgggagccacttgtccctgtgggcccagcccgcgagagcctgag

SEQ ID NO: 28195 - DNA, 122 bp, Homo sapiens
cagagtaatttaaacaattatgggcttaaagaattgatcattacagcccctgggatttagcgctgcaggctgattcccctgaaaaacctctgatttatcagggctgctactcggccaggcaa

SEQ ID NO: 28196 - DNA, 122 bp, Homo sapiens
tccttcgccctcacctccttggcttatctcttgctagaaaatgcaccaagctccaatctccgttccttttagcttcctccctgagaagacactgtgacctcgctgtccttgttcgtgttacc

SEQ ID NO: 28197 - DNA, 122 bp, Homo sapiens
gaaaaggagcaggtgcttcaaaaatgtaaccctggcaactctgccaacaggtcctgggctcgggcttcctggaaaagccccgggacacgtgggaactccaggcaccctcgcaggggcccccc

SEQ ID NO: 28198 - DNA, 122 bp, Homo sapiens
ctttcctcatccgagaagcgggaacggcggtgagcgagtcaagcgccgagtggtggcctccgcagatgcgggagcagggcgagcccgcgaccccggggctgaaggccacgcgggagccccgg

SEQ ID NO: 28199 - DNA, 122 bp, Homo sapiens
agttaggacagtgacttggactagcgttccagctgaagttcgggacagtagtgtcacctgcgccctaatttatcatcacaagttaacgaagtctgggggtgtgggggtgtgtgtgtgtgtgt

SEQ ID NO: 28200 - DNA, 122 bp, Homo sapiens
caaccagttctcctcagactctaattgggtgtcctacattttaactcaatcctgacactacgcagagttagcacagaccccacaggttaagggcttataccacaagactgccctctacccag

SEQ ID NO: 28201 - DNA, 122 bp, Homo sapiens
cgcagctggtcgggtggccaggctgcatgcggcttagcaggagacgtcctgggctgtttgcgcaggacctctggaggccctcgagatcgtcgcaagtggaaaggtaaagcggaacaagggac

SEQ ID NO: 28202 - DNA, 122 bp, Homo sapiens
aagattggtcactcggcaaacctcatgatcggcaggattgtcccaaaggtcacttgacagcgcacatgatcgatccaggatggcaaaatagcccaagggaaaaaacagaaagcatgagaaat

SEQ ID NO: 28203 - DNA, 122 bp, Homo sapiens
ttgcttgtctttggcaggactgacctggcatggggctaaacgcatgctgtgtcagatcatcggcgtttccctcaggcctggggctgtgtgtgggaatgtggtctgttgccagctttctgtgc

SEQ ID NO: 28204 - DNA, 122 bp, Homo sapiens
cgttgcgtggcgggcgctccccggcctctcctttttgaccggtcccgggcgttgcccagccgccagtcctcctgctcgggttttgtaagcaggagagggatgctttttacgtcttcttaaag

SEQ ID NO: 28205 - DNA, 122 bp, Homo sapiens
gcgcttttatctctgtgaggccgcgcagaggcttctgggaaaacggaggagcgcggcagccgcccagccttcctataggggcccagtggtttctggccttctggcgcaggttccttcaactc

SEQ ID NO: 28206 - DNA, 122 bp, Homo sapiens
ttgttcacggtgttgtattttaaaatgactatgtgtatgacaattaaactattgtgtcttcgtttactccatgtgttctgcctgacagctgggtgctggtgttcagatacccaaagggtgat

SEQ ID NO: 28207 - DNA, 122 bp, Homo sapiens
agctgccattccctcggtgtggcatacgcggtttcgccgcagccctgcaggcgtcaggttcgcctgccactgccagtttgcgtttctgatttctgggtctgagttcttcccttcccaggagc

SEQ ID NO: 28208 - DNA, 122 bp, Homo sapiens
atgggggagcgcactctggggaagagcaggcacaagctccttctcgcctactccatgggccggagggagccaattacaagctcattaggagaccaagcccagggttcccaaagcctggggac

SEQ ID NO: 28209 - DNA, 122 bp, Homo sapiens
attcgccgcccccagggtgtcacgaacccaggctgcagagtgggaccctgccgggcagcacgacccatggctgctgaagaaggacaggacccggtgctgcaggacatgaagatcccctagta

SEQ ID NO: 28210 - DNA, 122 bp, Homo sapiens
agcacccagccgggagatggtgttgactgcgatgaggagggcccgggaggagcctcccagcgccgccgtcctgacgcccccgccccaagccgctctgtcttggggctccgcctggtggcggc

SEQ ID NO: 28211 - DNA, 122 bp, Homo sapiens
ccacttttcctgacaacagtgttctcttgagagtctggttttattctgagtcttccagcccggtgtctgtgcccatgaaggactcatgccaaattacattctcaggaggactcccagaccaa

SEQ ID NO: 28212 - DNA, 122 bp, Homo sapiens
tcttctttaggacctggcgagcccaggtctaagcggcggccccgcgaggcccttgcacggcgccccgggtcgaggccctccccgcctcgccctaccccaggagcctgcctccccagctgggg

SEQ ID NO: 28213 - DNA, 122 bp, Homo sapiens
ctgacgggggtggcacacaggacacgggtggatcccaacaggcagcaccgcacctctgcccgcctcccgcactgcagctccgcccgccgggctctgcgtccccacgtcccctcgtcccatcc

SEQ ID NO: 28214 - DNA, 122 bp, Homo sapiens
gacatctcccaccttctccctctcactccactgcagccacacggggctcctcactgttcccgtagaagcaggcatgtgcccccacagggcctctgtactggctgttcccactgcccgaacac

SEQ ID NO: 28215 - DNA, 122 bp, Homo sapiens
agaaatggaaagggagttagcagttactgtctgagcaagagtggcagtagcttccttctgcggacagatggcaccctgaaggaacgaggccctgctcggagaccagactcgggaaaacaggg

SEQ ID NO: 28216 - DNA, 122 bp, Homo sapiens
ggggagaaacgtccaaaaacctcgctggccctcagaggtcagggtggcagggcactgactcgacccttttgtactatttaacattaatttttgccatgtgtgtaggatggctccttgtgagt

SEQ ID NO: 28217 - DNA, 122 bp, Homo sapiens
gtttgtgcaatgactgaaggaatcaatgaaattaagctatctgggccatcaccaatataccgttataaaaatcattcccctttaattaagcaatatctctactcccacagaaccatcttctc

SEQ ID NO: 28218 - DNA, 122 bp, Homo sapiens
gctctgtgctgggatagaagtgtcccaaagacaccctgcccccaactcataccctacagtcgaagcctgagggccccaggtccccctggcgtgatcatcattgcttcctgtccacagcttgt

SEQ ID NO: 28219 - DNA, 122 bp, Homo sapiens
gttttccctcttgcctgagaacaccacttataacacgggacctatacgggagtggtgacacgccatctgttcaagtttaacttttttctcattttttagacagcaaatacaaatggaagttc

SEQ ID NO: 28220 - DNA, 122 bp, Homo sapiens
agaaatagtatctagaatcagacagatttctcatatttcatgacacatgtgaagaggcatcgtggacttttttctactcaattccagccaatgttgaaaagaaaaagaaaaaaaaaactctc

SEQ ID NO: 28221 - DNA, 122 bp, Homo sapiens
ctcctttggaatttgaaaggaattcctttgcccagaggggtgatgacttgggcatcaattcgcactttcctggtaaatgctctccttaggaagtaacccagaaaaaccatgcttagtcatca

SEQ ID NO: 28222 - DNA, 122 bp, Homo sapiens
cagccaaaactcacactgagacggcggctgctctccaggcgggtttgctcaggctgcccccgtgctccctgccctgggcttcagtcctggagaggacccggtttctcaacccgtgcatcgtt

SEQ ID NO: 28223 - DNA, 122 bp, Homo sapiens
ggcttctgctttttcaccattgcagctgcacggagcggagcctctccggtgtgctcccttcgagccgagcccagggccccctggaaacttgcgtcacagccaccgcttcccacatgtaactc

SEQ ID NO: 28224 - DNA, 122 bp, Homo sapiens
gttttaagcttttaaaagacacaggtctactgttcaaaactgttatctgtcagtgttgttcgtgttcacaggaataagcaaatcatagtactaatatgaacacgcataaaacagcaggtctt

SEQ ID NO: 28225 - DNA, 122 bp, Homo sapiens
agtctaaccaaccaccagtggtctgatttagagctctttgcgattaacaaaggctcacagcgactgggtcagctgctttcccttacactcacaacgctaacagttctttctttaaaaagaaa

SEQ ID NO: 28226 - DNA, 122 bp, Homo sapiens
agcattctcaaactttgtaatcttgctgggctccagtttatcaagatacccccttacacccgcacagataacagccacttgttgttcagtaaccatgggaggatactgtccttgcttcagca

SEQ ID NO: 28227 - DNA, 122 bp, Homo sapiens
ctcccaggtctgctgagttgcgcatgcgctgttgcctaacggttctgctcagctgcctaacggttctgctcagctgcctaacggttttgcgcagccattttctccctggagaggctggagtg

SEQ ID NO: 28228 - DNA, 122 bp, Homo sapiens
tcctagcttgggggcagcacagggtaggcggccttctctctgctttgagtggcttctgggcgcctggcgggtccagaatcgcccagagccgcccgcggtcgtgcacatctgacccgagtcag

SEQ ID NO: 28229 - DNA, 122 bp, Homo sapiens
caatcgggccaattgacaggagcgcctcgctggccgcttgttttcactaggatctcagagcgggacctagatgtccctggcctttgcagaggtggctatgcccgcaaaggaggcggtgcttt

SEQ ID NO: 28230 - DNA, 122 bp, Homo sapiens
gtagcttttcctgagatgcagggtctgcccggcagggagagtgaaatagactaagtctgccgctcagctgcctttgtcaagggccagaccctggccttgggaactgactcgcggcagtttgc

SEQ ID NO: 28231 - DNA, 122 bp, Homo sapiens
ccattctctcatccttcacactggacttcaactcctctgcacagaaacttgataaatggccgtgactgcctcagtgcagggaagcagaatgtcaatgtgatgtgatggggattctggcttct

SEQ ID NO: 28232 - DNA, 122 bp, Homo sapiens
gatgctgctaaacatcctactgtacagccccaccacaaagaatgatctggctccaagtatcggtaatgtcgaggttgagaaaccctggtgtcagcagtgggagaagccttagagggaatttc

SEQ ID NO: 28233 - DNA, 122 bp, Homo sapiens
cgcgctctgggggctgggcaggggcagctgggctggctcccggggaacgcgacccccccgcgccccgcagaccggctgtctcccatggacccctcggcacctgcagcctccgaggaagggtc

SEQ ID NO: 28234 - DNA, 122 bp, Homo sapiens
gtcttactccggtggctgcagggcgcagggtagccgtgtcaggcctgcccaggtgcagagcgctcttccgcgaccccaacagcctctggtccggtctggcgcgccctcgctttcccagaggg

SEQ ID NO: 28235 - DNA, 122 bp, Homo sapiens
cagtgctcgacatacagatgagaacactgaggcacgaggcacagcctgtgatctggccaccgcgctcaggaggaggtggttacccgcgggcctgagggcgctgactttttagaatgggcgag

SEQ ID NO: 28236 - DNA, 122 bp, Homo sapiens
accccgcggcatcccattcccagtgagacctctgaggagaacttctcagagtgtccccctcgagctttctccctcccccgggtgtgcgtgtctagtgtgtggccgcgtgtccaccggcactg

SEQ ID NO: 28237 - DNA, 122 bp, Homo sapiens
cgctttcccagcagtccaggaattaattccaggaatgctctgcgtcccagcctcctgcagcgggactctctgtccgctgcttccagccgaaggccaccggagggcagcagaggcctggctga

SEQ ID NO: 28238 - DNA, 122 bp, Homo sapiens
agcccgcactcaaggaggtcttggggcgcggcgaaggggctccgggtcccagcccgaaggcgacctcagttcccccgagagcggccccgtgactaggcacatttttgccggcaccgaggcgg

SEQ ID NO: 28239 - DNA, 122 bp, Homo sapiens
aggtgtggttccagaaccggcgcatgaaggacaagcggcagcgcctggccatgacgtggccgcacccggcggaccccgccttctacacttacatgatgagccatgcggcggccgcgggcggc

SEQ ID NO: 28240 - DNA, 122 bp, Homo sapiens
tggagcgagcgagaacggactgcgcgtgcgtggctgcctggccggcgctgaggggctgagcgtacgcgggcggcggggtgggccgctatgctgcaactgaagcccagtgatctgacagtatg

SEQ ID NO: 28241 - DNA, 122 bp, Homo sapiens
gggggagtccgcgcggggcggggggccgagggcggccgcgggacccccggccctgctgtccgctgccagctggccggagcctctgccagcccgagcccacgttcgcccccctgaacggcagc

SEQ ID NO: 28242 - DNA, 122 bp, Homo sapiens
cggacacagagcatcgtaaggtcccagaatagagggtgtgagcaatttcagcgctcacctcggcccaagcgaagctccagcgggagcaattgagacccagggacgaagctagggagggcctg

SEQ ID NO: 28243 - DNA, 122 bp, Homo sapiens
agtgcgtgctccagcccgggctccatgtggccagccccagaccaactgagagcaagtgtgcgacactgtggctgggctgcactattctgggcccggccccgggcaccctgccctgccaggat

SEQ ID NO: 28244 - DNA, 122 bp, Homo sapiens
cttgtgggccagcgcgagttccaggtgggtgtgggctcagtgggcccgcactctgagccgcgggcgccggggcagtgaggggcttagtacccaggccagcagctgtggagggtacaccaggt

SEQ ID NO: 28245 - DNA, 122 bp, Homo sapiens
aggcgcgcgccaccatgaccgtctaacttgtgtattttttgtggagactgggtttccctacgttgcccaggctggtctcgaacctgatctcaagcgatccgcccacctcgttctcccaaagt

SEQ ID NO: 28246 - DNA, 122 bp, Homo sapiens
atccacccacctggcctcccaaagtgctaggattacaggcgtgagccaccgtgcccggcccgggggcagttttaaacattatctccatagccagagtaaaagggcaggctgctctgcacctg

SEQ ID NO: 28247 - DNA, 122 bp, Homo sapiens
ctcctccccttggcataatctttttgaaccaatgccaagccctctccatgacccctgtcccgcctacatattgccgttattcactccagtgaccatccctgagatctttttataaaaaaccc

SEQ ID NO: 28248 - DNA, 122 bp, Homo sapiens
ctcactgtgataaatgtcttctcacagcctgaacaaggaaaacacaaaccctgctcaaagcgtggcaaaaattatacaacatagctaatgctagtcacacccaccagaccctgttcacactg

SEQ ID NO: 28249 - DNA, 122 bp, Homo sapiens
tagaactgttctctctactgctaggtgcaaaacagccacattggagccatgatgaagctacgtctatttaaacagccaaactgatcattgtaactgttttctctcttaaaataaaccccatg

SEQ ID NO: 28250 - DNA, 122 bp, Homo sapiens
ccagattttagctatagcagctggagggcgggagtgagtgtgggagagccagcgtggcagcggccgcaggtggaaacctggagtttgagtatgcttgaaagggaaagtgtggaacgaagggg

SEQ ID NO: 28251 - DNA, 122 bp, Homo sapiens
ttttttgagacagggtatcactctgtctgtcacccagcttggagtgtagtagcacaatctcggctcatgacaacctctgcatcccgggctcaagtgatactcccacctcagcctccagagaa

SEQ ID NO: 28252 - DNA, 122 bp, Homo sapiens
gagttctctacaacccagactctgcagtaccaaggctgcagttctttatgtgctgggggccggggctctctccccgggagcagtctgactcaatgtggacagctggacaaaggctgtcttgg

SEQ ID NO: 28253 - DNA, 122 bp, Homo sapiens
agtcgcccttgggccgggggctccggcggaacagctcgtcccggctgccatcgaccccgccgcccaccgccactcccagcgccttgttccgcgtcttcacggtcttgacgctggcccggaat

SEQ ID NO: 28254 - DNA, 122 bp, Homo sapiens
ggccttggagaattaccattcttaccaattgaccacaaaagcagataggaacagtatctacgtattacaaaccagaatcaaaatgaccttcacacatgattagtgtggaattcttttcagtg

SEQ ID NO: 28255 - DNA, 122 bp, Homo sapiens
cttagccgtgcaggaacaatggcaagccttcagtccgatcaggagtggcaatgggcgcctcgctggatcaggagcacagcagacaccctgctggatccggagggatggaagtcagcggcggg

SEQ ID NO: 28256 - DNA, 122 bp, Homo sapiens
atatcactatttagtttgagtgcatcaaagatcatcttttcatctagtttgttagcttcccgacctctcagctcaaatacactggaagaagtaagggcaccattagagcataaagaactaac

SEQ ID NO: 28257 - DNA, 122 bp, Homo sapiens
ccccaggaagtcatcagagacggtggctgaggagacaggcactgggggcctccgtggacccgctattggagtgaagtggcctggatggaattgggtggacagggtgctgcctcagcaggctg

SEQ ID NO: 28258 - DNA, 122 bp, Homo sapiens
actacagactcggaaaccttgagggtagagcccagcaatctgtgttttagcaagtcttcacggtgagtctgaagctctctagagtttgagatccactggtctaagctcttatttacacaagc

SEQ ID NO: 28259 - DNA, 122 bp, Homo sapiens
tacccacaagactgtgtctcacgagtttcctctcgtttcaaagcttccaaccatctacaacgtttcccacctgcacagccctttccccttggaacaccacccccaatgcccgtcgccgcgag

SEQ ID NO: 28260 - DNA, 122 bp, Homo sapiens
agaaaccctgttcctagtaattccagaacttcctccaaagatactctgcgaatgctttgacgtgaggctgctatgacaaagaacaaaactgtgattcatattttacagactaaattttaatg

SEQ ID NO: 28261 - DNA, 122 bp, Homo sapiens
cggccaccggcgtttgtctttgcgctggcgagggcgggcgtctgcaacgcctctgatgggcggccgggcggccacggggagaaaaggctgccagcaatgggagcagtgcctgcagagcacgc

SEQ ID NO: 28262 - DNA, 122 bp, Homo sapiens
gtgcctccctcccgtccgcctgggcagttgaggccaatcagcagtttaggcgcacaggtgcgggctcagaaagcagcagcaatctccggcgtgttctggaatcagaagttgaggtccacgtc

SEQ ID NO: 28263 - DNA, 122 bp, Homo sapiens
ggcgcagcgggcaggcaagggcggccgagcgggcggcgggcatgagcggggcgggcagggcgctggccgcgctgctgctggccgcgtccgtgctgagcgccgcgctgctggcccccggcggc

SEQ ID NO: 28264 - DNA, 122 bp, Homo sapiens
gaattcgatctcactgagatggttgcaaattaaaaggctctaatcacagtgaaaaggaaccggtagctatgagccactgtgagttttctaagaagtcaaaccaagtgcaccctgattccatt

SEQ ID NO: 28265 - DNA, 122 bp, Homo sapiens
accttccctcggggcccaggcggagccagctagaggcgggcacctggggtggtgcaatggcgtcctgatctctgcatcttggtcactgaaggggctcgagaggccgcgaggcgctggggaca

SEQ ID NO: 28266 - DNA, 122 bp, Homo sapiens
aagccaccagatctacttagctactgtactaagttttccaccaaaatctaatcagaccctcgcttccttgccaggtaattgcaactttggggcggttaaagggaggcgaattcttcaaaatg

SEQ ID NO: 28267 - DNA, 122 bp, Homo sapiens
catggtgggcacccagccctgggggcaactgagggcacagccacgtccccagcaagggcacgctccagtagtagtgggggagaaggcaccagcagaggcagcgctgaggacctgggaagaaa

SEQ ID NO: 28268 - DNA, 122 bp, Homo sapiens
tttactcatgtgcagcctcagtaaagttgcttcagtttgccctactgaaaataatagtaacgctgctgtccccatacagaggggctatgaggatgacaggagctgatgtgagcagagcctgg

SEQ ID NO: 28269 - DNA, 122 bp, Homo sapiens
ctcctcactccactgtctccctacccccaccctgctgtcctcagaagccccagaagcccacgctcctgcagccagagggaccatccaaagcttccatgagatcttctctcctctgcttcaac

SEQ ID NO: 28270 - DNA, 122 bp, Homo sapiens
acgaatggtcccacctcttggaggagccactcccaacagcacacagctgcctcttcttcccggctctgtgccaaggggtgtttcagctttgctttgatcctgatgaccaggcactgctattc

SEQ ID NO: 28271 - DNA, 122 bp, Homo sapiens
gagtgctgagaaaggtgggcggcgagaggctagctatcgccccactctgcttcttatgagcgtgacttggcgcgttagcatccctggaaatgaccataaaaatcagacccagggttcacacc

SEQ ID NO: 28272 - DNA, 122 bp, Homo sapiens
ttctcattctcctgctgtctctttccatttgccctctctctgactgatacactgatctctcggtcactcagctttctgctctgctgagtccatattactaataacacctccgccacggccag

SEQ ID NO: 28273 - DNA, 122 bp, Homo sapiens
agtgcaccaaaatctcacaaagcaccattaaagaatttacacatgtaaccaaataccatccgtaccccagtaacctatagagaaactaaaaaaaatctcaaatcaactatctaacatcaaaa

SEQ ID NO: 28274 - DNA, 122 bp, Homo sapiens
ttttttttgtagagatgttggtcttgcaatgttccccaggctggtcttgaactgggttcacgtgatgttcccaccttggactcccagtgtgttggaattacagccatgagccatcacacctg

SEQ ID NO: 28275 - DNA, 122 bp, Homo sapiens
aactcatgtggaaagtcctcaaagccaaattccaactcctgttttactgttttttaccctcgagcttgctgagttgtcttggctctcctggaaaatacatggctcaaaaaataaaatagaag

SEQ ID NO: 28276 - DNA, 122 bp, Homo sapiens
atcatgccctggaattttaacaatgtcaagagagttagtgagcatttacttctacccaaacgttgttctagttattcctgcagtaagaggcctgaatccccagccaggctagaaattccccg

SEQ ID NO: 28277 - DNA, 122 bp, Homo sapiens
cagacagagggagcagtgaatagcaatagggtgtttccaccatggtcttcactcaggccccggctgaaatcatgggccacctccggatacgcagcctcctggcccggcagtgcctggcagag

SEQ ID NO: 28278 - DNA, 122 bp, Homo sapiens
gacctgatcatccagaggcaaggaggaaaagtgtgggatcctcttcgcccactcaacaagcgtgaatagctgtttgtcagctgcctgacagatgttagtcacagggtcatttggctgcaggg

SEQ ID NO: 28279 - DNA, 122 bp, Homo sapiens
gtccctcatggggacgcgtgtgggtcaccttcccctggtcagcgttaggcttcactggaccggacaacagcacagggtggcaactgggcaggtcaaaggatcttttcacagaagaccccgag

SEQ ID NO: 28280 - DNA, 122 bp, Homo sapiens
cctgttctgtctcacatagtcctcccaagctcagagggaaccagggacccaggcctggatcgagcagactcctgcaccagcctgtctcagggtgagagctcctcttcttaggctctcatccc

SEQ ID NO: 28281 - DNA, 122 bp, Homo sapiens
gtgactcatgccacggtgatacccggagaccttcggggacccagaaacattaaggtgcaccgatatctcaattatccggataactctagacctagagtcaccatggaaacctagaaccctga

SEQ ID NO: 28282 - DNA, 122 bp, Homo sapiens
cgatgcggtcccggcggccggcgcagacccgagcagactccgcgaggcaccccgcagacccggccccgcagacagaaggggaaggatccccgccctgaccagatcccagctccctcgtagac

SEQ ID NO: 28283 - DNA, 122 bp, Homo sapiens
agtctgtcagtattgtaatgaaataattcattatgtaattaattgcttagtgtgcataagcgccgtaatggcagaggctatgtctcttgttcatagtcataacaccattgcctggcttggtg

SEQ ID NO: 28284 - DNA, 122 bp, Homo sapiens
tgtccagtcctcaagggcagctacttatggctgtggcatctggcattcccgcggattctccgaatatacatatgcccctatttcttgagttatgaattttagatcttttgacttctttttta

SEQ ID NO: 28285 - DNA, 122 bp, Homo sapiens
aatgttagcagatcaggcattttgcaggtccttagatggtggtgttggcagagataacaccgccacttccctgtggcagggaagacagatccttctccagagtgtcagttcaggtaagtgtg

SEQ ID NO: 28286 - DNA, 122 bp, Homo sapiens
cctcagaccacccaaatattctccaaagcaaatcttaatcatacctttaattaatttaatcgcaatttctgattcacttttttttttttttttgagacagggtctcattctgttgcccaggc

SEQ ID NO: 28287 - DNA, 122 bp, Homo sapiens
aagcttagaaatgaaagtgagaaatgctctgatagactcacgtaccaagaaaacacagaacggggctgcgcactcccacagcgggcaagagggcgggagaacttcctggagcaggccaggcg

SEQ ID NO: 28288 - DNA, 122 bp, Homo sapiens
tttttcgcaatacaaggataaacacatcctgaaactccagatagaaacctcaggaatgggcgagagggtcagaaggaacgagagacagtagggaagagagagagagagacagagacagaggg

SEQ ID NO: 28289 - DNA, 122 bp, Homo sapiens
cagtaaactgagaagacgtgattaaacctcaggatctcctactaatagagaaatgtataacgatttagctaccagatctgaatactgaagggttggtaggggaccagagaatagaggaagca

SEQ ID NO: 28290 - DNA, 122 bp, Homo sapiens
tcactgcggagcccaagccgcgggcgcgggagcggcggggaggcccccgccctgccgccccgccccgccgcaggtcctggaggagggttctcggtgcccccattttacaggtggggaaactg

SEQ ID NO: 28291 - DNA, 122 bp, Homo sapiens
agtgcgtggggcggggagggccatggcctagccctggacagaggctcagccaactcagagcggccctgacactgggggggccacaagaggcatccggacagatggagctggcaggtctccac

SEQ ID NO: 28292 - DNA, 122 bp, Homo sapiens
atggcagctggaagctgtaatttggttctgccctctcacgcccgctgctactccagacgtcgtaagttgctcttttatgggatatctctggcttgactgcgggttccgttctgaggaggtgg

SEQ ID NO: 28293 - DNA, 122 bp, Homo sapiens
cgggggggctgtgcgacaacggcctggcgggacagggcgcctggagcccgtttccaccgccgcacagtcctcaggattcccgaagaggtaaaatagatataaaaaaaaccccggattccccg

SEQ ID NO: 28294 - DNA, 122 bp, Homo sapiens
cggcgctggcggaggagcagacggaggtggcggtcaagctagagcctgagggaccgccaacgctgctacctccgcaggcgggggacggcgcaggcgagggtagcggcggcactaccaacaac

SEQ ID NO: 28295 - DNA, 122 bp, Homo sapiens
tgagagaacacggctgatgtgaggagaaatggtggacaataaagacttcagcagtggcatcgtctgtgcttgaggtgaacggtagcaaagaggccagctaaagcagggttactttcaagatt

SEQ ID NO: 28296 - DNA, 122 bp, Homo sapiens
tttttgccacccatgccagtgggcagtgggtgcagacactcacagcacaggcacctgctgcgatgcacgcggcgcccacggaaacccgaggctgccagccgccgccctggagaccccagaga

SEQ ID NO: 28297 - DNA, 122 bp, Homo sapiens
ttcttccgagcgcacaagcttaccgtaaggctgactgtagacgtcctcgggatctcttgtcgacttgtcctcaatgaccacgctcgagcgtaccttcaccctagagaaaagcctccacgttg

SEQ ID NO: 28298 - DNA, 122 bp, Homo sapiens
aagtgactcctctcggtttcctacgactgcaacctaggaaatgtagccaccttgctcacacgcaggcttgaagatgtgatcactggctctcatcttgctaacaaactctctctccttttcgg

SEQ ID NO: 28299 - DNA, 122 bp, Homo sapiens
agcagagacactgcactgcgtgttttgaaatctcagtgagatagcctaattcaccacattcgattctgcaggaaatcaactcatttgacagaagaacaaagcatgcattgttcaagtataag

SEQ ID NO: 28300 - DNA, 122 bp, Homo sapiens
ccgcatcccccggcccgggtctgcaggtcgcccccgccaccgccgctcgccgtgcgtcctcgctttgctccacacttacagctgtgccccgggccgcctttctcgcgtccttccgtcctgcc

SEQ ID NO: 28301 - DNA, 122 bp, Homo sapiens
ctccctctctccctccctccagcaaaccctcaagctgaggggcagctccagtggctgaaccgccgggccaatgccctcctggccaatggcgtggagctgagagataaccagctggtggtgcc

SEQ ID NO: 28302 - DNA, 122 bp, Homo sapiens
ttacaacacagaacgagaaaagaatgtagacctccggctggggttagacttgctcccttccgtaagatgatgaaggtcaacttccctgtttgaaaaaaaacaaagtatgctctatgtgcgcg

SEQ ID NO: 28303 - DNA, 122 bp, Homo sapiens
gggtgtatttcagggaaggcatcacaaaggtggtgatgtaaaagcagaattttgaaatatcgttagaattgacaaagcagggagtagagttgtactggggaaacagtgcacagagaacactg

SEQ ID NO: 28304 - DNA, 122 bp, Homo sapiens
ggctgggccgggacggactcgacagggcgcggaagggagcggtgggcgcgccctgggaggcgagcgcgtcgcagcctcaccttggacaccattttcttgagctggctctccgacaccgccat

SEQ ID NO: 28305 - DNA, 122 bp, Homo sapiens
ctttcaacaggccaggcgcggtggctcacgcctgtaattccagcactttgggaggccaagcgggggcagatcacctgagctcaggaggtcgacaccagcctgggcaacaaggtgaaactccg

SEQ ID NO: 28306 - DNA, 122 bp, Homo sapiens
ggaagggctgtgggatatccaacttgtgtgctaggtatgctaggtaacttgattcctacacgtgagggtttttccatttgtcaaattggtttttccttctggttgcacagtacagataagcc

SEQ ID NO: 28307 - DNA, 122 bp, Homo sapiens
tttaatcattaatttcctcctctcgtcgaccccttccaccccgcctcagctcggcgcccccgccccagattagatctccacgtggtgctttgcagtgatccttgacagggcttctgtgctgg

SEQ ID NO: 28308 - DNA, 122 bp, Homo sapiens
agcaacatgaacataaacatataaagggcagggtaatctcgggttcatgcccctggggagcgaaagcataagtcagcctgctggctaaagaaccccaagcagatgagatgctgctggctggt

SEQ ID NO: 28309 - DNA, 122 bp, Homo sapiens
ataattgttgtcgtcgttgaaaccacccagcccgaaagcagcatgggctgtgcccagagccgccgtgccagaagcccacgcttagaaatagagggccgaagaccaaagaggactgcgggttc

SEQ ID NO: 28310 - DNA, 122 bp, Homo sapiens
cctctcccccaacagccccctgctgcgatgttgcctggctgccgggcagtggggctgtggcgctgcgatgttgtctgactgcggggctgtgggactgcgatgttgcctggctgtggggctgc

SEQ ID NO: 28311 - DNA, 122 bp, Homo sapiens
cgcgtgaaaactcgtgggtctgtgactgacgtttcattccacagaggattgaaaccgaggcggggtgacgtattcccgcacccgtcttctgacaaaggacgtgggcatgcgagctctcggag

SEQ ID NO: 28312 - DNA, 122 bp, Homo sapiens
tttaacctgagcctcttgggggctgggctctgagctcctccacttctgctcatgcccaggcgtccttgggggccttgaactgtcagttgtccaggagaactgtgtggcagcaacagaatgag

SEQ ID NO: 28313 - DNA, 122 bp, Homo sapiens
gtgggtggagagggacagagatcgagaggcctcgtgggaggtagctgcgcccttggggcccggccctgcgagcagccgtgggtggggaaaggagtttgggggtacgcgggctctgggagtgg

SEQ ID NO: 28314 - DNA, 122 bp, Homo sapiens
ggcctgtggggtgctggtggggctgggccacacccctttcatcttctctttgcccttctgcggccccaataccatcccgcagttcttctgtgagatccagcctgtcctgcagctggtatgtg

SEQ ID NO: 28315 - DNA, 122 bp, Homo sapiens
gttgcctctgagatgttttccattccatttctacccttcccaaatctttgttagtttgtacgcaagatctttttcctccagggctgtgaagaactattttctgttatttattgtaatggggt

SEQ ID NO: 28316 - DNA, 122 bp, Homo sapiens
tccagtcccagatttcccaccagctgtggtgtcttcattcccattgggcgtcagaattgtcgtgttcagccccactcccagcaggggcagctgcaggaataagagggatgtgaatggtaatg

SEQ ID NO: 28317 - DNA, 122 bp, Homo sapiens
gccagcacaatggcttatgcctataatcccagcactgtgggaggcttgaagagaggagtccgagaccagcctgagtaacagaacaagaccacgactctacagaaacaattctaaacattttt

SEQ ID NO: 28318 - DNA, 122 bp, Homo sapiens
atgtagagctggtttttaacatttaccagcatagcactgtatagagtacccaataaaagtcggaaacttcttatccttgttaatttaattggttaaatagggcaggcccaaacttctaggaa

SEQ ID NO: 28319 - DNA, 122 bp, Homo sapiens
atgtcagatttaacaacagtaacaaaaaagatttctaagtagccattatgaatacggtcacggaattaaaggaaagcatgaaaaagaaggaaaggaaggtattgatgacaatgtgcatcgaa

SEQ ID NO: 28320 - DNA, 122 bp, Homo sapiens
ccatgagagctacatgcaccaggcactagaaatccacatccacgggccaagcagaggaggcgcgctcagcagatctggacttcggtgtttctgccaggcctcccacctcactttatcggccc

SEQ ID NO: 28321 - DNA, 122 bp, Homo sapiens
agtcccttctccaaaacaagctttcctcccgtcagggaggtcagcagagcttcggctgggcgctgtctccttcctgccttcagaaacggcccccttttcagctctcctgtgcaggcagcagt

SEQ ID NO: 28322 - DNA, 122 bp, Homo sapiens
atgtgggggtcgggcgggagggagaacatcgttcctttgcggatcttggttttctgcagccgtctttgaagtggggggcaagccctactatgaatatgtggccccttaaatttcactggatg

SEQ ID NO: 28323 - DNA, 122 bp, Homo sapiens
gaatgggggccaacaagagtggccagggctctcctggggcggttttgcgatgtattcctccgctagaattagcctttcgggcctgcgcgcctacaggtttcagaggccagcgggaacggtgg

SEQ ID NO: 28324 - DNA, 122 bp, Homo sapiens
gatagagaggtcctgcagcagcgcctcttcctcactgcttatctttctgatccaggttcccgaggcatgccagctagcacctgacctacaagattccagctgtttaactgccatcacaaagg

SEQ ID NO: 28325 - DNA, 122 bp, Homo sapiens
caaaacgccagttccaggaagcctcgccagtgagttctgggcctgtgtacagaatcctttcgggggaggcgggaggctgtcgaccttccgtagggcgctggagacgggactaggacgtccct

SEQ ID NO: 28326 - DNA, 122 bp, Homo sapiens
ggtgtcgggtttctagagaagccaatcggtgccgccgcggtcccggttctaaagtccccacgcacccaccgggactcagattctccccagacgccgaggatggtgctcatggcgccccgaac

SEQ ID NO: 28327 - DNA, 122 bp, Homo sapiens
agcccagtggctgccaagccaccaaagcaaacaggatgccccctacgcgtacacgcacagcggccaccccgccccacacacaccccgagctggggcagagccggtctggtttcctgggctgg

SEQ ID NO: 28328 - DNA, 122 bp, Homo sapiens
gtgtgctgctgcttagcagaaattaaaggccaacattagaagcatctacaggaagtgtctcgccaaactgcagcccaggtcttcacctaactaatgacctcgagtttagggacagagagaga

SEQ ID NO: 28329 - DNA, 122 bp, Homo sapiens
tcattgaaagagcccgtagggatcacgtgaaagaacactgcagagtgcgtgacgtcacgacgctcacaccaatgggagcctctgtttatgtcgggagccatcaaatagtcatcttcccccta

SEQ ID NO: 28330 - DNA, 122 bp, Homo sapiens
agggcccttcctgaggccttgtggaagcaaacaccactccccactgcctgagaattggagcgaagagagcatctcacgatgactccagggctacagagaatggagaccaacttgcactccct

SEQ ID NO: 28331 - DNA, 122 bp, Homo sapiens
attgggcggatcgccaggagctgtcgggctgtggcggagctggaaccacaaggactgcaccggcggcctccctgcggcgggtctgggcgcttgagccccgacccagccgcgccaacctccac

SEQ ID NO: 28332 - DNA, 122 bp, Homo sapiens
tggtccccgcagggcagccatggctatgaggagtgacccatgcatggaaaggctccaggccgctcagcacaaagctcccagtgttcctgtcatctgcctttagggagactctggccacccca

SEQ ID NO: 28333 - DNA, 122 bp, Homo sapiens
cagtcagcacacagtcccggcaagccagggtgagcccctggccactttcgacaatggacacgggagaccagaacgctctttcagctcagacccttcttggtgccgcgtgccaggcaacagcc

SEQ ID NO: 28334 - DNA, 122 bp, Homo sapiens
acctccctgcctgattctcttgcctcagcttgccgagtgcctgcgattgcaggcaggcgccgccacgcctgactggttttcgtatttttttggtggagacggggtttcgctgtgttggccgg

SEQ ID NO: 28335 - DNA, 122 bp, Homo sapiens
tgaccctcacatacaagaaacactgccttctgcagggaaaagattcaacaattccaagtccgtcatctaagatcctttactctcttttctctacaagataagaataaaattcaatcacggac

SEQ ID NO: 28336 - DNA, 122 bp, Homo sapiens
ccgccgctgcctgcgggacgggcaaaagccaagccgccaggtggacctcggggaagccgccgccaacactcacctcacaggaccaggaggttccatcggggcgctgccgcgaatcgcgccac

SEQ ID NO: 28337 - DNA, 122 bp, Homo sapiens
ggctgagcagagataattgagatggaacacacctggtagtaacagatgcccaataagcaccgggtgactctgaatctataaagggatccctcttattttacagccttccacctggatgacac

SEQ ID NO: 28338 - DNA, 122 bp, Homo sapiens
tcacagtgtgctgaatgtctttatttacaagatatcattctatagtgaatatgaacaaaacgaatgtgctggttgaaataactgcttgattaaaaatgtgctgtgaagatgaatcactaatc

SEQ ID NO: 28339 - DNA, 122 bp, Homo sapiens
tctatgccacccacacttcagatatgccaattacttgcagtctcctgaactcctctaggccgtgcttttgcatgtttaattctgttctcactctccacattcatccatgtggctaatttatt

SEQ ID NO: 28340 - DNA, 122 bp, Homo sapiens
acctccgccgccaccacgagagggagggagcctggagcaccagcccttcctgcccgggcccgggcccttcctggctgagctcgagaagtccacccagaccatcctgggccagcagcgggcct

SEQ ID NO: 28341 - DNA, 122 bp, Homo sapiens
ggtggggtgggaaagggctgggggcagaggtgccaggcggagcaggttgggtaccgttctcggcggccctcttgaggttctcaatcatggtgtcgtagtggatgcggcagagcaccttctcc

SEQ ID NO: 28342 - DNA, 122 bp, Homo sapiens
attagcatcactcacggggtaatgaaaacataccttagctgctgtaaaagcaaagtcttccgtgtccgggtgggctgaaagtttttaataaaattttagctaaacatttgtttaagtgaata

SEQ ID NO: 28343 - DNA, 122 bp, Homo sapiens
aagccttggggagaggcagggaagcctgcggggacgggcaggggcggtccctgcctcgctcgctagtctccaccttttattttgaccggtccgatggcgacaggctcgcactaggacccagg

SEQ ID NO: 28344 - DNA, 122 bp, Homo sapiens
actctgcagatagtggccggctggcagcaggtgtccttgactgcaggtcgcgtgtggcaccgtcccagcccgcaggcatctcgctggagagtggacaggcaccgggagtctgaggttcagga

SEQ ID NO: 28345 - DNA, 122 bp, Homo sapiens
gaggactcatgtacggttgtttccacggttaccctgtcacactgccaagcagtcacaagacgcggatttccagtgcttcggagaaaggtgggaagctgcagagggaacagagtggcctgtgt

SEQ ID NO: 28346 - DNA, 122 bp, Homo sapiens
agtgaacgagagtccgtctgcaatcccggcacctcgggaggccgaggctggcggatcactcgcggttaggagctgcagaccagcccagccaacacagcgaatccccgtctccaccaaaaaaa

SEQ ID NO: 28347 - DNA, 122 bp, Homo sapiens
tgagggttaggtgaaagggtcccgagtgagaagatggcatgggtcctagggtggggagcccgatgccaagtcagacttcactcggtatgtttattcaaagccccactttcactcgtagcata

SEQ ID NO: 28348 - DNA, 122 bp, Homo sapiens
tcctttctattaagtagtatttacttggttgcacgggccacgccactaaaaccatttagccgatgcaaagatgcatctgcatgggcaaactttttagcttactacagttgcatgaggatggt

SEQ ID NO: 28349 - DNA, 122 bp, Homo sapiens
aactcccggcggcccggggctccccagttacccgggttcagcacctcgggtacttctggccgggcccagccttggagctgagaaaccaggcacgtttcctacaccacgtggtcacctttttt

SEQ ID NO: 28350 - DNA, 122 bp, Homo sapiens
caggtactgaatttgacacggctgcaggcatctgcagggccagcgctcccctctctccaccgttctgtccaaagggctcaccataggcataggccacgtccaagagcacatctttcgtcaga

SEQ ID NO: 28351 - DNA, 122 bp, Homo sapiens
tagaaattaaactttatcataggtgtgtatgtataggaaaaacatagtttatctagggttcggaactctctgtggtttaaggcatccactaggggtcttggaatgtgtcccctgcagatatg

SEQ ID NO: 28352 - DNA, 122 bp, Homo sapiens
cagcatagaatttccacgccgcagttcaggcgccatggcaaccaggggaaataaacactacgagtttcacagtccaagctctgccgtgacgtcatctccagctccagcctgctggggcctgt

SEQ ID NO: 28353 - DNA, 122 bp, Homo sapiens
gccacgtccggaccttgtcccctgctgaggactacctcgcgggccgggcggggtgaagggcgctgttaagaaggacagtcccggggaatgaggggcgagggggagaacggggtcgccgggtc

SEQ ID NO: 28354 - DNA, 122 bp, Homo sapiens
cacagctcggtctgggtttatctggccgaggtttacaccagaaggtattttaggagcacccggaggacccatgagtgaagaaagaggtggagatgagccctctgccttgcagccgtcttcct

SEQ ID NO: 28355 - DNA, 122 bp, Homo sapiens
tggtttttaagggcaccatctgatcttttccaccactgctttgcaacttgtctgttttgccgttgtcaggcctgacagagcactgtggctatgaactagccatgcttatacctgcttatgct

SEQ ID NO: 28356 - DNA, 122 bp, Homo sapiens
gacaaatatgcagccaccaccacaccttttacccctttgcacatcaaggtgaaacccaagcgggtaggcatattcctagactatgaggccggcacactgtctttctacaatgtcacagaccg

SEQ ID NO: 28357 - DNA, 122 bp, Homo sapiens
gccggcggtggccgggcgggcgggctccccgcggtaattagcgcgcgccggctcgggctgcgccagccgctaattataagtctcctaatgaggccggcggctgtttgcaatcacccgggtcc

SEQ ID NO: 28358 - DNA, 122 bp, Homo sapiens
gtttgaaataagaaagtactttaagcaatagagttcatctcctgctgtgttatccaacctcgatgtatacttacagcatctcaggtcaccctttttatttcagttatttaattatgaaacca

SEQ ID NO: 28359 - DNA, 122 bp, Homo sapiens
acggcagcggcggccacagtggcgaactctgcctgtcatttctgccttcagatctccgggcgagtcaggaaaaaaaataaaaaacagctggccctcgggagcgagctgcccaggtcagtgaa

SEQ ID NO: 28360 - DNA, 122 bp, Homo sapiens
cttttctagttgggatgaggaaaaattaaaaaatatatatgtaaataaagaaagaaatctcgtttatattgctttaaaactgctaattaatttagactttgggaaagaaggaaaagaagccc

SEQ ID NO: 28361 - DNA, 122 bp, Homo sapiens
ggtccacgttcgagtcatagtaggcctgaaagacagtggggtcctggatctgtaggtccccggatccagctggtaagaaaaactgcacccaggggccaacttaccaggtaaggaatggaaaa

SEQ ID NO: 28362 - DNA, 122 bp, Homo sapiens
ccacccaggcctcctggcacccccgccccgcatccaccacccaggtggtacctgtgcccgcgcaggtgaggaaaaaggcctgtggaaaacatcattactgataaataacagttcctttcagg

SEQ ID NO: 28363 - DNA, 122 bp, Homo sapiens
ggagacaggaaaacgttagcggagggggcggaggtggcagagaggaaaacatgggcctggcgaataaaaaccacagtactacttctggatttggagcaatagagaccatgtccgatccttcc

SEQ ID NO: 28364 - DNA, 122 bp, Homo sapiens
gccttgtcccgcgggactagcatatcaagccttccgggacacaccgtgcgatgatatatacgtatatacccctcttgcccttgaaggccggaagtcggtcttacagataaaagcgaaacagg

SEQ ID NO: 28365 - DNA, 122 bp, Homo sapiens
tctactcctattttgtttactttcaccgagttactgtgaagtgattggaaactttcttaacgggcagagagagaatacacggaaactcggatgcagtaataaagttgacataggagtcggaa

SEQ ID NO: 28366 - DNA, 122 bp, Homo sapiens
aggaacatatgaagtcctgagctatcctatcttctgttttcataactgtctttgttcagacgttcaaagactggctccaacttaagatgttagaaaaggcttaatctgccttgctgaaaggc

SEQ ID NO: 28367 - DNA, 122 bp, Homo sapiens
aggtcccgccccagagtgagtaggctccgccccagctgaaaggggcccggcctccgaccacgcatgcccaactcacctacccgcccgttttggaacaagtgggcccagttcttcaggccagg

SEQ ID NO: 28368 - DNA, 122 bp, Homo sapiens
gaactccaataataatggtttaaaaacatcaggggcttcctgtatctcctgtcaggaagccgaggaataagcaggctggggctggtgggcgtcaacatcccagttttgttctatctttctgt

SEQ ID NO: 28369 - DNA, 122 bp, Homo sapiens
agcacagggaaggtggccggctgggtggggactcagggcaggacaccgggctgcctggggcggggggactcctatcagtccccgtaaggccctgctcagtgcccggcccctgtgaggctgag

SEQ ID NO: 28370 - DNA, 122 bp, Homo sapiens
agactctaatggcttccggttgttactcaaccgttagggtcccttcccccttgcggcgcgcggtcccaaattgaccctgggtctcttgaaaaaatttctgcttgccacctcccacttcacac

SEQ ID NO: 28371 - DNA, 122 bp, Homo sapiens
aaagttgatgaagctgtagcaccaggagtccaagctgtgaaggaagttgagtccttcctccgccagcagcagactgtgagctgcagagtcaaatatgtaagtagcaattattggtgaggctg

SEQ ID NO: 28372 - DNA, 122 bp, Homo sapiens
aatgagcagacactacctgaaaatcaaccacgtaacgttcagttattccattcaaacccgcgtcctgtttttttttcttgaacagtgcaaacattattacatacttcaattattcttatcat

SEQ ID NO: 28373 - DNA, 122 bp, Homo sapiens
gacacagcaagaaggtgccatccgtgaaccaaaaagtgagcccttgccagacacctgatccgctggtgccataatcatgaacttcccagtctccagaactgtgagaaatacaagtttctgtt

SEQ ID NO: 28374 - DNA, 122 bp, Homo sapiens
agactatgtacgaagttatcattgcatctttcagtataggcagatctctccctcatataacggatgtttcttggcgcttggaatatcagataaaggtaaagtttaagaaacttctctagcgg

SEQ ID NO: 28375 - DNA, 122 bp, Homo sapiens
cttgatgcagccacatgggcctgtcaagtcccctctttccttccaaaggcctcggcggcgcgcggtatccctctgcctggggcgtcccccatccaggccgaggacacccccctaaacgctgc

SEQ ID NO: 28376 - DNA, 122 bp, Homo sapiens
gaagtatataactgcacgcgctgcctcatgggtagacgccgactccaccccctgaacatccggggccttttaaccgcccacggacggacggctggtacttacatgtgcacatgtgcagctac

SEQ ID NO: 28377 - DNA, 122 bp, Homo sapiens
ttatataaatgttttctattattctactcatgagccctagccccagagagtttccacatccggtattttcctcaggaggcttcatctcatttacacttgcccgtgggagtctgtagtttcag

SEQ ID NO: 28378 - DNA, 122 bp, Homo sapiens
cccctatattacccacagcacttaaaagtggagttttcatatagatgttcaaataaacgtcgaccaattgaatgccagaagagaataactcatgagggaaaaggcaagacatggaaggagag

SEQ ID NO: 28379 - DNA, 122 bp, Homo sapiens
atctgctttctggcagacccaacacaaccctgaatacaagggagctggtctgtcatacctcgtacataacagtcactggctaatagctaacaataggacagatggggaagttggggggtggc

SEQ ID NO: 28380 - DNA, 122 bp, Homo sapiens
cctgataccactgggggtcagtagagcaagcagcaaggaagaaaagctgggcatgaagcacgagaacaaggaccatctggaacacacaagggctaactggaaccagcgaggacaaacctgag

SEQ ID NO: 28381 - DNA, 122 bp, Homo sapiens
attcccatgaaaatattccaatctccatgggttccttgagtcaaattcaggaagaattcacgtgataacactgaccttgccgggggctacacaaagaaaagtgaactttctatttccagcat

SEQ ID NO: 28382 - DNA, 122 bp, Homo sapiens
tgcgcggcggccgggataaagtggggcacgcgaggaactgactttctatattataccacacgggggcagcagaggacaggcagagaaaaccgagagggtcttgggaatggggtgggagaagg

SEQ ID NO: 28383 - DNA, 122 bp, Homo sapiens
cttgtcctgtatagcaacctatttggtaatgattccagcacccacagaacagcttgcgtgcgcgcgcatacacacacacacacacacacacacacacaccactaacaaatgcaagttggtaa

SEQ ID NO: 28384 - DNA, 122 bp, Homo sapiens
aagaagacgggaacagcacggggcactgggagctgcaaatgcccacgatactgtgagagacggagaaaggtatgacaggaggagcagaccaagaagacgggagcagcacggggcactgggag

SEQ ID NO: 28385 - DNA, 122 bp, Homo sapiens
ctccatatggtgactatatagctgcagctatagcaggtttctatggcctagattcccctacggaacatgagggggaaaactgagacatagcaagcattgcttttgtggcaatggttgtggtt

SEQ ID NO: 28386 - DNA, 122 bp, Homo sapiens
attgtcttgtctcttggtggcatacgagaaaatactgtacccacgggtcgaggacagttccgtgtagaagtggaggcacacagtgaaggctttgagaggcttcgttaacggtgctttgaggg

SEQ ID NO: 28387 - DNA, 122 bp, Homo sapiens
ctcagggtccctctcttcttttgggaggtcttctcaaagcagggctaccactctcactgccgcaccacccctccggagtcccagctcacccgcttctgctgagagtccacccagtaaacacc

SEQ ID NO: 28388 - DNA, 122 bp, Homo sapiens
tgggggagaggcgcccgaaccaggccgcgggagcatgggggcccggagcggagctcggggcgcgctgctgctggcactgctgctctgctgggacccgaggctgagccaagcaggtaggaagc

SEQ ID NO: 28389 - DNA, 122 bp, Homo sapiens
ttggcctccctgatcttctgcctcacgcctctgcaggacaaagtgaggctagcgtggtggcgcttcagggattccaggcgccggtgaagcagttcggtcttgtccaccttttcttccaagtc

SEQ ID NO: 28390 - DNA, 122 bp, Homo sapiens
tttcctcccacagcctggcgcggggggctgggacgactttacacctggctcctgcggagacgtcaccttccagctggggtccttcgggctccaacagagcggctcccacgcggatccccctc

SEQ ID NO: 28391 - DNA, 122 bp, Homo sapiens
ccgcggggcctgccctagaggcggagtgagtgagtcctggagccaggctgggggaccttacgggccggtctgtcgctgccacggggtgggggcgtcccggtggggagtcgaggggaaccgca

SEQ ID NO: 28392 - DNA, 122 bp, Homo sapiens
gaagtgcagaaggcgcctcctctgataagcctgtgatacagcaggtgttgatcctaggcccggctggtcagcttctccacaaggctgccctctgacaagctctgcgcttccaccactgcctc

SEQ ID NO: 28393 - DNA, 122 bp, Homo sapiens
catcctttccagaacagtggcttcaatcactggaaaatggcctacagtttgtgtaggtatcgccgagttatcactgtgcatcagatctctccagaagaaatgcacagaatctggaatgacat

SEQ ID NO: 28394 - DNA, 122 bp, Homo sapiens
aggccggtgagtgaccccggccaggggagcaggtcacgacccctccccatcccccacggacggcgcgggtcccctcgaatcttcgggtcccagattcaccccaaggctgcggaacccgccca

SEQ ID NO: 28395 - DNA, 122 bp, Homo sapiens
taggtcattttcactgctgtagtcccagttcctacaacagtgcccaggacacaccaggaacgtgacatttattgaatagatgaaagaacagtgtaaaaaccacattgctcttcactctgcct

SEQ ID NO: 28396 - DNA, 122 bp, Homo sapiens
gactccagccgcctagacgctggcactatggtcatggcggaggggacggcagtgctgaggcggaacaggccgggcaccaaggcgcaggtaccatgtctgcacttttcttgtcgggcaactag

SEQ ID NO: 28397 - DNA, 122 bp, Homo sapiens
agatttgcattggaagcgccatcctcttgcgcgtctgatgaggaagcagaacccggtgaccgactgagctgcatttctgaagcatttgctgggttttgcctcactaagcctcggggagcact

SEQ ID NO: 28398 - DNA, 122 bp, Homo sapiens
cccaggctcgagcacagcagctgctatttaccttcttggcttctcccggggaccaggaaccggcccccgctctccgccgcccgtcgccgccccccgcctccctgcccccggggcgcgcgcac

SEQ ID NO: 28399 - DNA, 122 bp, Homo sapiens
aaaactagaacattggttactgtcaaatccagagcctgggaaggtgacctcctgtgggcacgttggagagcctggaaaaatgggggctttgtggttaaaaggacatcagttccaaaccaggc

SEQ ID NO: 28400 - DNA, 122 bp, Homo sapiens
ccggagccccatcctgcctgggtgttcacacggctccagctccactgtgatgctgagacccgggaacgtggccggccggcaactccgtgaagtgccaaacgcaaaaggacatacggcggcag

SEQ ID NO: 28401 - DNA, 122 bp, Homo sapiens
ccgcccctctgggtctgcgcggaagcgcatgcgtggggtggagtcagcttctttgaattccggaggcggcattcggtggtcagaggcctgtgcggctgcaggtagagtgtcttaggtgagga

SEQ ID NO: 28402 - DNA, 122 bp, Homo sapiens
ctagaaagggtgcagaagcctgaagtagaaagagacgggattttggtccggggtggagagcgaatgcattgaaaagggccaaggcccaggataaggtagacatttaaaggggtacggatgcc

SEQ ID NO: 28403 - DNA, 122 bp, Homo sapiens
tgccggcggggtggggtggactccgcgcggggggcggagaggacgtagcgctcggcccggcgcccgccccctagtgctgcccccactttgagagtaattgagacttgagcgtgactgcggag

SEQ ID NO: 28404 - DNA, 122 bp, Homo sapiens
ttcggttgggaggaccggtccagacagaggggagagggggccacttcgcgagtggtgtatcgctggttgaattctcataagttagagatagcaggcaggggttagaaggacaagacagggtc

SEQ ID NO: 28405 - DNA, 122 bp, Homo sapiens
ccggtaccaccaaccctggtgcagcggcatctcctacctgatgccgcccggccccggctgcgagtcaggaagaggataaagccgactagcagagccgccgctaccaagtaccacacaggcgc

SEQ ID NO: 28406 - DNA, 122 bp, Homo sapiens
cctgtacctcagtttcctcatctggagaatggggataaggacggtgcccacctccagggtcgccctgagatttaaggaggtaattccacaaagtgcttagtgcacgcatagcgagtgtcggc

SEQ ID NO: 28407 - DNA, 122 bp, Homo sapiens
gggttgctgcgaggactgagtgcttagcacagcacttggacaggaaactcaaaaatccaacggagctctcagtggtttcacagaggaggtggcagctgaggatctggcctcagaggatgtta

SEQ ID NO: 28408 - DNA, 122 bp, Homo sapiens
gtgtggaagggaaccagcggcaatgggacccggcgagcacttgcccgcagcaaatgcctgcgctgctgcaaaaaaaacaacttttggcgcaaagaatgttgcggccagagagcatccgctgt

SEQ ID NO: 28409 - DNA, 122 bp, Homo sapiens
acatcggttgcctggacgtggatttctatgaacactggatgccatgtctgtgataatagccgggcaatgttccagtggcttctggagggtctttagcaacaacgacctccctcccctgcaca

SEQ ID NO: 28410 - DNA, 122 bp, Homo sapiens
ataaatgaaaaaggccagtaatcatacactaagattaataaacagcacttcaaaattaaccgcataagggctgtgcttgcagcaaggtttcacaagacaaggcacccagattttttcttccc

SEQ ID NO: 28411 - DNA, 122 bp, Homo sapiens
ctaactgtaaatattatttggaggtgggcgagggcgcggcgtgcgcgcggcggcgggtggcgggcggcgcgggcgcccttgcggggattcccggtctctcagcgcgccctagtggacgccct

SEQ ID NO: 28412 - DNA, 122 bp, Homo sapiens
ggcgaagggggagggaaagcctttccacctgggcgtgtgaaggaggcgcgttacaaacaacgctgggccccttctttccctcgagtttttccaacctccggttgacacagagattgtcccct

SEQ ID NO: 28413 - DNA, 122 bp, Homo sapiens
ctggaggtgtggtacgtgcttgtggatatccagaaccgtggttaatgcgtggcgcttgggcgtgtgcgcgctaaagggcgtgcctcaggatggagcagccttgccgtagacttctgtggttc

SEQ ID NO: 28414 - DNA, 122 bp, Homo sapiens
aaagcaacactaaattctcttttatgttagtcttgtctctccaactagattataagtttccgaagcactggcaatgtgactttgaacttgtatttaccacaacgtttaaaattctgtgtagg

SEQ ID NO: 28415 - DNA, 122 bp, Homo sapiens
cctggtctccttcctttccacctgggtggtggcatccaggacctgcctgagttcattctccgcccccagcccggcctgccccaggtgccgccggcagccactgggaggcagtacgaggcaag

SEQ ID NO: 28416 - DNA, 122 bp, Homo sapiens
ttatggtccctccaccactttacatttgtctgctgtctccttgctctgctagtcatggaacgtgttggtagtgggggcagtgtgggatgttcaagggcacgtattgggtagggccacatatg

SEQ ID NO: 28417 - DNA, 122 bp, Homo sapiens
ccaggcggagggtgggccctcgggcctgtggactgaccccggggttcctgggcctgggggcggggatccctgtcccgggctcccctcgctgcgaggctggccctgccagatgacactcagag

SEQ ID NO: 28418 - DNA, 122 bp, Homo sapiens
ccagatctgggtcttggggaaccaggggtgttggcgctgggcaattaccacctcgcttcacgtatacccagtgtttctgtggcatgatgctagggggtgtgtaggtgggtctccggagccca

SEQ ID NO: 28419 - DNA, 122 bp, Homo sapiens
tgtgtgtgtgtgtgtgtgtgtgtgtgtgtgtgtgttttcctgtgtcctctgagtagacaccgctatgaatgtagacttgaggtttcttggcaaacatgtgtcctcacttatgtggctgagga

SEQ ID NO: 28420 - DNA, 122 bp, Homo sapiens
ctgtgatctgtgaacaaactcaccaacactccaaaatgaatgtattaggactaaggctcccgaggaaggaagagtctgtgcagaacagactcagctgagccccacagaacgagaacaggctg

SEQ ID NO: 28421 - DNA, 122 bp, Homo sapiens
cgacccctaagccacgtaccgtccccaggcagctcctcgacggctagagctctcgggggccgcgagctgtcccggtccaaggcagcagtctgatttcggggaaattaaaagggcagaaagga

SEQ ID NO: 28422 - DNA, 122 bp, Homo sapiens
ttttttttttttttaacaacatggggtttaaagggcgcggaattggaagcagtcgtcacccggaggcctgggcgtgcaagcaccgaagctctggctggccctgagcctccccaccccacccg

SEQ ID NO: 28423 - DNA, 122 bp, Homo sapiens
cttcccccggggcagggctccagacctgcagcccgccatgcctgagcctcccacctcctccgtgggctcctgtgcggccccagcctcctctatgagtgccaccccctgctccacggtgccca

SEQ ID NO: 28424 - DNA, 122 bp, Homo sapiens
gcccacacccccacccacacccccactccacccgcacccccgctctgccccggctcgccacgcacctgatgcacagcatgaagtggttgaggaggaccttgggcttgaggcggatcttgatc

SEQ ID NO: 28425 - DNA, 122 bp, Homo sapiens
acacctgtgggcatgctctctgcatggaagaagggtttttggtgtctaggagagagtggccggaaggagctctctagtgtcacctgtgtcagctgcaaagcagtgtatccggtaggcctgca

SEQ ID NO: 28426 - DNA, 122 bp, Homo sapiens
tcgttccggcgcgagtgccgtggcgcgtagctgaactgcaggtcgatgtggcggttctggcgtgcctcggcgcggctgcgactgtggcaggccgtcctgtgggccttgaggtcgatctcggt

SEQ ID NO: 28427 - DNA, 122 bp, Homo sapiens
ctactccggctgcctggcttctctccactgttagcacccactctgaactcagagcaaggtcgggccgagcctgggtactgtcacagcctggccgagcgtgcacacgctcaggacagtgctga

SEQ ID NO: 28428 - DNA, 122 bp, Homo sapiens
ttcaaggcccgcggaacagcggaggacgaagagcgggacccgagccctggtaagcggcggcgtctccgctgcccaccaggcccatctacccactccctggccgggccctgctcgctgaagaa

SEQ ID NO: 28429 - DNA, 122 bp, Homo sapiens
aggttgtggggggtggagtcctgtagcccggaaatcccaaagtctcccggatggaagagtcgtttttgtcagttagggggatgggttaggagggttactaggaaaaatctaggcgcagatcg

SEQ ID NO: 28430 - DNA, 122 bp, Homo sapiens
gtttataccgtggtatattatacattcattaaaaatgaggtggatctttatatgcatatacggaaagagttctgagatgtaattaaaaaacacaactaaatgcagaagagtgtgcagagtat

SEQ ID NO: 28431 - DNA, 122 bp, Homo sapiens
acacatatgtggaagaaatggaggcccagtgccatgggcagagactataccctaggtgcccgccccagtgccagccaacccaagacaggagaaaggggttggcagttttgcatctgagagat

SEQ ID NO: 28432 - DNA, 122 bp, Homo sapiens
atcacacgcgcaaccgcagctcgtacagcaggtgggtccatggccacgttgatgttaaaacgttcatttttggaaggcccagaggccagaagacagctcaggcagcctccccacggcggcgc

SEQ ID NO: 28433 - DNA, 122 bp, Homo sapiens
tgttggtaaaatcgggaaactcatctccttgccagaaattactttgcatgtgtgcatattcgtgcactatgaagggggtaacattctagccccggtctcaaatagctctgggctcaaactac

SEQ ID NO: 28434 - DNA, 122 bp, Homo sapiens
aacaccgaacttgaatataggaatgcagagcagttggggttgcgggtaggtagctggcagcgtgatagaaacttagaaacaaagataaggcaagctggccaatgttttaagtgccattctga

SEQ ID NO: 28435 - DNA, 122 bp, Homo sapiens
agagtatcacatgtgcagtctaggagtgcagtctaggatttcagctacagaaaacctccgcgcatatgactagaacaagacatgaactccttcctgtgtgggaggatgccaagtgttctttt

SEQ ID NO: 28436 - DNA, 122 bp, Homo sapiens
cgccccgcctccagcccgtgccacggcggccgccattggcgcgggcccatcccagaacggcgcccattggcccggtgcgaagccattcacccagcgcattccgccgcccgcaggcttgcggg

SEQ ID NO: 28437 - DNA, 122 bp, Homo sapiens
aaaacccagagaactggaagattagtgtggcaatgcatctgaaaatattctgtaaaccagcgtgctggacaaatgctaacctattattgaattcagcacttcatttcagcggagctaggaat

SEQ ID NO: 28438 - DNA, 122 bp, Homo sapiens
ggaagaactggcagaaatgtggtaaacttgtttggcagataaattcaaaagaacatgtgacgaactttgtgaaatttccctgaggtgctcactaggtgtaagaaacaacagaggaagagagg

SEQ ID NO: 28439 - DNA, 122 bp, Homo sapiens
cagcctttcagagctgtcttttggcatgtaaacagcagaaatgtcacacggatagtctcccgcaggccttattaaaagtaacaatataaaacataatctccccttagatgtgggcagcaaag

SEQ ID NO: 28440 - DNA, 122 bp, Homo sapiens
cagatatgccacaggaagccaggggccagtgttactggaaaggggatgaggtcagctagccggaacacagctaggtcaaaactagcagaacaattgcagccaggactatccaggagcctttg

SEQ ID NO: 28441 - DNA, 122 bp, Homo sapiens
catatgcattttctctgtgtctctgttttcacatagctctcttctgaaaagtacatcagtcgtattgaattaggggcctaccctactccagtatgacctcatcttaactaataacatcttca

SEQ ID NO: 28442 - DNA, 122 bp, Homo sapiens
accccctgggccagccgagctgcctgctgcttctgcagggcctccatgacagcttccaggcgcagtcccccagctgagggggtccctggtaccaggcgggaccccgaggaaagggccgcctg

SEQ ID NO: 28443 - DNA, 122 bp, Homo sapiens
aacacagcaagaccccatctctactgggcgggaagatcagttgagtccagaagttggaggcggcagtaagccaggattgcgccactgcatgtgaacttaatcaagtttcttatgctttgtct

SEQ ID NO: 28444 - DNA, 122 bp, Homo sapiens
tgtcgattcattgtttttggtcatatctcacaagtcagtcagccaaggtgggtggggtcacggcgttcctaaaatattatacttaaaaacgagcgcaatcctggccctcggtgtcaaccagc

SEQ ID NO: 28445 - DNA, 122 bp, Homo sapiens
cggcgaggagctggccgccatgggcaagcaggcgagcttctcgggcagcgtggaggtcatcgagatgtcctgacccctccgctgcccttagctccgctgcccacagccagacccgttataaa

SEQ ID NO: 28446 - DNA, 122 bp, Homo sapiens
ccatccattgttggggcaaaggatgctgctcaacctcccacaacgcatggagcggcccggcgcacgactcacccggccccaaacaccaactgtgccgaggtgatgccctgccctgaggcgag

SEQ ID NO: 28447 - DNA, 122 bp, Homo sapiens
acggggttgggcctgggcaggaaggcacacaggcgtcggggcggctcccgcagctggctgcgggccctggcctggccacccggctcacctcatactccagctcatccaagcggtctgcctcc

SEQ ID NO: 28448 - DNA, 122 bp, Homo sapiens
cccgaaaccagtgcccgctgtgcgcggggttggggaagctgcagtgggtggccggcgagccgggaacaatgcccaaattttggggaacgcaaggcagagttctttctgccttgcgggcttag

SEQ ID NO: 28449 - DNA, 122 bp, Homo sapiens
ttcatagcaaacatcatgactctatttaccaggaggcctattatcctcatataacagagacgcgtgtaggtcacctgtcttctttctttttcttcaagtgccccttggtattcctagtggtt

SEQ ID NO: 28450 - DNA, 122 bp, Homo sapiens
aatgggggtaaccgcgagaacaaagcagggtacccaacggggtgtggcgggacacctgggcgcacgccgccagcgcccgggagagcgaaggcggggagagaggaaccacgctgaggcgtggc

SEQ ID NO: 28451 - DNA, 122 bp, Homo sapiens
ttccgacctctggcccctgcttgtcccctctgagggatatctgggtccataaaagttgagcgtcagtctgaagccgcccttggatcgggctctcgcccatgctagagcggagggaggggaca

SEQ ID NO: 28452 - DNA, 122 bp, Homo sapiens
gtttgtatctccaaactgctgagcattcaaagggttaaatgggaccgggagggggccagccgcggagccctgaaagggttaaaaatccaaacgcgtcgactccccccgactatttggttcca

SEQ ID NO: 28453 - DNA, 122 bp, Homo sapiens
acgggtcctgagccaatccgtggaaggtaaaagctgcttcctgttggggcatgagtccggcgcgtgtcgggttttgagctgccgcggtcccgggactgaggtgggtggcggggtccgcccgt

SEQ ID NO: 28454 - DNA, 122 bp, Homo sapiens
gtcaccgccccgtgcagactttcacagcctctgctgctggcgtgaggcccagcacacagccgctctgctgccagcccacagaacacctgggcacacagctggacactgatgcctccgtgcta

SEQ ID NO: 28455 - DNA, 122 bp, Homo sapiens
acttgttcaactcaggagtgcctccttaagcaactgtagcctatgagctgtgggtagggccgctgagccgctgcctggcaggcacggaagagcaggtgcacgcttctccatggccctccctg

SEQ ID NO: 28456 - DNA, 122 bp, Homo sapiens
ttaatggggtgagatttttcctccgtacattgttcccatttccgcagtttcacttggcctcggttttctagcagagtaatcaccaaatgaaattagctggagagcgtttgatggcgcagaat

SEQ ID NO: 28457 - DNA, 122 bp, Homo sapiens
gcagacaggcacggtcggacagacttgacagatcaggcatcaggccctctgcgctggtcccgggctctttaagcaggaacgtgaatggcctcaagatgtctcacatggtcccactagccctc

SEQ ID NO: 28458 - DNA, 122 bp, Homo sapiens
cagcgacccgtggaggtcgccatattggaccggggcctcgggtcatgtgggctcgcctcacgtgactcaagtcccagggtggccgctttcagctcggactgaattacctgcgctcttttcgg

SEQ ID NO: 28459 - DNA, 122 bp, Homo sapiens
atttgaactaagaatttaaatgtaaatatgcaacatcccttcccctctgcctccgctcagcgggagggagcgtgtgtccacctctgtcagctgcagcaagagtgccctgtgtgcccagatcc

SEQ ID NO: 28460 - DNA, 122 bp, Homo sapiens
gttcatttaaaggttggtctgaacagtgaggcactcccatacaaaggaactccatcataccggatgccaccgtttaaggatcctttgaaacttcttaagaattcaacgagatttttaacctg

SEQ ID NO: 28461 - DNA, 122 bp, Homo sapiens
gtcagcaattttctgggataagtcctggtgggagctgccgctgaagattttgatattcggcgtcttggccaactaccagaggcactccgtcgagcgatccagctgccgctgaggctggaacg

SEQ ID NO: 28462 - DNA, 122 bp, Homo sapiens
gtttgcccgcttaggaaatgcagtataaacgccgaaatccgaaatcccacccccaccgagcgcaccagccccaggcaggcaggagggtgccccaaggcccacctgtaccaccgtgatgttca

SEQ ID NO: 28463 - DNA, 122 bp, Homo sapiens
atttttaaaaaattaacagtgcttcagaaaactgtgagacagtctgggcacactggcttacgcccataatcccaacactttgggaggccaaggcagacagatcacctgaggtcaggagttca

SEQ ID NO: 28464 - DNA, 122 bp, Homo sapiens
cgcggagctccgggaacgcccggccaaggggcgggcgtcacatggtgggcgctgtggctgcggctgcggctgcagcggccccaggtgcaaacagactgccgccgaatgtgagcagcgaggcg

SEQ ID NO: 28465 - DNA, 122 bp, Homo sapiens
gcgacggcggagcggcggaagaacagagtgcgagagctggcagcggcgactgagaccgaccgcggcctcccccgccgttatttaagcggaagcggcgcgcccgcgcggcccggcggcgcgcg

SEQ ID NO: 28466 - DNA, 122 bp, Homo sapiens
tggccagggacgcggccggcaccagcctggggcgcccgcttgggggcggagctcccggggcgcccccaggatatgatagggcgctctgctccactcgcgctcactcattggccggcaggaca

SEQ ID NO: 28467 - DNA, 122 bp, Homo sapiens
tcctcttccaaaacccacaaggttctgagttcctggggctttgtccccccagtctgtggccgccgcagggcctcctcctggaccagcccgaagggcacatggggatggcgcctcagggctcc

SEQ ID NO: 28468 - DNA, 122 bp, Homo sapiens
ggcaggaggtgggagaagagaatgagagaagggcggaatcctcaagacagcagcattctgcgctccgccctggaacacccagcgcagctaccccatcccgcccaggccggccacctggcgtc

SEQ ID NO: 28469 - DNA, 122 bp, Homo sapiens
cactcattgcccatggcacggtgctgcctcttgatgaccaggtggacagtgaggccatctcgcactccacactgtgccagtgagtcaggatccttgaggattttgccagcaaagattagaac

SEQ ID NO: 28470 - DNA, 122 bp, Homo sapiens
ctgagttatactgacttcaatgtctctttttgttctctttttactgagttttatgggcagcggattcccctccctgttggatatgaggtgttgtggactctctgggccaaaaaccactcttg

SEQ ID NO: 28471 - DNA, 122 bp, Homo sapiens
agcgctcgatgcactggtgcacctgcttcatggaggcctggctgtcctcacaacagctggcgctgcaccggaacatgagaccctggggagaaagggcagagaggttaggtaggaaagtctct

SEQ ID NO: 28472 - DNA, 122 bp, Homo sapiens
gcatcagagccagacagccaggagaactctgagcttccctctctgtgcctcagtttccaccgctacagagcacggacactgatgcctcaaagggctgctgaaagccttccaagaaaacagca

SEQ ID NO: 28473 - DNA, 122 bp, Homo sapiens
tcggcagcagaagccgctccagagactgatgaatggaagagtctttgcgggaaatgtatccggacgttgggaagcacgccctgcggctcattttgcaagttgcatggggatacatttttctt

SEQ ID NO: 28474 - DNA, 122 bp, Homo sapiens
gctgttaattgtgatgaataaacgttcaaccctcggcctgcagccagagtagccaggccgcgcaccccaaatgtagtcccccgattttagctgcagcagctgagcagcactttgctggcttg

SEQ ID NO: 28475 - DNA, 122 bp, Homo sapiens
tcgtgccgcccgccggggccggagcgctggggaccccagggacagcctgtgctcgggggtcgcgcgttgcgctcctcgccgggctccgcgcatccctggccgcgctcgggggtgccgggacc

SEQ ID NO: 28476 - DNA, 122 bp, Homo sapiens
cggagcccagctgcaccggctgcggtttgagcgcccagggccggggtgcggggtggaccgcggcggcccttcgaccaaaggtgcttgaagctcgagcccattactttctgtggactctgact

SEQ ID NO: 28477 - DNA, 122 bp, Homo sapiens
aaaagaaatctttaatttactatgaatattttaaaaatcttcccatagatattccctatgcgattggacttcattccagaccatcttgcaacaaatgctattgacgtatttgtggtctgtaa

SEQ ID NO: 28478 - DNA, 122 bp, Homo sapiens
ctgttacttgagactttcagaccttggaataattgcctgtgttttgacattcttctgtaacgttggggaaataaatggaactaatgggaaaaaaactcttctaggacattctcagatgtagc

SEQ ID NO: 28479 - DNA, 122 bp, Homo sapiens
cctggttttcatgtataaaaaatgagcatccagttgctaagtggaagtgaatggtcacctcgcctgcaagagagttccctggagacccgagaaggtacagagggagacactttgactctgag

SEQ ID NO: 28480 - DNA, 122 bp, Homo sapiens
cccgggcgcacacacaacttgctgtctttctcgggcgggaacatccacgggaaaccggaccgtcctgcccttctttgcctctgtccctaacagccgcagaaccccggggcccgacctggaag

SEQ ID NO: 28481 - DNA, 122 bp, Homo sapiens
gccgtctaccgcctccccagccaaagcctggccgggctggggaaggcgggagtcgaggagcgccctctgaggaaccagccaatgggaaggctcagccgccgtgaccgccttgctgattggct

SEQ ID NO: 28482 - DNA, 122 bp, Homo sapiens
aatgaggcatttatttgctcaagtagtggcgaaataatgcgcactgcttttttgtgttgtcgtcggcggaatacgctcagttgcctagcaccacagccctctggctggtagtccctcttcgc

SEQ ID NO: 28483 - DNA, 122 bp, Homo sapiens
gccaacatggtgaaacctcgtctccactaaaattacaaaaattagttgaacatggtggtgcgcacctgtagtcccagctacttgggaggctgaggcaggagagtcgcttgaacccaggatgt

SEQ ID NO: 28484 - DNA, 122 bp, Homo sapiens
cccgcctgcataggttcctgtgaacgccacagttcaggctgccctcaacgtcctcactagcgcccagagcagagacatgctggaaacactggctgtgtctccctgagataaccagcccccgg

SEQ ID NO: 28485 - DNA, 122 bp, Homo sapiens
ccgacgactctcggcgaagaacgtctggccctgcgggtcgcttgtggtctcttatagccgcgtcggcgtcaggcccgccccggccaatcagcgccgcccgccccgagcccgctccttccggt

SEQ ID NO: 28486 - DNA, 122 bp, Homo sapiens
ggggacggtgaggctcctgcctcctgccgcagcaggcaccgaggctgcccttttatggtccggaaaagggaccaggagcggccccatgcctggtacaagagcgacatctggcgtctgagtgt

SEQ ID NO: 28487 - DNA, 122 bp, Homo sapiens
agcatatttgatcactttgattctctgttcttttctctccgcggtgtgtgtgtgcgtgcgcgcgtgtgtgttttcttcttctcctcctcctctccccgagttgcctcctttctccgggtgcc

SEQ ID NO: 28488 - DNA, 122 bp, Homo sapiens
aaagggaagggaagctaactggtgtgtatacggggtggcgagggagaacctgccctagttcgcaaaataaatccaggaaatccagtgccacagagaggtaggattggtggagcacacttctt

SEQ ID NO: 28489 - DNA, 122 bp, Homo sapiens
caaaacacttggggagtttctctgccatgttcttacagggtccatgcctgccccgaggtgcgggatgtgactcagacagctgggagcggggctgaaatctagtgcttgtcttgttaataggt

SEQ ID NO: 28490 - DNA, 122 bp, Homo sapiens
gtatagacaaatggaccaaaggaaacaatacagaacagaaacaagactcccctgggcacacgtacttgacttatgacaaagctggcagtgcagaatgatgagtaaaggcaataatgctgggc

SEQ ID NO: 28491 - DNA, 122 bp, Homo sapiens
acctgccgccgcctgtacctgccccgcctgggtatgaaatgcacacctgtccaccaggatcgcaggcaggggccacggaggctgccacggaaggacagctgtcacctcggacatcgcctgcg

SEQ ID NO: 28492 - DNA, 122 bp, Homo sapiens
ttatggcttgaaggtgtcatctgtaaaatgaaggggctggatgcatgaagggaggttttgcgaccccgtgtagtgtgactgggctggcttagtgagtgttcgccgcccctgccttcaggtgg

SEQ ID NO: 28493 - DNA, 122 bp, Homo sapiens
aaatgtggcccacctgactccaatcatgcttccggccccgccacggttccggccccgccacggttccggcctcgccacggttcctgccccaccacggttccattcccaccacggttcctgca

SEQ ID NO: 28494 - DNA, 122 bp, Homo sapiens
atggaaatgactgggacatgtacttggttccctcctacgtaggcacccaaatatggggtacgacttcgaatcacgtgcttttgttgtccagtcgtaaatcctgcctgatgacctctagaggt

SEQ ID NO: 28495 - DNA, 122 bp, Homo sapiens
ctccaaaaagtggtgtggcttggcaatcctattcgttcttggcgggcagaaaattcagtgcgaataatctccaaataccctggttggagaaaagataacttgtagaaagaatgtgacgggga

SEQ ID NO: 28496 - DNA, 122 bp, Homo sapiens
cgattggtcggatggcgtttcggggggcggtgcatgcagagaagccaacagagcagtaagcgcagcagccggagtgtggaagatgacaaggagggtcacctggtgtgccggatcggcgattg

SEQ ID NO: 28497 - DNA, 122 bp, Homo sapiens
ctcgccccacggctgctctgaaaagccatctttgccttgttcctcgttcgcctccttgttcgcagcagcagcctccgccgcgcgcctcctcagccgccgcggactccggcagctttatcgcc

SEQ ID NO: 28498 - DNA, 122 bp, Homo sapiens
agaccaggggacctgcacggaggagcgctctaggggaggctgctgcctcgggagctagggcgcgcccggaccacaccgcacggcgcagaagcccagcgcgcacgcgcgccgcctgccgcccc

SEQ ID NO: 28499 - DNA, 122 bp, Homo sapiens
agcggcagccactagaccgcgcccggcagccacccaccccacgtgccaacttcccctccccgtgccagcactgccgcttccacctgggccacccaccggaccctcgcacgccgtgccaggcc

SEQ ID NO: 28500 - DNA, 122 bp, Homo sapiens
gccagtggccttgggaggggcctgtgatgctgggaccacagttcctgggcagggagcaaccgtctaggcgtggggagaacgcaggacgtgacccacacaccgcactggaggctccgctctgc

SEQ ID NO: 28501 - DNA, 122 bp, Homo sapiens
gttcaccaccaccctctcttttcccaagtcaagcaagatccacatgccaccaagtcctgacgacatggagacttcaattccaggtctcttcacagatctgggtgtgggtatactacccaaaa

SEQ ID NO: 28502 - DNA, 122 bp, Homo sapiens
cttgatgatttttggttatgtactgtcttttgtatttgtgatttctggttcacttggttgcgaatgctgtttctctttactgtagcctgccttatgtgatggttaaggtgggaaggaataca

SEQ ID NO: 28503 - DNA, 122 bp, Homo sapiens
gctagggctccaaccatggttgaacatagacggaaaccagtgcgtcacaaaggaggctagcgagagttcttttttaaaagggtctgacaaagcgtccgaggaatgaaggaggaactggagag

SEQ ID NO: 28504 - DNA, 122 bp, Homo sapiens
actcttccgtgtctctggcgggttttccttgttaaaggctcacaggttggagcctgttcgcggctcttggcctggtagggattttattagctctgctctggcaactgcaagccaggaacaca

SEQ ID NO: 28505 - DNA, 122 bp, Homo sapiens
cgctccatggacagctgggtggaaaggacgccccgtgaaggacacccggccgtcggaccgcgcccacccctgggcctcccaggggctccctccgcagactcccagggacttcctgggagcca

SEQ ID NO: 28506 - DNA, 122 bp, Homo sapiens
aactccactccctaaacatgtcagaactacacttcccatcaagggtcagaaagaaacttccggcacagtcttttcccagcattccttgtttacttccgggtttattactactgaaggaagaa

SEQ ID NO: 28507 - DNA, 122 bp, Homo sapiens
cattgacagcaacctgggttcctaacggtttggttaacaccagcacgtccccaacgacggcgctgtccggcattatgaactcatttggttggcatactacagtggcaactccaccgattata

SEQ ID NO: 28508 - DNA, 122 bp, Homo sapiens
tgatacctgagctcccctccccctatagcgatccacacactctgatcccgggtccggaagcgcattgaccgccaccagacctaacgcagggagccgaagcaactggacttccagcgcgccaa

SEQ ID NO: 28509 - DNA, 122 bp, Homo sapiens
ttgtggatttgtagtggctcctgccttctcataacatgggaatcagtgaactatttagaacgtactactgcctgacaagactccagtggggcagtcagtaggagaggacgttcagaggaaag

SEQ ID NO: 28510 - DNA, 122 bp, Homo sapiens
ccgggagcgaagcggcggagcgcccccaccagcccgcttcccgcccccacgaggtcaggacgcccgactcgatgaaagccgaaaggagctaagcccccatgcacacacaaaaacgcccctag

SEQ ID NO: 28511 - DNA, 122 bp, Homo sapiens
gatagtctagatttggatgtggggctgggctcggagaggctccgtccgctttccgctccacgagttgcctccagttaagtctgttccctgctgggggctgcctttgaaaaggggctcctgcc

SEQ ID NO: 28512 - DNA, 122 bp, Homo sapiens
cccagccttctgttctgcacacaggaactttcgaacctgctcccttcggctctcacagggcggggcaaatgactggcctattaaccctttatttgttccagtgattgttcatttaaaaagga

SEQ ID NO: 28513 - DNA, 122 bp, Homo sapiens
atctcgtccctcctttcctgcttagactgtgccagatgacccttcttgcaaaggggtgggcgggaaggccccccatgcagccaggcagtgcctggatttgtaactggccatcccagcagcag

SEQ ID NO: 28514 - DNA, 122 bp, Homo sapiens
ggccgggccgagctgagcggggcgcggagaccgcggcggacggtggggagagcgcgcgcgcgtccatccgatttcaggcctttgttgccggagcctcgtgccgatgggttaatggggcagaa

SEQ ID NO: 28515 - DNA, 122 bp, Homo sapiens
gcgcccgcaacgcggggccgccggggaaatgagtctctcgggactccctgggagcgtaagcgttcgaggatctgaccggagggccgggccggaaagcttgagagccttcgctcccgcaggtg

SEQ ID NO: 28516 - DNA, 122 bp, Homo sapiens
ggcccgctgcgctggcgggtaatgggtgttgggacgaaggcgagggcctcccactggcggcgccttttgagccttggggccactccggaggagcctctgttggacttcaaggtgctgttttt

SEQ ID NO: 28517 - DNA, 122 bp, Homo sapiens
cctcgtgactgggcctcatgctagacaacatgttacaaaaagatctagggtcccagaccacgccaaaaagcttcatgagacctctcctcgtctgtgcactgacgagtggccggctctggagc

SEQ ID NO: 28518 - DNA, 122 bp, Homo sapiens
cttgaaggtgggagaccccttgaaggtgggagacctgtgagctggtacactcagtgaggacggctccatgcacagggacgaagacccccgaggagaccatcgaaggatggtgggcagtgctg

SEQ ID NO: 28519 - DNA, 122 bp, Homo sapiens
gccctggaatcccggggcccccagcctggcccctccgcctcctctctcctctcccagttccgcagtccttcctggcaaacaggtaagcccagcgccggccctgcagggccagggtgggactg

SEQ ID NO: 28520 - DNA, 122 bp, Homo sapiens
cttatattattcacggcttcataaaaataacaagacctgccttagcatttcaatcatacccggactaatttcagtgactgctcagggatttcgtttttattaacatttagatccgctgcaac

SEQ ID NO: 28521 - DNA, 122 bp, Homo sapiens
aaacttcaggaggttttagctagtggcgatccaaagacattaaatattgctttgtgggtacgtctccaccttgcgtcttacttggtgactgttcagtggtaggcaaatgtcagaacccagta

SEQ ID NO: 28522 - DNA, 122 bp, Homo sapiens
ccagccacaggtttttctgccttttctgagagagggagccctagtcacatgccttctacacgggtactatctggagatatgaaggaaggctatggctgctcaggatttgcaggtgaatattt

SEQ ID NO: 28523 - DNA, 122 bp, Homo sapiens
actgggtttgatttatgaactgttacactagcaattgtttacacattgcatttcagagcccgggcccaccctccccgcagcgggcggcgggcttcgtgcgggaacctgctgcagcccccttg

SEQ ID NO: 28524 - DNA, 122 bp, Homo sapiens
ccgtggctgtgctgtatttcagcatgtggatggccacgctgtggccacatcatatttcagcgtgtggatggccacgccgtggctgtgccgtatttcagcgtgtggatggccacgccgtgggc

SEQ ID NO: 28525 - DNA, 122 bp, Homo sapiens
agatggcgcgctggctgcacaggtaagcgcgtcgcaccttccctgagtgggtccagctttcgggaatcacctgccggtatagccagcacctgttagctgatccccgccccaggtctgctgca

SEQ ID NO: 28526 - DNA, 122 bp, Homo sapiens
gggtatgtcactgtcactctggtagcccctggcttagcccaaggcaccagggaacctggacgtgggctccaaggcaatgacagagagagctccaggagataccttctagctctggcttgagg

SEQ ID NO: 28527 - DNA, 122 bp, Homo sapiens
gtgggagggagaaagttgctttctgcaccaatagctgaggcgttcagggttgtccagggacgctaccctcacgtgtctggttccgagtgctgcgttcggctgtgctgggaagttgcgtagac

SEQ ID NO: 28528 - DNA, 122 bp, Homo sapiens
ccggggttcccacccctggcggggctcgacccgggcgccgcctggcccttcgccaggaaccgggacagagctggtctgtgtgcacacctcgctcacaaaaaattgagccggccctggaggcc

SEQ ID NO: 28529 - DNA, 122 bp, Homo sapiens
cagctaaggaagcagcttggtgatgcctgcaaagcaaactccaagaacagaaagtccagacgtccaatacccataattaggtctatgctttcaagatagtaagagtcatgctatgatgactg

SEQ ID NO: 28530 - DNA, 122 bp, Homo sapiens
gctctcccaggaagccacctgggcgtttggggctttagctaggaaagaggatgtcgcctgcggctgcgaaggcgccaaagcccagacctcgcgcctccgcccgcgacggcggcactgggggc

SEQ ID NO: 28531 - DNA, 122 bp, Homo sapiens
ccgcctcggccgcatccagacatagttttctagttttgacccacagaaacagtgctgggtcggagtttgtcaactacccatctccagacagcaacacaaaggacctggcagggaggtcgcgg

SEQ ID NO: 28532 - DNA, 122 bp, Homo sapiens
tgctgactgcgtgtccagtccactcccggggcacagagcaggcactcgagcgatggttgtcgaatgaacaaccaaatgggtgaatgcgtgagtgggtgagcaacacattctgaagtgaccgg

SEQ ID NO: 28533 - DNA, 122 bp, Homo sapiens
ccctgtggactcacctctgcagccacaacaacaccctcctctccttggcgtggaagccagcgctcctggcccactcccagtaggggatgtcctctgagttgtttttcctgtgcggggagggg

SEQ ID NO: 28534 - DNA, 122 bp, Homo sapiens
agtccccgaggctctctgcagtccgcgtgagtcctggccaaggtctggcctcggaagctacgagctacaatcttccttcatcctacccacccacgaagagcgccaccccagctgcagaccaa

SEQ ID NO: 28535 - DNA, 122 bp, Homo sapiens
aatgctgatgtctgatgtttgttttcttgtccctgcagatgtctgctcactaagttggttcgaagctgaggaggaaaaaaattaggtgctaggatgctggagagatcctcagaaacccctct

SEQ ID NO: 28536 - DNA, 122 bp, Homo sapiens
gcgccccacgccgcgccactctcttccgaaatgcccgcctcgcgcttccaggcctagacccggcactctggcccaaggctggactctcacacacagggtgcccactgcggcgtctcctattg

SEQ ID NO: 28537 - DNA, 122 bp, Homo sapiens
aaaggtgagctggagctgcagctctggagtgattggctggtcctggcagtcgtcggtctccgtggcaaccgcctcctgtctccatggcaaccagggatggagccgacgagagcgcaccaggg

SEQ ID NO: 28538 - DNA, 122 bp, Homo sapiens
cacgatgattcgggcatcctggcgctacaacagagaaagaaacagctcctgagggatgcccgggaatgcctgaggggctaagccagatgtcttcacagctttgatttcccatcccaaagtgc

SEQ ID NO: 28539 - DNA, 122 bp, Homo sapiens
cacacatctctgtcttcggtgtctttaaccactttcttacccctgagcctcagacacattcgtctcccttgcagccttaaaaagaaaggaagaataaaataaaaaccccttaaacactcctt

SEQ ID NO: 28540 - DNA, 122 bp, Homo sapiens
ccctggggcattgtgaggccctgcacccagcactgccccttcaagcctcccacagggtcccgcccaggactcctgggctctgtgtccgcggggccatctagaaacactcccttgtcccccct

SEQ ID NO: 28541 - DNA, 122 bp, Homo sapiens
ttttcttatttcatctttctttagcagcctgccaaaaatattattagaaagctttgttgccgctacataactttaaatctctccttcctcagaaaaagcacccataaaactcagattgattt

SEQ ID NO: 28542 - DNA, 122 bp, Homo sapiens
gggtgcgtcacaaatcaggtcatagctctgggtagagtccacccacttcacccagtataacgccctctacttcctgcacacctgggggaaaggggtgcggggggcgggcagcttaagtccac

SEQ ID NO: 28543 - DNA, 122 bp, Homo sapiens
catcgtgcgtcctctggagaagtgcgcgcgtgtaagtgtggcgagtgtggccaagggtgccggaggcagggttcgggtgcgtagtcgttgcgtgggcgctgcccaaaaggcgcagagcatca

SEQ ID NO: 28544 - DNA, 122 bp, Homo sapiens
gtcgcatcctccgattggaccacgcggcctggggggcggggtctggtccggtgagctcaccgccgcgccccgccattggtccgggcggcgcactcgggcagtggcggggagaccgcggtacc

SEQ ID NO: 28545 - DNA, 122 bp, Homo sapiens
ccaagccagcccttacccccagctttggcagctctttcacttttggaaactctgcagccccggctgctgcacccacacctgcacctccgtccatgatcaagatcgtgcctgcgcacgtgcct

SEQ ID NO: 28546 - DNA, 122 bp, Homo sapiens
gtcccctggtccatatgggcccccccgcccatggggttgggctggtccttatagtgcctacgttagtctgtgtggagcccctggccagcgggggagaaaaaggtggcttctggtccgtctgt

SEQ ID NO: 28547 - DNA, 122 bp, Homo sapiens
ctacaacacgcctctgctgaaccccgtgcaggagcacgaggcggagggcgcggcggccggcggtaccagcatccgcaggcactctgtgtcggagatgacgtcctgccccgagcctcagggct

SEQ ID NO: 28548 - DNA, 122 bp, Homo sapiens
ggggcctggagggggcgttcccagctttgccagtgccacgaggagccggttcgcccgccccgcctgggaccttccgtcctacccagtcctggccggttttctgggtcctcctgaagtcacgc

SEQ ID NO: 28549 - DNA, 122 bp, Homo sapiens
tgtagattctttcctggaacaatcccaccaagcctgcaaggtgaggaaggaaattgaacacgcccctcctgagctcctcaggtgcacctcgtgctgctgtcctggggccatctcccaactcc

SEQ ID NO: 28550 - DNA, 122 bp, Homo sapiens
ttctgagacctcttgctgttctccaaagcagcggcccgctttgccttcccacggggagcgcgtgggagttgccgtcgcccagggtcccatcatcagcacttgctcttttccatcgctgtgtc

SEQ ID NO: 28551 - DNA, 122 bp, Homo sapiens
caggcgtcccccaccagagtgcacagtcagggaaggcctgcgggggctccagcgagagaccggcgctgttagaacagtcagtcgggggtgcggggctccagcgagagaccggcgctgttaga

SEQ ID NO: 28552 - DNA, 122 bp, Homo sapiens
agaggggcgtgttatttttcatagtattctccttggtatagatgaggcttgcaaaaaggacgtgtcctgaagattccattcctgtgcttatatgcactagttggcatgactacaggtctgct

SEQ ID NO: 28553 - DNA, 122 bp, Homo sapiens
ggaaaatgaaaatcatgcgcctgtgatcgcgccattgcatggatcgggttattggtaagacgccttcataggcagtgaaaacgatgcctgcccagtatttctgatcccattattgcagatct

SEQ ID NO: 28554 - DNA, 122 bp, Homo sapiens
ccctctccccagtgcagacaaaaggaccaacagccggcggccgcgagggggcgaggagcccgcatccccagcccggacccggagggagggcagggggtctttttacccggcgcctcggcgct

SEQ ID NO: 28555 - DNA, 122 bp, Homo sapiens
ttgatgcccacgtctggttaggacccctgctgtccattttattaaaggagctgtagaaagcggcctggggcccagcgacctgcccagggcggacgaggaggcgcgactggcccgatgccgca

SEQ ID NO: 28556 - DNA, 122 bp, Homo sapiens
ggaggaaaacactggccacgtgactcggaagcgtgactttgttgatctccatgtatttggcgcgggtcggcggggtcgcggcccgggagagggaggggaccgctgccggccgcagagttccg

SEQ ID NO: 28557 - DNA, 122 bp, Homo sapiens
tggtcccagcatgaatgcgggccccggctgtgaaccctgcaccaagcgaccccgctggggcgccgctacaacttcgccggctgcttcggacgcccggagctttcccagcaggcagaggcgcg

SEQ ID NO: 28558 - DNA, 122 bp, Homo sapiens
cctttgtgctgcggcctctcttctcccatcaagcctggaacgcaaacccattatccgtaacggtttatgttgcaaaactgtccagagcttattgtttggtgattatttctctaaggagcctg

SEQ ID NO: 28559 - DNA, 122 bp, Homo sapiens
caagcgatcctcccgccttggcctcccaaagtgatgagattacaggcgtgagccactgtgcgcggctggtagtactttttgtaccttggggacaaaaataaaaacccaggcacttaagtggc

SEQ ID NO: 28560 - DNA, 122 bp, Homo sapiens
gggagaggagctttggtgcctggtgtcttacactgcatctgaaggagggtgactcaggtccgcttcacctcctgaaccttggtctcctcagatgaaaaaagaacgatatcttaaaaacgctg

SEQ ID NO: 28561 - DNA, 122 bp, Homo sapiens
tctcgcccgtgtgcgtccggtggtggcgggccagctcgtcggagcgggcgaacttcttgtcgcagccctgccagtcacaagcaaaagggcgttcccctggacggagagacagagacagacag

SEQ ID NO: 28562 - DNA, 122 bp, Homo sapiens
ctcacccgccgccttctgcagggagagccgggcacactgcgtggacctggaatcggcttacgtgcagggctgcgagcggctggagcaggcggtgctggtgagcgcaggggcctggcgcgcgg

SEQ ID NO: 28563 - DNA, 122 bp, Homo sapiens
aaaaaaccgggaacggaaaaagaggctggtttggtcctcagcttcctggtcaggtttccccgcggcctccgctgccgccatccaccgctgggtgccgtctgcattccctcgccgcgccacgg

SEQ ID NO: 28564 - DNA, 122 bp, Homo sapiens
gggagggtatccggcttaagggggctgcggtggacaccacttcttaatgtcgggggtcttcgcggcgctcacctcggctcctagggttcgggacggtacgcaccagccaccttcgcgccgaa

SEQ ID NO: 28565 - DNA, 122 bp, Homo sapiens
agcgggctcggagcccgggtctccgccgctcgggacccggctaggcggcggcgggggcggcgatgttccactgcatccccctgtggcggtgcaaccgtcatgtggagagcatcgacaagcgc

SEQ ID NO: 28566 - DNA, 122 bp, Homo sapiens
ggctcctcaacagacacccagcaccagatgttacaaacaagccattttgcagcatctccgcgagcgccgcccagctgccctccctggcttcctacctttcggcctgcctcgttgttgtgcaa

SEQ ID NO: 28567 - DNA, 122 bp, Homo sapiens
atcgtcagttcgccctcctcctcatggcctgtgggagtacaggggccttgcagtgcgctccgccggcccttccaggtccccagcccctgcttggtcctgccctctgctcccagcagccggga

SEQ ID NO: 28568 - DNA, 122 bp, Homo sapiens
gctctcccccgcactccggaaaacccaaacagcaccaaagcaggttctacaacagcttcccggagcaactaggccaggggatgcgacgccgcgcatctccccccgtcacaccaggggcccgc

SEQ ID NO: 28569 - DNA, 122 bp, Homo sapiens
ggccagtctggagatactaaaagagactccggatgaggataggggctgacccgaaagccccgcctgactccgggctgcaggagggggcgtgggacgggggcggagccgttggcgatgacaac

SEQ ID NO: 28570 - DNA, 122 bp, Homo sapiens
agtttgagaccggcctggccaacatggcaaaacctcaactactaaaatacaaaaactagccgggcgtggtggtgcacgcctgtaatcccagctacttgggaggctgaggcaggagaattgct

SEQ ID NO: 28571 - DNA, 122 bp, Homo sapiens
ccgcacgccccgaaccgcggggctgggacgggcagggcagggcaggcgccggcggggaggcgcggcggccggagccccgcggggaagtctttccaggtcccgactcggctctctctgcaaaa

SEQ ID NO: 28572 - DNA, 122 bp, Homo sapiens
gctgtgttagtcagttcatgaaaaagtatagggctgtgttagtcagttcatgaaaaagtacggggctgtcttagtcaattcttgttgctatgaagaaataactgagacttggtaatttatag

SEQ ID NO: 28573 - DNA, 122 bp, Homo sapiens
accagtctcatcatcacctttcccaagcaaagaggtgtgagctgcagtcacacctacatccggtctaagctgcacccaaggtgtgctcaatctggaccttcggagcccctctgggaaggaag

SEQ ID NO: 28574 - DNA, 122 bp, Homo sapiens
ggccagggaaggaaggtaggtcaggaaggcccaccacggaactttctggggtgatgggcacgttctatttgttgatctgggcgacggttacacaggtgtacacatatataaaaattagtgga

SEQ ID NO: 28575 - DNA, 122 bp, Homo sapiens
ggacttccggctcttgactccgcccagccgcgccacccaggtaggtgcgcctgcgctttgcgaggttcctggctagggaggcggccttggctggcttgaccgtcatccttgaggcctgcggg

SEQ ID NO: 28576 - DNA, 122 bp, Homo sapiens
attttttttgcttcatggaatcatagacaaagcatcttaattttacaggatacagcccaccggggtgcttgaggaaaccaaattaacatttccaactccagctgagatgatgcacatacacc

SEQ ID NO: 28577 - DNA, 122 bp, Homo sapiens
gggctgggcagtcttgtgcgcactgctgtgaggcatgacaagcttcccgttcttcctccacgtgatagtcacttctgctggatagaagccccacacatagcaggccagcatcacaggctccc

SEQ ID NO: 28578 - DNA, 122 bp, Homo sapiens
aagtgaaacaatgctcaatatcactaattagggaaatgcaaccaaaaccacaatgtgatacgacttcacacccattagaatcaatattatcaacaagcaaacaaacagaaaataacaagtgt

SEQ ID NO: 28579 - DNA, 122 bp, Homo sapiens
ccaatacacaagcccactttgtctctggaaattaagagctgccattatacctatggaatgcgagaacccagtttcagtggggatggctcctgttctcagctctgagttgaaaaagcagtcat

SEQ ID NO: 28580 - DNA, 122 bp, Homo sapiens
agtagtgacactaaaaatgtctccagatattatcaaatgtctctggggaccaaattgacccgttgaaaatcattgcatttggccaggtgcagtggcttattcctgtaatctcagcacttttg

SEQ ID NO: 28581 - DNA, 122 bp, Homo sapiens
ttatgcagtccttattcaagagggaaccactctggtttgaatgcctctgacactacaatgcgtgggccagcactctacctgtagtaggtgctccaatcatgtttattgaatgaaatcatatt

SEQ ID NO: 28582 - DNA, 122 bp, Homo sapiens
acgtcgaagtcgtctgccaggaacttggagaagtccatggcggaactgcctcaggcctggcgtccagaacttaagagttggctccgggcggcaacggggatgcagaagcgagcgagcctgcg

SEQ ID NO: 28583 - DNA, 122 bp, Homo sapiens
gaactgaacttccttccattttctcgattgataactttttcgaaacttgaacctgcagcacgggtgctagaatatgcctgttggtatggttttaaaaataattcctatctttctggattgaa

SEQ ID NO: 28584 - DNA, 122 bp, Homo sapiens
gggcctgaggctggggaaccactcaccttggtaatgggagctgtgaggacctcataatatcggggaagctgggctcccaggatgcggcctacaagagaagatccacaaaacagaagttgaaa

SEQ ID NO: 28585 - DNA, 122 bp, Homo sapiens
acgcggagggagaataattaaaaaggccagcatcacttactaagtgagtaaacacagagccgttccaatcgtgctctccagctaatgagaagctgtaatttcttatacttcaaggcaagatg

SEQ ID NO: 28586 - DNA, 122 bp, Homo sapiens
cggatacctcgatgctgcctctgctgtgagcctgtggcgaaggagggtcaacaggcgactcgctgagtgactgcttgcaagagcggggagggtaggatccatagatgaggagcgtgtgtagg

SEQ ID NO: 28587 - DNA, 122 bp, Homo sapiens
ctcaggtgatccacccgcctcggcctcccaaagtgctgggattacaggcgtaagccaccgcgcccggcctgacagcttttatccagaaaactgtcgccagtaaaggttcccgtctcagtaaa

SEQ ID NO: 28588 - DNA, 122 bp, Homo sapiens
gaactctacagcggaagaataagaaaccggaactaaacttctcactcatctgacttcctgcggtttacgacaacagactttggttgcaccggaaaagaacagattctcttccgtcgcagagt

SEQ ID NO: 28589 - DNA, 122 bp, Homo sapiens
gtaacttgcccaggacaagtcatgaacacagccatttagtggagagacctggcaaaaacccggtgcctttgcttcttccgttctcaagtgagatcacctctggctggggtggggaagcggac

SEQ ID NO: 28590 - DNA, 122 bp, Homo sapiens
caagtcaggcagtctgcggcaggagcgccgggcatgggcttccgccgggggtgcaggaggcgcgcaccctccggccggatgggggcgcactcagggcccaggaggccatcccacgggagccc

SEQ ID NO: 28591 - DNA, 122 bp, Homo sapiens
caacaatccctccctagcaaggttattgctaggataatcagaatgtgtgtatgaaagcatcgaggattttgacccgtgataaaatgcccagttaattttcttgaatctaaggcccagagatg

SEQ ID NO: 28592 - DNA, 122 bp, Homo sapiens
cgtctttaaagaccactatatatggttgccatgtaaactgcacaaattatagcaaacctacgtattacctccttacatttcaatgataaaatcagaactttgtgtaacaccaagtgccattt

SEQ ID NO: 28593 - DNA, 122 bp, Homo sapiens
ctgccagcctcaaggtcattgccagcgctcagtctgggttagtacctctgcctctgctcccgccaagccagtagccctatctcccaccttcaagactcaccaggtccttctcttcttcccac

SEQ ID NO: 28594 - DNA, 122 bp, Homo sapiens
agggtttcagcagcaatgaaaggcaatggaagggtatcgtggatcaataaggctgagaggcgagagaaagagggcaaaaatcttctttattgagctctcgggcgaggttcacttgtccgcag

SEQ ID NO: 28595 - DNA, 122 bp, Homo sapiens
acctgccctcactgcggctggcagggacggacatgtccgggccgcagggtgaatcctccacgcttttccttgtctctgttgcagttttcctggcgtcttgtcctctggatgggcctctggat

SEQ ID NO: 28596 - DNA, 122 bp, Homo sapiens
gaaggcacctgcagaccaggggacctgcacggacagccccagaggtggacattgaggaatcgttggaggacttgggtctcatacgggaggtggggagcagggccccttcctggctgaggaca

SEQ ID NO: 28597 - DNA, 122 bp, Homo sapiens
gaataacaaggaggtggtggcagggtagtgagctccccgtctctgggggtgtgtgcaatccggcgctgcgctgtcagcagggcaagggctggggccggggccaagaccaccaagccaggccc

SEQ ID NO: 28598 - DNA, 122 bp, Homo sapiens
aatgcacatatgaagttaagtaaatgcacatacacacacgcaaaaccagatcaagacgcacgcactgacagtgggaaggttcgggaagaaagtggtacaaaccccaaattgattctttccac

SEQ ID NO: 28599 - DNA, 122 bp, Homo sapiens
accaagcaggcgtcctgtgaaagtcagatcccctgtgccctgtcccacctgctggggacccggttcgtcctgccacccagcctagtcttctggaaaccggcccacgtgcctgctggggagga

SEQ ID NO: 28600 - DNA, 122 bp, Homo sapiens
tgtcaaagatcttgatcttgcttgctgatctctagctcctgactttgcagcccactgatgcgaaatatgtacagttaaaaaacaaaaaacaaaaaacaaaacatggcgcggtgcagaggctc

SEQ ID NO: 28601 - DNA, 122 bp, Homo sapiens
agccccgggggcggggcctccaatgcaaatgaggggcgtgggcaggcggggcggggcgggcggggcgctgacctgacgtcaggctcgcggcccgggcagttggctcggcggcagcggagcgg

SEQ ID NO: 28602 - DNA, 122 bp, Homo sapiens
ctgggttctgagttggctttaggtggaacccaggtcattcctgggtatgccttgggagggcggcgaggctggccgcagctgggcccggcatcggagaaaattgtgtctctctggagaccctg

SEQ ID NO: 28603 - DNA, 122 bp, Homo sapiens
ggccctggttcgggggcgttctcgggacggcgtggccgcgctcaccaccaccgcggaggccgggctgtaattaggataattgcgctgctcccagcctggggcagctcaggaccccggctgca

SEQ ID NO: 28604 - DNA, 122 bp, Homo sapiens
caaggcctcgtgaatgtctcatcctaagttagcctgggctccccagggtggcctgggccccggggaaacacgggcactccatcaggcgggacattcccagggctcatggctcaggcccagac

SEQ ID NO: 28605 - DNA, 122 bp, Homo sapiens
agttgggactaactacacacttggtgggcgacctcaagcagatttcttaatgtctctgaacgctggcaatgttttaatctataaaagaggggaagatcataaccattacctccaagagctga

SEQ ID NO: 28606 - DNA, 122 bp, Homo sapiens
ccgggtctacatctccgcccgccctcacaatatcccaggaaacagacatccgcgtgctcgcggcatttgttaaccaatcagagcagtctgtcagagcacatgggagagcgacagccagtcag

SEQ ID NO: 28607 - DNA, 122 bp, Homo sapiens
tttagttcctcacgtacctgttttcacgagaaaacagcatctgggatgagaagtatgacgcggtggacatgcaggacatgaacaaccccctgtctcattactggatctcctcgtcacataac

SEQ ID NO: 28608 - DNA, 122 bp, Homo sapiens
gggtttaacgcccgagtcagggaagaatttgcggcgttgagttctctccggcccagattacgctataaaatgtgagtgtatgtagggagtggggtgggttggaggaggcgaccaggggatgc

SEQ ID NO: 28609 - DNA, 122 bp, Homo sapiens
ctgcgggttgtccatcgcccttccactgtctgtcacagcaggtacgttccgtgtgtcctccgttcccagaggctgcccgagtccacaggctcctggcctgtcattgggagcccccggggatc

SEQ ID NO: 28610 - DNA, 122 bp, Homo sapiens
gcctccttcctccagatgatgtttctttccctggggtcttggcagctggtcctgagctcccggcggcccatttcccggacctgcgttcccaggcatggccacacgagtgcgcccggctcccg

SEQ ID NO: 28611 - DNA, 122 bp, Homo sapiens
gccttgcaaacatatgcgctaagctgtgtatacagatggcaggcagaataatggagcaggcgccttttataaagctctagctgctgcctgtcttcagacctgggaaatgaaactattcagac

SEQ ID NO: 28612 - DNA, 122 bp, Homo sapiens
gaaaattagggaaaagcagttcctaatgactctttatcacatcaacttattctcaggaaccggaggttctaaattttgtatttgtcaccacgaccacaactcgttgtccagaaactgaagga

SEQ ID NO: 28613 - DNA, 122 bp, Homo sapiens
cgtcactccgtaaccggaagtgaattggccccgaggctgatggctccggaaacaccaattcgctgtctccacgcatgaggagacgtgtaggggccgggttcggccctggtgaactctcaccc

SEQ ID NO: 28614 - DNA, 122 bp, Homo sapiens
agccactgtggtaggattagtttttttgtgttgtgttgcacttgttgcttatgtcgcacacgcatgtacatggtctatgcagtacacatatatgcatgtatgtatgagagtcagatatccga

SEQ ID NO: 28615 - DNA, 122 bp, Homo sapiens
tttctccagggccactccggagcaaggccgatttaggacggtctccttttctctgcacgacgcaaaagtatttccccagtgggtctggcttagaagaaaacagaagggacttggccacagtc

SEQ ID NO: 28616 - DNA, 122 bp, Homo sapiens
tggcttccaacacatcaagcattgttgaaagtaaccgtcgtcagaaccccgctttgagcccggcccatggtggagctggtccagccttcaacttccgagcgagcgcggagcccccgacaaat

SEQ ID NO: 28617 - DNA, 122 bp, Homo sapiens
gcaggggccacggcccagccagtcgagcagaactggaaggatcacagcccagccccggctcggaatggcccctcggcaaccaccctgagttaccgacaaaatgccgacggactgtttcaaac

SEQ ID NO: 28618 - DNA, 122 bp, Homo sapiens
aaaaggaggcccgccaatgggaacgctgcgcctgtagggaggattctgctgggtttcatgcgggtagcaccgcttttcttttctgcccttgtaactcacgaaaaaacgccatcactccaagg

SEQ ID NO: 28619 - DNA, 122 bp, Homo sapiens
tcaaaattggaagcttgggctagttttcaggatcttgtagaaatttcaggatttctctaacggttctgcacctggaaacaaatataggcctgatggggagtgggagagagctctcgttctcc

SEQ ID NO: 28620 - DNA, 122 bp, Homo sapiens
gagtgaaaaagtggaaccatcactaaataaaaccgtgagctaggtaactacccttcaccccgatccttggtggctttttagtgttggttaaaggtgcttttttttttttaaatgtatcataa

SEQ ID NO: 28621 - DNA, 122 bp, Homo sapiens
acatatgttttcctatagacctattactttttcccatgtttcagacaaaaaatttttgtacggtacttgcaacttttctgagagtttgagtttgtttagaaataaaaaaaatgtttaaaagc

SEQ ID NO: 28622 - DNA, 122 bp, Homo sapiens
cctgggctcgcggccgggaatggcagactctcgtcccccgagcagcggaaaaggatggggcgcaatagttcctgggctggtttcctcaggtcctgtcccagaacttaagaaggcaacaatga

SEQ ID NO: 28623 - DNA, 122 bp, Homo sapiens
tcagcctccgctcctcaggactaggagacaagatccggacaggcaggacaggcagcaagccgactgtgagcagcctgggggcgcaggtgtaaaatacaaagccctttgaaggtccagacaat

SEQ ID NO: 28624 - DNA, 122 bp, Homo sapiens
taactgaggtgagggcctcccaagcccctctccctggagccctggggctttcttcccagtcgggtcagactacaacccccagcagcacctggggcagtgggtctccagctttacaccaatgc

SEQ ID NO: 28625 - DNA, 122 bp, Homo sapiens
gtggggagagcccatgcgcctgggaagccgggctgtttctgggcggggctgcagactcctcgtgctcgtgtcaccgtgtccttcccaggagacagagaaggaggagagcccggaaccagggc

SEQ ID NO: 28626 - DNA, 122 bp, Homo sapiens
gccaaagtccaggtgcttacacttttggacttaataactgagctgtttttactcaccacccgcccaacacccttctttttcttttatcattgtcagcatgtgctgagcccctctgatggaca

SEQ ID NO: 28627 - DNA, 122 bp, Homo sapiens
tcggatactaagaaatgcagactccgggttcctcatcctccagatttgggttgggggttccggactccgagacccctcaggggaaaccggctgcatatctgggacacttccctcttgcctca

SEQ ID NO: 28628 - DNA, 122 bp, Homo sapiens
atctcctttgagatgcagatgaaaaaatggccccttgagcaacagtaaatgcacagttcccgcaaaacccatccagatagggaattcctggcccaatccagctccctccaacctcggggcgg

SEQ ID NO: 28629 - DNA, 122 bp, Homo sapiens
tgcaaaaacctctttcggtccccacggatgcttttagttcagagcagccagcaatgcctccgcacaaagctttgccattgctagtgtgaagagaaagagctgctgggatgctgaatggcaca

SEQ ID NO: 28630 - DNA, 122 bp, Homo sapiens
ctaaaagaaagcaaaggaaggcaagaggaagggaaaaaaattaaaggcttgaggcagtttcggtggtacttagtggtgaaaattactttggcaaataatagaacccacggctggtaattact

SEQ ID NO: 28631 - DNA, 122 bp, Homo sapiens
ggcgcggggcggggcctaggtcgcgggccatctgggctctggaaggaacccttagaggagcgggaggacgccacaggtcctcggcggggctccgctcccgtgagccgcatgtggctggtgag

SEQ ID NO: 28632 - DNA, 122 bp, Homo sapiens
ggatctacggtggccacaaccatccgccattgatggtgttgcagccgctcttcacgaacacgggctatggcgaccacgaccaggaaatgcttatgttgcagacacaagaggaagtggtgggc

SEQ ID NO: 28633 - DNA, 122 bp, Homo sapiens
ggggcggggctcacagtaatcctctgacggggcggggctcacactaatgctctgacggggcggagctcacactaatgctctgatgtggcggagctcacactaatgctctgacggggcggggc

SEQ ID NO: 28634 - DNA, 122 bp, Homo sapiens
ctgtgcctgttgtaatccccaggttcatgaaagaggtgcctgccttagagccagggaagccgttgcacccggtgccccctctccccagggaccatgggcctgggcacactgtggggctcagg

SEQ ID NO: 28635 - DNA, 122 bp, Homo sapiens
cttcctgttccaggcgcttgttcaaccagccagtgccacctgggaattcccggggatgcacgtaggggcttcccagagagaaactggtgcctgctcttccccacccccatagccccacagcc

SEQ ID NO: 28636 - DNA, 122 bp, Homo sapiens
gggataaatagtgtggtccagcactgccctgggtgagctgagtcatgcccttggcagggtcgaggagctcccgtgaggagaccaatcgcctagcgtgagtcttcttccgggattgctcgccc

SEQ ID NO: 28637 - DNA, 122 bp, Homo sapiens
agcaaccctcaggaggttcccttgactaagactttgtattgcactctagtaacaacctgtcggacccacacggggtgacacagaaaagaggcgagaatgtgagattaatagagtggtagcaa

SEQ ID NO: 28638 - DNA, 122 bp, Homo sapiens
tgtccctctccaccggtaaaataagaaccacagaaatgactcaaatggagtcagatggcccgggctggaattctgactccatcacacattagttgagtgacctagaacatattacttcccct

SEQ ID NO: 28639 - DNA, 122 bp, Homo sapiens
cagtcacctcattaaacccggtccccctccacccctaccccaccctcacccccagcccaccgcacgcatccccacacccggtccctcccgctcagccctggccggcacagagaggctgggtt

SEQ ID NO: 28640 - DNA, 122 bp, Homo sapiens
aaaacagcgtatgctgtaagtaatctaaagtcacagtcactccgggatgtgtctcctacacgtcttcagaagcttatctctcctctcccttttcttactgttcctcggtttctcaatcttat

SEQ ID NO: 28641 - DNA, 122 bp, Homo sapiens
acagaggcagagatcagagccatgcagctgcgccagcaaacactaaggcctgctggtgaccgccggaagctgggagggcaaagatggacccttctctggcgccttcagagggaatacggccc

SEQ ID NO: 28642 - DNA, 122 bp, Homo sapiens
ggctgcgtgcccccggatgaagtgcggggagaggtgctggtccccaggcatggcaggcagcgcggacgttctgggaccgggagccacagtctgtgtttgggttggaggatttgtgtggtcag

SEQ ID NO: 28643 - DNA, 122 bp, Homo sapiens
accttcatctgctaaactgtggacaaatgagattttatgctttatcatcaaggtgccagacggggctcaggtatttacattttatatgtaaaattgctcatgctctgctgcacaatagttgg

SEQ ID NO: 28644 - DNA, 122 bp, Homo sapiens
aggccagcttctttcagaagcgcctaagagatgcgcatgtaaggggtgccatggagcacccgggaaggacccaggcctgggcagggaggcgttggggccggctctagggagcaaagctgtcg

SEQ ID NO: 28645 - DNA, 122 bp, Homo sapiens
cgcgacggcgccttaggaccaggatggggtctgcaggatcccaggacctggcagaggactcggcctccccgggactggggctgcggcgcggcgctcccggggctgaggagggggaggctggg

SEQ ID NO: 28646 - DNA, 122 bp, Homo sapiens
aagaagggctttctggtacaagtgagatacggaggatggaatcaattgttatgttttggacgtgttaagatgcctacctagttgactttaagtggagacatccaagtaggtagttggttctg

SEQ ID NO: 28647 - DNA, 122 bp, Homo sapiens
ggcaggtggatcacttgagcccaggagtttgacaccagcctgggcaacatggcgaaaccccgtctctacaaaaaatacaaaacatgccgggcatagtggcatgcacctgtggtcccagctac

SEQ ID NO: 28648 - DNA, 122 bp, Homo sapiens
ggagaacgagggtgcgatgctggatggaggccggccgggtggggggagggcaggggccctcgacccttgaggaccccaggtcctaagcccggactctccaaagatttggaaaactttacaaa

SEQ ID NO: 28649 - DNA, 122 bp, Homo sapiens
gagccatgcagagcccccggccccatatcaaccttcgcccctccctctctgcccgtcccccgaaccagctgcccctctgggggtgggagcccagaccaggtcagcagacgcgaaaagagaaa

SEQ ID NO: 28650 - DNA, 122 bp, Homo sapiens
tgtgcgcggccccagcggcgccctggaggaaagctgccctctccctaattcatccatccacgtttattggtcctgatcgtcggcctgacccgtgctaggtgcccgctgtggccccacccttg

SEQ ID NO: 28651 - DNA, 122 bp, Homo sapiens
cctccatggtagtctgtgcagtgggagaaggcagcccgggcccagggtccacggagaagacgcaaatcgacagcgcgggagcgcggaccttctggaggcgcgcggcgcttaccgctgtccgt

SEQ ID NO: 28652 - DNA, 122 bp, Homo sapiens
gggacaggatggcgaggccaagggctgcctcgagccagacctcagaggtcctgggtggagcggggctcaacaccaccagaaagggcctgatccaggtccacagagaggctggcctggaggct

SEQ ID NO: 28653 - DNA, 122 bp, Homo sapiens
ccaccatgttttacgagattgttggaatgggtccgaggacagaagcggccggtggcgggacgcaggggaggcagggtgacggcccgaatctcctcacagctccaggactgctgcgctggtgg

SEQ ID NO: 28654 - DNA, 122 bp, Homo sapiens
catgagtcagatggggcattaactggcaagtcaagagaaccaggcacactactggagtgacgtctttccgcctgcaaagatacaagacttgctgtccacaaactaattaagcatgatgtgga

SEQ ID NO: 28655 - DNA, 122 bp, Homo sapiens
taaacgccccgcacagcctggaccggcctgcccccgcccagcgagcctcaggggcccagccgacagccaggctcacgcgcccttgaaatctgccggtactcgctctgcgggctgggctggga

SEQ ID NO: 28656 - DNA, 122 bp, Homo sapiens
gaggcagggccagggcacctgtctgagaggggcttctaaggctgcaagcttttccccttccgtggactgcattcacaccttgttcggtcctgctggggccggggctctccttccttgcccct

SEQ ID NO: 28657 - DNA, 122 bp, Homo sapiens
tgtcactgatatggtttagacctgtgtccccgtccaaatctcacgtcgaattgtaatgcccggtgttggaggtggggcctggtgggaggtgatcagatcatgggggtggagttcccctgact

SEQ ID NO: 28658 - DNA, 122 bp, Homo sapiens
tgagcggcagctgcgcgcggggctcttcgatcaaccctcaccccgccggattacgcctcccgccagcccagctctgggacccctgggtctcctctgctgggaccagacctgcctgccggtaa

SEQ ID NO: 28659 - DNA, 122 bp, Homo sapiens
aaaggacagcctgccagaaactgaggctactttccttccaccctctaatcttctgctattcgctccacttgctgaactcagctggaatccagtggccaagggagcctgctgatgcaatccct

SEQ ID NO: 28660 - DNA, 122 bp, Homo sapiens
ggttattttagagtccatggggccctatttgacctattccagcctccagggttgcttaatcgatccagtaatatcaatttatttttttagagtccttgagataaggatgtaaacagtgattt

SEQ ID NO: 28661 - DNA, 122 bp, Homo sapiens
aaataccggctccccatactctctgtctggtgcaggcatgggcccggcacccccaaactccggcccccacacggttcagggccccccacgcaagactcacctccagcggccacccccactcc

SEQ ID NO: 28662 - DNA, 122 bp, Homo sapiens
tatttagccaaagcctaatccagagcaagcccctaactcttttcagttgtgtgaaagctgcgagatatgaggaagctgcagaagtttgaagttaacaggggttgatccatgaggtttaagaa

SEQ ID NO: 28663 - DNA, 122 bp, Homo sapiens
gtgcagtggcgtgatcttagctcactgtagccttgaactcctgggctcaagcaatccttccgcctcggcctcctgaatagttagggctacagtgtgtgcccccacgcctggctaatgttgta

SEQ ID NO: 28664 - DNA, 122 bp, Homo sapiens
aagtgtcagagctggtcctagctctggatatggtgctagagctggttcttgattggatttcgctctagagctggcaggaactctggctctcgttctgaagctggtgcaggtctgagatggct

SEQ ID NO: 28665 - DNA, 122 bp, Homo sapiens
tgttgcacctggaagaacccccgatttcctggggacccagcagggcaggcggcctggctccgcgctcaggtccggacgcttgtttatgagaagaatttcctctttcttaaaagggcaacgat

SEQ ID NO: 28666 - DNA, 122 bp, Homo sapiens
cagctgtgtaatgggggctcagtcactgagcttgtcaaaggtctactcagatgtggccagcggttggatgaagcaatgatctcatacatcttgtacggggccctcttggtaagaacatctat

SEQ ID NO: 28667 - DNA, 122 bp, Homo sapiens
gtcgatgatgatacaggtgtgctgagtgagctgtgctgccagccatcgcagaggagcccgcgcacgactgtggtggggccgtcggtctgttctggttgcctcttcctgaatgggacgcctgg

SEQ ID NO: 28668 - DNA, 122 bp, Homo sapiens
cgatcgtgtcgattttgcggggccggctgccgcctaggcggggacgcccacggcccaggtcggcctcagtttccaggtagtagacgttgaaggtctccttgcaggtacccgcggcgccaggg

SEQ ID NO: 28669 - DNA, 122 bp, Homo sapiens
ggttcgctcgtataaaggcatatttccggtcccttccaaggtccaacaatccggacacggcgggtctggggatgggcccaggaatccgcctttttagcagcattcccccaaacgacacggca

SEQ ID NO: 28670 - DNA, 122 bp, Homo sapiens
ctctccaggcccagctcctgcctcctgtcagtgtctacaggcccaacctctgtctcatggcggcttctccaggcccaactcttcctcttggctgagtctacaggcacaactgctgcctcaca

SEQ ID NO: 28671 - DNA, 122 bp, Homo sapiens
gggcctcggggcctggcttagggtcccttgctccccaggtccccctgggcccggagtgctcgagagctgtcatgaagctggtctactgtgctcactgcctgggagtccccggcgccaggccc

SEQ ID NO: 28672 - DNA, 122 bp, Homo sapiens
tcaggcccttcccacttagaaaggtgactcaaccagccccacacctacagagacctggggcgctcccaccaccagcaagacagggctctggcctggctccctggccctcaggcacagacaca

SEQ ID NO: 28673 - DNA, 122 bp, Homo sapiens
ggtcagagcgctaagtttcaaggaggcggcgctaaacaggccctctagccgggagcctgtcgcgacccgagcgaccgtgggtcgaccccgatccggaagtgacgcaacggcgccaagcactt

SEQ ID NO: 28674 - DNA, 122 bp, Homo sapiens
gggcccccaggtcgggtcttccgaagattgtgtacagaaaaggacagcagctctgtctctcgcccgggtgtccctcctgccccgacgtccacgccccccggtgaccacacgagccagagcgc

SEQ ID NO: 28675 - DNA, 122 bp, Homo sapiens
ccagagctttcgggcaggcccagccattgaaacccgagacgcggggaggagctgtcgctgcgctccgggaggaacgagggcggccctgggcctggccagagcggctccccttacctgtgact

SEQ ID NO: 28676 - DNA, 122 bp, Homo sapiens
gagtgcaccagggggagaagcgctgcctggggaagggccagactctggggccaccaagctcgtggtggcgatggtgcgcgcccaagtgggccctggctcccgccagagccagggcacagtag

SEQ ID NO: 28677 - DNA, 122 bp, Homo sapiens
tcttctagccagtgacacttgggggcgggggtgacagctgagttggtgttccccttcattcgtttagttcagcgcgttgaagcgctcactgtgtcctaggcagacaccgtgctgtgcgcggg

SEQ ID NO: 28678 - DNA, 122 bp, Homo sapiens
acatctttcatgactcaatttttttttgctggtgcaattttcctccttggttcttcaagacgactgcaacggatgatacagcctgggttagggggtaggtaggagggaaggtaggagtggtt

SEQ ID NO: 28679 - DNA, 122 bp, Homo sapiens
aagggtctgtctgagcagagacattggtaacggcttctataggtgtagcagtcgtttgttcgatgaaagatggcccttctaggcagaggcactgaactaggaaatacatttcttttttgacg

SEQ ID NO: 28680 - DNA, 122 bp, Homo sapiens
cattggactatgcaaatcaatttctactagcagcactgagcaactgggcacgtgctagtacgcaccccctcctactctaactgtgctagctcttgggttgaggaatggaatgggtagccttc

SEQ ID NO: 28681 - DNA, 122 bp, Homo sapiens
tcctgcaatactgggagtaatatcatgctcttcttccgtgaatattaggagcaaaatcaccgggtggatgcccacccagtgctatattgggagtaatatcatactccagcccctggagatta

SEQ ID NO: 28682 - DNA, 122 bp, Homo sapiens
cccccggcgggtcggctgggagctgggcgggggcggcaggagctcacgcctcattccctgcgtttccctccatgtgcccctgcacgctgggtccttggacacaagccccctcggtgcctctc

SEQ ID NO: 28683 - DNA, 122 bp, Homo sapiens
gatcggggtgctccggctggaaggcccatccctgagctagggaggaggaaggagagaccccgtggacagaagcgggcgctaagacctcttcacgtcagaaccaaaaaaggggacagaaaggg

SEQ ID NO: 28684 - DNA, 122 bp, Homo sapiens
aaaactaaacaaagttttagctacattatcccatccattatcgccacaagatggcgatagcgcttctcaactcgcctgcgggacggaggcagggtgcggcccggagaactcctccctgttcc

SEQ ID NO: 28685 - DNA, 122 bp, Homo sapiens
gcggcgcgccccgcctccctctctctgccgccgtgggtcagtgggattctgcctgctgcccgctcctccccgcaacctccgccgccgtcacccgggacaaagcggctccagggaggggctga

SEQ ID NO: 28686 - DNA, 122 bp, Homo sapiens
gtgatctaggtcatgccatctcatgttggacagggaaatgggggctgagtgaggtgaaatcgcataaaccagctgtggaatggaaattagtcctaggtttctagctggaatcctgcctcagg

SEQ ID NO: 28687 - DNA, 122 bp, Homo sapiens
acacacctttgtttaaaatcgccatagagaatcctgtttgggaaccctttcctgcagatgcggatgccctccaggacaccgttacaccgcagctggtgcagaacaaggctgtgttccatagc

SEQ ID NO: 28688 - DNA, 122 bp, Homo sapiens
tcccggcgcccagagcgcgcgctcctttggccctgccccctgcccgggggacttcggcagcggccactcctgccactgcgctctctccagagcccagccccgggaggccgccagtctcgggt

SEQ ID NO: 28689 - DNA, 122 bp, Homo sapiens
ggaggcggagtttgcagtgaaccgagatcgtgccactgcactccagcctgggcgatagagcgagactccgtctccagaaaaaaaaggcggggggaaatgaataggtagagcgctttaacaca

SEQ ID NO: 28690 - DNA, 122 bp, Homo sapiens
tggacaaatgtaaaaggttcaaagcccagatgatgtaagagctggggtggagctcaagcacgggagcccatctgcctgctctgggatgacagctgcaaaggaccgtttcaggggaagggcag

SEQ ID NO: 28691 - DNA, 122 bp, Homo sapiens
gaagggaggtggcggggcggcgagctgaccgtccgagaactggaaacaaggttcttgcagcgagggaggctctcggctatctccgccgccggcgccgcggccgccgctgctgcattcagcac

SEQ ID NO: 28692 - DNA, 122 bp, Homo sapiens
atgcgatggcgcttaataatcggcttggcaaaacataaacgtatgctggtgggaggtttgcgtgacggccaatcctggcaatgccaacctctactagggctggagggagggcaatcctcggt

SEQ ID NO: 28693 - DNA, 122 bp, Homo sapiens
gagcccctctccctcctccccggatggaaatccacacaactcctttgcccttcagacctccgtgctgcgccctggaaaccatgtcatcgcctttgtgtttttgcaaaaagatttggtcagtc

SEQ ID NO: 28694 - DNA, 122 bp, Homo sapiens
atgtgcttttggtgcccacgtgaaaatgcagacagttaaaactgaatatagagctgggcgcggtggctcacgcctgtaatcccagcactttgggaggccgaggcgggcggatcacgaggtca

SEQ ID NO: 28695 - DNA, 122 bp, Homo sapiens
ggcctggcctgtctcattcaccccaacaagggccctctcgacagcgtagggtgggaaaggcgggtccagagacggtggccagcgtgcccacaccctccccgttgtgccctgtagcacagctt

SEQ ID NO: 28696 - DNA, 122 bp, Homo sapiens
caggcatgaaccccttgtgggaggcggggccccctgtgatccctttctattcatttccttcgtctttccccacagatgctgtgtgctgtggacccacctggggttcatggagtgggccacgg

SEQ ID NO: 28697 - DNA, 122 bp, Homo sapiens
gattcgagtccctgtctcaggtctgcttttttccaaaactcaagctccttccctgaccctcgcctgcttctcttccagcttgcggggagcttttggggccctacgtgcgtgaagttccaatg

SEQ ID NO: 28698 - DNA, 122 bp, Homo sapiens
agagagagagagagacctcctcctgcggctgctttctcaggcgggagaagatttaatacacgtctcaccccttttgtgaacaagagcaggcactgttcagtatccttcaaagcacaggacat

SEQ ID NO: 28699 - DNA, 122 bp, Homo sapiens
actgatcttgcaggccctcacagggtggatgcccaggaagtcctgactgacaagccctggcggtggcctctccaccactccacccgcataaggagacagagaggctaggaaagaggctctct

SEQ ID NO: 28700 - DNA, 122 bp, Homo sapiens
gagatgggggctgcggtgactcgcgggatcaggaatttcaacctagagaacccagcggaacgggaaatcagcaagatgaagccctctcccactcccggttacccctctaccaacagcctcct

SEQ ID NO: 28701 - DNA, 122 bp, Homo sapiens
ggtggtagaaaataagtttaaagagtttgttgaaggcatctttgagcagagtggtgaaaacgattgcagaaacgcagacaagatcatcacctgttggaccagtaccttgtgttttgcttcct

SEQ ID NO: 28702 - DNA, 122 bp, Homo sapiens
cctccagcgcccgtggccggctgtgcgagtctgggtctcaggaccccaaggggccagacccgtcctggcgccgagcgcttacctgccgctcgcgtcctcggggctggctgctggcgccgtcc

SEQ ID NO: 28703 - DNA, 122 bp, Homo sapiens
tcgcaaacagcacaatcagccttttctgcaaaccttagggctgtctcccctgtgtatgtccgttcatctaagccaagcttttccgaaatcaccgagtcattcacagtccttaaataaacacc

SEQ ID NO: 28704 - DNA, 122 bp, Homo sapiens
gcttggcacagcgggaacccatggtctacgttgcctgtctctctgggcaaggaggtgaggcggtgggtgaaggggctgcgagtgggggcaggatgctgacatcacaaagggagcccatcccc

SEQ ID NO: 28705 - DNA, 122 bp, Homo sapiens
gggtgtctctccctgttttacggttgagggccttggtcaagccctgcagccttgaggttccgttcctcatccaggaagcccgcgaggcacgctgcaggcaggtccaccggcccgcgcatccc

SEQ ID NO: 28706 - DNA, 122 bp, Homo sapiens
ttgcttttatgtttgacagtagctcttgattcccataagaggagcttagctagtgcggctcgctggcgccacctagagctccgaggcggaaaggccgtcgcctgcccggctcgcggctgtca

SEQ ID NO: 28707 - DNA, 122 bp, Homo sapiens
tcctggggcagaggccgggccaggtcagcccctctggccctgtgctcctggggcagaggccgggccaggtcagcccctctggctctgcccctctggttgccatagagctgtagtgacagaac

SEQ ID NO: 28708 - DNA, 122 bp, Homo sapiens
gtttgtggccgagcgcggcgcggccccgagcggccccgcagcgcccggctccccgccgctcgctctccaggcgccgacccgcctgcgtcgccaccctctcgccgctccctgccgccaccttc

SEQ ID NO: 28709 - DNA, 122 bp, Homo sapiens
cagcgctgccaccttccgcttttcgtacagcttgtcattgagggcgcgcacgatgttaggcgtgagcggcgcgaaatccttctcggggttcatggtggcagctgggggaacctcgcgactcc

SEQ ID NO: 28710 - DNA, 122 bp, Homo sapiens
ggacaaaagcctgagcccggaggagacagcttgcctcgcagtaagcgccagtgcccacttcgtcctctgctctcagaaactgctgagagatagagggatcccccagatatggcccaggtccc

SEQ ID NO: 28711 - DNA, 122 bp, Homo sapiens
gcggccagccggggcgcaatccccacgggacacgcacctaggggatgcgtgacccggacgcgggcttggtgggctctctagagtcgtttcttatgtggcactttctgtctttgtctgctgtg

SEQ ID NO: 28712 - DNA, 122 bp, Homo sapiens
gaggatgggtaagggacttacttacttgctgttagcagtgaagttacacggcctgtgagccgcgggggctggagatgcaaaccgagcttgggtttcttaagtgggtaggagtggagatgtat

SEQ ID NO: 28713 - DNA, 122 bp, Homo sapiens
caccgggcgtgggctccagccaggagcgcatgtacctgccgtccggcgccgccgccgccacgggcgcctgggggtgcacgtaggggtggtggtgatggtggtggtacaccgcagcgggtaca

SEQ ID NO: 28714 - DNA, 122 bp, Homo sapiens
ggctgccctgccttccgccgaccagcaccccaggagcctctgaatgaaacacactgggctcgcaggcgggggactcgttcacgtgtgcctttggatttgcttcagaacctctgatagagccc

SEQ ID NO: 28715 - DNA, 122 bp, Homo sapiens
tatcagtgacaacaggcgatgtttgggttttctgttcctgcgttagtctgctgaggataacgccttccagcaccatccatgtccctgcaaagaggctgacaagtcttaaaggtgcggcagct

SEQ ID NO: 28716 - DNA, 122 bp, Homo sapiens
aggaacttcctgcggtgtccacaaagcagccgctggctgtcctccggcagaatgggatggcgcctctggtttcatggctggtcaagaatgacttctggaatcagcgacaatgcacccaggaa

SEQ ID NO: 28717 - DNA, 122 bp, Homo sapiens
gaatgtgatgagcctcatgagtcctatgagccccacgctccctatgcgccccacaagccccgggactcctatgcaccttacgaactccatgggccccatgcagcccccaaactcctcaaggc

SEQ ID NO: 28718 - DNA, 122 bp, Homo sapiens
ggagcgggctgtgagggacgggggctcctctttctgtccccacccccagcctgctgccatcgtcttcagcactgaatacgcgtccgtctgacgggttgtgtatttctatgtgagaaaattaa

SEQ ID NO: 28719 - DNA, 122 bp, Homo sapiens
tccgcaaaaagcgcagcagccgaagtcctgaaagcagggtcttcatcgccgcgggccctccgaaggtgcctctcccagctgcagccgcccctcaatgaaagtgcaatgtgttatctcgccca

SEQ ID NO: 28720 - DNA, 122 bp, Homo sapiens
gctccaggagtaaaaggagcggatggttttgttaattgtcgcctgcctccctccgtgccgcggctagaactaagtgcgaacacgctggggtttcaccccagtggctcctgattccgccttcc

SEQ ID NO: 28721 - DNA, 122 bp, Homo sapiens
ggccactcgcgccgctccctgagaccctgggaccttgggactaacgctcagaacttacatcgcctccatattgccgtctccatagatacaggacgcgcaggaaacggcgtcttcagatatcc

SEQ ID NO: 28722 - DNA, 122 bp, Homo sapiens
caaaacagaccaaagtgttgggcttgccaaactccaggggcttcagcgtgaacacttcagcgataggaaaccctggtggggggattgaagtgtagggggaaaaagagactagtttagatggt

SEQ ID NO: 28723 - DNA, 122 bp, Homo sapiens
cggccgacgcaaagaaggtcccgcagtcgcactggtacagggtgtcttccgagggctcggcggccgccgcaggtgcaggcgcctccccaccgccctcggggagcagccccccgagcttgggc

SEQ ID NO: 28724 - DNA, 122 bp, Homo sapiens
ccctccttggccatggacaggcccttcatgaacacgtccatcctggcggcctggggagggcgatacacgggcaccggtgcactggccccgcactctcaccccagcccctcccgcgggacgca

SEQ ID NO: 28725 - DNA, 122 bp, Homo sapiens
tggggcccgagtggctaccgcgcggtctgttcgcgggtgagcgccccgggaggagctcggcgggacacctgtacttgccccacctcgctgcggccgggacttgaatcgagggacggcgtgac

SEQ ID NO: 28726 - DNA, 122 bp, Homo sapiens
gtatcaaatgagggatctggggagaagggacaccggcattttcaccaaaaccctggtggccgagcacacctacacattatgctccagagtgcggagatcttccaggagctcctgggctgcgg

SEQ ID NO: 28727 - DNA, 122 bp, Homo sapiens
agaatgtctacatcaactgtcagctgtggttttcagaggaagtggattagggaggacttccgctttctaattcagagttctatagtgcttgcagtttttatgtgatgtggatcatactttgg

SEQ ID NO: 28728 - DNA, 122 bp, Homo sapiens
aggcgtgcgtggcaggagggttcgggttatatactcctaggtcctgggacagaatagttacgacctctgggacaggaactcttctctcttttgttaataaacttccaactccctcctcagac

SEQ ID NO: 28729 - DNA, 122 bp, Homo sapiens
ttacgcactgtttgcaatggcgcccggtattcgtagtttctgcgaggggagccgccagcgcgccaaccctcgctgaggaggaagaaaactacatttcccacagaggcacgggggcgaacacc

SEQ ID NO: 28730 - DNA, 122 bp, Homo sapiens
gtgcggctgctacacgcagctcacttcctacgggcggctaaaggcggtgcatgaactgaacgtaggcggcctctttatcccctccccacaacactgtggggtggcacgtaaagacctcaagg

SEQ ID NO: 28731 - DNA, 122 bp, Homo sapiens
cagagattaagaaatggccgtaagaacttactgcaacaacagagctctcttcggttccaacgtgcgcgtaaatcctgcagacaggagcccaataagacattaggtcaactcagggcatttcg

SEQ ID NO: 28732 - DNA, 122 bp, Homo sapiens
ggacacctctgggactgcgcgaccagcctggagcgagagtctttgctggcaggggttccccgacacacagggtgctgcttacagagggccacagacagcagtggtcctgagccagtacaggg

SEQ ID NO: 28733 - DNA, 122 bp, Homo sapiens
agctccgaatcatttagtccatgcgcacccagtctctgtaagcgttcgatctggtgtgggcggacacgaccacgatggttggtgcgcacaggacattcatatgctcagaggacattggcaca

SEQ ID NO: 28734 - DNA, 122 bp, Homo sapiens
caacagtaaagtcctaatgattgttaccagggggaaaaagacctgagagggtttaggcagcgccaccaggtattctcaagctgacagcttcaggttagagagaaggtgaagaggctgagggc

SEQ ID NO: 28735 - DNA, 122 bp, Homo sapiens
cgcttaatttttaacttcattttcaagttctcactgttagagtatctcaaaagatgtcatcgtgtgtttctgctttgaactgtgcatacaaccattcagtcaacaagcctttttttctgaaa

SEQ ID NO: 28736 - DNA, 122 bp, Homo sapiens
gtgcgaggaactgcgccagggcctgagcggaggcgggggcagcctcgccagcgggggccccgggcctggccatgcctcactgagccagcgcctgcgcctctacctcgccgacagctggaacc

SEQ ID NO: 28737 - DNA, 122 bp, Homo sapiens
cgcggccaaccgcaggcgggtgctgacgacacctccacccccggctcgtaagctaatttgcgtcacatatggcgtaagagccctgtcggagcgggggacctacctagcccatccctcctcca

SEQ ID NO: 28738 - DNA, 122 bp, Homo sapiens
agtaggcttgcgctccgcttgtagctgcttccgggtcagaggtcagacggtctagcgctgcgtgggccatggtgcagctccgaccgcgagcgtctcgcgccccggcgtcggcggaggcgatg

SEQ ID NO: 28739 - DNA, 122 bp, Homo sapiens
cttttcagcctgtgcttgggaataggcgctccccagccatcagtcttgggatggagaggtcgcggccgcggcggaggccgagaggccgagggcgggaagtttgctctcctcccgcacttggc

SEQ ID NO: 28740 - DNA, 122 bp, Homo sapiens
cccatcctgcggctgtgacacttaaccaaggaccagtctcctctgtagagcctcctactccgtttcttgccaacacccactgcctcccgggccctaccccacgcgcccccgcaactctttct

SEQ ID NO: 28741 - DNA, 122 bp, Homo sapiens
ggtcaggcagctcagggattcccggcgctggagaccctggtgatcttgttcctactcccccgcaatgcagaggtaccctggacatgtgcctgtgaccggtgctggcaggccatggtacagga

SEQ ID NO: 28742 - DNA, 122 bp, Homo sapiens
ctgtacggaataaaagccctttgacgatggcggcctccaatatcataatccgtatgggtgcggccatgccgtcctccctaccaagtttctgaagttgaatgaaccgcggaataaaggtacgc

SEQ ID NO: 28743 - DNA, 122 bp, Homo sapiens
ggaggtcccagtcctcagaattccctccaagccccgccgggaataaaaaccaggcagtaacgggtgtgcagaaaacctatacatccaacctaacttggctgaagaagacaccctcccccccg

SEQ ID NO: 28744 - DNA, 122 bp, Homo sapiens
ttcttcctagaagaataaatagaggaataaaataggcacaaagttctgtagctatttgtacgaggttttgtagaatccactgaaattttaattcagaggataaattgggtaagagcagtgca

SEQ ID NO: 28745 - DNA, 122 bp, Homo sapiens
gcgggtggacgggaggagatggaccgtgaacagtgaaagacgtaccccgacaccggcctgcggacccccacaagcccagtggccgtcagccttgggattttggggttttccaactttaatca

SEQ ID NO: 28746 - DNA, 122 bp, Homo sapiens
cgggttcactgaaatgtttaaatacactcctgactgcaaacacatccactcaccaagtagcgctaacaatctccccttctccgcctctaggcaaagcatcctgaaactaaattggcaatcct

SEQ ID NO: 28747 - DNA, 122 bp, Homo sapiens
ccggctccactcccgcagtcacttcctgcttccctcccgcacacgtggccctcccgcctccgggccccgcccccttggccgcaactggcaactcccgcctgaagaatagattctctggttca

SEQ ID NO: 28748 - DNA, 122 bp, Homo sapiens
ttttttctgtcctggtctctgaaagccttattgattgctcaaagtgaacttctcagcccacggtttcctcacccccggggcagcttgcatttcctctgccgcggcctctgtcgcctcccctc

SEQ ID NO: 28749 - DNA, 122 bp, Homo sapiens
acgcccacggtggtggtggtggcacagtgacccgcacaggcacaaccactcacagggccccgagggtctactcactgctgcttgcggctcagctcctgttccttgtgcaccaggtcctgctt

SEQ ID NO: 28750 - DNA, 122 bp, Homo sapiens
aaaattatgtccgctgactctgggacactggccactgtctatgtggggctgcaataatcccgccttgctggattcattgaccccgacatctcggagcagccgtccccatggtgcctcacctt

SEQ ID NO: 28751 - DNA, 122 bp, Homo sapiens
ggcgaaggctggggctgtatccgtggtgacgggctggaatgtggaggctgggactggggccgtggagactggacaggggctggagaccgcacctggttactaagggacgtggcgatctgctg

SEQ ID NO: 28752 - DNA, 122 bp, Homo sapiens
gagccccacagggatgaaaaccacaccagacatccagtgactgcatgtaactcctcatcacggccgggagccctggcactaagagggtgtgggcagcagcaccagtgtcgcgtgggtcacag

SEQ ID NO: 28753 - DNA, 122 bp, Homo sapiens
ccagcagctgctccttctgggaagctcgcaccttggcaacagaacagccctctagcagagcgtcagtgcagtcgtgttatcccggcttttacagaatattcttgtcctattttagaattttc

SEQ ID NO: 28754 - DNA, 122 bp, Homo sapiens
ggtgcggggaggtgggtctgggcaggtacagagcctgccctccttctccaggactcccagcgccgaggcgcctccctcatactgaaaacgcaaagccgggcgggcgcgggggctcacaatcc

SEQ ID NO: 28755 - DNA, 122 bp, Homo sapiens
cccttaacagtgacccggcccgccccttccggccgcagcgcggggcacgccgggaagcgccgtcggccagcacacagcgaagccgcgactggatccccgccttcctgcttagactggcagtg

SEQ ID NO: 28756 - DNA, 122 bp, Homo sapiens
ggtattagctctgcatgtgtacacaggacgctgccaccagcattgctttgaggacacagacggcagcaccagtcaaatgcctcttaagggatcttcaaggtgattaaggatgattccagttt

SEQ ID NO: 28757 - DNA, 122 bp, Homo sapiens
ttctccagcagtcccgtctcctccccaaactctccagcggccctgaccaccccaggaaagcggctttcactcagggagagcctgtggatgtggagtctgagggttttagactctcagacctc

SEQ ID NO: 28758 - DNA, 122 bp, Homo sapiens
cgtaaatataagtgactgaggaacaccgcgacccacggaggtgttacaaaaggcacgattcggagtaaacgcggggcacgttggaactcccaattcgtcggcgcaccagccagcgacggcgg

SEQ ID NO: 28759 - DNA, 122 bp, Homo sapiens
cccaggggcggggcgacctttgctccggccgtgagcagtccaggccaggcgtggcccagccgcccggctgcaaggtggggtgtccccgccgctcggatccccatctcacctgccgcgggcga

SEQ ID NO: 28760 - DNA, 122 bp, Homo sapiens
accagggagcaaggggtggtcctttgtcgaggaggtgggccttggggttgacggaagcttcgcgtgggaggaggcggcggcggcggcagcggctgctgggctccaggggagggatttcctgc

SEQ ID NO: 28761 - DNA, 122 bp, Homo sapiens
ttccatgtgtcatgggagggacccagtgggtccctgtgaatcacaggggcaggtctttctcgtgctggtctcatgatagtgaataagtctcacatgagatctgatggttttataaagaggag

SEQ ID NO: 28762 - DNA, 122 bp, Homo sapiens
gtatagtagagacttaataccattttgcatgtgaggaaacagaaacttgttcggggtttccgaggaaaacacctccacctgaagccggagagagaaagaactgggtctccaaaccttgctca

SEQ ID NO: 28763 - DNA, 122 bp, Homo sapiens
atgtcagtgtgggtaaaaagggagaagcggcagaggatgagatactccctaggtagagatcgtaagctcctactactcactttgtattctcagagctgcatatgcaggggcacacagtatgt

SEQ ID NO: 28764 - DNA, 122 bp, Homo sapiens
atgcaatggtgtgatctcggttcactgaaacctctgcctcccaggttcacatgattctctcgcctcagtctcccgagtagcaaggattacaagcgtccaccaccacgctcagctaatatttg

SEQ ID NO: 28765 - DNA, 122 bp, Homo sapiens
gactctttagttcacaggaggggacggccggcgctgacagcttcccctttgctttccccacgaagctcctccctggcagcccctgaccttccgctcagaagcaaagctggaacagcccagca

SEQ ID NO: 28766 - DNA, 122 bp, Homo sapiens
gtgggttcctagcgcgcttggatgatgccttccctggttccaaagctggccgctgcccgtcgacctctggggactgcatccctctgggactgcatctcgtgccatttccctcgcgtggcacc

SEQ ID NO: 28767 - DNA, 122 bp, Homo sapiens
atggtattcacagcagagttgtttgaaggggcacgtgctcgcttatgtggcttaggtccacgctacctgtagtccttcggaggcaagccaggctgccagctgactgtcttccaccacaaagc

SEQ ID NO: 28768 - DNA, 122 bp, Homo sapiens
gaccctttcaagccaccctcccgcgcgccgcgttaccacacgcccacctcctggttgccgcgactacacctcacgaacttttcgcgccccaaggcggccctttataaagatgcggtgacgtc

SEQ ID NO: 28769 - DNA, 122 bp, Homo sapiens
tattatccactgtggcaagaatgagagtttaagtttcttttataaacatgtatgtactctcgaactactgctgctattacagggagcaggcattttttaaaagcactattcttcttacagtc

SEQ ID NO: 28770 - DNA, 122 bp, Homo sapiens
cctcccccttcagttcgctccggttagccctagctatcactcctcttccttgtctcccaccgttcctgtctcctggagtcatctccggccagttccgcgtgttcccctcaggaccccgaaac

SEQ ID NO: 28771 - DNA, 122 bp, Homo sapiens
gcttgctagtttccatggacacgcgtggactcctaggaaaccttttccggagactgggcacgagaggagtgatttgcatctcatttgaatgctaggccctgccccgaaagtgtgccatctcg

SEQ ID NO: 28772 - DNA, 122 bp, Homo sapiens
tatatactgcagacagagggccagcaagggggtgggtgagatttaaggctgtatttcaatcgagagatcctgctgacatcataaactatgagaagacagcttaagctgtttggggagcagca

SEQ ID NO: 28773 - DNA, 122 bp, Homo sapiens
atctttatgtggacaaggtcagggcacctaacagctcagacatgggcctttgcagtggctcgaggattcaggcatgtttactctcctattcggctctccgaggagtagtccagcacgcttct

SEQ ID NO: 28774 - DNA, 122 bp, Homo sapiens
gctccaggcagaaggcatgcaagcccacagcttggaacttaagaggaacttaaaaataatcgagtaagtggtcaagacttatctgtaaggatgtttcttgtggtattatttatggagaatga

SEQ ID NO: 28775 - DNA, 122 bp, Homo sapiens
cgccccccccccgcccgcgcgcccccgccggccgcgcactccatgaagggcccattagcgcggcaggtgcctcccgggctgtaaattcgccccgatttatctccccggggacgaaataaatc

SEQ ID NO: 28776 - DNA, 122 bp, Homo sapiens
gccgagggtagaattccagctgcacctccttcccgggttctcctcactgacaaacgctgccgtcacctccaggcccaggctgagccctacatgtttctggggacccggttttgccatttcct

SEQ ID NO: 28777 - DNA, 122 bp, Homo sapiens
tcccaaaaaaaataaaaatttattgtctactacagtatactacatgtccctagttattcccgttaatactgggcaacaatcttctctatagaaatgagaagtgtaactagagactgatgcaa

SEQ ID NO: 28778 - DNA, 122 bp, Homo sapiens
tcggcctgagcagggcttagtttagaagtaatttcctgacgttgccgagggagccgcagtcgcctcagatccggtcggcggcggcggcggtggcggcggcggcagcgcgcctgcgcgctccc

SEQ ID NO: 28779 - DNA, 122 bp, Homo sapiens
tagcgaagttacagtcacatccggcaaactcgcacactgcagatctaggactaccccgcgcggccccgcccactttcccagcagcgggacgctgtcaccccgactcaggagctcctgggccc

SEQ ID NO: 28780 - DNA, 122 bp, Homo sapiens
agtcccccagaatatcaaaggctgggaaacacagaagcctgcaatcacactcttgcgagacgctggaggtcatccatcccccaagtaagtctgcttttgaaagaggctcctagaaagtgttg

SEQ ID NO: 28781 - DNA, 122 bp, Homo sapiens
cacagttaggatgcgggtgaaccacagggtagcggacgctaccatctgccagccagccagcgtcgcagcggtccaggccatggaacttccaggcggcaaagagctgtcccaccttggcgatc

SEQ ID NO: 28782 - DNA, 122 bp, Homo sapiens
cctgctgctgcgccagcgggtgggggtttgtgagctgtgggagagacgaaaatgaacgtccgttcgcaatcctttgtgcgtttgcgtcctcagcgtgtgccgcttatggagggagtgtgtgc

SEQ ID NO: 28783 - DNA, 122 bp, Homo sapiens
ccttatttcctgtgtcttcaggtgtgtggcagggggcctggggtggggaggtggggcgagcgagcagtgtgtggaaagccttgttgtcacctgaagcacgccaggtccagattgaccaatgg

SEQ ID NO: 28784 - DNA, 122 bp, Homo sapiens
gggggcggagcctgatgcgggatgattggcgtccgagcgctgggctgttccgtggacccgcgcggccacgccagtgtgctgtgcacgggaaatgtggacgtgggagcacggaggcacccagt

SEQ ID NO: 28785 - DNA, 122 bp, Homo sapiens
gtggggctgaaatcaacaaaaggtcttggactgttggctcagaaatcatcctagaaagcccgccctgttgatatctgtcatgcttagctcttatgagatgacccagtccttaaaaaaaaaaa

SEQ ID NO: 28786 - DNA, 122 bp, Homo sapiens
aattaataaataaataaaacggacattccctcacacgtgccaagagtgaacacaccagctcggagcaccccagagacatcagagacagagcacatctctgacctccagctccaccccatcca

SEQ ID NO: 28787 - DNA, 122 bp, Homo sapiens
gggcagcacttctttcatttgtttgcctgaaatatcctgtttttctcccccttctcggggcgctaaagagctcagagaaatctgcattttaattgacattccagggaaagagagaggggcgc

SEQ ID NO: 28788 - DNA, 122 bp, Homo sapiens
gggcagggagaaggctgggctcccccacctgcccctggccgtcaggtggctgtggagaagcggaggcgcgggcgctcggccttaacgtcccgggctctggggccatccgtgactcccacacg

SEQ ID NO: 28789 - DNA, 122 bp, Homo sapiens
gtcgcgggcggggcagacccacgagcctgcacgcagccccgcgccgccccgccccgtccgcgcaaacacgcgacctcctcagctcccattggtttctgccagcactagccacacccctgaca

SEQ ID NO: 28790 - DNA, 122 bp, Homo sapiens
taagaactgctagcaactgggcatattaactttctaatatcaggaacagcctctatgtggcgctagctatgtttacgactatgcacaccccttatatgtgtgtctcagttatagcttcttaa

SEQ ID NO: 28791 - DNA, 122 bp, Homo sapiens
tgcgtgtgcgcaggtgtccgggtggcgccatgcgtgaccctgtgcagccgtctgcatgtgcgcaggtgtccgggtaacgccgtgcgtgaccctgtgcagccatgtctgcgtgtgcgcaggtg

SEQ ID NO: 28792 - DNA, 122 bp, Homo sapiens
tcttgcctgagtttcagagtcccgccggagttagagctggcagagtccaattgctcagagcgccgaggcgggggcggggcagggggacgcttgcaggtccggtggtcccgcgggctgcgagc

SEQ ID NO: 28793 - DNA, 122 bp, Homo sapiens
ctccagcacaccgcggcctcggcgtcgtcagcactgcacgtcgctctctccagcacaccgcggcctcggtgttgtcagtactgcacgtcgctctctccagcacacagcacaagcaccatcct

SEQ ID NO: 28794 - DNA, 122 bp, Homo sapiens
caaacacggcagacgagttcactgtcctaacgcacacatccacacaggaaacacggcagacgggctcactgtcctaacacgcatccacacagcaaacacagaagacgagctcactgtcctaa

SEQ ID NO: 28795 - DNA, 122 bp, Homo sapiens
attaagcccaaagaaaagcattcagggcccctaggcgactctgcccagagggttcataaccggctctcagttattgctgcggacatttcatctggattataagaaaacccagaaaggggcag

SEQ ID NO: 28796 - DNA, 122 bp, Homo sapiens
agatgaacagatagaggtcctaatctcacctcctccacttacaaactctagaattatccccggcaggcaacctcttttagaagcttcactatcgatatcagtaaagtgcagataacaacagt

SEQ ID NO: 28797 - DNA, 122 bp, Homo sapiens
gaggcctctgtgccaggccggccctgcagctggactgccatggccatctgtgtgagtgtgcgtgtgtgtgccggggctcccggagcccggtgtcaccctccctgctggcgttggagaaggaa

SEQ ID NO: 28798 - DNA, 122 bp, Homo sapiens
acaccgaagaacctgctattaaccatctagaactcagaacgccttgattttccgacaagccgcgtgcagcttccacagagctgcgaggccgactcgcaagacgcccgcacctgagggcatgc

SEQ ID NO: 28799 - DNA, 122 bp, Homo sapiens
gaatataaaggaaaagaagttatcctaagacttaggtgaccttgtattcttgtttgcatacgatggttctgattatacctaatctcttgtagtagttattaccaaagctccattttactctc

SEQ ID NO: 28800 - DNA, 122 bp, Homo sapiens
gctaagcccctcactgcccagggcagccggccactcccgagtgcgggcctgccaagcccacgcccacagggaactctagctggcccgcaagcacagcgtgcagccccggttccccccgtgcc

SEQ ID NO: 28801 - DNA, 122 bp, Homo sapiens
ggcagcggaggaggtgtgggacgatgagcagaaggactttgtctgcaacaccaagcagcccggctgccccaacgtctgctatgacgagttcttccccgtgtcccacgtgcgcctctgggccc

SEQ ID NO: 28802 - DNA, 122 bp, Homo sapiens
agactggcttgactttctgaaggcatcctatagttacagcctttagaacagttgagctatcggcagctttaaagaggctttcagttttttttttttttaaatcattaatgctttgtaggtga

SEQ ID NO: 28803 - DNA, 122 bp, Homo sapiens
cacagtcacttcttctatgctctagtgctgtgcccctgcctgggcccctggcagcacaaccgtcctgactgcagccactccaggccctgtggcatacaacattcaccctgacattacgccag

SEQ ID NO: 28804 - DNA, 122 bp, Homo sapiens
cctttattgatctccgtgacggaaatggttgggtctcgttttgctcagttgggcaaggcgcgtggtattgagttaaggctggatgagtatctgttgagtgtatgaaattttagagattacat

SEQ ID NO: 28805 - DNA, 122 bp, Homo sapiens
aaacttctcaattaggggtgccccaaataacttgagcccctttctgcctcttgttctctgcgtatccatctttcctttgtaagccccttgcccgtgactattattgagccagtatgacagta

SEQ ID NO: 28806 - DNA, 122 bp, Homo sapiens
actgcccagaaattgggcggcagtgaggtcgccgcaaggcttcccgtggaccctgcaaaacgtggcgtgggcattgcacaccattgtactgtatggaaacttctgcagaggttagcaccgtg

SEQ ID NO: 28807 - DNA, 122 bp, Homo sapiens
acagtgacaaaaagtttgagacacactgtatgcatccccacctgatgctgagcaaggaaacgctctgtcctcttgtttcagctattatactgtaaacaagtgtccttttcatgatttcctga

SEQ ID NO: 28808 - DNA, 122 bp, Homo sapiens
acacctgagctctggggctctctgcctgatacccagtggtggccttatttattccactgccgagttctttctggcaaccttgtaccattcttgggaaaggttggggaagcaataggtaaatg

SEQ ID NO: 28809 - DNA, 122 bp, Homo sapiens
gctgtacctccctcccgcggacctgcaggaagcaggctgtttcctttcagtctcctccaccggctggactccatcagacattgcccgatggccggcctcctaggagatctcaaatggtaccc

SEQ ID NO: 28810 - DNA, 122 bp, Homo sapiens
tagcccctctgatccttgttttcctcatctgtaaaacgggataacatcacctactccatacggtgggtatgagaatcccatgggcaaactctaaattgtctagcacatattaggaactctta

SEQ ID NO: 28811 - DNA, 122 bp, Homo sapiens
ctgccaaactgcctgtcctgggatctagttatcttggccctgcactctcaacatgagtagcgaacacttaaattgggttttcaacagtcccagctttcactgccagggtcccagtcagattc

SEQ ID NO: 28812 - DNA, 122 bp, Homo sapiens
gtgacagccttggtgccctccgacacaacgtgcttggctagttccccaggcagcagcaggcgcacggccgtctggatctccctggaggtgatggtcgagcgcttgtcataatgcgccaggcg

SEQ ID NO: 28813 - DNA, 122 bp, Homo sapiens
ttccttcctttcacatttgcaaacttcactcgatctttgaaaggggagagaagtccatcccgggtgtgcagggcattctagcttcaagagggagtcagttgcactgtgcctggaaatagtgg

SEQ ID NO: 28814 - DNA, 122 bp, Homo sapiens
tctcaaggaaagacatggccttggcggcaccgccgtgggttgggcaaatgactctgctagcggcagcctcttgcctactctgatcctgctaccaagtgcagtctatttaggcgttgccatga

SEQ ID NO: 28815 - DNA, 122 bp, Homo sapiens
tcctctgtcggtgcttcctcagcgtctgcgtttccgcagatgcccgaggtcagacagtttcgcaagggggctgaagagccaaatggggaaactgatggagcctcacaagtttattcctttcc

SEQ ID NO: 28816 - DNA, 122 bp, Homo sapiens
ttgtgtgtgtgtgccttttttgttcgtttgtcctttcttgttactggggaaaaaataaagcgaacctgatgatcttccgtgaatttcaggaagctgcctcctagacttggtagcctggcccg

SEQ ID NO: 28817 - DNA, 122 bp, Homo sapiens
ctttatgtatcagaggcaaaggtaacccgctggagtcaagcaaaggattcacaggagccccgcatccacttgggtggcctcccctaaggtattttaaattaagtaatagggctcagccagta

SEQ ID NO: 28818 - DNA, 122 bp, Homo sapiens
tgggttccgggttttcctcctgggacagggactcctggctcgggcacgggccctccacagcggcagcctcgccttcccgcagagcaggcccacagggggtcctctcctgggggcccctggcc

SEQ ID NO: 28819 - DNA, 122 bp, Homo sapiens
ccattctagtgactaacacagagcataggactttaatgattctctaacgttaggaggcatcggaatcacttggaggaactgttaaagcacagattgctaggccccatcctctgagtttcaga

SEQ ID NO: 28820 - DNA, 122 bp, Homo sapiens
tcgcgctgggtaatgacagactcacagagcgccctggatggcgcgaattaacgcggggggcgggtgggggcgagggcgtgtgcttgggaggctggaaggggcgggatgggggatgggaggta

SEQ ID NO: 28821 - DNA, 122 bp, Homo sapiens
tggtcctgcaggacagcctggggtcaccgtcactgcggagctacaggccagcgtcctcttcgtgtcctagggctcgttttgtccctggtcctgcaggacagcatggcagcgattgaccgatt

SEQ ID NO: 28822 - DNA, 122 bp, Homo sapiens
ccaccacggtgctgtggatgacctgtgggcagcggcagagatcagcgcacgtggggcctgcgcaggtcctgctggagaaccgcgcgggacccgggccggcagggcaccttcagggccaggag

SEQ ID NO: 28823 - DNA, 122 bp, Homo sapiens
ggcagggaccgcggctcctacctcttggtgatccccttccccattccgcccccgcctcaacgcccagcacagtgccctgcacacagtagtcgctcaataaatgttcgtggatgatgatgatg

SEQ ID NO: 28824 - DNA, 122 bp, Homo sapiens
ggtctgatagggcatgacaggggcagagcaaaaactggttaatagcatctcgtcgacaggcgtggctctctgcccctgctcaccctgcagtggcttcttcagtcagggctaaggtctctgag

SEQ ID NO: 28825 - DNA, 122 bp, Homo sapiens
cttgggccttcctggagcagctttgatgagcctggtgaagctaagagctcaccactgtgccgtcctgcaatgctgagggcttttatttgaaaaactccacccaaaactccaggccatggtgg

SEQ ID NO: 28826 - DNA, 122 bp, Homo sapiens
tccaaaaataatattaattaaataaagcattgtaacaacactgacttaaactcctctggtcgggactgccctgtgactatgtctggaatatgtctaaattagcacccacaactgttttataa

SEQ ID NO: 28827 - DNA, 122 bp, Homo sapiens
ccaccatctgtaacaccaacagcaccatcgccatcttacctccaagtcctcaccgctccccgccagtgcagtgttacggtggccccgccacgagccacccctgtgcattcacacccgtgtgt

SEQ ID NO: 28828 - DNA, 122 bp, Homo sapiens
aaggacaggcaggccgggcggactggagacggcggctcgccttgggaccctctgagcttgcgggccccgctgagcacccaaaggccggccctagagtccaggagaagagcgcagcggcgcgg

SEQ ID NO: 28829 - DNA, 122 bp, Homo sapiens
aactggggaaattctcaatttttcactcgttaatcaggagtgcttgtatttgatctatatcgataacttgcacttataaaatagattacgctcagtcgtattaagatcttagagttagaaaa

SEQ ID NO: 28830 - DNA, 122 bp, Homo sapiens
tgtaaactgcatgggcagggcgccaaataacatcctgtgcgctgctgagctgagctcggtcgcggctgcctgtctgctccggcagcaccatgtcgctcttggtcgtcagcatggcgtgtgtt

SEQ ID NO: 28831 - DNA, 122 bp, Homo sapiens
ggcgaccccgggctcccgctgctttgcgtcctcaaccgggaagcacctgccggttccgcacggtccctgcacccagcgtaggccacgtttttgcctgggaaaatccacaccgggatgctaaa

SEQ ID NO: 28832 - DNA, 122 bp, Homo sapiens
tgtctgcaccaagtctgtgtgactctggcaccgttcccggggtcattcacagcagggccccgctcagacctcggcgggcagcgagaagaacacatggagattctgacttccagcacaaaggg

SEQ ID NO: 28833 - DNA, 122 bp, Homo sapiens
cactgcgggccgcgctgcgcctccaccgctgtccgcactcgctgcgcgccgggacggctgcgcccaccagccctgaccctggagctccttcccagcaaagaccctgcccagccctggccggg

SEQ ID NO: 28834 - DNA, 122 bp, Homo sapiens
cctcactcccctgctgccttcactcctttctgaccaagcaacgctaacttttgtacagatcgatttgataaaattaaacaaagtgctttttatggacgtgggctgcattttgtgtgttgctt

SEQ ID NO: 28835 - DNA, 122 bp, Homo sapiens
agtaggcaccgagtgtgtgacaagcacaaggggctacgtgtgcggccagatgacgctgcacggtcagaacccacaaaacaacacggcaacaggtggattttaaaccccttctctgctttcaa

SEQ ID NO: 28836 - DNA, 122 bp, Homo sapiens
atttttttccttctgctgcttggcattagaaggctctcgtgtcttactaccaggcaatatcgtatgtgccgagagtctcagcttctctcctgtccccacggtgacactcgcgtcctcctcgt

SEQ ID NO: 28837 - DNA, 122 bp, Homo sapiens
ccgggctggaggagaaagcaaaggccttgccgctccgtgccattggaaagaggcagcacccgggtgcccttgtgagatctttttaggggggatccctaagtctcaggtgtccggggggcagc

SEQ ID NO: 28838 - DNA, 122 bp, Homo sapiens
acaagcgagaggatcatggcggatggccccaggtgtaagcgcagaaagcaggcgaacccgcggcgcaataacggtgagtggcggaggggaccggggagcggcggagtcagggggagctgggc

SEQ ID NO: 28839 - DNA, 122 bp, Homo sapiens
ttcggccacctcctccagcagctcacacaggtagggcccggtccggatcgggggcagtagcggctgcagccgctccacagaagcctccgagttcactgtccaggtctgtgtggctacctccg

SEQ ID NO: 28840 - DNA, 122 bp, Homo sapiens
aataagaagagtgatggtcagaggaatacttaaaatcatggtcaacgcaagtaattctcacggtgttgtcctgggccaggagattcagcctcatctgataactgattggaaatctgattctc

SEQ ID NO: 28841 - DNA, 122 bp, Homo sapiens
cacgaagatggagagagcaggcaccgggcactttacagtagggaggcgggggcgggggagcgcagaaagagtccctctccatgcgataccggaagcccagtccccaccagtgcacaatattc

SEQ ID NO: 28842 - DNA, 122 bp, Homo sapiens
gagaaaccttcaaaggaaactattgaaaatgattttctctataaagggagaaaatactgtcgggtaacaggtaacagatgaacagacacaagtgacagatgtaacacataaaacctacaatt

SEQ ID NO: 28843 - DNA, 122 bp, Homo sapiens
gctgtcgccaccgccgccaccggccgcgaactccccctttcccgtcacgtcacacaatatcggatcgtccattcgctgccgccgcccgccactcaagaaatcccgtggatgataggtagctg

SEQ ID NO: 28844 - DNA, 122 bp, Homo sapiens
gtgagatgggcagtgagtcagggatgggcaggagaaaaacacagttggggtaagttcacacggacgggcttgagaaacagaaatgcgggacccttttggccatgacagagcataatgagtga

SEQ ID NO: 28845 - DNA, 122 bp, Homo sapiens
cgcacctcctcccagggctctgcgtagtgggctgcgtcagaccctggggagtgcgagcaccgtttgagaagcaccaaacacaagcgcatcgtccgcctcttccattcaacacagactgtcaa

SEQ ID NO: 28846 - DNA, 122 bp, Homo sapiens
tcttctcccggaagctgctgcagaacatagccctgaagtaggggctgctggaggccagcacgttgcggtggcaggggatctcccgggcaccggcacagatgctcacatcagtcaggatcctg

SEQ ID NO: 28847 - DNA, 122 bp, Homo sapiens
tgggcaaatgggctcccagccgggcttgggcctccaccgccgggaaggcgggactgcgctcgggtactgggctccggcctcccgaagtccttggtaagccttgcctgtagcggctccgctgc

SEQ ID NO: 28848 - DNA, 122 bp, Homo sapiens
aaaaaaagaggccgggcgcagtggagaccaaggccggcagatcacctgaggtagggagttcgagaccagcctgaccaacgtggagaaaccctctctctactaaaaatacaaaattagccagg

SEQ ID NO: 28849 - DNA, 122 bp, Homo sapiens
gaaggcctctggacaagccacatgcacctgtcccaggccagagctcaagaagctgctgcacgggctgggccttcaggacccagagggcttcctattcaaggagatgatgacctgggtccagg

SEQ ID NO: 28850 - DNA, 122 bp, Homo sapiens
agggcagcgtgaaggacagcggcgtggacagccagggggccagctgctcgctggtctccacgcccgaggaggtgagcaggcccaccggggtggcgtggatggggcacgggaaccaccctcgc

SEQ ID NO: 28851 - DNA, 122 bp, Homo sapiens
atacagggtcaaccatggtaactgaaggtgtagattcgggggaaaatccagctctgccaccgctgtgggacctcaataagatggggacagtactgccagcccctcaggcattgtcaggatta

SEQ ID NO: 28852 - DNA, 122 bp, Homo sapiens
gatgaacctggagaacaatgctaagtgtaataagccaatcacaaggaaattccaatactgcgcaattcgttatatgcggcgtctaaactcttagaacctgaaagtagaatggcggctgccag

SEQ ID NO: 28853 - DNA, 122 bp, Homo sapiens
actagtgggcatttgctaaactacgttttatttttttgtaaagtgagcgcccgctgccttcgttctcccaactggagcaaactctgtggcggcgacgatggcggccgtcaggtcggtggtga

SEQ ID NO: 28854 - DNA, 122 bp, Homo sapiens
tcttcagtcacaggccagtgccaggtggtgtctctcaagacctccccaaagtacagcaagcgtttttattttaataggaaacaacagcctctacttcaaatgcttttagaatgagctcttcc

SEQ ID NO: 28855 - DNA, 122 bp, Homo sapiens
tgtccttgacttgcttgagcgttggagttattcaggcagttttcaaaaatattgataccccggctgccgctccccatcccagccccgccccaccccaccccaagaggttctgatgaattggt

SEQ ID NO: 28856 - DNA, 122 bp, Homo sapiens
cctggggtcggagagctgcaggcgtcccccccacctggcacacaaagcggctgccgcgctcggctctcaccagatcctttgtgttttccatcagggcctcatgggtaggggttgtccgtgct

SEQ ID NO: 28857 - DNA, 122 bp, Homo sapiens
aatgactgctggggcacgtgccagcctcggtagagttatgggaagctgcgtggggctggccgagggggttccccacccagggccctcgagaacaaccaaggggatccagcaggacccccgcc

SEQ ID NO: 28858 - DNA, 122 bp, Homo sapiens
ccagccctgcccacacgcccggtacatcccgcctacactcaccgatgtcgcctagcaacccggctcgcagctagcatccgcaaccgaggtccccgcgctccagttctctggcggggagggag

SEQ ID NO: 28859 - DNA, 122 bp, Homo sapiens
gcattggcccctggcaaagctttcccgtatgtctggagacgaggcttctcaaccgtcacccgtggacatcctgggcactgcagggcactgagcatccccggaaccaccccctgcccccagcc

SEQ ID NO: 28860 - DNA, 122 bp, Homo sapiens
gacaagtggatgtctagaacccttgcaggcaactattatcttgataaatagcctggtggacgcacagcctcccgtgtccccgcctcagagcgcgggagtgcaggtcccatcccacaaacagc

SEQ ID NO: 28861 - DNA, 122 bp, Homo sapiens
aacgctacctaacaaacgtttctccacccacagcgccattagcggttaggtttgcagtgccgaagagctgcaagaaaacggggcttgaaacaggaatacaattgcagatccacccactacac

SEQ ID NO: 28862 - DNA, 122 bp, Homo sapiens
gaccccagataaaatcctggatccaactcttacagtggaaccatatgcaaatcacctctccgtgagcctcagttccctcatctgtaaaatgaggagaatagcacttttcagggaattttttt

SEQ ID NO: 28863 - DNA, 122 bp, Homo sapiens
tgtccagggtcttgcgtcctttcttccctgactcttcccttggagtgggctgtgcacatgcgcagtgctctgccagcgctcgggagaggagcatgcgcagtgtgtttactggagttgtgcgc

SEQ ID NO: 28864 - DNA, 122 bp, Homo sapiens
gcccatgccgaggcaggactctggtatggccggccttcagaggaggctgtgctgtctgcacgctcagtgattcctgggcagtggagatgtctacctgcagtcctgagcctgttgggggtata

SEQ ID NO: 28865 - DNA, 122 bp, Homo sapiens
tgctcaatctaaaaccatcacagtcgcaactgcgcggcacagacaggtgcgagtggagttcgggaaggggaggacggctccacagggacagccggcggggcctcccgggacgaggggatgcg

SEQ ID NO: 28866 - DNA, 122 bp, Homo sapiens
tccagcgttggtggggcatccatctctggtgacgttcacaagtttgtttgtttttaaaatcgtttttggaaaaatatttttttttcctcataagcacatttcaagaagtttggaaaatagag

SEQ ID NO: 28867 - DNA, 122 bp, Homo sapiens
ctggaatcaggtgttcccaacctgagattgacaattctagatcacagaactcttgagttccgggagctggatttatgaaaaaaggaatatgagatgccaaagcatcagaaagagagggtacc

SEQ ID NO: 28868 - DNA, 122 bp, Homo sapiens
cagactgctgtgctagcaatcagcgagactccatgggtgtaggaccctccgagccaggtgcgggatataatctcctcacgcgctgtttcctaagcccttcggaaaagcgcagtatttgggtg

SEQ ID NO: 28869 - DNA, 122 bp, Homo sapiens
gctctcagaagcttggctttatctgggatttgcactccaaaagttcccaggagccatcagcgtgccacagcacatcacaacaatgcgctcccaggcagggtcactcccacaggcccctgcca

SEQ ID NO: 28870 - DNA, 122 bp, Homo sapiens
gttcctgccacacttggcacaccggaaaggcttctctccgctgtggactcgaatgtgctccgtgagtttacactgcttggcgaagcccttgccacacttcctgcaggagaacggtctctccc

SEQ ID NO: 28871 - DNA, 122 bp, Homo sapiens
ccttgaacccgccacagaagcccaggaggatgggtggtctggcctcctctgcttatcctacgaggggctggcacaaaagaactgatcacctcccccacatctaaccagcagccaagccacgg

SEQ ID NO: 28872 - DNA, 122 bp, Homo sapiens
cgcagcgcgccagcggcgcccaatcagtgagctttccgggtctgtgacggccttcggctccgccccctcgacggccataaaaagtcgcagcgaagcctgcacctccgagcaccgcgcgcggc

SEQ ID NO: 28873 - DNA, 122 bp, Homo sapiens
aatgcaccaagcgatgacaaatctcaacctgtctttatgctgagaccactccccagtttccggagccgcggccactatctccccatgcgcatgcacacccggctctcccttccaggccctcc

SEQ ID NO: 28874 - DNA, 122 bp, Homo sapiens
tcacgctgaacccactgagaataaaacacagagagaaaggtatctgtggtgagaaatcagcgccttgagtgaaatcactctgggaggagggagccaaaccactgcgcacgctgggaacaagc

SEQ ID NO: 28875 - DNA, 122 bp, Homo sapiens
gctgaaaacacatacctcaaatggaaattgagtactcagcaaacttaacacagtgattcccggaatgtgggtcctagactagcagcatcagcatcactgaagaacttgttagaaatacaaat

SEQ ID NO: 28876 - DNA, 122 bp, Homo sapiens
ctaacttgcaggagctgtgcagctttggctttgcaggttttagaagctctccctacgccacgtctttaaatatatgtatgttcaatcagcaggaggaagggactaacaagagccttctgcgg

SEQ ID NO: 28877 - DNA, 122 bp, Homo sapiens
caagctgactctcgcggctctcgtgagagtcactctctcgggcgggctggttggggggaacgggaaattaaagttccatttccggccatgaggaaggacgttgcccttccgcacgtccggga

SEQ ID NO: 28878 - DNA, 122 bp, Homo sapiens
agttttcttgccgctagcctttgttccagggattctgttattcacaaatgccttcctgctcggtagaagaactcctattcatccgtcaaagcccagctctaggagcacttatgaggagcctc

SEQ ID NO: 28879 - DNA, 122 bp, Homo sapiens
ggaaggatatgaggaagtgttctgaggacagaaaaacgggagaatggggaggagaaggagcggcacatgcagctcagcagaggagacagacagaaggaaagatggcttggagaagccagcag

SEQ ID NO: 28880 - DNA, 122 bp, Homo sapiens
aaataagctgagattgatatgaggatgaattgaattaacatttatacgaccagtacagggcgtggcacaggatgagtgctaagttagtaatatttatgatgatgatgactattactattatt

SEQ ID NO: 28881 - DNA, 122 bp, Homo sapiens
acctgcgctgacgctcgctgacagcagtaccctcctgggaagccacgcaggacccgtcttcgggagcccgagagcctccttcccgggcgccagtcttaataaactttgtatgtgtgtgatgg

SEQ ID NO: 28882 - DNA, 122 bp, Homo sapiens
agagccgctgtgggccacacacatcatggctcatagatggtgttggctcatagatggtgtcgactcattagcctcagtcatgctgacgacatgctctttatggatgaaaaattaggatcaga

SEQ ID NO: 28883 - DNA, 122 bp, Homo sapiens
gttcactgagcaggggatcacaacctcaagctcccagagagcaaggcagtggggacgaggcggggacccgggagatccagacagcgtggcacgaccacctgagagaggctgctgctgttcag

SEQ ID NO: 28884 - DNA, 122 bp, Homo sapiens
tgttgtggttataaagagatgggatcctcatagagctttcttatggttagagacatagaccgtgagcaccattgaacaggctgggctgctgggaaggaagggagagctcttctcatgatagg

SEQ ID NO: 28885 - DNA, 122 bp, Homo sapiens
gtgtggactgcgggcccagctggacaaaggcaggggcttcctcagaagctctgctggtcacgcaggcgtccggcccacggccttcaacagccctgcagggcgggctgaggttaaccgcgccg

SEQ ID NO: 28886 - DNA, 122 bp, Homo sapiens
gggcggagtcggctggagcaggctacgatgggggagacctctgggggttccataacagcgcgttcgtgtcttcagcgtggcgctgctgccattgtttaataataaactgtcggtgccttcgt

SEQ ID NO: 28887 - DNA, 122 bp, Homo sapiens
tctccccctccccccaggcgcccgacgtagagggcggagcttctttgaccgcggcgtgagcggttgcttgggccagaaggttctctggtggaggcgctcttcctggtgtcccgcccagtagg

SEQ ID NO: 28888 - DNA, 122 bp, Homo sapiens
tctgtgggcgcgcggcgccctgccccgggtccgggaaactcaggggccacccacgctttccgctgtggattccagttccagaatgaggactagttattgcaaatgaagtcccaaagctctgc

SEQ ID NO: 28889 - DNA, 122 bp, Homo sapiens
gggatagaggtaactaaacttgtgcttcatagctccaaggtaatttaattccctttctggcgagagtgcttgcaacactaactcaggcttctagtggtctgatgagcttaaaaatcaattaa

SEQ ID NO: 28890 - DNA, 122 bp, Homo sapiens
ctgttttataaatttgtttaaaaagtaatcaagacaaactaagaaaggacaccaacgaagcgggactccctgcaagtctcctgggaccagccagggtgggccagcttagtgggaggattctc

SEQ ID NO: 28891 - DNA, 122 bp, Homo sapiens
tctcgtgtggcgacagctgcctcctttcgggagtgagacccggacatgctctcacaagagcggtgcttggtgctaccgggtaagagaccagaggcccccgcagtgaacacagcctcacatcg

SEQ ID NO: 28892 - DNA, 122 bp, Homo sapiens
aaaaaatacaaaaattatgaactgcagggcgtggtggtgcacgtctgtatcccagctactcgggagatgaggtgggaggattgcttgagcctgggaggtcgaggttgcagtgagctatgatt

SEQ ID NO: 28893 - DNA, 122 bp, Homo sapiens
gcagcaaagcgcttcttcaggggtcaatttttttttagctctgcagtcaccacccaaattcggaagatcgttgtgcctttcttggatgagaatgcccggctccagcccggggatgggacggt

SEQ ID NO: 28894 - DNA, 122 bp, Homo sapiens
ggagctaggaggagggagctcgagagttgtggagactagtgactgggagaagtcgcagcccgctcaggcccgcgccttcccgctccccgtcttcctctctcacacacctactccgccctccg

SEQ ID NO: 28895 - DNA, 122 bp, Homo sapiens
cgttttggctctggcctgggccgcctcttggtggtctgccctcgagcctcccggggactccgcacgggtctcagcagatgctatctagggtccacctgcctgtcccctgcctagtggtgcct

SEQ ID NO: 28896 - DNA, 122 bp, Homo sapiens
ctgaggtgggaggatctcttgagccagagagattgaggctgcagtgagccaagatcacaccgcggtactccagccgcggtgacagagcaagaccctgtctcttaaaataaataaataaggga

SEQ ID NO: 28897 - DNA, 122 bp, Homo sapiens
agagctgactgcaaagagaatgcagtggccccaggctctccagggagccgtaagtcaccccgcaggcactgaggaggagccatgggctgaggtcaaggggctagggccccgggttaacaatc

SEQ ID NO: 28898 - DNA, 122 bp, Homo sapiens
aagaatgattttgccattgtgggtctgctggtaggccaagaataaacttgaacacacccacgtttgtcctgttcttttcttttctcttttcttttcttttttcttttttgagacggagtctc

SEQ ID NO: 28899 - DNA, 122 bp, Homo sapiens
gtagattaatggttgcctagggctcggggtgggaggagtgggggtgatggcttagggatccgggggtatctttagattaaagacccttagaacatgaaaatgttccttttttggttcttttt

SEQ ID NO: 28900 - DNA, 122 bp, Homo sapiens
ggaaattccccagagagtaagacctgggtgggccatggcgctcgccagccaaacccccttcgaggccccccgtcctgcgcggactgctcgtcaatgtttgaaaaccctcatttcatgtgctt

SEQ ID NO: 28901 - DNA, 122 bp, Homo sapiens
aggtgtggactggatgaacaaggtgatggcacgtttcgtgaggggggatgcccggccggccgagatcgactccctgtgggagatcagcaagcagatagaaggccatacgatttgtgctctgg

SEQ ID NO: 28902 - DNA, 122 bp, Homo sapiens
acttgggtatcttgcacccaggcagggaccatagtacccagtaggtagtttttcaccctacgcccccttcccgccctccccacgctagtagtacgcttcggttactttgcacttctccgtag

SEQ ID NO: 28903 - DNA, 122 bp, Homo sapiens
aatgaccaagtgcaataggaaagggtctccccagcctgggtacctgtctcatgaaggacacgcttgtctgcatggaatgacactggaaagtgactggtgttgatgatcttgatgatgtgggt

SEQ ID NO: 28904 - DNA, 122 bp, Homo sapiens
gcttcctccataaatccaaaataatatagtcatggatatgcatttcatacaggtcagactcggcaaggacagctacgttccacatacatatctgacacaatcggtctcccccaaatacaagc

SEQ ID NO: 28905 - DNA, 122 bp, Homo sapiens
taaactcatgccaagcaattggtcactcagctatgcgatgagtcagcctccactgctgtacgtccttggctacagactcctggaacagcagctcttctcaaggctagttgtgacagactcct

SEQ ID NO: 28906 - DNA, 122 bp, Homo sapiens
gaagccataccatctctcatccaggtttgtgaacacgtgattgtgcggattgacatgtttcggcgccattttttttgtgggcaaaaccatctctactctggtcaacaccgggcaactgaacc

SEQ ID NO: 28907 - DNA, 122 bp, Homo sapiens
gcctgcagatgggcaccaacaaaggagccagccaggtgagtgggggcccccgggacacgccgtcaaggcccaggaccctggccaccccacggcctgaccacaccacccttcgcaggctggca

SEQ ID NO: 28908 - DNA, 122 bp, Homo sapiens
gcacggcggcggctgctggaggtggagggccgccggcgcctggtgtcggagctggagagccgcgtgctgcagctgcaccgcgttttcttggcggccgagctgcgcctggcgcaccgcgcgga

SEQ ID NO: 28909 - DNA, 122 bp, Homo sapiens
aggttttggttgagctgccaattcacccacctcggcctcccagagtgctggaattacaggcgtgagtcaccatgcctggccaaaagccacaaaggtttttacaagtaaagttgcctctttag

SEQ ID NO: 28910 - DNA, 122 bp, Homo sapiens
agaggaggtgccaggcctgcggcagctgcatcgacgacccgcgccccgcccaggggaaggcgccccccgtccccaggaccctccaggagctccaggctgcctgtgggatggagagggtgctg

SEQ ID NO: 28911 - DNA, 122 bp, Homo sapiens
ccggcggggccggcgccacccaccccctcggcgcgcgcccggcccagggacgcgcccacgcgcacgcgcccagcggctcagggctccctggctctcaccggctctgctgcccggaggcagcc

SEQ ID NO: 28912 - DNA, 122 bp, Homo sapiens
ttcatggtgatccagctcttccccctgtgagatgtagaagaaaatcagcagagtgtggagcggttggcttagttgtcttctcaggaacacctggtagactcagtggctatggttagatacgg

SEQ ID NO: 28913 - DNA, 122 bp, Homo sapiens
cccaaacaccgggccccaccacaccaggcccctctccacactctcctttcctcagctttgcgcctacaactctctcggtcaaacaaccgaaaacatcccgtgccggaagcgcgtcatcgagg

SEQ ID NO: 28914 - DNA, 122 bp, Homo sapiens
cacagaaagacaaatgtcagatgttctcacttatttgtgggtgctaaaattagaaacaatcgatgtcatagagatagtataaggatggatactggagctgggaagggcagtgtgggaaatgg

SEQ ID NO: 28915 - DNA, 122 bp, Homo sapiens
cattaatgagcatatggagttacctaacattttagtataaaaaatgttaggtcaaagccccggatgaccaggctgcaacactgcaaattgtttataaagaagtgttttgaaggccgggcgcg

SEQ ID NO: 28916 - DNA, 122 bp, Homo sapiens
gcatccaggcccttaggtgtcaggagttacagccttgccctcgcctcctgctcctctggccgaggccagggcggccccttcctgtcccccctgcccgtcgttcgctccccgagggcgcagca

SEQ ID NO: 28917 - DNA, 122 bp, Homo sapiens
tggttccccgcctgctcccggttcgctcgctctccgtgaatcagaagagggcttggcgctcggcctggaaagcacttgctaaaatctgatctgttacttcagcagctttcagactcgggaag

SEQ ID NO: 28918 - DNA, 122 bp, Homo sapiens
tatatggtagctagaaacagagggctctttcctctcacataaaagcaaaatcaagatgatcgatcgttttcttcttaggttttcctaaattttattttctaaaaaaggagagaacatttttt

SEQ ID NO: 28919 - DNA, 122 bp, Homo sapiens
tggtcactgccatggttccggcctgacggattcgtactacaactcccaagagtctaagcgcgcgtgaggactgcaggctccgagcggcgcctagccctctgggaattgtgttctgggtcagg

SEQ ID NO: 28920 - DNA, 122 bp, Homo sapiens
ccaagacaaaggcagaacatctggggcaggggccaggctcccacctccagcaaacaagggcgggtcccataggggtgggtgccgccatctcttccccctccaccctcccccatgcctgaaga

SEQ ID NO: 28921 - DNA, 122 bp, Homo sapiens
ggggtgtacgtgtgagtgcgcgcgcgcacgcgtgtctgtgtgtgtggcatgggaggtgggcggcaaggaaagcaggcgagacattttttaaataaaataagaaaaataaaagcccagccttc

SEQ ID NO: 28922 - DNA, 122 bp, Homo sapiens
ctgccgaaccgtgccacatttccgttccctctggcctcgccctcaggggtcgaccggcggcggagcgcggggcctcctgtgctgaaggcagctccctggcctccagaaactcacagtcagtg

SEQ ID NO: 28923 - DNA, 122 bp, Homo sapiens
tgtccgcccacagaaactccttcagttccccaacacaaccttctgtctcagaagggactccggaaatacgtaaaaacagagcgccgggtccacgccttccccaaggaatggggcgtgtctcg

SEQ ID NO: 28924 - DNA, 122 bp, Homo sapiens
actgagaaaacttaaatgacaagccttgaaaagattaagctgatttgcatgtagctgtaacgtagtgtcaggagctctgaagggtctgagtaaagttttaccctacttggatgttaacaagt

SEQ ID NO: 28925 - DNA, 122 bp, Homo sapiens
tcctggtcgcatgtatgcacctgcctgggtagcccccgaaggtgagtgaagtcatcatgtcgggaggtaaaaaaggaccacctcagaagtagtggaagggggcagagacaggacaggcaagg

SEQ ID NO: 28926 - DNA, 122 bp, Homo sapiens
actctccttactccgggtattaaaatgtctaagaggtcatcgctttggcccaaggcctcccgaggataagataaaagggaaaagtggaggggaggtgaaggaggaacgagggtgggtcccag

SEQ ID NO: 28927 - DNA, 122 bp, Homo sapiens
caacatctgtgacaccctccactgcccactccccacctccacccccacccccccaacccccgccaagcttgtaaaaatgatggattaaaccaatagtacccaaacttggctgcacattgatc

SEQ ID NO: 28928 - DNA, 122 bp, Homo sapiens
cagcggcggcggcggtggcgcaggagatccagatggaactgctagagaacgtggctcccgcgggggcgctcggagccgccgcacaggtagcgagagcgcggcgccttctccttcctttgtga

SEQ ID NO: 28929 - DNA, 122 bp, Homo sapiens
ggcatttggtggcttcgtggcaggcattattgggcagcactcctggccgtgtgcacccagcgtgggagggcctgcgtggatgccatgttcatagcgcttggtcccacagacacctggacacc

SEQ ID NO: 28930 - DNA, 122 bp, Homo sapiens
agatgtatttataaagatataagtaatttttttcttcccttttctccaccgccttgagagcgagtacttttggcaaaggacggaggaaaagctcagcaacattttagggggcggttgtttct

SEQ ID NO: 28931 - DNA, 122 bp, Homo sapiens
gcaattggaggattatgaacaccaacccaagttgcatttcttgtcaacctgctttcgatgcgttaatccgaggaaggttgcaatggcttgtgagatgatgacactgatgccctcgtgctgct

SEQ ID NO: 28932 - DNA, 122 bp, Homo sapiens
taacatacaagccaggctaaggaccactaggccaagccaccgggccagggcgttctgagccggcgctttagccagcggtcctgcagcgccccctggtggggaacacgagcgcgtcgcctgtt

SEQ ID NO: 28933 - DNA, 122 bp, Homo sapiens
gggataggggatggtagggcaaggcccctcaagcaggaggcagcaacaggactggaatgacgcggtccagggagggcggaggcccaggagaccaaagggaggggctctgccgcttagcagag

SEQ ID NO: 28934 - DNA, 122 bp, Homo sapiens
gaaggggacggtgtgggactgaggcctccctcgaccctatctggggctcttctggtagcccgaggctaaagcacatattaaaattatttttcatatcattttccaaaaagttttttctttga

SEQ ID NO: 28935 - DNA, 122 bp, Homo sapiens
caggggtaccctggagcccgacagaagcagggccgggctccagatgtcccctggcaattgcgccccgacccccgaaatgcgccgggcgggtcaccgcaccccgagatgtgcccccaaggatc

SEQ ID NO: 28936 - DNA, 122 bp, Homo sapiens
ggcctctggtccgctgccgtgttcggccccgcccgtcacgtctagctggggctcgcccggcgccttcctggacgcagacgtatgagtcccaactccacccagtccggcctggcctctgtccc

SEQ ID NO: 28937 - DNA, 122 bp, Homo sapiens
gcgtcctagaacttaaaggacttttcgatggctggaacctgggccgggtgggctccctggcgcggacggaggcggggagcgctggcgggggtctccgtctccagccacgggaaggtccgtgg

SEQ ID NO: 28938 - DNA, 122 bp, Homo sapiens
ctgttggggaaaacacctagacggtgttttgattccaccacatctctgtggcagcataaacgtgcatactgccttgtgccatagcaaaagtgatttcatgattgacggctgctcctgccact

SEQ ID NO: 28939 - DNA, 122 bp, Homo sapiens
aaaccaattctgctaacttgtccaaaaaaaaaagaaaaagaaaaaaaaagctctcggggtcggggcagggggtgccctctcagcatcaggagccggcagctgcctttccctccggcactttt

SEQ ID NO: 28940 - DNA, 122 bp, Homo sapiens
gcataaaagggcagccggcgcccgcgcgccacagctctgcagctcgtggcagcggcgcagcgctccagccatgtcgcgcggcctccagcttctgctcctgagctgcggtagggctcgcgagc

SEQ ID NO: 28941 - DNA, 122 bp, Homo sapiens
tagtgggtatgagtgtgatattctggcaataggaggttctgccactctccccattcctcacgagctttagttccccataccctgaggttctgagctccagaccttcaaccatcaggccaggc

SEQ ID NO: 28942 - DNA, 122 bp, Homo sapiens
gaatgaactttccgcgcaggtcagatataggcacccaggggttttgtgacgtcacaatgccgtctgacccggtgaaaggcaaaggaagggtcaaaaacggatagtgtgtgtgttgtggctga

SEQ ID NO: 28943 - DNA, 122 bp, Homo sapiens
tcgcccagttgagacttggtgtgcaggtcaggccttgaggactgcccaggccacatgaggcgggccagaagggctccagggtgccacgggtttcacttgggagctctcggtccccgggcatg

SEQ ID NO: 28944 - DNA, 122 bp, Homo sapiens
ttatagcgctctgggtttcgggacataggcctgggccatgcggcccccttggccccttggcgcgacccccaggaacgttcggaaagctggtcctcgtggctgggggaaaggcggggggtggg

SEQ ID NO: 28945 - DNA, 122 bp, Homo sapiens
ctcagagccccaccctttccctggccccaggccccaggccctgagccccgggcccactcccggccactgctcagtgaggtgtggtcctgccctgggggctgtccctgctttcccatggaccc

SEQ ID NO: 28946 - DNA, 122 bp, Homo sapiens
tgtgtcgtggatctcagactaattagttttgaaatggagttttgattgaactcttcaaatcgatgctgctgcaaaatttgtttctcgggcttcctattaaaagccatcttaaggggcagttt

SEQ ID NO: 28947 - DNA, 122 bp, Homo sapiens
ggaacggcgcgttacacagatctcatctgcctgctccatccacgccaactccttcctttccgactcatccttcctgaggccccgcagtcctgcacacggtggtgacggacttccatttgtgt

SEQ ID NO: 28948 - DNA, 122 bp, Homo sapiens
tgtctatatggctgagattgggagggcaactggggaagaggtttttttgtctttgtttggcgcagaaacaagtaaatttccttgtcagttgcattgttcttatcatgaaccttgctgcactg

SEQ ID NO: 28949 - DNA, 122 bp, Homo sapiens
ttagccggctccctgtgaatgaacgtggtatcaatggaacagaagaggcctacccttcttcgcccctccccgatttctctcacactgggagacttatcaccgccgcgcttctctctctctct

SEQ ID NO: 28950 - DNA, 122 bp, Homo sapiens
ccccaagcacagccacgtagtcataggtgcactcttcattgccctccacctggaagtccacgaacaccagcttgacgtgggcagggccagcggcccggatcacccagtggcactccatgctg

SEQ ID NO: 28951 - DNA, 122 bp, Homo sapiens
cgacctgtcccttatcggcgtctaaggggaagggtggagaaaacgaaaacagaagcgggccgggagcctcggctcccgccccagcgccttttaaactgcgtttctacctcctctcgctcagc

SEQ ID NO: 28952 - DNA, 122 bp, Homo sapiens
agctggggctgcggctccttttcccaggctgcaggaaggggtcccccagcagtgtctgggcgctggctcggaggcgggggtctggctcaaaagttcggaggagaaaggcttgggcctcggcc

SEQ ID NO: 28953 - DNA, 122 bp, Homo sapiens
tccctcgctcttccttttcacttagtagaaacttctaccgcgtaggtcccgccaggagttcgcgcatgcgcaggagcgacaataagatggcggtgataatcgccgcactttttttcaaatta

SEQ ID NO: 28954 - DNA, 122 bp, Homo sapiens
ctccgcgatccgctccggcgctctttacaaataaggggaggagggccctgtccccgcctccgtagcacgtggtgacccatttccccagcctgaactcccgcgcgcgtccacgccggggcgca

SEQ ID NO: 28955 - DNA, 122 bp, Homo sapiens
taaccactctgccaatattttatgagtttcaagccattctggtaccactttcatacttaccgtgtcatcaagctacctaacacatttatttaaatcacctcattaaaaaaaaaagttgattt

SEQ ID NO: 28956 - DNA, 122 bp, Homo sapiens
ctctcgcagtttacgcggaagattcagagcccgagtctgatggcgaggctggaatcgaggcggtgggcagcgcggctggtaaggcccaagtgcgaagctggaagggggaatcgggtgtctgc

SEQ ID NO: 28957 - DNA, 122 bp, Homo sapiens
atccaggtccgtctcaagcacctaagaacttttggaattattgttctttgtcagtctccacggaacactcccctcctgcctgttcccaagccacggaccaaggactaccggacggtacagga

SEQ ID NO: 28958 - DNA, 122 bp, Homo sapiens
ggccggcaggcaaacgcaacccacgcggtgggggaggcggctagcgtggtggacccgggccgcgtggccctgtggcagccgagccatggtttctaaactgagccagctgcagacggagctcc

SEQ ID NO: 28959 - DNA, 122 bp, Homo sapiens
aaggagatgaaacagaaagcgggagttcactccctcacagagcaggggctggggacccagcggggtgggtcgccttcttgtcatagcttggaaataggcccagggcagtccccatcgagagc

SEQ ID NO: 28960 - DNA, 122 bp, Homo sapiens
gcacagtgcaaggcccagggctgtgggctgcagccaggggtccctcaagccggaagccatcggggtgtgtggccatggtgacacgaaggctctggaagcaagagcccgggttagggggagtg

SEQ ID NO: 28961 - DNA, 122 bp, Homo sapiens
caatagtttacattttaaaggtgttacacccattttgttttgagatgtgtcaacaaaacccgtgtttcttttctttctataagtttaaaatgtccccaaatcaattaacaatagaggaaagt

SEQ ID NO: 28962 - DNA, 122 bp, Homo sapiens
ttttcaggcaacggggcacgcgcttgggtgcggcaccccgaatcgttcccgctgcttgatcgtcacgctctgtgagctctttctaaggtacatttgctatattcattaaaggagagaacatt

SEQ ID NO: 28963 - DNA, 122 bp, Homo sapiens
ccaggccaatggcaaagatgacggagtagaatatggacaggaacacagtcccaaagaccacgatgtccccaatataacaggcctcagccaaatcatcgtactcaaagttttctgtcactgat

SEQ ID NO: 28964 - DNA, 122 bp, Homo sapiens
ctggacccagctgagctgggaaccttttcccatggctctgcttagtcctgggcctagaatcgtaaacttgagcacaaagtggaactatccatgatatcaggattaatctgctttctttataa

SEQ ID NO: 28965 - DNA, 122 bp, Homo sapiens
tttcctggtcagagagaaccacgtcagctactggccaggctgacaagtcaggctgatgcacgttcctcctgggccggcacaggaatcatttcctcatcttgcacacggggtctcaacccatc

SEQ ID NO: 28966 - DNA, 122 bp, Homo sapiens
atgcctgccaggtgtcaggcaccttgctaggcactgggatggcagagattaccaaagagacgcccggtgccgacggtgaggagctctgtccagtgtggggagccaccgctgagcaggtaact

SEQ ID NO: 28967 - DNA, 122 bp, Homo sapiens
gtgccaatgctgggagaaaaaatttaaaagaagaacggagcgaacagtagcttcctgctccgctgactagaaacagtaggacgacactctcccgactggaggagagcgcttgcgctcgcact

SEQ ID NO: 28968 - DNA, 122 bp, Homo sapiens
gcgcccggccccgccccggccccgcccccggcggcagggccccgcccccggacgcgcgtccgccctcaggccacgcccccggccagccccgctcgccccggccacgccccccgcccgcccgg

SEQ ID NO: 28969 - DNA, 122 bp, Homo sapiens
caggaaccccgggctcaccagttccttttgcgtagatgagaaaaacctaggctaggagagcgcagtgtcctcacatggctggtgcagcctctgatccacagctccacaaagcttgcagaagg

SEQ ID NO: 28970 - DNA, 122 bp, Homo sapiens
tcccgggtgggggttcggggggcgtggtgcggcggccggggctgagaggggtcggtgcggcggctctgcctccccgggaagtgggaaccggccaagtcccgagcggggaggggcaggctttc

SEQ ID NO: 28971 - DNA, 122 bp, Homo sapiens
gctgtagtctctccattaaaagagtcctccactggctccttacatcctctctgtcctagtcggtttggctactataacaaactatcatagattggatggtttatacacaacagaaacttgtt

SEQ ID NO: 28972 - DNA, 122 bp, Homo sapiens
gtgtggagttagcgaagggccgtctggaggggtgcctgtgcctgcgtgtttggtgctgcacgtctccctccctctcattctgtctgggaagaaaaaagaaagcgggcagatttgagccgacc

SEQ ID NO: 28973 - DNA, 122 bp, Homo sapiens
ctttaaactcaagcggctgaagtgctcccggctgaggaggatgctgttctgtgcaaacgccgagccattgatcatgttccgggttgtccaactcttcagtttgagacaaaaacaaacacgct

SEQ ID NO: 28974 - DNA, 122 bp, Homo sapiens
tggttgaatacagggttcctgtctaactgcagacacaggtgtgcacacactccaatagagcgttccctgtctaactacagatacacacgagtatacaccccaatagagggttcctgtccaac

SEQ ID NO: 28975 - DNA, 122 bp, Homo sapiens
tctgtggcttagaagataacaaaataaatacatccggccccgctgccgccatctttgttacgggcagccaggcctggccggagatgccgaagtcgtgcgcggcctggcagtgctgcaaccgc

SEQ ID NO: 28976 - DNA, 122 bp, Homo sapiens
ctgtgttatcttgggcaaataatggaagctttctgaacctcagctgtaaaataaggataacggtagtctctacctcttagggttttttatgaagaggaaatgaggtactgcatgcaaaacat

SEQ ID NO: 28977 - DNA, 122 bp, Homo sapiens
gtcctccccatcagttcttcccactctccttctgatctaggtgaggagactcagattcctcgggcccaaagccttgggtgaccccgggcccctcagcaagttctgctgggtccaccatgctg

SEQ ID NO: 28978 - DNA, 122 bp, Homo sapiens
ggcccagtacgtaagactatccccattcatttatttttacttatttttgagacagggtctcgctctgtcacccaggctggagtgcagtggtgcaatctcggcttactgcagcctcaacttcc

SEQ ID NO: 28979 - DNA, 122 bp, Homo sapiens
aaagaggcggagggtagtctctcatctgaaccaggcgctttaatgcctgcctgaagccaccgcggccagcgtggagaccacgcagcgggcgggcggctgcaagccctgggctccgagcgcct

SEQ ID NO: 28980 - DNA, 122 bp, Homo sapiens
taacaccgcatctttgatagcaaatgctcacaaaggcaaacaatgaaaactcctagggtgcgtttcttgggatggcaccgggcaccatgcggaattgccacacacaaaagcaaaacagtgct

SEQ ID NO: 28981 - DNA, 122 bp, Homo sapiens
agtttgacttctcaagtaaaaaattgacataataattctaatcacctcatgaagaataaacgagttaaataatgtaaagtgttcagaacagtggctggcagaaagtgaacacttaataattt

SEQ ID NO: 28982 - DNA, 122 bp, Homo sapiens
ttcacaggctcacagttggacatgctgaaacacagcctatgaagaaacctatttctgtttcgagcatttgcaaccagcctgttactgtatcctagatattatgcaacacagagaattaaaac

SEQ ID NO: 28983 - DNA, 122 bp, Homo sapiens
gctgcccacctcagtgccacagatcgccgtggagggcgaggaagccgtgccagtagctctcgggcccaccggaagagactgatcccctgccaggtctctccctggcatcaaagttacgcgtt

SEQ ID NO: 28984 - DNA, 122 bp, Homo sapiens
accggccgggagatgtgaagttgaagccccaggcagcgcagagtcttctctcttgggacccgtgggtccgcccgcctcccgtttctcagacccggatcctggcgtcagggacaagctagggc

SEQ ID NO: 28985 - DNA, 122 bp, Homo sapiens
tacccctattctgaacagagccaccctcctcccaaacaaggcaggctctagcccctcacccgcctgaaaacagatgattccccaggttctatctcagctcaaagcagggtgtgccagaagca

SEQ ID NO: 28986 - DNA, 122 bp, Homo sapiens
tcgttctttctgatctgtgctgcttcagtcacgagattttagccgcagaagctgacgtcccgctcctaccgtggagatctctgtgaattacagcgggcatccaaagtgctttttccttctgt

SEQ ID NO: 28987 - DNA, 122 bp, Homo sapiens
agctagcccgcgccgcggactttgagcccggggcggggggtggccttgaggaggcgggctcggggggctgggcggccatgggggcgctgtcagcgtgccccacccggtccgcgggccgcgca

SEQ ID NO: 28988 - DNA, 122 bp, Homo sapiens
gcgagggcctctgacccctgggacactcccagaacccagcaggctcacagcaggcgcagccgtgcagtccgcacccaggagcctccacagcagcgggaaggatacatccacgtggcgagttc

SEQ ID NO: 28989 - DNA, 122 bp, Homo sapiens
gggggaatcctcactgcatgctgggaactgtagtcttcctgggtccccgttcctccaggacgcggaggcgccggagttgccgccattttaggtcccgaggtgcgccggccgagaaccagagc

SEQ ID NO: 28990 - DNA, 122 bp, Homo sapiens
aaggcttctggtccagtgccctatgccccagatgagaggactgaggcccagaccaggaagcgaattgtctaagactcttccaaggtccccacccagtgagttagtggcaaagctggaaaggc

SEQ ID NO: 28991 - DNA, 122 bp, Homo sapiens
agacgcgcgcgcatgcgccccgcggccgccagccggccggcccacccctcccctcctccccgaagggagagattccaacgtgcttcccgatgggtcctaaaaccgacctgccgggagaaggc

SEQ ID NO: 28992 - DNA, 122 bp, Homo sapiens
ggggccagccagcagcaacttgctctcccatagccccaaagggtgatggcagggatgccacgcaggacagaggtacccaccaccaagcacttgctgccccagaccctccacctccttgagcc

SEQ ID NO: 28993 - DNA, 122 bp, Homo sapiens
tcaccatccttgactcagcagccgtctgaagccacagaacgctccacaggcgtgcatgcacgtgggcagtttgcacgcctgtgtatacacaccacgcaggcacacactacacagtgctcaca

SEQ ID NO: 28994 - DNA, 122 bp, Homo sapiens
ctccaagccctcctgagagagaccggcgcgcgaccctgcgcgaacgagtgcgcatgtgcgcgcacgccgctttacgcatgctccttaagttccccgtactccctcggagaccctagctacac

SEQ ID NO: 28995 - DNA, 122 bp, Homo sapiens
ccggccggaaaccaaggccccacgtgtccgggcctggtcctttcggggacctttggggaccgtccaggaataagcccaaagcgcacaacccgtctttcagaaaagcggcgtgacagggaaaa

SEQ ID NO: 28996 - DNA, 122 bp, Homo sapiens
tgctcgctgctgcggcggcaagaacaggccagcagacggggtctccatgcctggcttgttcgctcattacaccacccaaggaacttgccaaaggccttgaagctgagaggcgcggtggcccg

SEQ ID NO: 28997 - DNA, 122 bp, Homo sapiens
tcgtttctcctgcttcttttctcctcccttttactttgccggtagaacacagttatgggtcgcaagaagaagaagcagctgaagccgtggtgctggtatcctttgtcggtttgaagtcgagg

SEQ ID NO: 28998 - DNA, 122 bp, Homo sapiens
agtctcctgtgctgggagatcatcatctaatcctgatgatgacgccctcctctcagagctcgggggatgagctgccaaaacccatggaggttcaaaacccgggctctggagacagaagacac

SEQ ID NO: 28999 - DNA, 122 bp, Homo sapiens
aaggggatatgcagtgggaaggaaaattcctgagagattccagcatagctttgtcaattccgactgagccatactgttttccacaagggctcaacacatagtcagtattccgtgctttcagt

SEQ ID NO: 29000 - DNA, 122 bp, Homo sapiens
agtttagtgggagttatgtgtcggagtgtggtccaggctctgcgggttgtcgcggagaggcggccatggcgcaggggcggggagagggggacggtgagagtgtggggtcgcgagccggtcgc

SEQ ID NO: 29001 - DNA, 122 bp, Homo sapiens
tcgtcacacgtccggaggccgagccgtcgcgtacctaggatgccgcgtggaagccgaagccgcacctcccgcatggcccctccggccagccaggccccctcagatgagagctgcacccaggc

SEQ ID NO: 29002 - DNA, 122 bp, Homo sapiens
agctagaggccggccaaactcaccctgtggcctggtggattttctttcagaccagttctgcgacctcccttagggctctgtctcccttctccgtgccctgaagggaaacaggccctggaact

SEQ ID NO: 29003 - DNA, 122 bp, Homo sapiens
ccccagccccagctgagtaatgccacggtgaagttgtgtccctcgccagccagcagagggcgcacgggcttttctttatgtcagaacttgctttctgggaatggatcttactctgggagaac

SEQ ID NO: 29004 - DNA, 122 bp, Homo sapiens
acaaatgaatggacgcgcgcacacatgctgtagggagcccttcttggctcgctcacgtaacgcacctatgcaacaactggccaatacgctttccaaagctcctgactcccactccgtacatt

SEQ ID NO: 29005 - DNA, 122 bp, Homo sapiens
aaagagtttagaagtctctacatgctagcattccattcagactgtttaatcctacaattgcggttttgtaagaaaaacagtcttaaagatttccaataattcccacaatggccttatggtca

SEQ ID NO: 29006 - DNA, 122 bp, Homo sapiens
tcggccggaggatcctgcagagcagcctgcacagccggggcccggcggcctcgcacgccgcgcccagcccctcgcgcatggcccggctccttaggcgcagctccgctggctccacgcgcctc

SEQ ID NO: 29007 - DNA, 122 bp, Homo sapiens
tctgatgggcacaagctgaacacaacccaggcaggtgccctgtcatcatgggaggggcagcgggggcacaccctgccgtcctaaaacccagccctctaaagtgtcagttctcatcggtggct

SEQ ID NO: 29008 - DNA, 122 bp, Homo sapiens
gaggcatggtattgccccagtctgggctgaaagtctattgctttgcttccaagaacactgcgattagcatatccacactcctttattgggggtgggggtgagttaggattagacgttggggg

SEQ ID NO: 29009 - DNA, 122 bp, Homo sapiens
aagttgcagccgggtcgcagaggtgatagctagggaccaaacctaaacccaagactctggcgggcgcgttccctaggtccgaggaggaggctgcccttcctttccggagggtctacggcgag

SEQ ID NO: 29010 - DNA, 122 bp, Homo sapiens
gctgatgagcgctgcgcggctgaaacgcgactacataaagggtccgccggcagcgtgggccggagggattgcttcacactccggaattgggcccagacacatttagaaatgttttgctggac

SEQ ID NO: 29011 - DNA, 122 bp, Homo sapiens
cagaaatggcctcaaggggactctgctccacgtggggccaggcgtgtgactgacgctgtccgacgaaggcggccacggacggacgccagcacacgaagtcacgtgcaagtgcctttgattcg

SEQ ID NO: 29012 - DNA, 122 bp, Homo sapiens
ctgagccccaacagtccaaagaagcaaatgggatgccacctccgcggggctcgctcctcgcgaggtgctcaccccgtatctgccatgcaaaacgagggagcgttaggaaggaatccgtcttg

SEQ ID NO: 29013 - DNA, 122 bp, Homo sapiens
cactttgccatttctgctcgtcactctctccccacctgtagctatgtatacacgtattgtcgttaaactatttcaaagttgcaggcatcatgacatcacaactagtactttgcactgtaact

SEQ ID NO: 29014 - DNA, 122 bp, Homo sapiens
tttgcagaggtggggccgacacgtgtgtgctctccaggcctgcagaccctggatcatcctcggagtttgctgcattctgccccacggcggtttggccaactacccacgcacaaaaaaatata

SEQ ID NO: 29015 - DNA, 122 bp, Homo sapiens
cggcgtgaggcttttctgctctgcttctgtggaagtgattatccaataactagtaggaatcgggcagttggcagacgcctcccatgctataaagccacacaaggcaggcaagtgtgggcaca

SEQ ID NO: 29016 - DNA, 122 bp, Homo sapiens
cccgctccgcccagagtcagacgggaggagagcgccccgtccgccgcccgcgcatcctcccgcccccgccgctttaactcgtgaccctactcccggctcgggttcccgccgcgccctgtcgg

SEQ ID NO: 29017 - DNA, 122 bp, Homo sapiens
tcgcagcgcgcaggcgcgttcgggtaggtagcgcaggacaggaactctgggcggttccgccggggcgtccaccggccggctccaatgaggtcgctgcgcccagccctcgcccacttgcagcc

SEQ ID NO: 29018 - DNA, 122 bp, Homo sapiens
cctccctcctggccaggctgttcgagcacccgctttaccgggtggcggttccgccgctcacggaggaggacgtcctgttcaatgtgaacagcgacaccaggctcagccccaaagcggcggag

SEQ ID NO: 29019 - DNA, 122 bp, Homo sapiens
gtgtcaattgatctgttccaggcaaactggaagatatgatcacccacctacacccaacatcgctgtaaaacccgcagttgatgctttcatttatctcattcattgctctcaacagccatgtg

SEQ ID NO: 29020 - DNA, 122 bp, Homo sapiens
caggcctgagccaccgcgccctactatgcccatttttcagataaagaatctgagggccctcgaggagaaaccacttgcccaacatgagccctggtcttgtctgaccccaaagcccatgggaa

SEQ ID NO: 29021 - DNA, 122 bp, Homo sapiens
ctctgcctggtaacagagctctgattggccagacctgtgcaaggactaggcctatagggacggctctgagctgtgcttctgcaggcagctgaacttggcaggcacaagcaagccctgcaaag

SEQ ID NO: 29022 - DNA, 122 bp, Homo sapiens
gcgcctgttactgcctccacggatcactgtgaggaaaataaatgaaaaggaaattcagtgcgatcctgttgcggctgatcctaaatgtctgcagttgctatctccgaatcctctttctcctc

SEQ ID NO: 29023 - DNA, 122 bp, Homo sapiens
gggtggagcgttctgtacatgtctcctaggtccgcttggtgcagagctgagctcaattcccggatatccttttttaactttctgtctcgttggtgtgtctaatgttgacagtggggtgttaa

SEQ ID NO: 29024 - DNA, 122 bp, Homo sapiens
cttcttatgcaaataggcttcccagttgattggcccatcttgccagcttcttactgtgcacgtggctgacaaagagaagggaagatggagccgccatctttaacatgattggcacaactgct

SEQ ID NO: 29025 - DNA, 122 bp, Homo sapiens
gacaggccaactgatttccccaaaaagatgccaagggcagctaaccgccctcctggcccgcgaagctgctccttgagggcccaaaacttcccggaggagccagaggaggccctcaggagcca

SEQ ID NO: 29026 - DNA, 122 bp, Homo sapiens
actgttgagtcctagatcatggggggaatgaatgacgtgatcatccgtcaaatatttgttcgtctttttgttcgggttgcacagcaaacaatacagacagttactctcttgtgaagatttcc

SEQ ID NO: 29027 - DNA, 122 bp, Homo sapiens
ccaggggcagctgtgctgggtgtagcaggtggacctgggaaaggacggcgccagacctgccgccaggactcaggggctcacttggggcaggagcacagtgtccctcacatttctgcagggcc

SEQ ID NO: 29028 - DNA, 122 bp, Homo sapiens
acctcatgatccgcccacctcgggctcccaaagtgctgggattataggtgtgagccactgcgcccggctaatgtcttcgtatacttcttacagtttacagagctctttattaaggctgttag

SEQ ID NO: 29029 - DNA, 122 bp, Homo sapiens
caggaagatgcttaggcactggggtgagctagtagaaaaacactgtaggactatagagatcgatgtgattaggccaataattagaatgttagtgctaattgtcactcactgaagttgtgctc

SEQ ID NO: 29030 - DNA, 122 bp, Homo sapiens
ataactaaactaaactctccaataaaaagacatagagtgggcaccggtgggaggtaggcgcggggctcggagtgcggcaggcgggcggaccggcggaggcagtatcgcaccggcggcgacgg

SEQ ID NO: 29031 - DNA, 122 bp, Homo sapiens
atctccggttctgtgctttgttgaacgcgtgagcttcgggcagcgctggggccgcttcagcgtgacctccaaggccactggcctggagttccactggctgctggtcccccatctgtggggcg

SEQ ID NO: 29032 - DNA, 122 bp, Homo sapiens
attgctctggctagcactttcagtactatgttgaataggagtggtgagagagagcatcatcgtcatgttccagttctcaagggggaatggagagctgttgtgagacctgattggattgatta

SEQ ID NO: 29033 - DNA, 122 bp, Homo sapiens
tagccctttctggctgacatttcttgtgcaaaacatgctgaatacgattagcaatccccccgcaccgcggcgggcgcccgcagccaatcccgagccagagtttccgcgcgaccactcccagt

SEQ ID NO: 29034 - DNA, 122 bp, Homo sapiens
aaacgtccatttacatcttgtcctgcaaagcttcatcaaaacttctttgccggccagtcacgtccccttatcacttttccagcccagctttgtgactgtaagtgttggacggagaactgata

SEQ ID NO: 29035 - DNA, 122 bp, Homo sapiens
cccttaaaaggatcaggaatttctctctcagggagctcagccctgaagacacaagtcagccgacactcccgaccaaataaagccacttccttctatatttcggtgtctgaggtgttttgtct

SEQ ID NO: 29036 - DNA, 122 bp, Homo sapiens
tggcggggacccgcggtggctaggagagacgtggcggcccaacggctgactacttgggcccgcgccgagccaggctttctccacggtgcgtgtgggagtgcacagaggggcctcgacggctt

SEQ ID NO: 29037 - DNA, 122 bp, Homo sapiens
tggtgtccaagagtttataatcaaatagaagggaagagtcaagaaaaaacctaaatgtatcgcatataacatgccatggaattctatggacagataagtttaatagctagggagtttagcaa

SEQ ID NO: 29038 - DNA, 122 bp, Homo sapiens
aagcttataaaaatgtggtgggtatttcagctgggactcaaatggacccccaggattctgcgaggtgaacatatttcatgcctaaaggctgaatactgccctgccagtggtgggggtagtga

SEQ ID NO: 29039 - DNA, 122 bp, Homo sapiens
tctgacagtgccatgccatgcactcgctgttgcagtgactcactgaccaggctggccacacgaatgttctcttccaggatctgcaggcagaaatgagcagccatcggcaaagcctccctcct

SEQ ID NO: 29040 - DNA, 122 bp, Homo sapiens
cggcgcggggggacacagaactgggctcccagacttttcctgtcgtggcctaaactggaacggcttgggcgaatgggggctgccgggacccccagcgctaccgccgttggggtgcgttcggg

SEQ ID NO: 29041 - DNA, 122 bp, Homo sapiens
caacctccccaccatccttcacttctttcagtgttgcctatctcagtaccatcttctttacgattttgcaaggcagataccccaaatctctctctctctctttttttttagagacagggtct

SEQ ID NO: 29042 - DNA, 122 bp, Homo sapiens
gacatgccggggcgtgggggatgctcagcgacttcatgccaaacacgaaagatcgcgttacgtgagtccacacacggttgcccttggtgcactctggagatcggtcccaggaccccagcaca

SEQ ID NO: 29043 - DNA, 122 bp, Homo sapiens
actcgttcctcgtgacctcagccactcagtgcacctggtccccattctcatggagtcacccggaccctgacctcacgtttccccgtccatggaactggccggcagccctcccgggaccctcg

SEQ ID NO: 29044 - DNA, 122 bp, Homo sapiens
ggcctaacttcttttcacgtacattccagccttccttccagacccgttttgggggtgcatcgtctgtgacgccacccccaccccggtagtggtccctttttggtctgggtctgaggcctccc

SEQ ID NO: 29045 - DNA, 122 bp, Homo sapiens
cccttgcgatatggggagtaataggacaccctctcccccactggctattacgatccacatcgcagggggctgaggcaacccccggcgatatggggggttacagcaccccctctgcccccaac

SEQ ID NO: 29046 - DNA, 122 bp, Homo sapiens
tgggcgtgtccggccccggcgtacccccggcgcatgcgctctggtgggctcgtctaccggcggctgggtttcaggggcgcccaggtgaaccctggcctagttcccagctaccccagaagggt

SEQ ID NO: 29047 - DNA, 122 bp, Homo sapiens
attgtccggtgactcgtcggccgagggctccggggacttggagcttgagtcctgagggggcgccccggcagccagaccgtgcactggggggagggggagagagaagcgcgtcaggcgtctgg

SEQ ID NO: 29048 - DNA, 122 bp, Homo sapiens
tgcggctcctgccaggggtggccaatcgcaccggactgcgccgagcacgccccgccccaccgtctcagtccgcccgccccctgccccggaccacgccccaagctcggctccaataggctctc

SEQ ID NO: 29049 - DNA, 122 bp, Homo sapiens
catctgcacaccatatgggaatgacctcccattccccttagcatcctccatatatatctgcggaaaggagggacagaggacgaaggtccagggctgctgcttctgtggagcatgctttgatc

SEQ ID NO: 29050 - DNA, 122 bp, Homo sapiens
gcttctgtcatgccctttcactctgttctcagcccagcagccagttagatcatgttactccggcggcaactcatcccactcccagggaaaaccacaacggtagcccaccaggcctggttccc

SEQ ID NO: 29051 - DNA, 122 bp, Homo sapiens
tgtctgggtgttgtggctcaagcctgtaatccgtggaggccaaggctgacggatcacttgcggtcaggaggtcgagactggcctgaccaatatggtgaaaccccatctctactaaaaatata

SEQ ID NO: 29052 - DNA, 122 bp, Homo sapiens
gaattctaggaatagaccatagaatctcagaaatggaatttgaaagtctaccaacactcccggggtgggggtggcgggtactgagtgggaatgattagaataaaattgaggactctagcagc

SEQ ID NO: 29053 - DNA, 122 bp, Homo sapiens
acggcctggcgcagtaggatgtacacccaagggtccaggatctggttccaggaggcaaggcgcacggccaggaacagtggccgctgcagggaggtagagctccagccgccgacggccagcgc

SEQ ID NO: 29054 - DNA, 122 bp, Homo sapiens
ctttggggacaaaccagggaagcctgatttgttgctgatacacagggtggtctctgtcaacgttcagaagttctggacccagccaatggtaggaaactttggctgtgccttaaacattttca

SEQ ID NO: 29055 - DNA, 122 bp, Homo sapiens
aaagaccctggtgactggggatgggcctcacaactaactcgggctgccctgcccctgtcgcgtgggctcgcaatggcaagtgctccggaagggggccgcctccccgtggggctcctggctgc

SEQ ID NO: 29056 - DNA, 122 bp, Homo sapiens
tcctccacaataaataccctccttaccttgctcgattgccttgctgactacatcatggagcgggtaggcttggaggccagcaacaatggcagtatgcgcaacacttcacaagatagggagag

SEQ ID NO: 29057 - DNA, 122 bp, Homo sapiens
actctgtctcaaaaaaataaaacaacaaacacaaaaacaaaaactagccaggcatggtggcgtgtacctgtagtcccagatactcgggaggctgaggcaggaagatcacttgagcccagaag

SEQ ID NO: 29058 - DNA, 122 bp, Homo sapiens
cccacgttcactgggaagcaaggaagttgaggacacgttacctcagtacgtaccacaatacgcattagaggtctgcttcctaggcccgtagattctagggagggcactccaggcctgcaggg

SEQ ID NO: 29059 - DNA, 122 bp, Homo sapiens
gggatagaccgggtggggtgatgggggtgcggggtgagcattaccctctacccctgttcccgctacacaagcacagcagccccctccttggtctggggctgcaacctgcgcccctcctgctc

SEQ ID NO: 29060 - DNA, 122 bp, Homo sapiens
taaaccaagtccggtcacggcatgatggcccggcgcaggtggtgctggcgctgtagcgaccgtcttggaggggctgcacagagcactcggttcctttctgtatttaaggtcctgaaaggcac

SEQ ID NO: 29061 - DNA, 122 bp, Homo sapiens
tgctagccggaaactgccggctgggtttacctattggtgctcgtgtgggactagcagattcgagaaaccagcgggactggaacctagtacacttcggcagttgagaaatgacttaccaggac

SEQ ID NO: 29062 - DNA, 122 bp, Homo sapiens
aagcacatcttggaaacaccgaacttctgtgacaccagtagttacacctggcctctgaatcgggcgagcagcgccctcgcgcccccagcgctgagcaggggcgggcggggagcggaaacggt

SEQ ID NO: 29063 - DNA, 122 bp, Homo sapiens
ctcactgagcctgcccttctcccttgtgccttccagctacatctactggaccgagtggggcggcaagccgaggatcgtgcgggccttcatggacgggaccaactgcatgacgctggtggaca

SEQ ID NO: 29064 - DNA, 122 bp, Homo sapiens
tgcctcctgggaaatgtggtttctaagaggcagagctctgcgacttagaactacctatcccgtcggccttagcgaaagggggtggacttaggcaaggggtccaggtcagagtttagagcttt

SEQ ID NO: 29065 - DNA, 122 bp, Homo sapiens
tggcgtgtctgactttatttttcttgggagtacttgtcatcgcctgacactgatatagctcgcggcccctcgcaggtggtgagcaccatgcgggcagggtctacgccttgcacactggtgcg

SEQ ID NO: 29066 - DNA, 122 bp, Homo sapiens
gcccgcggaggagccgcctgcgcatgctccatcgcctgggtaggtttccagggaaggcagcgagcaggatcccctactctgcgggcggcgcgaggcgtctggctcttcgcggcggcggcgag

SEQ ID NO: 29067 - DNA, 122 bp, Homo sapiens
gccccggtgacacaggcaatcccagagcccgcccacggcacccagaccgaacacagccagcgatgcctccacacagcccagattagaattctggtttcctggaataaaaatcacacatttcc

SEQ ID NO: 29068 - DNA, 122 bp, Homo sapiens
cacaaacagcagctcatgtgacctttccacacagccctgtggggcaagaatcatcacatccgtttcacatatttgaaaattgaggctcacagaggttgggacctggaggaaggttctcagct

SEQ ID NO: 29069 - DNA, 122 bp, Homo sapiens
aaaaaaagaaagaaagaaagaaaaagaaaaaaaaaaaaaagcccgctactaagacggagccggctctggaatagataccattagaaccacagtgtttctggaataaagatatctaatttcct

SEQ ID NO: 29070 - DNA, 122 bp, Homo sapiens
gcactcccgggtggagcagcggctttgggggccaccactcaggggaccttggttcgaggccgacttcggcgcttggctttcaagactgagggttttcggagttggccccccaaatccgcagc

SEQ ID NO: 29071 - DNA, 122 bp, Homo sapiens
ccacggccaccaagtggttcaccggggcgcccttcggggtgcagagccacaggtggggcccgtttgcgtcctgggctcacgcccacggtccaaagcagctgctgcccaccccgaagccacgc

SEQ ID NO: 29072 - DNA, 122 bp, Homo sapiens
atcactcacccgcgatgacgaatttggccatggtcgagagagactcagaggcagggaccgcggcttcgcggtttcctggcaaccacgcagccaagggcaaggcgcaggcgcactacaaagtc

SEQ ID NO: 29073 - DNA, 122 bp, Homo sapiens
aagcatttaacccacggcctcttgcataatcagttgtcagtaaatcttagctgttttcatcgtggccctctggaaggtggcagagggtcttgtgatccctgtctcccaggagattccaaggc

SEQ ID NO: 29074 - DNA, 122 bp, Homo sapiens
ttgcgtccacaaagcgtagggtgagaaccttgggagcgactgggcccgtctttgctccctcggtggggttttgtctcctggcttcccccaagtgcgaggcagttggtctcgcccagccgggt

SEQ ID NO: 29075 - DNA, 122 bp, Homo sapiens
gcaccctgccaaagtcctgtaaccatctacttcttccatctgcctaagagaaactgtaaacgggatttcccccccacgattgaatggaagctctgtactgtaccgacttctggatttgccct

SEQ ID NO: 29076 - DNA, 122 bp, Homo sapiens
tcacggtggaagtggctggtctggaagcggaagtcgtcgccgtggctgaggaacgtctgccgcgacacctgccgcgcggccgcgaagttctccacggcgcccgcgccctcggtcgcgaagct

SEQ ID NO: 29077 - DNA, 122 bp, Homo sapiens
acctccagcgtccgggcagcaagataaatgcaggcacaggcgatgctctctggctggaaccgcacgaagacgtcggtgcgaaggctgtcgttcatgtaattcctggaagccaaacacaggaa

SEQ ID NO: 29078 - DNA, 122 bp, Homo sapiens
cgtgatccgcccgcctcggcctcccaaagtgctgggattacaggcgtgagccaccgcgcccggctccaatgcaccttcttattggcaatattgataatcaaaatgcaaggagaatcttttaa

SEQ ID NO: 29079 - DNA, 122 bp, Homo sapiens
gatggaaatagtttctgagagattgccaggctgtcattttagtgtctgttgcataggacacgcgttacttgtagccaggttttttaactcgggtaaaacctgttaagttctgagctaataat

SEQ ID NO: 29080 - DNA, 122 bp, Homo sapiens
ggtggcaccagggagcatttcgcgcggcggggctggggcctgcctttgaagggacggagtcgggcgtcgtggtggggtggacaccggggatccccggggcgcggacgaggggggcgtccacc

SEQ ID NO: 29081 - DNA, 122 bp, Homo sapiens
ggcattattagtggtgtttttattagcgcgtgtgcctgtgagtgtttggaggtgggctggcggttccattaatttgtgggtgaggcagggaagccccagaggaaggcacggtggacggcgtt

SEQ ID NO: 29082 - DNA, 122 bp, Homo sapiens
acgatggctttcctcagcctgggatgacccggtcctccaaatgcagttccggagtggaggcgtgctcgcacccggggagagagccagaaagctgagccgcggcgccccagcgagagcacgag

SEQ ID NO: 29083 - DNA, 122 bp, Homo sapiens
attcagtaacacaaatcaacaggactcacgttttagtttctgtagagatagcctttctcacgcagaatcagggctgtgctttctgggtgagtctgtgttaaattaaaatgacaaaaatctta

SEQ ID NO: 29084 - DNA, 122 bp, Homo sapiens
ataacttcggttgctgtcttttcccaggtcggaagactgggagatcatgtaagatttaaacgttttcaaatttgttgaaactgatttatggtccagcatgtgatcagttttgctaaacgtcc

SEQ ID NO: 29085 - DNA, 122 bp, Homo sapiens
cgccagctccagaagccaagccaggggctcttcgagacatggtcccaccagaggagagaccgagcctcggagaaatgaacgtcctaggccatgggactcggacccctcaccccacccgccac

SEQ ID NO: 29086 - DNA, 122 bp, Homo sapiens
gacagtgtattatggcgtgggctgattattcatgctcacaatgagaaccttgagtcatgccgagagggctgacatatagctgtgtcctcagtgagagggcagggaccttccctttaacctac

SEQ ID NO: 29087 - DNA, 122 bp, Homo sapiens
agtggggccgggcctgagttgggctgacctgtgaaagtctgggaaggtctgcgagagaagcggagtgttttcagctccggaagtggcagttgtaaacttcacctcccgggggctcttcccct

SEQ ID NO: 29088 - DNA, 122 bp, Homo sapiens
tccctcagctgcgggagaccgttgagcaggagattcgagacatgggcctgcaaagcacgccgttcaccctcaccaaggttttccagttgtatgaaaccaagaactcccgccactccaccatg

SEQ ID NO: 29089 - DNA, 122 bp, Homo sapiens
ttttgggccccagtgtggcattttccacccactctgtgtccttactacattctcagctgccgtgactcctgccacaatctcctgtgtatctcaccgctttcctgagggagctgggtatcctg

SEQ ID NO: 29090 - DNA, 122 bp, Homo sapiens
aagaagctaggaggggaaataaattgagtgggggtggggtttcccaagaatcggaggaaccgagaacgaagaggggtgggggaacggggaaagagagaggaaaatcaagttttcttcagcac

SEQ ID NO: 29091 - DNA, 122 bp, Homo sapiens
actgaggcctgagccccggggaggagctggctggtgagccatgtatcccagtggtcactgcggccagccggggaggttgaatcccaggccccagcactcagaagctggtggagtgggttgaa

SEQ ID NO: 29092 - DNA, 122 bp, Homo sapiens
cagggaggtctttgcgggcctccctaggctgcttaccctgcccgcagcccacctcctcctcgttccccgcgcttttaagacgtcctaactagctcctcacttaggctgcggctaatattttt

SEQ ID NO: 29093 - DNA, 122 bp, Homo sapiens
gacggagagaatggaagagctcctgtccggtgtgccagcagcccggactggcggtgagcgcgagggaggctactgagaagcccggcgacggaggaacgcaggtctgctgccaggtaggttta

SEQ ID NO: 29094 - DNA, 122 bp, Homo sapiens
ccagctcccagctggaaaggaaaacttcaagaaaagactccagtccctcagccactctctcggccaatcccacctcccggccttatcttggctcgtaaatgatctgtatggtgagagcggtc

SEQ ID NO: 29095 - DNA, 122 bp, Homo sapiens
cctcaatgaccttgctcatcagcccttctggagtggagatacagggcaggcatgcttgcacgagtctatacaatagccctccccacaaacacagacaatatctgtacatacaggtgcatccg

SEQ ID NO: 29096 - DNA, 122 bp, Homo sapiens
atcaagttctgcaggtaaagcggtgtgacagatctacgcgatttcatccgggggtgctctcggatgcacggtcagtagcatgctgacaaccttaccgtagtgagggcgcaatccgacaacgg

SEQ ID NO: 29097 - DNA, 122 bp, Homo sapiens
tggacagtaacctgatggatgttccctgagaccagggagcaggaacaacaggggatggctcgtgacaggtctaggaggccagtgacatagtaaacactttagtacttgctggcagcaatagg

SEQ ID NO: 29098 - DNA, 122 bp, Homo sapiens
cacccttgaaacgttccatcagaagccggccgtcagcagtcgtgcctgctccaccgtgggcgaagcgtgctgttcatgcagcgtgacgtcagagccaaacctgtcttcatggagttttgtcc

SEQ ID NO: 29099 - DNA, 122 bp, Homo sapiens
ccgggccagcttcaggatggaaacgacagggcccgcacgagcatctgaacgctgatgtcccggccattccttagctggccggctcacccccatgccctgccctcggtgtggtgtggtggggt

SEQ ID NO: 29100 - DNA, 122 bp, Homo sapiens
ggactagaatgacctactcttccctgaccttttctctgtctcataaaaatgtaatagtctcgtcatttctggtcctgctccagcgctttctgtataactttcatggactataaatctggtat

SEQ ID NO: 29101 - DNA, 122 bp, Homo sapiens
aggtcggttgatcccaggctactagagctagactcgggtcgacgggggcgggggcgggggcgggggcgggggcggggcgtggggtggggcgtggggtggggtggggttcgtatgccatctgg

SEQ ID NO: 29102 - DNA, 122 bp, Homo sapiens
tgccctttctctagtgctgtgctgccttctgaattctcctacaaaaagcagtggccaggtcgtatggtccttacattccaggaaattgtaaagctcttcaaactcttcaaattataaaactc

SEQ ID NO: 29103 - DNA, 122 bp, Homo sapiens
tcagtcagttactgtttgtgggcagagatctgagaggaacattctcatggacacctgtggcgactttgtaatgtgtcaactcaagctagtctaaagtacatttctcaagactcccttaccca

SEQ ID NO: 29104 - DNA, 122 bp, Homo sapiens
gcaggatgacctggccatcttagctcatctgatgggctactctagctctagagtccctgtcgagtcagctaaaactgtcttggggcctgcatggagctcactactttccccctgtgccactc

SEQ ID NO: 29105 - DNA, 122 bp, Homo sapiens
attatacccctcaccataatgtagaatcagtaggagccctgaccttgttttcctgcaatgcgacggcggcgacagatcatcaggcatcaggttctcataaagagcgcacagcctagatccct

SEQ ID NO: 29106 - DNA, 122 bp, Homo sapiens
aggtctggtagaaggaaggccaaccgccccatggccgttaccgttctactcgtcctcatccgggactgcgctgaccttctggccgttaaagccgttatccactgttatcaggaccaggtagt

SEQ ID NO: 29107 - DNA, 122 bp, Homo sapiens
ggacacccagagcccagccctccgcagctgtggggaaggtggtgtggccattttgcagagcggcaaaccaagactcatgcagaagtggtgtctgcaggagttcagatcctctgcacacgcag

SEQ ID NO: 29108 - DNA, 122 bp, Homo sapiens
cttatgtatccacacatcgctagcgctgcctctgtgtatgttttatccagattccaagtgcgtgccttgtcccggaaccaacaggctcctacctcgtgcccaccacctttgaagatcaaagg

SEQ ID NO: 29109 - DNA, 122 bp, Homo sapiens
ctcggggccggccccagaagccatttcgttttgtgcaagtcacatgaaagcggcttcccgcgcgccggggccgcgatgccggcggcggcggggagagcgcgagctccattgtgcaggctccg

SEQ ID NO: 29110 - DNA, 122 bp, Homo sapiens
ccaaccagaggcactatcccctattctacagttccgataaccttaccgtcggactctgcccgaaccagcagcgacatccccttgagctcctccacgtaagtggaggagacgtgcccggtgcc

SEQ ID NO: 29111 - DNA, 122 bp, Homo sapiens
gtagctttcaccaaactgtgaaaatctatggagacacttggtggcgctgcaggataacatcgtgaaaaatatattcactggatggcgttgtgaacactgatatccagtgcacacagagaatc

SEQ ID NO: 29112 - DNA, 122 bp, Homo sapiens
tcttggaatcaacccagcatgtcctgctgctgctgctttctgcctctgctagcttggatccggtaggaagaacagagttttacattccttcagtgagtaattgacaaagctccacaccaggt

SEQ ID NO: 29113 - DNA, 122 bp, Homo sapiens
gcaaaaataccttattcagggacttgtaggggttggggtcgctgaaggagaacggggcctcgcgcctgaacctctccctgaactcatgttgcttgagctgcgagagaagagtgcaaagtaca

SEQ ID NO: 29114 - DNA, 122 bp, Homo sapiens
aaataacagtgactttttaaaatggtgacagtgttggcaaggaaacagcaacacaggctgcgctgttggtaggagtgaaaaccagtataattcttctgaaaaacatttatcagaaacttaaa

SEQ ID NO: 29115 - DNA, 122 bp, Homo sapiens
cttccaagatgcccaagaaaccaaagaatgaaaacccagtggactacaccggtaagcctgcggcggttgcctgatggctggggctccaggaagagtcaccatctgcatctcccagccatgcc

SEQ ID NO: 29116 - DNA, 122 bp, Homo sapiens
gggagtattacacaggtcatatatatttcacttttttggttcaaacccaggggatctacacgataattagattgagaacatctgcatcaaatccaaaccatttccctgatccttccttgagc

SEQ ID NO: 29117 - DNA, 122 bp, Homo sapiens
tggtccagcacgttgccatccaggtgcagtgagaagcaggtgcggtgacacgtgtcctcccggtccatgagcacctggtgaatctcctgcaccatctcctggggggacacctgcagggagaa

SEQ ID NO: 29118 - DNA, 122 bp, Homo sapiens
acgttacccgcttcatgatcgagtgcgacgcctgcaaggactggttccacggcaggtgagcgcgcggcggctgctcggctcggcccggcccggcccggccaccttgcccgaccgagccccgc

SEQ ID NO: 29119 - DNA, 122 bp, Homo sapiens
cgatcccgcgtagagcagcgtgtattgcagacgcacgctgggcagcacgggaaggcaggccggtgcctcctgccaggtgctagttgtagtggatctgctgcctgtctacagctgggagcggt

SEQ ID NO: 29120 - DNA, 122 bp, Homo sapiens
tcctcatggaggatcttaccctgtcattttctgtgtccctgtttgtctcaagaacagggacgcatctgatttatctctgtatcctgtgcacctaaaatagaagaggcttggtaaatattaag

SEQ ID NO: 29121 - DNA, 122 bp, Homo sapiens
ctcccccacatctttcttatgacgtgtattactttctgatgaccccctagatggtccaggcgcgaggatgctgacccagagtccttcggagggtcacaggcgcctgggctttcccggtgccg

SEQ ID NO: 29122 - DNA, 122 bp, Homo sapiens
acattccctagtcgagccatgaagggcgcttgctggcggcaactaacctaacctagtggccggcgataggtaatgaaaaaagatttaagtccacagatttcccctctcggtgaccctatctt

SEQ ID NO: 29123 - DNA, 122 bp, Homo sapiens
ttagaagacctgacaactctgggcctacacggctgcatggaaatatctgtgtgcccatctcgagaggacaagggctcacaatttgccatagtctctaccaattcctatcatattcctaacct

SEQ ID NO: 29124 - DNA, 122 bp, Homo sapiens
gcccgcgggccggcgcaggggtgggagtcgggcccggggcccagagagaccttccggggccggggctgcggctccgcgggcttccccaccggccgggtctcccggcaactaccagagagcgg

SEQ ID NO: 29125 - DNA, 122 bp, Homo sapiens
ctattgcaagtgatttattgatgtttattgggaatgaatagatcaaaggcagcagcatgacgggcgatcaatcagtcatcaaatcaaggatggcaacgggccagaaacccttcttccaggca

SEQ ID NO: 29126 - DNA, 122 bp, Homo sapiens
ccgcctcctccgggaagagccccgcctccttaaagagacagcagctcccagagaaacctgcgtgctgcggcgcgcagagcccgctcccgcccgcccttctcccgaggctgagcctcgagttc

SEQ ID NO: 29127 - DNA, 122 bp, Homo sapiens
gacacacgaggaaggggactctttggtaatcccaactatttggtaccagagccaagcaaacgtgactaaagggagctgggtcagcagaaaggtaccccgagtctcagcaataggacggcccg

SEQ ID NO: 29128 - DNA, 122 bp, Homo sapiens
taagatagccagatatgataaagagtttaaaggatacataaaattagttaccagaagatccgaagaaattgtctgcttaaattcagtgatgcatacaaagagtgagtagtatttttggagga

SEQ ID NO: 29129 - DNA, 122 bp, Homo sapiens
ggtggaagcagagcgtgcatcgcccagatgggctagattctcacaggctcactgctagaacgaatattcttgagactttagatctgaaagtcagcctgatttctgaaagccttggaccgttt

SEQ ID NO: 29130 - DNA, 122 bp, Homo sapiens
tatactgttaagccccattattcactacgggttactgccttttttggagaatggtttaaacgtactattaaaaactatggcagggagctggagctgataaagaagtcaatattccctgggag

SEQ ID NO: 29131 - DNA, 122 bp, Homo sapiens
cagtgcgtgctggcccggggtggcaggagccgcagaggcttgggctgcaggtaggtgctgcggcgaggggtgagagggcgaaggggcgagggggcgtgcagctgggtttcccgggggaccct

SEQ ID NO: 29132 - DNA, 122 bp, Homo sapiens
taccatctaaaagcaaagaatacacaccccagctgaaggagagacgacacctgtaaaccccgtgcccaacttgagaacacaggcagtcggagaacaggcagtcggagaacgcgccgcctgct

SEQ ID NO: 29133 - DNA, 122 bp, Homo sapiens
gagaggggatcttgttgcaattgccacctctccgtgcaacgaagcacctgccaccatctccgctgctttgtgtcaccagcgtctgatttgaagtctgattgcattgccgcggtctcaggccc

SEQ ID NO: 29134 - DNA, 122 bp, Homo sapiens
tcatgtggcacctcaagatttgccaaatccttccttttgagcaatgccaacattttcagacgttccatggcctcatgcccctccattttgagtcgctttgccaggacatcatctcgctcatc

SEQ ID NO: 29135 - DNA, 122 bp, Homo sapiens
gtgctgttcagcagaaatttctgcaatgaagaacatgttcatatctgtactttctgaggtcgtagttatgagatacatgtggctacttgcatgcaatgtggctagtgtgaattggaaatttt

SEQ ID NO: 29136 - DNA, 122 bp, Homo sapiens
tccccacgtgactctctggaatttcgccaaagctccgagtctctgggtccattttcacaccgagcaaagcagagaggaaggaggcaagggagactagaggaaggctgaacgtgtgtccttta

SEQ ID NO: 29137 - DNA, 122 bp, Homo sapiens
ttgcatgatgtcaggcaattcgggaagcgactgcttttccttctcaagaggcgggtcttccgagagtcagccaataggagctgacgggcagggcaggtcgcgttaggacagcgtcgctcccg

SEQ ID NO: 29138 - DNA, 122 bp, Homo sapiens
tatcagccacagaccacctttgaggactttgtatgcacttttacaaaactctgggagccccgagatcttcaagcccgaataatttttatcaggcgcagtgtggacagccccgaagcgcggcc

SEQ ID NO: 29139 - DNA, 122 bp, Homo sapiens
aggaaggcatcatttcatctgcaatgcgatgcccagacatgttcgataccctaattatcacgagaggaaatgccaattctttgtcagcctaagtgattttcttcctctgtcccttcctttat

SEQ ID NO: 29140 - DNA, 122 bp, Homo sapiens
cggatcggcctcagattagcaggccccgggagtggggcgggggcgtagtgtgggacggggcggacgcggcccggggcgctccctccctggacttcaatatttccgcttcagcttctggaagt

SEQ ID NO: 29141 - DNA, 122 bp, Homo sapiens
gagtgtgtgagtcaagccctgaatccgctggccacgtccggcctccatcccctttccccacgcctcctgggctccattccctgcctagtgaccactgaccctgagcaatgttacagccccac

SEQ ID NO: 29142 - DNA, 122 bp, Homo sapiens
acctcgtgatccgcccgcctcggcttcccaaagtgctgggattacaggcgtgagccaccgcgcccggccacatttctttaagattccaacactgggccgggcacggtggctcacgcctgtaa

SEQ ID NO: 29143 - DNA, 122 bp, Homo sapiens
agagagaaaatacctggagttggtgatcagcagtttctgaataagatctcagcagttgggcgagcaggctcaagcatgcgtactaagcagtaaaatggcaaatgtatgatcttcctctggag

SEQ ID NO: 29144 - DNA, 122 bp, Homo sapiens
tggatcaggacccatcgttatgcggatcaaatgagaccaggtatgtaagacgctgaacagcgctggcgcatggtaagcaccccacgcatgacgcgacagcggtagcttgggtggatgttgaa

SEQ ID NO: 29145 - DNA, 122 bp, Homo sapiens
ccggatccgggtgaggttgtagtcggcccgcagggagcgcacggctcgcgtgatgcttagcgccagctcaagggcggcttctgcctcggggtccttccaggagcactgtggggtggaggagg

SEQ ID NO: 29146 - DNA, 122 bp, Homo sapiens
tcagacaccagtgcagaagtggtgattctggggagaagagtgaagacaggccagggaagacgtggttaggattcactcaccaatccacgggcctgatctgcacaaaggaattttcctagagg

SEQ ID NO: 29147 - DNA, 122 bp, Homo sapiens
atgcttttttttttctttgagatggagtcttgctctgttgcccaggctggagtgcagtggcgcagtcttggatcactgcaacctccgcctcccgggttcgaatgattctcctgcctcagact

SEQ ID NO: 29148 - DNA, 122 bp, Homo sapiens
ttgtgggtcggcccagcgcgtattcgagtagagggcgagcccgtcccgcccctcgtcgggcgcttcccagatctgcttgagtctatggaggaaaaactccgcggggtccgcgattcccatgg

SEQ ID NO: 29149 - DNA, 122 bp, Homo sapiens
tgcagaagaggtgactgttacaagggttaataggcggggttatgtgatgtgacacagaggcgtttagccagaatggtcaaagaggacctcctgaggaggtgacattgggcaaagacctaaat

SEQ ID NO: 29150 - DNA, 122 bp, Homo sapiens
ctgtaaaataaaagagctagagaccactaagatccctttcagctttaaaagtctgattaacgttttactttacagcaaccctgccttgcgccacccactcccccacctaaccacagtttcaa

SEQ ID NO: 29151 - DNA, 122 bp, Homo sapiens
gaccacgtcactgtacagtagggtaaactgaggctcaggcgccggcccgcgggaatggcccgccctcgtgggaggagcatgtgtgcgggtcggcgtccgcctcctcctttttattgaagtca

SEQ ID NO: 29152 - DNA, 122 bp, Homo sapiens
agagcagcgcacagctcatcttgcttgagttttgggtgccctacaggatgagcctctctgcggtctggcattgtggggagggccaggcagcacctatcggggctcgggggcccaagtcctct

SEQ ID NO: 29153 - DNA, 122 bp, Homo sapiens
tccagctcatcggggaaatcagttgtgtcctcctccagaaagctagctggagtgaagcttcgacgctgtgcccggcgaaaggtgccatccctaacggagcggccctggggacggggaagtga

SEQ ID NO: 29154 - DNA, 122 bp, Homo sapiens
gccgtcctctcacttctggctactccatacttgcatgtcttaacgaaatagtgatttaagcgtagtacaacgtctttttgataatatctaacacttttgatcattgatttgttatgacagat

SEQ ID NO: 29155 - DNA, 122 bp, Homo sapiens
gtcagggtcacgcgtgtggcactggcggacacacacaaacacgcatgcacagagcagggtcgtcagggtcacgcgtgtggcactggcggacacaaacacgcatgcacagagcagggtcgtca

SEQ ID NO: 29156 - DNA, 122 bp, Homo sapiens
cttgggggcaatcaggccgtttgtaacgtcctgatacagcagagctggggactggggttacgaaagacaccaccaggtggagccttcagatgggacctcccagcagggcctccaggctgggg

SEQ ID NO: 29157 - DNA, 122 bp, Homo sapiens
gaagctcatcagtgacgtgacttagccaaaagcactggttatacctctatacctcggagccgacactgaaagccccggccatagtctttctgccccaaggaaagcctggggtgggggtgggt

SEQ ID NO: 29158 - DNA, 122 bp, Homo sapiens
cgtggtggccgctgccgatgagcgcctccaccgcgtcctcgggcgtcaggttgagcgcctcggggttgaggtgatgctggtagccgctcatccagtacagatcctccagcgccggcttcccc

SEQ ID NO: 29159 - DNA, 122 bp, Homo sapiens
tggcccggcggcggggggccgcgggggcgggggggcacggggcccagtcggggacggggccgccggagaccagccaccggaagaaaattaaaaaaaaaaaaaaaaaaaaaaaaaaaatttac

SEQ ID NO: 29160 - DNA, 122 bp, Homo sapiens
cgccacgcctctgagaagcggccctgttcccacccaaggcctcgcctgcagacatggccacgtccccagacagggccccgagaagctcgccccagacgccacgaggtgcatccttaaacagg

SEQ ID NO: 29161 - DNA, 122 bp, Homo sapiens
ggaaaggatgagaagggaaaggtcctggtcggggacacaatgacggtggcagtgtaacgccgggaaacttgattgcgtgaggtccctctcactccctctacctccctcttttacgtagactc

SEQ ID NO: 29162 - DNA, 122 bp, Homo sapiens
ccaaacaccgacatattcagtgcttaggagcgggggaaggtttattccgtttggccaaagcgagagagcgggagaagaagtctctcaaatactgacatgccttagaacgtaactggggggcc

SEQ ID NO: 29163 - DNA, 122 bp, Homo sapiens
atttctaggtccttaatcagacctgcaaagtccctttggccaggtaaggtaatatgcttgcgctgtgagcattaggatgtggacctgttttggggacctttattttgttgaacacacaggca

SEQ ID NO: 29164 - DNA, 122 bp, Homo sapiens
ggctctgcccccccacccaggtcccgtgtccccagggctgggctctgtggctgtgcctcccgggccccccccggcactgcacggtgctgtcattggcctgtcagggccctgatgctgtttgc

SEQ ID NO: 29165 - DNA, 122 bp, Homo sapiens
cttcgggtgatttcccgtcccctgtgagctgtagtttcttcctctgtaaggtaagggtgacgtcctcccctgaagatgacaaatgtggtgcccctgccccatgcctggcaccaggtcagtgc

SEQ ID NO: 29166 - DNA, 122 bp, Homo sapiens
atcctgtgctgaggagaacgcagctccgccctcccaaaggcacatggcgaccgcgcagggcgccgaaaggcgcacccgaacccgaatcctaaacctaacgctgtcctaagagccctggggag

SEQ ID NO: 29167 - DNA, 122 bp, Homo sapiens
tgtgtgggagctgggtgaggcctgtgactgctgggtttcccccacttccctgacaacctgcgtgactcagcagaggcagccataatcctgggtacacaactctattgacaagggaacctcac

SEQ ID NO: 29168 - DNA, 122 bp, Homo sapiens
agactctttgtggctttttcgcacatcgtgtcctttgtaagtcatcgttcccgctgcacacgcgcccaccatctccaggctgaacggctcagagatttaatcacgttctcggactcaggcca

SEQ ID NO: 29169 - DNA, 122 bp, Homo sapiens
ggtaggaaggttcttgggttcggacggcagcaggttcctgaggccagggaagtacagggtcggggtaagaagccagaggcatccccttctttgtacagcagggagctcgggtggtgtggctg

SEQ ID NO: 29170 - DNA, 122 bp, Homo sapiens
tatctgtactgccagaaggttactgcattttagctttagatccaataggctgaatcactgcgttccagagtccctgatgtagcacaaatatataattaaaattgcttgaaaggaaacatgaa

SEQ ID NO: 29171 - DNA, 122 bp, Homo sapiens
ggtcgtagttcttggtgacgttgttgaagaccaccagccaggccaggaagccgaagaggtcgcactcacagttgaaggggttgccggccagctcacacaccatcaggctggcgaggctggca

SEQ ID NO: 29172 - DNA, 122 bp, Homo sapiens
tctattctaaactaaatccttaaacttgatgttctcagaagcctttgccaaaagaactaacgtcacttccacaatgacaagaaaaacaaaacaaaacaaaaaaacactttatcttttatgat

SEQ ID NO: 29173 - DNA, 122 bp, Homo sapiens
cggcccggggcccagcccagccggaagggggccaggcccgcaagcttctccagggtggcgcggcggcgacaagatgttccattggggagggaccccagctccccggcctcttcttcctccag

SEQ ID NO: 29174 - DNA, 122 bp, Homo sapiens
aggcacaggaaaaatacagtattatgatcttatgggaccactgtcatagatgtggcccgtcgttgaccgtaagtttgtcatgtggtgcatcccgcctaccttaattctcttctcgtctctgt

SEQ ID NO: 29175 - DNA, 122 bp, Homo sapiens
ccccgcgtcggccctggccgcgctgcgggcggcgaccggggagctctgggaaccccctttcgcctccatagccccctccagcgcctggcagctgcgacttatggccccattttactggggag

SEQ ID NO: 29176 - DNA, 122 bp, Homo sapiens
tcccagagtcactgctcccactgttttctgggctctggccccccctaaaatttcacaggccgctaacacaacactaccttctgtcacaaaatgagagctttctggtgggctagggtaggggg

SEQ ID NO: 29177 - DNA, 122 bp, Homo sapiens
acattcatcacaggcctgggagggaatgacccaagcctggaaggaccaactgaaagggttcggggctgcaagacccagtacctatgcagaactgggagaagaaccagttcccaccagccaga

SEQ ID NO: 29178 - DNA, 122 bp, Homo sapiens
gcttcccaggtgaagcctcgtgtcggttctcttcgtattctctttgctcttgtttgtattcgaaaggcatttgagtaactggatctaggcagatcattcactgctctgggagagaaaatgtc

SEQ ID NO: 29179 - DNA, 122 bp, Homo sapiens
aggcgcctggacgcgccgtggacccgcgtgcggacggcggggacaggctccggtgctgagcgcctccggtgtccccagcagcactgacccacttgcaggccccggagctgagccgccagcca

SEQ ID NO: 29180 - DNA, 122 bp, Homo sapiens
ttggcaaactgtaagcagacgcgttttcttccttagttgttttcaaagttcgttgcttcccgcccgtttttcactggaggaaattaaacgtttttaataaccaggtctaactgaacctttct

SEQ ID NO: 29181 - DNA, 122 bp, Homo sapiens
aactgcgcattccaagagaaacttttctcaggcccagaattaagtcggagggatccgccgcgcagctcaatccctaggaagcatgaaagaatgtattgtaaagagtaaaatcacgcgcaatc

SEQ ID NO: 29182 - DNA, 122 bp, Homo sapiens
ggaggctgaagagggagcatcacttgaaaccaggaggcaggggttgcagtgagctgagaccgcaccactgcactgcaggtgtgccacagagcaagactctgtgtacctttgtctgaggtagg

SEQ ID NO: 29183 - DNA, 122 bp, Homo sapiens
cagctcggagcacgcgtgggcgaggctgtggggagtgtggccgaaagagtcagtgttgcacgggcgcagagggagccagaaacgaagctactagtgtgcttcacagaaaacggtcaactaac

SEQ ID NO: 29184 - DNA, 122 bp, Homo sapiens
agttagtggaggcatcctcagcagaaggcccgtcagaaccacagaaacaagaccaggtgccgggtgggcacagttagtggaggcatcctcagcctttgataggacggagtggtgattagtaa

SEQ ID NO: 29185 - DNA, 122 bp, Homo sapiens
gccatggaccgggggttggggacccctgccatagagtactgttgaatagaaactttagctcgtccggcggtgggctgggggggtgggggtagctcatgcctgtaaccccaccactttgggaa

SEQ ID NO: 29186 - DNA, 122 bp, Homo sapiens
gagccacggaattgctgcaggagacaagcgctgagttcggtgatgtctggtggccaagtgcgagactttccaagcaaagcaagggattgttcgaaagttattgcatttctgcttcgcagaca

SEQ ID NO: 29187 - DNA, 122 bp, Homo sapiens
ccaaccacggctgcacctgcgacacaacccagctgtcttggggacaggatcctgtgtgttcggttatgtcacctgtgtgtgcacggtcttcagttgctcattgtagattaacttttgctctg

SEQ ID NO: 29188 - DNA, 122 bp, Homo sapiens
agcggtggtctgtggagtccccagtcgtcttttctcctcttaaaagttaaaatggccgggcgcggtggctcacctgaggtcaggagttcgagaccaacctaacatggagaaaccccgtctct

SEQ ID NO: 29189 - DNA, 122 bp, Homo sapiens
cgcaacccgagccgagcttcctggctgggcactgggctcagccagtgctgagagcgctttcgctgggccagtcaagacagcaataagtttgcctctatttgggaaacctttccaggcttgcc

SEQ ID NO: 29190 - DNA, 122 bp, Homo sapiens
ggtgaggcagccagctgtgtccccgtgataatgccggggccggaggcctgcagctgcgcccgccacttccctgacaggaaccatctggggccctgccctgcgcggccttccctcgggccatt

SEQ ID NO: 29191 - DNA, 122 bp, Homo sapiens
ccttgtacgacttaaagttctcaatctcaatcagtttcaggaaccccatgacggccgcggcgccggcggcagtaggacaggccgcgccgtacgcccgagaactgaggtagcccgcgcgggaa

SEQ ID NO: 29192 - DNA, 122 bp, Homo sapiens
tccgtgaacccgtgcatgtacatactgcttaggagctgattcacagctttactaaggctccgtggagcccctaaacgttaaatgatgctgattcgagaagaaaacgcaccagcggcactgtg

SEQ ID NO: 29193 - DNA, 122 bp, Homo sapiens
ctctccggataagtcgagaggcgccggttaatggaaaatgcctccgctgcaacttaaagccggtagaagcaagccgggcccagaaagcctgcggaaaacgaatcgcaaagccaatcacgacc

SEQ ID NO: 29194 - DNA, 122 bp, Homo sapiens
tatctaaaaatggaaatggatggccgtggtggcacccgcctgaggacaggaacgccagcccggtcaggcctcggcggggcctacacgcttcgctggatcactggctcccgcctcccgccccg

SEQ ID NO: 29195 - DNA, 122 bp, Homo sapiens
cgcaattcatattacatccactcttcttccttgcaggcaaacgagatgctgctcagtggacggaagctgacagcgcaggaggcgtgtggcaagggcctggtctcccaggtgttttggcccgg

SEQ ID NO: 29196 - DNA, 122 bp, Homo sapiens
actttcttgtgggtggggttagcctctctatttggttctttctccctacatcatcattgtcgttattattttaactttggatgagaagatcaaagatagagttgcttttccctttcttgggc

SEQ ID NO: 29197 - DNA, 122 bp, Homo sapiens
ttaactctgaaaggcaaaaagactctcaggcgctcacagccggcgtcacaaaaggaacggcgcaccgctgacgtcatttacgctctccgcctcgggccaggcggggtttcgggactagggtt

SEQ ID NO: 29198 - DNA, 122 bp, Homo sapiens
tgtttactcctgtaagtactacctaggttgtaaggtctagtgcaaaccctatatcctctacgaagagttttcataccaccgtagaccatattgacttcatttcttcattgctttttgtgaac

SEQ ID NO: 29199 - DNA, 122 bp, Homo sapiens
ctcctgcaccagcacacaaacccacagctcactcttctcagtgttctgagagtggtagctcgatctcaggccacagatctcatcttactactcctgggcagtgtgcttgaatgctgaggggt

SEQ ID NO: 29200 - DNA, 122 bp, Homo sapiens
aggaggggcagaggaaggggccggccgaggggaggggcgaggggcgaggctccgggcggccggagaaaacctgtttgttctcctgcgggcggagcccagtccgcgcctcctcgcctccctgc

SEQ ID NO: 29201 - DNA, 122 bp, Homo sapiens
cttaaaccctgtctagcctacttgattccgggggtggggctgtgggaatcgctgcccacccggaatcccgcctgccccgagcatggccaagccccagccccgccccgccgacggcctgccgc

SEQ ID NO: 29202 - DNA, 122 bp, Homo sapiens
ggccaacatggtgaaaccctgtctctactaaaacataaaaattagctgtgcatggtcgtacgcgcctgtaatcccagctactcaggaggctgaggcaggagaaatgcttgaacccgggaggc

SEQ ID NO: 29203 - DNA, 122 bp, Homo sapiens
agacggcgagattagcgcagggatgtaagaaacaagtggctctcagaccaaagaagactccgcggcagacggcacactaggccttcatagaggcgtgcgctggacaggagctcgccagttac

SEQ ID NO: 29204 - DNA, 122 bp, Homo sapiens
gctgggcggagtcagatcggctttaatagagggagcctgaggaggctcccggggtgcgggcgcggcccagccccctcctacttggctgcggctggcggtggggcctgggccgacgctggtgc

SEQ ID NO: 29205 - DNA, 122 bp, Homo sapiens
acccaatgctaggatatcgccctccctctagtcctgagtaggaagaatcttcctggctttcgagatccggtaccagagagtgactgtgagagtccgccctgctctctgggacaattaaggga

SEQ ID NO: 29206 - DNA, 122 bp, Homo sapiens
ctcgtggatggcccgggacccatgcagtcgccgtgagggccgatactgcagctccccccgcgtttcccgccacttcttgagctgggctgcattctcccgctcaatcagtgcttctgtcaccg

SEQ ID NO: 29207 - DNA, 122 bp, Homo sapiens
cgatgaagagcttcatcagagcagtttctactaacagggaaatagcataggtgtcaaaagcgaggagaaggaataagtaaaacatgttagcatgttatgcagcatgcaaaagtaatgatgta

SEQ ID NO: 29208 - DNA, 122 bp, Homo sapiens
atcaaataatcaaaatttgaatatttgcaataaagaatttacaaactcaagaaatttgtccgtgataaatataaaaattaagaaatatggtcagaaactttgcaggcagtgtgaaatcagaa

SEQ ID NO: 29209 - DNA, 122 bp, Homo sapiens
cccaaggcgtccctgcggagggtggagctctcgggccccaaggcggccgagccggtgtcccggcgcactgagctgtccattgacatctcgtccaagcaggtggagaacgccggggccatcgg

SEQ ID NO: 29210 - DNA, 122 bp, Homo sapiens
cacccagttcagcagcgaggacacctgcagaaatacattcccaaagcaaggctgggcggccgtgtgaaggtatttgttaccttttttctcccctctgtatttgccgagcctccccgcctttc

SEQ ID NO: 29211 - DNA, 122 bp, Homo sapiens
gttaaaaatttatttattttgttccttcaagttcaagtagcttttcagttctttcccttacgctttaaaataaatttgtttttaatatctatctacaatgtcgttatttccaccatttgttc

SEQ ID NO: 29212 - DNA, 122 bp, Homo sapiens
aaaaaatgagaggtaagcaaggtgacagatatgttaatcagtttgataaacattccacgtcgtatgcatatatcagaacatcacactctaccccataaatgtatataattataacttgtcag

SEQ ID NO: 29213 - DNA, 122 bp, Homo sapiens
ccagcgcctcgttgatcagctcccgcttcagctcccggctaccttcagttgctacaaacgcgtatacactctgatcggcccgggcacggcccctggcctgggaagagagacaaggggtgtcc

SEQ ID NO: 29214 - DNA, 122 bp, Homo sapiens
gtctctccatctctatatgtctctgttattctgtttctctgtctctgttctcacctctgtcgctcccctcaccccacagtctgtctcacacacaccaggagctccataaatatttgttctca

SEQ ID NO: 29215 - DNA, 122 bp, Homo sapiens
tacttgggaggctgatacaggcgaatctcttgagccccggaggcggaggttgcagagagccgagatcgcgccactgcactccagtctaggtgacagagcaacactccatctcaaaataaaaa

SEQ ID NO: 29216 - DNA, 122 bp, Homo sapiens
gcccctgttcctggctggcttctgggttggctcctgaagctgcagctggggctgacttcccggcaggcagacaggctcaactaatgaccacagtactttcaggagcccttggagatgccttt

SEQ ID NO: 29217 - DNA, 122 bp, Homo sapiens
ggtgtatcttcagcgagcacatgtcccagcacatgtccccacgcccatccttccatttagcgccacaaacgcagcctcttaagagaatgggaagtttgggagtcacagaacggaagctacca

SEQ ID NO: 29218 - DNA, 122 bp, Homo sapiens
gggctggttcctggatggggcagatcctggggagaatggaggagcacacagaggcaggctcggcaccagagatgggggcccagaaggccctgattgacaatcctgctgacatcctagtcatt

SEQ ID NO: 29219 - DNA, 122 bp, Homo sapiens
acttataatgtctcacaaccatgtctcttttcttcctgtttctcatctgtgaccatcatccggtgctcccagtgtgaacccagaaaagtccaaattctcacaccaatacaaagagcagagct

SEQ ID NO: 29220 - DNA, 122 bp, Homo sapiens
tcccttattctaagacaattgccatgtggtcacagattggcagagcccatatggatcgtccggtagaggtctgagggccacatctctttgacctccacttgtcttggctacttgacccagaa

SEQ ID NO: 29221 - DNA, 122 bp, Homo sapiens
gaggaattcaccctgaaaggtgggggtggggggggtcgcatcttgctgtgagcaccctggcgaaggggagagggctttttctatcagttttctttgagcttttactgttaagagggtacggt

SEQ ID NO: 29222 - DNA, 122 bp, Homo sapiens
cccaggctctaatcggatcagatctaatccgttcgcagccaaagccactagcctagatctcgcacagccaggcccgccataacgcatcccgggagcaaggggtaagaccctccctgggactg

SEQ ID NO: 29223 - DNA, 122 bp, Homo sapiens
caagtgggttaggatttcacaagtaggtggaaatttcataacttctggaggctgagcacacgccaccacatttggctaaatgtacttttctggagagatggggtttcgccatgttgcccagg

SEQ ID NO: 29224 - DNA, 122 bp, Homo sapiens
cagaccctaccggggatactgggaatctggaagcccacttcctgccccacacggggataccggggcagcaccacactccctagccgccctgcctactgtgggataagaaaacgggctcgact

SEQ ID NO: 29225 - DNA, 122 bp, Homo sapiens
gagagtatgggggaggatctgggtgtgttgggaggcggtggcggggagggagaaaagggacggcttcatatctcatgaatatgcatctgtgtttacaaggctacccttactcttgtgtgaca

SEQ ID NO: 29226 - DNA, 122 bp, Homo sapiens
gtcggcctagcactgtggggaggcagccagggaaacagaaaccacagttcacagccctgacgcaggccctgggcccactggctggagaggcctgaattattaacctcgggagaggccagctg

SEQ ID NO: 29227 - DNA, 122 bp, Homo sapiens
cttcctagcaagtgaactgcacccaaatccctccttgttttgtttcagctccaagggaaacgatcgcggcacattcccttcccctctccagatgttggcatgcggggcaccttgtgggcgac

SEQ ID NO: 29228 - DNA, 122 bp, Homo sapiens
tagagttgggcaaagtcatctggcagcagactactctgtagagcgtaggttgtttaccttcgtgatcacctgactgattgagagttggagctcactgctgctgccaggctaggtaagatggt

SEQ ID NO: 29229 - DNA, 122 bp, Homo sapiens
tggagcccctgcccggcctgactggctgcgtcctcaggccctgcgatttccagggattcccgatttccctgagtgtgagcaaataaaggctccttcctgcagcccgagccagcgctcagcgc

SEQ ID NO: 29230 - DNA, 122 bp, Homo sapiens
ctaattgatttgctccaaactgttatccagacccacaaccccacctgggctgatcgtcaccggttgctcatgttactctttaagagagatgaaaggcgaaaggcggagagggctccaagcag

SEQ ID NO: 29231 - DNA, 122 bp, Homo sapiens
tccccttcccaacagatcgagagctcggaggcttggcacggtcggtcccgatggccccagcgggagggtcacggttgagacagcagccccatctcattgtttaaggccggggcttcctcttt

SEQ ID NO: 29232 - DNA, 122 bp, Homo sapiens
cagctacctgcgtaccccggactccaactcccagtttgcaacgccaaagggtctaaagggcgaacgggggcgcattgcatcctgggagcaagaatcgcgataggtctgatggattgtgggaa

SEQ ID NO: 29233 - DNA, 122 bp, Homo sapiens
ggcagacctcacctgcatctgttgtttccaaggaagtgttcaggactgtggccccccacacgcagcagccccccaccgagggcaccatggcctggcccctgccaggtggcatggggtgaccg

SEQ ID NO: 29234 - DNA, 122 bp, Homo sapiens
tgaggagcgtctctgcctggccgcccatcgtctgggatgtgaggagcccctccgactggccgcccagtctgggaagtgaggggcgcctcttcccggccgccatcctgtctaggaagtgagga

SEQ ID NO: 29235 - DNA, 122 bp, Homo sapiens
gagtcccccgcagggatgttccacagggcaggctaaagccgcttaagaagctgcctggaccgtccattactcacctcgcttgccggtcagggaaccaagaaatgtagcaggacgagccgcgg

SEQ ID NO: 29236 - DNA, 122 bp, Homo sapiens
cggagttttcttttgaaggccgagttttccattgtgtgggtaggccacggtttgtttattcgtctattgatggacattgggttgcttctacattttcgctagtgtgaataatgctctgaaca

SEQ ID NO: 29237 - DNA, 122 bp, Homo sapiens
tgctgtcttggaaacggagcgcttttatgctcagtgactcgggcgctttgcttcaggtcccgtagaccgaagatctgggaccagtagctcacgttgctggagacgttaagggatttttcgtc

SEQ ID NO: 29238 - DNA, 122 bp, Homo sapiens
gccacttgcctatttccatccaggaattcctctggaagggtttcaagctactaagaatcacgaaagacaatgagaaaatctgagtacactataggttttcccttgcgtcctgagacaagcca

SEQ ID NO: 29239 - DNA, 122 bp, Homo sapiens
ccgttttttcccagtgattcatggtggcatggtggcatgaatcctggtgtgtagatatctcgcccattctgctattgatatttagatgataatttaaaagataaggctgggctgaatatctt

SEQ ID NO: 29240 - DNA, 122 bp, Homo sapiens
gtgctgggaacgctcagggctggcgccagtcgcctggtccctcgctcgccgcagcctagacggcggacgctccctgtcaaggcctaattcctgcaactcgccggcccccggtaaccgttttc

SEQ ID NO: 29241 - DNA, 122 bp, Homo sapiens
gaaggtgccaactccctgcaggctggccctgtggccgggggctggggtttgagtggggtccgctggagggggcctgcgttccacagcgaggttggagctaacagcttctgtcttgcggcccc

SEQ ID NO: 29242 - DNA, 122 bp, Homo sapiens
atcgagagagggagggagtcaaggtggaacccatagagtgagcctcctgaagacacagagcggttgcctctctcattaattaattaattagttaataaaattaaccccatgtttacattctt

SEQ ID NO: 29243 - DNA, 122 bp, Homo sapiens
aaaataacaggaaaaatgtagtgcgccgagggcctgccagagcggtgtatctggcggcggcggtgccgctgcgctccggcggtaattggttctgcatagctcggggaaattggcagaaaaat

SEQ ID NO: 29244 - DNA, 122 bp, Homo sapiens
cagaagccctggcgttgcaggaattctttggcagttgcagcaccgggcccagctcgccttcgcatccttagtgttggcttcaggccgaggtcgactctgccccctggtggccgaatggctgc

SEQ ID NO: 29245 - DNA, 122 bp, Homo sapiens
aagaaggggcgtctaaaaggccagcccatgcatcttgttcagaccaggctgctccatctccgctaagcccagggatccacttgtgtgtctttctgggataattgtctttagtggcagcctgg

SEQ ID NO: 29246 - DNA, 122 bp, Homo sapiens
ttcccctgtggtcagttggagccagggtggggaatctgcagcttgcagaggggaccactgcgcctcctgcctgaggcgggctggggggtcgttgtcctcgcagcgttaaggcgagtctggga

SEQ ID NO: 29247 - DNA, 122 bp, Homo sapiens
gttagggggtgcgcttttccatcttttctctctttgggggaaggaagggtcaaagtgctgcgaaaggcccttcttggggatggggggcaaatacgaaccatcatttaatccgctggcgccgc

SEQ ID NO: 29248 - DNA, 122 bp, Homo sapiens
accccccactgtgccatcccagccatgcccttggaactgcatcctgtcggaggtcttacccgtagggatgatgtggtgggcacagacaccaaggaacagaaggctggttactatggtcatca

SEQ ID NO: 29249 - DNA, 122 bp, Homo sapiens
tctgaatcctgcctgagaattgcagcaagcagaaggcagaccagccagctaccccagcagcggaagtaagaaatagggttgctgtgttgagccaaaaaaatgcatcagggcaaaggaatgat

SEQ ID NO: 29250 - DNA, 122 bp, Homo sapiens
cggggcggggtcggaggcggggtttgactgagcctgcgtcgggctctggataactgggggcgggcttgggagggcaaggggcgttaccgggagtctcaattgcccgcgtgcttaccccagtg

SEQ ID NO: 29251 - DNA, 122 bp, Homo sapiens
caaggaaggcaggcaagtgttacaaatagttagaaactgtaaaatgaggtgcgacatttccggaaatcagtcagatctagtattagataatactaattaacaacaactggccgtgaaagaag

SEQ ID NO: 29252 - DNA, 122 bp, Homo sapiens
caataggtgaggtctgtatgtcctcaaaggacaggggagagactgaccccagagtgatgccgccacctaaataaggaactgaaggcaattcaagaggagggctgtctgaatggttgttggga

SEQ ID NO: 29253 - DNA, 122 bp, Homo sapiens
cagggtcctgagctgagttctctgggggacacaggtctctaggtggatgtgtgatgtgatcggtgggtgggtcaacgggaacactctctgttccctggaagaatctcttttcccatgatctg

SEQ ID NO: 29254 - DNA, 122 bp, Homo sapiens
tgattatatgtactattattatctcattttactactgtggaaactgagatacgaaacttgcggagtgaggatttgaacctaggtcatactcttggccagccagagacaccctaagccccagc

SEQ ID NO: 29255 - DNA, 122 bp, Homo sapiens
ttgggcttcctttccgttcatgcttcctggccctgcctgtgtgcacattcagatgttcaccgtccccatcctttctctccagcagtgatggaggcgcaggggcctgaagcctgggaatgcat

SEQ ID NO: 29256 - DNA, 122 bp, Homo sapiens
ggctctgtaaaagaacatgcctagcagccactggggtttgagagtgctagtaacccagaccgaggaggagggcatctctccagagtcattcaaagagagtgggtaaagctaatcgtttttgc

SEQ ID NO: 29257 - DNA, 122 bp, Homo sapiens
tgtaggggccggcggtcaaagcctgcccggcgccacctgtgtgccctcccgcccgcccgacgcctggctcacattgatgaggaaagacttgctgttcagcaggttggagaactggtagaggg

SEQ ID NO: 29258 - DNA, 122 bp, Homo sapiens
cacagaggcaggaaaaggggaagtgggcactgacacctggggtgaaaaagggtgggggtgcggctttgtgaggaaagaatttgcagagactgctaaactggggtctgctaggataccccact

SEQ ID NO: 29259 - DNA, 122 bp, Homo sapiens
cgactctttgacctcagcaattttacttctaggaatacatgtatcctctagaaatactggcgaagtttggaaagatatattttccaaatgtgtattacaactttgtacgtgaaagattgaaa

SEQ ID NO: 29260 - DNA, 122 bp, Homo sapiens
gttctccaacccgggcctcactataggtcaaaatgaatgcagctgcccaacactgtgatgcgagctcgttcacactgacggacacttttctcatgttcacgtggtaggtcacagagcagtag

SEQ ID NO: 29261 - DNA, 122 bp, Homo sapiens
ccgggcccgaccagaggagggcggtgctgcagggctggtccgggaggtgacgaccggcttcggagagtctatcatggcagctcggactggtcatacggccttgagaagggtagtctcgggat

SEQ ID NO: 29262 - DNA, 122 bp, Homo sapiens
gcggcggcgccagcgacccagcgagcctcggcggaacagccgggggcggaggagaccgcccgctcccagcgcccagcccgagaggggaagtgataacaaggacatttccaggaagcttttcg

SEQ ID NO: 29263 - DNA, 122 bp, Homo sapiens
aaacccaggtggcggtttgtcactctatgaacccgcctgccgtgtttccgtgcccccgtacgaggtctgggatgggaccctgtgctttggcagggaaatgacttggtccagaaacctgaagt

SEQ ID NO: 29264 - DNA, 122 bp, Homo sapiens
aaggagggaacaaggaagtccctcacttcaaggagctaggaggacgcgagtccggcaaaacgggtcagacgcggagtcccaggctaagaggatcatccgccactctccccgggagtcctgct

SEQ ID NO: 29265 - DNA, 122 bp, Homo sapiens
aggctcctcgtttgttggtcttctttcatgcatacgaactctgccgagtaacatgtatctcgatcttgccatcttttctctctgcacagacagcaatgttcttactcctctcctgctgtaaa

SEQ ID NO: 29266 - DNA, 122 bp, Homo sapiens
ccagccctggctccaggacagggccgaaggcaggatagacggagcaacgggtccggctgccgccgggatgttgcagcacagggcctcctggctgcctggcctacaggccgcccggattcagc

SEQ ID NO: 29267 - DNA, 122 bp, Homo sapiens
ctggaggataaaatcccacactccccgcttggccgggtggcccactgcccgtctggctttcgaggagataagccgcctgctcaggttcacgttcgggatcaaatgaacccacttaatccccc

SEQ ID NO: 29268 - DNA, 122 bp, Homo sapiens
tacttccaccgacaattcctgggcactgtctgagcttcattccctgattccctgagaggtcgctggggaaacgctcgggccaaggaggggatacccctgctcagacagcgaccccgctgggt

SEQ ID NO: 29269 - DNA, 122 bp, Homo sapiens
cggttcggaggcggggcaggtgggggcgggcccaggtagcaggtttggctgcgcgggggccgcgcgtcggaggtaaatactagggcggtgggtgtggggagccggggccggcccgggacgcg

SEQ ID NO: 29270 - DNA, 122 bp, Homo sapiens
gatcctcccacctaaacctcccaaagcattagccattatatagatatgagccactgcacccggccctcaaagagctttcattaccatatgtttcctccctcacaatccccagtcaccctggc

SEQ ID NO: 29271 - DNA, 122 bp, Homo sapiens
ttccactttgggattatatgcagttgggattatatgagcccggggcttgcaccatgggtacgtgaggtgaagacatctgcagcagcaggattaattagcctaagatgggcatatggaggcca

SEQ ID NO: 29272 - DNA, 122 bp, Homo sapiens
caaaagcaagtatcatgtctgatttaacagggtatattctattcttttttttccacaaggcggtgcccggttcggtcccagacgcggccaccaaccgacgtaaagccggtgagccgctcggg

SEQ ID NO: 29273 - DNA, 122 bp, Homo sapiens
ctgtctataggtgtgggtctggatgtgggtctggatgtgggtctgtgcccttggatggggcgtgtctgaaggcatttgctatatgctcagctgtggacctataagtgtgttggacatcagag

SEQ ID NO: 29274 - DNA, 122 bp, Homo sapiens
cggaaaggacatgggagagagctggaggaagctgacagagggaagggaagaaccccccgccgtcaaaggcaggactcaagaacgctgcctttcgtgcaagtgagatgggctccgctgcccgc

SEQ ID NO: 29275 - DNA, 122 bp, Homo sapiens
ggtgctcctgggcgattggttggcagaatgagggcgctgcgcaaaaacggagaagccgagcgctcggagctcagaaactgccagcccagaccacaggctcagaggctgaagcaggaggaagg

SEQ ID NO: 29276 - DNA, 122 bp, Homo sapiens
atggccatcaccctgcgggtggagcccaggctccctcccatgtcctgtgtgcttccaacacgcccagctgcatcctttttatcaatggattgtgcttttatgttttatctaagaaaattgtt

SEQ ID NO: 29277 - DNA, 122 bp, Homo sapiens
ggggccttatgtggactaggaggcagccgcccccaccagcacccactctgtagacccaggcgtctggctcccagcacccacggaaagagcctggctaggaaactgcagcctggtgcctggca

SEQ ID NO: 29278 - DNA, 122 bp, Homo sapiens
agtgatcctcctgcctcagcctcccaaagtgctgggattacaggcatgagccactgcgcccggccatctgtggaagacatcatttgtggaggtcagtaaggcaggaagcctgaacctctacc

SEQ ID NO: 29279 - DNA, 122 bp, Homo sapiens
gtctctccgctctcccagctgagctgtcttccccggaggccgggctgcaacccgagaaggcgccgcgccatcggccctcaccctgctccgcctaagctgctgcttttcctctgcaaatgccc

SEQ ID NO: 29280 - DNA, 122 bp, Homo sapiens
tgctgccgccaagcacctgacacctgtcaccctggagctggggggcaagaacccttgctacgtggacgacaactgcgacccccagaccgtggccaaccgcgtggcctggttccgctacttca

SEQ ID NO: 29281 - DNA, 122 bp, Homo sapiens
aactcagataaagagtaggagtcaaaataatgtaagcttagatttagatatagccaattccgagacagtcaaataatagatttttactctgttgcttaattacaggggttgaaacaagaatg

SEQ ID NO: 29282 - DNA, 122 bp, Homo sapiens
tgggtgtgggctggggcatacggtcctccctccacccgcgacgcgaggctggggacggcgcgcactcacctggcaatctaccatcatcctcagcctcggtggcacatcgccggccccagggc

SEQ ID NO: 29283 - DNA, 122 bp, Homo sapiens
tggcacacctagctaggaccccatactgggcaggcgatccttccgagcatgagcacctggcgctagcgaaccacaattcccagcacgccaggcgcccgtttccggggcgcgccgcggaaccc

SEQ ID NO: 29284 - DNA, 122 bp, Homo sapiens
cgtcacccacggacatgaccgatggcagaacgctgaggtacccacgatgaaggacgaggacgcatgctggcaccgcgccagtgtcagccacagacacacaggataacaaagctgataactgg

SEQ ID NO: 29285 - DNA, 122 bp, Homo sapiens
actgcagaagtgggcccaggaggctgcatttgggacaaactgctggagagaaggcaatgccggtggtccccatgcccattagggaagttctgggttaagatggcttgaggggttggctctcc

SEQ ID NO: 29286 - DNA, 122 bp, Homo sapiens
tctgcagaagccatttcaggagtacctggaggctcaacggcagaagcttcaccacaaaagcgaaatgggcacaccacaggtaagactttaatccggtttcttctcccctctgggaagtttcg

SEQ ID NO: 29287 - DNA, 122 bp, Homo sapiens
cacttggtatgtgggttcctacatgaaactcctgtcatggttaaagcttaaggttaaacacgttaatagaagccaatagaatggctctattgaattgtactgaacttctttttcagcagctc

SEQ ID NO: 29288 - DNA, 122 bp, Homo sapiens
aaagaccttctaatgggacatggtgtgaaggcagaagacagtgatatcaattacctgacccgaccttatgtaggcctgggctagtaggtgtttgtgtcttcatttttaacaaaagttaaaaa

SEQ ID NO: 29289 - DNA, 122 bp, Homo sapiens
ggcccaatcctgaaggctttctgagggcaataaggccctgcctttaaacaaatgaaaaaacgccaggcacggtggctcacgcctgtaatcccagcactttggaaggctgaggcgggaggatc

SEQ ID NO: 29290 - DNA, 122 bp, Homo sapiens
agaatcccagcttaaaacacaagttcacgattacataacactgaggctgattgaatatgccgagcacagatgtgcatttaattgaaataacctcaactacatgtcccagaagtaacaggaaa

SEQ ID NO: 29291 - DNA, 122 bp, Homo sapiens
ctgcacatttgcataaatacaaacaccactttacatataaaaatcatataagcacatacacggatgcaagcaagcatggagaaatgcacggaagcataaacaaacagacaaagctaagtaaa

SEQ ID NO: 29292 - DNA, 122 bp, Homo sapiens
ctcgaactcctgacctcacgatccaaccacctcggcctcccaaagtgctgggattacaggcgtgagccactgagcctggccatagtgatataatttttaaattgcacacgataagacaacat

SEQ ID NO: 29293 - DNA, 122 bp, Homo sapiens
tgagcagtgaggttgaccagaggccgtttttgtcaatatcttgattttggtgagttttggcgggcttctttaccacaacctgttttatcagcaagggttttgtgacctgtatgttgtgctga

SEQ ID NO: 29294 - DNA, 122 bp, Homo sapiens
tgcgtgaatcactttctccattgcaatccccgtctagacaaatcggctctggccaggcagcgggcaaggtgaactgttgggtagttacgctcgcaggaacggaatcacgcaatacctgtttt

SEQ ID NO: 29295 - DNA, 122 bp, Homo sapiens
gatttagacggaggattttcactgcagccctattaagcaaagcccttgctaaaggaacgtcgtgatattcatgacgctggaaggtcatgtccttacatgtttggtcaaattgggtgtcggtt

SEQ ID NO: 29296 - DNA, 122 bp, Homo sapiens
gccacgccggccaccacggccaccactgtcagcagcacaagcaggttggctcgaaggcagcggcgcacctggtcccgggaaccgcagtagccgcctgctgccgcgccttggtcctcgatgga

SEQ ID NO: 29297 - DNA, 122 bp, Homo sapiens
ccttggctcaggaagatcaatttcattcctgatactgtcaggctagtctggcatttgctgcggtttctcagtcattcacaatattggttgttttatcttattatctaagtgttactgtctaa

SEQ ID NO: 29298 - DNA, 122 bp, Homo sapiens
ccagggactccctctccctgccaggacacgtccttggctcaggcttaggctcgggtgggccgggggtcccggctccccaactttctgccgtgcaacattgacattggggtcataaaaagcac

SEQ ID NO: 29299 - DNA, 122 bp, Homo sapiens
cggcagtaacttaaataaatcatgggccgaaacacactgccgcccggaatgcacagggcgcgtgtagcagccacagacacgcggtggaaaagtgctcacactcttaggcaatcatgacctta

SEQ ID NO: 29300 - DNA, 122 bp, Homo sapiens
tcacagctcagcttcgtgcctctggttccagatgtgcaggggccagggcttccagggacacgcccccgtgggcctccagggagccaatcgacgcgcagaaggcggggccctgggagcgacaa

SEQ ID NO: 29301 - DNA, 122 bp, Homo sapiens
ctgtcgcttgggcctggctcagcttaccccggcggtgagggtgcgggtcggggacggagacgcgtgcaccctgaagacagtaactaggcctgctctacagagggaaacgcaggctctgagag

SEQ ID NO: 29302 - DNA, 122 bp, Homo sapiens
gtgagccaccatgcccagccagtaggaggctctagtaattgcagacattgtgatacaggccggctggagaagaattcaaggaagaaggaaggaatgaaccaaacgaagttattttttcagcc

SEQ ID NO: 29303 - DNA, 122 bp, Homo sapiens
cctcggggagggcggctggcagggcacagggcgctatctaccccccagccggcagccctgcgcctctgctctccgctttggggtcttgatccgccgcctcctcgctggcagttctcgtgact

SEQ ID NO: 29304 - DNA, 122 bp, Homo sapiens
cctcgctacagcggggctgggcgttcacggcggccgggggcagggccacgggcaccatgccggggctacagacagcgggcatccctggaagcaaagatcaagtttggtaaaaacgtcggaaa

SEQ ID NO: 29305 - DNA, 122 bp, Homo sapiens
cccattggtaaagcattgacggtggttgcggacggcttctgcggacagagccttgggctccgacgtctgcgcgggtaccggcagcacccccaccccgaagggagggcgggacctggatctcg

SEQ ID NO: 29306 - DNA, 122 bp, Homo sapiens
catacatcgtttcttacactcattttcttctgcacagcacctttttttcctttaaccactcgcagatgctaactcattcttcaggactcaattccaatgtccagaagcttttctctgaactc

SEQ ID NO: 29307 - DNA, 122 bp, Homo sapiens
ggtgggcgccggcctgggcgcgggcgtgaaccagcgcatggacagttacgcgcacatgaacggctggagcaacggcagctacagcatgatgcaggaccagctgggctacccgcagcacccgg

SEQ ID NO: 29308 - DNA, 122 bp, Homo sapiens
cgccccctcctgtctggttttcccttccagttgccgggagaggactaggcagccgggagccgggccgtgcacccgctgtggcgcgctggcacctcggcctccgcaaacagattgctcgccct

SEQ ID NO: 29309 - DNA, 122 bp, Homo sapiens
cggaccagtccgcccggtctgactcttgtggtcccgtgtgggtttcgtcgagtgtgcgctcggggccggggcgggaggggcagctcctcattccacctccaggaaatcgaactggaggaagg

SEQ ID NO: 29310 - DNA, 122 bp, Homo sapiens
gggcgggaggaagtcggggtgagtggaccaccctttaggcggagtccttccttaagctcccgcccgcggctccgaactgagtcctctcagccgcccgagggcgctgcgctgagccttacact

SEQ ID NO: 29311 - DNA, 122 bp, Homo sapiens
gggaagacagaggtggccacgtgaggctgggtggggctgtgcacaggggggttgccttcacgctgccagcaagattcttagaaaataaccttccagaagtctgtttggagtttctttttaaa

SEQ ID NO: 29312 - DNA, 122 bp, Homo sapiens
tccatgactgcgcgctggcggcaaggccctgtgcggggcggtggcgggcagaggcggcggcgcacaggaacctggctgaacaccggcacgctcaccatgctgcggtcctcctgcatggtgaa

SEQ ID NO: 29313 - DNA, 122 bp, Homo sapiens
tgtatctcccactcttagctatctgatgttagctgcctttcctaactttatggttctttccgtcacaattcctgcatcaaattcaattctctgatggtctgacgccttgctccctctgttac

SEQ ID NO: 29314 - DNA, 122 bp, Homo sapiens
caggagacaagcccccaggcctgcctgagattcatctttggtttttatcgcaccagtgaacgtgcagacaacagaatggggatggaatctccttgtggcccccagctcagtgctctcccaaa

SEQ ID NO: 29315 - DNA, 122 bp, Homo sapiens
gcgaaggccggccggtcggcgaaggccgagccctgctgcaccagggcctggtggatggcgcgctcgccattcagcaccactatggggcagctgcccaggcggatctggaaaacgtcgccgta

SEQ ID NO: 29316 - DNA, 122 bp, Homo sapiens
ttattagaaggtagttttactggcgatcagaaccgggcgctgggagaggctggggctgcccggcgccccctggccctgtctttgaagtgcctccactggctgggaggctgccctgcagccct

SEQ ID NO: 29317 - DNA, 122 bp, Homo sapiens
gtacgtagggaggtctgagcatgggggatgcctgggtccccgcgccttcatggacacgctcgtgtgtggtgtgccgtgatgcttgctgtgcagcaggccggctggtggagagctttcgctgg

SEQ ID NO: 29318 - DNA, 122 bp, Homo sapiens
cagctccagacccacgtagtcaccaccaaccctgaccgtgtgaagtacaaaggtaaattccggctctacctcagggatgggctcaaacttcaaatcctgaagcctgcttttggggtggggct

SEQ ID NO: 29319 - DNA, 122 bp, Homo sapiens
ataacgttcccgatgcctcccttgatagttttttcctctacaaaatgttgtcactgctgccgctcgttgttcccactaggcggcactctaagctcatcgtcaatgcgaggaccgagcacctg

SEQ ID NO: 29320 - DNA, 122 bp, Homo sapiens
ccccaactgcaggtctaattttggacgctttgcctgccatttcttccaggttgagggagccgcagaggcggaggctcgcgtattcctgcagtcagcacccacgtcgcccccggacgctcggt

SEQ ID NO: 29321 - DNA, 122 bp, Homo sapiens
cacgtctcttggttgcggacggtaagggccacatagacttgaggagcccgttggtgttcccggtaggcagccagcctccgcaggaccccgaccagcgacacaatggcttctgggcaatacgg

SEQ ID NO: 29322 - DNA, 122 bp, Homo sapiens
tagttattttgggacattctcgccctgctgcttgggatgaagaggtcctaattaaatacccggaccttccaacgggtagattttcaaagaagatgcccagctatgctgcatcctcatccaca

SEQ ID NO: 29323 - DNA, 122 bp, Homo sapiens
tgccgctcatggcccacacctgggttggtctcggaagatggcctctgggctgtgatgctccggccagggccacggctcagcccctctcttgagccgccttccgttttcacttgtgaatgacg

SEQ ID NO: 29324 - DNA, 122 bp, Homo sapiens
cacggcgtgatggacatcacacacgacagcctgagacaatccaggaattccctggtgactcgaggccctctttgcacaaaatgagttctctctccattgccgtgtatctctggggttatctg

SEQ ID NO: 29325 - DNA, 122 bp, Homo sapiens
catcaacaggcatatggatttataaatgtacgtgtaaaaccattctgcggatgaataaaccggtgaacatttatacctcatggagattttgtatatagtgctgagatgtagattgtgcaaag

SEQ ID NO: 29326 - DNA, 122 bp, Homo sapiens
ccctgccccatgatcagggctgcatttgctcttcagaggcctttgccaacacagggtgagcgggaccctggaaggtgagaagggaggatggcagtgcagcccggcttccctcagacagaccc

SEQ ID NO: 29327 - DNA, 122 bp, Homo sapiens
gacccacccgccccttcctgccctgtttgcgcagggacatcacccacatgccccagctctcggaccctgcagctctgtgtcccaggccacagcaaaggtctgttgaacccctccctccattc

SEQ ID NO: 29328 - DNA, 122 bp, Homo sapiens
gcgcccggccagttctcagaattctgacactggggccgggagactagaagaatcttccagcgcagggcaggtgccaggaggccctgatacgggctgcatccttggaaatcagtgctgcccct

SEQ ID NO: 29329 - DNA, 122 bp, Homo sapiens
cagctccttctcttgcccctgtgccttctgctgcttgtgccagttgtcgtgagagatgcccggtgctgggcgctggttggaaagaaaaacttaggtatatattttctttttctttccttcct

SEQ ID NO: 29330 - DNA, 122 bp, Homo sapiens
actcggggaggtgggtgaattcccaacaacttcacagccagcggttgttatgctgggcaccgcatctggcggccgtaagagcagccttcttggttacggtgaccgtgaccctcccactgtct

SEQ ID NO: 29331 - DNA, 122 bp, Homo sapiens
caggcggggcctggactgagggaggaggcaggaagaaactcacaaagagttggcagatcacggatggagggcagcatctcccaacagcctgggcggccgctgagacccagagaacccaagga

SEQ ID NO: 29332 - DNA, 122 bp, Homo sapiens
gtcctcctgagggaaccagggcggtgtcaggcgggtcagggcaccccacagcccccatcccgacggaaggaagccctaccttgtagttgctgtgggccagcccgtagtctccgatgcgcacg

SEQ ID NO: 29333 - DNA, 122 bp, Homo sapiens
gaagactggggagaggagcacccacaccccctggactcgcagccgccactccgggtttggcgtctctggctgcagctcgagttaccgccagcccccgagccctccggcgagctcagctgagg

SEQ ID NO: 29334 - DNA, 122 bp, Homo sapiens
tcctaagcctctttcattcttacattctttagctttttagtcagccttctttgtgactaacggtttttttttttttaggatattctaattgtatcaattcgttcctaaatgagtcatcagaa

SEQ ID NO: 29335 - DNA, 122 bp, Homo sapiens
ccgccaatccagcgcgcctcgggcgtgtgggcaacaggactcggggcggggcctgtgttgcgaccctggccacaccctcaccgcctgcccgcaatgattggttttccgctgagagaaaatag

SEQ ID NO: 29336 - DNA, 122 bp, Homo sapiens
caggttcttcaagctcagcagaagtggactttctccccgttctctctccgcaggagatgccgtgcactggcggttctgcaggtgccacgcctgtcactccccagcgctgatttcgtcccagc

SEQ ID NO: 29337 - DNA, 122 bp, Homo sapiens
aaactgagcaatacccagagaggatggaaatggcgaagaggcctggcgcctgcccgctcccgcgcatgctccctgacttcaccaaggtcacgctgcagcccgcaggaatgaaaatccacttc

SEQ ID NO: 29338 - DNA, 122 bp, Homo sapiens
ctctttacctgcttttttcccttagtccaaaacatggtggtagacaactcctgggtgtcacgtgttggatgttcagcagtcagtagagactgacctcctctatgctccagtgttaaaatctc

SEQ ID NO: 29339 - DNA, 122 bp, Homo sapiens
gcagtttcccgtcagagtatctgaggagcctgtgaggcgttctggagctttaaggtcaggcgccttccgggagccgtagccccggccccgcccttctgcccgcgcgttcctcactgcgcatg

SEQ ID NO: 29340 - DNA, 122 bp, Homo sapiens
aagagggagtggctgaatctctagcaggaaaacagtgggagcctttgttcatctaggaggcgagactgagagagaaagtaccagtaggaaaggtcaacttccagaaaaggaaactagagact

SEQ ID NO: 29341 - DNA, 122 bp, Homo sapiens
acagccttccaaccaggtggggaccccacccacggactcaccggaactgctccgagtgcccgtcaagagttacttccggtttccacggagctccgccccttaggggggttctcgctcggccg

SEQ ID NO: 29342 - DNA, 122 bp, Homo sapiens
ctgggtcaggaactcagcagtgcccttcaccagctgctggagcacacctcaggcaccctgcgttccacctgccagcagctgcatgtgctgcttgacaaagagaatcaatgtgtctcgagaaa

SEQ ID NO: 29343 - DNA, 122 bp, Homo sapiens
ctaccaagcttgcaagaccagttgaagctgactcaaaaatcctaacattcagctgattgccggcaggcttagagtcaggcatctgctgcttcggtgggggcccaacgcgcatgctgggcgcc

SEQ ID NO: 29344 - DNA, 122 bp, Homo sapiens
ttctccatcctcataactaggatggagacactgaggctcagagaggacaggttgcctgctcgagaccatatagctcctaagtaccagagtcaatgtttgaaccgagtcttacctgcagtagg

SEQ ID NO: 29345 - DNA, 122 bp, Homo sapiens
ctctccgggtggccgggcgggcggcgcggagacgtcggcgggcctgatgtctgccttgagcgcccgcggtcctagcctgcctgtacgcgcaggtcactgtaggtgatctggggacgggggaa

SEQ ID NO: 29346 - DNA, 122 bp, Homo sapiens
acctcaggtggtctgcccacctccgcctcgcaaagtgctgggataagaggcgtgagccaccgtgcctgtcttcaacaatgatttctaattgcattttatggtggtgattgaacataatgtac

SEQ ID NO: 29347 - DNA, 122 bp, Homo sapiens
ggggtccgcaagaaggagggtcttggccgcgctcgcttttccgccagagaggagtgcctgcgccgccggagcctccgagctcctggacgtttggcttacgggcatctggggctgggagtggg

SEQ ID NO: 29348 - DNA, 122 bp, Homo sapiens
ggggaggactctccccacctccagcctccggcagtgtccgccaggcagggcgggggccagcgctggtgttgagtagtggaccccagggggatgactaagccttgcctgcgagcagactcgag

SEQ ID NO: 29349 - DNA, 122 bp, Homo sapiens
cggcaggcccaggttgcaccggctacaaacattcccgacacccttgggccctagaagagccgttcgccacccgcggggtccccgcaacgccggtggtcaccggccctaagccgctgggcgcc

SEQ ID NO: 29350 - DNA, 122 bp, Homo sapiens
cttctccccgccccccagttgttgtcgaagtctgggggttgggactggaccccctgattgcgtaagagcaaaaagcgaaggcgcaatctggacactgggagattcggagcgcagggagtttg

SEQ ID NO: 29351 - DNA, 122 bp, Homo sapiens
gctgcttcagcttctgccccatcgtccgcacccagggcaccatctccgtaacggcgaggccgagactgcgctactggctgaggcagaggtcaaggcgaccccccatccacacctcgcgtccc

SEQ ID NO: 29352 - DNA, 122 bp, Homo sapiens
tttgcccgagtacttgtggaaggtggacaccatcacatccagggccttctccagagggcacgccatgacagcagtcaggatctgggagcaggaggcacagagaccgtcttattaatcccacc

SEQ ID NO: 29353 - DNA, 122 bp, Homo sapiens
tggaaagaaagtcttgcctatctgtcatagggaccccaaaatgaattcctaaaaaagcaacgctgctctaacagcaactggatcggaaagcagagaaagcagagatgcaacctcggccctgt

SEQ ID NO: 29354 - DNA, 122 bp, Homo sapiens
cacctggatgactcgctgcttgagtttattatccacgaaccctgcaggtctgggcttcatcgcgtcggtcttccaagccacagctcggaccgccagctcctagtcaaccgggggcctcgtag

SEQ ID NO: 29355 - DNA, 122 bp, Homo sapiens
gccgcaggctgtgcagcgcgacccccgcggcgcttggtgggcggtgcatctctgcggcgccgaggccccgaggacttctgggaattgtagtcctgtccccttgggagcccgcctggcacctg

SEQ ID NO: 29356 - DNA, 122 bp, Homo sapiens
atgagtttgactctagggacctcgtacgatagactcctacaggatttgtccttttgtgaccggcttattccactgagcacaacgccctcaaggtgctccctgtcatggtgtgccggccgttc

SEQ ID NO: 29357 - DNA, 122 bp, Homo sapiens
aggtatgggatgcggcagcagggtagaggaggcagccagaactgcaaggcaggcagaagacggagcggagtagacaggaagcagtcccactgacagggaatactggaagatatgagaacaac

SEQ ID NO: 29358 - DNA, 122 bp, Homo sapiens
cgcgcccggccgtagcactctctcttactggtgcctagcacatgctgccttgtccctaatcggcagcaattttatgtgattgctttgtgcatctctaaggaacctctgttaaacaattgttg

SEQ ID NO: 29359 - DNA, 122 bp, Homo sapiens
ccaccgggcggagggcgcgtgtgtgcgcgcgtgcgcagtgtgtgcgggccggggtcgccgcggctgcggcctgctgtggttggtgggttcctctgagattttgttgtttcggtcctacagat

SEQ ID NO: 29360 - DNA, 122 bp, Homo sapiens
caaggaatagtctgaggcgggtatccaggcctgcacgagtcagcaagtttggcacgcaggcgcacacctccacttgttatataaactgtttgtgtaagttcatacttgacttggagccacag

SEQ ID NO: 29361 - DNA, 122 bp, Homo sapiens
cgtctcggccagagtccaagcacacccgtgctgagaggcgaggcgggagttaattctgctcgggactctggtggcctgagaaggctcttcccgcagaaacagcctcatcccgagagcgctgg

SEQ ID NO: 29362 - DNA, 122 bp, Homo sapiens
ttcctgtcaagcggcagagtctctttcttcactttcttcaatatggatggccttgtaactcgatgtggccaactaactatcccttctcactttgagtaggtatctcttcttatgctgagacc

SEQ ID NO: 29363 - DNA, 122 bp, Homo sapiens
aaagatgaagcgtcgccctggcagcgtttgaaacacggtcattaaggagtgaaatcggcgcggtgagttgtgcaggagaacgtggcgaaacctccctggagacgaagagccccagagcgtgc

SEQ ID NO: 29364 - DNA, 122 bp, Homo sapiens
gcaagtctggatacttagcagcacaggtcctgttctaggactgtagtccctcttggggtgcgctggacggagaagggagacttttcaccagtaatggctcttaccgtagtgccatctttttc

SEQ ID NO: 29365 - DNA, 122 bp, Homo sapiens
acgggacggggcgggccagcgggatggagcggggccggagagcaggactgggcggagcagcgggacggggcggagcagcggaacggggcgaggcgggggagcgggatggggcggggaaacag

SEQ ID NO: 29366 - DNA, 122 bp, Homo sapiens
aacttacgaggatgctggccatgatgatggtggcggtggtaaggggagttcctctgactccgacctcatgtctttggcaggagttgaaatgaataataaagctgggtttatgattagataga

SEQ ID NO: 29367 - DNA, 122 bp, Homo sapiens
tgaagctttcctccaaaccttgaaccaatttagtaccaggactgaggcagatgagagaaccgggcaagggcccaagggcacaaagcgtctcagactgtctggagcagaaaacagtacggttt

SEQ ID NO: 29368 - DNA, 122 bp, Homo sapiens
cttaggaggcacagggggaacgtgacttggcccgggtcatgcaggaggcacctgccctcccgaggcatccgcagttctgagagttcacagcccctgactctggggcacaatcgccccaacct

SEQ ID NO: 29369 - DNA, 122 bp, Homo sapiens
atggacagggcggcgcagcgcttccggctccaggtgactgccggagcgtagtgggatgggcgcggcctgagggtactcgcagcggcactttcagccgccggacccgccgagggacaggggat

SEQ ID NO: 29370 - DNA, 122 bp, Homo sapiens
tgagcccgggaagtcgaggctgaagtgagccgtgattgcgccacagcactccagcctgggcgacacagcaacaccctgtctcatggaagaaagaaagaaaagaaaggaagaaagaaaaaaaa

SEQ ID NO: 29371 - DNA, 122 bp, Homo sapiens
caaccaggaaggcagcagctgctgtgcttctccaactgcctttcccctgccttctgcctccgggtgcttccaaccagtctgctgctcctgccccacccgtgcacgacagccggcaccacctg

SEQ ID NO: 29372 - DNA, 122 bp, Homo sapiens
ctcagttcatgcccgatccctgcgcagctttgcggaggtgctgggtgtggagtgccggggcggctccaccctggagctgtcactgaagagcgagcagctggtgctgcacacagcccgggcaa

SEQ ID NO: 29373 - DNA, 122 bp, Homo sapiens
atgtcgaatgagagttaccaaactgccaagacaaaagaaagcccagaagtgtcagcaatacgtggcagacaagcatccaccatcccactcccatggctctggctagtttttccagacagcaa

SEQ ID NO: 29374 - DNA, 122 bp, Homo sapiens
ttgttgctcctctctttgacacactctttctttccccaaatatttgtatgacttgctccccgcttgtgcattcaggcctctctgttcaaagcttacctcctgagataaaccttcccagacca

SEQ ID NO: 29375 - DNA, 122 bp, Homo sapiens
tccctgtgcaccttgtttcccattgccaccgacttcgtgtaaactgtagtcccgaggacacgagagatacacagacctggccccgtggacacgctctgtgccacggcttccaccagacggat

SEQ ID NO: 29376 - DNA, 122 bp, Homo sapiens
cggggtgggcgccgcgtgcgggagcgcccagcgctgggggcagtcctggagccagaaccccgcccagagtcatcctttctgctgattcttgtcaagagcctagggcctaggacacagcggca

SEQ ID NO: 29377 - DNA, 122 bp, Homo sapiens
ccccgacacgggctctgtgtatgtgctgcgtgtccgcggctgcaacaaggccggctacggcgaatacagtgaagatgtgcacctgcacacgcccccggcacctggtgagtgggcaggcacag

SEQ ID NO: 29378 - DNA, 122 bp, Homo sapiens
aagggattcatcggattccgactccgaatccgagagcgggggagtgtccatctcgccgcacgcacgtcccacacctacaggaagaaacggggtatcccgagacccaagcggctagcagaggg

SEQ ID NO: 29379 - DNA, 122 bp, Homo sapiens
ttgcgcagcagaccgatttgcgagccgttgagggccatgtagtcgcagtcggtgacgacccgcactcgcaccccacgctggtgcagcaactgcacggcgcggcccagctgcgggctggagaa

SEQ ID NO: 29380 - DNA, 122 bp, Homo sapiens
caaaaccgaagaaacaaaatcttaaaggctatggtttattgcaggggattgggaggggggcgggaaaacatggagaattaagtcagataatgctggcagccaaaggggcaaaatggcctgtg

SEQ ID NO: 29381 - DNA, 122 bp, Homo sapiens
ttcccccaagttcaagcttgtttagacaaagtgtgagtcagtgcctgtgttgcacgccagcgttctgtttccctctttctatttctaaccatctgtgttacttcttcagattttgggataca

SEQ ID NO: 29382 - DNA, 122 bp, Homo sapiens
tccaacaatcagcgaagtaggaaatgtttcggagacactaattggctcgattgcctggcgcgctcctggaccgaaagctgtggctggttgaggcgttgcctggcgacgtgttactcagtggc

SEQ ID NO: 29383 - DNA, 122 bp, Homo sapiens
tagagtgtagcaggtacaggttgcagacaaagcaagagcataaaaaggattaataccctacgcgagttgcagtgtacaacagagagcatagcaaggaacagattatctggagtgaatggtgt

SEQ ID NO: 29384 - DNA, 122 bp, Homo sapiens
cttactctgggatgacaggtgtatacgaggatgtagctgggcaagccaggcctagtggctcgcacactcatcagttagatggtgggtgctggtgctgctggtgcatcatgcatacaaggctg

SEQ ID NO: 29385 - DNA, 122 bp, Homo sapiens
ggggagagaagggagcgggtgaggtggggcgcggagggcgctgctggccagggagccccccggggaaccaagggtccaccaggacccagagagagactgggaggagagacccacggagaccc

SEQ ID NO: 29386 - DNA, 122 bp, Homo sapiens
cggaaccacaatgtttttctagtcttggaaaacataagatctctccaaaccccacattcccgtcaaatccacttttcaaagcagcccagtctctcctgtatttttttctttttaattaagat

SEQ ID NO: 29387 - DNA, 122 bp, Homo sapiens
gcagccatggccctgctctatggccccgtgcagtggctgcgcctgtggacgcagtggcgccgtgccgcggtgctggaccagtggctcacactgcccatctttgcatggcccgtggcctggtg

SEQ ID NO: 29388 - DNA, 122 bp, Homo sapiens
gcgttcactactgtagctcattcagaccccactctccaacctactgtccaggcacagaaacgacagttaaggttcccccggaccgtacgctggaccttgcctccccggctcctaacgggaga

SEQ ID NO: 29389 - DNA, 122 bp, Homo sapiens
atgccctgcgcgcgccccagccccgcgtcgggaacaagtgcacggtggttaactccgaagcgtccctcagtggagcaccaaggcaggactggcttctcagggcacttggcagcgggacactc

SEQ ID NO: 29390 - DNA, 122 bp, Homo sapiens
tggtctctgcattttctctttcagcctcagagtcttctttttgggccaggggtgggtgtgcgctggtgggggttggaagtgagccatcggaaagcccatcggaaagccccagcccggagcct

SEQ ID NO: 29391 - DNA, 122 bp, Homo sapiens
tttttgtgttctgaatggtggcgtcttaagtgttcctcaagagttgcacgtttgctacagcgcctgtgagccccagcgttctctgaatcactttgcgtaccatcatcatgtttatttcctgg

SEQ ID NO: 29392 - DNA, 122 bp, Homo sapiens
ggtgtgcaaacgagacgcgaaggaaacgcaaaccctcgggcgtcggcgcagcctcttccccgagcctgggtctgtctaatggcccagagggagaggtcgcacccccgacccctggcacctgc

SEQ ID NO: 29393 - DNA, 122 bp, Homo sapiens
agggattcgatttcataaacacagctcagctctgcagatcatctggcccagtccaggacccgggtttgtaatgatcttgttcagtcatggtccagcctgtgtatagagaccctaagatgatg

SEQ ID NO: 29394 - DNA, 122 bp, Homo sapiens
tcgatgttcacatttcaaaaagacggctccaaggccctaaagaaagacatttatagggaccgggcatggtggctcacgtttgtaatcccaacacttttggaggctgaggctggaggatcact

SEQ ID NO: 29395 - DNA, 122 bp, Homo sapiens
ctctccgaaccctgccaacctctctccactatccagtttcaaagccactttcacattttccggtatgtttacaacaatatcatattcctctaccaattctcgatattagtcctttcttacat

SEQ ID NO: 29396 - DNA, 122 bp, Homo sapiens
ggcagggcccagcagcaccagcgcccaggcgggcagacgggggtccatggtggtgggtggcgccggggccaagcggggaccccctttataggcgcctgggccgtcccagctgggggccttgg

SEQ ID NO: 29397 - DNA, 122 bp, Homo sapiens
ctcggaaatttttgtctccttcctgcagaagagagtgtggctctatctgaaaatcatggacgagtagtccagggtagttgcttggaggtcccacagtcctcagacctcctgggttctgattg

SEQ ID NO: 29398 - DNA, 122 bp, Homo sapiens
gtggcacaggaatgggggttgcgtggtggatgcagagcggggtgcatccctggatggcatcgctggagcgctcgccgctccggcgacatcgcgagcggtgcaaaccgggccgcctggagccc

SEQ ID NO: 29399 - DNA, 122 bp, Homo sapiens
gtaaccaaaactacgttccagctttgggctgcttctagtctagaggaagaagcagatactcgtcaagccactcgcatgaatgtgcatcaacaagctgcgggaggtgctttaaaggcaaagat

SEQ ID NO: 29400 - DNA, 122 bp, Homo sapiens
tcaccatcctgcccagtcaaccaccagtcagaaccagtcattgctaggcgggcagctccccgtgggcaacggctggctgaaggatctgtaccctggcgctgcagggagctgggcgttcagcc

SEQ ID NO: 29401 - DNA, 122 bp, Homo sapiens
gaggcctgccctgagcccccgcctcctccttctcagcctccccttctccagcctccacaccgggagattccagaagcttctctgctgactctggaggttctggtttctgagtttgagcctct

SEQ ID NO: 29402 - DNA, 122 bp, Homo sapiens
tctgaatcaggacccctttcctgttacaacattgttcatcttaaaggcttcagagcccttcgttcttacagctctttgtaaataactaggtctatgtggggaatgtcacttttatcactgat

SEQ ID NO: 29403 - DNA, 122 bp, Homo sapiens
tccagccgggtgcaggctggctggggtggggctgcccttgaccttgggctcttcctcctccgccagatcctcaggcgctggctcagcctcccacggcccgggggagcctctgtctgctcctt

SEQ ID NO: 29404 - DNA, 122 bp, Homo sapiens
tgccactcacactctgccattttgcctcttagtgcgcatgtgttgagcccactcacctcacgccggaggagatctatctgaaagctgcgggcttcaggtgtttctatctattgggagatgcc

SEQ ID NO: 29405 - DNA, 122 bp, Homo sapiens
gactgcagctgttgggcaccagcagccaggtctgcaggctccgcgaagcctggcccggaccgtagcttctgcaagcagtccaggtgtatcctggggtcactggagggcagagcctgctcaga

SEQ ID NO: 29406 - DNA, 122 bp, Homo sapiens
ctttaggaagatttctccagtccagcatcctgaaagatgaagcccagactcctcacctgacggttaacctgaaaacacctgatcctctctccggaatccttgcctggggaaaacgataaggc

SEQ ID NO: 29407 - DNA, 122 bp, Homo sapiens
gtgtctctggaaaccatggtcggaggtgtgagggattgctcactaaacgcggacggcaggcgaggggctaggaggcggcgtggtcgagcgaggtgacctgcgagggaaatgaggtcacggtc

SEQ ID NO: 29408 - DNA, 122 bp, Homo sapiens
aaatcaggcagaatatgcctagtagccagtctccaaagtggctctgtgattcctgtctcccggtgttcacagcctggtttagaccctttccacattgtaccaggttggtctgtatgaccaga

SEQ ID NO: 29409 - DNA, 122 bp, Homo sapiens
cgggttaccgtggaggcgacaagcgggtccactcctatcaggtgtcctcactggtacagtcgtaatcccttaatgaaggggattgatcgtctccacagccgctaataggcaaggagggaaac

SEQ ID NO: 29410 - DNA, 122 bp, Homo sapiens
ttatagacggggtctgtgtgttcctggggatcccccatccttgttattcattcatttcatcgggaaacacacaagctgtccttttcacgcagccctaagacacttcacggtcttcatttgta

SEQ ID NO: 29411 - DNA, 122 bp, Homo sapiens
cggcagcaagtcctagaactggaaaaagaatttcattttaacaggtatctgacaaggcgccgtcggattgaaatcgctcacaccctgtgtctgtcggagcgccagatcaagatctggttcca

SEQ ID NO: 29412 - DNA, 122 bp, Homo sapiens
catcctcttggcatacgagtacccaaaattgctgttgtggggaggcccattgtggatctgcgggcgtgggagaggcagaggccgctacttcctggccctgcccaccggctccccggccccac

SEQ ID NO: 29413 - DNA, 122 bp, Homo sapiens
ccagctttgctctcttcctgccgttttgccagcctccgaatgtaatacgcgggcgaagggcgatctccaaggcagaatgggaagtatccaccacttgggatactagttaagtctaggttcag

SEQ ID NO: 29414 - DNA, 122 bp, Homo sapiens
agagcgctgaggcgccaggagagcgctgaggcgccaggagagcgctgaggcgtggagactcgaggtggcggccgagagtaggaagcaaaacaacgggacgggactgactcggggcaacaacg

SEQ ID NO: 29415 - DNA, 122 bp, Homo sapiens
tgtggcccgagcccggggcctcagctgcaaccccttcgcaccctggatcctcgctccgcgcgcctggcgtatccccgacccggctgctgtcgtaaacaaaaccgggcgttggagcagcaccg

SEQ ID NO: 29416 - DNA, 122 bp, Homo sapiens
cgttctctccactccccagcacctaatactgtgtggcatgctgtaggtatttaataaatacgtgttcaatgaatttatcctcccaggaatcccttaagagaggggaattttaggccaggtgc

SEQ ID NO: 29417 - DNA, 122 bp, Homo sapiens
ggctccccgtctctccatccggctctccagtctcacatggacccggctctccccgctccccgccagagtttcacccccactgtaggaaataaagactaaagaaaggaaaggaaatctctcgc

SEQ ID NO: 29418 - DNA, 122 bp, Homo sapiens
tccaataggcttgggttttggcctttaagccagcccccactcagttccatgcattgctttcggagcgtctctgcacaatgtgcccacatggccgtggaggaggggcccgaggcatgcaagct

SEQ ID NO: 29419 - DNA, 122 bp, Homo sapiens
acagcataggctgttttgtcttgggctaagaggaactgtgcctggctgagccaagagagacgaaggccatagagttcttcaaccttgcctgtgtgtttgtactgactcactgcatctgagga

SEQ ID NO: 29420 - DNA, 122 bp, Homo sapiens
gaccaagaccattgagaaattcaattccggacagtattaattagctcaagtccagggctacgggactaaaagcagctgtgcaccccccacccctttttttctgctgaatgtttatttgcaca

SEQ ID NO: 29421 - DNA, 122 bp, Homo sapiens
gtcttgggcctctgtggaggggccctgcacctgcccaggccggcgtctgactccacatcgcgtgctctgtgggaagagcccagtggagccctgtacctgcccaggccggtgtctgactccag

SEQ ID NO: 29422 - DNA, 122 bp, Homo sapiens
ctagaccaccaacagaccagccctggggaccagtgtgtcggcagcatcgacgacacggtacgtggggcaaggagaggctaaaccctccacgtggctgggacttgtggagtgagcacaagccc

SEQ ID NO: 29423 - DNA, 122 bp, Homo sapiens
agtatgtacttgctgacccaattcctgaatttttgcaggataattaagtagcattttcaccgggagtgtagtcaaatatgatttgtactggaggtccttattctgccaggtgcgtgcagaga

SEQ ID NO: 29424 - DNA, 122 bp, Homo sapiens
gagcaggcagctttccactgccccagcctgcctcccccggggaaggaacctaggtgctgacgggacctgtcctgggctgtctccaaggagagaaagcaagcaacagggcccaggaccctgga

SEQ ID NO: 29425 - DNA, 122 bp, Homo sapiens
aggcccatggctgccttccccacctgccgccctttctttggcctgtgcacactagcaagccgcctgcacttttgggtaatttgctgcctcctttcgagagcctgttgtgcggtggtttgtca

SEQ ID NO: 29426 - DNA, 122 bp, Homo sapiens
gcgcacctgcagagcggttgacatggggctcctgagtgggaagcagcagtgtgggcctgacgtccgcccattagcacacacctgaggccgctcctaaactgagttaggctttgaaacacgtt

SEQ ID NO: 29427 - DNA, 122 bp, Homo sapiens
gcctcgctactcttctccttcctctgaggtgcagaggcgcggtgggacgacaaggagttgcgagaaagggcagagctcactgaggaggcaacagagaaagtccgctaacaatttttgaaggc

SEQ ID NO: 29428 - DNA, 122 bp, Homo sapiens
ctcgcaccaaggagatccacaaggataggcagggtggtggaggtcactgggcagcgcctccggatcccccgaaagggggcggggtcaaaactcagatctcgagctcccgaaagggggcgggg

SEQ ID NO: 29429 - DNA, 122 bp, Homo sapiens
ccatcagagagcgtgaagagcagcgcgccccagccggcactcccgccctgggccaggccgcgccacagcatggccatcaggatcagcccataggctgccaccggcaggaccatatccggctc

SEQ ID NO: 29430 - DNA, 122 bp, Homo sapiens
tggggcctcaggttttacagacccttttgggccaggttttactaaaagagccataagaagcgggcccagcccaggcaggagactggagacgaggtcttgcaggcggaactcaggatgctctg

SEQ ID NO: 29431 - DNA, 122 bp, Homo sapiens
ggtgggggaaggggctggcgtcagcagggctctcgtccgccaacgtctggtggggatgcccgccatgcgggggcctcaggctacagccagggctgtgaaggagccgaggtcatagagtggct

SEQ ID NO: 29432 - DNA, 122 bp, Homo sapiens
gccacgctttccagctgtcagccttggtctccatctggttccttgagggtgtggcctctgcgtcctgctatcacccttccttgtctaaaccttcccacctgagtggagaggaacttggggga

SEQ ID NO: 29433 - DNA, 122 bp, Homo sapiens
tgccgcccaacggctgggtaaatcctcagcggccgaaatgattagcccagggggcagccccgccccctgctcctcccggcctctcgccccgcccccatgtcccgcccgctcgtctgcctggc

SEQ ID NO: 29434 - DNA, 122 bp, Homo sapiens
ccttcaagatgctaaccatctaataaaataatatcatatggcaggttttctgctgagtttcgggttaatggattgtctgctcaaaggtttgaagaatactgcagtaaaaaataatagctctc

SEQ ID NO: 29435 - DNA, 122 bp, Homo sapiens
cttccacaccaacaggtacgaactgcacctgagggcaggggtggattttccacttctggtcgccccccgctcctgatccttcgtcccgggctgcgcttccagtcgccccctcccccacctgc

SEQ ID NO: 29436 - DNA, 122 bp, Homo sapiens
gggctcggtcgcgctttgtgacgttggcgttacttgcagattttgcaaaggtccgggctccgctgtcgaggcctttgctgtcgaggtctcattttggctgcttcgggtcgccacgttgcctg

SEQ ID NO: 29437 - DNA, 122 bp, Homo sapiens
cgggacaggggcggggtatgggcggggccgtatgcaagggcggttgctagccccgggactcgcggcctggaccgggactgggacggctgcagcccccgggcctggactgcactgactgtgcc

SEQ ID NO: 29438 - DNA, 122 bp, Homo sapiens
cagggcggcacggctgatggcctgcgggagcgggagctggaggagatccgggccaagctgcggctgcaggctcagtccctgagcacagtggggccccggctggcctccgaatacctcacgcc

SEQ ID NO: 29439 - DNA, 122 bp, Homo sapiens
gttacccgaagctccgcgtccgtgatggtctagggggcttccgaggtgatcgggcagtgtcggtcttcagccgctaagccgagaaggagtcagagagacttaggccagagttccgggggctc

SEQ ID NO: 29440 - DNA, 122 bp, Homo sapiens
gcacggtgttcccacgagccccgagcccacctgggatgcccggcgttcccacgagcccctcgcccacccgggatgcacggtgttcccacgagcccctcgcccacccgggatgcccggtgttc

SEQ ID NO: 29441 - DNA, 122 bp, Homo sapiens
ttttttccttgaaaataaaggtggttgtaattatgatctggatttcttgagggcctacgacgcaccaggctctgtgctaagtgttatacacagagtatcttgagcttcccactaaaggcaag

SEQ ID NO: 29442 - DNA, 122 bp, Homo sapiens
gaatttcatggaaagtgttttggagttaacatcagaatatctgcgttcttcatatgatgccgccattttgtggcattgagcaagtcactcaacctccatcattttcttctctccctcctcaa

SEQ ID NO: 29443 - DNA, 122 bp, Homo sapiens
tgaggccgagtccccaaaagccaaggaagccagccccacaggctggggagccctgaaggccgggggagctgtggctgcactgcctctatcctgctgagtgtgctctgcccaggcctcactcc

SEQ ID NO: 29444 - DNA, 122 bp, Homo sapiens
agtcctgaggagcagtgccactcagcccctgccagtggctgccttgtgggattggggacacggtgtggccagaggttccgattttgcaaggaaagctggaggtctggaattttgcataaagc

SEQ ID NO: 29445 - DNA, 122 bp, Homo sapiens
gtgtcccacctgctctgatctgctccccgggagatacagagatggcgaggcgcttcttcacgtgtcccacctgctctgatctgctccccgggagatgcagagatggcgaggcgcttcttcac

SEQ ID NO: 29446 - DNA, 122 bp, Homo sapiens
aggaggtccctttgcagagggaaaccaatgtcatccgtctccaacttctgaggagagacccggagcagccagcagattaaaaaccccatcccggccctcaccgaggtgttacaactctgtcc

SEQ ID NO: 29447 - DNA, 122 bp, Homo sapiens
gatttgccaagtccttcccgtgtttcaagcaaagcttttgactcgggagcgggtggcgggcggccccactgcggagacccgggtgccacgtcccagagcgtggagtgcaggggaggtgcccg

SEQ ID NO: 29448 - DNA, 122 bp, Homo sapiens
ctccatccccttctgcccttgcactctttgctgaatcaactgcagtcaggcgagggttcccgtggttgctctgtggttgctctgagtcactgtctggtctgacccatcagcctcattagaca

SEQ ID NO: 29449 - DNA, 122 bp, Homo sapiens
tgcaccgtcgtgcctgccgtcttgtgagtcttcaggaaggccacagtcatgtgcttggggcgcggcggcgagttccgcagaggagggcagctcaaggggaacagcttggggtacctgccagg

SEQ ID NO: 29450 - DNA, 122 bp, Homo sapiens
tctggtgggccatcatcaccatgaccaccgtcggctacggcgacatctaccccaagaccacgctgggcaagctcaacgcggccatcagcttcttgtgtggtgtcatcgccatcgccctgccc

SEQ ID NO: 29451 - DNA, 122 bp, Homo sapiens
ggcgacagcgagtgacacaaataaacccctggacccccttgttccctcagctctaagggccgcgatgttgtacctagaagactatctggaaagtgagtgcgcggcgctggcggcggccgcca

SEQ ID NO: 29452 - DNA, 122 bp, Homo sapiens
agactgaaatattccaaatgcagctactttggaaggaccatgtgagcagatatctaagtgcgtggcatctgggccccttggctagatggtggtcgatgttggtttctttgtgttaaccccaa

SEQ ID NO: 29453 - DNA, 122 bp, Homo sapiens
ccggggaccccatcactatctcccctccccccttccgggcccccgccagctgaggggagccgccgactggagccgccgtccggctccccggccccccaaacaaaggacccgccgggtcctag

SEQ ID NO: 29454 - DNA, 122 bp, Homo sapiens
gaacggggaagctgccaatgagagagcctaccccgagagagatggagctaatgagggcctcgtgctggagagggacggcggcttggccaatgcggagctgggtctggcgcggcaggaaggcg

SEQ ID NO: 29455 - DNA, 122 bp, Homo sapiens
ttcaacaaatgcttagagaggactactatatgacaaacctaatgctgggaatttcattgccggcatttggtcttcacattgcccagtgaggaaggtgaggttgccagatgcatcgtaaagtc

SEQ ID NO: 29456 - DNA, 122 bp, Homo sapiens
cgaggcgatctagagtgtaagtgttgacagagcgctgaggtttttggaccacagtggtgccggagctcttattctaggactgcaagcgtccatggtactaaggtgctggaaccggaagcctc

SEQ ID NO: 29457 - DNA, 122 bp, Homo sapiens
ccaggttctgaccccgtttaggagtgcggagggcaggggctgcctgcaacccaaggagcccgagctaccctgaaggccgaccctgaggccgctgctcagcgagaggagccgacccttggggg

SEQ ID NO: 29458 - DNA, 122 bp, Homo sapiens
ctgctggttgctaggagatactgggccagccatctcctccaatcagcacgcacctctttgcgtccaatcacagaggcaggaagggccgtggtgggaggtgaaaggtcatagtcctgtttggc

SEQ ID NO: 29459 - DNA, 122 bp, Homo sapiens
ctctaatgtcaggccgcccagaccctcctcctcgctgtcctccgaagcccctgcctccgccggcccttcctcagactgtttgccgggcatctctgcgagaacagagaggggtgcccaggctc

SEQ ID NO: 29460 - DNA, 122 bp, Homo sapiens
cgccctggtgtcctactctctggtggagcggcggttgggcgagcgctcgctgtcgagctacgtgtcggtgcacgcggagagcggcaaggtgtacgcgctgcagccgctggaccacgaggagc

SEQ ID NO: 29461 - DNA, 122 bp, Homo sapiens
gcgcggcgtgatgtaatctcgggggcgggacgaagcctaggtgggcggggcctgcgggggcgctgtggcggtacaagaacccaggcggggccggcgagcaggtgacctccgtccctaccggg

SEQ ID NO: 29462 - DNA, 122 bp, Homo sapiens
cccagagagtttccacatccggtattttcctcaggaggcttcatctcatttacacttgcccgtgggagtctgtagtttcagtcctttccagattctgggaaagagctgaacgtctttgggtg

SEQ ID NO: 29463 - DNA, 122 bp, Homo sapiens
tctctagagcatatagtcctcataataaacttggctctttccacttggacaatagcaaagcggttggtcttattgctggcgctttttacatgacaataactcatccgtctattgggctggca

SEQ ID NO: 29464 - DNA, 122 bp, Homo sapiens
accggacctacaacccgcagtcccacatcatctcaggcgggctggccggggccctcgccgcggccgccacgacccccctggacgtctgtaagacccttctgaacactcaggagaacgtggcc

SEQ ID NO: 29465 - DNA, 122 bp, Homo sapiens
tgcagtctttcaccgtccgtctgtttttagaacagagttctggcctgagcttataaatctcgggctttgcccccaaaccccaggccttttgcggacggaacaggtgagcactgcgcactgct

SEQ ID NO: 29466 - DNA, 122 bp, Homo sapiens
aaggccttccccaaggcctacctgctcaagaagcaccaggaggtgcacgtgcgtgagcgccgcttccgctgtggcgactgcgggaagctctacaagaccattgcccatgtgcgtggccaccg

SEQ ID NO: 29467 - DNA, 122 bp, Homo sapiens
gcaaagaggcctgagtatccatgacctcagtggtgcgaaacccggccaacttaaacatggcggctaaacccgaacagcaaaacgttgctgacgccaatgaagtcatgctcgaaatggagcga

SEQ ID NO: 29468 - DNA, 122 bp, Homo sapiens
ttggtcttgcagttggagaagaggctgctaccaggtttacattttcagtgtcacttacttcgaacattttcctctgaagattatgtaggcaaaagagagaaagacggagagaggctgattaa

SEQ ID NO: 29469 - DNA, 122 bp, Homo sapiens
ctatatattactcaccttcgaacccaggataagaaatagctactcaaatcaaacccaagacgaaagtaatactgttagtgatggtggcagcagttataatagcagtaataacagtagtagaa

SEQ ID NO: 29470 - DNA, 122 bp, Homo sapiens
ttatatattgggtttctaatgggggaaaagttttaaacatgactctagatgtaggtcttacgcaagaatggcaagataggttttgaatcaggttttcgaggatggtgagcactgagtccttc

SEQ ID NO: 29471 - DNA, 122 bp, Homo sapiens
gcgtaaccgcatctgagccggactctttaggacgagtcccgtccctggagtcagaaaacccggtccagcgccagcgtggacgtgcgcttcccgggacacgcccagggacgccggctaggacc

SEQ ID NO: 29472 - DNA, 122 bp, Homo sapiens
ttttaaggtttactaataagtccgtactgatgtctctttggagggcatcttaaaagagaacggggaggtgttgtagcagcccaaaccagctgagtcctaattctctccactgacctgtacac

SEQ ID NO: 29473 - DNA, 122 bp, Homo sapiens
caggctagtcacaaacaagtgataacgtttttcaccaaaggaatttacaacaataaatgccgacatcctgtagtgttccatatctaaatgtagctgattatccagccttcctatatccttcc

SEQ ID NO: 29474 - DNA, 122 bp, Homo sapiens
tgggggcattacttccagccaattagctagagcactgttcaagttctccgccagggcaggcgggtccctcccacactttccagccagagtgtctgcaggtttgtcctgtaaatggcagcaga

SEQ ID NO: 29475 - DNA, 122 bp, Homo sapiens
atccaatcgtgtggaaaagcataactttttcccaaagaaagaaagaagtaccagtacttacggtgtcatgagacttatccttgacatcatagactgttagttttattttggtctcctcatag

SEQ ID NO: 29476 - DNA, 122 bp, Homo sapiens
aaaatggttaacatttgagctgagacctaaatgaagaaaggatctggtctggtcatatcccgaggacaaaaacttacaggtgtgaaagtaacaaaaggaagattgatagtaaagcaaaggag

SEQ ID NO: 29477 - DNA, 122 bp, Homo sapiens
cccccgcgaagcggagcgcccgggcacctagcctccctgccggccacctagcctccctgccggccacgatgccgaacgtgctgctgccgcccaaggagagcaacctcttcaaacgcatcttg

SEQ ID NO: 29478 - DNA, 122 bp, Homo sapiens
ccacgcagcgggacgcgggctccggactccctgggggcagccttgctgtgggtgagcaagcgcggaggccgagcttcttgcaaacggactccaaggggcaacgaccttcgcgcgtcaccaaa

SEQ ID NO: 29479 - DNA, 122 bp, Homo sapiens
ggtgccgaccggcttcgaagggaggcgacggccgagacacacggtccggcgcgagccaggcgccccgcgacgtgcaattttattttgcaaaaggtgcacccaacgccagtcccggtagagtt

SEQ ID NO: 29480 - DNA, 122 bp, Homo sapiens
agcagaaattagtaataaatggaagctatgacatagggggaaaaaaactgaagaaagaaacggtatctaggacaagctaacaatggagcactggagtggggtctccagctttattaggttct

SEQ ID NO: 29481 - DNA, 122 bp, Homo sapiens
gataccgagcagtcttctgacacagtccctggaacgagtggagtgccctgtccttcagcccgggcttggtgcgggatggggcctgccatgctctaagctctggcctccctgcctggaggcgg

SEQ ID NO: 29482 - DNA, 122 bp, Homo sapiens
ggcgcctgagggctgaggctcccgctccagcactgctccgctccggccgcatccaggccccgcccaagggcggagtctgtgttcgccccgccccggccctcaactcctagcaggtgtaatcc

SEQ ID NO: 29483 - DNA, 122 bp, Homo sapiens
gaggtccgcacgggcgaggatggctaggagaagcctcatcgaagaaggactgcccagcttcgtgatgtttgctcatgagcagttgatttttatgtgcatagttgtgaagcatttggaagcat

SEQ ID NO: 29484 - DNA, 122 bp, Homo sapiens
cgaacctctccctggacgtcccagggtgctccctggtcagcaagtccaaaacagaactctcgcttcccaccttctctcctaagtgatcctctttatcccccttccgtgtctcactttcccaa

SEQ ID NO: 29485 - DNA, 122 bp, Homo sapiens
tcctcatctgtggaatgggctcccagtggctccctccccgccaggtgacactcaccaacacgcgtgggaaagacctcttcgtcgttgatgaggccttcgatccagtccatgagcaatgccat

SEQ ID NO: 29486 - DNA, 122 bp, Homo sapiens
gcttcatcacaggtggagttaggggcaactttcagttcctgccccgactctggacagggccggaggaggggaacagagggacagcacacacagacctttccttcctgagtggagcagggagg

SEQ ID NO: 29487 - DNA, 122 bp, Homo sapiens
ccagtcacttggacgtcagcgccagcagccggctcaccgcatggccagagcaatcctcgtcgtcagccagcacgtcacaggaggggcctagaccagcagctgcccaggccgccggggaagcc

SEQ ID NO: 29488 - DNA, 122 bp, Homo sapiens
attgctgggtggggagagactatgagagcccaggggccagagagtgccaaaggggagccacggggtatgaactctggggcctcagcctggtgctgctgcaggccccttccccagctgtgccc

SEQ ID NO: 29489 - DNA, 122 bp, Homo sapiens
ggctggagttttctcggacagtgaactctaccgccccgtgagaccctgccctatgtgtcgcgggaacacatgtcaccccacagctctctttgagtgacctcccgaccacccattcctgccta

SEQ ID NO: 29490 - DNA, 122 bp, Homo sapiens
ttgaaaggaacgagcgatgccagatgcggaggaaccaggcagggcgcattctgtcagtggcgccaggcggtgtagctccagctctcagataacccaggctttgggagggcggggctcctgcc

SEQ ID NO: 29491 - DNA, 122 bp, Homo sapiens
gtgagggtctaccagctcccagaaggcctcccctttctgtttcccctagggccctccacccgggctgcagccccagcatcgcgtcctctcggagcagcctggccccaggtggctgcggggcg

SEQ ID NO: 29492 - DNA, 122 bp, Homo sapiens
agcccagggaggccggggagacagcggagggaggaggaagtccgtgaggatcaggggccccgccagctgccgccagtgcctgctgggtcccaggccagggaacccccagctcccgcctggaa

SEQ ID NO: 29493 - DNA, 122 bp, Homo sapiens
gaccagaatagattcgttctggctcgtacttctggacaccaccagtctaaccagcaaaatcgaatatcggttctgagcttaatccttttaatagtgtttccatttacattaattgtgtcatt

SEQ ID NO: 29494 - DNA, 122 bp, Homo sapiens
cagccccgaactgccggagtaggggtgggaaccaaactttttcctgccccgggacagacacgtgagttttctttcttccagagcccccgtcccaccgggatggcgggcccgcgcgggagctg

SEQ ID NO: 29495 - DNA, 122 bp, Homo sapiens
tgacttggaagcagtctttgggctgacgatgagtgataaggaggaggcagatctgagtgacgaggcatatgctggaccctggccagttgacaggcctccagggacccaggctggcagagaag

SEQ ID NO: 29496 - DNA, 122 bp, Homo sapiens
ctgatttatcggtggagtgtcaggaggctgtagcaacagtttacatttcccctgtccctgcgagtggctaggggcaagctgggctcggacgtgatatcctgctgtttgtggagaggaaactg

SEQ ID NO: 29497 - DNA, 122 bp, Homo sapiens
aggaaaagggggaaggaaggaagagagtctccgaggcgggaggggcggcggcagccggggcgggggcgtccgtggaaaatgcccccccaccgccccccccggccatcgaaaggaaccgaggg

SEQ ID NO: 29498 - DNA, 122 bp, Homo sapiens
tccatccccagtggcaggtgcagagggagttccttcttccttctggccatgcatttacatcggactagcaaggagattctttctaggagaacagtgcctgggtgcaaacctccaggccaagc

SEQ ID NO: 29499 - DNA, 122 bp, Homo sapiens
cgtgctgccggcttccgaggctggggctgcgtggcgtgcgtgtgtgccgctgccgcaggtcgcataccctttccaagacggaccagtggctttaaaaggttcctgcaaggaagtggctggct

SEQ ID NO: 29500 - DNA, 122 bp, Homo sapiens
tgttctctcccacatccaggccttttcactgatccactcctctcatgtttcctgggaaagcgtttgctaacattaaaggcccaattgaaggcccccctaacccccttggcttctcccattat

SEQ ID NO: 29501 - DNA, 122 bp, Homo sapiens
acaggcaggcagcaaaggaccacagaagcctaggattcattgctggttgcccacggctcacggaaacttcatgggacagatggagttttgactggatgcgcgtcatcttcactgcaattgag

SEQ ID NO: 29502 - DNA, 122 bp, Homo sapiens
gcggctgtcatagggctgcttggttggtcagtggggagtcggcgcctgcgtactaagacccgtgtgcagcagcggcggcggcggtagaggcggcggcggcggcggcagcgggctcggaggca

SEQ ID NO: 29503 - DNA, 122 bp, Homo sapiens
aaggccctgccggtaaacccatttgaagcaggatggcaagaaggtgacaccatcttcccccgcgcactgaaagcccctggctgggattgcctggggcagacacaggctcggaccagccccag

SEQ ID NO: 29504 - DNA, 122 bp, Homo sapiens
taaatattaatactttactgaaatatgatttctactgaacgcatatagcttctgcaccatcgtaaagttaaattgtaagtcggggattgtctatatacacttagtggagatcactgacccaa

SEQ ID NO: 29505 - DNA, 122 bp, Homo sapiens
ttggacatccagggctgaatgctgtcatgaaattctgctccttggtagctcaccatccaccgtaagctcaccatccactgtatgtgaattgtccctaagtgagaaaacagactgcagcaggc

SEQ ID NO: 29506 - DNA, 122 bp, Homo sapiens
ccgggtcccgccacagccggtcccagccagcccctcctcccgcgtgtcgggaccccagcccggcacactcaccatttcctggactccagggtgtcccagcatcctcctgatggctctcctgg

SEQ ID NO: 29507 - DNA, 122 bp, Homo sapiens
tgtctatccttatgaatcgccagccaattctctttttgctatccatggtaagggcccgcacgtacgactgggtagttcggcactgggagttccaatgccttttgtctatgcccctgcagcct

SEQ ID NO: 29508 - DNA, 122 bp, Homo sapiens
ggcccgcttacccggaggaaggaaaccctccgcagaccctccaggaaggcaggcctggggcgccccttccccggggagcctggaaacccacaaggcaggagccattagagggcagcacgtgc

SEQ ID NO: 29509 - DNA, 122 bp, Homo sapiens
ggggaaaccgttgcggggttgtccaaaggggagccattgtggggcctctacagagggcgccgttcctgggaaaaattcctccctgagccgttcagcaaagaaccgtcccgaggaagccatgt

SEQ ID NO: 29510 - DNA, 122 bp, Homo sapiens
gatgggaaactcttttaaaattgtcttgtccctgaagcagcccttcaaggctgtggctgacgtataggaaggcccctggtagacccctctccagagtgaggtggttgccatggcacccagat

SEQ ID NO: 29511 - DNA, 122 bp, Homo sapiens
gagggatgctgacctactgggggctctcactcagccagggagactgcattttccattttccgaggctcgggctggctgggtgggagccgccccgtctcagcctgcccgctgaaggtggcaat

SEQ ID NO: 29512 - DNA, 122 bp, Homo sapiens
ccgcggggaccgggggcgaggccggggcggtgcagtaagggcttccctcctgggcgcggtcgccctcttacctggagcttcccctcgctggggttttgcccacctgacgcccccgcacccac

SEQ ID NO: 29513 - DNA, 122 bp, Homo sapiens
ccagccttttctgggaggactgcaaatgccccctctcagcaagcggccgtttcccatcttcgcttcgcgtccaaagtgttgggtcataatctggatttggaggcaaacccttgccagatcct

SEQ ID NO: 29514 - DNA, 122 bp, Homo sapiens
gtgctgcctggagccgtgcgaggggaaagggaagtaaggttacccacgattggcgcttctcgagagccaatttgattaggtgttgtttgacaaggccgttggcgcattccacttttccagaa

SEQ ID NO: 29515 - DNA, 122 bp, Homo sapiens
ctgaggccaaatgagtccatcataccaagtgataaatatccttggctcctaagaagtaagcgcctgcttgtccctatgttggtctattgaattggttctgggttcacagcatcatccattat

SEQ ID NO: 29516 - DNA, 122 bp, Homo sapiens
gaaagagacgatggtgcctccctgaagaggtccctgctgtgggcatctggggctgagccccgtagggaactgtgagaggtgtggtcacaatggggcaagacagccagtgggggcatctactt

SEQ ID NO: 29517 - DNA, 122 bp, Homo sapiens
ccgcccagatgtcagcggaccctttggcagcggcgctttctgaggacttgtgtccctggacgctgggcggcggcacgatgacagctggcttgtcagccaggtaggacgagtagtccacacgg

SEQ ID NO: 29518 - DNA, 122 bp, Homo sapiens
actgaaagtagctaaggcaccccagccggaggaagtgagctctcctggtgagttgggggtcgtttcgcccaccctagtaaatataaagagctctttaatccagccagcttactagtgggggt

SEQ ID NO: 29519 - DNA, 122 bp, Homo sapiens
cacagctcagtggccgtgatcagctcacagagcagcaagaaaaggcccccagagagcaaacgcatgtgtcaagttctggagccgtcaaggttctaagcgacagcttatcttgaaggtttaaa

SEQ ID NO: 29520 - DNA, 122 bp, Homo sapiens
aaccatatgttcagcaacgttatggagggcgctggccttcggcgcagacccagctgaaaccgtaaaatgctcggtaaaaccagtcgctctgagggtgcagcgcgtgtgtccatgggtaaaat

SEQ ID NO: 29521 - DNA, 122 bp, Homo sapiens
agcaggggcggcgcgcctcgcttgcgtgacaccgggccgtccgggggcttacctggtcgccgagcaggcgggcgggtaaagctaggccgcgagagcgaggttaggagaggagaggaggccgc

SEQ ID NO: 29522 - DNA, 122 bp, Homo sapiens
tgctttattgggaagtaatgctgaaaaggtagagattatgcataggttcacctccaagaccggcctgtcaatgaagcataaataaattggggagatcgttatttcggcaaagtattatgtgg

SEQ ID NO: 29523 - DNA, 122 bp, Homo sapiens
gacataaccttacacacaacaaggttaaaaaaaacacccctgggctgcgtcaggccaagccgggagagaaagccccgcctgaaagggcctggaggccccagcctgtcactcttgccacatca

SEQ ID NO: 29524 - DNA, 122 bp, Homo sapiens
ccccttctcaagttccccgaaggtcgcttagtgtgcggggctggcggaggcccgggggttcgtgagctctggggaggggattccaagaggctggggtgaacgctggggctggggctgcaggt

SEQ ID NO: 29525 - DNA, 122 bp, Homo sapiens
ggagcgcggcgcgcttcagctcctgtggcttgccgtgatcttattgtggttagtactttacgcggtggccgcagcagcctgggctcgaatcccagtcgtggcaacgtccattctagggtgta

SEQ ID NO: 29526 - DNA, 122 bp, Homo sapiens
gggtccttgtgcatccaagctgaaaaagcctttaggtttgtctccactttctggttttatcgatggaaagactgaggcctacatgggaggattgaaggcatgggacggaccctggagagggt

SEQ ID NO: 29527 - DNA, 122 bp, Homo sapiens
agagaaggactttgatgagattctgaaactagattgcaactactgttttagtataaaccccgcagtgccccatctttctcccacagggcccatggcttctcggtaggtggctagggtatcac

SEQ ID NO: 29528 - DNA, 122 bp, Homo sapiens
agggccgcagccctcatctgccaccgcagtctggttggagctgttgtcttgtatgctcagcgaggcccggagagacccgggagagagctaggccgagtccaccgcccgagtctgctgcccga

SEQ ID NO: 29529 - DNA, 122 bp, Homo sapiens
gatgtccgcgtgggacttttaggggatttgtttatttttgtacgttaaccacactagaaacggccccagaatgggctgaaacgtgtgctgctgaagctgccacctaaactcccgagagaagc

SEQ ID NO: 29530 - DNA, 122 bp, Homo sapiens
accgctctccgggcgacctcctgtgcttggcaaagatggcagcctgccaggggtgggaggcgatgtcggcgaagagccctcctttgatgcgaaactgaggctggctgtactgtctcaggccg

SEQ ID NO: 29531 - DNA, 122 bp, Homo sapiens
tcccaatctacagggctcaatcaggatgggatccttagtgtggcacctgggtcagaaagccgcccctgctaagaggctcaggacagggctaactgggagaagaggccccacctaagtgtctg

SEQ ID NO: 29532 - DNA, 122 bp, Homo sapiens
cgtgtggccccgcccccgcagcgtcgctccgacacgacggccgccgcgtctccatggaaacggcccaggcatccacccagccgagagcacgatggctactggggagctcggggacttgggtg

SEQ ID NO: 29533 - DNA, 122 bp, Homo sapiens
tgccggctgaggctggggcacggctgagcctgagtctgagtcggagctggggccagggcccgcaggaggggaagccgggcctccgcagacaccgcccccgccctgcccgccctcccgccgcg

SEQ ID NO: 29534 - DNA, 122 bp, Homo sapiens
aggaggagcacgtgcggtcggtggggcgcagggccggggagccaggggggtgccggggctcgaggccgcggggccgcgggggccgcgctctgctctccgcccaggctgggccactggagcgc

SEQ ID NO: 29535 - DNA, 122 bp, Homo sapiens
actcttccgaaatttcacaatcacaggtctatgcctcacttaagattgtagtcagctgggcgcggtggctcacacctgtaatcccagcactttgggaggccgaggcaggcagattgcctgag

SEQ ID NO: 29536 - DNA, 122 bp, Homo sapiens
gtgtcgagggaggtcagggtaggggcagctaccacgcctgaagccctagaggtcaccaggcggcgcgggtagattcgggggaagcgcgcagggctgcgctagggacccgccgggtcaccctg

SEQ ID NO: 29537 - DNA, 122 bp, Homo sapiens
cccgcacagcatgggcactctaggattcagaaaccctacctggtgttatcagcagcaactcgatgcaaggactgccctcccagtctcgacagcagtagccagagaccctcaaatttcctcca

SEQ ID NO: 29538 - DNA, 122 bp, Homo sapiens
gacagaatcatgggactttgagaagagggaggacagaggcctctgtcgcactaacgctctcgtggttgctcgactgttgtatctgtgatacattatccgactaaggactctgggctggcagg

SEQ ID NO: 29539 - DNA, 122 bp, Homo sapiens
ccttgcaaattatcccgataatgaacagctgcagatgttaattcaaaatggcaggtaatccgtgtgtaaattgaaatgtgcatgcttctgtctgaaactgcaattgcattaagttgtggaaa

SEQ ID NO: 29540 - DNA, 122 bp, Homo sapiens
catcggtggaagaagacagaagcagctggtcatcgagagcacactggcgggagagcacgtcgacaggcaacggcaggccggcaagccagcgaccagcggcacaacacggagttaggaaagag

SEQ ID NO: 29541 - DNA, 122 bp, Homo sapiens
tgtgagtgcactgtaaggagctccggaaacgtgatgtggggctctacattatctttatcccggccctttcactccatccccgctcccgcgactcggagtccgctgcagtgcggtacctgtgc

SEQ ID NO: 29542 - DNA, 122 bp, Homo sapiens
cttggcggttcagctttcaggagccccaattaatcattattaatttaatccggggtgactcggagtcatcctgacagagatcagccacgatttatcccacctgctaaggggcgaccttagca

SEQ ID NO: 29543 - DNA, 122 bp, Homo sapiens
taattttggataagccaacatttctgagtctagggtttccaaaactaaggcttttggaggcgtgctgggtcaaaaatagaagctcggtaaatacttgctcagtagtggcctagaacactaaa

SEQ ID NO: 29544 - DNA, 122 bp, Homo sapiens
aatcaagaagttgtccctctgaactgtgaatctctgaaagttggaacttttgataaaggccgaggctgccttaagtaaaaactagagaaagaaaatgtaaagatcataacaccgtagccgtt

SEQ ID NO: 29545 - DNA, 122 bp, Homo sapiens
agtgctccaggagaggtctgagagagaagggcaggggcctgagaaagccccacgcccagccgtcattctgcagatgtttgcagagggcctgctctgggccaggaagggaccgggagctaggg

SEQ ID NO: 29546 - DNA, 122 bp, Homo sapiens
cgccagaccaagatagcagagagacgtgctctttggagaccgcctctagggcttcgctggcgtgaaagtttgccgcgccaggtctccgggtcccctcgctctctgacgcccctctgtgcagc

SEQ ID NO: 29547 - DNA, 122 bp, Homo sapiens
gccttctatcggcctctggtgtggaccaggctcaagtctgaatccagggctggtctcctgcgtgccccctcctgaaacctggctcactcctcttcatctctttctctcctcctctgaacacc

SEQ ID NO: 29548 - DNA, 122 bp, Homo sapiens
ctgcccgcctcctgggcacgagcccgtgccagccgctcctggcacagttgctggcacgcccggcagactcccacgaccacctgctcacacccacccacgagcgctggcgcgcttcgggccct

SEQ ID NO: 29549 - DNA, 122 bp, Homo sapiens
aacaaccataaaacgtggcattccagagaaacatccagcttcaccacggaggccacagcacggggacccgggtgtgggctcccccttccagggagtctgggaagaccagctttgcaggcagg

SEQ ID NO: 29550 - DNA, 122 bp, Homo sapiens
tcctgggctcttccctctccctgctcctgacctccctccccttctctccaggtcagcttgcgactgtgaggagcagggacagagagcttcaaagacagaagagcgtacattccaactcactc

SEQ ID NO: 29551 - DNA, 122 bp, Homo sapiens
tatcatgcaagggagaaaaaatgtcatcatcaaatattcattaagctcccacttgtgcctcgtgctgttgtgcctgctgagtctgtgaggcctctgctgggcctgtttttataaactctaac

SEQ ID NO: 29552 - DNA, 122 bp, Homo sapiens
aagtacacgatctggacctaggggagattaccgtttaaaggcgaatctggcacgtgtacacgcacatttgatgacgtacccgtgcaatgcactacagaggaaggaacgcccaaagcagcctg

SEQ ID NO: 29553 - DNA, 122 bp, Homo sapiens
aacattattcattgtaaatttctatgtaaattatccaggggcaggggcattgctttggtccgcccaagagtcagatggcgcgggttccctccctgtgagtttcgacagtgcatcatcttacg

SEQ ID NO: 29554 - DNA, 122 bp, Homo sapiens
gtaggacccgcagccagtgcaggcactctggacctctcagggtggcgatgaagtttccagcgcggagtaccaggggagcaaccaacaaaaaagcagagtcccgccagccctcagagaattct

SEQ ID NO: 29555 - DNA, 122 bp, Homo sapiens
cctgaatgtgttttgtctctcggtgcccctctttcttttctttctttctttattttgagacggagtctcgctctgtcgcccagactagagtgcagtggcgtgatctcggctcactgcaacct

SEQ ID NO: 29556 - DNA, 122 bp, Homo sapiens
atttccctccattccagccaccccagcctcctggatcttcctggaacacgcccatcacggcgtggccacagggcctttgcacttactgtccccttggcctggaagtctctccctccccacca

SEQ ID NO: 29557 - DNA, 122 bp, Homo sapiens
aaaattcaaaataatcgaggagcagtaagggaagcaaacataggcatagatgaaataaaacggacaataagttgataattattgaagttgggttataggttctggggagttcctatgctact

SEQ ID NO: 29558 - DNA, 122 bp, Homo sapiens
agacgacccaaaagggtacctaggtggggccctttcagggacttggggcatagggtagggcgcatgggacgaggtgggtgagcgcaagggacgagatgggtgtgcgcatgggacgaggtggg

SEQ ID NO: 29559 - DNA, 122 bp, Homo sapiens
acatacacatccagcaggctgcacgcctgcacgctaagcatggaacgcaggggcactggccgcgatgacaacaccacgtggacccacatgcgcctttgcgatcgtcacgctgggtgtccacc

SEQ ID NO: 29560 - DNA, 122 bp, Homo sapiens
gggggcgctgggggcactgggcacgctggcgaggggtgcgggagccaggctgggggtgggcggaaccttggcggggcctggcttctggatgccccggacgtcgtacttggaagggcgcccca

SEQ ID NO: 29561 - DNA, 122 bp, Homo sapiens
taagccccctgtactttgtcatggccgctttagtagactcatgcgggcacttgctgtagacgctgacccccttgaccctccctcgctgcccctgcattctcctccacacacccctgagcccc

SEQ ID NO: 29562 - DNA, 122 bp, Homo sapiens
acaataacaaaaatagctatgaaaaaatgttaaatgcgcacaacaccaagcgaactgcaacgctttacctgaaaaacaaagggagaactgaattaatttaaaaaaatagccacattgctgga

SEQ ID NO: 29563 - DNA, 122 bp, Homo sapiens
tcctggggtcttgggtgctgaaatccgcttggtgcatacagagatgcaccacctgagtttcgaggcaactgtgcatgttctgaagaacattctatttccccgtcaataataacaacaatgat

SEQ ID NO: 29564 - DNA, 122 bp, Homo sapiens
tcacctgacgcgtttgttaaaaatccagatttctgggtctgatctcagatttattgaatacgaatctctggcactgacatcacggactctgacttgttaaaaacaccctagtctttgctgct

SEQ ID NO: 29565 - DNA, 122 bp, Homo sapiens
ggaagaaggctgaggtgggggctctcctgacttgagagcgaccccgcagagctctgggtccgttgtgcacactcaggcgtttcctgtgcggggccgactcactcgccctgctggtgcttggg

SEQ ID NO: 29566 - DNA, 122 bp, Homo sapiens
gcagcgggaacgcctaacttctaagatgcccttaattgatctcctccttcttaactacagcgagggaataacaactcggggctggggactgggtatctaagactcgctctccgcagggtccg

SEQ ID NO: 29567 - DNA, 122 bp, Homo sapiens
ttcccggaacttcatcctgcctcaccctccttagaaattagaaggaatatggtcccttagcgcaatgctttgggaagttctttggcaatgtttgccaggagcagaagaaatgtcttgctctt

SEQ ID NO: 29568 - DNA, 122 bp, Homo sapiens
gggaaacgcggtgggaaccgcccccgactccaggcgactccttggccgggcgggggagagcgtccccgtcagctgagagcatcctcactcggtcagttcctcgggcgagttacggggacgac

SEQ ID NO: 29569 - DNA, 122 bp, Homo sapiens
gagctcaaatcgcttcaccgcagtgagctgagatcgcgtcactgcagtgagctgagattgcgtcactgcattccagcctgggcggcagagtgaaaccctgtctcaaaaaaaaaaaagaaaga

SEQ ID NO: 29570 - DNA, 122 bp, Homo sapiens
tgacttccctgactctggctgggctccgtaagctgtcttgaggctacgcagcgtctaaggcgttatccttaacctccagctccctccggctttgcttttctctctcttcttgactcttctga

SEQ ID NO: 29571 - DNA, 122 bp, Homo sapiens
ataatccagctttcctgccagccataacattttaaacggcactggtgcagatgccccaaacgcaaacctccttcgcctttgttgtttctctttctctctttcctcctgttttatatctttct

SEQ ID NO: 29572 - DNA, 122 bp, Homo sapiens
atagtcaactagagccagcctcctgagtgcaagtctcagctctgccactgcttggcatggcggctatggacaagtctcttaacacctctgagcttcagttcatgtaaccataaagtgggggt

SEQ ID NO: 29573 - DNA, 122 bp, Homo sapiens
gggaggcgagacggcaaggcaaagacactgctgctagaatgtgccgtcttcttgagattgcgaggagaaacgcaatataatgtggttcaaaggacagatgggactttcctaattgtccccag

SEQ ID NO: 29574 - DNA, 122 bp, Homo sapiens
agtggtgaaaatcagccacattgaacatatgggtgtcttctcaaggaaatgtgacatatgcgagagaaaatggagtctagaagggatgaggaagaggtgatcaagggagtgaggggttcttg

SEQ ID NO: 29575 - DNA, 122 bp, Homo sapiens
atacccgggatgtggagcaggggccgtgattacggggccctgggcaggaagtgggacaggcgcccacttcggggacctagtcagcggcgcagccactgcacccactctgccaaaggcttcca

SEQ ID NO: 29576 - DNA, 122 bp, Homo sapiens
ggttgaagggggcttccatctgctggtgctccccaacaccaggggctggcagagggtactcgtgctttgcaggtacaaacagcgctctcccctggggtagacccgagccacgacaggcagcc

SEQ ID NO: 29577 - DNA, 122 bp, Homo sapiens
ccccaccctaccccttcacctcaggacctgacctagactccagagagaacagtaaggcttcggtgccttagtctgggactgtggaagtcgataggctgcgggcttacagggagcttcgtata

SEQ ID NO: 29578 - DNA, 122 bp, Homo sapiens
tttttttttagacaagagtcttgctcttgtcgcccaggctggaatgcaatggcatgatctcggctcactgagccaccgccccagcgtgaaggcatttttgagcaagttatgtctccctaatt

SEQ ID NO: 29579 - DNA, 122 bp, Homo sapiens
gttcttaatatcaaggggaaagaggatgctattactccaaagagtgcagaggatgtgcaccggtctgtgacatagttggtaatttccagaggcggagaagctattactgatgataacgtgaa

SEQ ID NO: 29580 - DNA, 122 bp, Homo sapiens
atatgcaggttttacaagttatcctacttatattttttaaccgcaatggctgcagaaaaccgaaactagccctttggcaataaagcagatgctgcagaggtttgggaagaaaattggatgat

SEQ ID NO: 29581 - DNA, 122 bp, Homo sapiens
tcaaggcctgtctggaatctgtttatcaggttccactccgctgcccgagatcgcttcttccgttactcagtgcccgggggagggacctggcgcactatccaatcagggccgcggggcggggt

SEQ ID NO: 29582 - DNA, 122 bp, Homo sapiens
tttcatataataaactgcttgattttaacttttaggcaaatttgttgactactgagacagcggtttgaaggtatcagattcactatggaaacttttaggaaataggttcccctagtgaaact

SEQ ID NO: 29583 - DNA, 122 bp, Homo sapiens
gggctctgacctgacacccacctcaacagctgtcagcacccccctccatcagagagaagacggagccagtgtgctgggcaccctggggtcataaggctgatactagaaccctggcccctgta

SEQ ID NO: 29584 - DNA, 122 bp, Homo sapiens
ggctagaagtttcatgtttggaaaggtttggaaaagaaccccttcagacttctgtaaccacgtagccaaataaaatttggaaattttgaagcctttgatcactactcagaatgtggataaga

SEQ ID NO: 29585 - DNA, 122 bp, Homo sapiens
cagaacccaattgtgatgtgataaaaggcttatgaccagggcagggggcagctgctgggccgccttggacaaccatcaggcagccaggacacagaggggcagagcaagtcagcattggcgcc

SEQ ID NO: 29586 - DNA, 122 bp, Homo sapiens
ggaaagagctgacagagaaggcggacggcatggtgttgggaagcccgctctcacagcaaccgccgaacccggcctggccagaatccacagaggagggcgccaaatcctctctcgtgagatct

SEQ ID NO: 29587 - DNA, 122 bp, Homo sapiens
ggacccgaaccggatccttacttacgcttgtctccgggctattagccgatgcatgggagtcgccatcttagcgcggtcaaagccggccgcgcagggttttgggaaactcctcggaagggcgg

SEQ ID NO: 29588 - DNA, 122 bp, Homo sapiens
caactgctttgcatcgccactgttgcttcttctagaatgtcctataaatggacatcagaccgactatggctttttgggttcttccccccacagcatcgtgtttttcagctccacccacgtgg

SEQ ID NO: 29589 - DNA, 122 bp, Homo sapiens
gaaggcttgaccagcccacagcatggcctctcagctaaccctctgaggaccatctctggacgagcagggatggaagctctacagagagtgccatgaacagggcaaatgcatcctctgctccc

SEQ ID NO: 29590 - DNA, 122 bp, Homo sapiens
ggggagatgtggcgcggggcgggagttggggctgcgtgtgccgtgggcgagcaggggttccgggtgggcacaggctcgtcgggaggagggcactgagcacagccagctggcgcctgctgggc

SEQ ID NO: 29591 - DNA, 122 bp, Homo sapiens
atataaagtccgttccttcttaaaaggcgctgctctggttgctaagtagctgaggctctgcgtcatagaggattagtgctgaaatgtgtcagggagagggctctgtcctctcccttttaagt

SEQ ID NO: 29592 - DNA, 122 bp, Homo sapiens
aaaaattaccaagaatttcaagacgggaacagcagagcatcaagccagctggggtgggtgcgcgcgactgcccttgaagccggccccgctcccgcattggggacagcacggggcggaggccg

SEQ ID NO: 29593 - DNA, 122 bp, Homo sapiens
gacgtgcaactcaaaaggcgctcttcctcctggatggaagggggaacgcctgggggacagcgtgaagtcccgcagcgcgacgccctgaaagcagcctggatttcattctcccgtagcatctt

SEQ ID NO: 29594 - DNA, 122 bp, Homo sapiens
gtatattccagaattgccacacagttagttgaacaattttatcagtcaaatttatcctcacgaaatctagcacttataggtgaagatgcatcccaaatgaaatgctcttattttcagattta

SEQ ID NO: 29595 - DNA, 122 bp, Homo sapiens
gagctccaatccaggaggctcagagcgctgcgagaggcgttttaacagagccccaaaccccgccccacctgtttgctttcgccctgaagagcgtttgtgtctgctcctcccgcagagagggc

SEQ ID NO: 29596 - DNA, 122 bp, Homo sapiens
aattctcatttcatgtttgtgtcttccttttctctgtatttcctcttgtgtgtgttaagacgcgcgcaccccttacctgtttttcactcctgtaagcaagtgccaatcttaatcaccgcttt

SEQ ID NO: 29597 - DNA, 122 bp, Homo sapiens
ccgtgcgctctcacagccgcgtgtggctctgtggtcgctggattccaaaagacggtgcgccggaaaaaaataaacatatctctctatctataatattatgaagggcgggcgcggtggctcac

SEQ ID NO: 29598 - DNA, 122 bp, Homo sapiens
aagacgtccattctgcaggcatttatgatttgcttactgtttgtcaggctctgtttcttgcgggggcagtggaaggggtgtccgggggcctggagacgaatagggcaggagtgatgggggtc

SEQ ID NO: 29599 - DNA, 122 bp, Homo sapiens
gggcaccacacggagcttctttgaagaccctcctcagataaactgctgagttgcaggtgtcgccaccttgcgtcctgccacccttgctaaccacaatcgctccagcactttcagccgacaaa

SEQ ID NO: 29600 - DNA, 122 bp, Homo sapiens
tgtcggttcttcctggactggcgctttggttgcccaaagttgggcgcagattgtttcgtgcggaggttgttgggacccagagtattctatatacaaaggcaaccgagagccggagggagagg

SEQ ID NO: 29601 - DNA, 122 bp, Homo sapiens
ccgggcccgagcgcccgcgcgcccgcgcgctcttgcaggtgcctccgggacgcgcgcgggcggctgtcctgcttgtttaatgataggaggacgggattctgcagcgtccttagcctagcggg

SEQ ID NO: 29602 - DNA, 122 bp, Homo sapiens
cgggcggtactcgttttctgcgctcattttggttagtggtgaggggcccgggtcggcctccgggcgcacttgcgaccgcggggactgtggccggggctgcccctcttgctcctggagcgagg

SEQ ID NO: 29603 - DNA, 122 bp, Homo sapiens
aatgcttctgtaatttgaatatctgcatactgtcccattaacacatcatccaccaggtagcgcttataaagaagcaattgcagcttctttaggtaattaatctaataactagttcaaactat

SEQ ID NO: 29604 - DNA, 122 bp, Homo sapiens
ctcgcctccctaggctcgagtcccgactgggcttgagggcccggctgggcgggattcggacgcggggggcggagccgggacagggattgactctggggtttgcactcagtgcgcgctttggc

SEQ ID NO: 29605 - DNA, 122 bp, Homo sapiens
ggcttcgcgtcgcccagcggcagatcgggctcctgggagcctctcccctggccgtttgctcggcctcggccccagctgccctggggcctagccactagctcccctggcgctagcctaccctg

SEQ ID NO: 29606 - DNA, 122 bp, Homo sapiens
tacccatgcatcgctgggccgatgatgaaaatgaagaagtcttctgatgaagcgagaccccggaagtgcagcttcaggcaaaatcctgagcgaattctttgctgccaggacagtccataggc

SEQ ID NO: 29607 - DNA, 122 bp, Homo sapiens
ataactggtggatggatgaaaagcattttgcagatatcttagaacatcacagtttcgatacgttgaggaattactattttcttatgattttcaagctgtagaagtgagggtttttacttaca

SEQ ID NO: 29608 - DNA, 122 bp, Homo sapiens
taccacgtcgtagggcctcaaataaattccttctccttcttgcccttgacagagatagcacgagatatcactaccattcccacttcacacgtggaggaaatccaacgcgagaacgctcggat

SEQ ID NO: 29609 - DNA, 122 bp, Homo sapiens
ggtcgttgcactcctggctgtggtgaagtcagtcttttcgcactttgccattggagtgggcgctattcaataacgtgcaccagtgcctgcaatcacccggagatttccactgggcagggcga

SEQ ID NO: 29610 - DNA, 122 bp, Homo sapiens
cctcctgtcggcggccaccgggcgcatagtgagctcactgctgctggagccggaggactgcgcggcagccgtggcctactgcctgccgcgcgaggcgctgtggctgctgaccagggctgggc

SEQ ID NO: 29611 - DNA, 122 bp, Homo sapiens
ccatgttcgctttcagacgggcctcctggcaagctcttggttgactgtccccagatgttccgggaacccacccctcccccacaccctcccgccccaaccctccgcagagaagccgaggacca

SEQ ID NO: 29612 - DNA, 122 bp, Homo sapiens
agagtaacagatgaactagacttagaagctgggagtctttgccctcttcatgcccttttacgttaaggtcatcatgtcaactaaaccttagcattttccaatctttaataaatgggaagggg

SEQ ID NO: 29613 - DNA, 122 bp, Homo sapiens
tgcaactggctgcggaagccgcagccgctcgagccacgcaccagtttcccctcggcgcgccgctccgagttccgtccacccaggaggctgccatgggccggccctgcctccgcccagtccga

SEQ ID NO: 29614 - DNA, 122 bp, Homo sapiens
tgcttctggttccattcaatttaaaccacctactgggtgcttaatagtcttggccgggtgcgtggcacacgcctataatcccagcactttgggaggccgaggtgggtggatcacctgaggtc

SEQ ID NO: 29615 - DNA, 122 bp, Homo sapiens
gcccctcacttgggtcaaggcagcatttcagaggaagccaggagcgagaactcgtgcatccgaacccttctctgacttggcgggttattggattagctactctcagaagacccaaaaggcat

SEQ ID NO: 29616 - DNA, 122 bp, Homo sapiens
ccaggtcctggctgacaaggaggcctgaggggaacttcacatgccaccaaccccactgcccgcctacctcccaggctctgtgcgtcccacagtcccactcctgaccaccagccaccctactc

SEQ ID NO: 29617 - DNA, 122 bp, Homo sapiens
gccaccagtttttgtttctttggtgaggaatcggttcacggtgaaacttcattcctcagccggtggggagccgaggctgggccgggcggcgagggttgcgctgggacgcactgccccctact

SEQ ID NO: 29618 - DNA, 122 bp, Homo sapiens
ggctcttggcagtcgccctccaggccacccctctctagttggtagccgggagtatggtagcgcgtgtgcagggcagatagcacacagagcgcttggcgatttggttgggagtcgccagcgcc

SEQ ID NO: 29619 - DNA, 122 bp, Homo sapiens
gagctcgcgcggccgggagtcgcctcggtcttccttggggcgcgcgcagatgtgagcgtgcgagagttgtgtaggggattttgttccctccgaaactgagacccagggcgcccagtgggcac

SEQ ID NO: 29620 - DNA, 122 bp, Homo sapiens
ctgtctcccacctcagccggcgagctccatgaggtgactacgtccggggttactccaggccgttcacctccgaccccgctccgggctgcggcgctgccagggccgccggggggcgaggcgcg

SEQ ID NO: 29621 - DNA, 122 bp, Homo sapiens
aatatcataaccaatatgtggaggttgatatagtcaacatacagaatatttccattaccacggaatccctcatgttgttctttcctagccacatctattttcctctttttcacctcatcttt

SEQ ID NO: 29622 - DNA, 122 bp, Homo sapiens
ggactcagagcagctgaaaggccagggacacgggagcaggaggtggcaggatacctggtgcggtgccgaggggcctgggaaacaaaacacagcccccccaaggctggcgggggacggccgga

SEQ ID NO: 29623 - DNA, 122 bp, Homo sapiens
cctgtgttgtatctccttactgtaaatatccttttgtatagtcatgcttttttccccttgcgtcttacatgtgtgtctttcttaatattcactttctccagtcttctactgtttattttccc

SEQ ID NO: 29624 - DNA, 122 bp, Homo sapiens
gagcccaccgcctgttgcagccaaagccgcgatgctctgtctgggtctggcgcggtcagccgggctcccgcacggggacgcctcctccctccttctcgcgctctccgccccctcccctgcgg

SEQ ID NO: 29625 - DNA, 122 bp, Homo sapiens
agttctgcggcgccaggttgaggccgccagagtggcgcacggagctagggtacatgctcacgtccttgtccaggaggtagctcacgtacatggtggcgagggtccgggagcagacctcacca

SEQ ID NO: 29626 - DNA, 122 bp, Homo sapiens
tcttggggcagagcaagaaagagacgtccatccacgtggataaagacacacacagacacacgatgggctttgtcacacacaatggtctgtactttgtgacacacacctctactcaccacacc

SEQ ID NO: 29627 - DNA, 122 bp, Homo sapiens
tcagggtccggccctccgggaagggcctcagggcctgggtcggcagagctggaagggtctcggcggtcagccgggccaggtcctgcatttgcagatgaggagactgaggttcacagagatga

SEQ ID NO: 29628 - DNA, 122 bp, Homo sapiens
acctaaagataacaactgaaacaatatcatggaagaaatgtccttaacactaatatttaacgaacaacttctgtcttcagagcatcaagatgtttttcaaagtttattatcttattctgttg

SEQ ID NO: 29629 - DNA, 122 bp, Homo sapiens
agaacacctcgtggggaggggaaagctgtttttcactcaaggctggctcacttctgaggccgctgctgggacagggaactcctaaggctcactctgggtaggtctttgtcgaagggggcatt

SEQ ID NO: 29630 - DNA, 122 bp, Homo sapiens
aagctgcagaacccaaaaacaccgtcgggccgtttcccgactaagggagggttaaaagtacggcaagctctgtcccatcatgtaaggtaaaaagacctcaggaaaagcacattcaaaggggg

SEQ ID NO: 29631 - DNA, 122 bp, Homo sapiens
tgggttgcagcgcatgtggggctccctgggctggggcctggcgatgctgtctgtgggcatcgggatcgactacacccacatcgaagtgctcatcgatggaaaggggtgtaagccccccgagt

SEQ ID NO: 29632 - DNA, 122 bp, Homo sapiens
cttgcgcacggccgccgcggcgtctgggctccccatctcggccaggtcccgcaccaggagcgttagcagtgtggcccaggatacaaactgcatggtgcttcccacccctccctccgctgccc

SEQ ID NO: 29633 - DNA, 122 bp, Homo sapiens
tttcattctggggtcctgttgcctccctgggtacttccagaagcccgaacctaagcctttcgactttattcgcatacctccctcacatttctctctttccaccaggagttggaattagggag

SEQ ID NO: 29634 - DNA, 122 bp, Homo sapiens
gtggcagcggcggtggcagcggcactgggaaacccagcaaagctaaagctatgctggaggcggggacggtcagcggagaggtcccgggccccggccagggcacggcgctcttcagcgttgtg

SEQ ID NO: 29635 - DNA, 122 bp, Homo sapiens
cacaggagaaaaccccaggggctgattgtcccttctacttggaatgctggtttgctaatccggagagaaaagactgctgcagtccccagtaatgtaattagcacacacttgctggagaaggg

SEQ ID NO: 29636 - DNA, 122 bp, Homo sapiens
gcagtcttcagaaaagtgacccccaacaaagagtaatattgactagactccacagcagaccggcagtgttttggagaacttaggcgtggtcccgtttgcctttagtatgggctgtgtctgca

SEQ ID NO: 29637 - DNA, 122 bp, Homo sapiens
ggagagcatgcgccatctagtatggactttggcaaaaaaccataaagctcaaagcagactcgctttgtctactgctgtagcaggactaaagcaaggcaatggtgcggagcagccagtgtttg

SEQ ID NO: 29638 - DNA, 122 bp, Homo sapiens
ccacccgggaggccacagcaagagccccagggtccgggaccccagggtaggggtgcgccccgtggccagtgtcagcccagaagctcacacgcccaccatgacggagccttgtccgcccgccc

SEQ ID NO: 29639 - DNA, 122 bp, Homo sapiens
ctttcatctcggctctaactttctcacacagtgaggtcagattcattgtctggaagatgccgaggaccactttccatgcctgaccttttgggaagtgttcatccaaaagaaaggacagattc

SEQ ID NO: 29640 - DNA, 122 bp, Homo sapiens
ttgaagcctggctcgctctactggggcttcttgtaggaaaacgcttggctttcccgggcgcggtagctcatgtctgtagaccccgcacttcggccggcagaggcgggcggctcacgaggtca

SEQ ID NO: 29641 - DNA, 122 bp, Homo sapiens
ctctgcagctgattggctctggagtgtggccagaagcctctctcctgcaattaaaggagtcgggtctctaactgttgatctgtttttttcccttctgagcaatggagcttaccatctttatc

SEQ ID NO: 29642 - DNA, 122 bp, Homo sapiens
aggctcaacttcctgtaccaggtgagtctgcgacaagggccccacggggacggtgctcggcgtcccagagtgactgctcccctcccgcaggccgcccattgtgtccttgcccaggaccccga

SEQ ID NO: 29643 - DNA, 122 bp, Homo sapiens
ttagtcccaaccactcagaaacgttaaaaactgatctaataaaaataaagaaccttaagacgcattaaactctaagctacttggaagctgcttcttctgtttgtggacacgcagatttgcca

SEQ ID NO: 29644 - DNA, 122 bp, Homo sapiens
agggtggctatagctcaggagagtgctcgaaaaaccccatgcatagctcaaaaaaccccacgcgtagctcagatgctctcaggctcaggtgcctaccgaggatgtcacgcattcccagtgct

SEQ ID NO: 29645 - DNA, 122 bp, Homo sapiens
ctcctacgcgctgattggctgcaagtcttgccttccaggcaaaacacgcttttgctctctcgctcctatgctctcctctctctctctctctcccttttccttctctcctccctcctctctct

SEQ ID NO: 29646 - DNA, 122 bp, Homo sapiens
cttcagctctcaggccccacgtgggggctctgaaggtgggctatagaaagatgtgaatgtcgggacaattaagggtgtgaataggagagtttctgtttccaattccagacagtgatcaacac

SEQ ID NO: 29647 - DNA, 122 bp, Homo sapiens
ccgaggttggtggagtggcgggcggggccgagctggaggctggtggtgcgctgcctactccgggagcggggccgggtccctgagcaacgacgggcttggaagagtcctgcggcggtggcggc

SEQ ID NO: 29648 - DNA, 122 bp, Homo sapiens
aattccgggcgtttcggctccttggtcgcagaggcaggaggcgtgcgtggcaggagggttcgggttatatactcctaggtcctgggacagaatagttacgacctctgggacaggaactcttc

SEQ ID NO: 29649 - DNA, 122 bp, Homo sapiens
catcggaagaccccaggatgctgggtcagcggctaggcgggtggagggtggggttgtccccggcacacagcggtgctgctctgccactctgcactgctgggtgtctcacatctcatccctgt

SEQ ID NO: 29650 - DNA, 122 bp, Homo sapiens
ttttttttttggcacaggtggaccaacggggggtgtgactgtgggcaccgtgcgcggaggcggaggctcatctggttcccaccctccgtgccgctggatgccccaggattttctccaaccgg

SEQ ID NO: 29651 - DNA, 122 bp, Homo sapiens
tctccgtgtcagggctggggtgaagagagctgaggggcgctttgccttccctcaccggtgcgttttacctctcgaggcaccgtaagtttgaagtcctccaagttgtggtcggcgccatcatg

SEQ ID NO: 29652 - DNA, 122 bp, Homo sapiens
caccttgctcaaagaaagtggagctctgcccagagatggaagtacctgcttccagaggctcgttgcagggtgataaggtgacccaccactgattcccactctgaaaccctcaacagcccaga

SEQ ID NO: 29653 - DNA, 122 bp, Homo sapiens
gagactcactgacctgccagtcattatgggttcgccagtgtgctcatgaggcattacaaacgttatatgtgaatgaggagacaaggaacaatagacacatatattgcatgtgtctcctctgc

SEQ ID NO: 29654 - DNA, 122 bp, Homo sapiens
ctgggaaaaggaagcacaaaaaggagaagcagcaacggctgctctgcttccttcccatctcgctcttgggtcatgcctggccagcagaaagcagctccataggggaggagagccacgcagga

SEQ ID NO: 29655 - DNA, 122 bp, Homo sapiens
cggcgatcttgtagcccagctgggccagcacctgctggcaggcgttctgggcaaaggccacgatgtcgtaggagaggcggaagcgccacttctcggccgtggccgccgagtttcgcacggtg

SEQ ID NO: 29656 - DNA, 122 bp, Homo sapiens
gggttgtcatcgtttctttgggcaaggaaggggggacccgagcgttcgtgtgtcatccagcgcaggctttgatgaggctgatgagtcatggagccatacaaggaagtttttcatgtaaacgg

SEQ ID NO: 29657 - DNA, 122 bp, Homo sapiens
acctcaggtgatctgcctgcctcggcctcccaaagtgctgggattacaagcatgagccaccgcacctggacctgcagtgtgttttgatcagtattattgagaatgaggcaccagtttcctct

SEQ ID NO: 29658 - DNA, 122 bp, Homo sapiens
gaaatcttaatctgcaacatctcttggctttacccctttcattcactgtttcctgttttccgtgtaccctcttgatttctttccaggccttctctttctcagactcacacactccttccatt

SEQ ID NO: 29659 - DNA, 122 bp, Homo sapiens
tcgagtctccttctcatttccgcgtgtctggaatgccaccaggagccccaaggcacagcacgtgcgaggcagggctgcggcacacactgaccatctggcctctgaaaggtaagcgaggcagg

SEQ ID NO: 29660 - DNA, 122 bp, Homo sapiens
tgaggtctcaaagcagatctgctgattcacagtctctacggtggtactcacactgggctgcgcacgggaatcacctggggagcattaaaactcctgatgtttgaatcccacaccctgaattt

SEQ ID NO: 29661 - DNA, 122 bp, Homo sapiens
ccttgttacagacattgcagataaatgccctttataagtatacattctccacatcctctacgttactttcttcaatttgatgagctcatcctaacgtttagataaatcattaacctactacc

SEQ ID NO: 29662 - DNA, 122 bp, Homo sapiens
gggaggtaggggcagaataggtttccctgagaagtgttatctgaaattcaattagcccaacgagaccagcagggggcagtgttctaggcaggacagaggtgatattagcgaatagtacacat

SEQ ID NO: 29663 - DNA, 122 bp, Homo sapiens
cttgacaggtcaaggtggaattcagtcccctgcatttttgtacccctacccgtttctttccgcacctggacaactacagcaagaccagtagagacacatcccattgagaaacacaaggctct

SEQ ID NO: 29664 - DNA, 122 bp, Homo sapiens
gcggggcactcacagctgccgctatgaaaatgcagacctgtggggcaggaattccgagtccggggtggagcgcgatgtggaatctgactcgcttgaaacagcaccgcggtggattcggatcc

SEQ ID NO: 29665 - DNA, 122 bp, Homo sapiens
atctaatcaaggtttatggatcacctactgagggcaaagccatgtgctggctatgacttgcggggtggggatggtgtataaaacttgtactttcccctcaaagggcttccagcctggcgtgc

SEQ ID NO: 29666 - DNA, 122 bp, Homo sapiens
cacgcctggagtgagctcagctggcccggctgaatcaaagtcccctctgagcagcgaggccgccgtgctcattgcctcgacccaccgccgcgggggcgtcctgaggaggggggccctgcatc

SEQ ID NO: 29667 - DNA, 122 bp, Homo sapiens
acgtcctccttttgccggcgaaagactggcaaggggggcgcaggcgcaaagaggtcgctacgcgcacgcgctgttgttttctcggctgtgcaccaggctgtcgtgcccgggcacgctctccc

SEQ ID NO: 29668 - DNA, 122 bp, Homo sapiens
cacatggtaggtgcttggcaaatatgtataaaaacatgccatgtaacaaaaaaggaggaacgaactgtgacctctgcccttaaggaaggtaagacttaacctaggagtagacaaacatccag

SEQ ID NO: 29669 - DNA, 122 bp, Homo sapiens
ggtcattcagtatataattgtttcattgtttcgtgaaaacaagggacctatgccagggtgcgttaagggcctaggcctaggtccccttgtaggtgtgttataatcaacgtcattcagtatgt

SEQ ID NO: 29670 - DNA, 122 bp, Homo sapiens
ctccactgctcagataccgtggagaaagagggacgagcttctcagatactccaaatgacacgtgccaaacacgtggaaggtaaatcccctaatacagtctgttcttccagcattccctggca

SEQ ID NO: 29671 - DNA, 122 bp, Homo sapiens
gggtcaggcacactaagtttgcgctttagtatatggtgaataaatggatggacacagtggcggctctgtataagtcagctgaaagcaaacaaagggaaggcagaatctttcattcacacgat

SEQ ID NO: 29672 - DNA, 122 bp, Homo sapiens
gagctgagcacagagggccctgatggggggccgggcaggcaggcgcaggctctgagaagccgccgcctcatcccacagagctgctgcctccgcctgcataaagtgctggagccctacaagcc

SEQ ID NO: 29673 - DNA, 122 bp, Homo sapiens
tgattaagggacctgttccctccacccgtggctcaccagcccctagacctcaaaggtttccgcattcactggcagacaggaaatgacaatagaagaagcccagcctgtatcttaaaagccct

SEQ ID NO: 29674 - DNA, 122 bp, Homo sapiens
gtttccggggagagagcccgaagagcaagggcctcggcagcttcctcagtggggcagggccggcgatgccagccagggacgccggagaggctgggggtccccgccccgcggaacctgcccta

SEQ ID NO: 29675 - DNA, 122 bp, Homo sapiens
ttcccctggcgcagctcagccctgggtccccttggcctcagggtgggtctgggcggcagtcgggaccccaggcgtcctgtcgtccctgctcggcgactgggacccctgccccggagctctct

SEQ ID NO: 29676 - DNA, 122 bp, Homo sapiens
agcagcggcggccctgcccccgccctgccaatgcccctctccgcctgcctcgacctctcccgccttctcaggccgcccccacgcgcccgcccgccgcaccgagtcccacagggtctgctcgg

SEQ ID NO: 29677 - DNA, 122 bp, Homo sapiens
gtggcaactccccacttctctctctgtttttcaacccaaatcctagagcagagggctcttcgctcctcacaccatctccaccaggctgcagggggagtcactagcccactcaagagctctct

SEQ ID NO: 29678 - DNA, 122 bp, Homo sapiens
tgtttgcaggtacggggcggccgggggtaggggtgcccctgcaggtgcgggaccgccgggcgtggggatcccctgagcccgaatctcccatgggggtgccagggtaccaagaacaagacaca

SEQ ID NO: 29679 - DNA, 122 bp, Homo sapiens
ctgggttaaaagcagtgacttcatctctttgggaaacggtgactcattaaaagcaacgggcggcttcccattacattcacgttatagcaagaaggcgaggcacttggtgcatcccgtaatag

SEQ ID NO: 29680 - DNA, 122 bp, Homo sapiens
gccacagactccgtagatccggtacagtccacacacaggaaattcaggtacagccaggggcggccctgccagggacggtgtggttactgtgtttccatccatttggtgtttcgattttattc

SEQ ID NO: 29681 - DNA, 122 bp, Homo sapiens
gccaaaagcagctatgagcggagacagccaaatctatgccagcctcggcaaacgccgattcgtccgcagtcacttccggcagtcgctctaaaaagtacaggaagtcctgcttctctctgaca

SEQ ID NO: 29682 - DNA, 122 bp, Homo sapiens
ctagctctagatccaccttttgaggggatcatctctagccgctgtacaatttttgtcttccggggtgagaaacagccactcctgggatttccaacactcggagcccggagccatgctgccct

SEQ ID NO: 29683 - DNA, 122 bp, Homo sapiens
gagcaccctgctgagcacggcgcggccgtttgtcttctgcctggcctgtgccgggccattcgtacattctcacgtgaagcctgtgaggcaggtcttgttactgtgccatcttagcggtggga

SEQ ID NO: 29684 - DNA, 122 bp, Homo sapiens
gccgtttcctcgcagcatttttaaggacgctgaagaactgggggaaagctgggtttgtctcgggccacttggtgactgcactgtgaggaaaagcttgcctatagcaacacagaggccagcag

SEQ ID NO: 29685 - DNA, 122 bp, Homo sapiens
cagcagggtggattgtgcccttcctgtctcaggaaaattgcttcggttcccgaggcccagcgaacacgctgccttgaggaaacttaagtttgcactcaagtttgtagacaaaagggtgtaaa

SEQ ID NO: 29686 - DNA, 122 bp, Homo sapiens
attgtccagcaggtggagatagagacaaacaaataaaacttgaaatctaggctttcataacgtctttatcattgttgtgtgctaaatacagtgggataaatgtagctagttgcttactttaa

SEQ ID NO: 29687 - DNA, 122 bp, Homo sapiens
cagcaccttcgcgggccagccacaagccgaggtgcccgctggtgctcaacagcgccaaagcgtgtggcccctcccaggacgctgcgccctgccgggcctccccgtcctagagctctgcttct

SEQ ID NO: 29688 - DNA, 122 bp, Homo sapiens
gccccctgggtttgagcacacatctgacagttgtaatcctccagctatgttttctgcaaacggatggtcattttgggctttctggtctctaatccttcattcagcaaagcaaacaccctaaa

SEQ ID NO: 29689 - DNA, 122 bp, Homo sapiens
tagcctgaaggtcggatggatctgagcttctcctggcattccctacctcctctggcctcccggggggccagccaccccctagaggagccccaggcttctgattccaaggtcgggttttcttc

SEQ ID NO: 29690 - DNA, 122 bp, Homo sapiens
ccgtgggctccggctgggtggggggctccgcctcggtgctgctgccctggctgctgcggccgctgctactggtggacggggccttgatgatgatggtggggatggggatggagttcttctcc

SEQ ID NO: 29691 - DNA, 122 bp, Homo sapiens
taattgcaggcttattgttatattataacctcacatgggggagtgggtggtagggtgggccgaagctcaagacagataatggccttgtagatctgcaaccctcagatcacccacacctcttc

SEQ ID NO: 29692 - DNA, 122 bp, Homo sapiens
gtttctttttacacacacacgacggcatcacgctgccagtgtggttctgagccgcagcggcgctctgggagacttccttccagcacacagagctacttcattaaaggacaaaaatgaaaccg

SEQ ID NO: 29693 - DNA, 122 bp, Homo sapiens
cgctccccagtcatctctccccgcagctgccgcgaccctggcagctagactccacagagtcgggagtcagctgacccggaccctttaaagcgcagatgtcacccttaagcccgccccggtct

SEQ ID NO: 29694 - DNA, 122 bp, Homo sapiens
acattttccacattgctgctggagtgatcttttaaaaatgcaactccgatgttgcctgtccgtcgggtacattcttcaatagctcttctttgccttcagtcttgctgtcatcctgttctccc

SEQ ID NO: 29695 - DNA, 122 bp, Homo sapiens
tccaaaagccctggcagagaccaagactaaaacagatctgatctaagactgtcaggctcccgaggagacatcctgctgactgctggaaagctctgcccaaggcaagcttgagacttagccaa

SEQ ID NO: 29696 - DNA, 122 bp, Homo sapiens
acattaaaattcaaaaatcactgagttttgctcaaagttagctttcacttagccacttttcgagaaaaatataaatcatgtcctggttattggagtgacaagaaatggagagcacgcgctga

SEQ ID NO: 29697 - DNA, 122 bp, Homo sapiens
gcagtatggcctggtctatatgcacagtggagtactgtacggcctaatctatatacacagcggagtgcactatggcctggtctatatacacagcggagtgctgcatggcctggtctacgtac

SEQ ID NO: 29698 - DNA, 122 bp, Homo sapiens
cagttttagggagtcggtggaagggttctgtgggatttggggtgacattttttccacctacgcattttcagtaaaggaaaatccaaaataactcgacatgaagggcaacatggggctccagg

SEQ ID NO: 29699 - DNA, 122 bp, Homo sapiens
tctccctctggggggtttgtgtgtataagtgcgtgggcagggaggccgcggaggcggcgccgcgggcgctctcacttgtaagctccttgaagaccaggacaccgtttaattcagcatcttac

SEQ ID NO: 29700 - DNA, 122 bp, Homo sapiens
ggcgagaggggcgggggaggtgctgcggtccgcgcaggcgcgccgaggacgccagggcggcgcatgagtgctgtgcccgtccacctcgggaactaccgagaagatggtggctgagccaggag

SEQ ID NO: 29701 - DNA, 122 bp, Homo sapiens
attcactttggccaagaattgaatgaaagtaacccaaatcactccttgaaaattaacacacgttcagtgtgaaaatgaatacactaatacactgttaaatctccattagatgtattaaacct

SEQ ID NO: 29702 - DNA, 122 bp, Homo sapiens
cgggtgaggctacgggttgcacagatggcgtgcagtggcgtgccagcccaggcccagggccgtacccacagttggagccaggagagggctgcgggtgggggccccagggaactgagacaccg

SEQ ID NO: 29703 - DNA, 122 bp, Homo sapiens
ggaaccgggcgaggcaatgccacaggcccagggttagagggggtgggcacttgcagctgccgatgtggctggatctggaacttctcagacggctcctgtcagcgccaagtttcaccaaatcc

SEQ ID NO: 29704 - DNA, 122 bp, Homo sapiens
cgcgagagaggagggggcatctggacttgactccctggagctctgggctggcccttccaccgacggggccgactgggagaagcaggttacagaggggcacagccgagggcgccgcccagaca

SEQ ID NO: 29705 - DNA, 122 bp, Homo sapiens
agtgcaggtaacagctgaggtaagtgtaggaaagtcggaggaagaattgcagttaaaaagcgttatgagaactttcacatctatcttagcgcctgctttggttgactagctggaaactcagg

SEQ ID NO: 29706 - DNA, 122 bp, Homo sapiens
gagcccacggtgtgtggccgcagccctggccgtgaccgtggccgtccaaaacccaggtggcggtttgtcactctatgaacccgcctgccgtgtttccgtgcccccgtacgaggtctgggatg

SEQ ID NO: 29707 - DNA, 122 bp, Homo sapiens
ttcagcccgggccacagagtagcgcgtacccggtgcttactgtttaaggaggacgattggcgtctggggagctgctttcccatttacctctcagggtgtccttaatttacacaacctggcga

SEQ ID NO: 29708 - DNA, 122 bp, Homo sapiens
tgatactaaggcggtgcgtgtcggtctgggtgatgctaaggggatgcgtgtcgctctgggcggttgtgtaacatggatgtagagaacgcgacagcacccacggctcacctgggaacacaaag

SEQ ID NO: 29709 - DNA, 122 bp, Homo sapiens
gcctgctcggcagtgggcactgggctccccagagaaagattaataggccaggcacagaatcggggaaccctgggacaggaacctcagaccccacaaactcctgctatgtgctctgccaggag

SEQ ID NO: 29710 - DNA, 122 bp, Homo sapiens
cccccagcccctggcccttcttcctgccacattgactgcactggtcgtggaggcccagcacgggagtgggaatgggagtgcatgtgcacagcacagcctgaggccacagccccgagttccgg

SEQ ID NO: 29711 - DNA, 122 bp, Homo sapiens
tttaaggatggatgttgtgttctctttatttttttcctactactttaatccctaaaagaacgctgtgtggctgggacctttaggaaagtgaaatgcaggtgagaagaacctaaacatgaaag

SEQ ID NO: 29712 - DNA, 122 bp, Homo sapiens
cagcttcactcctgaagccagtgagaccacgaacccaccagaaagaagaaactccagacacgtctgaacatctgaaggaacaaactctggacacagcatctttaagaactgtaacactcact

SEQ ID NO: 29713 - DNA, 122 bp, Homo sapiens
catggagatgaaggtcaacgtgccccgctggaccgtgcaagcccggcaggcggcgggcgccgagctcctgtccacggtcagcgccggcccctcctcggtcgtgtccttgcaggagcgcgggg

SEQ ID NO: 29714 - DNA, 122 bp, Homo sapiens
aatggcaacaaaagctactttcatggtaatctcacatcccacgaatactgaaatgaaaatcgccgcggcaatggactgtggttcaggtggaacacgttctcgttcgctaaggagattgatgc

SEQ ID NO: 29715 - DNA, 122 bp, Homo sapiens
agggactgttccagtttgcagtgtgcccagctatttatgaccatattattttttagactccgtctaaaaaaaaaaaagacttgtatttaatgtgatttaatcgactgtgcccatctcactgc

SEQ ID NO: 29716 - DNA, 122 bp, Homo sapiens
tataacaaaatatcattgcaatgcatatctttatggatattttgtgaaatttttgtttgccgtattgttacttatattggagttgcagtgttaaatgtttttaatgtgggttacagtcaaaa

SEQ ID NO: 29717 - DNA, 122 bp, Homo sapiens
caagcccgagtgcagaggccgacgctgaggctgcggggaggctgggtcgcggcttgcagccgccgctcctccacctgtagtcctgactggcaaatgcccaccgttgagccgctttggggggc

SEQ ID NO: 29718 - DNA, 122 bp, Homo sapiens
gacctacccacacagaccagcccctccccaaggacctggtaagccaaaggtgggaatgctcgtgcaactctcttgtgggaaaagagtcaacatgcttctcttccctttcagattccctctga

SEQ ID NO: 29719 - DNA, 122 bp, Homo sapiens
ctgccccatgcgctcctctctgcctccacctcagtgggcctgcctgggaccttgggggtccgtctcccaaaagctgcagccctgggtatggtgagcccctcagtgtccccaggctgatggac

SEQ ID NO: 29720 - DNA, 122 bp, Homo sapiens
gcccaggcttcttggtccccacccccgccctgtccttgggcagccaggagcccagggggacgaagcccagggacctacagtacgcccaccttcaggctgctctcccagaccctagggtgcct

SEQ ID NO: 29721 - DNA, 122 bp, Homo sapiens
ttcaataatgactgcaaactagaagaagagatattgtttgtaaaatctttagacgctgaccgtaccagagcatctattcttgctgctataaaaacttggtttggggctgggagcagtggctc

SEQ ID NO: 29722 - DNA, 122 bp, Homo sapiens
agcacagcccttgtcggggatttcttagggctggagttggtggccactttgcaaagcctccgcggttgcgattcctaaccaggatctcagctttcgaccgggatcgctggggaaggaaggac

SEQ ID NO: 29723 - DNA, 122 bp, Homo sapiens
atgtttctgggctaaatcggataggtgtgctcactctgtccaggccccagtgggctctctcggccgcccccagcgtcttcacccttgaaggctgtaagaccccagcttaggagctgggaaga

SEQ ID NO: 29724 - DNA, 122 bp, Homo sapiens
atcatgagtcagaaattcaagccaccagatgctttccaactaacagggaccaaatgggaccgttctaagatatcctaaaagatttgggagttagaggaggtaaactaagataattatattac

SEQ ID NO: 29725 - DNA, 122 bp, Homo sapiens
gccctgctgggcgtcctgcacaagccactggcccactctgggcttcttccattaatccctcggcaaaatgagggggagatttgacctagaatgtgctctgcaaaaagtgtcttcccgtggct

SEQ ID NO: 29726 - DNA, 122 bp, Homo sapiens
aacggggctcaaatcacgtgagggaaggagaaatcttcaaccaaggaggcgagcggagcacgggtatctcagtctccaccaagcaatgccaagggtgggattcagacccttccccagtcaag

SEQ ID NO: 29727 - DNA, 122 bp, Homo sapiens
catatttacagagctttactcacaaaagccaaagcccagagatccaaatgttctttgcaccgtggatgaataagggtctataaagcagcagcaccaggagccgtgcagtgcaggatcctcct

SEQ ID NO: 29728 - DNA, 122 bp, Homo sapiens
acccggtgggcctgggcgggcggtgcagggctggggcgagagcccgggtggggccaggcccgggcccacctgaaagcgcctcgatggccttgagggcccagctctcgtccgggcagtccacg

SEQ ID NO: 29729 - DNA, 122 bp, Homo sapiens
ggagccagacctggtctcaggggctgtatatatggggcagcagggcacccccacccccaacggcacccagtccctagccggatttagaaagggctgttgtcactagaagcatttcccccagg

SEQ ID NO: 29730 - DNA, 122 bp, Homo sapiens
caaagtttcccagacaaaagtattctcagttatacattttagacaatctgaaactgaatacgtacatgatttgtaactgttatgacccagcaatcccattcctaagtagcaatcaagagaaa

SEQ ID NO: 29731 - DNA, 122 bp, Homo sapiens
aagctttttttcttattcgcatcttctggcttctctcttccgtcgaacccttttggcaaccgcagggaacacgcatcctcaggttggcacgggaggcggcgaggagctcccggagccaccgg

SEQ ID NO: 29732 - DNA, 122 bp, Homo sapiens
aggctctcctccgactgccccggccaaactccaccatggctccactgctcgatggcctgccggcatctgttggcacctgtcagtgtgctcttccaccaacgtgctcctctcggcgtccagcc

SEQ ID NO: 29733 - DNA, 122 bp, Homo sapiens
cacgaaagggaacagaccgggctcactgtcaaatgccaggcagaccacgtctttccccaacgcaaacctttggcatgctctatgtaggcaccgtcacgtcgtggtgggtgcctccttctcca

SEQ ID NO: 29734 - DNA, 122 bp, Homo sapiens
ccccagcttccgcctcggggagggagtttccacttggtcacgactcaaaaatgtgtcgctcgcgcttctccgccccctcgttcctgccctgggggggtctcctccctcggaaggcaggaggg

SEQ ID NO: 29735 - DNA, 122 bp, Homo sapiens
cctggctgctaggctccgtgacatccggcagtctgagggcggcgggattcgggatgacttcgggcgggtgagtgtccccggggcagagcagagcgagaggtgaaacttcgggagcagggagc

SEQ ID NO: 29736 - DNA, 122 bp, Homo sapiens
aaccaggggacatctgtaggcaggtagatatgccagggatgaggtcaggacacccagctacggtgaagaggggaagactgttatttcaatagcttggcagactcttcttagggaggaacact

SEQ ID NO: 29737 - DNA, 122 bp, Homo sapiens
aaaacgaaaaaaaaccctcttgtgtaatgaacttcccccgcgtgcaaaattcggggaacccgggcggcttgcctctgcctcccgcctgcgcggtctccctagacgaattgcctcccgcctag

SEQ ID NO: 29738 - DNA, 122 bp, Homo sapiens
gggcactggaccagcaccgtgggagaccacttcccctggctaagcctcagtttcctcatccgtgacataaggctacagctcctgtcacctcagaatggctgctaggaccacagtgcagcaaa

SEQ ID NO: 29739 - DNA, 122 bp, Homo sapiens
ctgctccctcgcctttagtttgacctttccctccagtgtgtctgagggagagcggctgtgcgcgcgcgtgtacatgtctctgtgtgtgtgtgcgcgcgcgcgtggggaaggggccgggttcg

SEQ ID NO: 29740 - DNA, 122 bp, Homo sapiens
agtcagacttgatcagaccatcccccctgcctggcaccttctgtggctccctcctgcccgcgggtagagtcgaaaccctttaacatagccttcaagattttaatgactgggccccttccagc

SEQ ID NO: 29741 - DNA, 122 bp, Homo sapiens
ggaggcgcgagctgcccgataatggcggcctgcagagcccatgagagggagaagcggcagcgtctaccctgaggtaaatctggcctttcggcgtggcggagaggtcttgctgcagagccgat

SEQ ID NO: 29742 - DNA, 122 bp, Homo sapiens
tagagctccaggttgatctggcggtttatggcggcctctgagtcctggtgggagttctggcgcacctgcgaggcggacgcggtcgtcatggcggcgactaagcagaggcggcggtggcggcg

SEQ ID NO: 29743 - DNA, 122 bp, Homo sapiens
aaccaagtcttcaagaatgggagtccaaagaaacctggaccatcgtgaagcgactgcccccggaacttgagtggccagctccactttgcgacacggagactgtttgtgtgacacctcctcca

SEQ ID NO: 29744 - DNA, 122 bp, Homo sapiens
ttagttttatctggatggggagatggctgcagacacctgcttagacggccccggggctggcgggccagagggggaggcgctccggccgcccccgacccggacccggactccgggcccccagc

SEQ ID NO: 29745 - DNA, 122 bp, Homo sapiens
ggccccggcgcccctggccctgcgtcgtgccctcgccatcccccgcgatgatgcggccgccggcccatcctctggtcactgccatcttctgcgctccgctccccgaaaagccggcgccgtgc

SEQ ID NO: 29746 - DNA, 122 bp, Homo sapiens
gctgaggcctggaggcgtctacactggctccacatccacttcccccgcagctcgtgtgggcgctcgtccacaaacactccgtggctgagaggcagcggatccaggcagcgatgctgagccac

SEQ ID NO: 29747 - DNA, 122 bp, Homo sapiens
acttaccctagtaactatttggtttattccttttcgtggtgacatatctaagtagttcaacgtccttagcttccttgtgtttttataaacattcttgtgcttcatgtgccttcaggaaatgt

SEQ ID NO: 29748 - DNA, 122 bp, Homo sapiens
acatgactaggattagaactcgggtctctggcttcctgttatgccttttaaagtaggtcacgcagcactttgggagaccaaggcaggaggatcgcttgagccaggaatttgagaccaacctg

SEQ ID NO: 29749 - DNA, 122 bp, Homo sapiens
cggagcaagggtcttcagagcccgagatgcgcgacgcgcaggaagcaccagagagggtggcgggaagaaaaggcacctccatcactttgaaatgtcagaggcaagttgcggctgcgttgaaa

SEQ ID NO: 29750 - DNA, 122 bp, Homo sapiens
gacaaaccatttctagatcggattgagatgtgcgatgaaaagtggattgtatacggcaaccggcgatgaccaggtcagtggttggaccacagagaagctccaaagcacttcccaaagccaaa

SEQ ID NO: 29751 - DNA, 122 bp, Homo sapiens
caatttgcatctccaggtcagccttggtcagggtcagctcatccagcaccctacgcaggccgttgatgtcagcctccacgctctggcgcagagctacctcattctcatacctgaaacaagca

SEQ ID NO: 29752 - DNA, 122 bp, Homo sapiens
ttcgcgtaagaataataggacttgtttaaaaggattggagagtggggggcatcccagatgcgtgagaagcagtatagctaatggttagaagcaggtttgctggagccaggctgcctgggttc

SEQ ID NO: 29753 - DNA, 122 bp, Homo sapiens
gcctgcccaccctgtgcccagtgctgggctgggggacttgcgggcgtgtgggcctggtcacggcctttggccatttcccaccctcctgtcccttcaagttcacagcagggcacgtgacgtgg

SEQ ID NO: 29754 - DNA, 122 bp, Homo sapiens
tgaaagcaacaaattccttgattgcagaggggacaggggaacagagaggcagggctgggacgtagtcacagacacttacacgccagcttgggtgatgggagctgtccacatttgcaagtttc

SEQ ID NO: 29755 - DNA, 122 bp, Homo sapiens
aggaaatgtggcgtggagaacccactgggcctggctctccgtcctatggtctccgtccatcgttttacagtcagggtgtacatttgatgaggaatctctaaatgggattttggggaatcaaa

SEQ ID NO: 29756 - DNA, 122 bp, Homo sapiens
cacatagaggaattgccgggtcgagcagtcgcgtctgttgttactcacaggcctgagaatcgatgaccctggtttgctccagaccctgtgaactggtgatgatctgcaggaagtcgcttctg

SEQ ID NO: 29757 - DNA, 122 bp, Homo sapiens
cagagaaggcaaacctagtgcttgctaaggaagacttcacagaggaggtagtgtcagggccgagactaggagaaggattgtaagtgactagattttactttatccttctcgttaaccaaaat

SEQ ID NO: 29758 - DNA, 122 bp, Homo sapiens
agagttctttacaggttagtgacaggttgtgtcctctcatgttttcagttaacctgcggacgcccaggggctcctccatctccaccgtgttctcctcgggctgaagcccaaagtcccacatt

SEQ ID NO: 29759 - DNA, 122 bp, Homo sapiens
tgggcgccgccatgctggcccaggatcgaccaatcgaggcagttgcaataccggagcagacgaagaccgagagaatggattaggtggcgtgactctgatgacgcaacgcacggggcggagct

SEQ ID NO: 29760 - DNA, 122 bp, Homo sapiens
ggcggggtttaaatacgcagttgggaagccaagggttggatagaggctgggaaggataagcgggaagaagggaaaaccaggcaggtctctgacatttcagaatgttgtgtcctttttctccc

SEQ ID NO: 29761 - DNA, 122 bp, Homo sapiens
tcaggcggcttcgccagcgtggcccaggccagtgtgagtttttttccgcgctactcttggcgagggtggggaagttctttttatgcctcttatacctgtgagtactttgggagggaagggag

SEQ ID NO: 29762 - DNA, 122 bp, Homo sapiens
tgtctccagggagaaagcgtcacaatggaacagggttggaggacgcccagcgggtgtccgcggagactggatggaaccgggttggaggacgcccagcgggtgtccgcggagactggatggaa

SEQ ID NO: 29763 - DNA, 122 bp, Homo sapiens
tcaccctgatatactgaggacactcggtctctagcaatttcttcaggtcatccctgtagacggcatggaaattcccctttatcagggagtacttgtggtagacgtcgatgatagagttcaag

SEQ ID NO: 29764 - DNA, 122 bp, Homo sapiens
agtcggaacgaagcggctggaagctccaaacgggagctcttcccagctcgctttccacttcgacggcaccgttcaaagctctgctcagacactgggacaaataaatgacagggctccgaaaa

SEQ ID NO: 29765 - DNA, 122 bp, Homo sapiens
cacatctgggtccggtgtttcggattctaaatcctgagtcctgcagctgctccagctgtgcgctgctgggcgagccacgtcggcctgcccgttgcccgagccagggaatcctcctggtagcg

SEQ ID NO: 29766 - DNA, 122 bp, Homo sapiens
caggacacactcccggccggagcgggtggccacagtccctttcccctgggccagtgcctgcgacgggtgctggattagccgaggagtgatacaatggcacatacggtcctgagtgccgggtg

SEQ ID NO: 29767 - DNA, 122 bp, Homo sapiens
cctattatctctctgaattcccttatttgtctgctaccgttagaggtatatggtaatagacgttagtgtctgcccacaaaaaatatgacttgcttctctacctggtcactttaacagataca

SEQ ID NO: 29768 - DNA, 122 bp, Homo sapiens
tccaaagtattataggcatgagccaccatgcccagctaatctttgtaatattagtagagacggggtctcgccatcttggccaggccggtctcgaactcccgacctaaagtgatccacccaac

SEQ ID NO: 29769 - DNA, 122 bp, Homo sapiens
ctcaatgcagaataatcaaattagagttattctatgtctaaattctgcctgaagccaattcgtgctttctttccgtgttatgaaatgtgtgggggtgaagaagaagagggaaaaagccagct

SEQ ID NO: 29770 - DNA, 122 bp, Homo sapiens
ctagcccctggggtgggggagctgcagcccccactagatggggactgtgtgtgtcttgctcgtgtttgagggtgatgcgtgtggaaggtgtgctggagacagggtagaggtaagcggggctg

SEQ ID NO: 29771 - DNA, 122 bp, Homo sapiens
caaaatgctgtttcattgttatctatgtttggggaaacctaaaaccccctcaaagagttacgtatgcactgaatggaagggtatccattagcaacagagcggttttttagacatcatccaac

SEQ ID NO: 29772 - DNA, 122 bp, Homo sapiens
gctggggtaggctgtgccttgacgggctgtcccaggcgcccctggaattgatgcagtgtccgcccgtggcaggtgggaggccgcaccatgctgcccattcgctggatgccgcccgagagcat

SEQ ID NO: 29773 - DNA, 122 bp, Homo sapiens
tccctgttggaaccgcattgaatgtgactccaaagagagaggctttattaggccaagccgcgctgagcaggtggggccccgggggccaagcacccccatgccgccaccatcagatgtacccg

SEQ ID NO: 29774 - DNA, 122 bp, Homo sapiens
cgaaggcgctgaggtctccgagtgctctttcaggtccaactccagaatcgcccagccccacgcaatccagggccagaggttgtgtgcgcagcactcgaatacatccacagacggtgctgcgc

SEQ ID NO: 29775 - DNA, 122 bp, Homo sapiens
tattatgccatatataaaaataataatgatagtacaagttttaaagtttttttaaaagagcgtcaggacagttatgctggaaactctccctgggacattaaaaggtgaaatatttgtttcag

SEQ ID NO: 29776 - DNA, 122 bp, Homo sapiens
cgggcccccagccggtgtctgggcggcaggagatccatgcccaggaccttgtgggtctgccggaaggccagcattcgcagggcgtgctgcggggcacacacagcctgtcaggacccccgccc

SEQ ID NO: 29777 - DNA, 122 bp, Homo sapiens
atgcccagtgtgtatgcatgcctgtggcgctgcgtgagttatcggggctctgatagcgtccggagcgggttcgagggtctcctccaggaactcgcagaaattagagggggtggggaggagga

SEQ ID NO: 29778 - DNA, 122 bp, Homo sapiens
aagagagtacttcctggtcagacagctaacgtcaacagcaatttatacagctttgcatttcgacattttagaaagaactctctaaaaatttttccagaattttccccccagtacctacaaaa

SEQ ID NO: 29779 - DNA, 122 bp, Homo sapiens
tcagagggctttcaaagaagggctccagcgctgcgctgtaggcgtgcggcggaggcttaacgtggaagacatgggagctgtccatggtaccgtaaggcggactgggcagcccaggcgactgg

SEQ ID NO: 29780 - DNA, 122 bp, Homo sapiens
cgggcctcccctgtgtctgctggcccgagcatcctgagtcactcaccagtggcagctctccgcccggccggcgcatctgataggtcgacccatggggtaggttgtggctggaaagaaattgg

SEQ ID NO: 29781 - DNA, 122 bp, Homo sapiens
cttgacagttgacctgataaccaagccaggtactaagtgactgatggcaggcggtgtgtacggtgtggccacactggacaaagcagggttcatgtcccgggtgagacggtgcaagatttcat

SEQ ID NO: 29782 - DNA, 122 bp, Homo sapiens
acagagaactatgtttgccaaagagtctagaaattcttgaattccctttaaggcctgacccgtgttggtggctaaggattctagggtttgagtcaagttctttacggttgactcgtggtaag

SEQ ID NO: 29783 - DNA, 122 bp, Homo sapiens
cgcggccgcctccgggcgggggtccccgggcgccttcaggccgggtctgctgcgatgcggcgccatccgcgtccggctcctggggcctgcagaccttccgggccactcctggaaccgcgccg

SEQ ID NO: 29784 - DNA, 122 bp, Homo sapiens
gcgattcttccgctgagcgcgcgcctcagccagaagttggagtgccaggccaagagcgcacgctctggctgcagctccgcgctgactcttcaaatgattgtcgttttttcctctcctgctgc

SEQ ID NO: 29785 - DNA, 122 bp, Homo sapiens
tttagcaatgtcagccttgtggctttaaggttattgtatggttgccataaattgtccctgcgtctctgaacttgacttagtctaaaagtttagagacctgatcttgtcatcttctttctgta

SEQ ID NO: 29786 - DNA, 122 bp, Homo sapiens
tatttagttagcctatctgttctctgtgaggaacattacacagtttctgagattttgttacgatagaagtcagcattgataagcctctgcgcacctgttttaatgtaggatcattgggaact

SEQ ID NO: 29787 - DNA, 122 bp, Homo sapiens
ggggcgcgggagcggaaaagcaggtgctggcggggcgggggtcggggtggggtgccggggcgtagccaggagcccggcgggggaggccacatttcctggctctaaactgtacttctaacgcc

SEQ ID NO: 29788 - DNA, 122 bp, Homo sapiens
atgaagtagtatacagctgtttatttttagtctgttctatcctgattcctcccccatccacgttaattttttttaaaaagatttaaacttgctaaaatatatttcttttcaagtctagtaca

SEQ ID NO: 29789 - DNA, 122 bp, Homo sapiens
aattcaattgatgagtctaacatattttgagttccatttttttttcctctgaaaattagccgttttcctctgaacactcaagttaacacctaattaactccaagctaggaagaaggaaaatg

SEQ ID NO: 29790 - DNA, 122 bp, Homo sapiens
acagatgcagtcaggaatgcatggatttccttcaggaagcacccagatgcttgaaactggcgcacgcggtagcgcacgtggatacaaccctacggtttgcagggcattttcacacgcatgat

SEQ ID NO: 29791 - DNA, 122 bp, Homo sapiens
ggagtctgagtctccaaaggaatcatggctgttgggagtttgcttgattaggagatgggccgtttattacaatgtgagttgttaactctaaagtgcctgagataaatttatagtgtttattt

SEQ ID NO: 29792 - DNA, 122 bp, Homo sapiens
gcgcctcccgcctcatagattattcatctatgaccaggtctcagccaaaatcgtgccagacgatttcctaaaagaaagccaaatgttttagcaacttcccccgtcaatatttactccgaagt

SEQ ID NO: 29793 - DNA, 122 bp, Homo sapiens
agaagcaataagctgagcttacaccgatgggaggggtggctttgtgaatacaggtgtaaacggtgtcaccctgagcacaaagccagccgccggctcacaaacctattagctggtaaacagca

SEQ ID NO: 29794 - DNA, 122 bp, Homo sapiens
tgagctgactcaccactaatgacaaagacaaaatttgacctcagcatctaaacctgcaagcgtatatagaatatcatgttcttttttctatttttgttacctattcagacagctgacgaata

SEQ ID NO: 29795 - DNA, 122 bp, Homo sapiens
ttctttcccctgaggcaccctctgagttctccacgtgtcagacccatgtccaatgcaccacgctccttccttcacaccatgaaagccccgaagtaagaccgggtaccatcacgcagtcgaac

SEQ ID NO: 29796 - DNA, 122 bp, Homo sapiens
ctccactggagccatgttggctgcgtgagaggggagcgcgcatgcgcacggagcttgcgccggctcctatgtccaagtctgggcctctgggaaccaggaagagcagccgcgacttagctgcg

SEQ ID NO: 29797 - DNA, 122 bp, Homo sapiens
tctgggattgaagccttacactctacctccctttgttaccatttataggtttgccaagaccgcatccattgtgcatcaaggttagccttcattcagccagcctgaggtgcagagcatggggt

SEQ ID NO: 29798 - DNA, 122 bp, Homo sapiens
gaggcccaggagccaggtctggattcaaagtcaggtgcggctgatgacaaagaccgttcccgcccgcatcctgggtgtgccctaggaaagctgcctcttccagaaacgcagaagcagcaaca

SEQ ID NO: 29799 - DNA, 122 bp, Homo sapiens
gaggccaaggccctgcttcggggacggtgggcctgggatgagcatggccttggccttcgccgagagttctcttgtgaaggaggggtcaggaggggctgctgcagctggggaggagggcgatg

SEQ ID NO: 29800 - DNA, 122 bp, Homo sapiens
gtggggctgccgtgggcctggctccatggctctgtgcaggtggcagccggcgccgcgtgtcgccacccacacaggaaaggcgagattggtggcagaggccgtgtccgcgtcatcatgggagc

SEQ ID NO: 29801 - DNA, 122 bp, Homo sapiens
aagaacactgacgaggcattatcacacgggcaggtcattccctttcctagaagtgcatttcggcaggacccgccgtgtgtgacacagacaccgggaccaaaaggagaccggtgcagcgtcta

SEQ ID NO: 29802 - DNA, 122 bp, Homo sapiens
atcctggctggtctcaagcgatccgcccgtctcggcctcccgaagtgctgggattacgggcgggcgccacctctgcataagtcttaggcctgcaaaacagtcttaaaaacatataatattta

SEQ ID NO: 29803 - DNA, 122 bp, Homo sapiens
ttcacagcctcagctctccgagctcccttgccaagtggcacagtctaagcaggggctgaacggagcctcttgcaggccacaattcatggtcacaacagttttagtctttgtgatgaaaaaag

SEQ ID NO: 29804 - DNA, 122 bp, Homo sapiens
agctctgggggtggtggctgctgcctgagccaccacaggccccgtctcttccaccggcgccggcaccagagccccgattgctgtgagagtgaaccttctggggcctctggctgctgccacag

SEQ ID NO: 29805 - DNA, 122 bp, Homo sapiens
cctttatctgctcagaaagtacagggtgttctgtttctcctgtgcatacagatcaaggagcggatgttatttctttctttctttccccaaggcgagagaaggacagggcaggcaccgagtac

SEQ ID NO: 29806 - DNA, 122 bp, Homo sapiens
gcctccctccccgctccccgcaggccctgtcaggtcagcggcgccttatccatcgccccacggtggctgcatgtgcgtatgtgtgtgggtgtccacatgtgtcaggttcacatgaatctgtg

SEQ ID NO: 29807 - DNA, 122 bp, Homo sapiens
acttcccagtagttttgctagggaagtgtattccaaggacaacccctcaccttgaaatgtcggataaaacttcagcaaattagggtcccagcttttattttccaaaaaaaggcaacaagtta

SEQ ID NO: 29808 - DNA, 122 bp, Homo sapiens
gcgccgatcggtatctgcatgggctcgcccggggggaaggtctcacccaatgggaccgttcgccgaggccttcattagcatgccgggggcggggaggggcggggcggccgacgggggcgggc

SEQ ID NO: 29809 - DNA, 122 bp, Homo sapiens
ggtgccagccgccgccgcccttcgcaacccgggccgtcagccccgcccccaccgccgcagcgactcccgcccccgcgcccgccgagaccaaggcgctaccgctcacactgcccctccccccg

SEQ ID NO: 29810 - DNA, 122 bp, Homo sapiens
tcacgtgcttcaagggacacagaccctgttcctgggtccacaggggtggttcctgataggcgaagggtattagtaaatggcatttctccggggaatctttttgggctagggtgagcacagga

SEQ ID NO: 29811 - DNA, 122 bp, Homo sapiens
atctatctatctatcatctatctatctgcagcttcacccgcctcactacggctctgggtgcgactggtcttatgatgaatgttgtaggatgagtgacatcttaggagtaagtagactgtcct

SEQ ID NO: 29812 - DNA, 122 bp, Homo sapiens
tgccatgtggagaggccaagcgggggacaggggcggcttgtccgccaggtggcaccgaggcggctgcgtgtggggcagtgttcccactctcgtcaccagcccgcacttcccgctgcctctga

SEQ ID NO: 29813 - DNA, 122 bp, Homo sapiens
ctggaccagtctgggcagtcacgctaagccacattacaacacgatcagcatactgcctgacgcacaaggcacggggcctctggacgcgtgttctgagcccttcgcaggagactcgtcctaca

SEQ ID NO: 29814 - DNA, 122 bp, Homo sapiens
agggggtgcagcgctgttctaaaacacaaaatgccgagccccgttttccctttccctccccgctcggtcctgcgcccaccccgtcccgcgctggccactcaggcaagctgtaaatggatata

SEQ ID NO: 29815 - DNA, 122 bp, Homo sapiens
agaaacattttctttatgtacactaaaataagcccaaatacacagataacagcacaaagccggtccggcgtttcttggccatcaaagcatgcacagactttctcagtacagccttaagtgta

SEQ ID NO: 29816 - DNA, 122 bp, Homo sapiens
aagacgctcccaacccattcctcagagaacctgaaaaaactaggcttttctctgcctgcccgccccgcccctctcccgccagctttcttcctcttcaggcttctagctcctctttcccccac

SEQ ID NO: 29817 - DNA, 122 bp, Homo sapiens
ggcacctggaaggcgctcaataaaacgctagctgggcctcggggtacagatggagcaggacggctgagtcgctgcagaagcgcttccaggtaaggggagggagtgggtttccactccagact

SEQ ID NO: 29818 - DNA, 122 bp, Homo sapiens
caatttagtgaagttgttagtggagaagtgattgtcttcttatgtgcttatggtggggatcgttgagtaattagttaaatttatcatcaaaattatgtgtcacaggtgaatgggtaattgag

SEQ ID NO: 29819 - DNA, 122 bp, Homo sapiens
ccccaggccgagtgccaggcgcctgtgccctctctccgtagagcccgtgttctggtactacgtgaaggaggtcctcaacaagcacgagctgcagcgcttctactccctgcgccacatcgcct

SEQ ID NO: 29820 - DNA, 122 bp, Homo sapiens
taatacttctctggctttccttcctgattaagatcatgctaagtttgaaaacactttgtgcgtgctcatatgctgtatacatgttgttattgtttttatactgttaattatttctcttcatc

SEQ ID NO: 29821 - DNA, 122 bp, Homo sapiens
ggaacattcaaatataatgatttacatccttccccaactcccttccagtgtgggtcagggcgaacatggaccatggacgtgactggagccaggggtgcatgccctctctgggctccctcttg

SEQ ID NO: 29822 - DNA, 122 bp, Homo sapiens
aaaataagtttgaaatgagccccgggttgaggactccagagcacagctgcattatagagacggggcccgctgagtcctctcctctccccctacttcttctcctccggggctttctcagtgat

SEQ ID NO: 29823 - DNA, 122 bp, Homo sapiens
gcccacaggcttggctgcgagttggggccggcagggcgaccccttctctgaagcgccagccgcagagagagccccctgaaccccacacctcccaggaggcagccggtacccggcgtggagtg

SEQ ID NO: 29824 - DNA, 122 bp, Homo sapiens
attctgcattctcaaccaacctctgggcaaccacaaatctgctttctttccttatggattcgcctattctggacatttcatataaacaaaattacacaacatatggccttttgtgtctggct

SEQ ID NO: 29825 - DNA, 122 bp, Homo sapiens
agcgaaggctgcgcaagcgcggccggcgggggcgtggtcttcgcctgctgcttcgcttgccggccagtggagttccccgccccacatgccggggacgtcgacttactccctcccgctggtca

SEQ ID NO: 29826 - DNA, 122 bp, Homo sapiens
gcctgctggggaggtgcaggggaggtcctgactcctggtctattcccttccagactttttcgttcgctcccggaccttcagggctctccctcaaactttctcctgcccccttcacgggaggt

SEQ ID NO: 29827 - DNA, 122 bp, Homo sapiens
ttatagcggtcggtgccccggaggccagctcggccaagcccaccccgcccgcccaagtcccgcccgcgccccaccctgcgccgtggcttacacaacgcacattcgcggtttaccccctcgac

SEQ ID NO: 29828 - DNA, 122 bp, Homo sapiens
agaagcaggctctaaagaccctggagagccactgaagaattttaaatagatgaagaaatgcgtaaacaaatttgcatgttagaaatttcatcatgatagttcatggaaaagacgatgaaagg

SEQ ID NO: 29829 - DNA, 122 bp, Homo sapiens
gaacccttaaaaaaacacacacaaggaatatttttatctctacaacttagaaagtaaatacgtggcttctttttgctgaactaaacatcatttttgtaaagtgtttctaaaggatattcaat

SEQ ID NO: 29830 - DNA, 122 bp, Homo sapiens
gagggagacaagaaaacaagagattactgagcgccaaactgtagggggtggaggaggtcccggaaggaggcatgcctgtgagccaggccagcaccctgtgtccccaggatttctgcctttac

SEQ ID NO: 29831 - DNA, 122 bp, Homo sapiens
gggacttttcgaattgcacattgcgcctgaccttacctaccactaatgaataatggatatcgaggagccgtggaatggaggatcacggcggcgtacggagcaccggggaggaatcgtggggt

SEQ ID NO: 29832 - DNA, 122 bp, Homo sapiens
tggaaaagccccaccaaccccacaaagcagactcgggagagaacacgccaccgtctttagcgaatcttaccaacccagggccaaagcgccctgcaccccagagcagcactcgtggtgggaac

SEQ ID NO: 29833 - DNA, 122 bp, Homo sapiens
gtggctaccgtggcaggcgccccatcccctttcttttttcattattgcccagccattccccgcggcatgctcagccccacgggggaaagtgcagatcacagaggagaaatccgagaggatca

SEQ ID NO: 29834 - DNA, 122 bp, Homo sapiens
ctcatatgcctcataaaacacttactcatctacatctaaagccaagaaccactgtgtaaccgactagttccctgctcgtaaggaactcggctgtgtaattctgtttcatcaccaaatgccag

SEQ ID NO: 29835 - DNA, 122 bp, Homo sapiens
caggaagctgggtcttgatcacgctgaactccagacgctctctagatgtgcacgcatgtgcgtgtggagtgtgtgtgtgtgtgtgtgtgagagagagagatgtgttggggtggggggactgc

SEQ ID NO: 29836 - DNA, 122 bp, Homo sapiens
cacacgataaggaggaattccatctctaagggaaaggaaaagacagaatccacaggcttacgaggatgttttcagcacatcacatgggctactgtcatatgccatcttgagatcccgccgac

SEQ ID NO: 29837 - DNA, 122 bp, Homo sapiens
caaatctaagcgagcgctgtggggcggtgagtaggtagtgcggatgcgggcgcagaactacgtttcccagcaggcatacagttggtggggcggggtgtgtgtgtgtgttgggaggcgggggt

SEQ ID NO: 29838 - DNA, 122 bp, Homo sapiens
cccagcaaacagtgggtgagccatgaagatgtgcgagtcagccggaccctccccgtcaggcgcggacccgctgcggccagagaacccagtctgcgccagcccggctcgctcgcgaagccacg

SEQ ID NO: 29839 - DNA, 122 bp, Homo sapiens
cacatcttagctggattaaaataattgttcaaactgtagggctaaaccctacagaggaagcggagtgctaaaaattataccattggactgagagaagaaattctttcacaccaagtccttct

SEQ ID NO: 29840 - DNA, 122 bp, Homo sapiens
aaataaataggtgaagaactccaggacagttagctgggctgcatgaaggtcatggccccccgtctctggagtgacctagggtggtcctgcactctgggaggggagcctgtaggacgtggtgc

SEQ ID NO: 29841 - DNA, 122 bp, Homo sapiens
gcaccaagtcaccctgagcacgccccacggttcccacggagcagtcaggtccgggccaggcgtcctccactgggccccgcgcggccctgccataggtgacaccagccaccaccagagtcgct

SEQ ID NO: 29842 - DNA, 122 bp, Homo sapiens
gcagcgagaggggcgcgcccgccgcccgcgcttcccggccccgccctcctgccccgtccgcgccccggccccgccccccggcccaattgcgccccgggaggagtccccccggggtcccgcct

SEQ ID NO: 29843 - DNA, 122 bp, Homo sapiens
ccctcccgccgctccctgccccctgggggccgcggcttctgggggctcaaggttgggtggcggggtgggcgacggtctgcggctgcggaacgtaacaggacagggtctcctccatccccgat

SEQ ID NO: 29844 - DNA, 122 bp, Homo sapiens
acttgcctggctcaatcgatcctcccacctcagcctcctgagtagctgggactacagggacgaatcaccatgcctggctagggttttttatagagacaaggtgttgctgtgttgcctaggct

SEQ ID NO: 29845 - DNA, 122 bp, Homo sapiens
atgataacacgtgaaagtcagaatgactccttgatccattggctgcggaatggctgtgttcgcaggcatgaaaacagcatgaatcttgtacatctccatgagagctcttcggtgactaggca

SEQ ID NO: 29846 - DNA, 122 bp, Homo sapiens
cccagccagaaagcaatcctccctgttctgaataaccaataacattgtgtttaaccctcacgtgggcatgaacactacaacttataaagaactgacctcccatttgtttcttagcacttcct

SEQ ID NO: 29847 - DNA, 122 bp, Homo sapiens
cctcctggctcctgtcccattcactgcatcatcgcctgcaatgacagctctgtcggaccacggcccatgcaacagcagcagaggggcccaacagtctaatgaaaaggccccatacttgaagt

SEQ ID NO: 29848 - DNA, 122 bp, Homo sapiens
aaaattagctgggcttggcagcgggagcctgtagtccctgctactcgggacgctgaggcacgagagtcgcttgaacctgggtggcggaagttacagtgagctgagatcgcgctactgcactc

SEQ ID NO: 29849 - DNA, 122 bp, Homo sapiens
ctggggagtccgaccccggcaggcaaccccagggagcacggcccacaggtgctgcccccgcgcctgacctcgtggtcgccgacatccactccctgcactgtggcggaggccccaagtccagg

SEQ ID NO: 29850 - DNA, 122 bp, Homo sapiens
tgggctcagcccggagccggcgtgtgggggcgggggctcccgggagggtctcctcacctccgggccctcctgagggctgggatgatcctgctgtcctccgcaggcgaaactgagtcagagcg

SEQ ID NO: 29851 - DNA, 122 bp, Homo sapiens
aggatcccatttttcagagggttttttaagggtgtgtggagggggagggcgagggatctacgtgtaaagtgaagtgaaactttcgcctgggctccagaaagagcggacagaaaaggtctttg

SEQ ID NO: 29852 - DNA, 122 bp, Homo sapiens
gagagggcaccccggttggaactctgctggctttcatcccctgccagaagctgctttttccggggcaaaacctctgccttggattcacgcatgttcctgtccacattccccacgagttgctc

SEQ ID NO: 29853 - DNA, 122 bp, Homo sapiens
gcccggccccgcgacagcctccgagcgcccccggatcatggccaccgaggtaggggcgagcgccccacccgcaggcagtgcccgattgccgcgggaccaaatgccctaggggtgggctgggc

SEQ ID NO: 29854 - DNA, 122 bp, Homo sapiens
cgaccccaaggccctcaagggtttccacactgaccccgaggccctcaagggcttccaccccgaccccaaggccctcaagggcttccaccccgaccccgaggccctcaagggcttccaccccg

SEQ ID NO: 29855 - DNA, 122 bp, Homo sapiens
gcccaggagaagcctgcagcagtcagtcaaagctctgacaccacagggcatttaaagaaacgcagagcagcagcaggcccaataaccacactcccaaggagagccttgctgctgctgtccct

SEQ ID NO: 29856 - DNA, 122 bp, Homo sapiens
agggaagaggacagagaatgtgacccttcagaggaggtactggaagcatttttgcacggccgagtcacaagattcaaggtagggcgagattcagggcaagagccctgaaaacaaaggagagc

SEQ ID NO: 29857 - DNA, 122 bp, Homo sapiens
acacgctgggcccaatttatataggggctttcgtcctcagctcgagcagcctcagaaccccgacaacccacgccagcgctctgggcggattccgtcaggtggggaaggccaggtggagctct

SEQ ID NO: 29858 - DNA, 122 bp, Homo sapiens
gccctcggcagatggcagggacttaattccgtctgctacccagcttggcctcaacctaatcgccgccagcccctcgccctcctctgcgctgcaggccttgggcccgggcaaaggtcagtgga

SEQ ID NO: 29859 - DNA, 122 bp, Homo sapiens
atggctccacgtaaaaagacaaagatccgcggtggtctgccagccttctcagaaatctctcgtcgacctactccggggcctttagctggtctagtgcccagttttcctccaacaacctgaag

SEQ ID NO: 29860 - DNA, 122 bp, Homo sapiens
cacccggccctgcaggaagctcgcgctgattgacagctgcgttgtcccaaaaaggctcagcgaagatgctgatctgcgggtgggtctagacgcgcggcaggcgcgcccgctacccgctctcc

SEQ ID NO: 29861 - DNA, 122 bp, Homo sapiens
ttaaaatggcttgaagaactaattgaaaacctagtaaatactgagtgggagagtggggttcggggatctccattttaagtttagatcagatcacaagtttagacacacgagagtctgtcctt

SEQ ID NO: 29862 - DNA, 122 bp, Homo sapiens
ctggaagaaacccaagtgcaaagtccagcccgagaggaggaagcagaaatgcctgacctgcgtcaaactggaatgtgaggataaggttctgggcaggatggtcgctgccctccagaggcgca

SEQ ID NO: 29863 - DNA, 122 bp, Homo sapiens
agacttccttggcgggaaaccaggtcctctgacctcacccggctctgcagtctgttttgccgttttccgcctcaaaccccctctgcgatgtgcagctctgggtgtctgatccctcaggggtc

SEQ ID NO: 29864 - DNA, 122 bp, Homo sapiens
gctgcagcctgcgaggagcagctgggcagaaagactgtgcctttacggtggtgagtcttccgatgcccaagcctcaccccagaccgatgaaatcagaatctctggagacccgacccagacat

SEQ ID NO: 29865 - DNA, 122 bp, Homo sapiens
ctccacagttagatcccctggatgcgtttccccagaagggcttggagcctggggacatcgcggtgctagttctgtacttcctctttgtcctggctgttggactatgggtaagccaggccact

SEQ ID NO: 29866 - DNA, 122 bp, Homo sapiens
gccctttccaaaaaccacacagcatccctgggcgtgctgtccaaaatatgccctgtattgcgcatatattaataattatgatgatgacttaacatattaggcctctgctatatgcaccccca

SEQ ID NO: 29867 - DNA, 122 bp, Homo sapiens
tcaaatgaaaccccgtgcccagtaccaggtgctcccaagccctgtccccagctcccctcccgtcatgccccagcccagccctgggcagctgctaatgcaccttctgttgcccgcagatttgc

SEQ ID NO: 29868 - DNA, 122 bp, Homo sapiens
cggctgcagcgagagacaaagaccccgccacatcccggaagccgccctttccgctccaaccgcgtgcctgattggacagttcccaggccagcgtctctgacttgttaacgtttaagatccct

SEQ ID NO: 29869 - DNA, 122 bp, Homo sapiens
tgtgtggatggggtgagttcatgtcttgaggaccgagcatagggcctgtgggaaggtgaccgcgcgtcgggcgctgggaaggtgactgtgcgttgggcgcgcttggtggccccagggctggg

SEQ ID NO: 29870 - DNA, 122 bp, Homo sapiens
ttgtcatgtttgtggatggggctccctttgggggtttcccagggctttacactcatgctccgagggtacgtttgtagtcattctcatcagtggaaatgcccacctgccggcagaagttattt

SEQ ID NO: 29871 - DNA, 122 bp, Homo sapiens
cacgcggtcattccaactcaactgccctcgcgtcctggccacaggccccctgggagaccccggagatgcccaaaggcctcatgcctgccgcctccagtgggacctagcagcacacagacagc

SEQ ID NO: 29872 - DNA, 122 bp, Homo sapiens
ggcactggccgggacaccctgcgctgcttggccctggccacccgggacacccccccgaagcgagaggaaatggtcctggatgactctgccaggttcctggagtatgaggtaagcagctggga

SEQ ID NO: 29873 - DNA, 122 bp, Homo sapiens
cctggcccacttatttgaggtgcccgtccaccctggtcccagcagacgctgtcccaggcacgcgtcactctgcaggagtcgtcagttaggggcaagagatgatccctccagatatgcagccc

SEQ ID NO: 29874 - DNA, 122 bp, Homo sapiens
cgcctcccggcaccggctacatcgctgggaggtgaggcgctgggagcgcgtgaggctctccgggagaaaacagcccagcttgcatcccagaggaggcagcagccgcaggcaccgtctatttc

SEQ ID NO: 29875 - DNA, 122 bp, Homo sapiens
cattctatggggaaattctaagcagaagtgagggcaggagctgtctggctaggaggcctgcgttgtggattggaaaggagtctcctgatgcaggctgggccccccgcaggggtgggggcagt

SEQ ID NO: 29876 - DNA, 122 bp, Homo sapiens
ggggcaatgtgagctctgggggctggacttccggcgttgggactgtcacttggctgctcgcgtcaggccacaccggtggtctgggctgtggcgcgcgggtcggggcccgaggcgggcggcca

SEQ ID NO: 29877 - DNA, 122 bp, Homo sapiens
gcccaggcttcctctagtgggtccaggtgggggtaccccaagttcctgcagggctccagacggtgggtcagggcctgggcagatgatctcactgccccgagcctgtgcttgactccggggag

SEQ ID NO: 29878 - DNA, 122 bp, Homo sapiens
catctggatatctggggaacgcttttggcactgggaacaacagcaaagactctgtgtggtcggagtggagtctttggaggaaatgggataaaacgaggtgagattgagtaatgggggctcct

SEQ ID NO: 29879 - DNA, 122 bp, Homo sapiens
atttgcaagaaaggtatcaaggcattttgagcaaaagaaatagcgtgaaagaacgtgatacgttttggggaattgcaagtatttggtgtggtagaagagaatgcagtgagtgtggacatagc

SEQ ID NO: 29880 - DNA, 122 bp, Homo sapiens
caaattctgcattcttcccccgcttccatgatttattcttccctcatcaccatccctctgcgagagaaactgtctacaggggtatctagggggccacaacacaacttccagttccattaaat

SEQ ID NO: 29881 - DNA, 122 bp, Homo sapiens
cacctctatagtggggtcgtattcgtccacaaaatggttctggatcagctggatggtcagcgcactcttgcccacaccgccggcgcccaccaccaccagcttatattccgtcatcgctcctc

SEQ ID NO: 29882 - DNA, 122 bp, Homo sapiens
ggtccaagcttctttcctccggggacaaaacttggctgtttatctttcccagggcatcttcgtctctccccgggacgtggaaccccgatgcaccggcagggacagcccggagcgctcgcagg

SEQ ID NO: 29883 - DNA, 122 bp, Homo sapiens
cggactgaccaaaatttattaggcgggaattttctcatcctgataagcctgggagcgctacgggagactggggcttatttcatccctacagctttgattataaaagacagccacccccgaag

SEQ ID NO: 29884 - DNA, 122 bp, Homo sapiens
ctcgcgtgcctcacctgtgaggtcctctcccttctcacccagcgtcacgccctgacccctcggctcccgtgtcctctgacttccttgcaccagcaccctgttgagctccacccctgcactgg

SEQ ID NO: 29885 - DNA, 122 bp, Homo sapiens
ggagagggcggcctgggccgaagtgaggcgacgcggggcggcggagtctgagggccggagcggagcggaggcgacgcggggaggggcgagggatcgcggccggtggctgggggccacctgct

SEQ ID NO: 29886 - DNA, 122 bp, Homo sapiens
catcctcctcttttctctggtccgtgggagcttttgcaagcgggaccaggccccaacacccgaaccagcagcgagagaaggagcccggcatgcggcgactcagagtgacgacacacgcgagt

SEQ ID NO: 29887 - DNA, 122 bp, Homo sapiens
cattcgttcagaaaatggttattttttaagcatccagcttccgctgcgtaccgttctaggcgctgagaatcagctctgaacatgacagacaaggctcctgttctcatggagcttaattctgg

SEQ ID NO: 29888 - DNA, 122 bp, Homo sapiens
catattctgtgggtccttcctgtactagtacaactttgttattaccttacatttcacagacgaatgacagcaactttatactcaaagctattatcaaaatgttcagccatgaaagtattgtt

SEQ ID NO: 29889 - DNA, 122 bp, Homo sapiens
caagccgccctgggtgaggagggtctccccatcccgcctaggggtcccagggatgaggagcgatggtgacacgtggcgaggaacggcaggcgggccgccgggtggaggccggggtgggaccc

SEQ ID NO: 29890 - DNA, 122 bp, Homo sapiens
gcgcggcttgcgggaacccagcttggggggcgatcagacacctgggctgctgggcaggagcggcccctggctcccaggcgtgtggtgggggcgtggccagggtgaggacgccgttctcaaag

SEQ ID NO: 29891 - DNA, 122 bp, Homo sapiens
agccccagcccgcagcccacgtggcaccctacagggctgtgagagtggggctgctggaggcgttcagagcgcggaggccccaggcgcgggccgggctctctcccgcctcctcaggcccgggg

SEQ ID NO: 29892 - DNA, 122 bp, Homo sapiens
tttttacattggaagaggctgctgatgttaacatatggttgaaagttggtatttaaatttcggttccatttggagcttaaggactcttgattccaaaagcagatccagtggctgtggcagtc

SEQ ID NO: 29893 - DNA, 122 bp, Homo sapiens
aagcccctgatgttgcgtaaccatcagtcacacctgaacttgtgctacgttaatgcatgacgtaaggtgtggctcctattccggatgaaactgctcacgtaaagaccaagggataagaggac

SEQ ID NO: 29894 - DNA, 122 bp, Homo sapiens
gaatccatgcctcacaatgtgaaggaaagggccggggccaggccaaaaaggtcgtctccacgcctgtgccacggcccagctctccacagcccacggcctgagtgtaggccagcccagcagga

SEQ ID NO: 29895 - DNA, 122 bp, Homo sapiens
attttttattcaatattcaatttaatctatattagcctatgtttcactttataggcaatgcgtagttcttaaattccaagctctagaatgctgcttgagactgttctggctgttgtgcatct

SEQ ID NO: 29896 - DNA, 122 bp, Homo sapiens
ttttttgtcttgaggctgtcaggaaatcaaagtgttttcaacttcaaaagactctccgggcgtctcaagttgagaatctgacgcgtcccaggcactttcatgcacacatggggcgagccggg

SEQ ID NO: 29897 - DNA, 122 bp, Homo sapiens
tgcctggaatggacccttggagggtatggcactacaccttattaactgttgctaaactgtcgctgaaacacacatgtccgtttacattcctgcctcagtttctgtttccccaggcccccgcc

SEQ ID NO: 29898 - DNA, 122 bp, Homo sapiens
tctcgccagcatctccctggctgcggtgctctgattgctccagttgccagggaaaccaaccggcggcgccagaaggtgacgccatcgatgtgcgcccgcctcccagccccgccccgcccggg

SEQ ID NO: 29899 - DNA, 122 bp, Homo sapiens
tttccatttctgtgccttttagtttcagtgtgggcatctcatctttcccttttctcctggcgaccctttatgcctcccttggggtttcctgtactttcctctgtgcctctcagttttctctg

SEQ ID NO: 29900 - DNA, 122 bp, Homo sapiens
cctgccggacattccttcctgctgccatgttggaggggggtatccatggggcctctgtcccggcactcagccttttcgctctcacgaagtgccctggctgggctggcggctttgagcgtctg

SEQ ID NO: 29901 - DNA, 122 bp, Homo sapiens
caggcatgcgccaccatgcctagataatttttttaaatatttttagtagagacagcgtttcgtcatgttggccaggctggtcgcagactcctgacctcaggggacccaccctcctcggcctc

SEQ ID NO: 29902 - DNA, 122 bp, Homo sapiens
gtgcccagagagaataaagacacctgccctcgcggacagcccgggcctgaagtcaatttacgcccacgagacccgcccgaggcaagagaactgtggtccccattcacagacgcggcgacccc

SEQ ID NO: 29903 - DNA, 122 bp, Homo sapiens
cttgaggatgccagaggaggcaccggtggggccaggtccctgcggcccacggcccatctgcgtcacagacagccgctatgcacacccccaaccgccggccgcagccaccgagctcaccaact

SEQ ID NO: 29904 - DNA, 122 bp, Homo sapiens
gaggggacacgcggagcaggccaggctttcaggaggcaccggaatctcctagtcctggctcgcacggctcgggcaagcctcgagatccggcgaccccaaaccactccctgggtccccgccgg

SEQ ID NO: 29905 - DNA, 122 bp, Homo sapiens
cctgggtctttctggacagcaggcgctggaggtgcgcgtcactgtccgccgccgtgtccgcggctgcgccagacagtgtagaacctgcggcctcgatgtccttctcccgtgccctattgtgg

SEQ ID NO: 29906 - DNA, 122 bp, Homo sapiens
gtgagaatctccccttagcccctcctcatccccactcacaaatcacgcactgtcttgcaacggcccctctgtgcagctccctacggtcgacaggcacatacgcatttatagcctttgcttcc

SEQ ID NO: 29907 - DNA, 122 bp, Homo sapiens
acagagcgatactccgtctcaaataaataaattaataaataaataaatgaaataaacaggcgagaccaaagtcaactcagagaagctttaatagcaagaggtgggactagcctcctggcccg

SEQ ID NO: 29908 - DNA, 122 bp, Homo sapiens
agggtctccctatgttgcctcactcaatcttgtattctctcaggtgaatctttcccttgacgcagattcctactcatctctgctgactccaactgttattacccacacagaatccatctgac

SEQ ID NO: 29909 - DNA, 122 bp, Homo sapiens
aacatctgtatatttgtcacacagaccgaccctggtacaacatagaagcccacataagggcgtgaatactaggatgtgtggggattgttggaagccatcttggaggctcctcaccacactga

SEQ ID NO: 29910 - DNA, 122 bp, Homo sapiens
agtacaaacacaaacggagcaatgacaacagcagtgaggagaggccctgacaacgagggccgcccctgcccggggtgaggctgcacagcgccagctccaggctgggccagcttggcccgcac

SEQ ID NO: 29911 - DNA, 122 bp, Homo sapiens
acactagcattttcctgttgtcttttcaaacagtattttccttcttgacagtgcaatcagcgtataaaaaccaaatttcaccatctggtcccgtttaaagcaaaccgagcagcctgaaccac

SEQ ID NO: 29912 - DNA, 122 bp, Homo sapiens
gggtggcgggcgcagctgctgtgacaggtgagtgccgccatcttcctacctgtcaggcgccgagtcgttccccggatgccccgaagaggagtcgggacactgcagggctcaagggggtgcag

SEQ ID NO: 29913 - DNA, 122 bp, Homo sapiens
atacagcagtggttctcaagccctagtttgtaccacaattaccttcagggttggtaaggccgattattgggcacaccctcagagtttcttactcagaaggcctgtagtggggtcccaagatt

SEQ ID NO: 29914 - DNA, 122 bp, Homo sapiens
aagggttagccatctggtttcctacaattaggttaatttgtcaccaaatttagagaacttcgagtttggaaatattccaacggaagctgttttatttcctttctgttaagtttcactgaaca

SEQ ID NO: 29915 - DNA, 122 bp, Homo sapiens
ccctccccgcagaccatcctaaactccatgcacaagtaccagccgcgcttccacatagtgcgagccaacgacatcctgaagctgccttacagcaccttccgcacctacgtgttcccggagac

SEQ ID NO: 29916 - DNA, 122 bp, Homo sapiens
ctctttcctacatatgccaggctccctcccgccccctaccttctagatcatggaaggagtcgtggctctgagagattaaatcgtgccctatgcctttggccccacacatttagatctgagcc

SEQ ID NO: 29917 - DNA, 122 bp, Homo sapiens
ggggaggctgaggatccacaccgtggggagtgctctgcccccatggagtgacctggcgtccgccctccacggatggcacgcgatggcccaggccctgtgctgcagggccctgggagagccag

SEQ ID NO: 29918 - DNA, 122 bp, Homo sapiens
cttgaattcctgacctcaagtgatctgcccccctcggcctcccaaagtgctgggattaggcgtgagccactgcacctggctagagcttagttctctagtgttggtagttggagcctgctttt

SEQ ID NO: 29919 - DNA, 122 bp, Homo sapiens
ggagggcggcagtcccagggcagagtcccctccccaggcacagcccttgcctgttgttcccggttcccctgcacgccgggtgttctctgttgtccctggttcctctgcacaccgggcgttct

SEQ ID NO: 29920 - DNA, 122 bp, Homo sapiens
tgggcgcagcgtctgcaacttgtcagtcagtccctgtgtgtgcctggggacgctgtgctgcgaacagtgctctccggtcacatctgccctgcacctggaggtgggggtgcgatcgcaggcca

SEQ ID NO: 29921 - DNA, 122 bp, Homo sapiens
agacggtggggagggctagagaaaaatcctagaagctagcaagaccgcactacaccgaaacgtcgcgggcaacggactcgccagtcaccatctagcccagggacgacgcgggacggacgtgc

SEQ ID NO: 29922 - DNA, 122 bp, Homo sapiens
cggcgggggcgaacgctttgtttcctttaaagtcacttcttccctgggtttaaggtttcccgcgattccacctctggccggttgtcagtgtctgagggaagtagtctggatgaagtggtgtc

SEQ ID NO: 29923 - DNA, 122 bp, Homo sapiens
cttgtctgccttaccagatatgagacgtgatgcccttaagtctagtgaaaaccatctacacgataattatgagtgaagataataatggtaagcagtagaagcttactcttcatattcacatt

SEQ ID NO: 29924 - DNA, 122 bp, Homo sapiens
ggaaccacctctcgaaaaccccggccgtcgccctcccaggccgggagagtcggccccgcgcgcccccaaaagctccccagcggccggccctctctacgtcatccgcaccctcccgcccgctc

SEQ ID NO: 29925 - DNA, 122 bp, Homo sapiens
cagggacacagatgaggaacagaagggaattgcccaacaatgggttataatgaggctccacgaagacagtagcctcacctgttacattctcctgtgtaactccagcgctagcacagagccta

SEQ ID NO: 29926 - DNA, 122 bp, Homo sapiens
gtgtattttacatgaattaatcacaagagttgtatctcaatagagctgctcttccacaaacgaaccaagaggctgatgtcagggggagccaggcaccgggcggaagggccaaggggtcctgg

SEQ ID NO: 29927 - DNA, 122 bp, Homo sapiens
agagactgggagcgagtgtgtgtgcatctaaccgggaggttgtgagtttgtgtgcgcgcacgcccgcagagaagttgtgagcctgtgtgtgcacctaacacagaggttctaagtgtgtgcac

SEQ ID NO: 29928 - DNA, 122 bp, Homo sapiens
tgtgtaatgggtaatattagcattacagaagacacacacatcacatagaccctcagaagacgtaaacatcacatagaccctatttgtgcatcattttcaagtttaaaacaaatatttgtaat

SEQ ID NO: 29929 - DNA, 122 bp, Homo sapiens
ggagagaaaccctatgagtgtaagcaatgtgggaaagcctttatttctttcacttcttttcgataacatgaaaggactcacactggagagaaaccctatgagtgtaagcaatgtggaaaaac

SEQ ID NO: 29930 - DNA, 122 bp, Homo sapiens
cctccaccctctctctgtcgtgtttcctgagaaagccagatacggaaatgaacgaggtcacgaggccggctgcctccagggcatcctcaagtttctatctggctctggttttaactgaagct

SEQ ID NO: 29931 - DNA, 122 bp, Homo sapiens
ccccagcctgtaagcagtgaggggttctggcactaagctagttctccccatcacaggtctcgtgctggacataaaacctgcattgctgtagagctgccaactctgcctttctttaaccctcg

SEQ ID NO: 29932 - DNA, 122 bp, Homo sapiens
gcgctggctgttccgggctgagtggcacgagcttattagtatgcagggcccgtggctcgccgcgccaggctgcaggtttgagagccgctctggatgggctcgctagagtcgttgttgtggaa

SEQ ID NO: 29933 - DNA, 122 bp, Homo sapiens
ctcctaacccgtccccagcggctcgacgctgtggatcccgccgccctccagccccggctccggcgccgactcctgctcaggctcctgctcctgcccccggccccgcccccggccccggcccc

SEQ ID NO: 29934 - DNA, 122 bp, Homo sapiens
aaactgagaggtgagaaacccccaaaaccatccgtccgtctggttctgcctgaaggtctccgctgtcagctaatgaatagctcgatgcagctgctgggaggttttgcaaagcgcattcagaa

SEQ ID NO: 29935 - DNA, 122 bp, Homo sapiens
tggtcatcaggcctgccatgtctcagagagcagaagcaccagctcggggctcaaagctgacgtgcaggaggaaaggacctagggataaatagctcgggtccttgcagagtaccccaaactcc

SEQ ID NO: 29936 - DNA, 122 bp, Homo sapiens
gagcccaaggtcgcggctgggccagcgctgagcgtcagaggacgagagcaggggcctccccggtcgccccagcaggcccaggcacataggtgcccagagatccctggcttctgatcgcccgg

SEQ ID NO: 29937 - DNA, 122 bp, Homo sapiens
tctctcttaaatcggatacgaggctccctgtccctctatgtatgcataggaattttaatgcgattatccaacctgtaaagtcacacatttgtagattatcataccactcaaaacttactgtt

SEQ ID NO: 29938 - DNA, 122 bp, Homo sapiens
gtggctcggctcggctgaatgctcatcccaaccttgacggcctccgtccccaccccggggcgggcagcaaaaatgtcttgaccagccgtcctgtgaatcctttctgcgtgagcttggtggct

SEQ ID NO: 29939 - DNA, 122 bp, Homo sapiens
cctggaccacagcgtatctgaggtggagctgcgaagggccttcgagaaatatggcatcatcgaggaggtggtcatcaagaggcctgcccgtggccagggcggtgcctatgccttcctcaagt

SEQ ID NO: 29940 - DNA, 122 bp, Homo sapiens
cagaagacttcaagccttaaaaggaggctgccgtggagcacggatacagaaactgagacacgtggagactggatgagggcagatgaggacaggaagagagtgttagaaagggtaggactgag

SEQ ID NO: 29941 - DNA, 122 bp, Homo sapiens
cagaggggaaagggggcgtgtccagaaataagcaccgcccggagttccgggcgatgagggcggagcgcttccgcctccgtttggattggctcagactgggaaaaggcgggtccagagagaaa

SEQ ID NO: 29942 - DNA, 122 bp, Homo sapiens
tccttaatgggtgtctttgctttctttccttcaggaaagtttatatggactataatgcaacgactcccctggagccagaagttatccaggccatgaccaaggccatgtgggaagcctgggga

SEQ ID NO: 29943 - DNA, 122 bp, Homo sapiens
aacagctggtttaacagattgccacaaacttagtggctcttaaaaaaacagaaatctattcgaaagttctggaagcttaaagtctaaaatgggtacacagggctgcattcattacagaggct

SEQ ID NO: 29944 - DNA, 122 bp, Homo sapiens
aagagctccccttgccctctagtcgaagctcccgagtgctcggagcacgctcacccctcgcgaacacacccctgcagccgaagcagcccctgaagcccgcagcgcctgcaacaggtccgggg

SEQ ID NO: 29945 - DNA, 122 bp, Homo sapiens
cgggggaattagaccttaacccaaaggaatgtggctgtgatggcggaatttcaggcagctcggcgtgggggtgggggcccctcacatcttaccacccatgaagaaggctgggttcagagccc

SEQ ID NO: 29946 - DNA, 122 bp, Homo sapiens
tggcaggtcggctctcttcagtcctcagacgaacaagccttttgtggtctctgtcaattgcgtgggccctggcagggtttcttagtataaaataatagaagtaccacgggggcttcctgact

SEQ ID NO: 29947 - DNA, 122 bp, Homo sapiens
tcagacataaagtctagacgtccccagaggttaatcttgggaacattgtgctgtttccgacgcttctgttaaccgccgtgttttcccctgtttttgttgcagagctctcgcacatgagaagt

SEQ ID NO: 29948 - DNA, 122 bp, Homo sapiens
aaaaacaggggaggaaagtttctgaccagctgatgtgaaagcaaagttggccagaggtcacgtgagggaagtctgctaggatgcctgtctcagtctgtgtagttttgctatgaagaaatatc

SEQ ID NO: 29949 - DNA, 122 bp, Homo sapiens
ctccgagggcggcctacctctcctagggtcgccgtccccagctcctccctcagagtcccccgccaagggcccgctgcacctattcccgcagacgcgcagctgtaccggcctcagaccacgac

SEQ ID NO: 29950 - DNA, 122 bp, Homo sapiens
agattgagagctctttctgcggaacctgcctccggagtcagatgagcaaggggaccgccacgtcctcaccgagctcccagcggcctttggggcgggtccggggacaagccggaggactaggc

SEQ ID NO: 29951 - DNA, 122 bp, Homo sapiens
gagtctcatatcctaagatcttttaaaactcatttccctaccgaagggtgtcattcgtaacgcggcgtggggctgggggtgtggatttacggagaaagaggtgatcacacttcactgggctt

SEQ ID NO: 29952 - DNA, 122 bp, Homo sapiens
gtgaggggaatgggatgcagccgggatcgagcaccagtgagccgccagtgtacagacctccgagcgtgcccaggaccaccaaggaaggtgaaacttcctttcccttcaccctccccgtcccc

SEQ ID NO: 29953 - DNA, 122 bp, Homo sapiens
cacgcagcctgtccctagtgccgcaattccctgtttcaggcagcacagtgagggcatgtgcgtgtgtgcatgtgcgccaaggctgggtgatcaggcctgaggggctcatccaaaggcaggga

SEQ ID NO: 29954 - DNA, 122 bp, Homo sapiens
tttgcctttgagaactacccgaggagccggggagtctgatctgccttttcttgtggcttgcggaaaggccagactgttggctttcttgatatagcgtggcaatcggaagtgaagtctccgcc

SEQ ID NO: 29955 - DNA, 122 bp, Homo sapiens
agagcaataccactctctgaaaatgtggataaacagatctctgatatccatcccctcctacgttcacacttcagtctatgaaacggttccaccacactgcaggctgcagagacataagggac

SEQ ID NO: 29956 - DNA, 122 bp, Homo sapiens
gggccgagggtgataccaggaggcagagcctgagtatcacctccttcccttctccaggaccgggtcccttttaggtgagactagatgaaaagggctcttcagcagctgacttcacagcaact

SEQ ID NO: 29957 - DNA, 122 bp, Homo sapiens
catctcttcttggtaaactcctatacatccttcaagacccagcttaaatgttaccttctccggctctccctctggcagaacttaaaactcccttctctctctgtgtcttttctaggacttct

SEQ ID NO: 29958 - DNA, 122 bp, Homo sapiens
tacccttctccggctcgctattcctctgaagtcctgtggacttggagtctgaaaattcctcgagtggtagagatgcctcagctaggatgacagcgtggggacggccggcggcgtcccctgcc

SEQ ID NO: 29959 - DNA, 122 bp, Homo sapiens
ggacagcgcctgtttgctccttggtggccaggtgcttcttgtttcttttcagtaggaagtcgcaaacttcagcccagggctgaagtagctaatgctgagtagaatggggctctttctaagag

SEQ ID NO: 29960 - DNA, 122 bp, Homo sapiens
aaaagccagaagcaaacatacaaaattgtaacaagttaccttcaagtattctttctctatcgtcttttgagcttgaaaataaaaagcaatccgacaagttttagctgttaaaatggctcctg

SEQ ID NO: 29961 - DNA, 122 bp, Homo sapiens
cggagaagcagtgggcagctgtgagcacccactgggggctgagcagtgacccgccgcacacgtgcaccctccgcaggcggaggctggcctgccatggccatgcgccggccggggcagcgtga

SEQ ID NO: 29962 - DNA, 122 bp, Homo sapiens
tagccgaaagcactccgagaagacaagacaactgcagttctgtagggactgcgcggcacgcgtgggcccagagcctgtcccagcgaggtagcagctgccatgccgaccgctggagcgccggc

SEQ ID NO: 29963 - DNA, 122 bp, Homo sapiens
ggggcgggaaccttggaaactttacacagatggggagctcagccattccacgtgtgctttcgctcagcacaatgcttactacaaacccacgtgtacttccttccagctggttgctttttatt

SEQ ID NO: 29964 - DNA, 122 bp, Homo sapiens
ttgagttcatattattcccagattgccttttgactgtgctatagcttccttgccccagtgcgatgctggacaaatacgaaggacagtccttgtgattttataattggtccgatgctgccagg

SEQ ID NO: 29965 - DNA, 122 bp, Homo sapiens
gtctccgctcccctgcctcaaatgagggaggaaagttaggactggatattagcaaatggccgggttttgcctcagggcaactgaaaaaaagagtacagccagacgccactcctctgcgcggt

SEQ ID NO: 29966 - DNA, 122 bp, Homo sapiens
tctccctaaggagctacaaaacccatagcaagatcatgtggcaactagggccacctgcttcgaatagggttttctctccctgttttgatcctttacccccactcatttccctgctctgtgac

SEQ ID NO: 29967 - DNA, 122 bp, Homo sapiens
cgcggccatgcctgagccactgtgccttctccagggcacagcgcctgccggggagggtcccgcagagtccgcagaaggaggcgccgcggggcctcgggagccgagggtgagagccggatctg

SEQ ID NO: 29968 - DNA, 122 bp, Homo sapiens
agcgagctgtaattcctgcctgttacaagtgttaacacctggcctggggccttcctcccccgcagtctccaggtgcctccctgggcccagcccactgacccccacggggtttgactgaacat

SEQ ID NO: 29969 - DNA, 122 bp, Homo sapiens
tgcttagcttccctggttacacagggggaagcgagaggtgtcataatctcaccaaggggtcgctagttgcccatgtggagcctggccacacactattttcatcacagagtccactagcaggt

SEQ ID NO: 29970 - DNA, 122 bp, Homo sapiens
gcagaggcaagggaacggaggcggcaagtacatggcagaaggccggattggcgtggcgcccgacacagaaggctcaggggtattattgcccaaaaccactgaactgtgtgatttagaaaggt

SEQ ID NO: 29971 - DNA, 122 bp, Homo sapiens
cggtgtgtcatgttttggatgtagacttggtcattgtccctcagatgcctccagagcacacggtgcaggggtgtcacctttccgacgtacccatgggtgcccggagttgcctccttagtggg

SEQ ID NO: 29972 - DNA, 122 bp, Homo sapiens
agcctagagcacctccttccaagcttcgatttgagggggggtctggggtccctgctctaccgcagtgaagttcaagggagccttggaaggcagttgaaaagcttctcaggtggtgtcctctg

SEQ ID NO: 29973 - DNA, 122 bp, Homo sapiens
acccagcgtggctgcagaagctctctaagcacaagacaccagcacagccacagctcaaagcggccaactgctgtgaggaggtgaaggagctcaaggcccaagttgccaaccttagcagcctg

SEQ ID NO: 29974 - DNA, 122 bp, Homo sapiens
agcatgtctgctccaggtgtgggcccagaggcccagggaggtgcagccaaagccctgctgcgcctgcacaaagaagcatctgagagcctggggcgggcatggctctcgctgtgtgcactctg

SEQ ID NO: 29975 - DNA, 122 bp, Homo sapiens
agcgatccgggccgctgcgaagccctgcccaccaggagtggatccccaggattcacctcccggctgcctgctctgagctgagaaggggatctggttcttcacaataccgtggatggcgggga

SEQ ID NO: 29976 - DNA, 122 bp, Homo sapiens
tgcccgcggactcccgcctgttgccatggcgaccaggccccgctcctcggctgcgtcccccgccgtcgggccaatggaacactccccaagccgcctgcctccgcggtcccctgcaggcaccg

SEQ ID NO: 29977 - DNA, 122 bp, Homo sapiens
tcctgttcagtattgcagctgacatgcaggataacacctgtgagggaggagcccatggggcggggatacctactctgaaccctgccaaactgctacaccccagctccaggagcaaggagaaa

SEQ ID NO: 29978 - DNA, 122 bp, Homo sapiens
gcgccgaggcgcagtgcaccaagggttttgtagtccgtccgggaacagcggaaaagggaccgcatgaacctccggaactttgattcccagaaagccacaggctggcgcaggcgcaccaagcc

SEQ ID NO: 29979 - DNA, 122 bp, Homo sapiens
cccaaagccacgcgccccggcacaggctcccgcccacaccaggaggacgaccccagtgcccgcctcaaactcccagtcataggtccgcccgtggccgccaccccgcagggccagcaccaggc

SEQ ID NO: 29980 - DNA, 122 bp, Homo sapiens
gtagactccctgggtacaagggtgcctgctcagcagtcgggcatgagctgctccgatgggcgaaggaggttgtctatcccacagttggagaggggccctctctgccccagtgggcgatctgg

SEQ ID NO: 29981 - DNA, 122 bp, Homo sapiens
ttcatcttcactgagttcctggagccggcagccaatgagaccgtgcggcacgggtgtctgcgcctcaaccagcccacccacgtcaacaacggcaactacacgctgctggctgccaacccctt

SEQ ID NO: 29982 - DNA, 122 bp, Homo sapiens
acacacgcacacacacgaacactgctataaaggagggctaggctggctgcagttgccgaccgcactgggcaaatagagctatttgcaataatttggaaatcataccttgttttgtttaaggg

SEQ ID NO: 29983 - DNA, 122 bp, Homo sapiens
ccacttagctgctagtccccttattagagaactgaagagttagtaggaaggtgactcaaacgcatcgtctcaggatgggcatggtttcattccggattagaaatcatgaaagctaggagata

SEQ ID NO: 29984 - DNA, 122 bp, Homo sapiens
ggaatggctgcccctttcggtagcacggactctgcgcctcctgattggccaagggatgcgcgcactctgcgcgttccttcgtcgaacgtggcagtggggaggagttcccagtttaggggcgg

SEQ ID NO: 29985 - DNA, 122 bp, Homo sapiens
ggaaattctgcgtttcagacagggacactacccttagagagcagtgggcttccccagcagcgtagtgaaacatgatactcctgagtttcatgaaaaaagggcagacatctggccagagctgg

SEQ ID NO: 29986 - DNA, 122 bp, Homo sapiens
aggccaaagtcaagggagacagtctgtatgaaggtttgggtgggtgggtaggtgggtgggcgtagaggaagatgtggaatgaaagcaaattctcagctattaaaagctgtccatgtagggta

SEQ ID NO: 29987 - DNA, 122 bp, Homo sapiens
tctcagggagcctcctaattagttaaatacccaggtcctgtccactccctgtcattaacccgtgagtgcccagtgatgcaacgattcttccaggtctgacactttggccaagtccccgggga

SEQ ID NO: 29988 - DNA, 122 bp, Homo sapiens
agcaagcaaggggcagaccaagacctccccccgccggtcttggtggaaaggcctggacttcgttctgtccacccctgccaggtggggtgcagtgtcactgcagctcccgccccgtccctgag

SEQ ID NO: 29989 - DNA, 122 bp, Homo sapiens
tatgacacacctatattcacacagttgtgactgtggacacgcaaaatgcctgaggccctgcgtccaatcccggaagcacagttcctgggaggagtcacttctataatagccgtatcttccct

SEQ ID NO: 29990 - DNA, 122 bp, Homo sapiens
ggctgggtccacctggagggtatttaaaggggacgaaggcaaacgaagtgtctagttcctcgtctgcttactcattccacaagtgtttgttgggcacagttctagacactgggcagctgcgg

SEQ ID NO: 29991 - DNA, 122 bp, Homo sapiens
gtcgtggctgccgtggaacctggaccggatcttctctcttgtggcctgtggggcagcatgcgtggctgctggggccgcctctggccccatcttgtctgaggagcaggacccagctgtggagc

SEQ ID NO: 29992 - DNA, 122 bp, Homo sapiens
ggccggccatcagctcacagtgcggcggggacttggcattgctgaacatccagttcttcccggcctgcaacaaccgagccaatgacgagtgagcagggccgcggctcccccaggcacccact

SEQ ID NO: 29993 - DNA, 122 bp, Homo sapiens
ctcgctcttgcagcagagttttcattttggtagttgatggaaaaaggaggtcaaataaaccgatgtggataagaagccaaagccgtttgtcaaaacacagggagaggactggagacgggagt

SEQ ID NO: 29994 - DNA, 122 bp, Homo sapiens
aacttgacggatgggagcccccgcccccagctgtgcagcccttacccgctcgtgcatgggcgaagctgggctggagtcctcttcagtcccacagggggatgtgtcacctgtagacactcggc

SEQ ID NO: 29995 - DNA, 122 bp, Homo sapiens
tgggcagaacagatccccttaagagagtcacagctctgacaaaccaagaaactttcttaacgtgtttgagtagaacagggagtcagtggtacatggagagctgaggatttacagatggaatg

SEQ ID NO: 29996 - DNA, 122 bp, Homo sapiens
acttcgcacgcaaccgcttaggcgtcgggttccccttctgctccaggagggaggtggcggcgtgactaaagggcattggcctggggtcccctgcggtgcctgttacatcccactccgttggg

SEQ ID NO: 29997 - DNA, 122 bp, Homo sapiens
cagtctggatgaataaataatgccgtagggatgtgagccctacccattactgaatgactgcgggtgtccttgactgctatccagagatagtaacatcaagtagtcttcttggcatttgaggg

SEQ ID NO: 29998 - DNA, 122 bp, Homo sapiens
ggccgccgcccccggctgcgcgctgagccgccggccccccgagcgccacggccggagctgcggcggcggcatcatggccccgaccctgctccagaagctcttcaacaaaaggggcagcagcg

SEQ ID NO: 29999 - DNA, 122 bp, Homo sapiens
tgaaactcggggctggggagccgcagaactccctgtacccccatcaagtagaggagccgtcgggagactccccacaagtgtcacagcgtcaaagctcatctttaaaaatatgtacatttata

SEQ ID NO: 30000 - DNA, 122 bp, Homo sapiens
ggggagaggaggaggctggggcacagggagctggacctgagaagccttctatttttagcccggcctggcctgcccagccaacagcagcaggggtttggctgtaggtctcaggagtgtttaca

SEQ ID NO: 30001 - DNA, 122 bp, Homo sapiens
ccgccggaagtccgctccccagagccggtgtgggcggggactcggcgcagtgctgcggggcgagggcttctctacttgggcgctctgctcctgaagattgtggtgggggctgtctgtgcatc

SEQ ID NO: 30002 - DNA, 122 bp, Homo sapiens
caccgcccagattcataggcaaccgtgaacatccacaggtgaggaacacagcagtgctaacgaaggaaggtgcaggaccacaaaaccaaaacgaggctcctggcagcagctgatgcgagcac

SEQ ID NO: 30003 - DNA, 122 bp, Homo sapiens
caagacaatgttgcacccagtgccagtcgatccgtcacggcgccgcaaactttccctgaacggagggtttgtggctgacatctctagtttctcagagcctgggagtgatcactggctgcacc

SEQ ID NO: 30004 - DNA, 122 bp, Homo sapiens
gaggcagggagagagggaaggggcgagaatcttcttactgagcagcaggtccctgactcccgctcaggtctggatgctcaggccatgtgcagcgatccagctggcaggacccagcctgtctc

SEQ ID NO: 30005 - DNA, 122 bp, Homo sapiens
tgggtcacggaggcctgggctgaggtcaagactccgggcccggggaaggtgaagccagagcgctgcggctgggggtgcctcacccgggccgagatagggtgcggggaccaccagacttcggc

SEQ ID NO: 30006 - DNA, 122 bp, Homo sapiens
gagtaaactgtgtttttgcagaatgacaggcttgggggctgcctatgcgcagaatcagagcgggcggcggcggggctggcgtaaccggcagcagcggcggcggcggcggcggcggcacgagc

SEQ ID NO: 30007 - DNA, 122 bp, Homo sapiens
ccgattggtccttaccttttacctgtttaacatatacctatctttctgtgattagctgctcgccaaattttcatttgcataaagtgtaacgtcacttcagcccctgattggtcctgggccaa

SEQ ID NO: 30008 - DNA, 122 bp, Homo sapiens
ttttcggagatcacccttagcgcggcctctccgcccagtcccagattaggcagcgaagagcgaccctcaccttgtctaggtggcacgttccttaaaagcgaaaggaccaggagtttcttcct

SEQ ID NO: 30009 - DNA, 122 bp, Homo sapiens
aacagactggttaattcacagaacaggctttcacctgccacacaagtgctcagcaggagacgattttccatctagcctctttgaacataagggggttggatggttgcttgagagagggtaga

SEQ ID NO: 30010 - DNA, 122 bp, Homo sapiens
tagaagtggggaggtcacagcacctcattaaacttggaatttcatcttcccttttcttgccgtgttcccttagataactccagtcggatgtgccattgaaaggccgcgaagaagcttccgct

SEQ ID NO: 30011 - DNA, 122 bp, Homo sapiens
gactgacacattatgttggttatttattcattgcactcctccctgcagcagacgggagggcgcatgggagcagaagtcctcatctcctagtgccttgaggtggccccagaccctagaacagt

SEQ ID NO: 30012 - DNA, 122 bp, Homo sapiens
tccgggccgaagtctcggccttcacttcacttccgccttcccagcccgtgaacacgaatgcgcctgcgcgcacctctctcagcggaagtaatagtgacaaagctgggttcgcggctggccca

SEQ ID NO: 30013 - DNA, 122 bp, Homo sapiens
gctcaaccctggacccgcacagacccagcagagctgctcaggaaaccttcagccgccctccgtgagagcacacgatttggaatgttcaagaaatataaaagaaataaggagcacttcaaaga

SEQ ID NO: 30014 - DNA, 122 bp, Homo sapiens
cccggagtgagggcgacccgggggacgcgggattagcttagcccgcagcccctgtgccagcgaaaccttgaacattaagtgaaaggtgggggacacagtgaaagccgctgaggcgggagtgt

SEQ ID NO: 30015 - DNA, 122 bp, Homo sapiens
tatgaacaggagagccatgtgaggcctcaaactagtatttcagggagcagcgtgcacactcgtggttttgtggtcttcaaccgtcctgctagcccagataagtctgggtggtcaagaaccgt

SEQ ID NO: 30016 - DNA, 122 bp, Homo sapiens
ggcctaggaagagggtctgggccaagaggaacttccccgcaagaagtacctagctaaggacgctactaagggggcgggatcgccaccttggaggtgtgcgagcacatgcctgcgtcagggag

SEQ ID NO: 30017 - DNA, 122 bp, Homo sapiens
ggcaaaggcagaattaagaagcagggtcttgagatgtaggaaaggagaatgaaccccacgcgggaagaggacaggccgccctgactttggtccactcagccagggggtgagcaccacctgtc

SEQ ID NO: 30018 - DNA, 122 bp, Homo sapiens
gaggcgccgcgggccgggagtgtgcaggaatgtagcaacttgcagcgaaaagtttccctgcgctgccggccgggccgcggtgcgggcgggcgcgcagaggaaggaagagccgagaggaggcg

SEQ ID NO: 30019 - DNA, 122 bp, Homo sapiens
cttccaccgccccccgcccccagcaaagccccccgctcggagcatgcgcgggccgcttggcgccaattgctgaccgccacagccacagccagggctagcctcgccggttcccgggtggcgcg

SEQ ID NO: 30020 - DNA, 122 bp, Homo sapiens
ctcttatctgcctgccagagaagacagctactggtattgacagttctcctgcaccgagggcggccagccggctggggtgctgactctcagctctcttgtttttgtgcctgccaggcactcgc

SEQ ID NO: 30021 - DNA, 122 bp, Homo sapiens
gcgggcgggcgaggagcgggtgagaccgaggtcgacagagtgggggccccacgaggcccgcgcctggtcgggaagagagtaggagattcccccgcgagctcagacccggcactgagggaaga

SEQ ID NO: 30022 - DNA, 122 bp, Homo sapiens
ctcccgtgtgggggggcgctgactcccgtgtgggggggcgctgactcccgtgtgggggggcgctgactcccgtgtgggtggcgctgactcccgtgtgggtggcgttggctcccgtgtggggg

SEQ ID NO: 30023 - DNA, 122 bp, Homo sapiens
tcaatcccagatccctggcgctgccagccgatcgctggtttctagttgagtattgaaaatcggcctcgaggttttgagtcgcttcttaagctgagaacctaggttttggagtcaggcctgtg

SEQ ID NO: 30024 - DNA, 122 bp, Homo sapiens
ggttctgggcccttgactatcacagctctgggttccactggaggatctgggagcccccagcgtgtgggaaaatacagcatgcattgagcacgcactgtgtgaaaagcactgacctggggcag

SEQ ID NO: 30025 - DNA, 122 bp, Homo sapiens
tcctcacggctgctctctgggaaggacgctgcctcgccacttcctcccagccacctgcagcgcctcctgcaacactcaggaatcctagagatccttaagccttcacagggcgcaggccccat

SEQ ID NO: 30026 - DNA, 122 bp, Homo sapiens
cctgaattggggcctttccggaggaggaagctctgaaaaacagggggcccagtgccattccgcagggaattgtcgcttgcgttcagctgttctacacaatggactcagtacctgccactgtg

SEQ ID NO: 30027 - DNA, 122 bp, Homo sapiens
gttactctatctacgtgtacaaggtgctgaagcaagtccaccccgacaccggcatctcatcgaaggccatgggcatcatgaactccttcgtcaatgacatctttgagcgcatcgctggcgag

SEQ ID NO: 30028 - DNA, 122 bp, Homo sapiens
agtggcaggcgcggccggtgggatgccgggtaggaggctgccctggagcccgctgggcagcgccgacccctaaggcagccgggcgggtgagcgagcagaggcgtgggcggctgaggggctga

SEQ ID NO: 30029 - DNA, 122 bp, Homo sapiens
gcgcgcccggcgtcacggtgagtgcgggtcttgggccctagcacctgttctctgggaagtcgtccgctgtgaacgatgaacgcctttccttccaccagctgctggttaccccggagacaagc

SEQ ID NO: 30030 - DNA, 122 bp, Homo sapiens
ccttcaggatgaggacacagtggccacgctgctagagtgcaagacgctcttcatcttgcgcggcctgccaggaagcggcaagtccacgctggcacgggtcatcgtggacaagtaccgtgatg

SEQ ID NO: 30031 - DNA, 122 bp, Homo sapiens
tggccgcaagatgcttacgtctagtaggagagacaaattaacaaaacaaataagttatatcgaatattaggagataagtgctgcaaaggaaaagaaaacaggtgtgcaccaccgtgcctggc

SEQ ID NO: 30032 - DNA, 122 bp, Homo sapiens
atcattcatttgtttatttattcatttatttatcaggcctctgcagtatgttaggctccacgtggggccctggatatattatattgagtaaagagcagtgggcacagatgaaaaagtattgg

SEQ ID NO: 30033 - DNA, 122 bp, Homo sapiens
ggggagaaaggccagggggcactgactccattgcatcgtgggaggagcagcctggtctctcgccaatacccacggctttggacaggtgctccaggctttgtccttgcgctgggcctttgctg

SEQ ID NO: 30034 - DNA, 122 bp, Homo sapiens
caaacaattcacttgggaggagaggccctcaggaagagtagccttctagccacaggcattcggctctgagcatccattactatgttttaccgaggcagtggagagatgagtgaagtgagctt

SEQ ID NO: 30035 - DNA, 122 bp, Homo sapiens
gaaccgcgcgggcgccatcaacgccacctacaaggtggatgtgatccgtgagtgtggccccgggcgctggcgggcggggggtgctggtgggcgggggcgctggcgggcgggggtgctggtgg

SEQ ID NO: 30036 - DNA, 122 bp, Homo sapiens
aagaacgagtcaggtttgttcttaaagagaaatgaacataaagaatgcaccaacttctcacgcctcgagtaggaatcagaaatttgggctgggttcagctaggcagttcttctattggtatc

SEQ ID NO: 30037 - DNA, 122 bp, Homo sapiens
ccagcagctgcagagggtgggccgggtcccccagcagtaccggcccaccggcactgcactcggatcctcacagggccgcagctgcttccctgcaggacagggctcaggacctgcagcccacc

SEQ ID NO: 30038 - DNA, 122 bp, Homo sapiens
cggaccagacaggccaccatgaccgagaattccacgtccgcccctgcggccaagcccaagcgggccaaggcctccaagaagtccacagaccaccccaagtattcagacatgatcgtggctgc

SEQ ID NO: 30039 - DNA, 122 bp, Homo sapiens
tgacctggaattcatgaatgtgtatttcataggactggcaggagatgccactgcaaaagacgacattgtttcaggaagggaggaactatctctatatctgtggtatatacctaatgttactt

SEQ ID NO: 30040 - DNA, 122 bp, Homo sapiens
cctcatcgcgcctgggccggcagagccacaccccgcgtctcgcgtcactgagtcgcgtcacggctattggcttgttcctactgtggcgtcattagagcccggcctccggctggggccaccca

SEQ ID NO: 30041 - DNA, 122 bp, Homo sapiens
cctcggtaacatcacagcaggtccaggccaatgataaccttataagaggccatgtcgaagcgcgacatcgtcctcaccaatgtcaccgttgtccagttgctgcgacagccgtgcccgggtga

SEQ ID NO: 30042 - DNA, 122 bp, Homo sapiens
ttgccaacaactgcaggcccctgagcctgctggaggagggtgttgtgggccccagatcaacgtcatccccaacttccctgctgcacctcccaggcctctccatccaggaggttgggccctgc

SEQ ID NO: 30043 - DNA, 122 bp, Homo sapiens
ctctaataaataactcccattgattttccagctcagggctcaccactccttcaccgtaagcgccaggaggcagacctggaaaatcactcacatattattggtgctcttcctcccccatcctc

SEQ ID NO: 30044 - DNA, 122 bp, Homo sapiens
tcactcgggccccgccggtggcccggggaagcagcacgggcggggggcaggggctggggccgaccgggaggccggtgccaaggatgggggccgcccggctgccccgcgcgtgaggaggccga

SEQ ID NO: 30045 - DNA, 122 bp, Homo sapiens
gagggtcgcctctggaaactgccggctactacgcagatagctgtgaattagccaaatagccgcccggaccctgtacccgcaccagggcacagcccatcactaatcaatggtatttccataaa

SEQ ID NO: 30046 - DNA, 122 bp, Homo sapiens
gcagcggcgggctgaagggcaccttgagcgcggccagagcggacgccgaggccaaggaggcgccgagagcgatcgagggctgcgagcacgttgtcacctcttacctgcatccggacgcgggg

SEQ ID NO: 30047 - DNA, 122 bp, Homo sapiens
cgtggagctccaattgtcttggtggtgaggtgatcaatagcccattactggatagaacagcgactacaggaagagcattgaagattttaatgcatgaattatgcatgcagcgctcattcttt

SEQ ID NO: 30048 - DNA, 122 bp, Homo sapiens
ggaaggggcgactcaggtggcggtgcgactgccgctggtttcggttctggtgcgccatgacgggccgctgccgctttctgccgccgcgcttggcgccccgggcctccgcaccgcctagtctc

SEQ ID NO: 30049 - DNA, 122 bp, Homo sapiens
cggggccttgggcagagacccagggagcccagcagagtagttagcgactgcgctagaggccgggcagaggaggaaagctggcagccaggacctgggctggtggtgtagctgggggaccacag

SEQ ID NO: 30050 - DNA, 122 bp, Homo sapiens
cattgtaatatttattattcaaccttttgacatttatttgtagcagttgaattgaggtaccgggtgcattattagcatcgaaacagtaaagtgttccagctctaccgtaataactgagtttt

SEQ ID NO: 30051 - DNA, 122 bp, Homo sapiens
ggctggggtccttacccatcgtgttgttggctcgggagcaggctgtgcgcttcaggatctcgtgcacctaaaaggggacgacagcagagctgtgagctcctagttcccccccgccctccacc

SEQ ID NO: 30052 - DNA, 122 bp, Homo sapiens
tattcaggaagtagagtgcaactctgagtttcgaccttagcatgacgcaggaccaatgaccgaggcagttccactgggccccactgtctacctcaaatgaagaccaacattctttcagtcat

SEQ ID NO: 30053 - DNA, 122 bp, Homo sapiens
aagtgtttggcaatgcctattaaagctaagcacatacgtgtcccactccgggtatttgcccggtagaaatgagggcttatgtccaccaaaacatatgcggagaacgctcagagcagcattct

SEQ ID NO: 30054 - DNA, 122 bp, Homo sapiens
gaaaataaacaaaaagcaagtaactgctaatctaagcagatgctgatatcttcctcagcacgtaggttgtacactgttggcttgaccctgcaatcctttctgaaaatttaaagggtagtaga

SEQ ID NO: 30055 - DNA, 122 bp, Homo sapiens
caaactcctgacctcaggtggtccacctgcctcagcctcccaaagtgctgggattacaggcgtgagccacagtgcctgacaagatttatagagagagggtctaaattcattcctgcacatct

SEQ ID NO: 30056 - DNA, 122 bp, Homo sapiens
tacgactcccccgggggggctcgtgtccaaaagcagccgcaggggccgcgggagcatggccgagtgaaggaatcagcggggtcgggccatgggggcgcctggggagagacggggtggggtgg

SEQ ID NO: 30057 - DNA, 122 bp, Homo sapiens
cattctctcccactatggcagtgcttctcaacctatttgccgcctctgctctgtcacccacgtgggagtgcagtgggatgaacatggctcactgaagcctcggcctcctgggctcaagtaat

SEQ ID NO: 30058 - DNA, 122 bp, Homo sapiens
acgaaaacaaaaacaaatccggattgcctttgtccacagtatagagggcgggggcgggggcgggggcgagggcgaaggcgagggcgtcggcggggctgcagcctccacgcagagaccactga

SEQ ID NO: 30059 - DNA, 122 bp, Homo sapiens
ccccgggggcgagcggctgtgcgcggggccaagggcgggggcagcaggtgagtgcgcggccgggcgggagttctgggcggccgggcgggagttctgggcactcgcgcgcggcagaggagccc

SEQ ID NO: 30060 - DNA, 122 bp, Homo sapiens
atagacatttttccttacctggaactagtgtaattggtctaaccgtttggccttgctgtacgttcagcacaatcccaacctgattcattgcattttgtacaggccggacattccttacagga

SEQ ID NO: 30061 - DNA, 122 bp, Homo sapiens
cctgggcagagatagtgtccagggtgtggtcagttgacgtggcctgtcagtctttggccacgctctcaggcccccctcgctgtggctgtgtgtttgcaggcgcccctcagactccaactgga

SEQ ID NO: 30062 - DNA, 122 bp, Homo sapiens
gccggcccaggggtgctcaagggacaagggtctggagttctcatggggctgtggcttcctcgtccccgaagaccttggggaacaagagaacaagttgtgactgtggccgacaccctggccag

SEQ ID NO: 30063 - DNA, 122 bp, Homo sapiens
cttaagggaatctgtctttgccttttgctcccgggttatgagaaaatgtatgtggctgtgcgtccaggacagcaatgtgtttgtctctcagccaagctcagtcctcacccaggcaccggggt

SEQ ID NO: 30064 - DNA, 122 bp, Homo sapiens
cagtcctgggaatcctgtctggcctgtgcagcctgatctcctgcgagggctcgtccacagcgtcttgctgtcttgcagtgccggcaatgtggtctcccaccacctgagaagttccctcctcc

SEQ ID NO: 30065 - DNA, 122 bp, Homo sapiens
ggagaggaggatgaatggacagacaaacgagagcaattcttctacctgtgggctgtcctacgccttgcagtgccgggtcctgcggcgaccactgagccccttcgtcctcgccctcagtccct

SEQ ID NO: 30066 - DNA, 122 bp, Homo sapiens
tggaggggtcgaaggggcgcatggccgcccgcgcgtcctgagagaccgagaagcacaggacgtgtcagtcctcaggggagactaggagcttccatcttgtctcagcacgtgaggccttcatg

SEQ ID NO: 30067 - DNA, 122 bp, Homo sapiens
gccggagggggtccaggctaagtttagaaggctgccaggttaaggccagtggaaagaattcggtgggcagcgaggagtccacagtaggattgattcagaagtctcactggtcagcaggagac

SEQ ID NO: 30068 - DNA, 122 bp, Homo sapiens
gcaggggtcccaccggcctctcacttagtctaccctgacatacccagggcagtacattgccgggcactgagtaggtggttttggtcattacctctctgcagcctccagccacgctggttccc

SEQ ID NO: 30069 - DNA, 122 bp, Homo sapiens
gagctcgtagtgagaaacgttggcggaacatactacttcactggctctagtggatggaggcgaccaggaaagggttggctcttcgaccaagtattgatggatactggtttcagacttgtttt

SEQ ID NO: 30070 - DNA, 122 bp, Homo sapiens
ctccatctgcagggctgtaatacctactctcctccgatccattcaccacacaacttcagccggctgaacagactcacgcagctccagcccatcttgctgacctaattcagaaaagaagtgct

SEQ ID NO: 30071 - DNA, 122 bp, Homo sapiens
gaaattttaaactgcatggcagcttttttatttagtgaggcttttcagcaaagggtaaggcgtctgtggagtacagagcctatgttagtagattggacagctttccaaggaaatgatgtgca

SEQ ID NO: 30072 - DNA, 122 bp, Homo sapiens
actcactggatagggctgagacgggggcgggtcttggctccgcccagaaggctgcgcaggcgcagtcccgacgagcaacgcgtttgtagaggggtgggtgcgcacgctctgtccctgcgtga

SEQ ID NO: 30073 - DNA, 122 bp, Homo sapiens
catctgggcgagttacttcagcccatttatcaagtgatccaaaaggctgccagtgtcgagcggggtccagaacaggagcaggctctgcaacaggtccaggctgctgggcaagctgctctgcc

SEQ ID NO: 30074 - DNA, 122 bp, Homo sapiens
cctccttcgtgaaatcaaggaaatgagcgttcccgtcacccccagtccctgctcctccttcgtgaaatcaaggaaatgagcgttcccgtcacccccagtccctgtgctccttcgtgatcaca

SEQ ID NO: 30075 - DNA, 122 bp, Homo sapiens
gttctgtatccttctcactgacaatctatacaaaagcagctcccaaatcctctgaaaccccgtttctttctcttccctctgcctttctctctgctctttctgggaatgtggcaaggtttgcc

SEQ ID NO: 30076 - DNA, 122 bp, Homo sapiens
gccgcggtaaacgtataaggctttccctggcccttgcctgtttcctagaagctgaagccgcgcggaggcccaggttcgcccttccacacacggaataagctgttggactggctgcctcacct

SEQ ID NO: 30077 - DNA, 122 bp, Homo sapiens
ttcctccccccgctgcagttgtttcccattagtaactcgatctctcagagcagtaagattcgccttctacgcctctttttccctccgcccgaattgtttgttttctgcacatctccttcagg

SEQ ID NO: 30078 - DNA, 122 bp, Homo sapiens
gcaccccagggccagcagcccctttgtcagcactctgatgtcaatgcacgcacttcacaacgctctgctccttctgtccgtcaccaaaaaacgaacgtttgttccttggaaaagactacagt

SEQ ID NO: 30079 - DNA, 122 bp, Homo sapiens
ccaccaaggggaggaaggaaggcacctgaggcttccagggtgggggctgtttgccaggtacgtgggggtggggcacgcttcccagtgttctgcgtctgtcctcacaatggccctcaaggtca

SEQ ID NO: 30080 - DNA, 122 bp, Homo sapiens
tccagagtgtccccaccaaaggcttcaacaccgagaagatccgggtgcccctcgggggatcgcgtggcatcaccttccaagtgtgggacgtcggggggcaggagaagctgcgaccactgtgg

SEQ ID NO: 30081 - DNA, 122 bp, Homo sapiens
ccgtgggccccggtggccagtcctgcccagccggaaaggccttggagcagaagccaggcccgggaccacgttccgtgcgtgcccccccgacgggcacagggtgggtggttgctgggccctgc

SEQ ID NO: 30082 - DNA, 122 bp, Homo sapiens
cgaccttttcctgttcttgcaggcgggtaaatttccctcttgggggcgggggtttcccctcgtagggagctggggctggggaaaggtctgcggacgcgcagcgcttgcagaattctcagccg

SEQ ID NO: 30083 - DNA, 122 bp, Homo sapiens
ctattttattattgttgttgttaatttcttactgtgcctaatttataaattaaaattcatcgtaggtatgtatgtacaggttgaacatctctaatccaaaaatccaaaatttgaaccgttcc

SEQ ID NO: 30084 - DNA, 122 bp, Homo sapiens
cgggacaggcaggtgtggggagccggcgggttggagggcgttttgacgctagagggcgctcggtgcccggcgagggaggcggcccaggccggcgggggagcgcgcgcctctgcacttgcacc

SEQ ID NO: 30085 - DNA, 122 bp, Homo sapiens
tgctcttcagagtcgggcagacgtgcagctgaagcttggtctggccactgatctgctgcccggccttgggtaaactcctggagcccctatttccttattgattacatggagataccaatcca

SEQ ID NO: 30086 - DNA, 122 bp, Homo sapiens
ggttaaaatcttattttttcagggttggtaaatacctctgggtagacgtttcacaggcaacggggtctaagagccgggcggaagttctccctgtgtcacacaaggtcggtttgacttcaggc

SEQ ID NO: 30087 - DNA, 122 bp, Homo sapiens
ggcttcggtgtcccacttttgttctctcctccaggctgttgtacttgctatgtcttctgccggagttacccccagccttcctgcatctccccaaacttgtgtccccagcaagttccttctga

SEQ ID NO: 30088 - DNA, 122 bp, Homo sapiens
gtagcagaaactgactaactttccctgcaagggttagacagtaaataattctaggctctgcgggccacacagtctctgtcacaatgactcacctctgctgtttgagcagctacaaactggca

SEQ ID NO: 30089 - DNA, 122 bp, Homo sapiens
cccaccccatcccccacccgactcggtcgccgtctctgtctcgtctactccaggcttctccgccagtcacgatggctccttcgctgtctacgccaaactctcggcgagagggaagagacgct

SEQ ID NO: 30090 - DNA, 122 bp, Homo sapiens
agctttcaaggaaagtcttggagctgtgggtaattagagagtttgaatttcataatcagccgatttaacccatggctgccatggttctgagaagggctgatagcaagaggcaggcatcccag

SEQ ID NO: 30091 - DNA, 122 bp, Homo sapiens
tcaggcctgtgggctgagggcgattggagggcgatcagctgtgtcagacctgtgggagcgcgattggctgtgtcaggcctgtgggccgagggcaattggctatgtcaggcctgtgggccgag

SEQ ID NO: 30092 - DNA, 122 bp, Homo sapiens
caggcgccgtctaactgatacgtgggctctgggggagaagcaggcgccgtctaactgatacgtgggcacgggggagatgcaggcaccgtctaactgatacacaggatctgggggagacgcag

SEQ ID NO: 30093 - DNA, 122 bp, Homo sapiens
gggccccaagagatgcccctggagcccgggaggccccaccctgggcttctgcggcccaggcgcgacccagccgcccggggcgctgtccgccccttagagtgctgaaactctcttcattatgg

SEQ ID NO: 30094 - DNA, 122 bp, Homo sapiens
aatattctcttcctcttagacagctactgtaacaaaagcctgtagggagagctaaagcttcgcctgtttacaatacccacacactggctctctattttaattttaaaaaacaaactcagagc

SEQ ID NO: 30095 - DNA, 122 bp, Homo sapiens
aggaggtgggaacgctgtgttaaattgtacccaagaagataactcacaaggcaaggaacacggaagctagggtgtgttgggcaagtaagcagaggttgcttgctttaccgaaagtggggctg

SEQ ID NO: 30096 - DNA, 122 bp, Homo sapiens
caagggaagggaagaaaccgagtgtaagcggagggcaagcgggcggacacccaccaggcccggccccaccccgtgctccgcgtggccgggagacgcggcgcctttaaagcccagtgggaggc

SEQ ID NO: 30097 - DNA, 122 bp, Homo sapiens
ccgcccagcctgggaagtgaggagtgcctcttcccagccgccatcccgtctgggaagtgacgagcgtctctgcccggccgcccatcgtctgagatgtggggagcacctctgcccggccgcga

SEQ ID NO: 30098 - DNA, 122 bp, Homo sapiens
atcagggtcacacgcgtggcactgggggacacacagagacatgcaggcacagaccagggtcgtcagggtcacgcgtgtggcactatgtgacatacacagacatgcatgcacacagcagggtt

SEQ ID NO: 30099 - DNA, 122 bp, Homo sapiens
ccctcgagcattctgggaattgcaggcctggcccctcctcttcctgttcttggtcaattccggtcttgtttccccaacaaatgccgtcgtttccggggctgcttccgagccggacccaaggg

SEQ ID NO: 30100 - DNA, 122 bp, Homo sapiens
gtgcgtgggagggtttgcgggggggacatcgcgccccctaggggtgaccccagtgggtcccgtgtgctctccgcggagccggcggagccttgtcctctgcacccggcgcgcagcggcccctt

SEQ ID NO: 30101 - DNA, 122 bp, Homo sapiens
aacaaaaaaagctaaagactaagcaggatagaatataacttcactgtgcatactcctgaacgttacagattctgggttaatgactttaagtagcagaaaccaatgagcaaaaataatcaagt

SEQ ID NO: 30102 - DNA, 122 bp, Homo sapiens
tctcttaacacgatgttgtctaggttcattcatgtggagtaccccactgtatggatagaccgtgtttatttattcattagtccattgatggatatttgggttgtctccacattctggttctt

SEQ ID NO: 30103 - DNA, 122 bp, Homo sapiens
ggagggaagagtccttgttgccgccacccacttctgtttgtgttttgcgttttgcaggggcggatgtccacgcgagggacccccgccgtgggatgtcgccgcaggagtgggccacttacacg

SEQ ID NO: 30104 - DNA, 122 bp, Homo sapiens
gaggttgcagtgagccgagatggcgccactgcactccagcccagcgacagtgcgagacaccgtctcaaaaaaaatggctgattgtctgaaggtagtgagttatctcaattgattgttcatgg

SEQ ID NO: 30105 - DNA, 122 bp, Homo sapiens
ctcattggcatgaagaggccaggcaggtcctccgacagtgccacagccccaggcttgtgccgccaaatcacggaggccttccgggccctgaacacgaaccggacggggccttcccgcattac

SEQ ID NO: 30106 - DNA, 122 bp, Homo sapiens
cccaccctgtctcctgctctctgctcccgggtctatgctgctccagacactgctgggattcgaaggcgcttcctctcccagccatccaagcccacatgctcacctctactccccaaagctgc

SEQ ID NO: 30107 - DNA, 122 bp, Homo sapiens
ccacgcctgtctgagtgatgtcattcctggccaataggaagccaagcattggacccgtggcgccaaatcctgtcctccccgctttcagaagctaggtttgttccttgcttagagggtaggaa

SEQ ID NO: 30108 - DNA, 122 bp, Homo sapiens
gaggggaaactgctcagcattgggtcagttcttaattatccacgaatgggtcagaaactccgtacacagcgttttcctgataccttgaatgtcattggaacttcacagaggagccaacggaa

SEQ ID NO: 30109 - DNA, 122 bp, Homo sapiens
gcttcccgccattttgttcagcttgccgggcaaccggcccctgctggggactacaagtcccgtaagcctccgcggcggcacgtcctaccctacactgtccagccggctccctttttccccct

SEQ ID NO: 30110 - DNA, 122 bp, Homo sapiens
cacggttacgttcaatcagacactaaacagagtgcacgcccacccaggggacactgaggtcgctgggccagtgtccccgcctggttgcaggtccctaacccctccgggagtgcagagctgcg

SEQ ID NO: 30111 - DNA, 122 bp, Homo sapiens
cccctgacccaaaccccattcagggcattccaatccagctcatgattttcagccacacggcgaggggatgaagccatttcaggttatgcacttgatcccaaagagttttttgtgcttcgctc

SEQ ID NO: 30112 - DNA, 122 bp, Homo sapiens
tccgatgtcttaatccgagccccgacacaccctgctgcccttcggacgcctccacgtcagcgaccctctcccgcggtttccggaagcgcctggaaacacgaacttccggtctcttaggctcc

SEQ ID NO: 30113 - DNA, 122 bp, Homo sapiens
agaactagcactctgccagcatgctagcacctagcacttcacccctgttccaacattggtcgatcagaccaggaatgagtacctgaccccaactgggccaatcagagtattttttgagaata

SEQ ID NO: 30114 - DNA, 122 bp, Homo sapiens
tatttccacccacccggcagctcttaggacacattcccagaagagcggaaagatcattgacgtggaactacacacgaagtgtaattagtgggggaaaaaatattttttaaacaaaggatata

SEQ ID NO: 30115 - DNA, 122 bp, Homo sapiens
gcagggccttgggcggattctgtgagacgccaatgcagcggagaaggcggcagggggcgccggtccctaacatgcgccggtttagctcggtgttaagggtcgcgccaaccgggcaatcgcgt

SEQ ID NO: 30116 - DNA, 122 bp, Homo sapiens
cagcttttccagctttcctgcacgtacacacaagcgcagctatttctttaagggccaactcgtggttgaaatttgagagttttgccctgtttgcggtgaaagatttggctcatgcttgggtt

SEQ ID NO: 30117 - DNA, 122 bp, Homo sapiens
tggggcccccagagctagagcctccctcgggcggtcctggctgactcactctccatcagccgcgctgactcgtctttcagagtgtacttttgcttttgcatttagtttgcagagggttcttt

SEQ ID NO: 30118 - DNA, 122 bp, Homo sapiens
aactggtcagtcatcagataaactcttccaattgttcacatgttcctcaacaggataccacgtaatagactgacagctcatcagtcttcaatgaggatagggaaatgtctccctccagccat

SEQ ID NO: 30119 - DNA, 122 bp, Homo sapiens
acaggatgtggcttttggaaacccagtctggagacccagctggggaagctgccagggaagcgatggtcaaggcaggtcaggctctggccaagggtgtagccagctggttcatcatagttggg

SEQ ID NO: 30120 - DNA, 122 bp, Homo sapiens
caccactctcattttgagatagctggtcgtgagtctgattatggatgctttgtccagctgcgaggtgatagccgagggcaaaggcagtaatttagccagttcataaaattcactgttttcct

SEQ ID NO: 30121 - DNA, 122 bp, Homo sapiens
gtggtcgattgagtggcctacatctctaaggtcctgtggccttgcaggtcctggagtttgcggtgatggctggtggggctgcagccaccttcacaaggatttgtcatttatctgcaactaaa

SEQ ID NO: 30122 - DNA, 122 bp, Homo sapiens
agcactttcgccgcagcctccgccacatcttccgccgccgctcggccggggagctgccagcggcccacaccgctgccgcccccgggacccccggagaggctgctgagacccccgcccggcct

SEQ ID NO: 30123 - DNA, 122 bp, Homo sapiens
tgatccgaggactccttctgcccatagcgcgagtctgtggcggatgccatctggggataccgggtgtagcagagccgtgaggggggctctctccatcctcatgtgcccaagcccaggcagaa

SEQ ID NO: 30124 - DNA, 122 bp, Homo sapiens
tcccaagcgatgtctgtgggcaggtgtataaatctctcagagcctccgtctggagggctccgggtaccggctgcccagccaaggctaagttggtttttggctccctccttcggaacagagaa

SEQ ID NO: 30125 - DNA, 122 bp, Homo sapiens
actggctgtaaaagccatccgtctaccccctcgtcccgccccgcttccgtctttagggaccgtaaaaaacaccccacatacagcagcagcagctcaaggcaccgttagctacgtgcggcccc

SEQ ID NO: 30126 - DNA, 122 bp, Homo sapiens
aagagtgtaaggacaagacctttttggttcaaaataagttcattccttagcagagcctttcgtgatctccatgtgaatagctcaaaaatgtagacaactgtttcctgtaagtttacttataa

SEQ ID NO: 30127 - DNA, 122 bp, Homo sapiens
accgcgatgcgcatgcgcccccggggcagcgaagaagcagcccgagcgcgttcacactcgcgcatgcgcagtcacccatctcgccgcaggcgacagctcagtatttggcaagggggatgggg

SEQ ID NO: 30128 - DNA, 122 bp, Homo sapiens
cagtggcgatctcattattacatagtattttcccctgccctattcattttcctgaacacacgcccctacttgcagaagaatccccatcttgggctctgcttctgtggaaactctaaggtgac

SEQ ID NO: 30129 - DNA, 122 bp, Homo sapiens
ctcctgataagagagaaggatcgctttataattcctatgtagacttctaaattattccctcggccctcatcctctgccaccagattcccctccaccagttggaaggcttagttaacgagtca

SEQ ID NO: 30130 - DNA, 122 bp, Homo sapiens
ccgccttccccgcggaggcttgggctcagcgcctggggcggaggtggggcgggggcggtccgcccgcagcagggggtgccggggccgcctccgggtttcctccgctggatgcggcggtggtg

SEQ ID NO: 30131 - DNA, 122 bp, Homo sapiens
acgaagcccctgtatgaatgagagctcattgcttcctccagctcagctttgctttaagcacgaggaagaggggcagcctgggaggcttattacagctcagtttcttggctttgggcttctat

SEQ ID NO: 30132 - DNA, 122 bp, Homo sapiens
gcggacgccgagggagagcggagccgcttgcactcagctggaggaatgtgaactggtagccgcacggagcctttccctgtgggaaatggcaacgcatccgaatttaggcctggtcatgcgaa

SEQ ID NO: 30133 - DNA, 122 bp, Homo sapiens
gggcctcggggaccccggcaagcccgcgcacttggcaggagctgtagctaccgccgtccgcgcctccaaggtttcacggcttcctcagcagagactcgggctcgtccgccatgtccgccgca

SEQ ID NO: 30134 - DNA, 122 bp, Homo sapiens
ccccacacgtggggagacagacacagggacacgcctcacaggtggacagaccaggacacacgccccacatgtggggagacagactcgggacacacacctcagacacggcaggcatatgtggg

SEQ ID NO: 30135 - DNA, 122 bp, Homo sapiens
ttaaaagtcaagggagtaaaacggagagaattctggaggccagcccgagtctgagcacagcgcagggttaaaggaaaccatttcataagatcaaatgtggagaggcagcaggagcaaagagg

SEQ ID NO: 30136 - DNA, 122 bp, Homo sapiens
agaccgcgggctcttatgagctctgctcctcacaaagtttttgaccttgagtgagtttcccgagactcagttttttcatctatgaaatgcgggtgatgacgcgcggctgcgagttaggactg

SEQ ID NO: 30137 - DNA, 122 bp, Homo sapiens
acacttccccaaggcaaacactttataatttcctagattactagtttaatgcacaagttacgttttaaatgcttttctttacagggaggcattcttggaccctggctgagattaggaaacag

SEQ ID NO: 30138 - DNA, 122 bp, Homo sapiens
cgcaatcctcccaccttggcctcccaaagtgctgggattacaagcatgagccattgcgtccggcttgttttcggagtgggagctcgtctgcttttttaacctgtcctttagcctgagtcatt

SEQ ID NO: 30139 - DNA, 122 bp, Homo sapiens
gacaatctagaggtaatttatatccgcccccaggtggagcaacatgcgattctggaggcacgggggtaactgaaagtgagtacatatagtctttctggtttctggagataacccatcaataa

SEQ ID NO: 30140 - DNA, 122 bp, Homo sapiens
taagtttgggtcaaaagaggccttgagaggagagacaacccaaccagaacagatgcagcacggaacacgtacggggtcgtaaatgcagaaacgacagattcttccatcccaccttgaaagtt

SEQ ID NO: 30141 - DNA, 122 bp, Homo sapiens
aggtatcatttccccttttctttgatgcaccaacatgttttctagcaggagatccaagaacgttcatcaagtgtacgttgaaaccatgaaacctttaggtttaaagtgcactttgtccacac

SEQ ID NO: 30142 - DNA, 122 bp, Homo sapiens
agacacgtgctgtgtctgcgggactgtggaccatggccaggcgagctcttctctcttctccggcatgttcagccaggcctccaggttggagaccgcctgctgcagctcctgcaccacgccgc

SEQ ID NO: 30143 - DNA, 122 bp, Homo sapiens
gggggaggttctccagtctttctatgcagttttccccttttcacccttgaaggatgccttcgtcccttgtagactcgggggcggcccctctgtttctctccccggccagatcggccctgttt

SEQ ID NO: 30144 - DNA, 122 bp, Homo sapiens
ttcctcacagtggagaaacctgaaagctcccagcagccagtaatgaatgaaaggtgggggcggggctgccggcatggcagggcctagtgagccttgtgcctaggctcctacatcacaatggg

SEQ ID NO: 30145 - DNA, 122 bp, Homo sapiens
gatttcatgaattacccctggcaagtgtgtagggcagagactggcacagagtatgtgctccggaaaagtaagcttttatggcccaaccatgccatggagcctttcttccaggagcaggctgt

SEQ ID NO: 30146 - DNA, 122 bp, Homo sapiens
cagtccttgggtttgcaaatggcattagaagggggagggttgggcagaggaggcacggagcgggagcactgacagatgcagtgcaaggactcacatcagttgggcagtggggcagtggggtc

SEQ ID NO: 30147 - DNA, 122 bp, Homo sapiens
tcatcaccttgtggccagacaggatattgctgttagagactccaagagcctgtttgggttcggagctattctggtcaattttatcaccccatgcactgcctccacttactcatgggccaggg

SEQ ID NO: 30148 - DNA, 122 bp, Homo sapiens
ataaaacctagacggaagcaatctcagaaactactgtgtgatggctgcattccacacacacggtggaacatttctcttgatagagcagttttgaaacactctttctgtagaatctgcaagtg

SEQ ID NO: 30149 - DNA, 122 bp, Homo sapiens
ttgggactccttcatcctatcccctctctttatagatgaggaaaccatacaggatatgtacgcctgtttggactttgtacagttctctgtccagcaggggtgacttggctgtgggattaggt

SEQ ID NO: 30150 - DNA, 122 bp, Homo sapiens
ggacgggctgcggaggcgactgcagattgacctgtgaacttcagacaggccacctacctacgctgagctcctgcttctgaaaaatgggggaaattgtaactagaggcccagttacttacaaa

SEQ ID NO: 30151 - DNA, 122 bp, Homo sapiens
atccccctcctccagctacatctatccccaaggggtgggggccacgggacagccaccagccgcctctctcttgcctgggccgagatctctgccatgagctcagcttcaaggatttgcacgtt

SEQ ID NO: 30152 - DNA, 122 bp, Homo sapiens
atcggatgtttccaggaattcacacatttccataaaaatgcattttaaatgatggacaggcgagcctggggtaacaacgggtgtttggtgggtagacaagagcaaatgggaaggagcccgag

SEQ ID NO: 30153 - DNA, 122 bp, Homo sapiens
ggagcagaggctgtccccaaatggctgcaccgggtgctccccactgtcccaccctgcccccgggcctctgggtgtccccaccaggcctatcagccccaggagtcacccccttagggcacggc

SEQ ID NO: 30154 - DNA, 122 bp, Homo sapiens
catcataagcagggactgctcaggaagcgcagggagggccgaggtgggcttgcagccacccgccagggccagacgtctgcaggggctgccctgaaagccggcggtgctggctcagatgagca

SEQ ID NO: 30155 - DNA, 122 bp, Homo sapiens
tgtttgtgggagaggaggacccagaggccgagtcggtcaccctgcgggtcactggggagtcgcacatcggcggggtgctcctgaagattgtggagcagatcagtgagtgtccgctgcccgct

SEQ ID NO: 30156 - DNA, 122 bp, Homo sapiens
gagcttcagcaccagttgttagccaaaaataaacaccattcctcaaccatatatgtccaccggcccagagtcggggaggaggagaggaggcaggtcagccgtcccccggctgcagctgcact

SEQ ID NO: 30157 - DNA, 122 bp, Homo sapiens
tctggcgattcagctcgggcggctcctctagcttggagaagccgttgggcaccaggatgccgttcacgggcggcggctgcggcgtcggcggctgggccaggctcgctgccgggcggctgctg

SEQ ID NO: 30158 - DNA, 122 bp, Homo sapiens
ctgagcgcacagaagccacctgcttgccacgcctgggtgttttgcacaatatcctaagggcgtattccgttctccacggcggatctcctgggtcaaggacttggtggaggctcgagcattct

SEQ ID NO: 30159 - DNA, 122 bp, Homo sapiens
tcaaaggacggcatttcctctctcctttctcctcaagctgattagcgggtcgggcaatggcgtgaggagatgctgggggtaggaaaatgggggtcattttggaaaacctctttgtggatggg

SEQ ID NO: 30160 - DNA, 122 bp, Homo sapiens
ctggggaagataattcatcatcataaaaacaaacatccattttacacttgcatggcaatgcggatgtccttatttgcataatgatggtgatttgcatatgaggaaaatttgcctgagtgagt

SEQ ID NO: 30161 - DNA, 122 bp, Homo sapiens
cttcagcccaggccctggtctgaccaccctgggagcagggactttccacagtcagctggacgcacactcagcccagtaaaagaggggacccatcccgggagccccggggagggcacagctgc

SEQ ID NO: 30162 - DNA, 122 bp, Homo sapiens
cccatctctctcctttaaagaatcctaccgtctgcacggagattcaccgggggagacagacgatcactcagtgccaccctccgagtcccgtccttccatgcccacctacacgccaaacgctg

SEQ ID NO: 30163 - DNA, 122 bp, Homo sapiens
ttgcatctatccaagtgtaggtcgccagcacgctggacggtatgtttcatccggagaactcgaccattcggtggcggcggctgttactggcggcagcgggcctgtctgcttgtgaggatcag

SEQ ID NO: 30164 - DNA, 122 bp, Homo sapiens
cttttgtgctaataggcttgtcctcatttgctgcctaattggactatataaagccaataacgggcgggctcttatagcccgaagccaaagcgccaaaatccgagggaaggcgaggagggggc

SEQ ID NO: 30165 - DNA, 122 bp, Homo sapiens
ttttgaaaatttgctctttggggaaagaggcaacttcctttgcaggagatgagtatctcccggacgcgggctggacaggaatgcccaagaaggcacaatgtccattaagccggtgaatggca

SEQ ID NO: 30166 - DNA, 122 bp, Homo sapiens
tgcagcgcgctttacggcggcgcgtccttttaccgcggtgtggccggctcgcttgtcgctcgcacttttgccctattggctctgcggctccgctcgccgcactttacggcagtgtggctgga

SEQ ID NO: 30167 - DNA, 122 bp, Homo sapiens
ttttctgctgtcattttggatgcttttgtgctgaattccccttttgtcactgtttccctgcgattttcttttgaacctggcatctgtttggggcttcatccggtccctgccccctgcgttct

SEQ ID NO: 30168 - DNA, 122 bp, Homo sapiens
gagggctaaggactggagaaaacttctcttgtttttatagacatccttagtgacagggaccgggactagacttatctttgaagaggaaatgaatgcctattggatcttaaccctgattggca

SEQ ID NO: 30169 - DNA, 122 bp, Homo sapiens
gcacacaggattagggcagacactgcctgaaactaacacagagggtcagctatgacccaccgcagccatccacacacaactgaggccgacaatctgagggcagcacagcaaattcagtcaaa

SEQ ID NO: 30170 - DNA, 122 bp, Homo sapiens
gggatatgcaaaggagacgtcttggaatttcacaaccccctgcagagtggtgggggcaagcgtgccaggtgaaggcagatttggctgtcggtccatgtaggagaaaaccttctctgcagctc

SEQ ID NO: 30171 - DNA, 122 bp, Homo sapiens
ctggtctgcgcgcggctcagctgcctccgtaggccatggagccgagcagatccgggtcttcgggtggccgcaatgtcccaagtggacgacacccacctagtcccgaggacaaccgacaaagt

SEQ ID NO: 30172 - DNA, 122 bp, Homo sapiens
tgtcccctttcctacctaaatccaatgtgttctcagggtcctgctcaaggcccttcatcccggaggccttcctcgacccctttatctcctgctctgaacgtgtgtgcagtcctcctggtcca

SEQ ID NO: 30173 - DNA, 122 bp, Homo sapiens
acagcgcttcatcaccctttccaagagactccttgtgatgactggggcaggaatctccaccgaatcggggataccagactacaggtcagaaaaagtggggctttatgcccgcactgaccgca

SEQ ID NO: 30174 - DNA, 122 bp, Homo sapiens
tgctgcgtgcacactgacctgggagcaaacaggtttaggtctggtcaacgctgtgcttcacggaccactcacaatggggggaagcagagggtagcccaggggacagactccagcagggtcag

SEQ ID NO: 30175 - DNA, 122 bp, Homo sapiens
gacaaaagctctgggcaaatagaagggttatgcaactatctgagctatttctctggctgtcgccccaaagaggaacagcccagaaccttatctgcctgccctagctctcccaagctccctga

SEQ ID NO: 30176 - DNA, 122 bp, Homo sapiens
gcccagagaaacaggggtactccaggggaatcctgtcctctgactgttcccagtagaaggcgggagcagaattttttcttttctctctgccccttctgggttccccttcctctctgtgcccc

SEQ ID NO: 30177 - DNA, 122 bp, Homo sapiens
ctgaagtttgtttgagggctccccctgggggcagccaagagtatcgcgttggtgccactccggcccagcttcctggtgagggagtaggtgcacctccccaggctacagaagtgggtacaggt

SEQ ID NO: 30178 - DNA, 122 bp, Homo sapiens
gaaaaatgacatttcgccggtgtctccggagggggctgaatttcactttgtaactttctgcggaacccgagcccgggtggcagctcgggtggtggtatcgtatgcaaatacgcatgctgacg

SEQ ID NO: 30179 - DNA, 122 bp, Homo sapiens
gtaatttgctgcaataggactaaaatatctcccctgtcaaaaatattagtactggccgggcgcggtggctcacgcctataatcccagcactttgggtgtccaagccgggcagatcacttgag

SEQ ID NO: 30180 - DNA, 122 bp, Homo sapiens
tgtgggtccctcaacttcctggagcctgggcacttcatctgaaacccagagacctacgctcgctgtgcggagtctgaggaccacacaagccatgcaaggagtctgggcaccaggcctgggac

SEQ ID NO: 30181 - DNA, 122 bp, Homo sapiens
ctccaactgccttcctggccttccaggtgctagaaacttcctccatcatagccacttcgtcgggggttaatctggcctgtggattatactgtgtcctgtccctccacaaactgagttgtagc

SEQ ID NO: 30182 - DNA, 122 bp, Homo sapiens
acgcagcagaaggtgcagttccctgcccgatttctcccagccccgcgcagcccctgtccccgcccccgcccaggtaccccggcagagcttcccagggttgcctgtccctgaaccttgccccc

SEQ ID NO: 30183 - DNA, 122 bp, Homo sapiens
aggcctcctcccttgtctggccttcgaatccatactggcagcctctcctctcaggcactccgcgggccgggccactaggccccctgctcctggagctgcgctatgatccgggtcttgagatg

SEQ ID NO: 30184 - DNA, 122 bp, Homo sapiens
cgactcactaaagcttcagggtcacaaattgagcggcaagatacttgcgagacagaaaaccgaggttatgacggatactttggccctaaataaagcctgggtgtatgagcctaggcaaggaa

SEQ ID NO: 30185 - DNA, 122 bp, Homo sapiens
cgtgtgaagatgaaggtgtgcacagagacgcatgcagagtgcacagggagcaagagtggccgtggggggccgctcagcaccaagaatgcctaggaaggctctcaagggcacctgccttcctc

SEQ ID NO: 30186 - DNA, 122 bp, Homo sapiens
tgagagcatgggacaagtccgccacagccctcccccgcccccttcccccgccccccaacgcgcagtgtgtatttgcaccacggcaggtgcctctgtgtggagctagggtcaagccctgagca

SEQ ID NO: 30187 - DNA, 122 bp, Homo sapiens
ataatcttattccacccaagaaatttgggagaatgcgaaaaagcagcagcccagcattcccggatgggcgtggcttttctccaggggctgtccaattgaattccttcagagggagaagattg

SEQ ID NO: 30188 - DNA, 122 bp, Homo sapiens
tcgggctgcctcggcactcgcccaggtgaggggatgggccgggccagacggggttgaggtcgtcagcccctttttccagtgtctctggaactcaacctggtcggagtctgagagctttggct

SEQ ID NO: 30189 - DNA, 122 bp, Homo sapiens
cccgcttctgggtggactcgtgctgctgtgagcacctgtgaacccgcttctgggtggacacgtgtttatttctcttgggcacgtgctcagggcgcagttgcaggtccggtggtctcagtcta

SEQ ID NO: 30190 - DNA, 122 bp, Homo sapiens
ctctcctctctattcccagtgtggccgtggctgacactaaagactttgtagccatcaacccgagtgcagtttcgatggaaaatgaaggtaaaggcccctggccgaccggttgcaacgcggag

SEQ ID NO: 30191 - DNA, 122 bp, Homo sapiens
tcctctcttttttttttttttgcctaggattctgcctgaaccagaagatctgcccacatgcgggtgagtcctatcccagtcctaggatgctgtgttggccaaacacaaatgattctccaggc

SEQ ID NO: 30192 - DNA, 122 bp, Homo sapiens
ccttggcttcccctttttgtcgctcaagggccagggtcgcaaggaaatgtgaaaaaaaagcggagacaaaagagaacgaggtaaatctagatgcagagcctcgcctttcctcccgggtgcag

SEQ ID NO: 30193 - DNA, 122 bp, Homo sapiens
caacaatcgtggatcaaaaatattttatttctgcctattactttatcttacataaatgcacggcttgtcatgtgaacgtaactaacacaaaataattataagtttctgaggatcatccattt

SEQ ID NO: 30194 - DNA, 122 bp, Homo sapiens
ttcatctcactagggagtgccagacactgggcgcaggtcagtgggtgcgcgcaccatgtgcgagctgaagcagggcgaggcattgcctcacttgggaagcacaaggggtcagggagctccct

SEQ ID NO: 30195 - DNA, 122 bp, Homo sapiens
gagatgtgcctataaatggagtggggtctgggcctcccagagagacgagtgcttaaatcccgagagtccccacgggatggtggggaggaaggctgtggggagagtgtaccctgccatggggg

SEQ ID NO: 30196 - DNA, 122 bp, Homo sapiens
caccctcctccccaagtccctttcccagccttcaagcctaagctctcgccctgcccaccccgatcctgaacctgtagaaactcctccattggccagggctgtgcatctccttggaggtcttg

SEQ ID NO: 30197 - DNA, 122 bp, Homo sapiens
tacgggcgcacgtgggtgcccttccagttctactccacgcagtgccgcaagatgtacaaccggccgcaccgcgcgcccatcaccaagcagaacgagcaggaggccgtgtgcaccgactcgca

SEQ ID NO: 30198 - DNA, 122 bp, Homo sapiens
ctagggctcagcccccattctggagggacctggaaaaccaaggccggagtgaatggaaaccgggagattggtcataagcacaaagcagaagctggtcactctatctgaggttagggaagaac

SEQ ID NO: 30199 - DNA, 122 bp, Homo sapiens
catgccctgtccatggccacacgcccggacaggcctgggcagcctggctcttctcatgctcggccgcttcatgccactgccgccacctccaactgccccggctctgagctgagccacgccgc

SEQ ID NO: 30200 - DNA, 122 bp, Homo sapiens
tttggaggtcgaggttcttgagcatggccacgatgagcgtgtgcagggccgtgaagttgacggcgcccacctctggcgtgccgatggagaggtccgccagctcccggagggagaccgtggtc

SEQ ID NO: 30201 - DNA, 122 bp, Homo sapiens
agagtgcttttctggaagaaggaaagggtacaggatagacagcagaggaactagctaccacgtcgtttcaccagtgggactctgagctctggccagaaacctcagccactcatgagctgtct

SEQ ID NO: 30202 - DNA, 122 bp, Homo sapiens
tggaacagaaatcagccgattctgctccttgttggtagttcacgaagaggatgtggaaaccgttcattaaactgaggcttttggactaggagtagatgtcaattattcatgtatctctggct

SEQ ID NO: 30203 - DNA, 122 bp, Homo sapiens
tgaggctcccacctgcctgggttacatatcaggcttctctccgaagctcggctaaggcaacgtgcatccctctagagacgcactccggaaaccagccccgtgtgcggcgggcaggcacgctc

SEQ ID NO: 30204 - DNA, 122 bp, Homo sapiens
agaacgagggcccgaccgagccggtagaggcggtgggtgccgctaggggccccaagtccgcgttcaacacaggggctggaatgagaccgctcctctgagcggccgcccaccgcaccagtgcg

SEQ ID NO: 30205 - DNA, 122 bp, Homo sapiens
cggctgcctttggggagcccaagataagagcaggggtggattagaaggatggtgggggaacgaaagccacgtgtgggacaaaagacgatcatgaaagctcgtctagacccaggaaggaaacc

SEQ ID NO: 30206 - DNA, 122 bp, Homo sapiens
tcgcgctccggctcgggagaggggccggtgctgagcggcagcggaccaacggggagggagcggggggcggagtccagctcccaggccccacctgctggccgcccctggctcccgcccccagg

SEQ ID NO: 30207 - DNA, 122 bp, Homo sapiens
atcattctgaagtctgattggcccagcttactgtcagggatgcctcctggaccaatcagacgggccgggggtgggctcactgagtatacagggctcactgggtaaaggtggctgcggggtct

SEQ ID NO: 30208 - DNA, 122 bp, Homo sapiens
tgacttacggctaaatacaaagacaatgaagtaaaaagatgcagaattacaaatcacaaacgcagcacttggcacaaaagaggcatttaacaaatagacactgaatgcaaaaatatgtgttg

SEQ ID NO: 30209 - DNA, 122 bp, Homo sapiens
atagggggtttgtcctctgctctctggtgtggcagctggactggagcggggtggacagtccggcctccccctgtgacctgcagagggccgtgctggagccacctggctgggcgagggtgact

SEQ ID NO: 30210 - DNA, 122 bp, Homo sapiens
ggcggcctcccgcgtctacaagtccaagaggaacatcattctgggcgcagggatcctgttcgtggcagcaggtgagaggcagagggagggggcgaccggggcggcccacctgggcgcgcacg

SEQ ID NO: 30211 - DNA, 122 bp, Homo sapiens
cgaccaccaggcccagagagattctgggggccaccagagccaggctccttccaccgtcgccgccgctctatcccatagagtccaggctgactgtgtccagactcagacatggttacctatgg

SEQ ID NO: 30212 - DNA, 122 bp, Homo sapiens
tatctcattttgaaacaaatccaagatatcctgtcatttcgtctgtatttcagtttgtatcgctaagagataaggacccttttatagacataaccacaatactattatcacacataaaaaag

SEQ ID NO: 30213 - DNA, 122 bp, Homo sapiens
actgaatggacaccctcttggctaagaccgactgcagagaaaccttaaaaactaagttcccggccacgttgggacaagaggtcagatacgccttcttatttcccttcccttttgtggtttag

SEQ ID NO: 30214 - DNA, 122 bp, Homo sapiens
ctgtaaacatgcctgcaagttctcccagctccccttttggggcctgaaaatttatctcttcgcagtgagcggaaatattttccttagctgggtcccctgttttatgcctttgatttacagaa

SEQ ID NO: 30215 - DNA, 122 bp, Homo sapiens
ggtgagcaatcgccgacgtagagagggcagccctccgcgctgcaatattgagaaggcacccgcgggacgcatgcgcacggcggacggaggcgagccggccggggcttcctccccggccggca

SEQ ID NO: 30216 - DNA, 122 bp, Homo sapiens
gcgacacaggcagcaacgtgagaactacattacccagaagacactgcgggggcagggcagcgagtgtagccattggtctagcagagagacgactaatgaggtctcaattgtgtgggcgggac

SEQ ID NO: 30217 - DNA, 122 bp, Homo sapiens
ggagtcggagaggggaaggaagctgaaggcgcgccctgggtccccggcgcactgaaggtacggaaacctggtgctacgacggcatccctcgccgcccccggcctcccctcccccagcgcagc

SEQ ID NO: 30218 - DNA, 122 bp, Homo sapiens
cgaacggccagtcaaattggccagaccagacttctgcctccaggggtcttcagcgcccaccgcccgaccccacccctcggcagacagtgagaggcgggcctctggccggagcgaagaggaac

SEQ ID NO: 30219 - DNA, 122 bp, Homo sapiens
aaaaaaaaaaaacaaaaaaaaccacacacacaaaaatcctcgagggcagttcggcgagctcgacttgtggggaggaaattccatttctgtttagtgcacacgtccttactctagccttttat

SEQ ID NO: 30220 - DNA, 122 bp, Homo sapiens
gcaaatctggtgtgcagactccacaggtgggggacgaaccaagcccttttctttagcagccggtagcctggggcaagttttcaaccctgttacagcctccacctggaaacagacttggggtt

SEQ ID NO: 30221 - DNA, 122 bp, Homo sapiens
tctgagttaacagcagagagaatgaaggggagggatgattttgcatatggatgggcaacacgctgggtttttacagtcttacacccagattttaatgtttgcagtgtaaaggaatccaggtg

SEQ ID NO: 30222 - DNA, 122 bp, Homo sapiens
ttttgttcttatcgacatgaatatttgtccaaatgttgctttctgctttacccttgcctccgaggagggaagcattgttaatggagagggcagaccaagggcagagaattgctcatttttct

SEQ ID NO: 30223 - DNA, 122 bp, Homo sapiens
ggtggtggactttgggactggacagacctggtcacagtctaggttctacatcttactggtcgagcaactttaggcaagtagcttaactcctccgaacttattttccttttctaccaaataat

SEQ ID NO: 30224 - DNA, 122 bp, Homo sapiens
gctgcctctctgagtaaaatgggagcccccatgagggaaaaattgctttggtgggattaacgccatcagagaggccatgaggcttcctcgaaagaaataaactctgagcctctagctcttaa

SEQ ID NO: 30225 - DNA, 122 bp, Homo sapiens
gaagccctccccggagccaggctgggccagcgtcagctgctgccaccatggttacttagacgtcaccgggaaaaagggtcccccccaacccccccccccaccccccccgcagacccagttct

SEQ ID NO: 30226 - DNA, 122 bp, Homo sapiens
ctctccgcctcgggccaggcggggtttcgggactagggtttctgccgtgtaatacctcctcgaggcagaaaaattctactttccatctgcttggctgcggaggaccttggggtgggctcagc

SEQ ID NO: 30227 - DNA, 122 bp, Homo sapiens
ctgcctcaggctccggtgattctcctgcctcggcctgccgagtgcctggggttccaggcacgcgccgccactcctgactggtttttgtatttttggtggagatgggtttcgccatgttgacc

SEQ ID NO: 30228 - DNA, 122 bp, Homo sapiens
ttcatatttcctagaaaatggatcctcacttcttcacttggatataataatatagactgccgacattctgggaactgatcagtcttccagcttccagtgtggtgccctccctcaattgtgct

SEQ ID NO: 30229 - DNA, 122 bp, Homo sapiens
tgcgtgtgtgtgtctccccaaagccagtaatgggatttaaaatgagagattcccagtcctcgtcctccctcccattccattttgctctcttcgccccagaaaacatctgcgataaccggctg

SEQ ID NO: 30230 - DNA, 122 bp, Homo sapiens
gctctaagctctgaagacctttttaatatggctgtgttgtaatactgcagtgacaaaccccgccagtcattccaaaagcaaaaggaaaccccactctgcagcagaacttcccagccctggaa

SEQ ID NO: 30231 - DNA, 122 bp, Homo sapiens
cccgcagcggctccgcggcctcctgctgctcctgctgctgcagctgcccgcgccgtcgagcgcctctgagatccccaaggggaagcaaaaggcgcagctccggcagagggaggtggtggacc

SEQ ID NO: 30232 - DNA, 122 bp, Homo sapiens
tcctaagctgcccactgtcctctctcctggtgtgttcaggcctccccgaggtgcttctcacgactttcacacccggtttaatccacaccgctgcgtctgtcctccgtcctggggctggtctt

SEQ ID NO: 30233 - DNA, 122 bp, Homo sapiens
ccccctcccggatccccgacaggtggcacgtacctgcctcttcttggagtatggacgagtcgaaccgggcacaagcatggagctgcgggtgagtcccggctggcgctggcgcggcgcagtga

SEQ ID NO: 30234 - DNA, 122 bp, Homo sapiens
tgacctcatgatccacccgccttggcctcccaaagtgctgggattacaggtgggagccaccgtgcccggccaacggacccagttttatatctaacagactgagggacaaatgagaaaagaac

SEQ ID NO: 30235 - DNA, 122 bp, Homo sapiens
ccaatcaacatttcactgcccgttgatttagaaactcactctccacccaccactcatagccgcggccagccagggaggcataaagaccaaatctagcgccaatatttcccgacactcacatc

SEQ ID NO: 30236 - DNA, 122 bp, Homo sapiens
ttgtgcatctccgtttagtgattattttttcaatcttcacatgtgttcccttgcttttaccggtgggttctatataggcctggtgcgaaacaaacctgcggaggtgcatcagcgagcaacac

SEQ ID NO: 30237 - DNA, 122 bp, Homo sapiens
agctgagaaagcggggtgggggctggggccggtggggggagtggtctctcggcgggaagccgtgcacgcctccagcgttgacactttcccggtgcactttttctggtgggaggggagagcgg

SEQ ID NO: 30238 - DNA, 122 bp, Homo sapiens
gcatggaaagtgaacatcgcaagaaaatcaagctgatgagaaaatgctggagaaagcatgcgctttaatagggatctatcaaagaacactgatgaagaacaggcatcaatgaaaaaggagga

SEQ ID NO: 30239 - DNA, 122 bp, Homo sapiens
aggaggggaaggaaccccacccagtgagaaagccagcatggggcgggcttttgactcatccggaaggcagctggctgctggaaacagaggctggtgttgggagagtcgtagaagcccaggcc

SEQ ID NO: 30240 - DNA, 122 bp, Homo sapiens
aattctttcttattttaatctttcattatgatttattgacgtattcaaagtttgtcccagcgacccatcccagcagccccaggctgtagagataaacatccttgctgactcttagctgcgtt

SEQ ID NO: 30241 - DNA, 122 bp, Homo sapiens
cccgtgaaggtagcaacgttctctgtcagtgctgtctgctgcggtaggcgcggaggagagcgctgctcaggaggcaggagctggcgcctttgcagcgggagtttttctcagcttccggggga

SEQ ID NO: 30242 - DNA, 122 bp, Homo sapiens
tgttttgagattttcaaaatgattgcattagctcttggcaatgctaaattatgttccttgcgaaccactatccagtttctcttgggccaagtccacctcctgctccgcaagaggaacaactc

SEQ ID NO: 30243 - DNA, 122 bp, Homo sapiens
tgtaagccacacccacctgcacctgtgcctgccatgttagccccagtgacttggccgtgccgacagccatgacgagcgccctttgcactaagtgtaaagcgtacagtataggatacactttt

SEQ ID NO: 30244 - DNA, 122 bp, Homo sapiens
ctaatcgctgctgactctctgactgcccattccccgcctgcctgcttcgccgccgcggcccgaaacctccccgtggcgatccatcccagcagcacacgggcaccataacagcctgagggcgc

SEQ ID NO: 30245 - DNA, 122 bp, Homo sapiens
gcatcccagaacaaagctcagccgtgttcataggaatgcagacgtatccagtatccaacacggcaaaattcacaacatctgcaaccaataaaaaattgtgggatctgcaaggaagcaagaaa

SEQ ID NO: 30246 - DNA, 122 bp, Homo sapiens
cgtgcgcacgaaggcccagtggtcaagtgtgctccatgcgcatgtgcaaggcccagacctcgcaaatctcggcgactgggacgagccctgcgttcctgtcaaacaaatgtcggtgggagtct

SEQ ID NO: 30247 - DNA, 122 bp, Homo sapiens
gccagaagccgaagccacttgccctcctggaggagacctgcaagctccctgagcggtgggcgggcctcgtccgcaggtctcatcccacactcttgagaagccttggtcactacagtggtcgc

SEQ ID NO: 30248 - DNA, 122 bp, Homo sapiens
aaagtcctgtcacccgtttcttgattactttttacggcggcttccagaacctttcgtcagcgcgagctccatgcccggaggccgccgtcacctgctctccgggaaggccctgggcaggcagg

SEQ ID NO: 30249 - DNA, 122 bp, Homo sapiens
ttgtgcgggccggagaccgcggcgcggctgctctttcaacaggcgatttgttctcctgtccgaggctcatttccatgcaaagagcctgacatcagagcaccttttgttgctaaacgctttct

SEQ ID NO: 30250 - DNA, 122 bp, Homo sapiens
ggtttggggtggcaggggctggagaaagaaactgttcttcatccctggagcaggaggctgcggactttttgcagatccagaatttggcaagattacatttgtcgtcgttccagccattgcca

SEQ ID NO: 30251 - DNA, 122 bp, Homo sapiens
gtgccttctccaggaagcggagcgcccggtcgggctggttgctctggatggccttgagggcgatgctgatacagcgctcagcttcatccttgttggattccatggcggaaccagaacgcgga

SEQ ID NO: 30252 - DNA, 122 bp, Homo sapiens
agaacgagaagggggaggccgctgtaaacacatgaagacaggcagcgtaagagaaagtcacgagggcaggaataacatccaggcatacttcagatcccagctcaagaaaccactcccaggcc

SEQ ID NO: 30253 - DNA, 122 bp, Homo sapiens
gctttacctagggcctgtttggggcaggatgatgtcctgttatgaggggaggaaatcgggcggggatctggatgaaaggcttccacatcagggaaccctaaggttacagggactttcgaggc

SEQ ID NO: 30254 - DNA, 122 bp, Homo sapiens
agggcagtgcccgacctgtgactgttttttgagagggcaatagttaacccacaagggtggcgtcaggaaggcgacaagacaaagagaacgagtagccccacgggggacgtccccggagcccc

SEQ ID NO: 30255 - DNA, 122 bp, Homo sapiens
cgaaccggccgccaggcgcgctcttctctcggaggagtcggcgctgacccagcccgcgcccggcagagactggaagccgccgcctacacggaaaatccacagagccccgcgcagaccctatg

SEQ ID NO: 30256 - DNA, 122 bp, Homo sapiens
cacaggcgcctgggcgccctcctctacaagtgggaccttgagacaaagtgcaaactctaccgggaggggggctcctggccattccctcgggcggcgcgcccaggtgcaggctcgctctgcgg

SEQ ID NO: 30257 - DNA, 122 bp, Homo sapiens
atgacgcactaacttttgtgtaggaggaataagatatacacactctttccttgctatactcgcagacttggttccaggacccctcaatatatcaaatctgtgcatattctagtcctgcagcc

SEQ ID NO: 30258 - DNA, 122 bp, Homo sapiens
caggctttgttcatccagagggcaccgagcagcttctgagacccaccctgtgtcactggccgggctgcatatcccagtctgatgcacagacccacgattttttgtttgtttattttctgaga

SEQ ID NO: 30259 - DNA, 122 bp, Homo sapiens
gagcaggcccggaggtgagatgggggccggggtcgtaccttgcgcctgcagcacccgcagcgcgcggccgtagagcgcggaggcctcggcgtactggccgttgcggaaactctcattgccgg

SEQ ID NO: 30260 - DNA, 122 bp, Homo sapiens
tcgtgaggagtaaagcccagggagctgtgcctggcgcacggcaggccataaaactggccccggttagggaatccatgagcagcagccgcagaacactcaaccccaaggtcaggacggatcct

SEQ ID NO: 30261 - DNA, 122 bp, Homo sapiens
gccgccctctccctgcagcacgagttccgactgggcggtgggctgaaccctgggcttgtccgtgccctggccatcagccccagtggccgtagtgtcgtggccggcttctcctcaggcttcat

SEQ ID NO: 30262 - DNA, 122 bp, Homo sapiens
cggctgcacgcgcgcctccgtgcccactccccccacctcccacaccctggtcccctcatccgcccccggtgctggccccctggattgctgcaagtcccgcccgggccccccggccccgttgc

SEQ ID NO: 30263 - DNA, 122 bp, Homo sapiens
attccgtaagagctgatcgagaaaataaatttgttagaatgaaatagtctgtgtctgatgcgtaaacactgtgtgggaagaaaagagttctttaagaaatatttttttactaatgaaaatcc

SEQ ID NO: 30264 - DNA, 122 bp, Homo sapiens
gatgctcgccacgtccctgcaaagtgctcccgccccctttctgcaaatgaggaaacgggacgcgcggctcgccgggccaggtagggctaggacgcggactctaggcccaagcgctccccagc

SEQ ID NO: 30265 - DNA, 122 bp, Homo sapiens
atgatgataacggtcttggtgtggcatcacaaaggaatagtaagtgaccattgtcatttgcgttccagggattgttctaagcatttgcatgtatgtcattcattcctgagcgctcacagcga

SEQ ID NO: 30266 - DNA, 122 bp, Homo sapiens
ggctgaggccgggatcgggccccttccgcttgagggcaggtgtggagcgaaaggcgagggcgggaaccggggctgcgcgcggcgctcggaggccagcgcaaattccgggtgggcgcgggctc

SEQ ID NO: 30267 - DNA, 122 bp, Homo sapiens
gtcccaggcagtgctcaagtccaaagtcagaagcgcccctcacagtccctaggagaaagccgctgacgccatcatcagtaggggatttgcatttctcctcccacttgaggctttcctgtgcg

SEQ ID NO: 30268 - DNA, 122 bp, Homo sapiens
aggggcccctctcaccaatgacgctgcaaagcaggcgcaggctggtggtgtctccctccccgctgtccctcgggttgtcggtccaggaaggaggtagtgggatccgaagcccaatggggcgg

SEQ ID NO: 30269 - DNA, 122 bp, Homo sapiens
tgagtatctccttgtgccaggcaccctgttgttgctggggaagcggaagggagagacaatcgttaatcggctaaatttctgccttctgagagctcagaatcaagaaataaataatagggcag

SEQ ID NO: 30270 - DNA, 122 bp, Homo sapiens
cagacaagcacatgagagatgagtagcagtatgataccatgtaacgaagtccaggctgtccgcaaacaatacacagatgtagtgggtcaggcctgtgtagctctacatcttcctcaggaagt

SEQ ID NO: 30271 - DNA, 122 bp, Homo sapiens
aaagatcccttactgaatgcacgtggtggcttcattaacattgcaatcggtgccaagcaccgtaagcctggacaaagcttctctgacccaggcattccttgcctaggacgtgaggcagcacc

SEQ ID NO: 30272 - DNA, 122 bp, Homo sapiens
cggggggcaccgcgcgggtgcagccacgatggaagggggtgcgtacggagcgggcaaagccgggggcgccttcgacccctacaccctggtccggcagccgcacaccatcctgcgcgtcgtgt

SEQ ID NO: 30273 - DNA, 122 bp, Homo sapiens
caatcaagcgcttgctgcacgaaggcggggttgcagggctcccagtactcaacgtgaggccggcgggacctcggcccccgactgccggctcagagaccatcggctgacgcgccgcaagccga

SEQ ID NO: 30274 - DNA, 122 bp, Homo sapiens
gcacgtgtgcacatcctctgactgctcacgcgccactcccttccccaccgcaccccaccccgacacccacgatgccacgcttcaggcggggctctaagacaaggcctttctctggcacatgc

SEQ ID NO: 30275 - DNA, 122 bp, Homo sapiens
agggccggaggtcgtcgaagaaggatgcaccttctgaggtggcgttgggggtctgcgccccgcccgcgcccggggggcggaggaagagtggcgccagtagcagcagcagcaacatctaagtg

SEQ ID NO: 30276 - DNA, 122 bp, Homo sapiens
ccacaccctgcctgtagctttttctgaaatggccacatggctttcggcgtgatggtgccacgcgcccccggtgctggatgagctcggggtccgggatctggggtccttgccggcgctggggg

SEQ ID NO: 30277 - DNA, 122 bp, Homo sapiens
ttttgtcttccctccccgcctaagaagctaccaggtcacatgctggcggatacgcagtggcggaaacctagcggtgacagggaaggacagccctctgcctactgatctgcaggtttctcctc

SEQ ID NO: 30278 - DNA, 122 bp, Homo sapiens
actgcgatggcgccgcgtccgccaggcccggctcatcaccgtggccgcccccggccgctccggttttgcccgcctccagctccggctccggctccagctccggccctggcccccccagcgcc

SEQ ID NO: 30279 - DNA, 122 bp, Homo sapiens
cactgcactccagcctgggcgacagtgcgagactccgtctcaaaacaaaaacaaaaaaaacgaacaaacaaaactgtctccagacttggtcacatgtcctggggtgaggctggggcagcatc

SEQ ID NO: 30280 - DNA, 122 bp, Homo sapiens
agcccaggcactgtaagagcaagcacatgacggccaggacacccagtcacacaccaggagcgcccggcccagcctggccccacagtgggctacataacatccacaaagaactcgctgggatt

SEQ ID NO: 30281 - DNA, 122 bp, Homo sapiens
gggcccccaggcgcagccccctcccacggcacctttccagctggctgtgagccctagggccgcaggaaaggtatggcaagatgatgggagggatttaaagttcacagcgagaacaagaaaag

SEQ ID NO: 30282 - DNA, 122 bp, Homo sapiens
agacagtgccctggtggctctgccccgcatcccaactctggggtgggggaaaggggtcaacgttttcgcagccccaaaccgggccatcacttgcccaccgagtcgaatatgatgcggttctg

SEQ ID NO: 30283 - DNA, 122 bp, Homo sapiens
tgcagaattcaatcgtcccgtgcaggggtaagtgagtctgagatgtgttttgagcctggccgttgcgcatgatgtgaagtgacaagtctagtctgcagttttcagaaaccctcattcctccc

SEQ ID NO: 30284 - DNA, 122 bp, Homo sapiens
aaaagaattctttcccctggcaacacccctcttggatatgtagattgtatctgctgactacgtggctcagttttcccttattaaaacctatctcaataaaatcattttgaaagtagaaaata

SEQ ID NO: 30285 - DNA, 122 bp, Homo sapiens
ctcacctcttgctgtgtgtcctggttcctaacaggctacagaccagtcaggtctgtggcccgggggttgggaactcctggtgtatggaagagactactctgcagcaatgtggacaaatagga

SEQ ID NO: 30286 - DNA, 122 bp, Homo sapiens
tacacaacacctcacattattcaaagaaatctgagacacccaccctcacccccgctgcctcgctctcaggaaataagcacaggaaaactaaatcactgcatgccatcaatgggggagtgtgt

SEQ ID NO: 30287 - DNA, 122 bp, Homo sapiens
agccccggcccatggcaaaactttccatcttcaaagccgagttgctggcaaccaaggaggcggcccacgccggcgggggtgctggctccggaagatcctctctggttgggtgctgagccggt

SEQ ID NO: 30288 - DNA, 122 bp, Homo sapiens
accgcaccccagccaggtgggacctgggcttcgggcctggcagggcctggaggggagaggcgcccactccccagccgcggacacccgccgggccccggccttccctagctcgccgccgccca

SEQ ID NO: 30289 - DNA, 122 bp, Homo sapiens
cacactcttgtcattgaggtctgtggcatggatgccacctgccaaggtcctagattgggccgaggcactcccggccacggccaccatcaaggcagtcagcagcagcagtggggtgtgcatgg

SEQ ID NO: 30290 - DNA, 122 bp, Homo sapiens
gccaagtcaaggttaatgccggtgctcgggcggatggtgaaagcagcagatggccttgaccggggtagagaactcgagcacaggagcaggttctgtgtgtgtgtgtgtgtgtgtgtgtgtgt

SEQ ID NO: 30291 - DNA, 122 bp, Homo sapiens
gattccatcgatattactgtccttggtgtcaggaaagcatggcccagggcctggtgccgccgtaaggaaaccagggatacgtcctgaggggtgggtggagggctggctgggtggaaggcggg

SEQ ID NO: 30292 - DNA, 122 bp, Homo sapiens
ttcttatgtcttactaatacattgaccctctatctctggtaatactctttgtcttaaatccgttttgtctgatgttaatatacttactctgggtttttaatgtttttgttgacactttaatc

SEQ ID NO: 30293 - DNA, 122 bp, Homo sapiens
gcgagggcggggccctggggactggacggaatcccagttggtcagaggagaccctgggggcggggccgcgcgagttgccgttaggacagttaaaaccgttagctgcctgtcgtggcggggcg

SEQ ID NO: 30294 - DNA, 122 bp, Homo sapiens
cttgtctaaatatttaaaggtttaaaacaagcctgcgcagtggatgtcaagagtaaagtacgtttcatagtaaaattaaaatgccattaaaattttgttcttgtggggctgggtgtggtggc

SEQ ID NO: 30295 - DNA, 122 bp, Homo sapiens
tcgcccaaaggcacaggcagctaaacattaggcttttgatttttccaaacagacttacaccggctctgtgtgatgtcattttatttgtgttttccttatcggttaaatgaatgtttaaggtc

SEQ ID NO: 30296 - DNA, 122 bp, Homo sapiens
ccgggaggccagtgcgtgtgtaagaccgcgtttctctgcaaggctgtcccgcggcaggaacgcgctcgttgggccgcagagcaagagcgggacgcgccggggggcgtctgcgtggcacgtgg

SEQ ID NO: 30297 - DNA, 122 bp, Homo sapiens
gcgtcagccatggtacctgtggtttaagctctcagcttaaagcatctgaaaggggcattacgtgggaaggcatctggaggttttacaggagggcagcacatcagcgaagggtacagcaacct

SEQ ID NO: 30298 - DNA, 122 bp, Homo sapiens
cggccgggctggggcgcagggcggcttcggggcgccagggggcgttgtgaagtcgtggcccgctccgggcggtctcaggtgcctggcggcctggggaaagcacctgggcaggtgggggcggg

SEQ ID NO: 30299 - DNA, 122 bp, Homo sapiens
ggctcggagaagtcttggagacccggagctgactcacctccctgggagatatctcagatccgacctcgccttcctggagcggaagtgcctccgagtgcccacggttcgtggactccacttcc

SEQ ID NO: 30300 - DNA, 122 bp, Homo sapiens
ttccttctccgtggtccagaaggctgtatctcacctgaccagactgacctaaatcaggatcgtgggcttctaaccacatgatgacggttccttctggaagatcctctcggactttcacacga

SEQ ID NO: 30301 - DNA, 122 bp, Homo sapiens
aagtctgtaccagctgtcccaaccataatctctgcctacagcattctagccaaacagctccgctttctatactggagagaccatgttccattcatcagtatttgttccctgaactggagcct

SEQ ID NO: 30302 - DNA, 122 bp, Homo sapiens
ctgtctctgagagggagagggagagaaggaggagctgtttacaaacaggatgtctgattacggagttacaccagtggccagattggatcagatatttaatgcttgattagggtggctagtgg

SEQ ID NO: 30303 - DNA, 122 bp, Homo sapiens
ggctttccctggctctgggcccgcgggagcaggtcccggctctcccggagtcgctgcccccgcccccgtcccgcggctcatttgcctcctggtgccctgggccggagccccggcggtgctgc

SEQ ID NO: 30304 - DNA, 122 bp, Homo sapiens
ctccttaccaaggctccaggttggggggatcgtaggattagaggggctaaggatagtcagcgagctggactggggtaagaaagaaaaccagatgtcctagggcctagcccttgtagtcagaa

SEQ ID NO: 30305 - DNA, 122 bp, Homo sapiens
tacaccaaggcggtctctgctctgaaaggagatctgctaagtgcctcaggaaaggtagtccgaagcccctaggacctcaaccccacccctgagcaaaggttccaggaccccagcaagggtca

SEQ ID NO: 30306 - DNA, 122 bp, Homo sapiens
cacctgatctccgaatggacctcagctgctcctgcgccactggtaaaggatgcctggtttcgggtcttaggatcttcattttcataccacagaatagaacatccctggggcaggaggcaggt

SEQ ID NO: 30307 - DNA, 122 bp, Homo sapiens
gcagggggcgtaggtggggttggggcagaatgtaagtctgaacagaggagagattactgacgtgaaagtaacttctcatgactcagggcttaatatcctggaaaggacacgcgtaccagtcc

SEQ ID NO: 30308 - DNA, 122 bp, Homo sapiens
atgtttaaggaaaaaaaattttttagagttggggtctcactcttgtcaccaaggctggatcgcagtggtgagatcacggctcactgcagcctcaaattcctgggctcaagctatccttctgc

SEQ ID NO: 30309 - DNA, 122 bp, Homo sapiens
aaaaaagcttttttggggctgtttgatatacatcccactctaaaagggatgataaatgctcgggagagttctgaaattatgagacctccaccaggaggatgtactgcctatcttgtttcttt

SEQ ID NO: 30310 - DNA, 122 bp, Homo sapiens
ctcaccacctcctctcccccggcccccgcggctcgcagaagcctggcttacccacgctcccggcatcggccgcctcagcgctccccgattccatccccgcggttcctcctctcccccagccc

SEQ ID NO: 30311 - DNA, 122 bp, Homo sapiens
ccccaaatccccacgtgttaggggagggacctggatgattggatcatgggggcagtttcccgtatactgttcttgtgatagtgagttcgttctcaggaaatctaatggttttgtaagtgtgt

SEQ ID NO: 30312 - DNA, 122 bp, Homo sapiens
tcgaggaatggtgaggatcactgtttgcaccaaccgtctggaagaaaccgggcggccagccgctcgaccccatctgtcgagatgtgaaacttggccgcgcggtccgggcgcgcgctgcctgc

SEQ ID NO: 30313 - DNA, 122 bp, Homo sapiens
ctcaatggagcgtgtcccgcataaggtgagctttttacgactgcagatttgctctcctgccgaggcaaggctgatagcagtggctcacttcgttgactaaactaaggaaaactgtgggtggc

SEQ ID NO: 30314 - DNA, 122 bp, Homo sapiens
ggctggtgggactggagccgctgtgtcactgtggcaggagctgctgctgagggcaaacatcgaggaactgtgctgcgccatgcccaggtcctgcagggagcgagtgcaggtaccgcccagct

SEQ ID NO: 30315 - DNA, 122 bp, Homo sapiens
cgggagcggggctcagaaacagcgctcttcggcggtcgcagcgagtgccgacaccaggatcgctttggagtaattagccggctagctaattcacaattcggggggaaatcgtcaagtttttt

SEQ ID NO: 30316 - DNA, 122 bp, Homo sapiens
ggtcacagacttcccttctgagacgagcagaaacaccaccactgacatgatcttctttcacgacccatggaggagcaattcaccttggagagaatcagaagacattagaactggagggaggg

SEQ ID NO: 30317 - DNA, 122 bp, Homo sapiens
tgtaagagcaataagtgtacagcatctccatgtcccatatgctatagaacagaaccaccacggactccggaacacggggtgagaagggcctttgttggctcttcttgcctggcaggcccttc

SEQ ID NO: 30318 - DNA, 122 bp, Homo sapiens
cctgaatattgggccaggaaaacgtttctctgaaaggaaccacaactgcaggggaccacccggctgcagctcccagctcccggcccttcgccctaggctgcccactcgctccggctcccgac

SEQ ID NO: 30319 - DNA, 122 bp, Homo sapiens
tcgtgtaagtaccctcgagactcctaaaagtctacatttactaccaaagctaactagtctcgaattctaacacttggttttgttcatttttgaacattatataaaatgaatcatacaatatg

SEQ ID NO: 30320 - DNA, 122 bp, Homo sapiens
gccacctcaagctggtgagggagcctggcgctcttcccctcgcccgcccgggccccggttcgcccatctaagctgatgcttgggccccagctggacattcacgctcccaggccatccccgct

SEQ ID NO: 30321 - DNA, 122 bp, Homo sapiens
catctctcagatcattgaatctgagtttctaagatgaacaaaatcatcactcagattcttcggggaggcatttggccattctaccgtgtcatgcatctctgcttttgcagaggaggaaggag

SEQ ID NO: 30322 - DNA, 122 bp, Homo sapiens
gggaggttcgcggacggaagctcccgccctgcggtgccggatggccccgccccttagcaacggcctagcgtccctccctagagacggggctgatgcatccccgcactgctcggtggaaccgg

SEQ ID NO: 30323 - DNA, 122 bp, Homo sapiens
gctcgctcaccacgcacggaagtgcgcctgcgccaggagacgccccgcccagcccctggccgactataaagtgtcgagcttctcctcgcgagagacttagtgctcatgctcgctgcaggggt

SEQ ID NO: 30324 - DNA, 122 bp, Homo sapiens
caccagaacacagaaaccagagcccagcagcactggctgggccatgtgttggtggccccccgggactcgctaagagtagcaaaggggagagggaagctctgacacacaccatttctacgacc

SEQ ID NO: 30325 - DNA, 122 bp, Homo sapiens
caatgcagaggtgggggccaagaccaagcctcctggggcttaagaaaatatctccagagacgggaagtctggaagggaactccatcacgaatattttatgttccctccctctattgttctca

SEQ ID NO: 30326 - DNA, 122 bp, Homo sapiens
tcttccccagccagggaccgcggcggagactcaccggcagcagaaccgcgacgatgaagacgacgaacttaaggatcttggggtccaggagccatggtctggttcccgacgctgtcctggct

SEQ ID NO: 30327 - DNA, 122 bp, Homo sapiens
tgggctgtggcctgggctctggcctgtgttgagcttggcacagcgggaacccatggtctacgttgcctgtctctctgggcaaggaggtgaggcggtgggtgaaggggctgcgagtgggggca

SEQ ID NO: 30328 - DNA, 122 bp, Homo sapiens
gtaccaaggtaaagaggttggagtttattagttaggtagtgagataatggttttttgagtcggggggacattggtagagctaaaaaaacattgcctcagaaacattgatctgctattgtttt

SEQ ID NO: 30329 - DNA, 122 bp, Homo sapiens
tactgtcatccaccccagtttcctcattattaacatcttacatttgttgcaattgatgaacgaatattagtatattattattaattagtggtttatattagggttcactttttgtgttgcaa

SEQ ID NO: 30330 - DNA, 122 bp, Homo sapiens
gcttccgagggcctggctgggggactggtgtggagggcagggtcacagggctgggtggctcggggcgcaggctgccgctcactacagaattctttcaggggctggcgcctccctctacgccc

SEQ ID NO: 30331 - DNA, 122 bp, Homo sapiens
caccctgggttgtgtgtcctgcaggcttccagatccattcggagtgagtcttcctgctcccggggcactgcctggtctggcggggcagttgagtgggtggggcacagggtgtgtctgtatcc

SEQ ID NO: 30332 - DNA, 122 bp, Homo sapiens
cgagcggacttgcttctagaggcagctgtaagcatttccctactgagcaaccacacacgtcggatgtgagtggcatatgtatgtgtgtgtttttccttccggttgctgtgaggtgatgttgt

SEQ ID NO: 30333 - DNA, 122 bp, Homo sapiens
cggcccagggcttggcacgcggggatgctgaaacagggccaggcctggtttccagccgatcgtcagagtcccaaggcccagcaaccttcctcacaaaggcctcgttaagaggcgaggaaaca

SEQ ID NO: 30334 - DNA, 122 bp, Homo sapiens
ccacgggctctcgcacggactctcaatcggtgcggcacagcccgatcgccccgtcttccccgagtccccaagtcttagcccagaagtactctctggtggccaaacaggaaagtgttgtccgc

SEQ ID NO: 30335 - DNA, 122 bp, Homo sapiens
agaggacaggtggtaaagaatcacggacacctagtaggacaactaggcatggctttgtcccggtttcagagcaccgacacagcatttagtcaccatttaccttcttgggaggtgggttaggc

SEQ ID NO: 30336 - DNA, 122 bp, Homo sapiens
cgggagtgggggcaggaatgctccaaagctgagatctaaatgtgtctctgattgaacgtccgtttttcaaccaaagacaccggtgagcgagagctgccaggtggcagtgaaaggcgagtgtg

SEQ ID NO: 30337 - DNA, 122 bp, Homo sapiens
gaaagggtggtgggaggcccagggcggtagggggcgtgactaggtggggcttggctggaccgaaaactgggatgaagcggggcctccaggggtgggcggggccgaggcggggcctgttctcc

SEQ ID NO: 30338 - DNA, 122 bp, Homo sapiens
agctcccgctctatggcatgacggtgagtacagcacaggctcgtggccagggcctgtcctcgggggcagcaggtgcgggcgctgctgacccggcgatgaggagggaaggagactggataggg

SEQ ID NO: 30339 - DNA, 122 bp, Homo sapiens
tccacacctccgaggcggggagctgaggttgaggcctgggccggaggtcgccaagaagaccggaaggccgcactcaccatggctccggctgggctcccttgcttccaccgggagcacggctc

SEQ ID NO: 30340 - DNA, 122 bp, Homo sapiens
gcgtacagaaaagtcccgttttctcgcatcccaggtggaccaggatccagatcaatctgtcgatattgggaacgacgccggaccaggaaacccagcgccaagggccgggttggaggcgggga

SEQ ID NO: 30341 - DNA, 122 bp, Homo sapiens
atgggcctgtggggactgaacctggaagatcatggacctggtgcccctgctcactgggcccgagcctgaactgagccccagcgggctggcgggcctttttcctgcgtcccagcctgcacccc

SEQ ID NO: 30342 - DNA, 122 bp, Homo sapiens
cctttccttaaaaccaaagggcaactcatattagagcaaagctagaaaggttcaagaaatcggtctcccctcaatactatgagaaaagagttaatgggtggtataaggtgatagaaatatac

SEQ ID NO: 30343 - DNA, 122 bp, Homo sapiens
tggggcgcttaggtaccgacctaacaacttctgcgcctgtttccagggacgagccacgcacggtgccccctgaacacctaacagtcccgggggcagccccacctctggctgggtggacagag

SEQ ID NO: 30344 - DNA, 122 bp, Homo sapiens
gatcttagataggaggggtggatttgcaaggcctagaatagctggggagtggtttccccgcggaatcggcctccctgccgctcctgctttgtactgtgacgctcagcctgtgatgactggtg

SEQ ID NO: 30345 - DNA, 122 bp, Homo sapiens
ccatctgtcctctaccccagagcctctcacctccaagtgccgcaaaagctgagtggcgttcgcctctgacttcacggctttgtactgactgacagtcaggagcaaggacttcaagcaggcag

SEQ ID NO: 30346 - DNA, 122 bp, Homo sapiens
catcatcttttgtgttttcttggcagctggaacaaaattgccgcttctctcataaaataacgaattcctggagcattaatttagcccccgctgtgtagtagggaattagggattcagagctt

SEQ ID NO: 30347 - DNA, 122 bp, Homo sapiens
tgtgcagccaatgtcctctccatgagctgtgccacaggacaagtttcccggcaaacaccacgccccgcgatatggcaggattcatgccgactaatggaaaacacaccagatgctggaaagag

SEQ ID NO: 30348 - DNA, 122 bp, Homo sapiens
gttcctgctcctggtgtctactctgaagagcacagagtagacgtttgtctgccatttcaccggcagtaagatcagcagctgctggtgagcaaagaggtagtagtgggtcactggactggtgg

SEQ ID NO: 30349 - DNA, 122 bp, Homo sapiens
aactggtgcatcctctgccgatagttggttggtgagatggggcccgaggccacgctgctgcggttgaactccagggccagggcagggcccttgtacttggccatcagggccgtctgctcggc

SEQ ID NO: 30350 - DNA, 122 bp, Homo sapiens
caggctgaagctggagaggaaccagcgtcacacagacggcctctgagaacttggagaccccgttacccacccagcaggggtgtcaggacaagcatctgctgcaggcttcagcctcaggggca

SEQ ID NO: 30351 - DNA, 122 bp, Homo sapiens
atctctcctgcacagtccacttggtgttaatgggcccagtcaaaaggcaggactgttggacgccagtgttccttattcgaccatctgtcgatcaaagtgaccacacaaaccccgctttgccg

SEQ ID NO: 30352 - DNA, 122 bp, Homo sapiens
aagagaaacttctgttgtttgcagacactgagctacggaacttggttgtggcgggaaactcgctttctccacgcctcctgtgtctctgcatccctgataacaccctgcagactctgagcacc

SEQ ID NO: 30353 - DNA, 122 bp, Homo sapiens
atctggatgggcctgctcgcccgcgccccggcgggcctggcagaggaccagccccagctgcggaccccggggcagtctaaaccctggggccttgagttcccgttttgtcaatgggagaaaat

SEQ ID NO: 30354 - DNA, 122 bp, Homo sapiens
gtgttaccatttctacctgatgttttatgaattaggcatgtgagttatgtctccatatgtcgaaaaagactaacatgatgggcttcctcagcatttccaaaaagcttgcatgctgggatttt

SEQ ID NO: 30355 - DNA, 122 bp, Homo sapiens
ctttcagactccagcaggggcgccctccaggcaaccggctgtggcgggcagaagcaagctcggatgggagacccccgagctgcgtgcccagcgccggctcaacagacttgcccgcgcagcgc

SEQ ID NO: 30356 - DNA, 122 bp, Homo sapiens
catcatcaaggacttcaccaagcaggtgagcctgccttggagtgggggtgtgagccggcacggggtgcaggtcttctgctggttcccacccactcagcactggcatcttactcagcagacag

SEQ ID NO: 30357 - DNA, 122 bp, Homo sapiens
gaccggcatgtagttgtgaccagtaagttataatgactcaatgagtagccatttgggccacgctcctgcctccacacacaaattcctccaacttctcattttctctgtcttataagccctca

SEQ ID NO: 30358 - DNA, 122 bp, Homo sapiens
ggtctagcggtaacgccagcgtctgggaagatgcctgttgccaagtggaccttggtctagcggtaggcgcagtgtcaaggaaaaacacctgctacttagcagaccgggaaagggagtctccc

SEQ ID NO: 30359 - DNA, 122 bp, Homo sapiens
ctcaggagcagggagctgggagctatgagtgctgactgcgtgaactcggcctccacttcccggacctgccacttatcatgatccacgagctgtactcatgactccgcacaagcaagcagggg

SEQ ID NO: 30360 - DNA, 122 bp, Homo sapiens
ggaagattggtggtgtcttccactccctcaccaaagcggcccttatgttcatctgagtaacgcattgggactgtgtgcctgtgcccttaactatttgaagggcatcaaagtacaaccatttt

SEQ ID NO: 30361 - DNA, 122 bp, Homo sapiens
cctagaacaacggcctgagcgcttgtggaattaaaatgggagatgtggggccgaggtgggcgaattgggatccctccaggtcaggggttcgagaccatcctgggcaacaaagcgagaccctc

SEQ ID NO: 30362 - DNA, 122 bp, Homo sapiens
cggagaacacactcaggggagaagccttatgtgtgtggggaatgtgggcggggatttagccggaggatagtcctcaatggacactggaggacacacacgggagagaagccttacacgtgctt

SEQ ID NO: 30363 - DNA, 122 bp, Homo sapiens
gttttcgttaggactgcggctcttggagaaagcgtgagcagggggccaccgcggtctccgcgcctgtctgcaccctgtcgcctgagctgcctgacagtgacaatggtgtgaggggctgcgtt

SEQ ID NO: 30364 - DNA, 122 bp, Homo sapiens
gcttgctggagcatgacagattcggggctcagttttgcaattgtttctagtgtgcatttccgtttgatctgtatttaatctctatcttttacagttaacatgatcttttttgaggtgcatta

SEQ ID NO: 30365 - DNA, 122 bp, Homo sapiens
gtcgtgcaacaaaactttcagcaccatgcacgagctagttacgcacgtcaccgtggagcacgtaggtggcccggagcagagtaatcacatctgcttctgggaggagtgtccgcgcgagggca

SEQ ID NO: 30366 - DNA, 122 bp, Homo sapiens
atctgaggccacccaccacgcagcttgagcttggggagctcctgaccttcccttaggcaacgcctgtgatttttgaaaattccattcatgctatcaactgatcctgccttgcctttgactgc

SEQ ID NO: 30367 - DNA, 122 bp, Homo sapiens
aaaagaaaattattttatggaaaaaggccaaagatttgggagatactttgagaagagaagcgctaattaaatttaggatgccgcttcccccatctaacagtgacacgtgggctcttccagac

SEQ ID NO: 30368 - DNA, 122 bp, Homo sapiens
gagccgggccgggagaggcgccgcgcccggtcccgcgcccggtcccgcacccgctctcagcggcccaagcagtttctttctgggtgacaagaatgtgcctcggttggtttttcttttttttc

SEQ ID NO: 30369 - DNA, 122 bp, Homo sapiens
gttccacctggcggcagctgcacaaagtgtttctcttcgaacgccgtcccaagttttacccggaactacttagcccagggtttcctgagtgctcctcgggccaaaagcagagcgcacaaatt

SEQ ID NO: 30370 - DNA, 122 bp, Homo sapiens
aagtggagctgaggcgtcagggaggacctccccgaggggctgaggcctgcagtggggagccgttggagacttgccgaggagggcgagggcgcaggcccagggctttgcagctctgcatcttg

SEQ ID NO: 30371 - DNA, 122 bp, Homo sapiens
caagcagctgtctacttggaccatttcaataaggccgaggaccgcgctccagacacacagcgcaggggctactacaggaggtcctgtgggacccccgccacggaaatccggctttaccttga

SEQ ID NO: 30372 - DNA, 122 bp, Homo sapiens
acctgttcgagcggacgttcaacctcaagttcatccggcccttcatgcagtacaacagcacgcgggcgggcggcgtggaggtggatgaggacaccatccggcgcatcgaggagctcaacgac

SEQ ID NO: 30373 - DNA, 122 bp, Homo sapiens
aaacggcgacgaataaacaacttaccttgcggagaagagctacgactgcgatgcggtgtacggttgtttttgcttttgcgttggcggcttaggggctgttactgtgtcccacccaggcgtgc

SEQ ID NO: 30374 - DNA, 122 bp, Homo sapiens
ggtgcacgctgtcttgtgagtctgagatttttaaaaactcagctttggctgaacaggtgacgactacctgttgaataatatagttcttaaaagtcctgtagccagtcagaaatgagcttatt

SEQ ID NO: 30375 - DNA, 122 bp, Homo sapiens
cacactggaccgacttctggacagtatggagcaggacccaggagccctgctcctgggtgccgtgcgctgtgtgccccttgcccgcccgctgcgagacgcactaggtgcgctcctccgacgtt

SEQ ID NO: 30376 - DNA, 122 bp, Homo sapiens
aaagcaaactagggtttgcacacaggtagtgaacttcagaattcttcttcctctccattacgttggaaagatgaacaaagtagaaatggaacttttcatttgctgttaaacgacagcaaaga

SEQ ID NO: 30377 - DNA, 122 bp, Homo sapiens
gggctgggggcggatgggcgcggcggggaagacgcggcggggcgccatgcggggacacggcgcctgggagcggctgtgtggaacttgtttgcgttcatctctgtctccctcttcagcggcct

SEQ ID NO: 30378 - DNA, 122 bp, Homo sapiens
ggaagggggttggcaggggagggtctggtggctggttctgtagtctccaaggtaacagaacgcggctgggtcccgcagagcgatcatcgggttccggccggcggcacgtgatctgtcgggac

SEQ ID NO: 30379 - DNA, 122 bp, Homo sapiens
caccctcgccaccacagagggcctcctccctcacaggaacgcagctccacagtggagggacgggaaagtggctccccaaactccagtatgggacaagagggaatgagtgcaggtcccaagcc

SEQ ID NO: 30380 - DNA, 122 bp, Homo sapiens
cctaataacagcaacaatagtaatacaataacgccaagctccataccagagctctaccaacgctggcccctgaggcctcacagcaaccatttttcagacgagaaaagtgaggcacgaacaat

SEQ ID NO: 30381 - DNA, 122 bp, Homo sapiens
gaattcaataggactgacctttctcccccactgggtttctgtgcctggtgggggggcattcggagacattggtttcccattcactccgacaggactcctgcccccagccggagccctccata

SEQ ID NO: 30382 - DNA, 122 bp, Homo sapiens
gcaagtttaaaagtactcacaaaatctaataggcaattcaacataaaactccatggctatcgctgttcctcactttctgaacctttacctgcctgactttactccataccactccaactcac

SEQ ID NO: 30383 - DNA, 122 bp, Homo sapiens
ccctacgcgcagcaactcctcaccgccagaccagctaccgctcggctcagctggcgccggcgccaacccaatatataggccgggccggtcccgccccgcacgcatgcgcctcagactgacac

SEQ ID NO: 30384 - DNA, 122 bp, Homo sapiens
tgcctatagtcccagtgctttgggaggccatagcaggaggattgcttgagcccaggagttcgagaccagccagagcaacatagtgagaccacatctctaccagtaaataaataaataaataa

SEQ ID NO: 30385 - DNA, 122 bp, Homo sapiens
ctcgcgagggggcgctgaggtcggggcggggcttaagggacagaggcgcatgcgttctgccgggggctcgcccttcaccaggaatgacggtttctcttgcacatgcgcttccaggccgcaag

SEQ ID NO: 30386 - DNA, 122 bp, Homo sapiens
ggaaactgaggcatagagaaaacttgtgcctggtaagctccagagctgagacccaaaccccgatgctggctctcgagcctgaacttcacatcctcggaatgttggggtttcagaccctctgg

SEQ ID NO: 30387 - DNA, 122 bp, Homo sapiens
cggccggcccatccaccttgcggaaggagtactccaccgagaagttgtttttgtgctgcccgcggccgcggctccacacgaacagcagcacgaagcagaagaggaccacgcccaggaaggtg

SEQ ID NO: 30388 - DNA, 122 bp, Homo sapiens
ttttttttttttttttttttttaaatctgaggccccctgccagtaggcagccacagacaacgccaaaaggaattagactctgggctgatttttatggattagttaacatatccctcctcaga

SEQ ID NO: 30389 - DNA, 122 bp, Homo sapiens
tcagcgccccctgctgcagggcggggctcacggcctgcatgaatggcgcggcggagggggcggagccgcgtgcaccggggcggggcattgtgggtaagaggaaacgctggggccggcccgct

SEQ ID NO: 30390 - DNA, 122 bp, Homo sapiens
cgccaagagccggagcggtgtgccaagtgaaaactacatttcccacggggcagcgggtcacgtcacagaggaacgactacgcatgcgtgcaaggtcctccgcgcgcgactacgctcataaaa

SEQ ID NO: 30391 - DNA, 122 bp, Homo sapiens
ggttaatatttggattttatctatcataatcacttatgccatgggtcccaaaaaatgttccgggctgcatatatgttctgcatatgaatcttggaagaatactcatttactgtcaacagtag

SEQ ID NO: 30392 - DNA, 122 bp, Homo sapiens
accaaacagacaggacggaccagaccccgtgcaccccggacgatgacttggaggaggtaacgagggtctcctgccgggtcctgggcttggaggaggtaacgagggtctcctgccgggtcctg

SEQ ID NO: 30393 - DNA, 122 bp, Homo sapiens
agcagcaagggccaaagcatcactctccagcccggaccttcccactcaccctccctgaaccgcaatgcaactcacctcctgcaaggaggcccggcagagctccagggcaatgtagtggaact

SEQ ID NO: 30394 - DNA, 122 bp, Homo sapiens
ctcccagctgtgaagctgtgcgcaaacttctcctgacttaagagtctcaatcctagcctgcgctcccgccccacccccgcccgcctcccgacaggcggcagaggaggtggcagcagaattga

SEQ ID NO: 30395 - DNA, 122 bp, Homo sapiens
ctctgaccgggctcccccggcaccgatccgcggccggagcgtttagtcccggggacccgtcgagccctgaaagggccatttccccctgaggcgagtccccccaggcgccccgcagcctggcc

SEQ ID NO: 30396 - DNA, 122 bp, Homo sapiens
gtcatgcagcccacggcgtggcggctgcgggccggggactggcggcggcgggcgaggcggcgcccacagcactcgggactcagctgccggagggacaaactaacttcctgagcgcgggacct

SEQ ID NO: 30397 - DNA, 122 bp, Homo sapiens
tcgtggtgtttcaggctcagtgctgtgagggccgtggtgagtgaggtggggccatgctgccgctggggagcttgcagcccccatctggtccagagcacatctgacctttcctgctgccagcc

SEQ ID NO: 30398 - DNA, 122 bp, Homo sapiens
gctgaaagtttaagaagaaaaggaggaaaatgctggacaccaggtggcactatggtgtaccgcctgtaggatttccaggtgtagtaaagaaatttgaaaaggctgtagaccacatgaagcct

SEQ ID NO: 30399 - DNA, 122 bp, Homo sapiens
tatcacatgctttaacgacagggccagggagctcagaccaagctctcggtggggctgctccgcgtgcccatttctgcttgcatggaagtcatttttcttaaaaccggcgcacgtttctgaac

SEQ ID NO: 30400 - DNA, 122 bp, Homo sapiens
ttctggtttaggggccggacccactgagaggccccagagccgcccgtgatgttcctcccccgtccccatctggcagctcctgtctcgcctgagggacccagccgccttctccgtgctctggg

SEQ ID NO: 30401 - DNA, 122 bp, Homo sapiens
cagaggagatcccttccaactccttaaagatccaagaaagaccttcacaatttacgagcacgccaggaaggcgggggcctgtgtactgactgcagaagagaacacccctctcaggaaacaaa

SEQ ID NO: 30402 - DNA, 122 bp, Homo sapiens
tactacagctcaccttctcgcagaggctcttgacctgggactcggacagctgcttgcactcgttcagctgctcgatccactggtccagctccttggtgaacaccttctcgtccatgatgcca

SEQ ID NO: 30403 - DNA, 122 bp, Homo sapiens
atgctttctctgcgcttcttgaagcaatgaccctcaaaagcccagaggtattggccccctcgggggacccgggggccgccaagcagggttcccccaggtgggggctgggcagctggcgctcc

SEQ ID NO: 30404 - DNA, 122 bp, Homo sapiens
cttccacgtaagggagacctttgcaaagggcatccaaatgggtaggcaggtgacagccgccgtatttattttgcataatattttaatttgtatatttttgtgatttattttggcgttatgag

SEQ ID NO: 30405 - DNA, 122 bp, Homo sapiens
tatacgcctttgtttcagtgattccgattccaaacgacacatccaagttactgtttgaatcggcatcgagcttactggggcggggtcttcccatgatttccatccggtcttttgctttcgag

SEQ ID NO: 30406 - DNA, 122 bp, Homo sapiens
cctccttctccccgccgtccccacacccccacggctttgctgaacgccccggaaaggcagcgtcgcagtacctctcccaccgcggggactccacgccgcacatggctccatcccgggtggga

SEQ ID NO: 30407 - DNA, 122 bp, Homo sapiens
tttgcagttttcctcggaaaagcctctccgaagtcaaagctgtggggaaaatgggaaactcgttcccgctgtcggtttccacaggccgcccttcaaggatcagttcgcttttctcgtcgtct

SEQ ID NO: 30408 - DNA, 122 bp, Homo sapiens
tgcccgagctgcacatcttttaaggcttcctggccgttctgtgaaggaacaggctcaaagcgagctacccggtgcggccgcgggaccggggttctcccgccagctgccctgcgtgctctcgc

SEQ ID NO: 30409 - DNA, 122 bp, Homo sapiens
cccacaattagctataaaaagccaacaaaccagtgttgtggacagaatcacagggacacacgacagaatttccaaaatccaattctatttggctttccctgataccactgcccttacctggt

SEQ ID NO: 30410 - DNA, 122 bp, Homo sapiens
aagccctcctgacctcagggcaagaaggctgacttcaaagcacttggccactgggctaggcgcccaacatgccccaaacctctgcccagccttctgttacccctcttctaggccacgggggg

SEQ ID NO: 30411 - DNA, 122 bp, Homo sapiens
agtgccttgcgcatacacgcttttcacaccgcctggggaggaaggtacgattatgaccctcgttttacaggtgaggaaagggaggcacagagaggttaagtgactttcccaaggtcattcag

SEQ ID NO: 30412 - DNA, 122 bp, Homo sapiens
gactccagataccgcaatctacagctaggctaggctgagtaaatagataaaataattacacgttattagtgctgacagaggtatgtacacagcactaaagagaagagaaacaagtgagaaat

SEQ ID NO: 30413 - DNA, 122 bp, Homo sapiens
tgcggtaattagaggctgacaccaggtgtggccgccactgctgctagcacagtggagaggcgagtgtgctgctacctgctccagcgaacccccccactctgcaaaggaggcagaccgtgaac

SEQ ID NO: 30414 - DNA, 122 bp, Homo sapiens
ttcttttctgaaccagcaatcaagactccctacttccttttgctctccaagttcctgtatcggtaaatgaattgtccacttgctgtaattttgccatttagccctctctaaccaagatgttg

SEQ ID NO: 30415 - DNA, 122 bp, Homo sapiens
cagagggccctgatagacgagagtggggactctgcctgtcattacagagcaatgggaagccgagggcaggttctcgcaggaaggataggaattattctttgaagatgcttgtggctgctggg

SEQ ID NO: 30416 - DNA, 122 bp, Homo sapiens
cttactataacacaaaccaaaacacagacattatatggggaggataacgcattgaactttcgttcactaatgagtagacccaattagtttattagatcagccaagcaaggagaaactagact

SEQ ID NO: 30417 - DNA, 122 bp, Homo sapiens
cgcccgcgccgccgccgcggctgcagcctccgtcgtccacggcccccgccgcctcttcggcgcccagttttcgccgcttcttctgaagctgttgctgcttctcggcgccgatcagcgcctcc

SEQ ID NO: 30418 - DNA, 122 bp, Homo sapiens
gggaggcctaatgcgctggtggcgatgggagcatctcccgagcccgcttcaaaggagacacggaaatccaagggtcctacagccagggctacagggacccctgcttaaccgagggacccaat

SEQ ID NO: 30419 - DNA, 122 bp, Homo sapiens
gaggtgtggcctcatggccctctccaaaaaaaatcaaggacctgctacaaagcacaaagccgactgcaatgcttgctgcttactggttagggcagctcctctttgccagcgaccaagcagaa

SEQ ID NO: 30420 - DNA, 122 bp, Homo sapiens
gcaccccaggaagatcaggacaggcaagactagtgcagagcgtgggctactggctctgagcgcgagagtctggtgctcgtggacatcttacagaggaaccgcagacaggaagaagctaggta

SEQ ID NO: 30421 - DNA, 122 bp, Homo sapiens
tcccgcgtcgtcaccccctgcttggggtcgggggctctggggtctgcgtaggctgggagccgttccggaaccggacacctggcgcgcacgtcccgggaaaggcggagggtgcattgcccctc

SEQ ID NO: 30422 - DNA, 122 bp, Homo sapiens
gatccgccaccagaaggagctgggcaacgagtccaacttcagtgatgcactgctggatgccggcgagtccatgaagcacctggcagaggtgaaggactccctggacatagaggtcaagcaga

SEQ ID NO: 30423 - DNA, 122 bp, Homo sapiens
caccccagggctttgcttcgcgccctccgcccggaccctggcccttctcttcttcgtctgcgtggaactccctccagggcagggcctggcactgtgtagtgaatgtcggcctcgtggtggac

SEQ ID NO: 30424 - DNA, 122 bp, Homo sapiens
cccccctcgcgctctctccctcctcccccccatctcagtgccgggaagccgcctgtgctgcgcctggtggggaaatggtggacgctcatgactgtgtatgtgtttttgtatatctgtctgtc

SEQ ID NO: 30425 - DNA, 122 bp, Homo sapiens
aaacagactgctcagctgttaagaacacacagcgctccagaaaactggtgttcaacacaacgcgtcactccggcttccactgctgctgcggagagtcaggttctccggcaaggccccgcgcg

SEQ ID NO: 30426 - DNA, 122 bp, Homo sapiens
ggtttactccccagctcctggatggtaaagcgccctgcggcccgcgggtcaggtctttaacggtccagccagcgcagcaagagagctggggagtcttcttgcagtcccttcctcctactcac

SEQ ID NO: 30427 - DNA, 122 bp, Homo sapiens
ttttgctattccggggaaggccacgcagggtgcaacccggacgcgcccccgggggaagcccgcgacgcagcagccacacccccagcctgcactggcgcccaccccatgacttcgccttcgcg

SEQ ID NO: 30428 - DNA, 122 bp, Homo sapiens
cgcgccccgaattcccactgggaggaacgcactggaattgaaatgtctgagatcaagccccgctgagaatcaagtcccagaggatcttctcggctggtggaaacgtggaggggaaaggcggt

SEQ ID NO: 30429 - DNA, 122 bp, Homo sapiens
cgccagggcgcgcaaacaggaagcccgagcccgggctgcaggcgttggcaccgcagcactcgactggcctctctctaaccgcaggtcctaactcagagcagcctccggcgcgggtggcgcgg

SEQ ID NO: 30430 - DNA, 122 bp, Homo sapiens
aagttcgattttctgtaggtcttactgagtaacttctgcattctcagaaagccgtgtatgcgcggactcccggtggatgttaccaatcacattcatagatctcagagctgatggctgccttt

SEQ ID NO: 30431 - DNA, 122 bp, Homo sapiens
gttcgctggctacagtgaggaggttttggatgtccggtttcttgggcccgaggactcccacgttgtcgtggcctccaatagcccctgcctaaaagtgtttgagctgcagacgtcagcctgcc

SEQ ID NO: 30432 - DNA, 122 bp, Homo sapiens
ggggcgggcgcggcgagcccctgccagatccggggatgataacgtgcctgctccatgtcgcggcttctagctgtccaggctccgccccctgtgagtgtgtaagtgtgtgatgctgccgcggc

SEQ ID NO: 30433 - DNA, 122 bp, Homo sapiens
cctgggcgaatgcgccgaggcgcgaccgagtgacggtatgtcaagagcaggttgatgacccgggagcgaggctcttggaggagtccagctggggctgcacgatgatccatgcacaaccttct

SEQ ID NO: 30434 - DNA, 122 bp, Homo sapiens
cggcttcctgatgggcctccggcacttggccagcgcagttaaatacccacggcaaacggccgtcccttcccgccacgcagaataaaaccagggaaaaccgctagcctcagaaacccactcgg

SEQ ID NO: 30435 - DNA, 122 bp, Homo sapiens
aatgcacacacacccatgtctacacatgtgcactcagctccagaacacaggatgtggccacgcatacccagcacctccccacacacaaatacccagcgtccttcccatacctgcatacccag

SEQ ID NO: 30436 - DNA, 122 bp, Homo sapiens
cctcttttccttcctctctgttctaggtctctggggtctgatcaataatgctggtgttcccggcgtgctggctcccactgactggctgacactagaggactacagagaacctattgaagtga

SEQ ID NO: 30437 - DNA, 122 bp, Homo sapiens
agcgcagacctgagaatgaataaaaatctttcctaagcactccaggatgctctgtgtacgcgtgtcagagacaatgcggaccggctcgaggggcctccgcgtcgtggcctcgtgccagcctc

SEQ ID NO: 30438 - DNA, 122 bp, Homo sapiens
ggaattccatcacaacacacgcgtgcgctcacacacaccttgtgagattgcccataacgacgccctggaagggcattgcctgaccgtgactgcagcccagccagtgaggctgacatgtgcag

SEQ ID NO: 30439 - DNA, 122 bp, Homo sapiens
agggaaaccggagaagcgggcggagctgagagcgggtgacaccccaggactccagagagccgaggtctggagcccgcaagagaaggtcgccgggaaagggaagagaggctggagagatcatt

SEQ ID NO: 30440 - DNA, 122 bp, Homo sapiens
tggatacttcataactcagctttattttgcttccgggagaattgagttctttatttttttcgatattgctgtttgtgtgtttttctgttgccgctctaacaaattaccacaagtttagcatc

SEQ ID NO: 30441 - DNA, 122 bp, Homo sapiens
acctgagaaaagggaccagagcaccgaggggcataagctggtggcgaggccagacgtggtcggggcccagcgagtgaaccctgctccgtcttcagttcaggatgtgacagtgactcggggcg

SEQ ID NO: 30442 - DNA, 122 bp, Homo sapiens
agtattgttatgtaaattaaataagttaacatgtgcaaagcactggaaacaccagggctacgtaagtgtttgttcaataaatagtttttcacagctcaaaacctcacagtagcataaaggac

SEQ ID NO: 30443 - DNA, 122 bp, Homo sapiens
agccgttgaaggaaaacaaaactttaaagctcactgagctaacttcaggtcttgctacatcgcatattcactggccataatgttattcatcctgaagtcacactaattatatattctccctg

SEQ ID NO: 30444 - DNA, 122 bp, Homo sapiens
gttctcattcccaatgggtgtcgggtttctagagaagccaatcagcgtcgccacgactcccgactataaagtccccatccggactcaagaagttctcaggactcagaggctgggatcatggt

SEQ ID NO: 30445 - DNA, 122 bp, Homo sapiens
ttgttctgtgtttgggacaggacagtgttctcccagtgcccaaattccaaggggggagttcgatggtcttgcccgagtggtgggactctcgtcctggtgggtcccgtgctagcggctcccct

SEQ ID NO: 30446 - DNA, 122 bp, Homo sapiens
gcgctccaagaaggtgaggctgctgggatgggtgactccgccgtcactgcaaacacgggacgtcccgtctactcccttacgcctgcttggtctgagcccgagtctacctcttctctaagtcg

SEQ ID NO: 30447 - DNA, 122 bp, Homo sapiens
tagatctttgaaccaccagctccaggagaaggcaactccagtcagaacagcagaaataagcgtgccgttcagggtccagaagaaacaggtatgttttgggcacagacacttttaggagtcag

SEQ ID NO: 30448 - DNA, 122 bp, Homo sapiens
ggcccccggaggccctcgggacgccgccgcaagggaccccgggaggggctgcccgcagcgcgcctgctcagaaacgcctgctcctgcgcgaccaaggctggtgacggacccctgggccggga

SEQ ID NO: 30449 - DNA, 122 bp, Homo sapiens
gcccctccttttctcccgtcttgcatcgcgcaggcctaaggagagtggataaatgtctcgcggccaatccaaggacgagaatgagagactgggaggtcctgaaagccaatcaatgcggggtt

SEQ ID NO: 30450 - DNA, 122 bp, Homo sapiens
agtctaaaatcactcattgcatttggttgccatctcccatttttttttcttctttcatttcgctggcctttttgaagacttcaggggagttgtttttcagaatctctattctgacattttca

SEQ ID NO: 30451 - DNA, 122 bp, Homo sapiens
agtctcagttaaccagaaggcagctgtctttatttagttacctaggtaaacagccagatacgctgtgtgaactctgtgacccagcctcctggggtacccatatgcattttctccagcaaaag

SEQ ID NO: 30452 - DNA, 122 bp, Homo sapiens
gaagaattccatcaaatatctggaaatgcctgccacctgcaaactttgtgtgaaatttcccgtacatttccactctcctttctggatcctggtttctacctctgtccctgactctcctttat

SEQ ID NO: 30453 - DNA, 122 bp, Homo sapiens
cccctgtccccgtctccagtgggagcaggcagcgtgggcatctgggagagccccgatgcccgcgagggtccctgggcttctggccgctcttcatttcgcaggggctccgccggccgcgcccg

SEQ ID NO: 30454 - DNA, 122 bp, Homo sapiens
ctcccttcccgaaccctccaagaacaaccgaggctgatccagatgtccttaaatggcttccgggtaaataaatatgcataaatgcctcacttcgtgtgggagcggatttgactcctggtgaa

SEQ ID NO: 30455 - DNA, 122 bp, Homo sapiens
agaaaccatcctccagaatgcctacacctcttcttcctttgtgggccaattctacaggggcgctaagtggccgacttgtggttccccagtgtgtctgggctgtttcctacacacttgtattc

SEQ ID NO: 30456 - DNA, 122 bp, Homo sapiens
cgagggccctatcccgtgccggcgcatgcgcagcggcagctacatcaaggccatgggcgacgaggacagcgacgagtccggcggcagccccaagccctcacccaagaccgcggcgcggcgcc

SEQ ID NO: 30457 - DNA, 122 bp, Homo sapiens
gtccctcggcaagaagttcgaagtgacctacgtgagcctgcagttctgctcgccgcggcccgagtccatggccatctacaagtccatggactacgggcgcacgtgggtgcccttccagttct

SEQ ID NO: 30458 - DNA, 122 bp, Homo sapiens
aggtctcagtagacatcaggatcaatgtcggtgttcttcttctgccagagtaaaccaaagcgagtgtgggcagaaaaggagtcataggaggtgattcatctctcaatgcatctgaaggagca

SEQ ID NO: 30459 - DNA, 122 bp, Homo sapiens
tttgtagcgctttaaacattattttaaagtttgtcattgcagaggtgttatttattgctacggaaactgagaaccaaggggcagaaagataacctggcagaactgggacaggcctaagaggc

SEQ ID NO: 30460 - DNA, 122 bp, Homo sapiens
tggctccaagggaaggggcaggggtccgctggtcggcgagggccgggggccccctggtgtcgggcctgggaacagccgggctaggccctcctgggtgtgttggcccaaggctctggccctga

SEQ ID NO: 30461 - DNA, 122 bp, Homo sapiens
ttctcctcccatccagccagcctttgaacacgcttcccacgtggcacaccccgtcttccccgcagcccttaatccgccgatcctccctggcgatctcagcgcccccaggggctgaccaggcc

SEQ ID NO: 30462 - DNA, 122 bp, Homo sapiens
tggatttgggggctgaatgcagatcttggtattgggagggtttgcatcacgtggcaggtgcgagcccagagagaccggcgcagggatcctgatcttgaaagattgggagagggcaggaggcc

SEQ ID NO: 30463 - DNA, 122 bp, Homo sapiens
ccagatcattactccccaggcagaggcattcagggaatgaaaggaagccacgctccacctcgcttctctgaccagctggtagtgaagattcccagggcccacaaaggtccctgccaaacctg

SEQ ID NO: 30464 - DNA, 122 bp, Homo sapiens
ttcttctgactctggaagggaaggaattccccctcacagccctcactgggggagagcctgcggtgacctgctctggagtgaatgggaaagcctcaggagcaggagtgactagccaggcagaa

SEQ ID NO: 30465 - DNA, 122 bp, Homo sapiens
ccaattttatcaccacctgtgcatttgctgacaaggatttcatcttgcttttccaagaaacgaacatgaggatataattggataaacttaattttcacaggctgttgcatttagtacatata

SEQ ID NO: 30466 - DNA, 122 bp, Homo sapiens
agaatgactgatcgccaatactagcacttggagatcagtttaacagccagaataggcaagcgatgccaggggtcagttatgaagctgagtcaacaactcaagaaactgttctaaattctaaa

SEQ ID NO: 30467 - DNA, 122 bp, Homo sapiens
tagcatcgggtggtagacggtggtggatggtgtgctagagacatccagggcttatggttccgaagtgactgtcctccataatgtcacccatcaatagaggctaggatataaaagtagatcat

SEQ ID NO: 30468 - DNA, 122 bp, Homo sapiens
ggcaggaccacggtctgcagtacgggcagacatgtaacatgaggacagaatgtcagctcccgtccacatacacacaaagtactggattctcctgagtctgcatccccaattccttcccctga

SEQ ID NO: 30469 - DNA, 122 bp, Homo sapiens
ctagaccaagactctcctttgttcccatttcagctagaatttactgcccattttcctcagcgtcttatctcagcacagcttctgcctgtcattggacaagtttgatctgagtttctctctca

SEQ ID NO: 30470 - DNA, 122 bp, Homo sapiens
aaccacagttgccacctcctcttccccatatccctgactccagaacagtcacgtgaacctcgtgggtttgagcgttcagaactcccttagaagctccccttgtcagcggggtaattatggaa

SEQ ID NO: 30471 - DNA, 122 bp, Homo sapiens
ttaaactgatatgggaaacgaggggatagacatgaccagccatatggagagtgactcatgcggcactgatgggaaaactgcaagtcatcacctcctctgctgcgctgagcttgccgcagaga

SEQ ID NO: 30472 - DNA, 122 bp, Homo sapiens
acctgtgagagagacaagtacctgatttggaagccccaacatctaaggatatacagtgggcggattccccttaagttccaggtatgtgttacactttctaacatgccatttagaaagtgtta

SEQ ID NO: 30473 - DNA, 122 bp, Homo sapiens
gggaggcatgatcataagcccatttcacagatggtgaaacggatcctagagagagagccacgcgcccagagccccagagccacacgctgaatttcaccaagcagcctcccacacgggctccc

SEQ ID NO: 30474 - DNA, 122 bp, Homo sapiens
cgatgccagggatggcccccaccttgttgtagtatctcagatgcactgtatgccattgcccgtcactcaagccccctggaactgtggggctgaccacggtgttggattcacctggaggggag

SEQ ID NO: 30475 - DNA, 122 bp, Homo sapiens
tgccctgagtgcctccgcggggatagtccccgtccccacccctgcttcccccgcccatcgcgacagatgctcagagctcatccctggtgtcacaccacataaaggaggagggcggtggccag

SEQ ID NO: 30476 - DNA, 122 bp, Homo sapiens
gggaggtaccgggatgccgagtacgccagagcaggcgggggatgggttccggcttcctgccgcctcggcatctcgctttgcaccgggcaaagaaggggccacgaccggcgaagagcgcgtgg

SEQ ID NO: 30477 - DNA, 122 bp, Homo sapiens
gctccccgcgcggctcggagattatgcaaatccccggcggctccttaattaaatccctaacgaggcgctggggccgggccaggggcggcgctgaaagccggggtcacgctccagaggggccc

SEQ ID NO: 30478 - DNA, 122 bp, Homo sapiens
ctaagatgaataaaggggcagtaaatgatcttcctgtgcatctggactgagaccactgggcgggtggatggggaaggcaggctggagggacacgaggagttgtgcaaagattcggaatgaga

SEQ ID NO: 30479 - DNA, 122 bp, Homo sapiens
gacctctcccgaatgccccccgatcctgagggcccagtcagggtcctgttgggaggggtgcgggggcttcgtcctcagcgtgttggggaggcgccgcggagcaccggctcctgcgcacccca

SEQ ID NO: 30480 - DNA, 122 bp, Homo sapiens
aatagttaatgaatgtcgtcatgtactgggccctgtgcacaggatgaggagaacaggtcccggccaccaaggagcttcctagtgggaaagtgacataccacaggtaacaacactacaatggg

SEQ ID NO: 30481 - DNA, 122 bp, Homo sapiens
gcggggccacgtctggcccctgacctggagagcatccgggcctggagagagcaggaggcacgcggctctcagccgatcccgaacccttaagcgcgctcaaaggccgatccctagagcagggg

SEQ ID NO: 30482 - DNA, 122 bp, Homo sapiens
cattatattccttatctacagtgggcattttcagtgctgccaacagtgcctatgaatctacgttctaaatgtcaggacctgccaagatttgttaattatcctaactccctctgctggcggat

SEQ ID NO: 30483 - DNA, 122 bp, Homo sapiens
gtgtctcagcgcagtgggcagctgggtgggtcccttgcactggagagtcccaggctccagcgcttacaggcacgcccagaggccctcacagcaggctggaagcccgttgctctgcagttacc

SEQ ID NO: 30484 - DNA, 122 bp, Homo sapiens
cgggaaggatggagagctgtcctgcttctctgttccccctccgccacgcgcgcacctgggcggagtgagtgcctacagagcctgcttacatgtgtacattgccttaagtccagcgtttagta

SEQ ID NO: 30485 - DNA, 122 bp, Homo sapiens
ggcggcgcccctgcaggacgcggagctggccctggccggcatcaacatgctgctcaacaacggcttcagggagtcggaccagcttttcaaacaatacaggtgacccacgcgtccccgattcc

SEQ ID NO: 30486 - DNA, 122 bp, Homo sapiens
gacacagtccaactccatcctcaccaggtcactggctggaacccctgggggccaccattgcgggaatcagcctttgaaacgatggccaacagcagctaataataaaccagtaatttgggata

SEQ ID NO: 30487 - DNA, 122 bp, Homo sapiens
tcgaaggatcgtgaaattccacgaagtccgcttgctttcctgggtgaataaacaccaggccgctccctggactttccttgtcgtttgtgatcaaaggctcagctacctcgtgctcatggtcc

SEQ ID NO: 30488 - DNA, 122 bp, Homo sapiens
gtatagccaccgcctgggtgtagactcctgcaaaataattcacttccggtttccagatctcgcgagagagggaccgggaaggtcaaacctaattctgggatcccagggaacttattttcttt

SEQ ID NO: 30489 - DNA, 122 bp, Homo sapiens
tcccaatccaagttctgcctactgggctccagccttcctcagaaagacacttctgaaggccgactgctcggttcttcgaagtagctcagccagacctgacgacaccactggcctgcgggtag

SEQ ID NO: 30490 - DNA, 122 bp, Homo sapiens
gaatacttccaagggatcccagctgatgcaacatggaatataaggaaacccagccaatttcgttccaaattcttggcccacaacatgtgagatacaataaggtttgtgttcatttaagccat

SEQ ID NO: 30491 - DNA, 122 bp, Homo sapiens
cccaaaggcagcacacacttctccactccaaggagggtggctgccactaaacacaatgggcggagacagctcaacaatagtgccagttgagcacatcttgatccactgccacagagttcaca

SEQ ID NO: 30492 - DNA, 122 bp, Homo sapiens
cagaaagaaatctctctctgttctgcaaggtactttgtgcttatatgtgtgttgggtccccgcagacctgaaccagaatgtgggtagaattcacccctggcaaaaagagctcctctcttgta

SEQ ID NO: 30493 - DNA, 122 bp, Homo sapiens
ccgaacttgggggcacgatcttgtctgtgcagtcatctgcgggattctggttcctagaggcgcccctgcgatgggggccgggacgcggagcctcagggtcggagttcgggctacgcgggcgc

SEQ ID NO: 30494 - DNA, 122 bp, Homo sapiens
ccgcgccctgtgagcgcgtccccgggtccgccgcgtcccttcccttcttacgcaccgacacggttttgtggtgtggacccaagacacaattgcagtcccttgcttgcacgaatgcaatccga

SEQ ID NO: 30495 - DNA, 122 bp, Homo sapiens
gaaagccagcatttcccttggaaataagaagtcacgtgtggggagatgctgcttcgcatccgtctgatgggaatccctctggttcagcacccatccgtggtcgcccggcgcgccgttcctgt

SEQ ID NO: 30496 - DNA, 122 bp, Homo sapiens
tgggactgtggtgacttctgctgctggccccgcccctgcccccagagcgtccttggctgccgtctggccgggctctcatggtacttcctctgtgaactgtgtgtgaatctgcttttcctctg

SEQ ID NO: 30497 - DNA, 122 bp, Homo sapiens
cccaaactgaaacattccagttgtccaaggtaaatcttagctactgaccggctaatttttcgagtaacgaaattagctcctaaaaagaggcaaaagatgtagtatcagtcaagtgcacttga

SEQ ID NO: 30498 - DNA, 122 bp, Homo sapiens
taggtctccaaattggctttgaacccaaaaccacttaaaaacaagtatgttcacagttaacggcaattggcttataggtgagagaatggtcgaagttgttccagttgaacttccagggaaat

SEQ ID NO: 30499 - DNA, 122 bp, Homo sapiens
tctgtaaacgccaaactgtctctttgttctcttcattttacacttagggctatgtttcctcgtctgtaaactgttcattgtaataaagtctgtttcctctaaattccttttcagagaacttt

SEQ ID NO: 30500 - DNA, 122 bp, Homo sapiens
gctccaagttttctgcgccctcgcctcgtcccgagtgcccgcgaatcccccggacgcccacgcagaccacccagccacaccacaactctgcctgcggagagaggagaggagaaaaaggggcc

SEQ ID NO: 30501 - DNA, 122 bp, Homo sapiens
tgctttttgttgttgttaaccctcctcggatttctcgaatttcacaccactgtccatatgcgatgatgtttgtttgcccttgacgcacttactcatggatggtacttcagcctcgttagaca

SEQ ID NO: 30502 - DNA, 122 bp, Homo sapiens
catcggggccggggtgtccgcggttcatggcaacggggacgggaaagcggcgcgcgagctcggcccccccagcctcagtcggaatctgccatcttgagcctgtgtctccgctctcggcgcag

SEQ ID NO: 30503 - DNA, 122 bp, Homo sapiens
tcagcactagacggactccgccccgcggaagtgcgcgcccctcccgctggagaaggagggcgaaagcaggcgcaccctcccaagctctgtcaagcgtcgccctagatttgcgcgtgcgcgtt

SEQ ID NO: 30504 - DNA, 122 bp, Homo sapiens
ttggtaaacagtgtgtgtttaatccagcctctgcctctgactacctttaagaccaggactcgaagcagagtgagaggcctccctccacccacctcggggcgagtgaagacacagcttacaga

SEQ ID NO: 30505 - DNA, 122 bp, Homo sapiens
tattttggtaaaagcaacctggattctcactttttaactagaagaagaaagttgtcagcacgagtgttacagatgtgattcctttagaccgaagtgctgctcatgttaattattgggagcaa

SEQ ID NO: 30506 - DNA, 122 bp, Homo sapiens
gccaatccttcctgtatccctcctacagataccgggtgactactgcttttgcgcccaaagcgcagtgctctggctcagctccctacagtagcgacctccaccgcagattctcatctcctcgc

SEQ ID NO: 30507 - DNA, 122 bp, Homo sapiens
tgggggtccgcatcactgcatctggccccggggccccacagcccctgcctctccacatcccgggccggacagcatcctcctgagtccactcaaccctgaacctatgaaactgctagaagtaa

SEQ ID NO: 30508 - DNA, 122 bp, Homo sapiens
ggaagcccgagtccctggttcgcccccggagcggttacttcagcgagctcgttgcgcgagcgttttgcaagaagggggcccaaaaaagttgtacgtgttcttttttagtcgcgtgtgggtgc

SEQ ID NO: 30509 - DNA, 122 bp, Homo sapiens
cgcctgggtcggcttccgtggcctgggggtaagctctgattcaccccaaggtgaggtccccggggatgcccagattcgggccgggaaacgcaccgggagagaaccaccaagcgctcttggtt

SEQ ID NO: 30510 - DNA, 122 bp, Homo sapiens
agcctatactcacgcccttaaaaagggtgttaatactggactcagaactttaaagaaaaacgcactgatctcattcattgaagttattttttgtatgcagaataaaattgtgtgaataaaat

SEQ ID NO: 30511 - DNA, 122 bp, Homo sapiens
atggggaggacagcgggtgaaggaccagcctgaggataccccaacctcaacccgggcctgcgctggaggagccccagctctgtgcccacgtggcggtgcctggagattaaaaggacaacaaa

SEQ ID NO: 30512 - DNA, 122 bp, Homo sapiens
tttagcccaccagtatattcccttatcaaaacagacttttaaaaaattcatcctgatatccgttgcactgtacttgacacatatatttaacaattacttgattatgactgagtcaggagcct

SEQ ID NO: 30513 - DNA, 122 bp, Homo sapiens
tggcaggctggtacctgttaagatgccaacataggtggtttgttcatgcaacctgaaagtcggctctgcgctcctccatgtgggggctggagtagctacctggcccttgtcctggccctggg

SEQ ID NO: 30514 - DNA, 122 bp, Homo sapiens
agggtgaaagtcctagttggcatctacttccaatagaagactattttgttgggcaggcgccgtggttcacgcctataatcctaggaattagaaaccagacggggcaacatggtgaaaccccg

SEQ ID NO: 30515 - DNA, 122 bp, Homo sapiens
cctgacaggagtttctgtggaaaaagcctacccacttcttactgtggtggtggctcacttcgtgttcaggtcttgaatagagaaatcaccggccagctacctggaggcaggaggtgccagcc

SEQ ID NO: 30516 - DNA, 122 bp, Homo sapiens
ctactcattccggcaaccccagcctctgagtcccacatccaagtcccatatccacacatccggatcaatctctacaatgcactaggcctgcaggaggccaaagctggcaggatgggctggca

SEQ ID NO: 30517 - DNA, 122 bp, Homo sapiens
ggctgcagattgcgctgggccatggtaaccaccacgccggcccgagggcgctatacagtgcgacaccagactccaggtctgctgggggcctgtgcccaggggagaggctcctttccatgttc

SEQ ID NO: 30518 - DNA, 122 bp, Homo sapiens
agcgggtgagaagtcggcgggggcgcggatcgaccggggtgtcccccaggctccgcgtcgcggtccccgctcgccctcccgcccgcccaccgggcaccccagccgcgcagaaggcggaagcc

SEQ ID NO: 30519 - DNA, 122 bp, Homo sapiens
acaacaggctagtagcctaaaggtggcctgcagtaggtgaattccacctaatttacaactcgagtctcccattcaaacctaagactgttaaaaaatgcccgactccctggagcagggagctt

SEQ ID NO: 30520 - DNA, 122 bp, Homo sapiens
ccggtgttgcttgaatagccttgtgtgctctccgtacattccagcaataacttgagtgtgcggtggaagtgggtatgaaggttacagacacctaagccctcctcggtaattcatagactcac

SEQ ID NO: 30521 - DNA, 122 bp, Homo sapiens
ttggcccacccccgtcccgccgcgtgctgcgcaggcgcgttttacctaaccaccattttccgtcaagttttagccaatgagttgatttggagccatacgctccaaagtccaatagcaatccg

SEQ ID NO: 30522 - DNA, 122 bp, Homo sapiens
cctgcggaagcgaagactgacaagcactctgtccgcgcgctgagtgggggctcgcggcaccgggtgctccgcccaggccccagcacactcactcaccagcctggtagctcggtacggcccgg

SEQ ID NO: 30523 - DNA, 122 bp, Homo sapiens
ccccagttctgactcttggcctctgtgtgtctctgggtttctttgtctccctcctctccacggtcctcttgtccttttgtcttccctttcttgtttcttgaatctctttgcctttatgtatc

SEQ ID NO: 30524 - DNA, 122 bp, Homo sapiens
gcatctcgatatctccggttaagcctgggagaagaaaagaccttttgtgggaggccctggcgttatggggctcccccaggccagcgtaaaactcatccctgcacacccacccccatctccac

SEQ ID NO: 30525 - DNA, 122 bp, Homo sapiens
caacctcatcgagcaccagcgcacgcaccgcggcgagaagccctacgcctgcggccagtgcgccaaggccttcaagggcgtctcgcagctcatccaccaccagcgcagccacagcggcgagc

SEQ ID NO: 30526 - DNA, 122 bp, Homo sapiens
gagcgcaggcggctggcaggcagggttgcccggctactacgtttcttaggacggcccccgcgggacttggcagctctcctggagccctgctcggtctgaatcaccggcctcgtccagacctg

SEQ ID NO: 30527 - DNA, 122 bp, Homo sapiens
agcccccgtccccgctgcacggccgccgccccccgcgcccgggccgcggccccgcgtggccgtgaagatggccttccgcaaggcctactccatcaaggacaagctgcaggccatcgagcgcg

SEQ ID NO: 30528 - DNA, 122 bp, Homo sapiens
aatgggcaggtcagtcaactttcctgcaggctgctgctgactcatggctgctcagcaggacggcctgcggccctcacaccccacaccccgcaagctctcccgccttctccagctcgagcacc

SEQ ID NO: 30529 - DNA, 122 bp, Homo sapiens
aagctcttaccaggggcgacgatggctccctcggggctgagcttggcgggacccagggctcgggcacacgtgcttggagtgctgcctccccagggacggcgtctgcagcgacagggtcggga

SEQ ID NO: 30530 - DNA, 122 bp, Homo sapiens
gcggaagagaacaggaagtgaaggccccatgggaagtccctgcggtcgggagcacccaggcggggcggggggtggggggctttcctgtggccggctccctgcccctcccacccccattcagg

SEQ ID NO: 30531 - DNA, 122 bp, Homo sapiens
aaaaaaaatcaggacactgacagcacgtgctccagcacggggcagggcctccatggggtccgcgcccacgcggggcagcgcggtgacgtcacggctgaggaccccgccccacgaagggctca

SEQ ID NO: 30532 - DNA, 122 bp, Homo sapiens
ctccctgtccttatattttaagaaaggatgattacagaagtgacaattataaatcttcctcgggcagacaagacactcccataatgataatagctaacccttaggactcttactatgggtca

SEQ ID NO: 30533 - DNA, 122 bp, Homo sapiens
ccattgtcatgtaaaattagcctgggcaaaaccccagagaacatagcattggatgccatccggctcaccctgaacaagggcatgtgagagataaagactgttccagcgcctgcttttggtca

SEQ ID NO: 30534 - DNA, 122 bp, Homo sapiens
ggtctgcagcctgggagtgcagcacagggcatgtgggggctgagggcctcaggggcactgcggggctccgcctggctgggagggtctcgggcactgcggggctctgcctggctgggagggac

SEQ ID NO: 30535 - DNA, 122 bp, Homo sapiens
ggatggggagcggaggatgggacgctcccgcagggcgctctggggttgggggttcccccccgtctacatcggggtcggggtgcagaggggggcttggacgcctccgcacgtccaggacgggg

SEQ ID NO: 30536 - DNA, 122 bp, Homo sapiens
agactcggagtgcatatatagcaacttggagaaagtcgcaagggacgaaggacccttccccggacacaggaaccttctgggggatggggacagggactcaggtgcagagaaaaccagagctg

SEQ ID NO: 30537 - DNA, 122 bp, Homo sapiens
ggaagcgagttgtagatctagccttgtgttcacacgacaccaggctggatatgagtcactcgcagggagctcagcttggtgaggtcctctcgctgttgtggccttttctcctgcacgttgga

SEQ ID NO: 30538 - DNA, 122 bp, Homo sapiens
cccacggcctcgtgctcccggtgtcccatgtcaggaagacggccagccctggtagctggccgggaggagaacaggaccctcgtgcccaggggaccagccctcgtaaagagccagccctctgg

SEQ ID NO: 30539 - DNA, 122 bp, Homo sapiens
gagaacctcagcgcgttccctctagacttaaatcttaaaccacaaaaatgtggagttttgcggggacgtgttgcgagctgtcctgactgcacgggcgacccctcccctcctcttgcacgccc

SEQ ID NO: 30540 - DNA, 122 bp, Homo sapiens
tcctggagcgaggtctccttgctcagtgtggcaaggggcaaaggtgcccccagacagtgccgtcttaatgcaccaagggagataaccccctgggctgggacacaccttgctgactttccatg

SEQ ID NO: 30541 - DNA, 122 bp, Homo sapiens
cagtgcgaaaggctgccagcatgtcatcagtgagccccatccagatccccagtcgcctcccgctgctgctcacccacgagggcgtcctgctgcccggctccaccatgcgcaccagcgtggac

SEQ ID NO: 30542 - DNA, 122 bp, Homo sapiens
cccccggcggcgccatcatactctggactgggtcccctggctgcaccgtcacactctagccggattacccagtggcaccatcacactctgggctgggtcccctggccacaccgtcacactct

SEQ ID NO: 30543 - DNA, 122 bp, Homo sapiens
cagggctggggtatgcctcgcttcaggtagatatgctacactgaacacccctgaggcagccgtgttggcaatgctcatctgaggaaaaaaaatggacagccctttcttgtttgacagctttt

SEQ ID NO: 30544 - DNA, 122 bp, Homo sapiens
tcagacaaggcctaatggtgaccggggcctgtggtcactccagaagagggatgaggatgacgtgcccactgtgccgtcgactctgggcgaggagcgcctctacaaccccttcctgcgggtgg

SEQ ID NO: 30545 - DNA, 122 bp, Homo sapiens
ggggacagagcctgggtaaatgaagctttccggctcgaccgctcccaacctgggcacacacgtcctcctgtcctgcaaggggcagttttggggcatcctccctgcttggggcaacccagggg

SEQ ID NO: 30546 - DNA, 122 bp, Homo sapiens
aaaagtacagaccaatatttctcataaacatggctctaaaaatacctgacaaaattttagcgaatgatccagcaattcataagaagaaaaacacatcataaccaagtaggtttatggaatgc

SEQ ID NO: 30547 - DNA, 122 bp, Homo sapiens
ggggaaggtgaccaggccctctggcgggaggggaggttgggtcccagtctggccgcaagccgggccgtgggagggagacaagctgtggatcctgattataaatgcagcttctgctacccccg

SEQ ID NO: 30548 - DNA, 122 bp, Homo sapiens
tggctgaacattctacacaatgcagaagatacaagtctttttttctaataatctatgtttcgtaagcataatacaattcaaccataaaagatacctcaatcaacactacagccagacttact

SEQ ID NO: 30549 - DNA, 122 bp, Homo sapiens
acacattggtgcctccaggctgggatgacatcaaaggttctagctacagtggttctgggacgcgatctcttcctcttcatacctcacagggcactttaccactgtcgttacacatcttcaca

SEQ ID NO: 30550 - DNA, 122 bp, Homo sapiens
cgggcgcgagcgcacctccgcgcctttgcgcagagaccttcccccaagattggctcacgacgcctcctaccccgaagtcaagggctccctgtggcaaatcctcacacgccctcctcctcccc

SEQ ID NO: 30551 - DNA, 122 bp, Homo sapiens
ctttcccttgtcctatgctgtgtccaggactgctagataagtaggtacccagcatcctagcgtccagatatcaaaaccatgaaaatgaagcactacaagccagacagataacctccagaggg

SEQ ID NO: 30552 - DNA, 122 bp, Homo sapiens
aatagctttatcctctgtcagaacacaaacaaacaaactttgagaggggaggaaggaaaccgtctagctcagggctcacttaggagagggatgagattagaaagttcaacacactgcttgtg

SEQ ID NO: 30553 - DNA, 122 bp, Homo sapiens
tctaatacacattcttctggaggcagatgcagtgtagacaatgaggcagcactataaacacgtctccatgataatcaccattcattgcttttgctcactcaggtgggactgaaaatacgtgg

SEQ ID NO: 30554 - DNA, 122 bp, Homo sapiens
acgcgcagtatgttgggccctaccggctggagaagacgctgggcaaggggcagacaggtgcgtgcggccggggcggggaccggggccggggaggccgcgctggcagcgcgctgggtgggggg

SEQ ID NO: 30555 - DNA, 122 bp, Homo sapiens
cacaaaagaagagtttgtccacagtggcctgttagtgccatgagttcctccccactctctcgcagtttctctctgatcccccactcccggggagaagggcttgagacactcgctaagaaaat

SEQ ID NO: 30556 - DNA, 122 bp, Homo sapiens
ggcggccccggcgaacccccgcgccgcacaggccgtgtgcgccggatcccggtgcctccgcgccagctgagacctgcctttcccaggggcggctttgctccggcccctaggcccccgccctg

SEQ ID NO: 30557 - DNA, 122 bp, Homo sapiens
tggccgaggtccggggccctgcccactgcctgctgctgggggaacgggtggccctcaacacgctggcccgctgcagtggcattgccagtgctgccgccgctgcagtggaggccgccaggggg

SEQ ID NO: 30558 - DNA, 122 bp, Homo sapiens
acgaaggcacctgggggagtagatatatgtttttgagaatgagaggagtaaatcgctggacgaccatgagcaggaagaaaattaggcctccacctcccaaccagtggccctgagttggcaac

SEQ ID NO: 30559 - DNA, 122 bp, Homo sapiens
ctgccaagcgccccaagttgccgccgcgccccgcagcggggacgcgaagccggcgcggggcgggtgtatttacctgccgccaagaccttcattatgggctgcacttcagagggccttggagg

SEQ ID NO: 30560 - DNA, 122 bp, Homo sapiens
gatcccggaggtgtcttgtttgtgcctgctgtatagcacagggcccggcacagagcgactcgatgggtatttggggaatgagttaatgctggaggagctaattccggtgtcttggtgcggag

SEQ ID NO: 30561 - DNA, 122 bp, Homo sapiens
tgtctccagctttaagaccacgacatcgagagctgcctgccagctcgtgaaggagtacatcggccaccgggacggcatctgggatgtcagcgtggccaagacacagccagtggtgctcggga

SEQ ID NO: 30562 - DNA, 122 bp, Homo sapiens
cgtgttcctgcaggcgctcggggctcggcctggagctggcggccggcacgtcgcctttggcgccctctgccaaccaagagaaacacggttaaatgagtgcgctgggacagaaatccacagct

SEQ ID NO: 30563 - DNA, 122 bp, Homo sapiens
tcctctagggaaatgtttcctgggtcattaactctcaaatgtccaaattctgttttcctccgtgagcctctgtagcccctctgcttttccagtcctgcctgccttttggccttttttcttct

SEQ ID NO: 30564 - DNA, 122 bp, Homo sapiens
cttggaccagtggctaaagctcttgccacactcgttgcagatgtagggggcgggcggccgcggccggggaggcgggccggctgggggcgcagactggggcggggacagcttggtgggaggcc

SEQ ID NO: 30565 - DNA, 122 bp, Homo sapiens
tatgcccacttcctggaagtttggaggcacgggaactacattgcccaaaaggcgcagcgccgcgaggcggcgatccctgaccaatgaaaagaggtctgcccgagcgtgcgacacgcaatggg

SEQ ID NO: 30566 - DNA, 122 bp, Homo sapiens
atgcagactccaggggacatgcaggtagagtagagcaggggtgagcagatggccacatagcgatcataggccatggcagccagcaggaagcactcggccgtaccaaacgtcactacagaaca

SEQ ID NO: 30567 - DNA, 122 bp, Homo sapiens
tgcgcatgcgcggcgtcagggtcgggcggaagttgacgccgccgtgccgccgccgcgtgacgcatttcctgtttgttgttggagaaaggagagaaaggaaagcgcgaggagccgccgccacc

SEQ ID NO: 30568 - DNA, 122 bp, Homo sapiens
gcgggagtgcagaaagcgggctaacatcctgtgttgctatcccttcggagtcccacacggcggtgagtctaggcccaggcgctgatttacaccagctacttgggctggtcgggttttccctt

SEQ ID NO: 30569 - DNA, 122 bp, Homo sapiens
tccaggtgaatgagtggcaggatgactggccgacctttttcgcccggcaccggctccaggcgcagctggacctcattgagaaggactatgctgaccgagaggcacgagaactctggtcccgg

SEQ ID NO: 30570 - DNA, 122 bp, Homo sapiens
ctcgggagcatccgtctgagagtttcagcccactccagccaaggaaattaataacaataacgattgttcttgtcgttataattgtcacaataagggctgacagttatgaggtctttattatg

SEQ ID NO: 30571 - DNA, 122 bp, Homo sapiens
ggaaagagcagagggagagcgggtaggcggctgtgtgactctagtcttggccccaggaagcgaaggaacaaaagaaactggaaaggaagatgctttaggaacatgttttgcttttttaaaat

SEQ ID NO: 30572 - DNA, 122 bp, Homo sapiens
catactcaatattgtccactttgattgctttcatttatcagcatcttggaaatcacttcacgttggcatgtaagaagcgtcctcgttttttttgtatagctaaaaaaattcattaagatgca

SEQ ID NO: 30573 - DNA, 122 bp, Homo sapiens
gcgccccgcagctctgtaggccctgaagctcgggctaggagagtggtccgcaggtggtaccgcacgggaagggacggatgcgcggccgagctggcccgaactgcctcccacgcccctcgggg

SEQ ID NO: 30574 - DNA, 122 bp, Homo sapiens
gccctctgcaagcccctcctctttccagcctagtccccgcccctcatgcctgggctgacccgggcacagtgttatccacagcacgccaggaacccacagcacaaggctgatcttaaatgatg

SEQ ID NO: 30575 - DNA, 122 bp, Homo sapiens
ggagtgagtcagagggcggcggcaggggggcggacagaccgcaggtggaggggaggagaacgtagacattgacaggggatgggggaccaaggggactatttgtccctttccgggaggagccg

SEQ ID NO: 30576 - DNA, 122 bp, Homo sapiens
ggaggcggtggtcaggggcccaagctcagaggcgggtagcggcctggaggtcggtgggggcgggggacgcggcctgggggcccagagtctcgcccgggcccggtaagggcagtgcgatttcg

SEQ ID NO: 30577 - DNA, 122 bp, Homo sapiens
ggactggaaggctcaggggcaggcggtgaggcctctggcagcgaggagcccacacagttacgctcaggggctgagctcgaaccggctccttccagtttctccggtggcaccgccgcgggact

SEQ ID NO: 30578 - DNA, 122 bp, Homo sapiens
cgggcccgggcgggggaaccagagctgccacaggtcgcccgcgatcctggcgggcttcgccgcgctgggtccccgggagtgcctggaaaaaaacagcattactttcaactccctactctttt

SEQ ID NO: 30579 - DNA, 122 bp, Homo sapiens
acatgctcgtcctctctcctgcttcctaggcccagccccatggcaggaggcgcttgctgtcgctccaggtttggacaccccagagtgcagagggagaagtgatgaaacccgccagtgttcac

SEQ ID NO: 30580 - DNA, 122 bp, Homo sapiens
tttgtgccttttaaaataaaaacaacaacaaagaatcaaaacagagatgtctaaactgcgcgaagaatggaaccctcaatatacagtccatccaccatacaggatgtgagtccagttcggat

SEQ ID NO: 30581 - DNA, 122 bp, Homo sapiens
ctccctaagggcccctggcttagaatatgtgtgagtggcaacccagtccctcaacccctgcgcggggagccggggcagagcgaactgctgtaactttcgcacgccgccaccagagggcggcg

SEQ ID NO: 30582 - DNA, 122 bp, Homo sapiens
caaggactagtagcaacacacccatgtacaggcaaatggacatttcctccgactttcatacggctcatttttaaaaaacataagccatgtacctagcacatggtcaactcacactaaccctt

SEQ ID NO: 30583 - DNA, 122 bp, Homo sapiens
tggccattttcttggattcctcagcctctatcacagtggctgacatgtgatatgtcatcacgaagaaatattaacaaatgactagagaatatctgcaaaccttctatcttcaaattaaatat

SEQ ID NO: 30584 - DNA, 122 bp, Homo sapiens
cgtatcctcccctgttcctctgcaccgagctcctggctgccgctgcggccgctgtgtgcccgaggggcggctctgtaacccggctccaggcatttcttaggtttcccatccccgccctccaa

SEQ ID NO: 30585 - DNA, 122 bp, Homo sapiens
agatatggaaactgaatgagggattgtgatttttcattgcagcatctgatatcagccttccgttcaccagtccttgaattatctgtgtgcacaatcaaccagtaccctaattgtctgctaat

SEQ ID NO: 30586 - DNA, 122 bp, Homo sapiens
acactggttttacatttcccaggactggaggcttcctgccccatctccaacaacccattgcgtctcctggacttgggtacatctacctgaactacttgagaggaaagactactagatacttc

SEQ ID NO: 30587 - DNA, 122 bp, Homo sapiens
caccccaccgccgcagcgcccgctgggcccgcagcgggtctccccaggcagcgtcctccacgcctttcccacaatgctccgcgccaggccccgccccggctcgccgtggagaccggcgcgtg

SEQ ID NO: 30588 - DNA, 122 bp, Homo sapiens
cgccttctccgcctccctttctcctcgcgtcacccgcaccagcggctgggatgcggcgcgcgttccgtctttccgtatggaaacatggcgcctaggggcgggccatccccagcttcgagcca

SEQ ID NO: 30589 - DNA, 122 bp, Homo sapiens
gcccgcgtcccattgcgccgaaagctggctggcagggactgctgcgcccgggcctcgagccggctacaaggtctcagactcaagtggcccggaaggtgcccgttccgcaccccgaggctggg

SEQ ID NO: 30590 - DNA, 122 bp, Homo sapiens
cgggctggccgggccccagccggggctttgggagtcagaggagccggaagaatgcatggccggcggcggggccggcggaagaaggcggtggcggggccctgccccgctccggctgtggcgcg

SEQ ID NO: 30591 - DNA, 122 bp, Homo sapiens
aaagggaagaaagacctggtttctggcaaagaaaccacattggccaggagctgtggctcacgcctgtaatcccaacactttgggaggccaaggtgggaggattgcttgagcccaggagtttg

SEQ ID NO: 30592 - DNA, 122 bp, Homo sapiens
ttgttctaaaaagcgctggtttcttggcagagctgaaccaggcttggtgtgtaaaccacgcgtgccacacctgggagacgcacgcccatgcccgccaaggattcagagagctgcagatttcc

SEQ ID NO: 30593 - DNA, 122 bp, Homo sapiens
tgacaggcaccgcaataacaggagctcagggtgccttgggagctctcagtccaggttttgcgggtcaggcaaggcttcccagaggaaggatgaggaagagagaggctggaaaggagggagag

SEQ ID NO: 30594 - DNA, 122 bp, Homo sapiens
atcgggcgctgtttgtgtctaacccgaatgccaagcttcccagatggcagcttgcagcatcggggtgcgtgcgcaggaaacgggaggccaagctgtccagccctccctcaaaagccggggtc

SEQ ID NO: 30595 - DNA, 122 bp, Homo sapiens
gtgcacgccctggcaggtcgggccagttgctggtgagcttatgaagtgtggtctcctccccggagctcatgtgcgcttcccacctggtgagctcagggtctctctggagggatcctgcctcc

SEQ ID NO: 30596 - DNA, 122 bp, Homo sapiens
gttctgagcaaatttcgagtcactgacaaggcggcggtatccagcagagggcgcgccaggcgccagcaccaggcccgaggacgcctggctcatccccaggccggcttccgagagccccgcta

SEQ ID NO: 30597 - DNA, 122 bp, Homo sapiens
gaagcacgtcccggccttgctggctggggagttgcaggggtctggtctcgcgggtaaagccggtgaacgcgaggctccgcatcctgccccggccgcggcgctgcgccctgctcgctctgccc

SEQ ID NO: 30598 - DNA, 122 bp, Homo sapiens
cgtccaccctccgcagacccgaggcccgctccgcccggccccaccgttccctccgacgcccgagtgctcagagctcgccgccagcccttcctataggttgtgggtgcacccgcttcgcctcc

SEQ ID NO: 30599 - DNA, 122 bp, Homo sapiens
atcagccccctcccgggcggagagcgcttcccgtacccttctttccactgggaccccatccgggaccccttgagggatccttaccgagaacttgacattcaccggagagacccgctgggcag

SEQ ID NO: 30600 - DNA, 122 bp, Homo sapiens
ggggggtcctccagccaggagacccccgccagggccaccctgcacacatacaaggaggaccggggaccgcgcggcatgccttccagacgctactagagctcacactcaggagccaaggggcc

SEQ ID NO: 30601 - DNA, 122 bp, Homo sapiens
ttccacaggcaccagtttgtagaaaataatttaatactaaagatgggcccagtggataagcggaaggtgagtggtcagtggtcccgctgctccgcacggacacctgcatcttccccgactcc

SEQ ID NO: 30602 - DNA, 122 bp, Homo sapiens
gagaagatgggaaagtcatcctggatgatggcttcagggccttggccagatccttgaggtcgatgcgacttagacatacatagtcaaggaggaggcacaaacaaaatgtttaagttctcaga

SEQ ID NO: 30603 - DNA, 122 bp, Homo sapiens
gatccctttccataagcaccttgagagcaaattcacaagccatccatttgcagggaccttcgcaatctgcattcattttatatatatatatatactttttctataaatgcattataaatatt

SEQ ID NO: 30604 - DNA, 122 bp, Homo sapiens
ggcagcgactaggggtagctgaaacctcagtccaggcactgccgcatgccccgcccctcccggccaaggactataccagcccagagaattagtctttttcaggacccctttcaccctggtcc

SEQ ID NO: 30605 - DNA, 122 bp, Homo sapiens
aagcaaaccccaccaaaccaacacctagtctagagcctgatcaaagtgccactcaaagcacgattcctccctttactttcctataacccgagaattcttcctgaaaaaggtggcccctgaga

SEQ ID NO: 30606 - DNA, 122 bp, Homo sapiens
cccccttgagtttcctgcaggaacaagcaagggtgcctgcggcctgctgacgcaggctggcggggagtggcttgccttaggcctgtctccttgtctctcacagctggctctccagggccggt

SEQ ID NO: 30607 - DNA, 122 bp, Homo sapiens
ttcctatcctttatgtgtcaaactttgcaggacacagtgctccttttcaaagttagcaggcgctttagtaggggatcaggagacgtccccggaccgaatcctcgagatctgaagagaatcga

SEQ ID NO: 30608 - DNA, 122 bp, Homo sapiens
gagctaggcagcaaagaaaaaagactactaactatagccaaataaagttaataggctacacggtctgtgcaggagtgtctaaaattaggtttcctattttgtaagagatagggttcctcatc

SEQ ID NO: 30609 - DNA, 122 bp, Homo sapiens
taagctctctaaggcgatcagtgaatggcagtgtaagtaaagtagtttaggaggaaagaccgatttggagagtccagagtgaaggctgttgacagtccaggcaagaaagagagtatagagtc

SEQ ID NO: 30610 - DNA, 122 bp, Homo sapiens
caacagatcctcctctgcctgcgcaggcgtaacttcctcgccatatcacccctccccccacgacacattttcctgctgttgagaccagctgggctgtattagtcatgctgaagcacgtcatg

SEQ ID NO: 30611 - DNA, 122 bp, Homo sapiens
tccatcggggggatcttggcttcccgctgtctgcacgtggacctgctgcacagcatcctgcggtcacccatgagcttctttgagcggacccccagtgggaacctggtgaaccgcttctccaa

SEQ ID NO: 30612 - DNA, 122 bp, Homo sapiens
gcgtgaaatgtagggtcccgccctacggggcttgacgggtgttctccccgtgtgtggagacgagagagagatcgtacgaaataaagacacaggacaaagagataaagagaaaacagctgggc

SEQ ID NO: 30613 - DNA, 122 bp, Homo sapiens
tgatcactgcggttcaaatcctggcttcatcacttattaggtgagtgatcgtgagaagatcgttctgtgcctatctgtgcctgttttctctattaaaatagggatgatagtaatagtaccta

SEQ ID NO: 30614 - DNA, 122 bp, Homo sapiens
taccgcgatcacctgtggccctcctgtgttctttacctggactcttgcctttgctgatggcgacctgtgacggctcagctgcgttctcagaggccggctgtcctcgtgggcgtctccggtgc

SEQ ID NO: 30615 - DNA, 122 bp, Homo sapiens
gtcgtgatagaaacttaaatcgggggttgcgctgggtggtccctgctgtgcctgctattgcgctcctggcttcttaagaacattctcaaggggctcctaccgcggtggtttttatgtaagat

SEQ ID NO: 30616 - DNA, 122 bp, Homo sapiens
gaaatagaatgaagccacatatgtaatgttacatactcaagtagcctcattaaaaataagcgggtgaaattaattttaatacatttcatttaacccaatacatgcaaaatacaattaggaca

SEQ ID NO: 30617 - DNA, 122 bp, Homo sapiens
tctggaggctggacgtgcaagatgaaggtgccggccagtttggttttctggccctcttctcggcgtccagacggccgccttctcgctgtgtcctctggtggtgaagggagggcactctgaac

SEQ ID NO: 30618 - DNA, 122 bp, Homo sapiens
gccgctgtcgcagacccgccgctaacttccacccctccggatccagcagggtgtacgctgcgcttctgatcagcaaggcgcccatccattgccgttccctatcgggctagaggttcgctatt

SEQ ID NO: 30619 - DNA, 122 bp, Homo sapiens
tgcctctgtggatgtgtgggccgctggcttcagtcctgcttttttgatggccgttgtttacgctatgtatttttgcaggaggcctgaggtgggctgggttctcctcctatggcagggcttca

SEQ ID NO: 30620 - DNA, 122 bp, Homo sapiens
tctggagtttagcagaagaagggtaattccaggccggaacccctttctttcccgacctctcgaccacagtcctccccaggcacattttagtggccagggatggagacccgcggataatgact

SEQ ID NO: 30621 - DNA, 122 bp, Homo sapiens
tttgtattttcatatttatgtgatgatcaaaaccattcatgcaggctgttctgcatttcacgtgtgctcaaaattcctggagttcttaacatacaaaagacaactaggagagagccaagccc

SEQ ID NO: 30622 - DNA, 122 bp, Homo sapiens
gaagcaacgacggccaagggcaaagggcaaaaagcgcgggatgtgaaagcacgtgggcctcgcacagtgaggcttctttggagatctaatctaaaaccaatttaagaggaaaaaatgtctgg

SEQ ID NO: 30623 - DNA, 122 bp, Homo sapiens
aatctgtggcctcttgtgtctggcgtctttgacttagcacaatgtttttcaaggtccgtccgtgtcgcggcgtgtatcgttgcttccctcctttttatcgccgaataatgttccattgtgtg

SEQ ID NO: 30624 - DNA, 122 bp, Homo sapiens
ggacactgtcccagccaggacacggccatcggtcactaatctgcagcactggaatgtccgcgggccaatcagcggggtctctgggggctccccaagggtgctaataatcccacaatgattag

SEQ ID NO: 30625 - DNA, 122 bp, Homo sapiens
actccactcggaaggagggaagggggtgccagagaatagaacttcttggccctaataggacgggagaagccaaggaaaagagcaaattttattgagtaatctgtgataggattatgccagac

SEQ ID NO: 30626 - DNA, 122 bp, Homo sapiens
cttagttaccttactacccaaagtgacatttcttcccattttagagctgtgctgtccacacgtacaattaaaattttctagtagctagccaaagtatttaaaaagagaaattaacttaataa

SEQ ID NO: 30627 - DNA, 122 bp, Homo sapiens
tcatcttgccctaactctctcccaaaggaactgtctccaaataccagcaccttggggtcacggcttcaacagaggaatttggtgggggacacagttccatccactgcaggaggtgacggtgc

SEQ ID NO: 30628 - DNA, 122 bp, Homo sapiens
aaaaagctggatgtttgtgatataggatggacagctagaaataacttgaaaattaataaccgatatttactgaggatctcctaagagtcagaggaagaattgtatacattgtctcattcatt

SEQ ID NO: 30629 - DNA, 122 bp, Homo sapiens
agccctgtggggggagagtgtgctgacactcaggagttctctcccggaaagggagggtctcgaattctggatttgtgtccctggaggaagcactgacgtgagtcttcactcgtacatggggc

SEQ ID NO: 30630 - DNA, 122 bp, Homo sapiens
gagacgagtgctgcagtgagcacgcgtgagtgcttaggcagcgcttgaagagggagttaccgatttggccctggaagtcaggaaggctatccttttaaggtgatccctgagctgggagtttg

SEQ ID NO: 30631 - DNA, 122 bp, Homo sapiens
agaagtcaatatggctgagctccaggccggactccctgacgatgtcataggacgagggggcgcgtgtgcacactgcatatatgtgtgtgtgagacccgtttgcacactacatgtatgtgtgt

SEQ ID NO: 30632 - DNA, 122 bp, Homo sapiens
ccggcaggtggcaatgttgcaccatggagccaccctgctcgcctcccgccccgcccttcgcgagcgaaaaaaggccgccgaaccttttccgagagaagaggctttttttttttcccttccct

SEQ ID NO: 30633 - DNA, 122 bp, Homo sapiens
cacacactggggagagcccctacgagtgcagtgtgtgctcaaaagccttctttgaccgttcgtccctaactgtccatcagcgaattcacactggagagaaaccctttcagtgcaacgagtgt

SEQ ID NO: 30634 - DNA, 122 bp, Homo sapiens
ccatagagatggagtcagccaggcctcgggtgagatgcagggtcattcaaaagcccagaacgtgctcgggtcaattgccagggaggaaactgaggcccagagaggggagtgactgactcgtt

SEQ ID NO: 30635 - DNA, 122 bp, Homo sapiens
cctattcaaccactctgtttgccgatattaacttgcggagctaagagggccttcatacttcgggattaaacccacccatctatcactgatatctttatcattaattttattatacaagtact

SEQ ID NO: 30636 - DNA, 122 bp, Homo sapiens
tccataattccctcatgttgtgagagggagccagtgggagatactgggttcctcccagtacgggagtattcccgcacactgttctcatggtggtgagtaagtctcacaagatctgatggttt

SEQ ID NO: 30637 - DNA, 122 bp, Homo sapiens
atcggcaacaaggggtcgagatcaggaggtcgctcgccgcccagttgcgtcgctcaccaccggccggccaccagaccctcggcttccgatccagaaaccgtattttgttcttgcacccagac

SEQ ID NO: 30638 - DNA, 122 bp, Homo sapiens
ccaccaacccgcctccccccttccactccgcacacggacgtctccactgcgcatgctccgcgcacacagtcctagcagagtaggagccaaccccctaaaaagtcaacctggaagccgcaaac

SEQ ID NO: 30639 - DNA, 122 bp, Homo sapiens
ccatcggcccccagcagaagtcccagctcccggcgttttctgtctcgtggcgagttggggcggagggagcggcgggaaggtgccgggtgggcaaggtcggagctgcgtcaccgagaggccgg

SEQ ID NO: 30640 - DNA, 122 bp, Homo sapiens
agccccgtggtggcgaacagaacatcacggcggaaacggtacgcggagcataagagtcaccgaggggagtactcggtatgtgacagtgagagtctgtgggtgaccgacaagtcatcggccat

SEQ ID NO: 30641 - DNA, 122 bp, Homo sapiens
gcggctgaatgtgagatgctcctgtcgaggggtggtgctggggggttgcagaaagctgctcgccagcttagttcaggcaggtgctgtcagcgtcccttgttttggaggagccagcctgagcc

SEQ ID NO: 30642 - DNA, 122 bp, Homo sapiens
tccgcaaatggggagggggtgttgctaagcagtctggggtccaactgacctggtcctggccggccatttcccacttcaggctccttttctcaaatctagaaatccagactccatggcatctg

SEQ ID NO: 30643 - DNA, 122 bp, Homo sapiens
tgaccccacttccgtagcgccaggaggcaccatgatcatcgctgaggagacagaagactccgtcccgctccagcgtcccatggccacacacgatgaggcggcccttccgtggctcccgctgt

SEQ ID NO: 30644 - DNA, 122 bp, Homo sapiens
taaagccaaaggttatttatggttctgcagagatgggacctgagtggctatttacgagcacgtgattccaataaactttgttttatggcttgagagttgacaagccaaaatataattcccac

SEQ ID NO: 30645 - DNA, 122 bp, Homo sapiens
tagggatgggcacagggtacaaaggactggtacacaaaagcaagcccaaggatagactggcgggagtggaggcataccatacttacctgcgaaacactcctctcttacgaagcagtgaaaag

SEQ ID NO: 30646 - DNA, 122 bp, Homo sapiens
ctccttcaactctatgtacaggtatatttaaaacgttttgcaaggcgagaggggagagaacgggccctcagtggcctgagatagacgctgagtcagggacccctctggatctccccagttca

SEQ ID NO: 30647 - DNA, 122 bp, Homo sapiens
ggccactgcctgggctggacccgccggcagccgccaccacccgggcgcgactcgagctgccgggaccaccaggacgctcctgctccgagatcccaggccctggctcgcttgactccggcatc

SEQ ID NO: 30648 - DNA, 122 bp, Homo sapiens
cgcacatggccaggagactggctgcgaacattttcaggtaggtggacatgggcacgcccgcgggcatggtcggcaggctggacggggaaggaaggggcagtgtcagaagttccagctcacga

SEQ ID NO: 30649 - DNA, 122 bp, Homo sapiens
gactagggcagcagaggaggcgaggagcgcagggtatcgggcgggggagccgccggccctcggggaacagacggatgatgaacaagcttttcatcgggaacctgagccccgccgtcaccgcc

SEQ ID NO: 30650 - DNA, 122 bp, Homo sapiens
agcttgactgggaaccaggctaggattcagcataagctgctctgtaaagctgattttttccgggagccacagtataatttcactaagaagttgcaagcgtggttttgaaattcttcatattg

SEQ ID NO: 30651 - DNA, 122 bp, Homo sapiens
cctttgaaaatagtacattttagtatgatgatggagagaagagaggcagaaaagcaaattcgcatcagttcagttgccatggagtggaatgatgctcaaaatcagtagtgcagattgctcgg

SEQ ID NO: 30652 - DNA, 122 bp, Homo sapiens
tggtttatcctgtggcttcccaaaagccatgagacagcatctggactggccagctacattcgaggattatttacattcctccatggatatgacagttgcttcagaaatgtatcagaatataa

SEQ ID NO: 30653 - DNA, 122 bp, Homo sapiens
gcgtgagccactgcacccagctcttttttatattctcatagggtcaggcatggtggctcacgcctataatcccagcactttgggaagccgaggcaggcggattgcttgaggccaggagctca

SEQ ID NO: 30654 - DNA, 122 bp, Homo sapiens
tacgtgagggcagcggtggctaggtccaaagaggaggctttcaaggcaagagaaggcaggcgctcccagcaccagcgtgcagtggaaataaagacacctgtagccttgtgatataagtgaca

SEQ ID NO: 30655 - DNA, 122 bp, Homo sapiens
tccttgtcgtaatttttaactacctgttataaaatttatgggtgggtttgtgaaaagaaacgaggtccctgcatccggcctagggaactgcttttcttactatggaggaagtctggggaagg

SEQ ID NO: 30656 - DNA, 122 bp, Homo sapiens
agaatgactagtttctggcagtgtgacaccatgagcatgctcctaggctaatggagcagacggaagagctccctccaagagaggctccctgcagccctccccttttttcttctgaaaatgtg

SEQ ID NO: 30657 - DNA, 122 bp, Homo sapiens
ccaaactcccccggcccgacttcgccacgggcggtgttctgcgccccgtcggggatacgccggagaagtcgggaagtcactgcctgggcacacaaaatccctgaaatgccctgacagtgacg

SEQ ID NO: 30658 - DNA, 122 bp, Homo sapiens
cgcagtctctgctgctctgctcctgctctccaaggcttaacattggaaagtccatgcccacgtccccctctaattaatcaatgtagaaagaaatacgagggaagagagagggagcacactcc

SEQ ID NO: 30659 - DNA, 122 bp, Homo sapiens
caccctctccaagaatacaaaccagagtgtccagctgcgtttaatttatcagaggcgcatcggcttagctgcgaaaagagacacgtttcttctccaggaggcccctccgctgatttctgggt

SEQ ID NO: 30660 - DNA, 122 bp, Homo sapiens
ctcaaaggtaattttcagctgtgcctcatgaggggctggtgtaggaactgagaaccaccacgatggtgtcctggcttctctgtctgggtctgctcatgtcacgtctattctctatggctttt

SEQ ID NO: 30661 - DNA, 122 bp, Homo sapiens
aacaaattaacctttcaaagctcactttcctcatttgcttgtggccagagaaacgtgagacggtggactgtggggtaattaagaaagtctgtgaaagcatctggcacacagcacttgctcaa

SEQ ID NO: 30662 - DNA, 122 bp, Homo sapiens
tcacttctcagaaggggcggctgccgggcggaggtctcctcacttctcagagggggcggccgggcagagacgctcctcacctcccagacagggttgcggccgggcagaggcgctcctcacat

SEQ ID NO: 30663 - DNA, 122 bp, Homo sapiens
cccctaggcagacgagcagggccagaagcactgtggtcaaggcgggccacggcctgcgcacgaacaccatctgggaaggcgacattgggacgtgggtcattccaagcctcgaccctacacgg

SEQ ID NO: 30664 - DNA, 122 bp, Homo sapiens
aggccttgtccagcaatggaggtacatgcacctctgcaccaggtttgagacttgtttaaacgtaagagacaatgaggaggagatcaagtgaaaaactacccatttcaccctatctggagtgc

SEQ ID NO: 30665 - DNA, 122 bp, Homo sapiens
ttcagagctgctcagcacgccctgggatcgcgggcggttttcatcggccggtttgtgaaacggacaagagaggtagggtactgttcagttcttgcgtttgcacgcgtctgttcactttctaa

SEQ ID NO: 30666 - DNA, 122 bp, Homo sapiens
ctttctttccgccttagcggttacctagtcgtcatctcggagagctgcgctgaggggggtcgcttgcccggcttcaggtgccccaaccgagccagggcaggctgccggaccctctcgagctc

SEQ ID NO: 30667 - DNA, 122 bp, Homo sapiens
agggaaagaggcagagcttgaggcgccttgaccagttgatgaagtggtggctttaatttgcgattcttgtgcaaacatttgataatgggaattggatgtgtaggtattgggctttctcgtgg

SEQ ID NO: 30668 - DNA, 122 bp, Homo sapiens
caaggagtcatggaactcagggtactgggcctcaacgggaacctgagacagctccagcttcgcagcccttcccggagctacagggggatcctctagcatggggggtgtgacttggttccttt

SEQ ID NO: 30669 - DNA, 122 bp, Homo sapiens
agcatcacctaagagactcggtggagggcgggggcggggcggctccaggcggggccggcacgaggcggggcggggccaacgccggctctgggcgggctctgggcgggctctggctgggctct

SEQ ID NO: 30670 - DNA, 122 bp, Homo sapiens
ccttccaagtaactaattcctcttgaaaccagtatcaaaaataagtgtcatctttcaatgcgacagaaatatttctaaaatacttaatataatagctgaatgtacaacactcatcgtgcagc

SEQ ID NO: 30671 - DNA, 122 bp, Homo sapiens
aaatgaaaacatacttttgccaaccaaattcagctataagtattgtactactagtatgcacgtaaatacaattccttacacatacttttctaacactgttatattcagtttcaaaatctaaa

SEQ ID NO: 30672 - DNA, 122 bp, Homo sapiens
gccgcggggagaccgggcctgaggtgttaaacatttttgtttgcttccgactagtccagacgaagggccgcgtctcggtagcgctctgccagggtggaaggtgccggggccggggttcctag

SEQ ID NO: 30673 - DNA, 122 bp, Homo sapiens
gcaaggacacaagagaggtctgtcttcccaagggacagctgggggcaggtggccccatcccggatggtacctgtgtgtgaccatcacatgcgctctgagccccgcgcggtgcagcgggcagg

SEQ ID NO: 30674 - DNA, 122 bp, Homo sapiens
acctcacctacaatcttggtatcttgatgaagcaaggctttacattatttctaagagacacgactattactctatgcattataaataagaaaataattggctctttaatttgcagatttatg

SEQ ID NO: 30675 - DNA, 122 bp, Homo sapiens
acctcgtgatccacccacctcagcctcccaaagtgctgggattacaggcatgagccactgcgcctggccgagcttgcttgttatacttgaacaactaataaatgcaaggatgtcctataaag

SEQ ID NO: 30676 - DNA, 122 bp, Homo sapiens
cctgaagccctgcttgctgcagaggcgccgctcttcagtgatgcagggtgaggggctgagcggcgcctcctcccatctagtctgcttgggggccgccagggagcatcttcaacacccttaca

SEQ ID NO: 30677 - DNA, 122 bp, Homo sapiens
gatccaaccaggtacaaaaaagaaaacaacagctgaatccccaaaagcaaaatgccagggcgaaaggagaaaagaataggaagacaggccccatggcagcctttggggtctgaaagagtgat

SEQ ID NO: 30678 - DNA, 122 bp, Homo sapiens
cccgccaccctcccgcaggtacctgtacttcaccaacatgcaggaccgggcagccaagatcgaacgcgcagccctggacggcaccgagcgcgaggtcctcttcaccaccggcctcatccgcc

SEQ ID NO: 30679 - DNA, 122 bp, Homo sapiens
gctagcatcctgagacaactcctcatcgtcaccctgggtgttcctttattttctttcctgcgctggattctctgctttccatgttttgctccctcattttggtcaagaacattctccaggcc

SEQ ID NO: 30680 - DNA, 122 bp, Homo sapiens
aggcccagttcctgaggcctcacttcccatctcttagcaacagaggcatgacagcatctacggttgccaggcctggagtctggagaagaaactaggaccctgtaccaccttttgaggaccct

SEQ ID NO: 30681 - DNA, 122 bp, Homo sapiens
gccgcaggtgcctgctcagacctgagaggctcaggtcctctttgggctcagcactgggaccgtagctcttctgtagctccatgaggatagaggcatgtctccctcagcatgatacaccagca

SEQ ID NO: 30682 - DNA, 122 bp, Homo sapiens
agaggttgagaggtgtcctttggtgaggtagcggtattctagatgcttggtgcatcttcacgtggtgtctgctctgtaccaggctcagtgctcagcttcaagggcataaaaaggaacctaat

SEQ ID NO: 30683 - DNA, 122 bp, Homo sapiens
taccgtcgttctcatcagaactgaggtccagcacgttgcctcctctggggactgtaggagcgagggacaacttccactggttcccatgggttccaccacccagggcatttacagatgaaaat

SEQ ID NO: 30684 - DNA, 122 bp, Homo sapiens
gccagcagacggggtctccggggtttccacctctggcaggggtgcgttgtccccctccaacgccggggatggctgtggcccctgcccctgccccagcgacggccgccgctccgagggctgcc

SEQ ID NO: 30685 - DNA, 122 bp, Homo sapiens
gtatacaagggactggagaccatcacctctaccgccaggtgtgtgtatgctgagtcccagcgttccagatcagtgtcccgcacgtcctcggccttctgccagtaggggaggagtcgggggcg

SEQ ID NO: 30686 - DNA, 122 bp, Homo sapiens
gctgtgattgaagcacctacagggacagagacctgggactttcatgagcttcagaaaaggcgctatgattactggggcctgattgctatgacatatctgtgtgggaatgttatgagtatgct

SEQ ID NO: 30687 - DNA, 122 bp, Homo sapiens
aatattttaggtgtgaaaaaggcaaagttttgctgttgtttttaatgtccttatcaggaccgtaaactgaaaaatttgtgagtaagacaacatgatgtacggaattttgttttaaaatgcac

SEQ ID NO: 30688 - DNA, 122 bp, Homo sapiens
catctcacttccattttacacctggggggccacaagacaaatgggaagttagcctgagaccgattcccgtgctccagcttcaggtgctcccatgccgaggaggagggagcggctgctgcctg

SEQ ID NO: 30689 - DNA, 122 bp, Homo sapiens
agaatgggacagtggctgagcatggagaataagtcagtgattgagcttgcatgggcaagacggaatgtgacagattttgtatgtgtcagtacagtgtcatagtggctatgtttatgtgtgac

SEQ ID NO: 30690 - DNA, 122 bp, Homo sapiens
ctggtgggtgagcaaaggatggcggggatgaggggcccgtgaggaggtggctctaagccacgggaaaagacattttgtaagaagaggagatgctccacctattctggaagcagggtgccggg

SEQ ID NO: 30691 - DNA, 122 bp, Homo sapiens
tgcacaaaagacttttgtttatcatttcgccggactgcctgggaatcacaagactcaagccgccacccggctggtgtcctcgcatttcagcagccgtaacgtgtggagattgcgaaagcact

SEQ ID NO: 30692 - DNA, 122 bp, Homo sapiens
tcatcctcatgttgcctttcctctctgtgattgaggaaccaatcagttgggtgtagcagacggggcgtggctcttcaggtagaggccgaaggggctgagagcggtcccaggcggccatcttg

SEQ ID NO: 30693 - DNA, 122 bp, Homo sapiens
cggggtcacggagcctccagggaagtaggcacccactgggcagagaatgacgaacaggagcgcgcgcgtgggctggctgacacccagcgagggctgcgacgggcaaagggacagcgtcagga

SEQ ID NO: 30694 - DNA, 122 bp, Homo sapiens
cactagcagtaagctcgcaccaagtgccactgtcctgccaagcactctcctgaatcactgcgctggagtctcagagccacctgatgtgttctgtaccattatacccattttgcaattggggg

SEQ ID NO: 30695 - DNA, 122 bp, Homo sapiens
tctcataatctgaaggtcctgagttcgagcctcagagagggcagctgttttgttgtgctacgaatgcagcaaatgttcggatgtaacccagcaaagcactctgaactatgggcaaagagtag

SEQ ID NO: 30696 - DNA, 122 bp, Homo sapiens
tttttaaaacatttttaaaacaacttccttccatcacaatcatcagattgtgctactaaacgtcagtgagttcctgagagattcggagtcagtgcaagagaccagggctcttttggaatact

SEQ ID NO: 30697 - DNA, 122 bp, Homo sapiens
aaaaaacaacaacaacaacaaaaaaaagagagattaaaaataaaaggcattataaatgcccgtatataaacacagcctgtccatggctttgaaagagagaataaaggtctctttattacttt

SEQ ID NO: 30698 - DNA, 122 bp, Homo sapiens
aaaaagcgttcctaatgagtagaggcctgcatgctccgtgaactggggatctttggtagccgtccatgtctggaggacaagtcgacatcaccatgtgttactggcctggaaactgaagggag

SEQ ID NO: 30699 - DNA, 122 bp, Homo sapiens
aaaactaaaaaacatgtgaaaagattgtgtaggtgcagcaataagaaacaggctctctgtcgcatcttgcttgtaggtgggcatgtgctcaattcctgccaagggaattatctaccaaaact

SEQ ID NO: 30700 - DNA, 122 bp, Homo sapiens
ctgggtgccgggtgggagggagacgcagacagggaggcaggaattgggcagagcctgccccgctggtgtgagatgcctcggtggaagtttcgctttcatccaagaaaccaaccaagcagcgt

SEQ ID NO: 30701 - DNA, 122 bp, Homo sapiens
cctgctacaatggtctgagcagagatgacatcatcttacttattttactaggtccactcccgctgctgtattgagaacagcctggaagacaagaatagaaagcaggaggcctgttagagagc

SEQ ID NO: 30702 - DNA, 122 bp, Homo sapiens
ctcaatggcagtttcatggcatagcgtccctgctgcccccagacggtcagaaatccaacccgagtcatatcattatcctcgtctttgtcggcactggagacgtggggaggtttcgttcctca

SEQ ID NO: 30703 - DNA, 122 bp, Homo sapiens
tggggtccgtgggcgccgagtcagggccatgcccctgggctccgctcgcggagccggcgtcgcccttgttgactttcaaaaggcgccgccggccccgcgccctacacgctcagcacgccctg

SEQ ID NO: 30704 - DNA, 122 bp, Homo sapiens
cgtattgctttttcttttatgtgactactgcctgaagtcactttcctaggaagaatggatcgattagagaggcggggcaataccttttacctgctggcaggtgaaatttcgcctcctggcgg

SEQ ID NO: 30705 - DNA, 122 bp, Homo sapiens
cattattattatccacggaagattctctggacgggtggcttgtttgcatccctgacccaccgggctgcgccctggagcccccctgctcaggctggccaaggagggcgcctctcctcccactc

SEQ ID NO: 30706 - DNA, 122 bp, Homo sapiens
gcgccttcactctcgtggacacacatctttcattttccactgagcactggtccgagatgccgtccaaacccccagccccagcctccgttctacaagagcaggacctggcagccccctgcagc

SEQ ID NO: 30707 - DNA, 122 bp, Homo sapiens
taggagcactcgatgaccttgggcttcctgccccagatgaggcagcgcccatccgtgcggcggaacaggtccttctggtggttggccacccggaagatgtagtagcccaccaggcccagcag

SEQ ID NO: 30708 - DNA, 122 bp, Homo sapiens
ttagtgagataatgcagggaaggcaccaagcccagggcttggcattgtcaatgtgggtgacggtggtagtgtctggagatgctggccaccttgacgggtgagctgagtgggcagaggatttg

SEQ ID NO: 30709 - DNA, 122 bp, Homo sapiens
tgccacacacatccctcattaacttggatacacatgagagctgacataagctgaagccatcgagaaagcctgcaatatgctgcaggacctcaaaaggaagactacttagatggtcattatgt

SEQ ID NO: 30710 - DNA, 122 bp, Homo sapiens
cgaagtctttcaaaccatgagcttgcaacctcccattttatgattgctttcgtcttcttccgcttcagccaatagcggagctgttccctgctccccgcccactgcgccccaccttcctgaag

SEQ ID NO: 30711 - DNA, 122 bp, Homo sapiens
ttggggtaaaatgcctgcatctgagagtgctgcagtgttcaccccagagcaggaagcttccggctgcaggaggagggctgggcacagaccgtggggagggtccactggtttgaatgtggcac

SEQ ID NO: 30712 - DNA, 122 bp, Homo sapiens
gtccatcggcggaagttggctcaaggaggtcctgaatacgggattcctgggggctttgcccggggacacccgcggccccttgtcacaggcgccccgaaactgtaccccggatccagccgcag

SEQ ID NO: 30713 - DNA, 122 bp, Homo sapiens
aacctctctgggcccttccaacaccaacgccccgcaccgcggaggcctctgcggggctcccgtcgggtttgggcctcatgaactcatctcctggagcaggactatctcacgcgctccagacg

SEQ ID NO: 30714 - DNA, 122 bp, Homo sapiens
ctcttcccgtgccccgccgcgcggacccttagccttgaccgcccccatctcttctgaccccgtcttacaatgcccctctcaccaggacgcgcccagcgttgggccgcaggcctggggggcac

SEQ ID NO: 30715 - DNA, 122 bp, Homo sapiens
agctggcctttcttcccatggcatatatctgctatgagagtcttctctcccaggcagggccgagaggcaggaggtacagagcatagcactccagctctggagtcagaaagaactgggttcaa

SEQ ID NO: 30716 - DNA, 122 bp, Homo sapiens
caccggggctccggggctccgcagagactcagggccgtgtagacgccgccctcagcccggcggggcagccttgactttggctttggggtagtttgacttaaagcaaggttctactaggtcgg

SEQ ID NO: 30717 - DNA, 122 bp, Homo sapiens
tctgttacacagtagtcagcactggtcttttggcagctcacatttgtgacaagcccctggcgtgagtcagaagcctcacatatcctttatatccagtggcttctctttctgctctgtagagc

SEQ ID NO: 30718 - DNA, 122 bp, Homo sapiens
ggttggcgggccacctcgctttctccgcgctcccggagggggcgcgatttcctcgtgctgcgcttgtaggagcagcaacttgaatcctgtgtggggcaagctgggcccaatccgcggatccc

SEQ ID NO: 30719 - DNA, 122 bp, Homo sapiens
cctcagctgtgcctggtttctctgtccagagcctcagattaacccaaccaattacagccacgaagttaaataaattccaagaggctttggctaaaaaggcaagaagttttgcactagagttt

SEQ ID NO: 30720 - DNA, 122 bp, Homo sapiens
aaataaaccactccattgcagaaaagcgtgggcaggcaggacttcactccactgcagccccgggaagtcgaaataaacattgaggtgggttctgctatagccatttcgtctaacttaaggag

SEQ ID NO: 30721 - DNA, 122 bp, Homo sapiens
ggcctctagatacaggcacacagctttgcactcatgattaacgtgggggatgagtggtcacgtacactcaccaatggggagttcacggggagaaagaggcttttacgtgcattaaatctgca

SEQ ID NO: 30722 - DNA, 122 bp, Homo sapiens
gcttgttgatacctgaaaattggtttcggaaatcgagacgcctgatggaagtttgtgtgtcgttttggctgcgttaggctcttcttgagccctattaggctcgatgccattaaactgctatg

SEQ ID NO: 30723 - DNA, 122 bp, Homo sapiens
ggcggaaggggcggatgcgacgggccggggcgtctgccgctgccgcatgagacgtgggggcgtggcctggtacgctagtcctttggccagagggcggattccgcctgctaaggtatccccag

SEQ ID NO: 30724 - DNA, 122 bp, Homo sapiens
aacaaagggatgctctgaaatactgggaagcatctaacgaggagtcaagggtcctaaacccgtggggctagctccacattttttttctttttttctttttttttttttttattttgagacgg

SEQ ID NO: 30725 - DNA, 122 bp, Homo sapiens
agccggcaattatacttttaaccaacaaaaaacgatcagactgcaggggaagagtgttcacgtagccataggtaattataggcgtagaggcatctggaagaaagtacacctgtcatcaacag

SEQ ID NO: 30726 - DNA, 122 bp, Homo sapiens
ggaggaccgaccgtccccacgcctgccgccccgcgaccccgaccgccagcatgatcgccgcgcagctcctggcctattacttcacggagctgaaggatgaccaggtcaaaaaggtgagcccc

SEQ ID NO: 30727 - DNA, 122 bp, Homo sapiens
gatacagaaggtggtcatggcactaggagactacatgggcgcctcctgtcacgcctgtatcgggggcaccaacgtgcgtgctgaggtgcagaaactgcagatggaagctccccacatcatcg

SEQ ID NO: 30728 - DNA, 122 bp, Homo sapiens
agccttgaaaacaaaggttaaactatttttgggtcttcacatcctggttttgcagggagacgggaggtatggaggcattgcccatttcataaagctgtatgtttttgaactacgcacatggt

SEQ ID NO: 30729 - DNA, 122 bp, Homo sapiens
cctttgaagaaagatgaaacttaaactagcaccatcccttcctttagaatattaactggacgcctatatcataaatgcaaaacaaatgcaaatggatatattttctaaaattccaaagtttg

SEQ ID NO: 30730 - DNA, 122 bp, Homo sapiens
gcagggtgcagtggagtgggctgcacccactgcacctgcttctgggccagctgggggtcccgccaagcctcactgtggttcagaggctggagtatgagcttgtgggcctccagcaagagctc

SEQ ID NO: 30731 - DNA, 122 bp, Homo sapiens
gcatctggaagaaaacccttgggcagggtggtggccccatgccaacatttttaagatgcacgtggcaaggtcagaagtaaggaagatccaatttgtgctccgagactttccttagacactca

SEQ ID NO: 30732 - DNA, 122 bp, Homo sapiens
ctgcaggaggacccggctgcagagatgggggcgggagggcagatgttccctggctcactgcgctcacaccccggagagggccagcgcctaacgccgcctcgacaggttccacggaggacaca

SEQ ID NO: 30733 - DNA, 122 bp, Homo sapiens
tagagaatctgtgagaggagctttgagataagcagtgggcgaggttgatatttgttgtgacgtttcaggtaacaaagagcctgggatttgtctcacatctaagaagactgaaagcaaatggt

SEQ ID NO: 30734 - DNA, 122 bp, Homo sapiens
taaaaaaaatgaacaaaagccaaaaaagccacaaacacaacctaaaccttctaagaagctcgactactcccgttctgcacgttccttcccagaaggatgcagacccccggtgtcggcgggaa

SEQ ID NO: 30735 - DNA, 122 bp, Homo sapiens
caagaggaaatgtttaaatatcttaacagaacaaactggttttgcttgcaaatgaaaacccgtagagacgctcttgattcttcctggtttctcaccacctgtaacaacagtaacaccaaagc

SEQ ID NO: 30736 - DNA, 122 bp, Homo sapiens
gagcggcgtctgcggctggtccggacgtgtcccctccgggcgggggtggccgggcctcctcggggcctcgggcctcccgggcgcacccccctgcctgcgcctctccaagtcgccctttctcc

SEQ ID NO: 30737 - DNA, 122 bp, Homo sapiens
gagggaggagaggcatggggcctgcagctgcccacaaggaagcgcccttggttacttccacggtggggggcctcttggaaacctccaatctggaaagaaaaccaagggccaaagtcacatgg

SEQ ID NO: 30738 - DNA, 122 bp, Homo sapiens
ttctcctgcacggtgacgttgtactcgaggtgtgtaaactgcagaggagtctgttcaagtcgttggctgccatcactgtctccaaaatgttggaagagaaggagcagaagcaggagcaaagc

SEQ ID NO: 30739 - DNA, 122 bp, Homo sapiens
tccactgtcctgggcagagctgtcccttgggacaaagcatccctctccccagagttgtctcggttccctcaggcctggacctcactcccttccccctcctccctttcattctgcaatgcaaa

SEQ ID NO: 30740 - DNA, 122 bp, Homo sapiens
aacaataagcaggtccctggagttgcagggttgaaagaacgcggcgaggcccgtggaggacggtccgattcttagattacagatgtcggtgtggtttctctctggctgttctctctgcgcct

SEQ ID NO: 30741 - DNA, 122 bp, Homo sapiens
cccctcctcctccctgagactggacctcaccgcctgtatggtgggggcctggtatggacccgtcggcccgaagtatccagacggtggctgattctctcggtcccagctgcggggcctgaggc

SEQ ID NO: 30742 - DNA, 122 bp, Homo sapiens
agctcttctttctgctattgtggaattacagcaggattctgtggtttatcatatcattgtcgtgatcatcatcataaatcatcatcccaagcaaatatttttgagcccctactctgtgcctc

SEQ ID NO: 30743 - DNA, 122 bp, Homo sapiens
caaatggctgaacttggttcaaactcttgactaatgtgtactactaaagccctattttcacgatataatgttaccctccacccagaaagatgtttaaactgaaatagaaacaccctgaaata

SEQ ID NO: 30744 - DNA, 122 bp, Homo sapiens
taccttcttaaaagctctagaagagggctcttaaccttttgttgtgtgtcatgcaccttccgcaagctgatgaagttgatagacccatctcagaattttttttttttttttgagacagtgtc

SEQ ID NO: 30745 - DNA, 122 bp, Homo sapiens
ccgcctggactgcaggaaaaggctgcttaaacagcctgccttttcctgctgcctgactcgcgccatctgcggccacctgtctcgtttcttccccctggctggcgcacccttccttcctaaac

SEQ ID NO: 30746 - DNA, 122 bp, Homo sapiens
tgaggatgcccctcacttcccatctgagtggtctgaatgaaaagactggcatctatctcccggagagtggggctgtgctcattcctgttgcccaactggcagagcagccacagggcccagcc

SEQ ID NO: 30747 - DNA, 122 bp, Homo sapiens
tgaactcaccagtggtatatgcacctttttgtagagacacgctaactgggccaatcttcacgttttgtagatgggagacgaggtccgaaggggcagaggggctctcctgggatctggactgg

SEQ ID NO: 30748 - DNA, 122 bp, Homo sapiens
gaggataggcacccctaaccctccttcctccagggaggcctcagcatcagtgtctgtggacgtagtctctgaagagtgcttcagctgatggggaaggagaaactcaagacagagatcctcct

SEQ ID NO: 30749 - DNA, 122 bp, Homo sapiens
ttttttaatctaaagggaagtcagagtcttgtcctcaagttcttgttgccatagccgtgccgctcggcgggcggaggatcgcggggccgaactgggggtgccggaggcgcgccccgctgggt

SEQ ID NO: 30750 - DNA, 122 bp, Homo sapiens
cagacagggaaacaaatgtacccgcaacggttctccagaccttaacactgctcagacgcacgctgcagggtgacatgcggaacgcattccaacctctgacttgctgcttattgtgtttgcct

SEQ ID NO: 30751 - DNA, 122 bp, Homo sapiens
aggctccctggcctttggcgcgctcatcctggccattgtgcagatcatccgtgtgatactcgagtacctggatcagcggctgaaaggtacgtcccacccacggttcgcattagctcctgttg

SEQ ID NO: 30752 - DNA, 122 bp, Homo sapiens
atatattctctgtttccaacagtctatgtttagtctaccattttaaagcaaacagtaggccgggcgcagtggctcacgcctgtaatcccagcactttgggaggctgaggtggacagatcact

SEQ ID NO: 30753 - DNA, 122 bp, Homo sapiens
ctgaacagaacagacaggccttgctgggtttagagcatacccttttgtgcaatcacatttcgacacaattatccatgcttcaatcatgaacaaccaatgaagtctacataaaacgcagggtt

SEQ ID NO: 30754 - DNA, 122 bp, Homo sapiens
catgccccacccctcactgtgatgggataggctggggcccttcatgatggacggaacatacgtttccggaccccaaaatcactcagcaaaggtaagtcaagctggaaactgcgtcaggcaaa

SEQ ID NO: 30755 - DNA, 122 bp, Homo sapiens
aacgcctggcaggcgggcccttgagtatgaccaatcagaatgcggactgcgtcccaggggcggagcagaggcgtatcttggtcgagattggatagcggcggggcgcaggaaagaggtcgcgc

SEQ ID NO: 30756 - DNA, 122 bp, Homo sapiens
cagcggagcgatccacgaatttgcgccacttccctattcaccaaccccgcccccgactatcggggactgccccccccgctaagatacgccactacctcagcggcgctaacgctgctagcgta

SEQ ID NO: 30757 - DNA, 122 bp, Homo sapiens
gacaggaccctcggcctcgcccactaagaagcagacatttacagaattcctaagacgccgcgttccatttcgtttttaaggagtccgatcacatgcgaagcgcccctgcgtcttaagcccag

SEQ ID NO: 30758 - DNA, 122 bp, Homo sapiens
ccgcttccccaaactgtcccggggtcagccccgggagacccgcaacgtggagccccagagcggtgacctctgacctcgacaaaaccgcagccacgggccctgtgcgtggcaccagctgcgtc

SEQ ID NO: 30759 - DNA, 122 bp, Homo sapiens
ctttgaacaactcagctcctgcaaaagcttccgtccctgaggcaaaaggacacgagggcccgactgccagagggaggatggacagacctcttgccctcacactctggtaccaggactgttcg

SEQ ID NO: 30760 - DNA, 122 bp, Homo sapiens
ctcattcgggctttcctttgcatttcccgcgtgactagcaccgttggatgtcttttcatgcgcttatttgccatctgtatccagctgtctctcagtatccatgcggattggcttcagggcgc

SEQ ID NO: 30761 - DNA, 122 bp, Homo sapiens
atgaaactgcttggggattttttaaaatcactatattattcagcaaatattttcacaaaacgtagggcatactacatgcaaagcattgttctgcagtcgaatgctctatccctgagctatac

SEQ ID NO: 30762 - DNA, 122 bp, Homo sapiens
cgctcgccagcctcagacggccgcgccccgccccgcccctctcccgaagccccgccccggcgcgggaccaccccctccgcggcctcagctccggtcctggccccgccccccgcgcccccgcc

SEQ ID NO: 30763 - DNA, 122 bp, Homo sapiens
gccggcagggagctgcttcagggacaagatgtggggctggatgtgctcacgccccagaggcgaccccctcctgcccgctggcacgccgcggggtcaaactgtgctctccagccgtggcttcc

SEQ ID NO: 30764 - DNA, 122 bp, Homo sapiens
tctcctccctctcaccaagtgacaccgctccctctcaaacggaaggaaggggaagaggtccgtggggaatctcttgggtccttaaagggggcggctgtcatgtctcctagctctgctatgcg

SEQ ID NO: 30765 - DNA, 122 bp, Homo sapiens
atccctctctttctgtgcttctccagcaaatttccccaggttcgtatccagcctacatcacgaactatttttggaaccttgggcaagtgactgcacccctgtgagcctgtttttccaactgt

SEQ ID NO: 30766 - DNA, 122 bp, Homo sapiens
aattttccccagttgtttcttctaaagcaaaacctcatgcatcctaactgttctatccctcgtgagggccagacaaagaggctggacaggaagctcttgctgagtatgccaagacctactta

SEQ ID NO: 30767 - DNA, 122 bp, Homo sapiens
gtgagcacgctgggagaagggggccatctgcaaactaggaaaagagctctcaccagacaccgaatctgctggtaccttgatcttgaacttcccaggctgtgagaaaataactgttgtttaag

SEQ ID NO: 30768 - DNA, 122 bp, Homo sapiens
gacaacaatacagggtttgaaagccggacacaatttaggttttgtgcgggtccctcctcgcgctccctcggcccagctggccatatggaatccagcatggagcccgtggatgacaaagggac

SEQ ID NO: 30769 - DNA, 122 bp, Homo sapiens
ataaaacatttatagcatgccactccatttcctatacttttcatagagacaaaactttagcgctcacaaaagtacttataaatataatagctagttgtgaaaactttttaatttagatccca

SEQ ID NO: 30770 - DNA, 122 bp, Homo sapiens
ctgcccccgtggtggtggccgccatgctgggagcctgggcggttgagggaaccgctgtggcgctcctgcgactgctgctgctgctgctgccgccggcgatccggggacccgggctcggcgtg

SEQ ID NO: 30771 - DNA, 122 bp, Homo sapiens
gtccttatcgggaagaagtttaaccaaagaggaacatgcaaaacccagcccccttttagccgctttgggccgttaaaatatccaagcaggctggttccctctgccttgtctcagccaggggc

SEQ ID NO: 30772 - DNA, 122 bp, Homo sapiens
tctgagctgtctggacagttctttattccagtttggtatatttcttcagcttctttaaaccgctcctttaaaaagaaagaaacaaacaaaataagtgagaaagctttctaaaaccaacaata

SEQ ID NO: 30773 - DNA, 122 bp, Homo sapiens
taaagcggaaggtcatgtctctgcacacagtctcacccccgcggctcagagtgcccatcgcgggctcctgggcagtgtttatctggggccacgcccgctctgagcgccactggagtcacgat

SEQ ID NO: 30774 - DNA, 122 bp, Homo sapiens
ccagcactaccacatgcagaagattggggagtcactgcttgtgtctgtctggacagatcacggtttgctgtggtaacagcaatccccaggtctcagaggcttaaagcaacagaggtttattt

SEQ ID NO: 30775 - DNA, 122 bp, Homo sapiens
tctctgccctcagggctttggtctctgtcttcaatgttttcctggcaattcaaaactcagcgattttagaacaattcattagggacttgaaaatcacagtctagtctatttgaattcaagaa

SEQ ID NO: 30776 - DNA, 122 bp, Homo sapiens
cgggatcggggcgcgcagggaagtagccagcaaagcaggtaagtcccgggctgctcgcggcggggtcatgactgagggcacaggggtgaactccatggtgcttcctcaggaaacttccggcg

SEQ ID NO: 30777 - DNA, 122 bp, Homo sapiens
tctctttaaaaacaagcaaacaaaaagacacaacttttacccaggaccatctgctcatgacgcttttcaaacaagcccctggcagtgccgtccggccggggctgggccagggccgccctctc

SEQ ID NO: 30778 - DNA, 122 bp, Homo sapiens
cgcacgggccatggcatgtggcgagagcgccacacatatcacctccgtgggtggcacccacggaaacaaagcccccgagtccactcggccccagccagacatttgctgccgtgagtgagctc

SEQ ID NO: 30779 - DNA, 122 bp, Homo sapiens
ccctgaggatccagggcttctgaattttcctattctggtcgccgtggggaccatggcacccggggatgcagctcccaccccgttcgggaagcctgtccgtgtctacacctctgctggcccca

SEQ ID NO: 30780 - DNA, 122 bp, Homo sapiens
ccagcctcccactgagaattaatgctgcttttttttcccgtcaagcatgcagtcccaagtcgccctgtagttttcctgctttcgatagaagcctgattatagagaaatattttaaaacaaaa

SEQ ID NO: 30781 - DNA, 122 bp, Homo sapiens
attcattccctgtacagttgacggccccacagcagagctgcgagggtgggaggcgcagcccgggtcggcctccagaaacttacggcttgttccccctgtcctggaggtgctggctgccaagc

SEQ ID NO: 30782 - DNA, 122 bp, Homo sapiens
gcaggtggttgggcatcttagtcatgttccagggcagggacttgcacagggggatgcggacgggctcacaggctgcagcccgagccccgggcacccggagcaggcagagagcagccagggca

SEQ ID NO: 30783 - DNA, 122 bp, Homo sapiens
acagacaaagagccagagagatgaacagttacagacccggaaccatggacagagagaggacgagatcaggggagggatgcagagaaagagaaaatagacccatggtggctttcctgtctgcc

SEQ ID NO: 30784 - DNA, 122 bp, Homo sapiens
caacagccagggcatctatcacaccagacaccgacgtcagctggagcacgtcagagtacccgtgttcgtgatgcagtgtggaaggctctgaggaactcaggtggcccctactgttatgtcac

SEQ ID NO: 30785 - DNA, 122 bp, Homo sapiens
cgggctcaccgtgtggggccgaagatcaacggcccgggaacggttcccgggagcgggggccgctgctgctccagcagctgtaacaacccgcggctgcagcctccccgctggcagctccggcc

SEQ ID NO: 30786 - DNA, 122 bp, Homo sapiens
taaaggttctccacgtccgcaccagactcaggagcccagctggcttcacccagtggatcacgcactagggctacaggtggagctgcttgccagtccgccgccgtgagcccacactcctcagc

SEQ ID NO: 30787 - DNA, 122 bp, Homo sapiens
tctccatctctcccacctcttccaactatgaacagtaacctaaaatcacactgaactagacgtaagagactcccaggatttctctaaggtatacccaggatcaaggccctctgggatccaaa

SEQ ID NO: 30788 - DNA, 122 bp, Homo sapiens
catagtcagagggagcccaaggtctcccctctgggggactggcaggcctgtggttgagcccgcatggaaggtctgtaaatatatcctgcagataacatgattctttctcgtaaaggcagttg

SEQ ID NO: 30789 - DNA, 122 bp, Homo sapiens
cccctgaagttgcctcgcagctgagcactgggccccgtctctcccttcccagggggccttcggcgtcactgcaggcttcctaggggtcccctaagtgctctgcaaaccgcggctggaagttt

SEQ ID NO: 30790 - DNA, 122 bp, Homo sapiens
ccgtcagagggcctgggaacggagcatcctgggaaagatagttcccagacgggcttcccgcgctgcttcccggcgccttcggcggcgagaggactccatttcccgacgtgccccgggaccgg

SEQ ID NO: 30791 - DNA, 122 bp, Homo sapiens
tgatagcaagatcaggtttcctttagaaattcttattggttccttccctgcagcgacaaccggctgcccaaagttgatggaacccagcagctgtcactggacgtttgccaggaggcagggct

SEQ ID NO: 30792 - DNA, 122 bp, Homo sapiens
tgggggaggggggctgtcgccttggattgaaggccattgatttgtatgtatttgtcccagcgctggaggctgccccagccgccgcgccggtgccgccgctgccagtggagttgcctccccgc

SEQ ID NO: 30793 - DNA, 122 bp, Homo sapiens
tgactcccaggcagcttgctgctttcatgatactaccttggtaaccactcagtaaacagccgtttgaattgttttatttaaatcagattctctatacaatgcatttgagtgtttgctgtact

SEQ ID NO: 30794 - DNA, 122 bp, Homo sapiens
cccaccgcacccggacctggaccccgaactagcaccccaggcgggctggacttcagtgagcgccgcgcgcagcgcctcggagccagagaccgctgcccggtgcttcctcccatcttcttcca

SEQ ID NO: 30795 - DNA, 122 bp, Homo sapiens
ctctacctaccaggttcaagcgattcttctgcctcccgagtagatggaattacaggcacacgccaccatgcccagctagtttttgtactttcagtagaaacggggtttcgccatgttggtct

SEQ ID NO: 30796 - DNA, 122 bp, Homo sapiens
cacaagagacaactctggaagcttatctcaagtacacaactctgactggcagggtttgctcgctcgtctttttagtatagtccagtttgtttagacaagcctggggttaacagagccaaggt

SEQ ID NO: 30797 - DNA, 122 bp, Homo sapiens
gagaggtgccagaggaccccgaatgtgatcacgtttgtatgctaggtaatgggctcaacacgtggtgaacactcagtgttggttgttatggtaatgtggatgctattgttgtcatccctggc

SEQ ID NO: 30798 - DNA, 122 bp, Homo sapiens
gtagtctcgagttctcaggttacccctcagtgacagccctttcttgagttccttctccttcgcgtcagtctctcgttctcccaccccgcccctctagaccaggtgaggtttcctccctcaca

SEQ ID NO: 30799 - DNA, 122 bp, Homo sapiens
gattcccttccatttttttcttcccttttctcccaagatccagcttcttgggggcactcacgggtgcccgttgcgttctgctccgtcggcccggagctgcatggccaactcccagcaggggc

SEQ ID NO: 30800 - DNA, 122 bp, Homo sapiens
cctcacaaggacccttgcagagggagcagtgcatcggcacagagcaggacacaggggagccgggctgaggctgcgggtcccttgtggccgccaggtgctcacgcgtgcctcggtggggatct

SEQ ID NO: 30801 - DNA, 122 bp, Homo sapiens
attcataaacccgccctttgtaggaggaagcggtgaaccacggggcgtggtcattcgtgtcgctgacattgaccacaatccttgcaaagttgcgttttacaggcacatcttgatctcgtacc

SEQ ID NO: 30802 - DNA, 122 bp, Homo sapiens
tacagccccgcccagatctggcagagccgtgggcgaacccaggcgggcagaaaggcggggcgggcggctgccaagccggccaataggcggctctccggctgctaagccgagagggcaggggc

SEQ ID NO: 30803 - DNA, 122 bp, Homo sapiens
ctggtcacatgccccacccgtgaagccgggaggacaggtgcaaatggcccggccgttcaccggatttgtgtcacagatagcatcctcgtggcaggggttgctgacacaggcgtcatccaggt

SEQ ID NO: 30804 - DNA, 122 bp, Homo sapiens
cattagtgagtagcagtggggtcctcggtctcccttgtgtgagccgacgtcggagagtagcggtggggtcctcggtctccctcgtgtgagccgacatcggagagtagtggtggggtcctcgg

SEQ ID NO: 30805 - DNA, 122 bp, Homo sapiens
tggcagagatgggggtgcatgatggccatgtagtggagtggacgacagacagcagcatagcggtcaaaggccatcaccaccaggagcacacactctgtggagcccagggctaggtagatgaa

SEQ ID NO: 30806 - DNA, 122 bp, Homo sapiens
gtcaccaactcggccatcatccaccggctacggaggaggggccggagtgggctgcagccccgggtgggcaagagcacagccatcctcctgggcatcaccacactgttcaccctcctgtgggc

SEQ ID NO: 30807 - DNA, 122 bp, Homo sapiens
ctcgaactcctgacctcgtgatccgcccgccttggcctcccaaagtgctgggattacaggcgtgagtcactgcgcccggcccgcagaaggatattaaagagcacctgcaggaattttttaag

SEQ ID NO: 30808 - DNA, 122 bp, Homo sapiens
ggctgtcaccctttcttcactcagcccagcaactgatcacatcttctgtcactcagggcacgagaaggtggggttttaaaagttatccaatcagcgacgctgggttgggaaccgtccaatca

SEQ ID NO: 30809 - DNA, 122 bp, Homo sapiens
cctctccactcttaaggagatgctactaactcgctagcggggattcaacccggaggcgcccgagggcttttccgattctaggcggggctggggagatgccaggatccccagggctcccgagg

SEQ ID NO: 30810 - DNA, 122 bp, Homo sapiens
gctgacccccgtcctgtccccggacccgcagggcatgtacagctgctgcagcgctgaggccgccccaccgcccgccaagcccccgccgccgccacagcccctgcccagccccgcgtaccccg

SEQ ID NO: 30811 - DNA, 122 bp, Homo sapiens
cgagtcgctccgggttggctgcgccagtccagagttaaactttcagccaatgaaaaagggcgcgaggcgtgacgcacggaaacgtcatgggaattcccccctccggggggccgagaaggggc

SEQ ID NO: 30812 - DNA, 122 bp, Homo sapiens
ttgtctgtctccgccggcggccgccggggccgcgttcccggctcccgattggttgccgcacgcccggtagaccatgacgtcgttctatttgcatatgacattgagacgtcaccaaggccggt

SEQ ID NO: 30813 - DNA, 122 bp, Homo sapiens
tggaagggagggaggaaaggagggaagaaaaataactgtgttttcatcagtaaatgtaagcgaccaaatagaagtctgtaggaagctaagattcaaaggtgaggaaggactgaggtttgggg

SEQ ID NO: 30814 - DNA, 122 bp, Homo sapiens
gaaaactactgccctagggctcagattgggccagggtttgaggccccaggaatcccagtgcgccagttcccaatattgctaggacatctctattctcgggaggaaaggagaatttcaagagg

SEQ ID NO: 30815 - DNA, 122 bp, Homo sapiens
accaaaggttttacttacaagcaaaatcccaacttttgtttcagttataatgttatttcccgtggttcctattgttgctaaatatgaatgctgcaaacaagatagaaaccaaattccaaact

SEQ ID NO: 30816 - DNA, 122 bp, Homo sapiens
tagctgggccccggagccacgggaacgcaatggaaatctaggagtggaatagctgggccccggagccacgggaacgcactggaaatctaggagtggaatagctgggccccggagccacggga

SEQ ID NO: 30817 - DNA, 122 bp, Homo sapiens
ctgctgaccgacggggacgtgcacatccgtggtgggtgcctgcaggcctcccgcccaccccgctctgcagctgctcctccggggcctggcctcaccacagttccccaccatcttttccattc

SEQ ID NO: 30818 - DNA, 122 bp, Homo sapiens
gtgaggctgccctttccagagccgccgggagaaactctggatacagagaccctagcctggcgccagtcccagcgttcctcctagtcggggaggaatctgtgggtgggaggtggggagcctga

SEQ ID NO: 30819 - DNA, 122 bp, Homo sapiens
cgtacgcacgcgcatcgggagctgtcaagccttcctgccccaggggttgccagaacatgccggggcgggaggttgtggggtctacgcggctttcctaacacgaatctttggtcccccccagt

SEQ ID NO: 30820 - DNA, 122 bp, Homo sapiens
ccgcggtggatctggagctcctagatgtccggggagggtatttctacaggctggggcaggcgcggagagcagaagccgaccaaactacccaccagagcagggccacggggctgctccgcgct

SEQ ID NO: 30821 - DNA, 122 bp, Homo sapiens
aatgcagaccctccccctgcccagatccactgcacgagaatctacatgtctgtgagattccgggggcacctctctgtggagtttgaggagcacagccttagatgctagtccccggtgtgggc

SEQ ID NO: 30822 - DNA, 122 bp, Homo sapiens
tcagaggcagctcacactttcaagtctgaatgctgactcatgtcctccccttcagggcaacggaaaggaagggtggagttggaggatctggggctgtagggtaggagcaggcaggggggtgg

SEQ ID NO: 30823 - DNA, 122 bp, Homo sapiens
agtgggtgttaatcctcctgcactccctgaatgtacatatgcagacatacccagcatcaacgggaaagctgcgggacaggatgtcagaggtgtgcatgaagtgaggtgctattggcatgcac

SEQ ID NO: 30824 - DNA, 122 bp, Homo sapiens
ttcaaatgagtggaagttcttattttgtattctttaatcagctgaacaataactcacaaccgttggacaaaattgttttgcattatttagtagtaaggtatttaatttaaaaaaacttgata

SEQ ID NO: 30825 - DNA, 122 bp, Homo sapiens
gcttcccagtttgctttctcatcctcaaactgacgacgtttctcctctaattctttgtgccgtgctcccaaattctttttcagttgcacatggcactgctggagctaaatcacagcacaata

SEQ ID NO: 30826 - DNA, 122 bp, Homo sapiens
cagccggctctcaccacaaaaatgcttggctgagggtaccccctcagaggcacctggtttcggcagacgctgcaacttcttcactggccaggctcctgccatttgctggcgaacaggtgctg

SEQ ID NO: 30827 - DNA, 122 bp, Homo sapiens
tggataaatatgagaagtgcaggctttcatctgaaccgtcctctgaccagctgcagatgacgtgaggttctggttcactttacacatttcgtccgacgtctcctttctaggggagaggagcc

SEQ ID NO: 30828 - DNA, 122 bp, Homo sapiens
cagggctacccccaggaatcccccaggagaggagagctcgtcttgacaagatttctagatcgagatttgggctgatggggtgaacccaaggaagagccataggacccacagtgtttttataa

SEQ ID NO: 30829 - DNA, 122 bp, Homo sapiens
aagggactaggagagccgggcgggccgggcgggggcggggggcggggccagcgccgggggcggagtcccggcctcacctggttcacctccttaaagggacagtagggcaggaaagaaacttg

SEQ ID NO: 30830 - DNA, 122 bp, Homo sapiens
ctatctccccatgcgcatgcacacccggctctcccttccaggccctccccaccacgtgggcgcggcctaccctcccgcagggggtaataggtggagtcaaggggctacttccgggattcttt

SEQ ID NO: 30831 - DNA, 122 bp, Homo sapiens
agtggagatgacaagaggctcccattctatgagtggagataacaagctgatgacgaaacccgggtgctcccctcattggcacccagcaggcagcaccggcccgctcccggagccctccatcc

SEQ ID NO: 30832 - DNA, 122 bp, Homo sapiens
gaaggggctggttggaaccggtggcaagaggctgtggcgggactcaggcctccccgcagtcggctccacaatctgcgccccaagttcgccttgcccagcccagcctcagtccccttcagcca

SEQ ID NO: 30833 - DNA, 122 bp, Homo sapiens
ccacagtcctcgccagtgtagccggggtcacacacgcagcgcccgtccttgcagcgtccccgctggctgcagccccgagggcagctcctcaccccacagtcctcgccagtgtagccggggtt

SEQ ID NO: 30834 - DNA, 122 bp, Homo sapiens
cgcaacctccacgacctggatgtgtccgacaaccagctggagcgagtgccacctgtgatccgaggcctccggggcctgacgcgcctgcggctggccggcaacacccgcattgcccagctgcg

SEQ ID NO: 30835 - DNA, 122 bp, Homo sapiens
atctgcaagcgagtttgcaaagcactgatgcccaggtgctgcgggggcgggcgcagcgcgcgccgctcgccactgggtggcgctgcccgctcggcccggcgctcctggagctgcgagccgcg

SEQ ID NO: 30836 - DNA, 122 bp, Homo sapiens
ggccccgtccccagtccgtgagtgacagaagatgtgaccaaacactggactcaatgaggacggagtgacaacctaggctgcagcctttcctggcaggcctttatccctgctctgagcagggc

SEQ ID NO: 30837 - DNA, 122 bp, Homo sapiens
aaagcacttcactaacggagtagtgaacatttaaaacactgagacagtaggaagtctttccgctttatacgtctcctcctttccccttgtacagaaaagcagaaatcttaaaaacctccgat

SEQ ID NO: 30838 - DNA, 122 bp, Homo sapiens
ggccacgcccaatgttcaagtctataaaagtcggtgccggaggctcccagctcagatcgccgaagcgtcggactaccgttggtttccgcaacttcctggattatcctcgccaaggactttgc

SEQ ID NO: 30839 - DNA, 122 bp, Homo sapiens
tagactgatgcgcctcgtatcacggggcctgagctccacttggggttctggggtcccgtccgtgggtccgaccctggcttccacctgaatgtggtcttcggtggtggccgcaggcacccctg

SEQ ID NO: 30840 - DNA, 122 bp, Homo sapiens
aggagaaggaatgtttttcagttgcaggcatatctcactttatcatgcttcgctttattacgcttcacgaatattgcctttgtacaaatggaaggtttgtggcaaccctgtcaagtctatca

SEQ ID NO: 30841 - DNA, 122 bp, Homo sapiens
cgaactcctgacctcaggcgacccgcctgcctcggccttccaaagtagtgggattacaggcgtgagccaccgcctggcccaggttttttaaatgatgaaatgtcagatacaaaagaaagagt

SEQ ID NO: 30842 - DNA, 122 bp, Homo sapiens
ggagctgcgggaggcggtaccggctctgctcggggagccgctggcgggtcctgagctggacgagatgctccgagaagtggacctcaatggggatggcaccgtagactttgacggtgagtctc

SEQ ID NO: 30843 - DNA, 122 bp, Homo sapiens
cctttgaccctccccgcgatttccggtagcgttccgcttcctccggaagtcggaaggagtcgctctgtccgtcccgctcgttggtggcgctgttacatagcccgtagtcagaggcctttcag

SEQ ID NO: 30844 - DNA, 122 bp, Homo sapiens
cccctgaatcccaggagggtagcacttgctttcctgcccattgtgaaggcaaggaatccgcgtgttgtcctatcaattccattcatggcagggtagagacttttcaaatggaagaaaatgtg

SEQ ID NO: 30845 - DNA, 122 bp, Homo sapiens
actctgagagtgggtctcgggcctcaagtcccctagccgcccctagaaggtctaggggtgcgtggagacaccaccattcctctcagcctgtgtctgtctcaaaggccccacctcacctcccc

SEQ ID NO: 30846 - DNA, 122 bp, Homo sapiens
tggaagtttcttattttgaagaccatttgtttgaatgaaatcatcaatcatttctagtttcgtaaaacttggaagtctccttgtggtagagactgcacagatcccttcttgcttctttgagt

SEQ ID NO: 30847 - DNA, 122 bp, Homo sapiens
gcatacaaactcacatgggtgaaaatgggccacagtttagtagggggcatcgttcaggagcgcatagtcagcggtgagaagcaacacctgagcctggttaacttagagccccgatccaccta

SEQ ID NO: 30848 - DNA, 122 bp, Homo sapiens
cccccgcccggtcctggaagaccgggtcaggcattgttttcttgcctattgttccagttccgcgccccccaccctaagttgagggagtttggggagagtctagggagcaatgagtgaactcc

SEQ ID NO: 30849 - DNA, 122 bp, Homo sapiens
tcgcagctctcgcctaacaggaaagggaagaaacaggcggaagtgggaactgcacctgagcgacagtactgcaaaccaataggcagccggccacggcggtcaggcgccttcggtcgcgtctg

SEQ ID NO: 30850 - DNA, 122 bp, Homo sapiens
acagcatgggcgggatcacggccagctggcgcatctgcttctccaggttctgcagggaaacggagggcagggtcagaggcccagggacgaggtgctccggccggcgcaggggacccagggaa

SEQ ID NO: 30851 - DNA, 122 bp, Homo sapiens
tgggtggcagaaggagaccctgtctcaaaaggaaaaaaaaaaaaaaaagcagggtgggtacgaggcaaaatcgtgattaacaagctttggaagtttaataccagtgagctgcgtaagattgc

SEQ ID NO: 30852 - DNA, 122 bp, Homo sapiens
ttcttatttgaatcttttagccgtgttagattgatgagaacgctgtcatcactcctgtttcgtagctgagaaaacctctgaaaagttgtggggtttgtccaaggtcacatggcaggttgggg

SEQ ID NO: 30853 - DNA, 122 bp, Homo sapiens
ggctgtcagaccctgctgagtcccatcgttagctgtggaccccctggcgtcctgctcacccggccagtcatcctggctatggaccactgtggggagcccagccctgacagctggagcctgcg

SEQ ID NO: 30854 - DNA, 122 bp, Homo sapiens
cgtctccgcggctgccggcccatcccccacagcctccggcccggcgcgcggaagccccgccggtttccagggaaaccgaagctcaggccgccatggcaaccgcctgacgtggcggcgccccc

SEQ ID NO: 30855 - DNA, 122 bp, Homo sapiens
gcactagctgaggtttttggagaatactatatagcaggctctgtgtcaagcacccacatgcgttaaatcgggctgttgacttctgctgttaatcattaaaccatacaaacatgagtaagctt

SEQ ID NO: 30856 - DNA, 122 bp, Homo sapiens
ccgagcccgggacccgcccctctttgttgcggtggccaatagacgcattcggaacatcggcggctgcccgggtgacttggttatatgtcacagaataacattcgagaatgggacatggaatg

SEQ ID NO: 30857 - DNA, 122 bp, Homo sapiens
gtgcccttgggactcccgaccctggggttggtggccgcctcctggggttttggctggggacgcgctgggtccaggacggcttgggcgatactccccctacccgcccacctagccccaggccc

SEQ ID NO: 30858 - DNA, 122 bp, Homo sapiens
tcttaagcattgcttttcgctgacttcaactttttagataatttaactttttcagccaatcgccaatcagaaaatcttcaaatccacctatgatttggaattccccactttgaattgtcctg

SEQ ID NO: 30859 - DNA, 122 bp, Homo sapiens
tagtctcctcaccccatcaaaaaacttctattagtaatggagacctcgccggagaccttccgcggagagcgctgccttcccaattcccagtggaaaaattctgcgcgaaaaactaattctac

SEQ ID NO: 30860 - DNA, 122 bp, Homo sapiens
ttaagtaaactgaaagaaaggcagcattgaaagcattaaatcaagcacttaattcacttacggctatgtaaaaaaaaaaaaaactgtgcccattcagactcaaccttctaaatctcccaaaa

SEQ ID NO: 30861 - DNA, 122 bp, Homo sapiens
ctcattctcgcaggcctctgcctgggcaccagcacctctcaccctggccactgccttcgtcggaggggccgtcttaaaccctgcctgggtcccgtcccctgggtatccctggggcagcggct

SEQ ID NO: 30862 - DNA, 122 bp, Homo sapiens
ggtaccaaataggtaacaagcgcctcctgaacggggcccccgaagcactgtggccgtccacgcagtcactccaggttacagtccaggacatttggcaaattatgcacacttggcaaatcaga

SEQ ID NO: 30863 - DNA, 122 bp, Homo sapiens
gtcctacaaaggcaatcaagtccccaggcaagaaggcctgctttgggaaagggctgttaccgtctgtgtttaaattataaaatataaactaagtttctcccaaagttagttcagcctactgc

SEQ ID NO: 30864 - DNA, 122 bp, Homo sapiens
gcctgggcgacagagtgaaagtgtgtctcaaaaaaaaaaaaaaaaagaatattatataaacgtagttgataaatcagcatagaatttgagagaattgactccaactttctttttttattttt

SEQ ID NO: 30865 - DNA, 122 bp, Homo sapiens
acacgtagcgacattttcctccagatcaactcatgagtcatgctgatgaagaccctcagccgcgcacaccctctgtggacagggagacgcgcagcttggtttcctgtccccgtcctctgaca

SEQ ID NO: 30866 - DNA, 122 bp, Homo sapiens
ctgccccgcctccactaggccccgcccctcgccaagtcatgaagtccgggaaggactccacgccctgcccctgaaggggagggagcactcttggaccacgcctgtcccagccacgggacccc

SEQ ID NO: 30867 - DNA, 122 bp, Homo sapiens
ggggtaggcaccggggatggggagcgtctacctggagacttgccttgaccccggctgctgcggctgcggctgcggctacggctgcggctacggctctgagcccggccccggatctggctctg

SEQ ID NO: 30868 - DNA, 122 bp, Homo sapiens
gcgggtcgacgtgcgctcctctctggtctcgagtcaccaggaccagatcgaggatgcggccgaccccctgcccgatgtggaaagcgaagtctccacctcgtgattgggtctctgctgtcaga

SEQ ID NO: 30869 - DNA, 122 bp, Homo sapiens
cagctcacaatcttaggatttgccctaacaagcaaactcagaaaactgctgaggaaggcacgggagggtggctgtgcgaggtactgccggggctgagctctcatggaggctctctctgttct

SEQ ID NO: 30870 - DNA, 122 bp, Homo sapiens
aagctttcagggaaggaaaaaaaataaaacacacagagaaaatagaaaaataggaaattccgggacttcctggaacaaaggagagaatctcagtgtctttttaccccaaggcttacgtagaa

SEQ ID NO: 30871 - DNA, 122 bp, Homo sapiens
tggaatttggactcaggtgcactagtgcatattcttctacatcatgctatagaagagagtcggggccgggcacggtggctcgcgcctgtaattccagcactggggaagccaagatgggcaga

SEQ ID NO: 30872 - DNA, 122 bp, Homo sapiens
tgcctgcctctccagagcacctctttccctggctcactctcttctggccatgatggtctccggtgccccctccttgaacacactgggtctttccctgctgctaggccgtggcctggcttctc

SEQ ID NO: 30873 - DNA, 122 bp, Homo sapiens
ctagactgcggtgcggccttcatgtgcacgcccctgccgccgtttaccgccaggtggcagcgtagaccaagtaaggaagccggcccacccagagctgggaactacaggggtgtgctttgtgg

SEQ ID NO: 30874 - DNA, 122 bp, Homo sapiens
gcacgtgccgcgctcgggcagacgcagctggaagcgcagcgcagggctggcttatactcccgcagcgcgcggcgggggttggcagaacggccagggcatagactcagtgggtgaataagggt

SEQ ID NO: 30875 - DNA, 122 bp, Homo sapiens
catgaggggtgggggctttcctggagatgccccaggcaggggcacaggcactcaggaattcgaccgctcccaggagccacctgtggccaggggcgggggcaggggcatggggttgctgcctg

SEQ ID NO: 30876 - DNA, 122 bp, Homo sapiens
cctctagaccagggaccgcaaactctgtgaaggaccagattgtagataccttaggctttgcgggccacttagcctcaggctctgtgccccatactctcccttgtttttttttttgaatgact

SEQ ID NO: 30877 - DNA, 122 bp, Homo sapiens
gccgggtgtggtggtgcacacctgtagtcccacctactccagaggttaaggtgggatgatcgctggagcccgggagttggaggctgcagtgagctatgattatgccactgtactccagcctg

SEQ ID NO: 30878 - DNA, 122 bp, Homo sapiens
tcttgggcgggacatccttgcccggcttgggggctgtctccatctcgcccacccgaacggcgatccacgtgcaaaactcctctcagctgccacacagtcggcttgaaaactcccggaagccc

SEQ ID NO: 30879 - DNA, 122 bp, Homo sapiens
cgggtcgagctgagtaaggcggcgggctcggcgggggccatggagctgctaaagctgaaccggagcgtgcagggaaccggacccgggccgggggcttccctgtgccgcccgggggcgcctct

SEQ ID NO: 30880 - DNA, 122 bp, Homo sapiens
ggttaagaatactagcagaagatggaatggagtatctgattacctaggcagtattaattacgcagcaggctggtttatctgtacctatttgagcaaaggataaggaaaattagaaatcccag

SEQ ID NO: 30881 - DNA, 122 bp, Homo sapiens
agccccctgatagtgccagaagaaaggctctagcagaaagccagttagcatcctgctttgcgcatctttgtgatatatataatttgatgtttgatagatatatcaaaagtgatctttgtctt

SEQ ID NO: 30882 - DNA, 122 bp, Homo sapiens
cccactggaagctgaaccctgcaacccagtgacaggaactcctgaggttggggggtgggtcgtgtgcatctctggccctatcagccagtgccccatgtagtaggtgtttgagaaatgaagaa

SEQ ID NO: 30883 - DNA, 122 bp, Homo sapiens
acagcctgaggacggaggcacagccagacgcaccaaggggggcgacccagaggggttgctcgagcgccgtcacccagggccagggggcgtggcctgaatggggcgtggccagggcgggatct

SEQ ID NO: 30884 - DNA, 122 bp, Homo sapiens
ccgcctccgcctctgccgcctggattgcattattatttttatccgggttgccgtttgctgcggatggtggtgagcgcggggctggctgggctgcttggggggtggggtggagggaagttgga

SEQ ID NO: 30885 - DNA, 122 bp, Homo sapiens
ccccgcctctgtgccaggcacttcctgccaactatcttttgacattcccagaggcaggagcgtgcatccttgaaggtgcttctcctcgagggtgggcactatgaagggagagggagtgtagc

SEQ ID NO: 30886 - DNA, 122 bp, Homo sapiens
tagaaggaacagttagagcccaacttctccgctatacagaagacagtgaagggaggatgacgatggcatttaaagacctcaaattagtcaacgaccaaatcatcctggtcaccccggtaact

SEQ ID NO: 30887 - DNA, 122 bp, Homo sapiens
aatcatttcaaactgacagctcaaaaccccttttccctaaaatattttgtaagccccttgcgttccaagtacccaggtttagtggctacctgaggatgcatttctccccaccctgatatgaa

SEQ ID NO: 30888 - DNA, 122 bp, Homo sapiens
tgaggcccgcgccctgagccagcaggatgggggtcctctggactccacctttatctttcccgtgtgggctgagccggcccccgcagggccggcctggcactcagcccttcgagggcgggcgc

SEQ ID NO: 30889 - DNA, 122 bp, Homo sapiens
aggcctgtgccctagatgtccctggagacagcgccatctggtggaacttcctgtaacgatcgagatgttccgtctgtgccgtccaacatgggagccatgcaggacacatggtgactgagcac

SEQ ID NO: 30890 - DNA, 122 bp, Homo sapiens
tgtacatgaatgagtgtattacgaggacatgtgtgggaccaaccaacattcagactatgacgtaccttgaacctatcagcagcaggatgtaaacattcacaagaatgctgtcactctggaaa

SEQ ID NO: 30891 - DNA, 122 bp, Homo sapiens
tgctaaatcaaacaccgaggctagcaggatagaacgctctcatcaatgaggcctaggtcccgagcccaccctgagagacaggcagtggcctcaagaggaggagacatcaataatcaaatacc

SEQ ID NO: 30892 - DNA, 122 bp, Homo sapiens
atgtctgaccaccggccgaggcaggttcagaagcgtcactgtcctcgacccgattggacacgacttactgaagctcagatggtgcctgggcagggaaggccagcgtgcccaccccagcggcc

SEQ ID NO: 30893 - DNA, 122 bp, Homo sapiens
caccgggcctcctttccacatcctcctccgggaagggaccccgttccgggcctcgaccggcgcagactgggctgacccactttcttgggcccactgagtcacctcgaaacctccaggccggt

SEQ ID NO: 30894 - DNA, 122 bp, Homo sapiens
ttctctacctgtacaactgagattataatgtttatctcgtagggcggctgtgagcattggcgataaagtgtgttagtagttagcacatgaacatgatggctgctaccttactctcacactca

SEQ ID NO: 30895 - DNA, 122 bp, Homo sapiens
caaaatggaattcctctaagaatcaaggactggccaatacttgtggaagcaattgatgggcgccccatagcatcgggcccagttgtccacgaaactcacgacctgatagttgacctgggaga

SEQ ID NO: 30896 - DNA, 122 bp, Homo sapiens
ggaaacgtcttggtcggttatctaggatcaaagagtcaaaggtagcgatgacttcatccccgtagagggcgcctccctaccccgacagtggattttcggtcagccggtttgcccgggatgtt

SEQ ID NO: 30897 - DNA, 122 bp, Homo sapiens
actccacctcaaaaaataaataaataaataaataaataaacttacgtatgtatgtacgtacgtttgtaaagggggggttccaggcccttcagaaaaacagtcctgggttttactgtatttac

SEQ ID NO: 30898 - DNA, 122 bp, Homo sapiens
tgtactatggggacagaaaaccagaaatgtggagactgaactggtatcccagagagtgcacgaccctgggcatctgggcaagggcaggcatgagacctctgaattagaagggtccagccccc

SEQ ID NO: 30899 - DNA, 122 bp, Homo sapiens
cactgccgcacgttttcctttgaggccaacacaaggattgatttgctgttcatgagagaccgctaaacggcccgttggggaatcatctttcaaaattaaattcatctcggctggcttcctgc

SEQ ID NO: 30900 - DNA, 122 bp, Homo sapiens
gccccatcgtctctgtgggtccccagagaagccatttctgacttgtctcacaggggctgccggaggaactgggaaaagaccacagggagaaggaaacctccagctgaacttagtaacaattc

SEQ ID NO: 30901 - DNA, 122 bp, Homo sapiens
gtgtcgaagccgggagttgcgcggagaaggagcgctcaacacagcctcagcggttcactacgcaagcgcgaccaacggcttcccgggaagcagccaaaaacgcttggccgcctaccacgtcc

SEQ ID NO: 30902 - DNA, 122 bp, Homo sapiens
gactcattggttcagccacccctttcatctcggctctttattggcagcttctccataaggcgccgccctttccgtatcagaaactaccaggtgcttcatggttggactgaaattccgctttc

SEQ ID NO: 30903 - DNA, 122 bp, Homo sapiens
ggagcgtggcacacctaaggggaacgacattctcaaggtgatcccttcctcactgccttgcggcatgtcagaaagtgtgctttccaggaactgcaggttgggcgctaagccttcgtttgaaa

SEQ ID NO: 30904 - DNA, 122 bp, Homo sapiens
gctggctcaggagtgaagctgcagacctttgcagtgagcattacagctcttaaggtggcacgtctggagttgttcgttcctcccggtgggcttgtggtctcgctggcttcagcagtgaagct

SEQ ID NO: 30905 - DNA, 122 bp, Homo sapiens
gcctgctcattcctactccctctgcgctgctcctgcgcgctccctagaatcttctagaagcgtggctgttcgtgctgttgcctgcctccctgcgcatacattctcatattcttaactaggaa

SEQ ID NO: 30906 - DNA, 122 bp, Homo sapiens
caggccaaaataatctccaaaggccagctctgacccttttaaatcaattttagctaaatccgttcacaaaaggcttcgcacatccagtgtccctgaaaaataaaggaggttgggcaggccct

SEQ ID NO: 30907 - DNA, 122 bp, Homo sapiens
ttgacacaccgtcttcacccagcagcaggtgtgcagacgcggccctccccgtggaggaggcgcgagtaccgcacaaaacctttctggttgtgtgtgttcagctcagttagtctgtagtaacc

SEQ ID NO: 30908 - DNA, 122 bp, Homo sapiens
cttcaccaccacactcctcacgtccaggcagtgatcgacggcctggcggcaccctcacagcgggcccatagcacggggccacacacgtcccctgagcttagcctgggcacattcgtctgcca

SEQ ID NO: 30909 - DNA, 122 bp, Homo sapiens
caacccgtagtgcgtggtcgccgcgaggggagttctgcgcaagtacggaagctgaggttccgcgcttccgggaggccgtccgccccgccccctcgcgggggcgcttcattggtcatcggctc

SEQ ID NO: 30910 - DNA, 122 bp, Homo sapiens
gtccctatagccaagccctgggcagagggtggctctggccttgccaccctggaatagccccgggaggagacatggccctcagaggcctgtccagggtggtcgaagcagtcccgtgcccccac

SEQ ID NO: 30911 - DNA, 122 bp, Homo sapiens
ctaaggggctactgttctcttccagatgcgtgagggatgacacctacggaccctactcctcgccatctcttcgcattgcccgcttccggttcagggccttccacttcctgaaccgcttcccc

SEQ ID NO: 30912 - DNA, 122 bp, Homo sapiens
cacctccaagccctaccccggatacaagaaggatactggccacaatgaggatggtgcagacgctgcagaggcccaggcggaggggcccaatccaggcagccccgggctggggcagcctcttc

SEQ ID NO: 30913 - DNA, 122 bp, Homo sapiens
gggcagttcggtagaccgcagaaccgtagtcattttagactgcattaataacacttcaggcggggagactacgctgagcagaatgcacggtgatcatgacctagtcgacatatttcaagggc

SEQ ID NO: 30914 - DNA, 122 bp, Homo sapiens
ggctccgcacggagaacgagctgcatggggagaagctgggctggccgcagtacaactggacgccgaactccggtaccgccacccaccccacctccagccttgggtcttaaccccctccccag

SEQ ID NO: 30915 - DNA, 122 bp, Homo sapiens
cacacacacatgagttgcaaacagaaaagacacacacataggcatgtatgcacagacacacgcatagatgtccacacagttgcacacaagtgacagggctgccccaggggtcctggggaaga

SEQ ID NO: 30916 - DNA, 122 bp, Homo sapiens
aaggtgttcaggtagcagcgacatctttatctgtcctcacttaccctgggcaatactgagcgggcccagggactcatgctacatgatgtatgtatctgaccgttttcctgtccatgcctcca

SEQ ID NO: 30917 - DNA, 122 bp, Homo sapiens
aatggcctcctgcagtgcgtacgtggtttcctctgacatcttccactcggtacagtgattcggggactcacccaggctgtgtgtgtccttcccccatggccaagcagggtcccagcagtgcc

SEQ ID NO: 30918 - DNA, 122 bp, Homo sapiens
tgcgccggccacagccggcgcgccgttgggggagggaaaaccgctgagtgccgcgcacagcgcctgcgccgccccgccccgcaacggcaaccccacccctgcgccagccccgccccctccgt

SEQ ID NO: 30919 - DNA, 122 bp, Homo sapiens
ctcactgttcctgggtgggccaggcatgtttaggagaaccaggcgggcgtcgtgggagcgcgtgacaatgacttcattgagcttcacagcagtgtgcatgcgccgcacattggattggtccc

SEQ ID NO: 30920 - DNA, 122 bp, Homo sapiens
cgcctcatcttacatttcccctcccaagctcatttagtgggaacctctgctgggctcctgcgcgcctccctccccaccccctcaactctgggcgaccatctccccctcttcccttgctcacc

SEQ ID NO: 30921 - DNA, 122 bp, Homo sapiens
ttaggatctgtgttgatatgtaattcctcccgtcttcggcttgtggaaagctcttcgactcgattcccgatggttttgacatgattccagaaagctttgatggcttccttgctttggggatg

SEQ ID NO: 30922 - DNA, 122 bp, Homo sapiens
ttgctctggagtgagctcacagctccaactcacctttcagcaagggccatacgtgcacttcgtggtcccctcgggagcctctggtaggttaaacgtcagtcctgagctgcgcttgttgggtg

SEQ ID NO: 30923 - DNA, 122 bp, Homo sapiens
atgtgacagaaggaagaaaaatgtctcaccagagatccagccagccacaaattcctccaccggcattgtctgggcttgcgggaactggtggctccagcagaggagacagagttgaattcccc

SEQ ID NO: 30924 - DNA, 122 bp, Homo sapiens
aattctagctggcccgcaagtgccgcgggcagccccggttcccgcctatgcctctccctccgcacctccccgcaggctgagggagccggctccagcctcggccatcccaagaaggggctccc

SEQ ID NO: 30925 - DNA, 122 bp, Homo sapiens
cagcgcgccgaactccccagtatgagcgaacctcaagtcactgccctcgcgcttgtcgagcgaactctcaaggcttgcaggtcgtctccaggagtcagagaggtccggactccggggattcc

SEQ ID NO: 30926 - DNA, 122 bp, Homo sapiens
tggcctgcaacctgtctctccaaggtctgatgccatttaggggttgctgttgatgttaagcgggttccccctgcccagcttctcacaggtttccttttctggtttccgaagtgcgagattta

SEQ ID NO: 30927 - DNA, 122 bp, Homo sapiens
tccaggtcaatgtcatttagaatatattgcatccttttcttggatctgtctgctaggacccgggccaccctcctgctggaggcaaccccgacagcccatattttaagcagctcttttcacag

SEQ ID NO: 30928 - DNA, 122 bp, Homo sapiens
gccgctcaccgcccctcctccgcaccgcccctacccgcaggccgcggcgggctgtcggcgcggggcaccctgggacttgtagtccaagccgcttgccacctgccggctgcaaacggcggagg

SEQ ID NO: 30929 - DNA, 122 bp, Homo sapiens
agtatgaccgctacctcaacaaggagatcgaggaggcgccggacatccgcaagatcgtgccggagctcaagagcaaggtgctggcagacgtggccataattttcagtgggctacacccgaca

SEQ ID NO: 30930 - DNA, 122 bp, Homo sapiens
tagctgggattacaggcgtgtgccaccacacccggctactgtttgtaattttagtagagacggtctcactatgttgctcaggttggtctcaaacacctggcttcaactgatccacccagctc

SEQ ID NO: 30931 - DNA, 122 bp, Homo sapiens
atcattttcacgactttttaaagacagtaatccttctggtcactgggacacagctgccctcgcccattctaaaaagtcagcgccctcaggaccgcgggtaaccacgtcctactgagcgcggt

SEQ ID NO: 30932 - DNA, 122 bp, Homo sapiens
ctcagtcctcctgccgggcgggccctgaggatgcaagggacggaggaagtttcgtgcgtgcgcccttcctatagcgcccagtagaactaacagtacctgtctctgtggcgcaatcggttagc

SEQ ID NO: 30933 - DNA, 122 bp, Homo sapiens
gccacaggcatggcggccaggagaggaggagggggcttcccgccccgcatggccgcaggccgtctccatggcaacaacctcccaggcccaggggttccgcagcctccgccaatctgagatga

SEQ ID NO: 30934 - DNA, 122 bp, Homo sapiens
gctaagtggaagaagctgatcacaaaagcacacatcttttatgattctacttacgtgaaacgtccaaactagatatatctacagagagagaaagtagagtagggttgccctgggctggggat

SEQ ID NO: 30935 - DNA, 122 bp, Homo sapiens
caacccgcagggacctgggggactcggtggatccaaccacaggagaccatgagacacaggcggtctcgccgaggcctgccgcttagagctgtctctcctcctcacgggccccctggctccct

SEQ ID NO: 30936 - DNA, 122 bp, Homo sapiens
caggatttctcaggctcagactgagggttttacttcacccttcccagagggcacgcagcacggatctgtggatggaaggggctgtggaaacaggttatggcagagttggggggcggggtgac

SEQ ID NO: 30937 - DNA, 122 bp, Homo sapiens
cgcatgcgcgccgcgaggctctctgggacccctagtcctgctcccgaaaggtttggactgcgtctcccggcaggccgcgcgcctgggcgggcggggcacgtggtcgttgtcgcgtcgcgccc

SEQ ID NO: 30938 - DNA, 122 bp, Homo sapiens
gagaggtggagacgagacccagggtgatgctgaaacgtaaggacacgtctgcagggaatccggggaaagacacttcctccttgatgaagggaggcaagcatggggggccctggctgcccctc

SEQ ID NO: 30939 - DNA, 122 bp, Homo sapiens
tcactctccctggaggagccgctggccctggactctccaaattctgagctctcatcatggcggcggcggccgcggcggccgtcgggggccagcagccgtcacagcccgagctgcccgcgccg

SEQ ID NO: 30940 - DNA, 122 bp, Homo sapiens
ggaaggggcaaaacccctcgcagatccgaaagagatcctgttagagactagttttttccccgcgccacacacacacacgccctcaagcccttcatctcgagctcttcaactccagtccatcc

SEQ ID NO: 30941 - DNA, 122 bp, Homo sapiens
ggtcacctccggccgcagtgtggggctgggctggcagctggaactccaagcgtcctgtcccgtccctgcgcggcgactgcggtcccagccccggagccctctctggacaactccgcgcccgc

SEQ ID NO: 30942 - DNA, 122 bp, Homo sapiens
tggcttccaccctgggtcatcaacatggcctggaagagccgtactctggatacccgagggcgcggccccagcgccgcgacgccccgcccctctggctgctccgctctgggatgcacttccga

SEQ ID NO: 30943 - DNA, 122 bp, Homo sapiens
acccaggaaacacccacgtttaagaaaaagtagaaagggaaaaaaaatccacaaaggagacgttttaaaagcctgagaaagagaataaaaaccaggagagactgatggcatgaaaacaaagg

SEQ ID NO: 30944 - DNA, 122 bp, Homo sapiens
cattaatttcgtagcaagtgcagttgaaggtgttttgcatgttcattgtgcagtgcgcgccgtagtctgcacagtttggccggcaggtgggatgaagggcggggctggcggagcgcgcccgc

SEQ ID NO: 30945 - DNA, 122 bp, Homo sapiens
taagaagctgcgcggtagcgcggtgaggtgaggttctcagccaccaaagctgcagggtctcgtcgttcgttccctctggcctggcggaacttgcgtgggaagctgggaggacagaaggctta

SEQ ID NO: 30946 - DNA, 122 bp, Homo sapiens
gttttatctggcagggatcgtgagctggggtattggctgcgctcaggttaagaagccgggcgtgtacacgcgcatcaccaggctaaagggctggatcctggagatcatgtcctcccagcccc

SEQ ID NO: 30947 - DNA, 122 bp, Homo sapiens
aggcctgtccaggcgccattccccgtggcctgcacgctcctgggtcatgctccgctcaggcggctccttcagtgaagttgcacagcagtcagggtaacctccatgtccccaaagggcaagac

SEQ ID NO: 30948 - DNA, 122 bp, Homo sapiens
tgggagcgagcgggcgcgagggggctgctgtgggaggtggggcaaggcggtacagaggaacgcaccagccccaggccactcagacgcagaggagcccctgccctaggaggcccctctgcagt

SEQ ID NO: 30949 - DNA, 122 bp, Homo sapiens
acttttgttatttttagtagaaacagggtttcaccatgttggccaggctggtctcaaactcgtgacctcaggtgatccacccacctcggcctcccagagtgtttgcattacaggtgtgagcc

SEQ ID NO: 30950 - DNA, 122 bp, Homo sapiens
acagagatcattgctaccctctggggtggggggcaggcgggagaaaccaaggaataactacggttgggcagttcaaagcctgaacagtacagagcaaaagaaagccagcaagtgactagggg

SEQ ID NO: 30951 - DNA, 122 bp, Homo sapiens
ttaaccgagtatttgaatagcgaggaaaagggaggccggggcgagcctggcgttcgctcgcgctctcttgcttaatggcaaattgtgggcgagcgctgcgtttaaggaagtgctgctttgaa

SEQ ID NO: 30952 - DNA, 122 bp, Homo sapiens
ccgtctcccccagtaacgcaggggccgcggcggcggcggctgcggtggcgagggcggcggcggggctgcttcagcctctgtggaaccagcaggaacccctacctgactccagagctggctgg

SEQ ID NO: 30953 - DNA, 122 bp, Homo sapiens
ccagaatgcgtttgttatggattttattgaaccctggtatggccatgctttgggtgggtgcgttatccagaacagaacagaatgatggacctgtagggtgaaggggctgttgtaagttggtc

SEQ ID NO: 30954 - DNA, 122 bp, Homo sapiens
gcagagcctacagaacatggagaaaggaccccactggccaatgagatcaccacaccatcccgagcagagcctacagaacatggagaaaggatagccaatgagaaggccacaccatccccagc

SEQ ID NO: 30955 - DNA, 122 bp, Homo sapiens
agtagagacggggtttcaccatgtttgtcaggcttgtcttgaactcctgacctcaggcctcggcctctcaaagtgctgggattacaggcgtgagccaccgtgcctggccgacgaacaccatt

SEQ ID NO: 30956 - DNA, 122 bp, Homo sapiens
ctttctcatccggaaggggccaggcaactgccactttgattttgctcaagaaatcctcttcgtggactacctacgggctcagctgctgccccagccggccaggaggtgaggagaaagtgggc

SEQ ID NO: 30957 - DNA, 122 bp, Homo sapiens
ccagaggtcctcgatcccgtgtcgtcttcctcttcgcccccaggaggagcgagagggagccgcggttgatgtgagaaatagacttccgggaaatggcctctaaatcctggctgaatttttta

SEQ ID NO: 30958 - DNA, 122 bp, Homo sapiens
caaagccgctgccaccgctgaaaccgctgctgccgccgccaaatccaccgccgattccaccgccgcctccccggccaaagccactgcctgagccgccgcccgcactgaagccacctcctaaa

SEQ ID NO: 30959 - DNA, 122 bp, Homo sapiens
gggggtgtcccacagccgtgcaggtggggctgcggatgtgggggctcaccctgctggagccgggccggcgggccggggagcactggctcgggacctggggaacccgccctccgctggacagc

SEQ ID NO: 30960 - DNA, 122 bp, Homo sapiens
cacttccaggatgtctgacgatgctgactgatgagcagaaagccctggtggctgacaccccgcaagccctcagcgctcccccaccacccctaggcaaggaagtgtgcaagcgggataactct

SEQ ID NO: 30961 - DNA, 122 bp, Homo sapiens
agagccccaggcagaggcccagctctgcagtagggaaggcatcgggagtgccagggtgaacgtaccccaagggcccggcacgactgacctctcgtgcctgctctctcccttcctcgccaagc

SEQ ID NO: 30962 - DNA, 122 bp, Homo sapiens
agcaccccagctcccccacccccaggagcccctcaaccttggcctgctgtcatcctcgtccggccccaatcttcctgcaaatcgggcccttgcaggattcctgctgactcagcagctgggcc

SEQ ID NO: 30963 - DNA, 122 bp, Homo sapiens
aacgagagtgacctctggttgtcttcactgctacactcccaccagcgccatgacagtttacgaatgccatggcaacatcaggaagttaccgtatatagtctaaaatggggaggcttgaataa

SEQ ID NO: 30964 - DNA, 122 bp, Homo sapiens
caccgggggcgccctggaggagtccctgaagatctatgctcctctgtacttggtgagacccgtcacccgtcccgcagggcgagtttagtctggaagatgggccgggggctgcagttggtgct

SEQ ID NO: 30965 - DNA, 122 bp, Homo sapiens
tgccataacaaccaacaatgtatcttcgatgcaaagggacactttgtcatgaggttatttcgcttctctattctgggaaaaaccactgcaagtggaatgaaaagtaaccgcaaagggagggg

SEQ ID NO: 30966 - DNA, 122 bp, Homo sapiens
ggacggttccgcggagggatctgacgcacacggagccgcagcacaggctctattcagcggcgctggctggagctgagatggaagttagtttctatgtagcagaaatatgaaacaaatgaagc

SEQ ID NO: 30967 - DNA, 122 bp, Homo sapiens
tcccgaagggggcgattggtcatgacaaccccattgttgaattcatccaggggccgccggcgctcagccgtcttattattgttgctgagtttgatgagggtcccgcacttttcatgaaagag

SEQ ID NO: 30968 - DNA, 122 bp, Homo sapiens
acatcaacacaagctgttgataacacaaagctgtttattgctcactgtggtaagaaagaacgcggcctctacagagttttggtaacctctggaatagaaggcaaggttggaatttactgaga

SEQ ID NO: 30969 - DNA, 122 bp, Homo sapiens
gcaggcctggccccacaccttccggaagagccacggtgtgaggctggcatccctggggcacgacacaaccaggatgtagacgaaatagatgcaatatctggaggttctcctataggtgtctc

SEQ ID NO: 30970 - DNA, 122 bp, Homo sapiens
ggcggcggcggcggcacaagcccgcattcgcccgggtcaggagctgctctgtgtgaggagcgctgtctgcgcagccgccttgcacttccccactcctcctcccccctcctactcgtcctcca

SEQ ID NO: 30971 - DNA, 122 bp, Homo sapiens
agaaaacagaagagacttgtgtgtgtgttacacatatgtacgtatacacacacgtgcgttcgcaagcatgcctaaggagatttctttcaaaaagaaggctggcccaacaatttcagtggcca

SEQ ID NO: 30972 - DNA, 122 bp, Homo sapiens
cggcaggtaggcagtgccccggcggcggctgcggcaggcggtcctggaatgtgcgaggggcgtgatgacagcggccagcctctttgcgcaacaccttcgccatatatacccggggcgctgcg

SEQ ID NO: 30973 - DNA, 122 bp, Homo sapiens
agcactgtcccacagcagcaggcagagccgcacatgcattcaggccaaggtgaaggctgccggtgcagtatgtgaccagcgggccacccccaccgccgccgccttggcagatccgagagggg

SEQ ID NO: 30974 - DNA, 122 bp, Homo sapiens
gtggtgactgggggcggctgcaagtgcccagagaggctgacagagccatcggaatggtggcgcagggccgagagccacctctgcccctcggccttctgagagcggccccctgggccaccccg

SEQ ID NO: 30975 - DNA, 122 bp, Homo sapiens
acttcaaacactagaattacctggagaatttaaatactgatgccaggcctcacttctagacgttctgatttaatgtgcagggcctaatcccaagcatcaatttgaaaaacaaaacaaaacac

SEQ ID NO: 30976 - DNA, 122 bp, Homo sapiens
agcggaggaggcggggcttgagcagggttatgacaggtagggcgggacccaggtgagtagcgggagggggcggggcctgaggagggtgcggagagctggggtggggcccaagtgagtatccg

SEQ ID NO: 30977 - DNA, 122 bp, Homo sapiens
cctcgagattgtgagtggccatttaactgtgtcccgcacctgctctgtctttctcgttcccgctcacgccatgtgagacacctgctcccgcttcgccttccaccacggttggaagcttcctg

SEQ ID NO: 30978 - DNA, 122 bp, Homo sapiens
aaacaagcctcccgtagaactacaactcccagaaggccttgccactaccgcgaggaacagcgcccaaagtcacgcgaagatgcagtttctccgtatccgcaggcttctttcgctggcgccat

SEQ ID NO: 30979 - DNA, 122 bp, Homo sapiens
gctgccggcggacccggccatggagacactgaacggccccgcgggcggaggtgccccggacgcgaagctgcagccgcccggccagcaccaccgccaccaccacctccacccggtggccgaaa

SEQ ID NO: 30980 - DNA, 122 bp, Homo sapiens
cagcccagtgatctgcggtgaccagtttgccattattcgctgtaatgccacctgcttcagcggaagatcttggccaccttccatggaaaatttgagacaaggggacactgttctcctctaca

SEQ ID NO: 30981 - DNA, 122 bp, Homo sapiens
agatttgccaagaatgctgtgtgcacactcatctcagcagggcaggcccatcagggaacacggccacctttaataaccctggagcgggaggtgggacaatcaacaagcctgcctgctgcagc

SEQ ID NO: 30982 - DNA, 122 bp, Homo sapiens
cgggtctgaggccgagccctgtgatgaggggagccaccgcctggactccagccggggtggcgtaaagcccaggacctccagtaccccatgggttctggtggcaagcccatctcccctacacg

SEQ ID NO: 30983 - DNA, 122 bp, Homo sapiens
cagtctgtcacagcacccatggagttagtccagccaccaaatatggatgagattctattccgtggatcagaatcaaactggtacattgatccatttgagccattaagtgctctctattgtac

SEQ ID NO: 30984 - DNA, 122 bp, Homo sapiens
aaggaaccgaggaaatgcagaggggtgacagtgtaggaggtctgcacgctgcagcctaaacggggagaaagacacctacctggacaatgtttcatggtaatcatgcaattcaaacagtatgt

SEQ ID NO: 30985 - DNA, 122 bp, Homo sapiens
gaaactccgtttgtaatataatacaactggctgaaatcagttgaaaccaatataaccaaacggagtccatgcagaatgagcttgctgatgtcgcagcctgaatttccactgcacttttcaca

SEQ ID NO: 30986 - DNA, 122 bp, Homo sapiens
ttggatagttctcaccttcggacttctcattggttcttagggctcattgttccaagggcgcgtccaattagcgcgcagcgttagcgggagagcggaagaccccgcctcctcgcggctctagg

SEQ ID NO: 30987 - DNA, 122 bp, Homo sapiens
gagtaagctgcccgtgccgcgccccgacagcttccctcagccccaagccgccccttattccggatcccggccccaactttggccacggagcctcccattcaaatccctcccttgctgtcaag

SEQ ID NO: 30988 - DNA, 122 bp, Homo sapiens
cagcctcttcagaatgagctcataaaattcagtcagaaagtacccattaagagtataaatcgctgtttttctggcttccccaggattggaaactcctcagattgacaaccaatcaagataga

SEQ ID NO: 30989 - DNA, 122 bp, Homo sapiens
aaaatgatttggaatatggacagtgtcattcttattttgtaatttgtctgctctgtgcttcgataagatgcaggaatatggggcaatcctggcaggaataagggcaggacacgctggttgta

SEQ ID NO: 30990 - DNA, 122 bp, Homo sapiens
actgtccccctttcttctgaaaacccaaaatagatcctgagactaaatataatcccaacccgtgatcgattcctggggcgctgtctcctttcagagctgggtcggtctgcgcctctctgtaa

SEQ ID NO: 30991 - DNA, 122 bp, Homo sapiens
taatgaaaatcctcacttaaattacattgcatttcaaagcagttccctgttaaataacagcgtctcccaaaagtacactgttgtggaagttgaaacatgagccacaaatgaaataactttgt

SEQ ID NO: 30992 - DNA, 122 bp, Homo sapiens
ttcagaactctggggcagttctttggagttggagctcctagggcaaagataacgctaatgcgttgtttaaaagggttcaatttttaaaatacttttattggtaacacccattctgttcatca

SEQ ID NO: 30993 - DNA, 122 bp, Homo sapiens
gcgaatgctaacgtggtgaaccctggtctcccttccccagctcagctccggggagggggtcgcgggccgcaggaggaagccggagcgcagatacctcgattgcaactcctctgagtcgacgc

SEQ ID NO: 30994 - DNA, 122 bp, Homo sapiens
ctgccattgtttgtcccgcaggtggataaagtggttcaaatgttcgagaccatgttaacccgccacacgacgatggtggtggggcccaccagagggggcaagtccgtcgtcattaacactct

SEQ ID NO: 30995 - DNA, 122 bp, Homo sapiens
acagcctgggctgcttcccacacctcgacgcgccagctcagcccacactggcagctccagcgcctgacaggggacggtctcctgactgatccagcgcctgacaggggatggtctcctgagtg

SEQ ID NO: 30996 - DNA, 122 bp, Homo sapiens
atttacacatcactgatgtaaatatactagacctgtctaaatctaaactccaactacacacgaatttttttaacgctccacaaaaaagaaaatgagaaaagcaaaactcaacaacaccctaa

SEQ ID NO: 30997 - DNA, 122 bp, Homo sapiens
aggcatgtcaaaagaatggcccagagaaccaaaaagcaattataaaagtaccataataagcgcacgtaaaacaaaactgtcttgaatggaaaaagggagttacaacatgcaattaatctagg

SEQ ID NO: 30998 - DNA, 122 bp, Homo sapiens
cagcgccggcctcagggggcggggccacgtgggggcggcggccaatgggcttccgggctgcgctgccggcagggagcgggaggcggaagtgccgcgggctgccgcctccgtcccggctgcgg

SEQ ID NO: 30999 - DNA, 122 bp, Homo sapiens
aggttacggtgagccgagatcgcgccactgcactccagcctgggcgacagagcgagactccgtctcaagggggaaaaaaaaaagtaaaactgtcaaaaaacagtagctgaaaggaggaagct

SEQ ID NO: 31000 - DNA, 122 bp, Homo sapiens
cgccgaacgggcagcggcggaagaagagctcgaactcggcggcgtcccgcgcccggcccgcgcgccaatagcccaacgccatggtggcctggtagaggtcagtgagcagcggccgcgccgcc

SEQ ID NO: 31001 - DNA, 122 bp, Homo sapiens
gttccagctgatgccatacatttcctggatatcacccagagaagcacgatgctgccaacacgtttcgtgggctcaggtccatgacgcccccctcagccagtcccttcaagataaagtccgtc

SEQ ID NO: 31002 - DNA, 122 bp, Homo sapiens
actgcagagtcacagaaagagctaactatagcaggagtttctcaaggttcttagctcagacggtttgtaggcctaaccaaatccctaccaaacataaagcactgtgcaccagttaagctagg

SEQ ID NO: 31003 - DNA, 122 bp, Homo sapiens
aatagtctagactggggtgttaagccatttatagaaaaatctccagggcgcgctcagcctcgtggtcttgtcaatcacagacgcacaatagcaagcctgcaaagggaacggggacgggcgtg

SEQ ID NO: 31004 - DNA, 122 bp, Homo sapiens
ttcttcatttataaagtgagaaggctgaagaggttactctttaaggcttccctctaacctcgtggtctgtgattataatctgaagtgaggaaggcccaggaaagggtccctaggacgccggc

SEQ ID NO: 31005 - DNA, 122 bp, Homo sapiens
gtttgtaattgacacgccgtgtgaaaatgcggagaagatgtatattggaaatgccatgtacgggaattatgcagctgtctttgcccagctcatcatagatggaagatctcaaggtttgttac

SEQ ID NO: 31006 - DNA, 122 bp, Homo sapiens
catagcagagttgagtggaaagcactgcgttcctccacaccctctgtgcgtgcacacacacgcgcacgcacacgcgcacgcacacgcacacgcagacgcacgcacacgcacacacgcacgca

SEQ ID NO: 31007 - DNA, 122 bp, Homo sapiens
tgacgcaaagccccgccccccgcgcgttgccgggagacggcgcccaaccttcctctgcagcgcccctaccgacccgcgctccgcagctcctgagggctttcgagcccagatggtcatctgag

SEQ ID NO: 31008 - DNA, 122 bp, Homo sapiens
gaatcagcggcacttgacctgctggaaatcctgcttcacactcccctttctccgtccctgcgtccccacccacacacacatcttgggcagcactcagggacctcaccaggttacccaaggct

SEQ ID NO: 31009 - DNA, 122 bp, Homo sapiens
tgcctggccggccgggccgcgcggcgcgccccctcctccgcctggcccgcgggcgggctgcgtggcttcccccgggcaggccgccagcagcccgccgcctcctccatgcccgaggctgaggc

SEQ ID NO: 31010 - DNA, 122 bp, Homo sapiens
aaaccttaaaggtagagaagaaaagataaatctgttttcacagaaagtccttgttagtcacgaaggattgcaggatcgctgcagggcacactcatatgtgcagaaccagtctccaaatgggc

SEQ ID NO: 31011 - DNA, 122 bp, Homo sapiens
ggttgtaagaggatcagcttccacgattactctcagttggtcgtcaacttccaatggcgtcgctacgctcctcatcttcaaagctctcatctcctctgcaaaacttcgtgacccagcactgc

SEQ ID NO: 31012 - DNA, 122 bp, Homo sapiens
gcgcagccaatcagctcccggcggggcgagccgcactcgttaccacgtccgtcaccggcgcgggagccaatcgcctccctcgcgagcgggttcggtttactagaaccagacgcggctcaaca

SEQ ID NO: 31013 - DNA, 122 bp, Homo sapiens
tttcagtcccggggcgcgaggtgggctgggaggctctggaaggcgggtcccaggtggacgcgaaccgggggaggaagggatccgggcggggcagcagctcacctggggcggaacaggtgttc

SEQ ID NO: 31014 - DNA, 122 bp, Homo sapiens
cctcgggaaagctctctctgtaaatgagtcaaatgggaatgaggctggttagtgaacaatcgtcataagagggtcacttgaatttctagcttgcaggctttctcgtttgtttctagctatat

SEQ ID NO: 31015 - DNA, 122 bp, Homo sapiens
cctgccccgagtccttaatggaagttgggtgagaaccgactcctgttcattcatgccctgcgtgacgtcaccaacgcccgccctcaggaatgtctttaaaggggccgggctggcacccggag

SEQ ID NO: 31016 - DNA, 122 bp, Homo sapiens
cctctgtggccattatctggccctaaaagcctattctatacccagccgaggacagcactacgaaaatgacctcaagagagactttcccttggggatgttctttgagctcactgactgcactc

SEQ ID NO: 31017 - DNA, 122 bp, Homo sapiens
gatcagactgcatttctcacgcattccaaatgccctttttcccttttactctgtgaacctcggttgcaaaggaggggcttgttaaaaactcaccaatcggaggactgtgcccattgtaattc

SEQ ID NO: 31018 - DNA, 122 bp, Homo sapiens
gcagtgtctaaccagaagccaaggtcttctcctgggctcccaggcagggttgcattcccacgggggtcatttatatttattattattatttttggtacagccgcattttagggccttcgctg

SEQ ID NO: 31019 - DNA, 122 bp, Homo sapiens
ctggggcgcaggccgtcagaatgtcttgcccggaccaggggacaaaatggcggcagggtgcgcctctttaacttacacaatactttatcactcttaaaacttgaagttagtttcagacttgt

SEQ ID NO: 31020 - DNA, 122 bp, Homo sapiens
cccccgcccccaccccaaaagaggccacagagcttcagcaggaagtttggcctccccgcccgtctccagggaagcagcttttggtccccatctggggcaagcctccatgcccaaacatggtc

SEQ ID NO: 31021 - DNA, 122 bp, Homo sapiens
aagagcacagcagcaaaacccaggaggggcctggtacgcttggaaagcctccgaatgtagcgacaaataaccgaattccagcacaacctgcaacgaaacctgggccgcggccccacacaggc

SEQ ID NO: 31022 - DNA, 122 bp, Homo sapiens
actcctcggcagaggtgcagcgctgtgcggtaccgatcagaaactgggcgacgtgccgctcgctcagccccaacaccgagtgcagctcgtcctgaacccagcgctccagacccgccggcgtc

SEQ ID NO: 31023 - DNA, 122 bp, Homo sapiens
ccacctccagggacgcttctagcacttctacatgcccttatccctccaaactccagggggcgatagcccagcgcctgactctctgcagccccacggcgctccttccaatcagcagagagaac

SEQ ID NO: 31024 - DNA, 122 bp, Homo sapiens
gcacgtcacccaccttccggaggcccaggacactgcgactcgaggccacccaaatatcctcggaatagcgcccccaggagaaacaagcttgaccgttatgccatcatcaagtttctgtggac

SEQ ID NO: 31025 - DNA, 122 bp, Homo sapiens
aacatcttggccatttacaggacatatgtccactttgttagctctttaatataacctgctcgagtttattttcttgccatcttttttgtttcttcattactctccaatggatagatcatttt

SEQ ID NO: 31026 - DNA, 122 bp, Homo sapiens
ggaatcctgaagcttcggaattcagacattgagcttcggaagggtgagacggacatcgggcgcaaaaacacacgtgtacggctggtgttccgggtacacgtgccccagggcggcgggaaggt

SEQ ID NO: 31027 - DNA, 122 bp, Homo sapiens
cctcttgtctggggactgggagttggagtttccctgggtcaagcatgtcaccgtccagctcgggtgttccatctgtgaaatgtgcaaggggcatttataccctttcaatcaccaaaggctgt

SEQ ID NO: 31028 - DNA, 122 bp, Homo sapiens
gttgcctgcggcgtccacttccttggccgcccttgctacactggctgattgttgtgcagccggcgccatgtctgtgagcgagatcttcgtggagctgcagggctttttggctgccgagcagg

SEQ ID NO: 31029 - DNA, 122 bp, Homo sapiens
tcgctggagccccggacgctggcggcggtcaaggcgctgaggaaccgctaagtgagtgaccgcccagcccttgcgccccccggtacactggccccgccgggttcccacacacccgtcgctga

SEQ ID NO: 31030 - DNA, 122 bp, Homo sapiens
tgtaactttctggctggagagatcgaaccgatgttggagacaaattaaaaaaaaaaagagcggagaaaaaaggtatagacactcaaagatcatctggttggcacctccctgaaggcacatat

SEQ ID NO: 31031 - DNA, 122 bp, Homo sapiens
acatggacctcactgcttttggggaaaaaaacctaccgtaggagaatccggtgtccagttcgctgggcagacttctccatgtgtttctacatactggaacgccttcaccaagcggagggttt

SEQ ID NO: 31032 - DNA, 122 bp, Homo sapiens
aatcaaatgcattcaccccactgaatcctaagaaggctcaggaatcagaggcatcagatacggagaaagtggggatgacgtgtgggaatttagttagactagttggggctcaggaaacaata

SEQ ID NO: 31033 - DNA, 122 bp, Homo sapiens
tcgggatggggcgcccaccccctgccctgccctgaccctcgtgggaactgccaagaccatcgccaagcccccaccctaggaaatgggtcctaggtccaggatccaagaaccacagctcatct

SEQ ID NO: 31034 - DNA, 122 bp, Homo sapiens
ttggccacccggagagcggtcggagttgggtacagaaattcctcgaaattggcagcaacacgggtcgggcacaagaccctcctctgggcccctcggaaaggggatggagttgggtgaggaaa

SEQ ID NO: 31035 - DNA, 122 bp, Homo sapiens
tgcccctgcccttcctcacactgacactttgtccccacatggggtggggagcagagtgcccgccccgtggagataccgccccagcgggggctgcgacatccatggccaccatggggcacctg

SEQ ID NO: 31036 - DNA, 122 bp, Homo sapiens
cccccaggccctgaattacctccggtgcccttcccgctgcaggacttggtccctctggggcgcctgagtagaggggagcagcagcagcagcagcagcagcaacctcccccgcccccgcctcc

SEQ ID NO: 31037 - DNA, 122 bp, Homo sapiens
ggtcaataaacctggacgtggcagatttcaaagaaagtaattcaaacacaggtggggtcccggcttacatctgttggatttggctgccatttggcagctgctcgttggacagggagaggaga

SEQ ID NO: 31038 - DNA, 122 bp, Homo sapiens
tctcatgagtggtttagcaccgtccccggtgctgttctcgtgatagtgagggagctctcacgagatctggtcgtttgaacgtgtgtggcagctccccgctctcctgctcctgctcccgccat

SEQ ID NO: 31039 - DNA, 122 bp, Homo sapiens
ccagcccctcgggtgagtgtcggggccagcacgccggggcgggggctgggccgcaggagccgctctctgggctgccgggaggctccgctgagagtccccgggcggcccctcccctccccccc

SEQ ID NO: 31040 - DNA, 122 bp, Homo sapiens
cccacggaagcacttgcagccggaccaccgaagggctcacgcaggcccatcctcccaccacgggctcccagcactggcaaaatgccactcagaccacagctgcaggggcctccccgatcctg

SEQ ID NO: 31041 - DNA, 122 bp, Homo sapiens
ctgccctagagagttagctggagatgtagagtcaccccatcaggtgctgtgccggccgctcggcctgtgtctcctgcgtgtcttaacgtcccttgtgtccggatttccatttcagatcaagg

SEQ ID NO: 31042 - DNA, 122 bp, Homo sapiens
ataaggacccagctcaaatggacatgcagtgtggcatggacagtaccccttccccagccccgcaaccaacctttcaagaagctacaactgccgagatcagcatcccctctccccaccatttc

SEQ ID NO: 31043 - DNA, 122 bp, Homo sapiens
ttgcctaaaacctctccccagcagcctccttatgagaatgcctgcctttttattctaatgcgtaacttctttctcctttgtcattcactgcatgtttggtgcaatacatccattctctttgg

SEQ ID NO: 31044 - DNA, 122 bp, Homo sapiens
cgggtctcagcggggtggaggggttgcactgcggtaatatggctcttccttagccagcggcggcaacggcggcagcggcggcagcggcggcggctactgtctgggctgagcagtagtgcctc

SEQ ID NO: 31045 - DNA, 122 bp, Homo sapiens
cccttgggtacccttaaaactcagttttaccatccataaaatggagataatgatacccaccgaatttattgtgagaataaaataaaataatgtatttaaggcatacatgatcacaatatctg

SEQ ID NO: 31046 - DNA, 122 bp, Homo sapiens
acagatgaagcagtggcagagccaggaaaataacctgacccttgtccctgctctttccaccgcaccatggtgactctcttttttgtgtcttttttttttttttcactctaaaactgaggatc

SEQ ID NO: 31047 - DNA, 122 bp, Homo sapiens
cacccgcttgcagaggttgttccagccccatcttaacatctttgtttggaggggttaccccgaggagacagctgcagtcttcccagagcactgctaaacagacaccttctatctggagaggc

SEQ ID NO: 31048 - DNA, 122 bp, Homo sapiens
gtcccgggctctgtctgccgaccagggctcctacaggtgtatcgtcagcgagtggatcgccgagcagggcaactggcaggaaatccaagaaaaggccgtggaagttgccaccgtggtgatcc

SEQ ID NO: 31049 - DNA, 122 bp, Homo sapiens
cataaagccagtgactggacaccggaatgtggagtccagctgctgccttcaccaccaccacgtctccaccctccagaggtggagggtggacacagcaccatgtcctgtgaccttgctggcag

SEQ ID NO: 31050 - DNA, 122 bp, Homo sapiens
acgaaaatcgactcttggcgagtgggacccgctgagtcgttagtactgggtgctttgccccggtccccgccaaatcacggcgccgagccctagcggacccatcgctccggggccgggtcggg

SEQ ID NO: 31051 - DNA, 122 bp, Homo sapiens
ggcgggcgaggagcggggaagctgactcagggctgcggccggggtcctgcggggtaggagcgcgaggccggcctgagggaggaggcctagcgacccatccggcgcctcccgccccgggcacc

SEQ ID NO: 31052 - DNA, 122 bp, Homo sapiens
tgtcctctcccctagtttgggatgaatgcgcttctcctgtctgcctggttcggccacttacgaatcctccagatcttggtaaactcaggggccaagatccactgtgagagcaaggtaaggcc

SEQ ID NO: 31053 - DNA, 122 bp, Homo sapiens
atccccagttttagtgtattcgttaaacacatacgaaataaagatacaagtgtttacaagcgaggaagatgacaattggtttatgctataaacattctcccaggacaaacttgctgggtttg

SEQ ID NO: 31054 - DNA, 122 bp, Homo sapiens
ggaaggagactcctcacatgatccagtttaatcctcctcttctcccttcctgaagctgcacgctgcagtaagagcacagcagaaatgcagacaaaagggggccaaacatgggcgagaagggc

SEQ ID NO: 31055 - DNA, 122 bp, Homo sapiens
cgctgtcctaatcagagcagggccgggagagccaggacaggaagtatggagagcagggagcgtctctccagggccctgcctgtggaggacaccttgggggtgggagccaagtgcagacttga

SEQ ID NO: 31056 - DNA, 122 bp, Homo sapiens
tccaactcccactactcccacctccggctttcaccctgcacccggcgatgaagacgtcggcgaaacgcctactttccatgcctaggtctgggaaggtctgaagatcccggcggagctgcctt

SEQ ID NO: 31057 - DNA, 122 bp, Homo sapiens
ctaatctcatccagaacaccctcggacatccccagaaataacgttcaacccggcaccccacggccaggggagctgacacataaagttaaccgtcacaccgcccgcgtggagagggagcccac

SEQ ID NO: 31058 - DNA, 122 bp, Homo sapiens
gatctcagcatgcccctgcttcctctaggtggctgctattgccagagcccactgagtagacgcggattacccgtttgtcagccccgggcatctgggctgttccagagttttctagtccaatg

SEQ ID NO: 31059 - DNA, 122 bp, Homo sapiens
ctaggtggctgagctgagggagcgctgtggttcgctgtccccgcaggacacagggccccgcgagagaggcttgtggccgccccagatgacctcagctccctgtctgtggccgctttgtctgt

SEQ ID NO: 31060 - DNA, 122 bp, Homo sapiens
aggaggttgctgggcagcacaagcagcttccggggatctaactgctctgccagcaccacacggaaacagggcctctggcaacaccacaaggacacaggacctctggcaacccacccggaacc

SEQ ID NO: 31061 - DNA, 122 bp, Homo sapiens
cccctctctgggaaacctgtgagccccaggttgctggagggcctctcctctgtgcactcgcggtgcggacccaggccacggacagtctcggcaagtccgttacacactgaaagaagacctac

SEQ ID NO: 31062 - DNA, 122 bp, Homo sapiens
cgtgcttttgcaaagcccatatctggggtggcttaaataatcatgctcctccccatcccccgacctgatctttgtagttggaaactccagggctggctgcctgtagtctttgtgactacact

SEQ ID NO: 31063 - DNA, 122 bp, Homo sapiens
ctatacaagttatggttgcatatatctcactgcagcaccctggtacagaaatctacctgacgaagcaattcagcagaaagtaaagcagattcaattgtatcaaatctcaagttgttttgttt

SEQ ID NO: 31064 - DNA, 122 bp, Homo sapiens
gttcccacccggctcctctcacgagacccgtgacaaatcgctggtcggagagagagtgcacggccccaaggaagggaggcactcagagccctgtccttccagacattcagactattaactga

SEQ ID NO: 31065 - DNA, 122 bp, Homo sapiens
agttggcgacccccctcgaatcccccctctgctgcgggctccccgtggcctttggaggctcggtgagtcggctccaaatgttttccatatttgttcagcctccataattcgaataccagggc

SEQ ID NO: 31066 - DNA, 122 bp, Homo sapiens
aagtgttggttagaacgtggactaactgtcccacactgctggagagactataaaccagtacggccagtttggagaaatagttggcaaacccagcaatcccactcctaggtatatttccaaga

SEQ ID NO: 31067 - DNA, 122 bp, Homo sapiens
tcgctccaggctggattcccccctgaaatgttggtccgggaaaaccagcctgggtcctcgcgcgcccttctgcacggggaccccagcccacccccgtacggacacgccttccaccatctcgc

SEQ ID NO: 31068 - DNA, 122 bp, Homo sapiens
tccccatgcagcgggtaggcttatgacctcccccacccaggatagcccccaaggaggggccgtgagcagagacccaccttgtgggaagggacaggagaagtgtccagttcctcgacagcaga

SEQ ID NO: 31069 - DNA, 122 bp, Homo sapiens
ccattttgcgatgcctctggagctatctagtgaacaatttagatgcgtggttcagaagctcgatgggaggcttgggaacacagaatgtgtaaaataagcatcagtctccctttcaccctctc

SEQ ID NO: 31070 - DNA, 122 bp, Homo sapiens
cggggccgctgaggcggcagtagcgacctccggaagcgaagacgggcaaggcgagcggcccgagcccaccaccagccgcctcccatgattcgcactacggccgccgcgcgccgtaccgcccc

SEQ ID NO: 31071 - DNA, 122 bp, Homo sapiens
attactgctccacttacccctctcttctgttaatctgtgaactctccaggggcaaggactcggtttatatagcacagtgacagtgacaggcacttactagatgcttatgaaatgtttgttgt

SEQ ID NO: 31072 - DNA, 122 bp, Homo sapiens
tttcgctgctcttcctgtagacaatacagcatgggggcaggagtggggtctggagtcggacgcacgttcagaggctggggtcacttctcccaaaccgtgtgcagtcggacgcacgttcagaa

SEQ ID NO: 31073 - DNA, 122 bp, Homo sapiens
tttattttcagttcaggaaatgctgatattggagcttctgagggagctgcagtgatttcccgatttcctgcgcgcctgtgtggaaagttagaagcggaatctaccggcagctttgagactaa

SEQ ID NO: 31074 - DNA, 122 bp, Homo sapiens
acctcaagcgatctgcccacctcagcctcccgaagtgctgggattacaggcatgagtcaccgcgcccagctactccctgtctttgcagtgctcctgagggtgtgcctcccatgtttggaagc

SEQ ID NO: 31075 - DNA, 122 bp, Homo sapiens
cgtgatgacgcaagagcggaggacggctcctctccatccacggctccgtttcctaggaaacgtggactccgcgttccactctgcgtcgctgcccccttgacgtcacgctccggatgggaagg

SEQ ID NO: 31076 - DNA, 122 bp, Homo sapiens
gagggcccagcaggagaggagccagaggaaagccatggtgccgctggcaggggtgtaggacgcctgtctgccggtccccgttatagccctgtgtgcctgctgttatctggagaccttggggc

SEQ ID NO: 31077 - DNA, 122 bp, Homo sapiens
tgcctcagatctgcagccagaggaaaagggggagtgggcagggcagactcagtctagggacgagctatgcagcacagccagtgccagctccccacgtgcctccccaaccagggtgataaagg

SEQ ID NO: 31078 - DNA, 122 bp, Homo sapiens
ccctggacactgaggagtagccagcctcggaagttagaaaggtatccacccagctcctcccgcagggcacagggcagtgccatctctccccgtgtgtatctggataccagcttgattttaat

SEQ ID NO: 31079 - DNA, 122 bp, Homo sapiens
ccgccgccgctaccggaaatgcagcaccacgtaaaatgcggtcgggtagaaacctacttccggtccagctcactagccctggagttccggccccggagcggagcttctgccgagcagaggcg

SEQ ID NO: 31080 - DNA, 122 bp, Homo sapiens
ggagcctggagactgctagctgcctggttctttaagaaccagccctggtccagcccattccgcaggccagcaagcttctgaaaagcaaacctaggaagtagctttccaacataaagtggagg

SEQ ID NO: 31081 - DNA, 122 bp, Homo sapiens
ctcggggggagtctgtccagactacaagtgtctgtgcccctgttttattttgagacaagtcggggtcgctcaatgagtcagcacagaggaggcagtgggggagacagacagcggctgggacg

SEQ ID NO: 31082 - DNA, 122 bp, Homo sapiens
tgaccgctttaagcacacgcgcacccactatgtggacaagccctactactgcaagatgcccggctgccacaagcgctacacggaccccagctcactgcgcaagcacatcaaggcccatggcc

SEQ ID NO: 31083 - DNA, 122 bp, Homo sapiens
gcaaggcagtgcttctaaacagcccatcagtattatcaagaattttgaaaaatatgagcccggcactgtggctcctgcctatcctcccagtactttgggaggctgaggtgtgaggattgctt

SEQ ID NO: 31084 - DNA, 122 bp, Homo sapiens
tggttgtggaacttcacgggaatttattttgtcattacaatgttggcaagatatttttttcgtgtgctgtaaactgaggttctgtcttggagtttatgtcatgtcaccaggtcctgtgctga

SEQ ID NO: 31085 - DNA, 122 bp, Homo sapiens
gaaggggccctgagaacgctccctgccaaagtggggaacagctaccctcattgtacgcctcgccctgccggtggcgctctccccccgcctgcgttcggtctgaaagtgtgaaaattacaaat

SEQ ID NO: 31086 - DNA, 122 bp, Homo sapiens
gaggcccggcgggctgggcagcctgactcggcggctttgagcgctctcagaacccgcgggcgctcgcggcactcctggagacctgcacttgtctgttctcattgtcaagcgtttcgctcgga

SEQ ID NO: 31087 - DNA, 122 bp, Homo sapiens
gctggaaatatgaagagacgctgcagctgcggtggcggtggcggccactgcagctcagagcggcgcacgcggcggccggggcgggacgcggggccgggcgcggagaagtcggggcgggcggc

SEQ ID NO: 31088 - DNA, 122 bp, Homo sapiens
tctgtcacttactgttgggcaaaacgcttaatggagccccagttttttgcctgtgaagtgcggataataatagcacctacctcattgctatcgtgagaattaatctacacaaaggaggccgg

SEQ ID NO: 31089 - DNA, 122 bp, Homo sapiens
ggtcactcacacaagggagcagcatgtcctgggacctgcgtccagccccaggctcggggccgcggtcactcaccggttagcaaggagcgactaacttggcggccacgtcgagggttagcagt

SEQ ID NO: 31090 - DNA, 122 bp, Homo sapiens
gaccgggcccgtgtgttaccagcacctgctcccagtccccctctgccctcccaggggtcccgtgcccaccaacactagtgcgagtggccctggggaggaggggcctcatctgccatccccga

SEQ ID NO: 31091 - DNA, 122 bp, Homo sapiens
ctgactggggttacatcagccttgagtcagcctctgggtgggggggcaattttgggggtgcgctctgtcccttaccttgccagctccccagaacctctcctctttggtcacccatcgtcagg

SEQ ID NO: 31092 - DNA, 122 bp, Homo sapiens
agcccgatgtgggagggaaggcgcgggggaggggaggccgcgaagggggctgcttttctccgggttccccgtgctgcggaactgcagggctccccagcgccctctgccttcttcgccggcgg

SEQ ID NO: 31093 - DNA, 122 bp, Homo sapiens
atcccagagacctgcccaggagcggagggccacctctccttccttcccactcacaccctccggggttgaactgagccacctgcaggagcacagggcacccagacgaactcctggctgccctc

SEQ ID NO: 31094 - DNA, 122 bp, Homo sapiens
tctttctagcccagtctccagtctgtctctccccagacaacccaaaattccgtgccagatcgggcctgatagttgttcattcattccaaaagctagttgttcattcattccaaaagcaatta

SEQ ID NO: 31095 - DNA, 122 bp, Homo sapiens
ccccagcgcgggccgggagggggcacggcggaggccacggaggcaggcgcgggagaagaccgcgctccgcttcccgggccgcgccgacctgctcggcggcctgcccgcccgcgcccaggggc

SEQ ID NO: 31096 - DNA, 122 bp, Homo sapiens
cgcgggtatgaacagcacgccaacgatggcaaggattacatagcccggaactaggacctgcgctcctggaccgcggcggacatggcggctcagatcaccaagcgcaagtgggaggcagaaga

SEQ ID NO: 31097 - DNA, 122 bp, Homo sapiens
cagcgactcacctggctgcagggcctccacctggggcattgtcagacctgggagaagaaccgtcgacgggcagcttgcctcccctaaagtgcttcttaaaggaaacctttgcctcaaacagt

SEQ ID NO: 31098 - DNA, 122 bp, Homo sapiens
cgtaagcgtcaggaaatagcagttgctgtgattggggctaaagctctgaggcaaaatgggcgacattattttctttgaatgacattaagcagtttgtgcatagctgagggcttctattgggg

SEQ ID NO: 31099 - DNA, 122 bp, Homo sapiens
ccggaccgcacgccgaccccgcctcccggacttcgcaccgcggccccggcccccgccagccgcccagtaagtacacctgggccccgccccctggccgccacgtgacggcccccggcccaacc

SEQ ID NO: 31100 - DNA, 122 bp, Homo sapiens
tccaattctcaattaggggctgaagcagtaattgaaatgggctagtgtcccaaagccaggcgtcaaagttgcccagcctgaccctaactatgcaaatagcaaaaagggcaggcttggtcaaa

SEQ ID NO: 31101 - DNA, 122 bp, Homo sapiens
gaacacagctaactatttttcccagttaaaagatccaagtccaaaatgccagaacggacacggccatccttctagttcttaataaaaggagtaccaaactacagggggaaagaagcgcaaaa

SEQ ID NO: 31102 - DNA, 122 bp, Homo sapiens
tcaactctatgattatatgtactattattatctcattttactactgtggaaactgagatacgaaacttgcggagtgaggatttgaacctaggtcatactcttggccagccagagacacccta

SEQ ID NO: 31103 - DNA, 122 bp, Homo sapiens
agtagaatgggtagaacagaggggccagaaccagcacatggatgaatatacttcctttatcgagggtgacaaaccaaaacaaaaaaagaccaaacatgtaaaaacccagggttctagaaata

SEQ ID NO: 31104 - DNA, 122 bp, Homo sapiens
ggcggggccttgccacagctgcagcgccagctctgtgaatctgcagtccctttgagctggcgcgtcctccaggcgtgcccttgccctttgagacggaccgtctcacggctgtacactgttct

SEQ ID NO: 31105 - DNA, 122 bp, Homo sapiens
tgctgtctgtctgcaggtagcacttgttgcccaggcagtaccgccacaggccctggtgggcgaaggaccctgacagccggtactgcatccagtggtctgttgccatggccaccaccaggagg

SEQ ID NO: 31106 - DNA, 122 bp, Homo sapiens
gtccctttcctacttcagataggaccgtaaccaaataaggtcacccaggaaaggggtagccgtgcagggctgtcccaccatacgctgcagtttgcagggcacgctcacacttaggggccagc

SEQ ID NO: 31107 - DNA, 122 bp, Homo sapiens
ctcaggtgcggtggggagggggcgtgctgcccggggctggggtgggctgctctgggagaccgttttaggttgggttctcttcaagcagaggctgagacagggagcttcctgtgggcgactta

SEQ ID NO: 31108 - DNA, 122 bp, Homo sapiens
ggccttctgctgcttgaggcctcgcacgcgctctccctgaagtttcaccagctcctccagcgccgcacgctctgccatcccggctgtccacttgagccgcctgctgtctcgacctgcggtgg

SEQ ID NO: 31109 - DNA, 122 bp, Homo sapiens
tggacaacgagatagggacaagtaggcatatcacgttctgatacctggacccacatctgtcgctgggcccacgtctgtcctcaggcccccaggatatacttttatggggagttttcctccct

SEQ ID NO: 31110 - DNA, 122 bp, Homo sapiens
gataattgagctttgggctgtaacaaaataggttaagacatttattatcttagtcagtcccgaggtaagcaagactagagcaacagcccaacagtttcattgaaggctccatttcttttcat

SEQ ID NO: 31111 - DNA, 122 bp, Homo sapiens
ggcagcccgggggctgacccttggggccctttccgtgtgtctggccccgtgttgtgcgagcgccagtaggacagggaccgtgatgtcaccacctggctactcggctccaagctcacttgtta

SEQ ID NO: 31112 - DNA, 122 bp, Homo sapiens
tccggagcgtccacgcagccagcagctcacatcctcttgctcctggcggccgatgctctgcgcagaaacgggcttggtctgaacggagagggacattgtgaacttgaaatgaaatctgacaa

SEQ ID NO: 31113 - DNA, 122 bp, Homo sapiens
gaccaaggacacaatattcactgatctctaagcaaacagaaaaactccacttacagaaatcgttgcaactttggaacttccaagacaatctggcctctatcaatgggcagacagcgaccctc

SEQ ID NO: 31114 - DNA, 122 bp, Homo sapiens
cctaatgggggctcttgagctgtttgctctagcttgctcctgctctgtgagttgtactttcgcttcaataaatctgtttcttccttacttcagttttttcttttgtttcttttcgttgcttt

SEQ ID NO: 31115 - DNA, 122 bp, Homo sapiens
gggccggcgggtggcgggtggcgggcggcgggcagtggccgggcgctgaggccagaggggcggagcggccgagctgctggggcggggcggggcagggcaggccggacccagcctctgggtgc

SEQ ID NO: 31116 - DNA, 122 bp, Homo sapiens
ggcatgagcgcggtgggagacgtcttttcccttcggtctgctctgagcggtatcagcctccgctctacgccctgtggccactctgtcggggtggagggatgcggagaggatgtgggagtttt

SEQ ID NO: 31117 - DNA, 122 bp, Homo sapiens
cccccgctctctccctctcccctccctcttccctccctccttcgcccccccccacaatcccgggctgggccgacccaaattagcatgccctccccggaattgagccgccccgggtggggggt

SEQ ID NO: 31118 - DNA, 122 bp, Homo sapiens
caccgcgactaaagcttgcaaagcctgggtcatcgaaactacaactcccagaaggctaagcgtctgcacacgctaggtccgcagggcgctgacccctgggggcccgaggagcgccgggctgc

SEQ ID NO: 31119 - DNA, 122 bp, Homo sapiens
ttcgcctggccttctacccccagatcgcagcctgcagctgagcgcatgggagagcagcatcgtggatcgtctgatgacgcccactctctccttccttgctcggagtcgcagcgcggtcacac

SEQ ID NO: 31120 - DNA, 122 bp, Homo sapiens
cgatccccaaatctgggcctgagcctaagaggaggcaccttgggacgctgctccagcctacggtcaacaagttctcccttcgggtgttcggcagccacaaagcagtggaaatcgagcaggag

SEQ ID NO: 31121 - DNA, 122 bp, Homo sapiens
ttcccggggctgtggaagagaccatagactcaacaggagggggagtcctgggtagcgcgccggtctaaatcgttacttggcggaaagttcccatgagtctttgccagcgtccccctcctttt

SEQ ID NO: 31122 - DNA, 122 bp, Homo sapiens
ccggcccgggctgggcgggcgcgcgggcccgtgttgtgtgtggagccggtgtcccgagagcgtgtctgtgtgttttggactgtaagggaaaatggctgacggctccgtccctccccctcctc

SEQ ID NO: 31123 - DNA, 122 bp, Homo sapiens
cgtgtggtgtctgtgccgcagacgggccatctgcccgctcacttgtggactttgcgctcccggttgtcgcgccctgtgctcccgaccagcagccccaccgtccacctcctcgcccccgcttc

SEQ ID NO: 31124 - DNA, 122 bp, Homo sapiens
tctctcaggcccccaggggagaagctgggacaagagaaagtgaggaaggtcactgctcagcggtggaggtggtatcagtctgcatcttcactgctgctgggctacctagagaaggagacccg

SEQ ID NO: 31125 - DNA, 122 bp, Homo sapiens
cctggacaagggccccagtcgctggacgcccggctctaaggagcccgtagaacccttcggcggcttgcctagttaagagtcttttggttaccccactccaggctttgggtggggaaacggaa

SEQ ID NO: 31126 - DNA, 122 bp, Homo sapiens
ggcctgcggtgcttccttgcggccacgcctgtctggtttggtctctgggtggcgctccctcggcttctgttctgctgtctttgaccaggacttgcgcatccagggctgtgggcccggctctc

SEQ ID NO: 31127 - DNA, 122 bp, Homo sapiens
cggctaggggcagagccagcccttggaggtgggggctgctgggtcttgggaagcctccctcgcgccgcctgacctgctggggggtgggcattggagggtggggccgcctccggcccgggctt

SEQ ID NO: 31128 - DNA, 122 bp, Homo sapiens
aggaaggagcccagttcctgcccactgccttccgacgtcctgtaagtggaccccgcttcccgggcctcagtggtctggtctggaatgaagagtctgagccaggtggtcccaagcgctgccgg

SEQ ID NO: 31129 - DNA, 122 bp, Homo sapiens
cctacccccgcctcgcagcctctggtttcaaaggcggacaaacagcgcactgtgcttggccgcggctccctcgctaaatcttcctgtcttcaagttcttgtaacttgagccggcagagctga

SEQ ID NO: 31130 - DNA, 122 bp, Homo sapiens
cgcaggggggcgggcgacccccacgatgcggggagaaatatcacccccccccggatattacgagccacattgcaggggggtggacacccccagtgatgcagggagtaatacctacccccctt

SEQ ID NO: 31131 - DNA, 122 bp, Homo sapiens
ggaggggccaggctcgtcatacgcctgcttgctgatccacatctgctggaaggtggatggcgaggccgggatggagccgctgatccacgcagagtatttgcgctcgggaggagcaatgacgt

SEQ ID NO: 31132 - DNA, 122 bp, Homo sapiens
tcacgcccaagactgggctggccgacaagtgcctggatatgaaagcagaaggcttgggctcgggggagccggtgaccctgcaggtgtcgggcgtcagccaccgaggccgcctcttccactcc

SEQ ID NO: 31133 - DNA, 122 bp, Homo sapiens
aggtgggaagatcacttgaggccagaagtttgagaccaactgggcaacataacaagaccccgtctctaagttaataagtaaacaaaagtagacgaaggcgatggcacgtgcctgtagtccta

SEQ ID NO: 31134 - DNA, 122 bp, Homo sapiens
ggtcccctttctctccgtccttctgccgccgggatcctgtcctgcgtctctccaagtttccgtgtgcgtgtgtttcgtcagaatcaggcttcagttgcagtcgcctcttttcttttctcttt

SEQ ID NO: 31135 - DNA, 122 bp, Homo sapiens
tggggaagggcggagaaagggtcggagtctgggaggagagcagctgcgggcgcgccagggcgctgacagtctggctcttggaggtaagatgggcgtggctgatcccgaactccgcctgcgtt

SEQ ID NO: 31136 - DNA, 122 bp, Homo sapiens
ttattgtaataataaatattcatgtgtacctgttccctcaggtagtatacgctcaccccacggtagacaaaactaagtcccatctagttagtataatcagctcaacgttcaggatctgtggg

SEQ ID NO: 31137 - DNA, 122 bp, Homo sapiens
gccttctgaacactaactccatcttgtttttctggaattgatacatcctttccttaaatacgcaaatgctgcctttgctttgagtggcttggtgtttggcagtgagactttgtcatacctca

SEQ ID NO: 31138 - DNA, 122 bp, Homo sapiens
cagcttggctgagcagcagcggcaggctccgcaccttgtcgaaggagttgaagtggtgcacgtcctggtgcagcccgtacatcccattctgatgctgccagcaaaggcgcatgaggtccggg

SEQ ID NO: 31139 - DNA, 122 bp, Homo sapiens
ggtcctggacccggggtgagtccccagtggcactgcagggtccccagacaaggggtctcccgacagagctgctgatccccagtggggtctgtgggtcaccgggcccgaacttggcagcaccc

SEQ ID NO: 31140 - DNA, 122 bp, Homo sapiens
aataagcaaataaataacttgcaactacagtaaccatggttttataattactgtctttatcgaagtgtattatttatctatacagcaaataacctaaaggagaacctgtataaggcttccag

SEQ ID NO: 31141 - DNA, 122 bp, Homo sapiens
cccatgcctgtgcattgggtctcaggagcccaggtgggtggctgcggcccaggctcctggcgtcccatggggtacacacagagcagtggaaggcctgccgggccttgcgatgaggtattgac

SEQ ID NO: 31142 - DNA, 122 bp, Homo sapiens
agccctacatagaaatgaaattatactaaaaataaggactaaaagctatgccttggcagacgatggctactgtactttgataatgatgtacagattttttaaaaaacttttggtggctctag

SEQ ID NO: 31143 - DNA, 122 bp, Homo sapiens
cctcagttttggtggggacaagccatatccaaaccatagcacctggtaatgttttttttccgttactattacttccaataaagcatctggttactaacgacacacattctcctatcacatca

SEQ ID NO: 31144 - DNA, 122 bp, Homo sapiens
cccggggagcgagtgcgctgagtgggcctgggggccctgcacccccagcagcaaggattgcggcgtgggtttccgcgagggcacctgcggggcccagacccagcgcatccggtgcagggtgc

SEQ ID NO: 31145 - DNA, 122 bp, Homo sapiens
gtgacgggagtgtgtggggcactcaggccttccgcagtgtcatctgccacacggaaggcacggccacgggccagggggtctatgatctggaggaggggaggagatgctggagtcaggaccat

SEQ ID NO: 31146 - DNA, 122 bp, Homo sapiens
agaacaggctaaggtggctttggaagcattttgcaagaccacgcccaggccgccaagcttcggtttcattgcgtgtgtatgtttacataatgtgcctgtatatcgtcagtttatctttacaa

SEQ ID NO: 31147 - DNA, 122 bp, Homo sapiens
ggagagagagacagggcgtggcctaggctggagctgcactgctgcaccatgcaccacccacgcagggcggcccttcctccatcttgggctgggggctcggggagcaggtggacatggaggct

SEQ ID NO: 31148 - DNA, 122 bp, Homo sapiens
cccttcagtagaaccttgtcccaccatgacctgtgatcacagggacttggatgtcacctacggcagtccctgcataccagggtccttgtggtatcaagagacaaattttcagatcgttcaag

SEQ ID NO: 31149 - DNA, 122 bp, Homo sapiens
cccagctcaagcaaccctctcacctcaacctttcaagtagctgggactttaggcacacgccgccatgcctggctagtttttgtatttttagtagagatggagtttcaccatgttgcccaggc

SEQ ID NO: 31150 - DNA, 122 bp, Homo sapiens
gctgcctggctctgaaggcttcacctggtgggctggcttgggcattcctaatgggcatgccgggagcctatcaaggtatgaaccagcatactctcccttttacaaaggaggaaactgaggtc

SEQ ID NO: 31151 - DNA, 122 bp, Homo sapiens
ttcccactgtaaatttctaagactgggcttaaaataaactttaaaggcataggagtttggcgttctaatgctactctgaactggactgagttgcaaggctagatggctgggtggactatctg

SEQ ID NO: 31152 - DNA, 122 bp, Homo sapiens
gctggttcctgagtgaggtccctcttgcatgtgagacaggacgggacaggaattaggagtcgagccagtttctctcaggagagagtcactggaatggttggtgaatttttgggccccaagcc

SEQ ID NO: 31153 - DNA, 122 bp, Homo sapiens
tcagcagggaggggaagaggagctgctgctcccgggtgttggtgccagttgacaggcagccgggaaaacggggcccaggaggggcacacacccacaggttccaacttaagccccggggaaaa

SEQ ID NO: 31154 - DNA, 122 bp, Homo sapiens
ttctgctgcacatgtctgaggatgactgggacaaagtcatagctgtcaacctcaaggtggcgatctctgaacctgcgacgtttggcccccttagcctggggagggagttggaggagggctgt

SEQ ID NO: 31155 - DNA, 122 bp, Homo sapiens
tggatgtacccaacaggtgctctcatcgttaacctgcggcccaacaccttctcgcctgcccggcacctgaccgtgtgcatcaggtccttcacggactcctcgggggccaatatttatttgga

SEQ ID NO: 31156 - DNA, 122 bp, Homo sapiens
gtatatctttagaatgtgcattgtatcaactcatgtgtttcctgtgaggaatgaatgagacgatgtaggtttagtacataaggcagtagttgcacatagtgaagtctcaacattgtttgtag

SEQ ID NO: 31157 - DNA, 122 bp, Homo sapiens
caagcgccgcagcagcaccagatctagaggctccaggggtgacgaggagcctggcaaaagcggtgacggtagtggccccggagtccggtagcgcaactggaagaacgggcctgcggggtcct

SEQ ID NO: 31158 - DNA, 122 bp, Homo sapiens
ggactctgaaggaaggagagatccctgaggtgttggtcctgcccgaggccttgttccctccggcccatgccagcctctgggtttcgctctgaaactcacagcagctccggccccctgagctg

SEQ ID NO: 31159 - DNA, 122 bp, Homo sapiens
ctaaactggaaggggtacggttcacaatatcaagaagatttggacttttaagggtttcaccgaagtttgtgaccttaattagcttttacgttgttattcctacttttagcgaacaccacaca

SEQ ID NO: 31160 - DNA, 122 bp, Homo sapiens
gaggcagcctgtttacttctaagggactaacccacatgaaaagacccaggcctcctgcgccggcctcacggcccctacacgcgttatcaagcttggagtcaactggacgacctgctgtccct

SEQ ID NO: 31161 - DNA, 122 bp, Homo sapiens
gagggctgctgcctctgctccgccgggtcccctccttcgctcttcttttcctcggcgctgcgctgcgcggctcttgctccgcacgtattgtttggctgggtctctaatggcggacggggagg

SEQ ID NO: 31162 - DNA, 122 bp, Homo sapiens
cataacagacattctcacagcccggctgttctgtgttgcacacaaatttgctttgctcatcgtaatagatggattctcctcctacagctgtaaggacgatccggaagacaatcagaacagtg

SEQ ID NO: 31163 - DNA, 122 bp, Homo sapiens
tgacaccagaaccccgcgtctgtcaggctgtcaacattcccgcagcaagcgcaccagcgccgaagccctgattgatcccatatgtctggcaggagctgcagaggaattcactggagatggat

SEQ ID NO: 31164 - DNA, 122 bp, Homo sapiens
gccacctcatggcaggcagagggcaatgaaactcatctttccggccatgcagggcgcatgcgcggtctgcctcccgcggcgggccgggtctccagggaggacctgagtttttcttcacccat

SEQ ID NO: 31165 - DNA, 122 bp, Homo sapiens
ttcccatgtcaagtggttacaaattctgtcaatcctacctaaaaactctttccttctccccgtccccccagtggttttgccgttgttactgctcacctggtttgattcagtggcgtcgcggt

SEQ ID NO: 31166 - DNA, 122 bp, Homo sapiens
ggaaagagcactgcacccaggactgcactgcacccaggagtccatgtacaagctgtgacccggctgaacctcactttcttcaactgtaaaatggtaataaccacactgccctaattttaata

SEQ ID NO: 31167 - DNA, 122 bp, Homo sapiens
ggacctggagaagccgggggtggacgaggagccgcagcatgtcctcctgcggtacgaggacgcctaccagtaccagaacatattcgggcccctggtcaagctggaggccgactacgacaaga

SEQ ID NO: 31168 - DNA, 122 bp, Homo sapiens
gtgtctgaccccaagcctgagtcaggaaagcctggaaaagtgagtggaggaggaggagctcggggggccctgttctccattcagcccccacccaagagctgtgggcttccaggtgtgtgagg

SEQ ID NO: 31169 - DNA, 122 bp, Homo sapiens
gacaggcccctggtgacaccattgagtgtgtggtcaccgacacccagaaagcatgatgcgcgtctgtgacaacatgagtcaagaaacgacgggaagcagcgcctggtccttcccagcccctg

SEQ ID NO: 31170 - DNA, 122 bp, Homo sapiens
tcggcctcccaaagtcctgggattacaggcttgagccactgcacctggccactgagccaccgcgcctggccacttgttttgttttttgagacagagtctcactctatcacccagctggagtg

SEQ ID NO: 31171 - DNA, 122 bp, Homo sapiens
gagccaatgggcgcgcgcggtctggactgcgggtgccaatcccggggcgggccggccggccgcgcccacctattggctccaagagctcccggggcgtgtgtcccccgaccttccgtattacc

SEQ ID NO: 31172 - DNA, 122 bp, Homo sapiens
cggcacggggtgggtggagcagccacacaggcggagccgctggagagggggcggggtcctcgggtccagccagccaggcccccagagtagcccaaggctccaggggccacagccaggccgcc

SEQ ID NO: 31173 - DNA, 122 bp, Homo sapiens
cttcgataaacacaactggaggggcagctaagccacggcagtccccggcaggtttggccacgccagaactcggtatatgtttatctacatggacttcggaacagtgaattagcagcgggcat

SEQ ID NO: 31174 - DNA, 122 bp, Homo sapiens
cctttcactatggcgttctctccattattacagagaaaggcagatgggagcctctcccagcgaaaagactacagcttgtgtccttcataggagaaaacagtgatggctccagaacttttata

SEQ ID NO: 31175 - DNA, 122 bp, Homo sapiens
gagcagagtggatgaacaagcagaggttggggcgttgtggtcatttagggcccaagtcaccgagagctctttagtaagagtccatgcataggtccaaggttgttgtgtctcccttcactggt

SEQ ID NO: 31176 - DNA, 122 bp, Homo sapiens
caaactcctgggcttaagagattcgccggcctcagcctcccaaagtgctgggattacaggcgtgagccaccatgtcgggcccaaatccattaaatcactatcgctagtcacacctgctccat

SEQ ID NO: 31177 - DNA, 122 bp, Homo sapiens
ggcaggaaggtgcctgctgtttgcaagcttgtttagtacggtgtctccccacgccactggcggggtcctggctccctaccgacaactttgagggcctgtcccttgtttgccgtggtgttgca

SEQ ID NO: 31178 - DNA, 122 bp, Homo sapiens
aatccacaggctgtggtttctctaactcaccaagctggctggtattaatagacatacttacgtctgtagagaaaatgtgctggctgtagtggccagttctgaagactctacagttatatcag

SEQ ID NO: 31179 - DNA, 122 bp, Homo sapiens
ataaatttctgttgttttaagtaactcatgtatggtatctgttacagcagccctaggaaacgaatactagcatctactatgtggccaggcttctctactctgaggttacagtaataaacaaa

SEQ ID NO: 31180 - DNA, 122 bp, Homo sapiens
ttcctcttccccatcggctttgtgggcaacatcctgatcctggtggtgaacatcagcttccgcgagaagatgaccatccccgacctgtacttcatcaacctggcggtggcggacctcatcct

SEQ ID NO: 31181 - DNA, 122 bp, Homo sapiens
gttctccgcggagtctgtgctacaccgtggagcggggcggggcgtgctgggatctcgaggcggggcctctgccggacccctcccaccagtcgagccccgggcgccgtacagaggctgggtaa

SEQ ID NO: 31182 - DNA, 122 bp, Homo sapiens
agtgcttctgatggctaacttttctctaattaaactatgtttctttgagttgtgaacgaccgagtctggggtctggacggccaatgataagatttagaaccacttggatggaaagcagttct

SEQ ID NO: 31183 - DNA, 122 bp, Homo sapiens
ttaaaagtttcagtgtaactttctctaaacccaagcctgcggcggtaacaagagatacagcgctcacaaagccctcgggatgttgccctcttgtgggcacggagggcattaccgcctagcgg

SEQ ID NO: 31184 - DNA, 122 bp, Homo sapiens
agttggaatatagtctccaggataaactagctttgggacagaggtggggagaatgggtgccggaaaaacatccaacctggttacgttttgcctgttcctagacttagccccagcctttcctg

SEQ ID NO: 31185 - DNA, 122 bp, Homo sapiens
atctttctctgctactctcatttccaaagtggagataaataatagcacccactggtcgggcgcggtggctcacgcctgtaataatcccagcactttgggaggccgaggcgggcggatcacct

SEQ ID NO: 31186 - DNA, 122 bp, Homo sapiens
gtcaggtcagcatccccagtttgggcggcaccctggagtgccacagcacccaggagcgcacggctcctgcctaccctcagccctccaagagcacacagaggctcgtgtctaccgccccaact

SEQ ID NO: 31187 - DNA, 122 bp, Homo sapiens
ccggcatgcccccaagtcccccccaccctgcttgccgcgagggctccccagtactccccacggcagccatcgctctctcgccaaacaaaacagaagcccccaaacagaacaaaatggaaaaa

SEQ ID NO: 31188 - DNA, 122 bp, Homo sapiens
atccaagcgcttcgggggcggaagcaacgaccaatccgcagtggccgaagtggaagtcggcgtaacggcactaaggggcggggccgaagcggcccagggggcgggcgtttgaaatcagtgcc

SEQ ID NO: 31189 - DNA, 122 bp, Homo sapiens
ggctcggtggcctccagctccggctctctgcgccaccgcaggcccctcatcagccctgcccggctcaacctgaagggacagaagctgctgctgttcccgtcaccccctggagaggcccccac

SEQ ID NO: 31190 - DNA, 122 bp, Homo sapiens
cggtacatgtgatctgaaacgctctccggcctctggacatttctgtatacccagccagttcgtgggactctctgataaatatgaagaagaaaaagaagttttaaagaacaaatattaactat

SEQ ID NO: 31191 - DNA, 122 bp, Homo sapiens
tcctctcacccttgcccagagcgggacaaggagaaccggcatcggaagcgcagccacagccgctctcggagccgggaccgcaaacgccggagccggagccgcgaccggcgcaaccgggacca

SEQ ID NO: 31192 - DNA, 122 bp, Homo sapiens
tcggggagtgtggaaggctctcaggagcgggtcggcgtctggttggatgcgggttcgagccgcgtgtacgtactggagggagatggtcagactgggccgggaatccacctcacagccaggcg

SEQ ID NO: 31193 - DNA, 122 bp, Homo sapiens
gagtgactggggcccgaggctgggtggggggaggccgccctgtgacagcctcgccgcgcccgtctctgacatcctcgcgcagccgcttctcgccgctgctaccaccctctatcccagcgcgg

SEQ ID NO: 31194 - DNA, 122 bp, Homo sapiens
tggcagtaagaaagtaaggcaaagaaatatcaaaatgataaatccagaaatacagtggaacgcatattattttgatttagggtgctaaaaacatctaaatggggacaaactaaaagtggcag

SEQ ID NO: 31195 - DNA, 122 bp, Homo sapiens
ggtcagtcccaggagaatgaactcagtcaccaacgtgcagtttcttctcataatttccttcggtggaagaaaggaactttacatatatattggattacaatacaatagcaacatgattatta

SEQ ID NO: 31196 - DNA, 122 bp, Homo sapiens
gcaaggccacccaaattttcaatgagtgctcctgcagaatgcaggaaatggcaggagatccgtccgaggcaccccaggccgggtcgtgggtagagagcagggacgagggctgggaggggacg

SEQ ID NO: 31197 - DNA, 122 bp, Homo sapiens
catggtcccaaacagccagtggggctccttggtgaaaggcatctccatgccatgaaattgcgccatcttcgtggcaatggctgctgacaacactggctctcgaagctcttgagttttcaatg

SEQ ID NO: 31198 - DNA, 122 bp, Homo sapiens
ggagatcccagtgactgtggatgatgcgttcttgtggtcacacttggcttactttccccacggagccgagcatcagtggtgctctgaagcacagtgcaggccacaaaaactaccagggctct

SEQ ID NO: 31199 - DNA, 122 bp, Homo sapiens
agcacctcgtcgggggatttcatgtcgtgccgagcgcgggactgggagcggcaatgcgggcggtgacggcgccggctctgctcctcgtggccccggcgcggcctttatagctgcccctcccc

SEQ ID NO: 31200 - DNA, 122 bp, Homo sapiens
atggcaaagcttggcttgaagctgttcccttgtgcctctgtcacttcaaggcctgggacccgattcgatctaagccagttcggtctggcttcccctgaccatatgggtgttgggtaagaaag

SEQ ID NO: 31201 - DNA, 122 bp, Homo sapiens
caccggatggctggcaggcctcgtgcggtccgcagctggaggactcacaggacaccaggccgccctcctggcagtggcaaagggaatcacatccggggccagggtagaaggtctggcctggt

SEQ ID NO: 31202 - DNA, 122 bp, Homo sapiens
gggccgcacccgggcacgtggcggcgctccccgcccgccatctcctgacccctggcccaccgcacccctaccccagggtggaaaaatcccgggaggagcggcctgagatgagggggcggggc

SEQ ID NO: 31203 - DNA, 122 bp, Homo sapiens
cccgcctccccccaccccggggcgcccaccaccccggcctccgccgccgccctgcgacagcgcccccagggcccggcgtcctgggcctctgactctgcccggtttgctaacccggaccctcg

SEQ ID NO: 31204 - DNA, 122 bp, Homo sapiens
ccccgcgtcgcgggcgcaccagaaggataagcctggcatggccctctccagagccagggacgcacagatatcaaacccaccggaacaaatgcgcgaaattcaacctatgccgcactcagaag

SEQ ID NO: 31205 - DNA, 122 bp, Homo sapiens
gcccttcccctgcctctgcatagagctcagtcacgaggggaggctcacaaggccaccatccgcctgcctgtggtgcagacacctcccagctggcaggctcaaggcagccacgcacacctggc

SEQ ID NO: 31206 - DNA, 122 bp, Homo sapiens
cctagggagtgcaggccagggcagctggggcagggaggcggggtccgccccatggcatcgcggtttctctggaaggggtgatgggctttctcagaaccacctttagtttctgtaccgtaatc

SEQ ID NO: 31207 - DNA, 122 bp, Homo sapiens
ttcatcccttcaagcccagcctgtttgtctagttttcttttcatgtcttctgcactttgacggactaaagccatgtgaatcacgcgctgatttcagggctatcgggatcaaagggagtatac

SEQ ID NO: 31208 - DNA, 122 bp, Homo sapiens
aggagcctcgccagggcccgggggctgactgggggccggtgggagacaagcaggtggtcacggttggctgacggccacccccggcgctcacgcccgcagattccgggaagtcggactcccaa

SEQ ID NO: 31209 - DNA, 122 bp, Homo sapiens
gtgcccatgctggtgcctagaaatgctcccattgctgtagccagcatgcctggctgtgcgcgtgacccggaccctgtgctcgctcattcacgtaccccttgctgctccaggctcgcctttgg

SEQ ID NO: 31210 - DNA, 122 bp, Homo sapiens
gaggggctgagagtctgtgcgaaggtaggtggacagactgcattgcttgttgttgcgcttcggaggcggcgatccccgaaggcgagctgaaatacggctggagcgttcccaggctacagttt

SEQ ID NO: 31211 - DNA, 122 bp, Homo sapiens
caattgcctgaacttggaggctgtgtcctgtccccaggctgctccagggctgcctccttccgactgggccttcttatctgggactgttgagggcaacaggccttccgaagaccagtgaagaa

SEQ ID NO: 31212 - DNA, 122 bp, Homo sapiens
atttgtgtctgtagggattggtactctctttggttttaggtatccccgggggtcttggaacgtgtcccctcagataacggcggggggtgctcctgtacttagagtttcatggacatttctct

SEQ ID NO: 31213 - DNA, 122 bp, Homo sapiens
tgctgcgccagccggaggacgtggtcaccttcgccgccgagttcttcggccccttcgacccgtggcgtccgtcgtcaccggccttgggctcctcccaccggcccaaccctttccgctccctg

SEQ ID NO: 31214 - DNA, 122 bp, Homo sapiens
actgctctcaggggacttcaaatttactaacagtatcgtatttgtaatggggctcatgagcgcggacattgattatgcttctcaaactatgtatctatgttacaaatacttttgcacataca

SEQ ID NO: 31215 - DNA, 122 bp, Homo sapiens
actaggaatgccagccctaatttactgtcttgaaacacacagattgtactggctacagcacgatactgtccttggggcgccaggcttacacaggacttccttgctagagtctcggctgtcaa

SEQ ID NO: 31216 - DNA, 122 bp, Homo sapiens
cataggcaataacttcttgctgtgccctcacatggttgaaggaacaagaggtctctctcacgcctcttttgtaagtgtactggttgcattcgtgagtgctctgctcccatgactgatcaccc

SEQ ID NO: 31217 - DNA, 122 bp, Homo sapiens
ccggctcttggctagcgaggagcccccgggatggctgagaagcagaaccaacccgcccgccgcctctccagggtcaagcgaaactgggtcgcaggaagaaaaataacgaagagattgtagat

SEQ ID NO: 31218 - DNA, 122 bp, Homo sapiens
ttaggactttgcctcttcctttgtccttagcataatttctaggcagagcatccacgaagtcggttttcattgccagctcaagagcgacaatcatttacgagttcctatgttatgttaggtgc

SEQ ID NO: 31219 - DNA, 122 bp, Homo sapiens
cagttgcccacatttgctaggttgtcattgactcatgcaatccttgatccctggggcaatcgcagattcctcttctgtgaccacctcccagccccacctcaagtctggccctgagttctctc

SEQ ID NO: 31220 - DNA, 122 bp, Homo sapiens
tgaatcactgccggagcccggccgtctgccgaggctctcatacctcgtggcaccgggcgacgctaaggatgacaggagaggtggctcgtcatcccccagtcaccagagctctgccctaaacc

SEQ ID NO: 31221 - DNA, 122 bp, Homo sapiens
actgcctgcggagtgtggactggcagaaaaacgtcaccttcgggccccccagcaccaacgcgccttaaaccaagccccacaaagaagtcacttcggcgatgtaaacgcgactttgcggcttc

SEQ ID NO: 31222 - DNA, 122 bp, Homo sapiens
caatcctttggcgaaaatggacatgcctaaaagggcggagcccagagaggtgtgtcactccgggtatcaattcctataaatcagatcctgacaatcaccacaatattttaaaaagaacgaat

SEQ ID NO: 31223 - DNA, 122 bp, Homo sapiens
gaactgaggtggggacggggacaggaacaggcaatgccagagatctgaaggtcgcatcctcggcatgtcccttgcacactactccctcgctgtgctctctgctcccaccaatccagacaatt

SEQ ID NO: 31224 - DNA, 122 bp, Homo sapiens
aatggcggtctgctggtgccctcgaaggggcatccttcctggtcttcgctgacccagaggcgctgtgcctgcatatcatccaccaccaccctagcccagccttcccactgccccaggaaaag

SEQ ID NO: 31225 - DNA, 122 bp, Homo sapiens
ccagcgcccccggccaccgcctacctcgcggccgccgcgccacagccgctgctccgacaccgggaagccagtctccgcgaagatacgttccttcacatcgcgcacggtccaggacgccagcg

SEQ ID NO: 31226 - DNA, 122 bp, Homo sapiens
ttcttcgggctccctccaagggagtcccaaagaccccaatggccaataggaaagtgggttcggtctgggcagcagtctgattggctccagccttcgggagcggacccaggggcaaggggagg

SEQ ID NO: 31227 - DNA, 122 bp, Homo sapiens
gccccccgcggtggtggtccgagagttgtgaggggctggggcccgacgtatttgggggcgcgcgcgtccgggccgggagagcaagtgtactgcgccctcgtctcgctgctctggtactttgt

SEQ ID NO: 31228 - DNA, 122 bp, Homo sapiens
ggaaactgtctccagaagcttccctccccacgacagataatgagcagcaagtgcttctggcgacttagggtgatgtgaaatcacgctgggaatcctgctcctcctcaggtcctggcagtttc

SEQ ID NO: 31229 - DNA, 122 bp, Homo sapiens
attctaggaattcccttataaatagaaatgttctctctccatcctcatgtgtcctaccctcgcgttcaccaacgccgaatgttgtttcccgcataaacccaaagctactgcatgtatccact

SEQ ID NO: 31230 - DNA, 122 bp, Homo sapiens
actgcaaatcagaaaagaatcgaatctgccgatggcccgtggcctccgctttgagatgtccggcctgcttcggtcacgtcagtgcatatccttcattgcttgaaacctctgcctccctgcct

SEQ ID NO: 31231 - DNA, 122 bp, Homo sapiens
ctaattctttcatttcccagcactttgacaaaggggactctcttaaaactcctcatcggacgttagtggaagtcgactcatgtatctaaacatgtagccagcgtaagttcttggtcagattg

SEQ ID NO: 31232 - DNA, 122 bp, Homo sapiens
tgcggtgttacagctcttaaaggctgcacgtctggagttgttccttccttctggtgggttcgtggtctccctggcctcaggagtgaaggtgcagaccttcacggtgagtgttacagctcata

SEQ ID NO: 31233 - DNA, 122 bp, Homo sapiens
tttacatttgttacaaggtacttttgatctcctggcttacaactgagaaagctgaggccacgttaagggatacacccaagttcccacagctgtggttgatttggaattccgaccagcacctg

SEQ ID NO: 31234 - DNA, 122 bp, Homo sapiens
ggtgatccacccaccttggcctctcaaaatgctgggattacaggtgtgaatcaccgtgcccggcctacagctgtctttatgaagtgctatgacaaacataccatacagcaggggttctcaac

SEQ ID NO: 31235 - DNA, 122 bp, Homo sapiens
ccggcgcccaagacccccggcccacgaacctcaccagacagccgggtaactttccaggtgcgcagcttgtcacctcggcgcggccgcccctgcgtctcagcgtcctctcccacgccgccctc

SEQ ID NO: 31236 - DNA, 122 bp, Homo sapiens
tactttatacttccagacaccaggaactcagttttgaaaggctacttttgatgtgtgccacgttggctgttttgtagatagagtatccatatgtggcacatcatggcaggctgtaactgtgg

SEQ ID NO: 31237 - DNA, 122 bp, Homo sapiens
atgcgggtttttacctgaacttcagcatcttcaccccggtttcggagacctgcctagattcgtcccagcacgcactgtttcgggttcgggattgagggttagggcagcacacacagcttgag

SEQ ID NO: 31238 - DNA, 122 bp, Homo sapiens
cgtctgtgtcccgcctcttcagtgacgcgaggcagaaccagccaatccctgcacggatagcgcccggaagaggctagaagctggattcagcgtgtccgcgacctcacctttaggtcctgtga

SEQ ID NO: 31239 - DNA, 122 bp, Homo sapiens
atagactctgactgcagaaaattcagaactcctgactgatttgattcagcatcttaacatcggagcccaccacatctcactgtaggacacattcgctgaggatggagcagagagagtggcca

SEQ ID NO: 31240 - DNA, 122 bp, Homo sapiens
tagggacaaagtctcccacatcccgtcccctggatccccctacagccccctgctgtccatcgcggcctcaacccctgcagatggcagcctgcaccacaaaaaggcaacttagaggtgttttt

SEQ ID NO: 31241 - DNA, 122 bp, Homo sapiens
caaatacctgtttatctccacccttatccccatcgccatttccccccttagctcctgaagcgattaaccagcaacagtgagaaacaatgagagagagagagagtagaggtaagccagaggaa

SEQ ID NO: 31242 - DNA, 122 bp, Homo sapiens
ctggcgggcatctacgatgacaacagcctgagccaggacttcccaggtgacgagagcccccgcccggacgcgcagcccacacagccgactcccgcccctggaacgccgccccaggtggactc

SEQ ID NO: 31243 - DNA, 122 bp, Homo sapiens
aggaggctagaggtacaagcttcacctgagatgtccttagaccctgacctcagctcccaccgtcctagtggtgccgggcggcggccacgccagccgcaccttcccccggccagcccagagct

SEQ ID NO: 31244 - DNA, 122 bp, Homo sapiens
tccaatgggagaagaccaggaaacaaataagtgttcctcaagcaacatttcatgggtgcacgttttcataaaacttctcacaatcccgtaccccacaagcacttctataaagtagacaagaa

SEQ ID NO: 31245 - DNA, 122 bp, Homo sapiens
acaccctccgcagccactggcccgggtgctaagtccctcactgcccggggcccgcagggccggcctgctgctccgagtgcagggcccgccaaacccacgcccacccggaactccagctggcc

SEQ ID NO: 31246 - DNA, 122 bp, Homo sapiens
cccctcttcctcatccacttctgcctccctgtcctcatcgccttcgcctgccggtaacaccgagtaatgatccaagttgatctggggcagcacctacggcgaacaagacatagacacctggg

SEQ ID NO: 31247 - DNA, 122 bp, Homo sapiens
tcaacagtcacagataggaaggggctcggtgtggaaggtgccagctctggctcagccctgcgggtgagtgtttaactttcagcccagcttaagatctccgaagacacccatcgcctcgtcct

SEQ ID NO: 31248 - DNA, 122 bp, Homo sapiens
ctttgcatcccctcaccacctctggaatagagagcagggtctgggaagagaggcagaaaacgcagctcaggaccacagacttaaggcccagggctcccagccccaggaggcagccgctgaat

SEQ ID NO: 31249 - DNA, 122 bp, Homo sapiens
ccgcccccgcgcggcttcctacctgcccaaggaacggccctcaacagctgggaagtcaggcgccccaggagcatggtctgtgggcggcggccacaggtcccaggggagctggaacacaagtg

SEQ ID NO: 31250 - DNA, 122 bp, Homo sapiens
cacccgggctgcacccccggccgcgcaccgaggcttctgccagcgcctgcggggcctctgcgtggagtgggccggcagcgtttttctacccggcaacaaatacatggctttattccacttct

SEQ ID NO: 31251 - DNA, 122 bp, Homo sapiens
ggtcgctccagcagcccggcctcacgcgacccaccattcccgccgccccctcacggtgcccgccgttcccgccgcccggctttctaaccgggcccctagttccccgccccgtgccctctgga

SEQ ID NO: 31252 - DNA, 122 bp, Homo sapiens
tgggcggccaggtcctggcaggtgcatgaaactcttaaaaactctcccagatttggatggcggagataactaaaatttgttcttgggtaaaacatctttgtgcttggtatctatttctgcaa

SEQ ID NO: 31253 - DNA, 122 bp, Homo sapiens
tttctgtgaagatatatttatacctattccggaaaccttctccatttctagaaaaagctacgcatcttcttcttcctcgacttctcttttctccctcccggtgaggatttcaaagggtatgt

SEQ ID NO: 31254 - DNA, 122 bp, Homo sapiens
gcagaaagcatgtgcatggctgctccttcagagcctgcagaaaactgtgcagacagggcacgggcacaaacccatgtgagcagagaagcatctctccgggtgcacacccgcactgctgagat

SEQ ID NO: 31255 - DNA, 122 bp, Homo sapiens
ggattcttaatgcttagagctgaaagcgaccgtcctcagggccagcgctgtcacctcacacgggaaaagcacgacgcatcacgtgctctgaggtcagccctgctgtctgtgcagctccacct

SEQ ID NO: 31256 - DNA, 122 bp, Homo sapiens
gcaaatagctccggtggccctgggtggactccttggccatcagggtctccgccagcgcctcgtacagctcgtccaaaggctccgtgtggacagcctcctgctgggggcaggcagagtgagag

SEQ ID NO: 31257 - DNA, 122 bp, Homo sapiens
ggggtgagccgggtgtgggtaccctgctggggggctgcgcgccctcggcgtccgggcctccgcctgggatgttcccctcgccccaggatgcagattgatagtccttgaagcctcagtgcatg

SEQ ID NO: 31258 - DNA, 122 bp, Homo sapiens
attcaactcgtcttgaatttttgtatttagagcccctaccttctccaccgactccaggggcgccctctggcgggaaggggcctggggtaggagggaacctgagggagcgggttacaaagcag

SEQ ID NO: 31259 - DNA, 122 bp, Homo sapiens
ccgcgtggatgcgctggtggcacgtgagcgaggatgagcgggagaagctcttcccgcactcggagcagaggaaggggcgctcgccggtgtgggacctgcgggggtgtggaggacttggcatg

SEQ ID NO: 31260 - DNA, 122 bp, Homo sapiens
ttatgttagatatgaaaattgcagctgtcacactatcatttaaaatgcttacaaaatattcgaaattcgtattctaaactaaaaagcctataaaagctaggaatataaataaattacttacc

SEQ ID NO: 31261 - DNA, 122 bp, Homo sapiens
gcctttgagaaaaggatcgtttcctgcttgggcctccacgtactccttgatttcctttcccgctttggaaatctgcgagaacacaaaaaatgttttaggtccttgttactgtctctgggtcc

SEQ ID NO: 31262 - DNA, 122 bp, Homo sapiens
gcggggccggcggagcacgcccggggaggcaggtccggctcggctgctgcggagggaggacgccgcgcccgagctctgcgctgagtcctggccgccggctctttatgcagccagcgaggccc

SEQ ID NO: 31263 - DNA, 122 bp, Homo sapiens
cagttcccagcgtcttgcaaaggaagggcataaaacccagatgttttgtccacctgagtccgatttctccagagagctgcgatgagcatcatgcttttgtgtgcttttgggaagtctgcgtg

SEQ ID NO: 31264 - DNA, 122 bp, Homo sapiens
cctcacggagaatgggcctaacctcacggagaatggggccatcagatacaccaaagcagacgctcggtggtcccaaccacctctcataacactttcccaaacttaagacgcacatgtccacg

SEQ ID NO: 31265 - DNA, 122 bp, Homo sapiens
agagaaaacaattttataattgggagaaaaagggaaaaggaagaacacaaaagtagtcatcgcattctctgacaaggtgggcatcaggtcttagaaaatgccaaaaatcagaggaacctatt

SEQ ID NO: 31266 - DNA, 122 bp, Homo sapiens
cctgacctggcttccttctagtcccctcttcctagctaagctcagtcccactgaaaagctcgtggccctggactcctttggctctcacaagcctcctccagtcctgacttgtcacctgtcct

SEQ ID NO: 31267 - DNA, 122 bp, Homo sapiens
ccaccagaatcactgaggcacagctggcccactgccgagtgctgccagccatcctgcaaacgccaccattgctcatccctgggagatgctccagcattgaccaaaagggttgccgggtcttg

SEQ ID NO: 31268 - DNA, 122 bp, Homo sapiens
cggtacccgcctaagaccatactgcgcaggtgctgatctgagtctgggtccctcctgggtcgaggagttctttggcccagatctgcgtggaggcgtgttcgcccggccctaaggtcccttgc

SEQ ID NO: 31269 - DNA, 122 bp, Homo sapiens
caggggctgctgaggagggagctggtcggagggtgacttgcaggaaggcccaggctcagccggcacatccagggggacacagaaggacggtgagggcgggtgcaggctctgggtgccgctcg

SEQ ID NO: 31270 - DNA, 122 bp, Homo sapiens
gtccctcaagatgcttgtgaaggtgcccgctgcgctctgacaccggcgatctcttaggtacgacccagcggggttgggctggcggcagaaaccggcggagtgcgcgacctcgaacccgtttc

SEQ ID NO: 31271 - DNA, 122 bp, Homo sapiens
aactcacatttccatccagatttcaagttgacgtttggctctgacatccatcttactattcgagaaccctaagacctccatggctgaacataacaaatgtcaccaccagcctgggcatggtg

SEQ ID NO: 31272 - DNA, 122 bp, Homo sapiens
gaaaccgaccggccggcaggaaatgacgaaggcagagggcgtccaggtccgctcggtaaccgtttcccgcgcgcccggccccgactccggggtaaagagccccggagcggagcagcgctggc

SEQ ID NO: 31273 - DNA, 122 bp, Homo sapiens
gctcaggtgagcaggtgcgcgtgtgcggctcacctgtgcatgcacgtgtgtctgtgtgcacgtggaggtatctgagtgtgcgtttactcatcccgtgggaaagtctgcacatgtctgttcta

SEQ ID NO: 31274 - DNA, 122 bp, Homo sapiens
accccatgtgtagctgatgccaaacactgacatataggtgcttggagataaaagtttattcgatttggccaaagcgagaaggcgggagggcaagatctctcaaatccgccctaacaaaaaga

SEQ ID NO: 31275 - DNA, 122 bp, Homo sapiens
tgtccatgcccggttggccaccccgtttctggggggtgagcggggcttggcagggctgcgcggagggcgcgggggtggggcccggggcggagcggcccggggcggagggcgcgggctccgag

SEQ ID NO: 31276 - DNA, 122 bp, Homo sapiens
ctctgtgcctgaaagcctgcttcacctccacactttctcattagcgaactgctacgctgtcgtgccagtccacacgcagcctcttgcaggtctttagaagctcagctgagtttcttactatt

SEQ ID NO: 31277 - DNA, 122 bp, Homo sapiens
tcttgctactgctccacacgcctcaccctttttacacacggtcacttgccccgcgcaccccggagcccttccagccttgacacacagctgggactttcaggtctgaacagcggtcctggact

SEQ ID NO: 31278 - DNA, 122 bp, Homo sapiens
tggggccgagctccagggctggctgctgggctgctaagggaactgtgagccgctcagagccgcgcgcctcccgggcggggcggggccggccgtgggagtccgcgcgtgcccgcgccgagctg

SEQ ID NO: 31279 - DNA, 122 bp, Homo sapiens
ttctgttctttccagagaggagcttagccagggacttctgcccttcctgggcccgggcctcgggggcgattccgggtaggtaaagcggaacgagggcgtggcctctcttgtgagcccgccct

SEQ ID NO: 31280 - DNA, 122 bp, Homo sapiens
tgaaagctggaagttgtatgaaggtgttccttttccacaccccagctactctgccccagtcgaagaggctaattctggccctcttataaaaaaaagaaagaaaaggtaaagaaaaagaaaat

SEQ ID NO: 31281 - DNA, 122 bp, Homo sapiens
tccacgtcgcttgacgtcatggtgtgtgcatttgtcctgtgctgggctccctacactgctcgtgatcatcggagctgcctgccacgggtcacatgtccagcactttctctatgagacacgct

SEQ ID NO: 31282 - DNA, 122 bp, Homo sapiens
tcctggacggacggctgcttgagcccacaggtcgtgcgtcctttgacagcggcctccggccgggaggcaccagctcttcgaacaatgtcagtaccttcctagggccccacgtggccaagctt

SEQ ID NO: 31283 - DNA, 122 bp, Homo sapiens
gaccgctcagcacagtctgtctgagtgttgaccaggaaagtccaggctctttctaaatctcgccgccagacctggtgacgcattcgcatgtatttaaggcgtttgcacgcagaacgttatca

SEQ ID NO: 31284 - DNA, 122 bp, Homo sapiens
gctgtgcccagtagaaaaaaatgcgctcatatatttttcttccatgagcaaaaaaatccccgccgagatcacctcccctcagaatgtagggcacgaatgtgttctcacatgagttcaagaac

SEQ ID NO: 31285 - DNA, 122 bp, Homo sapiens
cgaaatatttgtgtgttttactctagctccggagtccccaacctccagtaaacgtaaccgcgtatcaggcagcgcggcaggcgagccagagaagtttcatctgtccttatacagcaactccc

SEQ ID NO: 31286 - DNA, 122 bp, Homo sapiens
attccacccaagaaatttgggagaatgcgaaaaagcagcagcccagcattcccggatgggcgtggcttttctccaggggctgtccaattgaattccttcagagggagaagattgataagggt

SEQ ID NO: 31287 - DNA, 122 bp, Homo sapiens
ccttcccaccaatcactcccatttcttttgttgtccttggtggtgacagaatataggggtcgttgtcttcttgataatatacttaatgttcctgaagggtatgagggaggcctcccttagcc

SEQ ID NO: 31288 - DNA, 122 bp, Homo sapiens
cagcatcgtgaccctgccgcgggcgcggcgagccgttgcggccatctgggtggccagtgtcgtcttcagcacgctcttcatcgcctactacgaccacgtggccgtcctgctgtgcctcgtgg

SEQ ID NO: 31289 - DNA, 122 bp, Homo sapiens
caaggagccaggcaggactgactcacgcctggttgcaggagacctggttgaagcggcaggcgaagatgaagttgcccagcgtgtcctcctccagggatggcagagtctctggcagcctcgac

SEQ ID NO: 31290 - DNA, 122 bp, Homo sapiens
ataccgaggacatctgcctaaaagcaggttggtcactgaatctggccatactgtacccctcgaaccgaagctccctccggtgccctttgggcggggaggcggttggtgactctcccggggag

SEQ ID NO: 31291 - DNA, 122 bp, Homo sapiens
tggtggcgccaaaaagtccaggcagcttcgggcgatcagggtcccgaggcgctgggcgcgcggacttggatcctcagggggcccctctgtgtgactttcgctaattgtctcacagggagggc

SEQ ID NO: 31292 - DNA, 122 bp, Homo sapiens
gtagttttattgtatcagacttagtacaggggtggggtgggggtgtgtattggaatgatgcgtgcccgtttctctgcaaaatagtttctatgtcatggaaaggagtcgatgggacaagaaga

SEQ ID NO: 31293 - DNA, 122 bp, Homo sapiens
gggaggcacagagagtaagaaggacctgctcaagggggaaacggggagcgtcgggagaggcggggaggcaggcagagaccaggagctgcacaaaagcacagttaatgattcactcacagccc

SEQ ID NO: 31294 - DNA, 122 bp, Homo sapiens
acacgcggcaccacccccaagcaagaggtaactactgaagtgcccgaataaaaagaaactcgagtccctgctcctgtcgtggtccttttcaggtgaaatgagttgttatttttacgcaaaaa

SEQ ID NO: 31295 - DNA, 122 bp, Homo sapiens
atcacataaaacagatatagaccttttctcaatttatgcaaagggcatcaattaggacaacgtgcttctgtcttcaattgatttacttagtggtcaatcttaataaccaaggaagctttgta

SEQ ID NO: 31296 - DNA, 122 bp, Homo sapiens
aatgcactttgcccagactagtaactctcccctgacgttccgcatttcccttgcttctcccggaaacgtggggcgcccaggaatcctaaacttccaatccctaagcttccaaaccccgcccc

SEQ ID NO: 31297 - DNA, 122 bp, Homo sapiens
ccgggacgaccacctcagaggccaaggcgcggggactgggccccagccaggccggggtgccgtccaggaaggagacactgcttcccgtgggcctggcacggtcactcccccgctgcccgccc

SEQ ID NO: 31298 - DNA, 122 bp, Homo sapiens
cggctggcagagacagaggagggtgtgacggcgttgctggccccccatgggtccagagggcgagacagactctggaggcacaccctccacgtgcctgtgtaggcatcctcggccctccagcg

SEQ ID NO: 31299 - DNA, 122 bp, Homo sapiens
ggaaggtagcttggtaatgttaccttttactacagccatggtcgcactctcctgtaaaggcgtcttaaaagagtcaaacccaaagaccttcttcagcgtactccggactcgccgctcagggt

SEQ ID NO: 31300 - DNA, 122 bp, Homo sapiens
ctgcctcatttgccttgctcaccattaagagtcaagctccactgcagtagtccgcagagtcggagcagaaattgtgtggacaaacgctcccgggttgcccggacgacaggccccgcccactt

SEQ ID NO: 31301 - DNA, 122 bp, Homo sapiens
caaatgagacacgtgggggcaaattaattacaggtgctgctacctgctagtgtatgcagccgcgttgataggtaacaagaaaacggaggaggggggccgtaaatcggctcccttgacggtga

SEQ ID NO: 31302 - DNA, 122 bp, Homo sapiens
gagatttcgcttcctcccgttcccccttctctctccctctctctcgcccggccagaaagacggctcccttattattcgttcggattattattgtggatttgagttcgaggtgggtttttctt

SEQ ID NO: 31303 - DNA, 122 bp, Homo sapiens
ggctctcgcctctcccgttcggacgccctaagcctccggacttaccgttggcatcccaaacgcctttccggagccacaaagacaggaagagagcgtcagcatccgaaagaccggaaataagc

SEQ ID NO: 31304 - DNA, 122 bp, Homo sapiens
tttttgttttggagagtgagggctgctggtgagggtagatttctgaactaccccagagaacgtagtcaggaacctcccagcaggatgagagaggagccatcagctggaaggagaggggaaag

SEQ ID NO: 31305 - DNA, 122 bp, Homo sapiens
agggcgctattgggctgacatgagtgacgtcacccagctcttatcccagccccggcatcacgggacttgccctggcagcaacttacctgcctggtcactgtcagtccagaccctctaccctg

SEQ ID NO: 31306 - DNA, 122 bp, Homo sapiens
aggccctgtggcccctgggtgactcagtgagcggcagggatagggctggatccacagccccgccccaagcttcctgccaccgtgggaaccacaagctccacgtttccctgtcaggtaagcct

SEQ ID NO: 31307 - DNA, 122 bp, Homo sapiens
gagataattttgagattttcacttgtattggtttccttccctttattctgcccttttgcacgttgcccaatgccagcagacggcctgatgtacttaggtaccctcacagggtggacaggttc

SEQ ID NO: 31308 - DNA, 122 bp, Homo sapiens
aatcagttaggacgccctcgctgtgtgggagactgatgggtccaggcgctgtgcaaaccccgcctccaaagtgcatccttggctcactgggaccttccgggttgtgctgctcttgcttcaca

SEQ ID NO: 31309 - DNA, 122 bp, Homo sapiens
agctggggttttgccatgtcacccacgatggtcttgaactcctggactcaagcgatccaccgactttagcctctcaaagcactggggttacaggattttgccactgcacccgattttatata

SEQ ID NO: 31310 - DNA, 122 bp, Homo sapiens
tcgagtgtgttggttacagtttctcttctccaggcatttcaaactctgaagctcatctgtcggtggagagttagctaacaggcaaagctcggatattgagactgcatctgcagagctcctgc

SEQ ID NO: 31311 - DNA, 122 bp, Homo sapiens
caaggtaaccagctcttcatcactcaggtgtgtgtaccggaagggggtgcctgttcgctgcgcaggttaggcctaagcgcacctgcccttcaaccctgtgccgacgaggcccgaaggcttaa

SEQ ID NO: 31312 - DNA, 122 bp, Homo sapiens
aagaggacgcctgcgcaagaggacgccgtcagcttggcgtcagcgcgccgggctctggcccgccccctgtgacaccagccccgccccaccccgccccgcatacccgtgcgctgccgcgcatg

SEQ ID NO: 31313 - DNA, 122 bp, Homo sapiens
ggctgacttggaatggttgtggcctgttttgttacaccttttgcttttcacgttaaagtgcgtgattggccttaacttttctgaaaaagtactttatcctctttgaagtcctcccattgctg

SEQ ID NO: 31314 - DNA, 122 bp, Homo sapiens
gctgggaccttacgtcactcggtggtggcgatgatgcgtgtgtgtggggggcggggcatacgctgggcgcgtcccgggggtcacgtggtgcagagcacgcagagtccttctgtcggttggtc

SEQ ID NO: 31315 - DNA, 122 bp, Homo sapiens
tccagcacccacacccccagcccggcctgctgaccctcgcccaccacacaggttcgctgtcgtcccggctttgctctgagcctgagcctgggatgcacccacgacccagcctcctgggacct

SEQ ID NO: 31316 - DNA, 122 bp, Homo sapiens
actgctttactgtctctgcctaggctcagctctcacgtgagctacaagaaccccaaatggcggtccctgtccccaggcctctctcctcactgctgccgacctgttccagaaaactcaggcct

SEQ ID NO: 31317 - DNA, 122 bp, Homo sapiens
cagcacagatgatgactttggtgggggagcccagataaacacacacgaacttggcctgctcgcaaacgtagtcttacaggaacccaatgctctgacactgggattttttgtccttattagaa

SEQ ID NO: 31318 - DNA, 122 bp, Homo sapiens
aaagaaagagagaaagaaagaaggaaggaaagaaagaaagagaaagaaagaaagaaagagcgagtatgtaaagtatgtctactacacaagcccacaatattagccagtattaatgttatcac

SEQ ID NO: 31319 - DNA, 122 bp, Homo sapiens
agtaactggatccagctgagggcctggcggccaccgagggtacgggcggcgatcaggttgcggccgagccgtgagcgttccactggacggcttctacatccggaagggctgggccgggccgg

SEQ ID NO: 31320 - DNA, 122 bp, Homo sapiens
aacgccggtcgggggaggtgtggggaagcaaggaagctccttttagcatcctcagcggtccgggaagtggggggttcccagaggactgcagaagaacaccacctttcatgcttgcattctca

SEQ ID NO: 31321 - DNA, 122 bp, Homo sapiens
tctggtcctcccttcccttctttgtgccgtcgtctctgcggccagccctaatctccttctcgtggcttctccgtctctgaccccaaataggccttaagggcgtgggagaaatgagtttctgg

SEQ ID NO: 31322 - DNA, 122 bp, Homo sapiens
cgtgcccacggccctccctgcagcgggaatctctcgctctggtgacggggctaatgtgggcgccgaatctgagcccggcatgtcacctactttacctcgttggttcccacaacaatcctgtg

SEQ ID NO: 31323 - DNA, 122 bp, Homo sapiens
gttcctcccctgggtcctgcagctgcacttctgaagtctggtcccttcaggatctggcagcgggtgaagaccaaaggagaggagggggtgaagcagaggaatccatctaggagaagctagtt

SEQ ID NO: 31324 - DNA, 122 bp, Homo sapiens
tcaaaatcttcactcaaaatgggatgtaagcttgttcatttaagttgcaggtgatggactcgtcagagagagtaatcagtggaacaagatcagtgtaacccaccattgactcggaaaggaga

SEQ ID NO: 31325 - DNA, 122 bp, Homo sapiens
agcggtttattcccggggctccgcactgcacccacgcgcccgcgcctgtgtttgactgcacgaggattctccggaggtgtcccttcctgccagccaggcctcacccctgggtacgcataggt

SEQ ID NO: 31326 - DNA, 122 bp, Homo sapiens
gagtttcctcccaggagctgagaggtagctgcagggcgagccctgggggaagtgtgcagccgctggagctccgtcctgggcaggggtggtcacggcttgaggatggcaagggctgatgcctt

SEQ ID NO: 31327 - DNA, 122 bp, Homo sapiens
cagcccagataaacatccaggtcttagatataaacgacaatgcaccagaatttgcacagccgctctatgaggttgcagttctagagaatacccccgttaactctgtcattgtcactgtctcg

SEQ ID NO: 31328 - DNA, 122 bp, Homo sapiens
gctccctgaacaccatccttgtgtgtatctagcgcttttgctcctatagtatttaagatccgcatcaacttttttatccatctcatccctcacttctcaggcaagtttggagaccttaccct

SEQ ID NO: 31329 - DNA, 122 bp, Homo sapiens
ttgataggcctggggtggctctaagccctgggaagagccctggcaactttccctggctggcgggtagaatcttctcctggcagttcagggctctgcctccagctccctgggggagagcaact

SEQ ID NO: 31330 - DNA, 122 bp, Homo sapiens
tggggaccccaccctgagtgcccacccccagcctgagcagctgactgcagaggaacagaccgctctgagtcacacagccagcccagtctggtgagtgccttagtgtgcgccaggtcctgctg

SEQ ID NO: 31331 - DNA, 122 bp, Homo sapiens
acaaagttgctccccgaggggctgagatccaactttcgcttcccgatttagccaggggagcgcgaggccgcacacaacccggcgcggggggaaagccggctgcagctgcgcctcccatcctt

SEQ ID NO: 31332 - DNA, 122 bp, Homo sapiens
gggttcctttacacctcaaagaccaaaggagagtaacaaccaggttgaacacaaaacctacgtgtaaaaaccaatttttaagacgtatggccaggcatggtggctcatgcctgtaatcccag

SEQ ID NO: 31333 - DNA, 122 bp, Homo sapiens
gtgaggaagctaagttctaaagggcttctgttccttggttaaggccacacacgatattcacggtgttggtattatgacatcaagttcagagcttttctgaaaatatccaggcagcattccac

SEQ ID NO: 31334 - DNA, 122 bp, Homo sapiens
ggtcggtcggtcgccgtaatgcggtccggatcgtgcacgtgctgtttcgccactgccctccggctcctccttaacaaagatgtcaaccgtgctaaatcacaggtggtgcctttgtaagacca

SEQ ID NO: 31335 - DNA, 122 bp, Homo sapiens
caattgcaggggagaaggcatgacccaaattatttccgactgcctcgcgccaatttggaccgcttagaggaggcaaaaaatgggcaaattccttggaagccctgctgtgtctccctggtact

SEQ ID NO: 31336 - DNA, 122 bp, Homo sapiens
gaagtactgggaaatgctgacacatataattacctaaggctaagctgggccctaaggttacggacagaatgatgggaaaatacttgtagggagaagaataggtattcaaaggggatgggaag

SEQ ID NO: 31337 - DNA, 122 bp, Homo sapiens
ttctcatctgtgtaggtttgcggtgtttcttgaggcgagagctgtctgtgtaggttttgccgctgcctatgtaatcccaagtgtgggtagtgatcttttttggcttgtgctcctccaagatg

SEQ ID NO: 31338 - DNA, 122 bp, Homo sapiens
agaatctgcatagcgagtggtcatgccctgtggtcagtcaccaagctggagtctgagcagcgtgctactgttttgggccgtggacaggatcaggggcggggattatcgggaaagtgaccaat

SEQ ID NO: 31339 - DNA, 122 bp, Homo sapiens
ggcctccacacgggcctccgaagagctgccgcgacgcccggcccgcagggcaggtgagtgcggccgcccgccgctcagacccggcccccagtctgccagtgccccccaagtcacttctcccc

SEQ ID NO: 31340 - DNA, 122 bp, Homo sapiens
aaagcaaaggaaaaaaaaaagcaaagaaaacttggggacttgtctcgtaccccctcaccccgccccctcaaaaaacccaaagcaatgtaaaactgccccggttcggttgtttctgggttttc

SEQ ID NO: 31341 - DNA, 122 bp, Homo sapiens
gcagccccacccaccctcctttttatgttatttcaacacaatgggattcaaagaccaatacgttgaatgtatttattaacattataatatttcagcaaacatttgagatgattttattgaga

SEQ ID NO: 31342 - DNA, 122 bp, Homo sapiens
accagcgtttagcagcatgcaggcggggcagtgtgtgatggactgggcagcacaggtgtccgcctgggtccacgtgtgacctccgtcctgccgctgatggaagatttgcggatgaggacaca

SEQ ID NO: 31343 - DNA, 122 bp, Homo sapiens
ggcagctaccatgttccgggctacgctgcggggatggagaaccggtgtccagcggggctgcgggctacggctgttggtgagagcgctgagcgaggagctgagggcatcgcgtgggtgtgagg

SEQ ID NO: 31344 - DNA, 122 bp, Homo sapiens
caccgctcctgagacacattcctcagccatcactaagacccctggtttgttcaggcatctcgtccaaatgtggctccccaagcccccaggctcagttactccatcagacgcacccaacctga

SEQ ID NO: 31345 - DNA, 122 bp, Homo sapiens
gccccggccccgcccccggcccgacccccaccccgaggccggagcctccagggcacccggcgctggaatctgtgtcctccttccggacaggagaacatcaaggcggtaaagcacagaaactt

SEQ ID NO: 31346 - DNA, 122 bp, Homo sapiens
tctggcccctggagggtcacagggcaatgacaaggaatgagcagggaaagagcctgcagacgggaaggatggtgcttcccgtgcagtgttgctaatgctgcccctcttcaaggaagacaccc

SEQ ID NO: 31347 - DNA, 122 bp, Homo sapiens
gaatcctgccagggaggcaggtcagaattatttgcctccacctctgtgcggaactgatgccgagacggactccacccaggcagtgggcaggcgggcaggtccgtgcgcttctgtggctgaag

SEQ ID NO: 31348 - DNA, 122 bp, Homo sapiens
ttaggaaagaatgcttgtcaacaccagatgctatataaatgcggcagaagggcatgggcccgaccagggcccccattagtcatgctcaaccacctccaaatcactcctcttccagaagccaa

SEQ ID NO: 31349 - DNA, 122 bp, Homo sapiens
aagagtctagcgccacggcatggtccttacttatctaccagatactaaactccgtgaggacggtgatgagatctgttgtagccctggtcattgacacatgacagatgtaaagtgactgttca

SEQ ID NO: 31350 - DNA, 122 bp, Homo sapiens
gcatgagtgccatgcagcgcaaactagaggactttcgggactaccggcgtctgcacaagccgccccgcattcaggaaaagtgccagctggagatcaacttcaacacactgcagaccaagttg

SEQ ID NO: 31351 - DNA, 122 bp, Homo sapiens
ccagaggagaggagtgagccgaggctgcctgcccatggccagggggtctgagttggggcacgtttcccatttggtggcctcagaccctgctggctgccaacccttggaataagcaacagggc

SEQ ID NO: 31352 - DNA, 122 bp, Homo sapiens
ctctgtcctgccattcccctacctgaaattcttcaggggcttcctccccaagatggcattcgaagcaactgatgagccagctggtgcctcttgacaccctcatctctaaccaccatccttcc

SEQ ID NO: 31353 - DNA, 122 bp, Homo sapiens
ggtctcagtccatccgactgctctagccatgtgccacggactgggtgggatccaaaaacccggcctgcattcccacggctctgcagcccggacgcccaagaccagggcgggttccgtgtctg

SEQ ID NO: 31354 - DNA, 122 bp, Homo sapiens
ccagggttcagcgtggactggtgggcgctgggagtcctcatgtttgagatgatggccgggcgctccccgttcgacatcatcaccgacaacccggacatgaacacagaggactaccttttcca

SEQ ID NO: 31355 - DNA, 122 bp, Homo sapiens
attcagtggaccagggcggagcgacgcctgagaattccgcccaggccttgaggcgggcctcgcctcccgcagccaaagcagaacattgcgaattagagcattttgcggtcaattttccactg

SEQ ID NO: 31356 - DNA, 122 bp, Homo sapiens
ggccggagctgcgagctctcggggtctggggggcgcgggctcggccggaagcggagggagcgctgcttccggagtccgccgggctgatttgcatagagtgtccgggccgccccgcccaggtc

SEQ ID NO: 31357 - DNA, 122 bp, Homo sapiens
caaagagagggctggctataaaatatttagagatgagagacatagtaggagaaaatataacggaataggaaatatatggccttcccctagcatatttgtaaagtactgtcttactgaaaaat

SEQ ID NO: 31358 - DNA, 122 bp, Homo sapiens
cctgaagccccagagggagacactcaagctccctctaggtaggaaagggtatctggctggcgttagctgagaggcttaactaaaggagggttcttgctccattgtctcccaaatttggaaat

SEQ ID NO: 31359 - DNA, 122 bp, Homo sapiens
ggggagaacgtaatttccttctgcaggagtcgtggagacgtgagctgcaaccagccaccgcgctctctccaggcttgtttaccagttttaggtcatcattgtgcacgaaacattctttcatc

SEQ ID NO: 31360 - DNA, 122 bp, Homo sapiens
gctgccagggccccgcccgcgcgcggccgaattgggatctgaaggcagcggcagcgtctacgcaagcagcgttctggagcgtcgctctgccaccttcccgcgcgcagttccgcgcgagccgc

SEQ ID NO: 31361 - DNA, 122 bp, Homo sapiens
tttgggtttattttatgttcatctttgtcatttttcgtctggatcttctggcttgggtcccgttgggagaggtcgctctcttaaacctctctttcccaatacatcgcgctaccccctcactt

SEQ ID NO: 31362 - DNA, 122 bp, Homo sapiens
ttcgtgccctcaccttgtcgcttctgtagagataaagaaggaatgacttaatttctgttccggttggttctcttggtacctgaaggtataattaattaatgctcaattaatgcttattcttt

SEQ ID NO: 31363 - DNA, 122 bp, Homo sapiens
ctgggctcactggcgtgtgctgccgcgcccggcccgcccaccccaggcggtatggaaggccgaggtcagagccaggactcccccgggagccccgcaggtgcctcaaggcccgcgtcctgcac

SEQ ID NO: 31364 - DNA, 122 bp, Homo sapiens
aaggggttgggaatatttgcgggacagggtgtagccctatgtaggtccctgccgacagtgcggccgcatggctatggcttccatcatcccggaatggggacgggactggaatgaaggactca

SEQ ID NO: 31365 - DNA, 122 bp, Homo sapiens
caccgtggctctgtggctccagccggaatggcaaagcctggctccacagctgcctgggagcgtgagtcacgcgccccacagaacacggcgggcagcgcgggcgaggattggcgaaagccgac

SEQ ID NO: 31366 - DNA, 122 bp, Homo sapiens
gctcaggaagcgcgcacggctctgtcctggagggtgccatccacgcggagggtgcctgtccgcaggaatgcaggccgggagccacgcagagcccccaccccagcccggaatcgctgtctccg

SEQ ID NO: 31367 - DNA, 122 bp, Homo sapiens
acgcaaaggggaccctgtcttcttaggacacagactggctgcgccgatagtgctcagccccgcacctcctgagcatacatttaatgttaggcaaagagcaagtttcctatctaccgtttgac

SEQ ID NO: 31368 - DNA, 122 bp, Homo sapiens
tatcactactcttggaagaaaacccacagccgaactagcatgacggacagacaggcccggcggctgaggggctgcaaggacaaagaagacagtgatgagttcgaagagagtcgaggaggcct

SEQ ID NO: 31369 - DNA, 122 bp, Homo sapiens
acctcaagtgatccacctacttcagcctcccagagtgctgggattagaagtgtgagtcaccgcacctggccttagtttaacttctagttgattgggaatggattcaggaatttctgaaacta

SEQ ID NO: 31370 - DNA, 122 bp, Homo sapiens
acctcaagtgatctgcctgtctcagcctcccaaagtgctgggattacaggcgtgagccaccgtgcccggcctctcagctcttaagattctgacactctcttggggaagctggtgatgactca

SEQ ID NO: 31371 - DNA, 122 bp, Homo sapiens
tgtgacggtgatggtgctgtctccacaggtgatcctaaagtcagagcctgtccaccccttcgggctggccgtgtatggggagcacattttctggactgactgggtgcggcgggcagtgcagc

SEQ ID NO: 31372 - DNA, 122 bp, Homo sapiens
ccctgtgatactcttcttaatattcagagaggaagaggatgatattactcccaatacagacgggtgtacaccctctgtacaccgagggtatatagccgtctctgaaacagttcataatctcc

SEQ ID NO: 31373 - DNA, 122 bp, Homo sapiens
gttcacgtccgctccgttttgcagcaggaactcacagacgatcaaggagccctggggagccggggcaactcagacggagccacggcaccggcccctctccgcgcctctgcaccctgaccccg

SEQ ID NO: 31374 - DNA, 122 bp, Homo sapiens
gaccgctttgtggccatctgtaaccctttgctatacacagtcaccatgtcttggaaggtgcgtgtggagctggcttcttgctgctacttctgtgggacggtgtgttctctgattcatttgtg

SEQ ID NO: 31375 - DNA, 122 bp, Homo sapiens
accgccggggggtgggattaacgtccaaagctcacaccggcttcaactgattggcaggaacgaagtgggtggagcctcctgaccctgccctcctgcttccgttgctagggacgcttcggccg

SEQ ID NO: 31376 - DNA, 122 bp, Homo sapiens
caagtctgcactgtcacattttgccagtcatatcctttacaagttttcttgcgggccgggcgcgggcctcacgcctgtaatcccagcactttgggaggccgaggcaagaggttcgcttcagc

SEQ ID NO: 31377 - DNA, 122 bp, Homo sapiens
ctatgacgtttgtgctaacttttcagatgtcccaagatttgggttgttttacaaggataacgaagttcatgatgaggttaagcaatcactgaagctagtgctagaaattttttttaatttaa

SEQ ID NO: 31378 - DNA, 122 bp, Homo sapiens
ccatctgcacatggagccctccggacgggtgaatctgtcgtcagtttggggcttgggaatcggtgtccaagagctggcttcaaaggcaatgaaactggcattgcatctttgaaggcagcaca

SEQ ID NO: 31379 - DNA, 122 bp, Homo sapiens
aggctgggcggcgggaacaggggtgcgttggagctgaggtctaagctttccgccgccttccggcccagggccctgggatccatagacgatccgccccccaccccgctgtggtctgaccccag

SEQ ID NO: 31380 - DNA, 122 bp, Homo sapiens
aatggcccccagacttccgcttcaggaaactggagatcgatggttttttggccggatttgcgagcagcttgtcagctgtttttgccctccccttcccatccatccactgcgaatgagtatta

SEQ ID NO: 31381 - DNA, 122 bp, Homo sapiens
aaagaggaaaggtggggagccgatggggatgctccgggctcgggagaccgagggggcggacgggcgggaccccgcagccccgggggcctctgggaacccgtcccccctcggccccgccccct

SEQ ID NO: 31382 - DNA, 122 bp, Homo sapiens
gattacgggcaggtccttaccctctctggtttagaactgcacaggtggaaggcaagggggcgcagggtcccacccaggctgcctggtgtagaaaagtgggtgcttgtgcctcccggcctgaa

SEQ ID NO: 31383 - DNA, 122 bp, Homo sapiens
ccagggagctctactttccaagcagttccatggccaacagctggagtcttattttagggacgagctggcagcccagcatttgtactgaatgttccgggtcggcctggcccgcgcctggtgca

SEQ ID NO: 31384 - DNA, 122 bp, Homo sapiens
cccttcacttaactgccctcgtgagatgttttcagagcgcactgttgagaattgcagccccgccctgctgttttcctccatagcagccagtacgtcttcagacccactgcacattttacctg

SEQ ID NO: 31385 - DNA, 122 bp, Homo sapiens
tttctattccttgaaaaagtcctcctgtttgcctaggttgaggaaaatccttaattaccacgttacttacttctaacaaaattatttattatcgtatttgtacaaaaaaagaatatgataaa

SEQ ID NO: 31386 - DNA, 122 bp, Homo sapiens
ggaactgaagtacttcacgtcggtgctgaacagccacgagcccctgtgctcggtgctggccgccagcacgccctcgccccccgaggtggtgtacagcgcccacgcattccaccaacctcatg

SEQ ID NO: 31387 - DNA, 122 bp, Homo sapiens
tgatgtgtttgaggcctggcggctgctgctcacatctgctccctccctggccaccagccccgccttccgctacgacctgctggacctcactcggcaggcagtgcaggagctggtcagcttgt

SEQ ID NO: 31388 - DNA, 122 bp, Homo sapiens
cgcgcacgcggggagacaccgccccgtttgccttctggctcccggtgattggcggttagacgatggctggggagcagggtcacggacactattggctgcaaacaacagtcactcaaaaagtc

SEQ ID NO: 31389 - DNA, 122 bp, Homo sapiens
gcctctttctaaatctatgggacaaggcagaataaaggtcgggcaaccaattgacttggacgccgtcccaactccacaagttaacggtcgcagctcttgggcaagacgttacaaaactagaa

SEQ ID NO: 31390 - DNA, 122 bp, Homo sapiens
gtagcggagcctgggggagctggaggtgcacgggggcggggcagtcggtaccaggcgagccgtggtctttgacctttgacacttgccaaagcatcgagtgcgattggaggggtgagtctttc

SEQ ID NO: 31391 - DNA, 122 bp, Homo sapiens
agacggtggcggctccctttggtgcaggaggagggaactcgactctggtccagcctccgccgcccggagtttccggcgactccaaattgtgccccacctccgaggccatgggggaaaaataa

SEQ ID NO: 31392 - DNA, 122 bp, Homo sapiens
aaatactataatttaaaaaattaccaacgggctaattatacttgtgttttactggcagagcgctttgtctgttagctcttttaatcccgctaataattctgtgaggttggtactataagttc

SEQ ID NO: 31393 - DNA, 122 bp, Homo sapiens
cagcgacctgcgggtgggagacgctgccagccacgcggccgaactccggactgggggccacgtggaggaggccttggttcagctctgccccatgcctcacgggacacacatttatcacctgg

SEQ ID NO: 31394 - DNA, 122 bp, Homo sapiens
ctttggagtctccttgagtcgtggctgacttgatgtgggcctctggaggatgagcagtaacgagcttgcagtagcttttgagccaggcactgtagaaaacacgggtattttaaattttaatc

SEQ ID NO: 31395 - DNA, 122 bp, Homo sapiens
acctttgcatttcacgcgggattgtgcacacgcatgtccaccgtgccttccacgcgggatcgtgcacacgcatgtccacgaactcctgcacacctacacccaccaggcctgcccatgcgatg

SEQ ID NO: 31396 - DNA, 122 bp, Homo sapiens
tggcccaccggccctccggcttgtccctctgcgcggtcactggggcgtgcagacccgagccggccctccctgagtcagccagggaccccggagtgtcgataattaagagacacacgtcaaga

SEQ ID NO: 31397 - DNA, 122 bp, Homo sapiens
caccagctgcttcactcatgcatggccccctggccctgtaggcattgaaggtggaaaccccggttccctctcagaaagctgacctccagatccaaagacatcctggatgccacagagcttta

SEQ ID NO: 31398 - DNA, 122 bp, Homo sapiens
gacctgcgtgggctgcgtgaggctgagcacagggggctggagggcactggtcacggtggccgccgtcttcccggccgtgcgctggaccgagctactcagcaccacggccgtgagcgcagtgg

SEQ ID NO: 31399 - DNA, 122 bp, Homo sapiens
agtgtgagggtttgggtttctctggggaggtgcacacaggacctttgctgtctatagttgcgccttctggaaacattgggcaggcacaaggggtgagaggtggagctggggaggcagctatt

SEQ ID NO: 31400 - DNA, 122 bp, Homo sapiens
cgtcatgcacgctgcgctccattgtcccccaaacatagccagcacttccggctgtaactccgggctgttgcccaactggaacactctgcccactgatcttcacttggcgaactcgcaagcca

SEQ ID NO: 31401 - DNA, 122 bp, Homo sapiens
tactgcccgcgggatcgcggcgtggggaaccaggaactacaagtcccggcaggccgcgcgcgcctcggcttcactaagcgcagtcaggtggctgtccccgcacggttcccagctaattcccc

SEQ ID NO: 31402 - DNA, 122 bp, Homo sapiens
ccgccggcctccccagaggtttccttggcagcccttatttgtaaggcaaatccaggcccgcgcacacgttgctcgaatgtcaggtactaaattgcctttatgagagtcgagcaggcttgccg

SEQ ID NO: 31403 - DNA, 122 bp, Homo sapiens
gaggccagcgttccccctagcgcctcgctgtgccccactctgggaaccggaaacaggaagcgccaagaggccgctgggcaaccgctcctcccaccagaccccgcggcatgtgaccatagaac

SEQ ID NO: 31404 - DNA, 122 bp, Homo sapiens
cctgcccggaggctgagaaagcgcatttggcggttcccctcgacggaaggcgtagaggggcggggtagcttacacctgcctgcgataccatcctgttagtttctagttctgttagtttcagc

SEQ ID NO: 31405 - DNA, 122 bp, Homo sapiens
ggctggatgggaaggaccctccctgctgcagacttcatggcaggctgcactgtgtcccctcggctccacggctgccccgggggcgctgctttcggtaggtgccagcccccgtgccagcagga

SEQ ID NO: 31406 - DNA, 122 bp, Homo sapiens
acaaaaacattgtgtttgattttgatgcattctcatttgagtggctcagtgttgagtatgcggttatgtgtcttcttattcaggcttgctcactgtactttgtttgtgcagggaacaatgct

SEQ ID NO: 31407 - DNA, 122 bp, Homo sapiens
cctcccctcccaccctctttaggccagatttttgcagagaagctccctgatgagatgcagcgtgcaggtgagagtggcgtctggagacagcctggaggcggccagtgcctccggagggaagt

SEQ ID NO: 31408 - DNA, 122 bp, Homo sapiens
aggctgaggcaggagaatggagtgaacccaggatggggagcttgcagtgagccgagaccacgccactgtactccagtctgggcaacagagcgagactccatctcaaaaaaaaaaatttaatc

SEQ ID NO: 31409 - DNA, 122 bp, Homo sapiens
atcccagctccccgggaggctgaggtcggcggatcgtgggtgctcgggggttcggagctacggcgctgtgtggagcgggcgtccgcaccgggcctggcaccaacatggtactcccgggggag

SEQ ID NO: 31410 - DNA, 122 bp, Homo sapiens
ttagtgatgggaagagggcgatgtcttgatggacagtggcatcggctgccggggagggaacggcagctcaggaaggagctgcccccacagggccccagtgaacaacccccctaccctcctgg

SEQ ID NO: 31411 - DNA, 122 bp, Homo sapiens
caccatggggaatgggatgaacaaggtaacgtcttccctcgttcgcgctgggtttgcctccgctccgacgccctgccgtctcgccggcgtcggctgcccgacgactcgagcccggggtgccc

SEQ ID NO: 31412 - DNA, 122 bp, Homo sapiens
cagtgagctggtgcagagtgtggggcacatcgtgtctttgtggggaccagggtcccctcccggccactcctcacctaagctgcagatgaacttcacgccaggcagtgcagaagaggcgtggg

SEQ ID NO: 31413 - DNA, 122 bp, Homo sapiens
cgccttccgccgtcgggagccctacaactacctgcagagggcctattaccaggtggggagcgggccgggcagctccgagggtcccagccctcaccacgacgctgtcctactttgcgttgccc

SEQ ID NO: 31414 - DNA, 122 bp, Homo sapiens
ggcggtgggcgcgcgcaaaacccggcccggagtcgccgcccgggactggccgccgcaacccgcttgagcgccccaggagccggcccgaaaacccgggctggactttccttcctttcgcctcc

SEQ ID NO: 31415 - DNA, 122 bp, Homo sapiens
taacagggggacacgactcgggcgaccatagggtggctgggaagtgaccgtccaggggcgcgccctagctgtcccgccaaggcctcagggaacccaggtctttcctgagcgacgcggggacc

SEQ ID NO: 31416 - DNA, 122 bp, Homo sapiens
ttaagagaacaggctctggagtcagacaactgtgttctcatcaacagactctgatgagcccgttttctcaactataaagagggattaatagtatgcatgtcagggaagggagagagcacaag

SEQ ID NO: 31417 - DNA, 122 bp, Homo sapiens
cgtaggaaaaacaatgaattcaataattgtggtttaggaacactagtatttacgtattcacgaattgctttgattgaaacttgtagaaaataagttcaagactagttggaagagggagaaat

SEQ ID NO: 31418 - DNA, 122 bp, Homo sapiens
acacgaagactctgaccagcaccccaaaatcggggcacccctgtggacagaagcctcccgcgggcctcagcccactcaagccccgtcctcatgggcacagagggctgttccgggcctgtggt

SEQ ID NO: 31419 - DNA, 122 bp, Homo sapiens
ggttttgtctgtcaatacgtgggagacttttggttgttgcaagcattatatttaccaatgcgcaatgttaaattgctggatttaattgttacagtacagtgaattattctattatttcttac

SEQ ID NO: 31420 - DNA, 122 bp, Homo sapiens
aggaggttggggtgggggaaggtcaaaaggcttttgatattataaatgtttgtggccatccgaagggccatagtacctaagtagataacgagtttaactgcagtatcaaatttcatgtggga

SEQ ID NO: 31421 - DNA, 122 bp, Homo sapiens
ctaccgcggcgagtcccaggcagctcactctccagtcactctccgaggcgggggagccggcgagagggaaacaagggcctttggtacccagctgttgggcctttggtacccagctgctgggc

SEQ ID NO: 31422 - DNA, 122 bp, Homo sapiens
cttctggggttgcagagtttcagggtctagacgggtggtctccattgcattcaacgcgagcgccctgtatctatggactgtgagcttggaaatgtttgtgctactggaaccgcggcacttta

SEQ ID NO: 31423 - DNA, 122 bp, Homo sapiens
ggcgtggaggactgtgctgggcgtccccgtggcggccgtgctggtctccacgaccagggccggttgctgtgctgtcttcagcaccctgtccagcgtggatgcatgcacgactttggtccggg

SEQ ID NO: 31424 - DNA, 122 bp, Homo sapiens
ctcagaggaaactcaggaaaactcatgccattctccattcaacggagggcgacattctagcgctgatcccattttcctcctcttctcgtgggaggccatccccggcgacctataggagatgg

SEQ ID NO: 31425 - DNA, 122 bp, Homo sapiens
agaaatctcacataacaattacctgtgctctcaaagcctccaggcttgtcatctctgcaacggttcccatgaaacaaactactttctccaccagtaactactgaattttagtatgtcctgct

SEQ ID NO: 31426 - DNA, 122 bp, Homo sapiens
gcagaaaccgcaaacgtcaaagtacacaccaacgcttaccgggagtggggctcgaacccacgcggacacctgtccattggatcttaagtccaacgccttaaccactcagccatcccggtgat

SEQ ID NO: 31427 - DNA, 122 bp, Homo sapiens
cagtgacggtctgaggctgatcttgggcacctggcgctggtcgtaggagcccgtggatgccgagcaccctgggccacctcactttgggagacggtgaggctgtgcacaccacattccctgca

SEQ ID NO: 31428 - DNA, 122 bp, Homo sapiens
gccgccggcccgcccccggctccgccccggcgcagggcgcagccgctgcctccgggcccgcgcctgcacgcgaagccgccctccgcccaccccgcccagcgcacaggggagcgggctccgcc

SEQ ID NO: 31429 - DNA, 122 bp, Homo sapiens
cattggggctcacagagagatctggaatgtgaggctgtgataggccacccgaggcagagccgggcagttggtggctttgattgtgtgtgtgaaagggtgtctagaatgatgcccaggtgggc

SEQ ID NO: 31430 - DNA, 122 bp, Homo sapiens
cggggtcacccgtccaaaagcccacgctgcaccggtccatcagcaccaaggtgctgctggcggagggcgagaacacgcccttcgcagagcactgccgccactatgaggactcctaccgggtg

SEQ ID NO: 31431 - DNA, 122 bp, Homo sapiens
ggtgagggtgagggtgagggctgccagcgaggtgggcgcgggcgaggtgggcatgggctgcggggaggcggagagggctgaaaagccccggggcagcctgagcgcggggttccctcggctgc

SEQ ID NO: 31432 - DNA, 122 bp, Homo sapiens
gggtgcagttgtggtgaatgaaaccaatacctcccatcagagccattgcaatggctatgtcggcctgtcacagtgtccgtgggggaggaaatgagcggagtcttcagcgtgatcttccgggt

SEQ ID NO: 31433 - DNA, 122 bp, Homo sapiens
tgattctggaagcaacctagtgttcgaaagggaaaggctcctacttttccattacagccgcggaaatccgcaggcaaatctccgaggagaattttagggaagcttcattgacagctgtctgg

SEQ ID NO: 31434 - DNA, 122 bp, Homo sapiens
cctgcaggaggactgccaccagaagatcgatgacctcttctccgggaagctgtacctcatcggcattgctgccatcgtggtcgctgtgatcatggtgagcgggcgggggcggagggcctgct

SEQ ID NO: 31435 - DNA, 122 bp, Homo sapiens
tggcgcctatcctctcatttgcaaatgaagaaactgaggttttgcacggtggccactaaccggggacacaattgggcccaagaagtggtcaccactgccctcactctgtgtaaatgagaaag

SEQ ID NO: 31436 - DNA, 122 bp, Homo sapiens
gcagcccagccgggctccccttccagctggtgcctaactaggaatccgcctccacttaaacgcccgcctgctgctcaggctggaacccggcggcttccgggattctcgctttcctccactcc

SEQ ID NO: 31437 - DNA, 122 bp, Homo sapiens
ggaaagtttccaagctttaggaagaattattttttttcaagacgctgtcttccgtactttcgttattaaacatacggctcaagtgatcaccggtatagacagtgacatcagacatctttcat

SEQ ID NO: 31438 - DNA, 122 bp, Homo sapiens
aacaacagatacttctcctcccacggtcctcagggccagaagtctgggatcagctgtgggcggggcggtcctttggaggctctgagaacccttgtcccggcctccttctggctccctggggc

SEQ ID NO: 31439 - DNA, 122 bp, Homo sapiens
tgtgctaatcaaagacagtctggagggagtgacctgctttaggctttattggtttggcaacgttttaattcttacgcaactctgggtatgtttatggcactatgtaaatgttacataagaac

SEQ ID NO: 31440 - DNA, 122 bp, Homo sapiens
gttaatagacagaaatgggaagagctcttaaaaattgacaaggggcttgctggttgctcacgcctgtaatcccagcactttgggaggcctagacgggtggatcgcttgggcccaggagtttg

SEQ ID NO: 31441 - DNA, 122 bp, Homo sapiens
tgaggctgctgtagcctcactgaggaagtgactgtcccaggctctagaggtgcctgagggcggccgagggatggggccggctccacagacgtccctaccgtggagctccagatggtgtgctc

SEQ ID NO: 31442 - DNA, 122 bp, Homo sapiens
gagcacccggatatggaagatggcaccgggcacagagccgtgggactggcctgcaggccccgcaccctcaccgtgtgctgtcctgggggtgcctcacaagcacagcaccttggctccatcgg

SEQ ID NO: 31443 - DNA, 122 bp, Homo sapiens
gattctcactgcagagcactgcgccggctcggaaggatgccctgtgtccgcctgccgcgacgatggtgcctttgtctgggcatggggagctgtgatttatgtcataagctcgctgtgaaacc

SEQ ID NO: 31444 - DNA, 122 bp, Homo sapiens
cattgctgtaagactatgtttagcttcataagaaactgccaaactatctctgtacaatttcgtattcctactagcaatgaatgagagttcctttttctcatataaaaataaatatccttgta

SEQ ID NO: 31445 - DNA, 122 bp, Homo sapiens
acccaggatcagctccaaccttgctcccggacctcccaggtcagaccagacaaggtcccacgtgcctcgcccagctcactcactcctgatgctgcagtggtgacctggggctacaggcgtgg

SEQ ID NO: 31446 - DNA, 122 bp, Homo sapiens
ccttttcacttctgtattgtgagtggttcctactgtgtgcctgttggagaacatgtccaccgttcccgagttaggtggaggattggaatgttggggggcggggagcgttggagttgaggacg

SEQ ID NO: 31447 - DNA, 122 bp, Homo sapiens
ggagcccaacagccgagaaggggagggagggcagaggagggggaccaggaaggacacccccgtgccccgaagacataaatccctgagtgcccgggaggagccttaacaagcgcacggagccc

SEQ ID NO: 31448 - DNA, 122 bp, Homo sapiens
ccccgcggcagcctgggagataaaccacgctcggtgccggcaggaagggcagcggtgcaccgagctgctgctgggcgtttgcagggagtgatctgtggctgatgagaggccctgaggggtcc

SEQ ID NO: 31449 - DNA, 122 bp, Homo sapiens
gacagctcagctgcatgtgtcagcagctccagccccaccatgaacatctgaactcctcagcggggtaatggaccccctcctttcccccggagacacagcctgagtggcaggaatacagagcc

SEQ ID NO: 31450 - DNA, 122 bp, Homo sapiens
gtgtctcacacctgcaatcccagcactttgggaggccaaggcaggaagatcatttgaggtcgggaattcaagaccatcctggccaacgtagtgaaacactcatgtctactaaaaatacaaaa

SEQ ID NO: 31451 - DNA, 122 bp, Homo sapiens
tcattcaggcatgtcttcccgcctccaaagtagcttcaaaacacaagaggggtagctgaacgtctgaagagctgggatctgtaagggagtgtgttctaacaaagagaggctcataggtttag

SEQ ID NO: 31452 - DNA, 122 bp, Homo sapiens
aagcatgtccctgaagacgagtggggagagcagaccacccgctgattccaattccctaggcggccgcggcgagctgcggcgtctctgtgccccggcctgcccctatcccgcctgcgccccgc

SEQ ID NO: 31453 - DNA, 122 bp, Homo sapiens
agtgatcctctcgcctcagcctcccgagtagctgagaccacaggtgcctgccaccacgcccggctaattttctcaaagtttttgcagagacgagcgtctcactgtgttgcccaagctggtct

SEQ ID NO: 31454 - DNA, 122 bp, Homo sapiens
aaatagcagcagctgagtggatgaaaggtcttctttgccctctgattaacttctgacttacgacagattaaggagcaacccggccacatgttctgctggttcatcacgagggaggtggtctg

SEQ ID NO: 31455 - DNA, 122 bp, Homo sapiens
agccagacttcatctttatttcttaatctgggctagctgccatcccctgaaagccctcaccgcaccattgttgttgctcactattcctgagactagattactgtggggtctgaatcaagaga

SEQ ID NO: 31456 - DNA, 122 bp, Homo sapiens
ctggttcattgaacccacacctgtttctggttcaccacccgccaccgaggtctctgacagcgaggaccaaagcggggtgtgcttgtcacaccttgtttcatccttaccaaggaccccagagc

SEQ ID NO: 31457 - DNA, 122 bp, Homo sapiens
gtgaacccctccgctacccactgctgctgagccaccgggtgtgtctacagctagctgggtcggcgtgggcctgtggggtgctggtggggctgggccacacccctttcatcttctctttgccc

SEQ ID NO: 31458 - DNA, 122 bp, Homo sapiens
accgtgctctcccggctccaagcgcagaccaagagttccgctgccagcaaggctgctctccgcgtgccgcaaaaggatctcagagtaaagacgatcttaaattcgatatgtgaagttgattc

SEQ ID NO: 31459 - DNA, 122 bp, Homo sapiens
cccgcccgcccgcctcgccccgcgtctgacccggccgagcgtggaggctgctgttgccgccgctgcccagagcccaggggtatcaaaacgatctcctgaaaaattccaaacgataaatcccg

SEQ ID NO: 31460 - DNA, 122 bp, Homo sapiens
ccccggccacggcgcacgcgccggcctcagcgctccctcctccatgccctcggcgcacggcgccgcccactcacccagctgcacctctccgtgcgtccccaagctcacccgctctgaggctg

SEQ ID NO: 31461 - DNA, 122 bp, Homo sapiens
cccagagaatctgcgggagaagtgtctgcccagtcctgagtgggctggatgagcaagatgcgacaggagggaggagagtggcaccccttcccccagggctctcactgcgccaccccagctga

SEQ ID NO: 31462 - DNA, 122 bp, Homo sapiens
ccaggcaatgcctaagaaacttctcgttcaccccgttcacacctgttgcccccacagagccgatgatgagcaccccacctcctgccagcgagctcccgcagccacagccgcagccgcaggcc

SEQ ID NO: 31463 - DNA, 122 bp, Homo sapiens
gtacaaccagtaacatgcaggagctggcttgcaccagcttgcaagagctgattgggcatacgtactgcttcctaactccattttcagtaacagcttgaaatcagccactgtggaagtattta

SEQ ID NO: 31464 - DNA, 122 bp, Homo sapiens
tacagggttcttccctggcgtttgagcacgtagaccacggccatggcggtgaccgtcttgcgcttggcgtgctccgtgttggtcacggcgtaccagatcacattttccaggaacaccttgaa

SEQ ID NO: 31465 - DNA, 122 bp, Homo sapiens
cggcccgtggacactcaacttcggggatcccggagcagagtggggtggcgcaagggtgcccggtgggctccctatacccgaggaggaaatctggcccgaaagaatctggccagaaagagaga

SEQ ID NO: 31466 - DNA, 122 bp, Homo sapiens
cgtgcggggaggctgaggctacggggactccgttgggggaggctgaggctacggggactccgtggggggaggctgaggctacggggactccgtggggggaggctgaggctacggggactccg

SEQ ID NO: 31467 - DNA, 122 bp, Homo sapiens
tcgtgcgactgtagaaaggcagctggctgtgtggccacgggtgaccgggggtggccacagcgcaggttgcccatgctgggccccacggctcctgttggtcatctgggttaccaggatgtccc

SEQ ID NO: 31468 - DNA, 122 bp, Homo sapiens
aaatcattgtgggaagctgggaggagagagagagagaggaagtcggacgtgggcgaggggcggggtgtctggactggaacctctgggcccacgtgagtgtctgtcccgctgctgagtgggtg

SEQ ID NO: 31469 - DNA, 122 bp, Homo sapiens
taggtaaacttgtgcttctgggcacagcttaaacatctactgacaaaaccaagcaggtaccgtccttcagttaatgtggagtccaaaggcagcagtgagttttgtgttttgctttgtttttt

SEQ ID NO: 31470 - DNA, 122 bp, Homo sapiens
gccttgatagtaaaagtgggttttccttttccttcttcccttaggaatggtctcagctcccgctcctggatgaatacttggatattgccagaggttttggtagatgggcgcgggaggcctgc

SEQ ID NO: 31471 - DNA, 122 bp, Homo sapiens
aggccagccaggcaggaaaagggggagggggagtgctggtggaaggaaggatttcttgcccgttttaagtttcatcatttctggggagttctcttggggtccacagaaaatctcacctcatc

SEQ ID NO: 31472 - DNA, 122 bp, Homo sapiens
tcaccttcaggggcagctcggatcttcccacgcccgcgcggcgcacaatctttggatcagcgccacgtggagaccttacccgcccgtacgatcaatcccttctgtggaacccagctcaagga

SEQ ID NO: 31473 - DNA, 122 bp, Homo sapiens
gctgcgatccggatggttctttaaccagccatggcaggcagagcgaggtgtgcagacactcggcggcgttcgcggcttcctgacggtcccctccctctccttccccccgaggctcctccctc

SEQ ID NO: 31474 - DNA, 122 bp, Homo sapiens
gttttgccttctctgctgcctacaggatcctcaggcctgtgggggattcactggatcctccggccccggcctgatcgagggctggacacagaaggggaccccacccagacagaagcccagca

SEQ ID NO: 31475 - DNA, 122 bp, Homo sapiens
gaggagcgtctccgaccggccgccatcccatctaggaggtgaggagcgcctctttccggccgccatcacatctaggaaggaggagcgtctctgcccggccgcccatcgtctgagatgtgggg

SEQ ID NO: 31476 - DNA, 122 bp, Homo sapiens
gcggggccagggtctaacaccctccagataatgtatggctgcgacttggggctggaagggcgcctcctccgcgggtatgaacagcacgccaacgatggcaaggattacatagcccggaacta

SEQ ID NO: 31477 - DNA, 122 bp, Homo sapiens
gcacttcagcttacgcgcggtgagcctgccctgcccccgccagagaagggcggcgggtcccgagcctgctcagacccagagccttaagttgggaaagcggctacgagacccacactcggttc

SEQ ID NO: 31478 - DNA, 122 bp, Homo sapiens
ccagccgcgtttccggttgtagcactgggcgcccccagagtggacccgataagctatcggcgcggcccaggaggggcggtcagcggcgagtcagggcacctcggaccggctcccggctcccg

SEQ ID NO: 31479 - DNA, 122 bp, Homo sapiens
aagattaaaaaaaaaaaaaaagccagcgccgccttggctgtgggttggtgatgctcaccacgctgcgaaaccctgtggtttgcattcagtgtgattcgtcctgcctgctgaccactatgctg

SEQ ID NO: 31480 - DNA, 122 bp, Homo sapiens
tctgcaacagacaaccgaaccccgggggtacccagggccaggtgctgatggactgggactcgggagagttctcactccctgccggggaccttggccacatgctgccattcctggcccttcgt

SEQ ID NO: 31481 - DNA, 122 bp, Homo sapiens
gcacgccgcgtgggcaccaggcaggcggttggagtacggggcgggggtcggccgagggcgcggggccccggggctccgggctcgcccccgccgctcggggcaggcgcgccgatggcgtttct

SEQ ID NO: 31482 - DNA, 122 bp, Homo sapiens
ttctcgtctatctggctgcctttagggagcggtgcctagcgttggccaatagttggctgtcgaaagtgccggcccccgcgccggcgcctgcagcagccgggtgggaaggctcaagatggcgt

SEQ ID NO: 31483 - DNA, 122 bp, Homo sapiens
gcgcgcccccgcgggcccacacatgaaccgcgcacgcgcgcgttagccgcaccccctccccgtgcgccccgcctcacgccctctagagctggcggctgttcccagtgccttgcccacccctg

SEQ ID NO: 31484 - DNA, 122 bp, Homo sapiens
cgcgctgtgaggcccttggttgtggtgcgaggcggctgccctggtgggctctggccatggcgctctgtgcctgcggccgatgcgttgctgcgaacagcataggtgagactctgccgagtgag

SEQ ID NO: 31485 - DNA, 122 bp, Homo sapiens
tcaggcctgggccgagccttcgggagtgactgattccctgtccgagtgtggaccctgagccggcgggccgcccccagtccgtctgggccctttgtttttatctggcctgccctgtggccctc

SEQ ID NO: 31486 - DNA, 122 bp, Homo sapiens
ggcaatgccgtgaagtggtgcagccaccagatgtgtgtggtgggcacctccagccctgcccgcactggccagtgggctccagcacaccccagccctcccagcaccaggcaggtgagaggcag

SEQ ID NO: 31487 - DNA, 122 bp, Homo sapiens
cgaccacctcatgagggacactgttaatgtgagcaacagcagggcttctgaaagcaacctcgaggttatggagtattgactgagggcagccagaggtgaagaagacgtgaacctatgatgtg

SEQ ID NO: 31488 - DNA, 122 bp, Homo sapiens
gccatggaaacccgagggaacgcggagccgggtgctaggggggtcggtgagttctccggccgcgccctccgtccgctctcggaccccggccctgcagcagggcctgccgggagttgtagtcc

SEQ ID NO: 31489 - DNA, 122 bp, Homo sapiens
tcaatttcattgtctacacacacacacacacacacacacacacacacacacacacacacacgtatttttaagacagagtctcactctgtctcccaggatggagtacagtggcgggcacaatc

SEQ ID NO: 31490 - DNA, 122 bp, Homo sapiens
cagccccgcgccgcatcctccggccgccccctccccgctgcgagcttacgccgctgtcgccgccgccaccgccttaaaaaggacaaaacggaacagaaaatgaatgcatgcacaaaaaaaat

SEQ ID NO: 31491 - DNA, 122 bp, Homo sapiens
cctcctgtgaaggccgtggggcggctctatcttctctccggggatgctgggggcctgtgacggagctctgttctcgtcctgctggagtgccctgccattcacgccgcgtgccagcggtgggg

SEQ ID NO: 31492 - DNA, 122 bp, Homo sapiens
tgccctggtgggcgcgttcagctgcagcttcgcaagcatggtgcagccaaacttttccaacgtggaatttgcacctgccccggtgctcccggactgcctgctgggcccgagccgcgtcatga

SEQ ID NO: 31493 - DNA, 122 bp, Homo sapiens
cagcgcacgtccaagtggcctgctggcggggacccagtgattcgaggccaactgaggctccggctccgaggccaaccgagggtctgtggccctgctgtatggttctgcctgggcggtattct

SEQ ID NO: 31494 - DNA, 122 bp, Homo sapiens
gcgacctgaaggtcctggggaaggagcgtggggcggacgggaagcctgggtcctcccggccgcctcaccctgcgcccgtctccgtcccagacacggcccgctggcgtcttcgagctgcagat

SEQ ID NO: 31495 - DNA, 122 bp, Homo sapiens
gggggtagggccattccctgccagccggactctctccactgtgggctttccccaggctcgcgttggaatctgggaatcccggagtggtgacgcttcaagctggggactctcggtcttacctc

SEQ ID NO: 31496 - DNA, 122 bp, Homo sapiens
ggcgcagtggaaggccggctgcggggggaggcgatcgctgccaccctgtctaagaagaaacggcaccaacagcgttgcagtttatgttacagtttccccaaggctgttaaccgaggactcaa

SEQ ID NO: 31497 - DNA, 122 bp, Homo sapiens
catttagaccaatagaatagaattgagatcctagaaattagtcttcacatatatggtcgacgactgttcaacaagggggccaagaccagtcaatggaggaatgaacagtctgttcaacagct

SEQ ID NO: 31498 - DNA, 122 bp, Homo sapiens
catgaggaagccaactttaaccaggcccacatgatgcaacagcaggtgtccctttcactacgccacctgcctttctgaaaaggtagggcacagaacatgatacagctgcaggggccagccct

SEQ ID NO: 31499 - DNA, 122 bp, Homo sapiens
aggccaactcttcaccaatttctggagctgggagtaaaaacaatttgaaaaagagataatcgagagaatgagtagcctgagcaaagtcataggggtaagataaaacgacataaagctaaaac

SEQ ID NO: 31500 - DNA, 122 bp, Homo sapiens
cagtgaacactcgggaacaactgtgctacccaccattcaggttaagtcccagaaacgttgcgctcctcaaaaatcagaggggatggggctcctgcctttgacgtgttctgaccaacagctct

SEQ ID NO: 31501 - DNA, 122 bp, Homo sapiens
tgacccaactgtccatgtggaggggcggccgcacgtggggataaagacctgccgatgaagcgcagtggtaattttacatgtcataactcttcatcatcctgcttttctgtcacgtgcttgaa

SEQ ID NO: 31502 - DNA, 122 bp, Homo sapiens
ctgcagctgcaccccagaccagccctggagcttagctccccggagggcagccatgggggccgagcacatgtgctagaggccccgccaccccctgcatgggtgcaagggggaccccatgcctg

SEQ ID NO: 31503 - DNA, 122 bp, Homo sapiens
attacctcataaagtagcatggaactcttgacaaaagtagcaaagctctgaggagatgtgcgcttactggctttctagcatattccaaagttctctctgcctccaggtgtgttgctgctgca

SEQ ID NO: 31504 - DNA, 122 bp, Homo sapiens
tagaagccctggctgggactgctagcacccacccaagcccctttgacccccatctgctggcgtctactccgcttatcaccctagcatttcaccctcacgggagagatgatgcttgaggggta

SEQ ID NO: 31505 - DNA, 122 bp, Homo sapiens
ggctagctgcgcgtagagcaccatgggaatggtagtccacgcctggggcccaccagccgacgacgcgctggctgaactatgcacccacaatgccctgcgcgcgccccagccccgcgtcggga

SEQ ID NO: 31506 - DNA, 122 bp, Homo sapiens
tgcgcaagggcgcctcgctgagcaatggccagggctcccgcgtgctgcatgtggtccagacgctgtaccccttcagctcagtcaccgaggaggagctcaacttcgagaagggggagaccatg

SEQ ID NO: 31507 - DNA, 122 bp, Homo sapiens
cggtgtggggctgttgggttttcctgcccgtggaatgttcccgcacgtcttcccgctggtcgggatttaggccctgcattccctgcatctgagtcagcaccctgaggtgctggacctgggac

SEQ ID NO: 31508 - DNA, 122 bp, Homo sapiens
ggtcccctcgcgtggaaggcgcctgcgcctcggccgtgcccggcacgggaacgcgccctccggggccagctcaacttcagcagcccagaagttgggctcctccgggtctccagcgttccgag

SEQ ID NO: 31509 - DNA, 122 bp, Homo sapiens
cattgcacacctcgtgttttgcaatgccgaaatacaaaaaattagcttggcatggtggcacgtgcctgtagtctcagctacttgggaggctgaggtgggaggattgattgagccttggaggc

SEQ ID NO: 31510 - DNA, 122 bp, Homo sapiens
ttctgggtggcttgctggccaccatcttcctggacatcgtgcacatcagcatcttctacccgcgggtcagcctcacggacacgggccgctttggcgtgggcatggccatcctcagcttgctg

SEQ ID NO: 31511 - DNA, 122 bp, Homo sapiens
tgggggaaagccgagacctccagcttgctggtggggagacttctccctaccccccttattcgtttagcattttaattatattatcgtacactcacaattttgccgctccattcacacaaaca

SEQ ID NO: 31512 - DNA, 122 bp, Homo sapiens
cccggcgggaggaggaggtaatgaagtctgcacgacatggcagggcagggctgggcctctcggggaagtggtgtccacaccagaggaaaaggaggaagcagctgggggaggaggagcccaaa

SEQ ID NO: 31513 - DNA, 122 bp, Homo sapiens
gagaaagcagggggaggggtgcagcactgaggtctggggttcgggagggggccctatacgcgggaggaaacggagagagacggtgaggattgccttcggaggtgggtgaggcccagcgtgcg

SEQ ID NO: 31514 - DNA, 122 bp, Homo sapiens
ggtcagctatctgcccagcctgccccaccctgcctacttcggccttgcagccttgctggccgcagcctacctgggcctcagcacctacctggtacagtagggccaggggatgccttgggaat

SEQ ID NO: 31515 - DNA, 122 bp, Homo sapiens
gggcgtctaaggcgtccggtacggcgtcggggccgggtggctgcagcagggcagggggtgcgcgaccagcggggatctgggcgcaggggccggtccccgggatccgcaggcgacgcgggcgg

SEQ ID NO: 31516 - DNA, 122 bp, Homo sapiens
ttgactgattatattatgggttttccagtcaaaaactcaaagcagtggataaagcacttgcgacctaaaataagcaatggaatgaacaggaaggcgaaaccagagtttaaagcggcaggaca

SEQ ID NO: 31517 - DNA, 122 bp, Homo sapiens
ttggcgctgctctttgcaaaggatttttcctgctgtcatcctcacaacccccgcctcccacgcccccagggatgtagactaatatccccatttctgatgggaaagtgatggccgcagagtcc

SEQ ID NO: 31518 - DNA, 122 bp, Homo sapiens
gaaaacagggagaacggtgagagcagttttaaaacttactccctaaacgcactccagggtcggaagcgacctctaggggttcatttagaccattacttttttctttttcttgctcttaaaag

SEQ ID NO: 31519 - DNA, 122 bp, Homo sapiens
tgccgctccgctcactccagcctgtttgggggcactttgtttgtgtcccacaatgctctgcgccggcggcctggctggggaaggggaggagaagggggcggggcggagcgcgctcgggggcg

SEQ ID NO: 31520 - DNA, 122 bp, Homo sapiens
tattgcgaacagcagcccttagagatcgtagctggctggtaaaggcggctttagagcggacgcccaggcttcttcatcagcttaccagaaggttggaggcagaaggtacgcatttcaacaat

SEQ ID NO: 31521 - DNA, 122 bp, Homo sapiens
ggaaagacagacaggggctgcggccgacatgcctcagcctgcagtcaggcaccagggccgcgagcctctcctcgtggtgaagccgacacacagccgccccgagggtgactgccgagaagttc

SEQ ID NO: 31522 - DNA, 122 bp, Homo sapiens
ctcctttggtccatccccccacaggatgaagtccaagcttcctggcaggacccacgaggccgttcagatctgggccctgtcaacctctccagcctcatttcctacccctcttctgcctgtat

SEQ ID NO: 31523 - DNA, 122 bp, Homo sapiens
caccagctgaggtgggagcaaaacacccacctccctctccaggtggacgtttttccagtccgaattaccaaatccaacgcaaggcagctccaccggctgcttcggaacactcccagtttcct

SEQ ID NO: 31524 - DNA, 122 bp, Homo sapiens
atgatcccgcaagggaagctcacgggaggcaggagctgtggcagccgccccaggatggggcgcggggagcgcgctgagctgtcctttcccgcagcggccccgcggttgaagcgtgggcttgg

SEQ ID NO: 31525 - DNA, 122 bp, Homo sapiens
tggcacacagggtcccaggctgggatggcccatgtgtggatggtgcttccagtaacaaggcggggcacacttctacctggggcttgaaactcccagtgggacaagaaaacccagaccccgct

SEQ ID NO: 31526 - DNA, 122 bp, Homo sapiens
agcaatcctcccgcctcagcctcccaagtagctgagaccacaatcgtacactaccatgcccggcctggcctcaagcaatcttccagcctcggcctgccaaagtgctgggattataggcgtga

SEQ ID NO: 31527 - DNA, 122 bp, Homo sapiens
gaacggctctttttgatttttttcccctctgcagaaaaagcctcctactttccgggtgaccgtagagggcagtttgacaagtctcagccccgggcgatggaagattttgcccgtgggaccgt

SEQ ID NO: 31528 - DNA, 122 bp, Homo sapiens
taatttacgagtcgcaggctctcaggagccattggttacgtatgaggagacctgcaccagcgccacaatctggagccactgaagagcgctaaacaccctgctgtggcttgagctgcatcctg

SEQ ID NO: 31529 - DNA, 122 bp, Homo sapiens
cttggatccactgctacaccttgttatttaatgttgttaaaagtaagcatataggccaggcgtggtggcccacacctgtaatcccagcactttgggaggcggaggtgggtgaatcacgaggt

SEQ ID NO: 31530 - DNA, 122 bp, Homo sapiens
ggtcacagtctagatttcgtgtacggtcatataatagggaaactccctccgtgcctttcgcgctggtggactaaatgctcccattttacagatagggaaactgcagcttcacaacgatctat

SEQ ID NO: 31531 - DNA, 122 bp, Homo sapiens
gaaggagggctgacagaaaaactgcccgcagctagtaaggaatcctgatgatgttactcacgaccaacagtagtaaaaattgctgaacaccaaccacctggagattctgccccgctgttatt

SEQ ID NO: 31532 - DNA, 122 bp, Homo sapiens
tcttctccttgcatggcagaggtgatgaaatttatgagaaagtacatataagggaaggttcgaagtgttgattgtgaatataagccctggcttgaaacaaagaattcttggcttgtatggtg

SEQ ID NO: 31533 - DNA, 122 bp, Homo sapiens
ctgctacttctctgcttagcattcctgatatacctgctttacataggcaccatgtggcaccgtggtgtgtgcctgtgccactttgaatcacatttgggtatctattggaaggcttcttcggg

SEQ ID NO: 31534 - DNA, 122 bp, Homo sapiens
acaaatgagcgtggggcttcctcctcctgcgctatgacgctggggcactctcagggctgtcggctccagctctttcgaaactcagcatggtatcaagaataatggtgatgcctctcctgggc

SEQ ID NO: 31535 - DNA, 122 bp, Homo sapiens
acgagggtgtgcagtgtgtcagctgtgggtcccagtacaggaccacaggggctgcctgcccgagggcctgtttctggtctgtgaggggcctcccctgtaacgcggctgtgtgttttgggctt

SEQ ID NO: 31536 - DNA, 122 bp, Homo sapiens
acccgggatttgggtgtgcggccgtctgtcggggaagctgctacaggccacagtgtctggcggcctccctggggagccgcgccgtttgccagcccccaaggtgcctgctctccacacggggg

SEQ ID NO: 31537 - DNA, 122 bp, Homo sapiens
aaacatcaatttcacatacactcaccatcagcattgagaccttaaataaacattggtcttcgtagagctcagatgattcataaccttccaaagcccagatttgttctgcactttctctggtg

SEQ ID NO: 31538 - DNA, 122 bp, Homo sapiens
gaacacccagcgcctttctactacctccccaataataagaggttcccactggaggttgcacgtattttatttagaatatattctaaacttcacatttcaaaaattactgcttggattagctg

SEQ ID NO: 31539 - DNA, 122 bp, Homo sapiens
tatgggatggttggagctgagccgaggagcggggcggtgatcccagagagctggcctagtcgaacgaggccttgtctcacgggtggggatggcagctaagccgggctaacagtggagccctc

SEQ ID NO: 31540 - DNA, 122 bp, Homo sapiens
tgcaacatctgccttcctatagttgttcctcttgtgacaggtttgctgattctaccagcccgggcatctcttctgtatttactctcatatggcaacatccctcttaaggtgtgatgctcacc

SEQ ID NO: 31541 - DNA, 122 bp, Homo sapiens
cctcggcacccaccaagacctgcctcacgagcccctggtcccgccaccggggccccgaagcgaccacagccacaaactcaacgccagggccacatcgctcgtgattctcgtccatcctccga

SEQ ID NO: 31542 - DNA, 122 bp, Homo sapiens
gactcacctacgatgcagaaggtggcagcaaacgcttccacgcaggaaagtctgtagggccggccatagttcacggggttggcggccaccaggtagggcaacaggcgcaagtggctccctcg

SEQ ID NO: 31543 - DNA, 122 bp, Homo sapiens
acctcgtgatctgcccgcttcgccctcccaaagtgctgggattacaggggtgagccaccacgcccggcctatgtgcttgcatttttattcacagaagggttttcctggaacacttttttttt

SEQ ID NO: 31544 - DNA, 122 bp, Homo sapiens
ccgcggtgagtcagggctccgcgcccgccgactcatttctgccgccccggcccgggagcgcgatttgcaatgcaaagtcaccccgcctccagcaccccaatctgccccaggatccgccagca

SEQ ID NO: 31545 - DNA, 122 bp, Homo sapiens
gacaaagagggaccgcagcaaatcgacgccgcgggcaagccataccctagccggagtttacgtgcgcgtctggggtcaccgaggcgcctgctaatccacccaacacaggctgtccccgccac

SEQ ID NO: 31546 - DNA, 122 bp, Homo sapiens
cacccgaatattgcgcttttcggaccggcttaaaaaatggcgcatcacgagattatatcccgcacctggctcggagggtcctacgcccatggagtctcgctgattgctagcacagcagtctg

SEQ ID NO: 31547 - DNA, 122 bp, Homo sapiens
agccctccatgggctggaacttatgcactcactgctgggcagagtagatggggctgagcccgccccctgcagcagcgtgcctgtggccacaatgccctggagagagtggctagtgccagcct

SEQ ID NO: 31548 - DNA, 122 bp, Homo sapiens
cctctacaatggtgctattaatatccattttagaaaatgaaaataggagactcagccaggcgagtctcctgaagccctgttgggtagagggatggaattccactgtggtgctgagaagacgc

SEQ ID NO: 31549 - DNA, 122 bp, Homo sapiens
ccctgtggatcggcttgaatgacttggacacgagcggaggctggcagtggtcggacaactcgcccctcaagtacctcaactgggagagtggtgaggcacaaggttgggggcgcagggcagca

SEQ ID NO: 31550 - DNA, 122 bp, Homo sapiens
cagactaacaccccccagactggaggtcaaagaaaaactggacctgtagaaaacttattgcgcaatgtgcatgtcttgaataaggaatgtcatcctgttattatcatgaccacccaaaattt

SEQ ID NO: 31551 - DNA, 122 bp, Homo sapiens
cagagctgcagccattaaatgctcttctccaaggccagtggccgggggttgagtaggggacgatcgaggggcgcccgggaccctgcggagtggagggttttgtctgcggatgcaaccaatta

SEQ ID NO: 31552 - DNA, 122 bp, Homo sapiens
ggtctgtattttccagggactgggacacggtgaactggggagggcctctgggatctgctgcgttgctacacaaatccaggggttcccattcatgttgcactcctatgtgtggttcatacaca

SEQ ID NO: 31553 - DNA, 122 bp, Homo sapiens
ataaagtttcattcgaatacttgagctgccgcgccctgcgtttccctcatgagcttcttccgcccgcaacacgagactcagcaccacacaatcagcgtggcaaagcctgaagggcgggacag

SEQ ID NO: 31554 - DNA, 122 bp, Homo sapiens
cggggcccggcggggaggggcgcgtggaccccaagcggcgtggctggcgacgggtgggggcgccagcgggtggagatcgagcagcccgagggagcacgttcgctcttctcccggacccaggg

SEQ ID NO: 31555 - DNA, 122 bp, Homo sapiens
tgttgtttgcgttaatgaattaaagctccatagggtcttctcgtcttgttatactatgcccgcctcttcacgggcaggtcaatttcactggttgaaagtaagagacagctgaaccctcgtgg

SEQ ID NO: 31556 - DNA, 122 bp, Homo sapiens
tgcgtcccagtgtctcacacctgtgctctttaaacacagagacctgccaagacgccctctcgtccaactatgcccaggctgaagtcctcaccctctcttaaagcggcaccaacgtgagagag

SEQ ID NO: 31557 - DNA, 122 bp, Homo sapiens
gaagaaaatgaggttggaccttccatttgggccaaaggcaatgcggttgcaggcattcctcggggccccagcaaccaaccacactaattctcaccacagcctcatacatggtcgcccagatc

SEQ ID NO: 31558 - DNA, 122 bp, Homo sapiens
ccctattcctgcagcctgtgctgagggtagcagtgtatgagctaccagcgtgcatgtcagcgaccctggcccgacaggccacgtcctgcaatcggcccggctgcctcttcgccctgtcgtgt

SEQ ID NO: 31559 - DNA, 122 bp, Homo sapiens
ggacctgccctgggggtgtctaaatcgggggtggtatggccctccccttgcagggttaaacgtggaggggagactgtggccctgccttgggagctggggtttccccgcctcggcaacagcct

SEQ ID NO: 31560 - DNA, 122 bp, Homo sapiens
ttcctgctagattctgtctggaattcggtgggctcagccacacagcagtgtctgacgtcacggcgtgtgattcaatcagccaggcttcccctagttacaggcaaacgaaagatatattaatt

SEQ ID NO: 31561 - DNA, 122 bp, Homo sapiens
tagagcacctgtagggaaaaaccggtgtctcttccttgtgattggctgttgccatggatacgctttgtgtagcggctatgggcgctgtcttacaacaaagccaaggaatctcgctgctgagg

SEQ ID NO: 31562 - DNA, 122 bp, Homo sapiens
gatgctggagtggggtgcagggtggctaccttcatttggccctgaccccggccccagggtcgtatttatgtttatcctcgtttaaccaagttgatttcaccgaaatgtgaatgatgcaaagt

SEQ ID NO: 31563 - DNA, 122 bp, Homo sapiens
tgaccgtcacagcgggtgcggttactgctgcatctggtggtgtaacggccacaacaggcacggtgacaatggcaggggcagtgattgcgccgtcaacaaagtgcaaacagagagcgagtgct

SEQ ID NO: 31564 - DNA, 122 bp, Homo sapiens
atttagccagaaaagggggcgggaagggctgtagggtacttgtcaattcgccgccatgaacgtggtttttgctgtgaagcagtacatttccaaaatgatagaggacagcgggcctggtatga

SEQ ID NO: 31565 - DNA, 122 bp, Homo sapiens
cttaagatcaagactttgagtccacactcggcaacacaatgagactctgtctctaggaaacgtgtaaaaaaaaaaaaaaattagccaggcgtggtggcctgcacctgtagtcccagctactc

SEQ ID NO: 31566 - DNA, 122 bp, Homo sapiens
cgccgcgaacccgtcttaagcaccttgcgtttctggggtgagcctgctggaaacaggcaccgagagcaggggtggttcaatggctggtaatggcatacagattccccgtcctccagggacgt

SEQ ID NO: 31567 - DNA, 122 bp, Homo sapiens
gtgtgccagccccggcaggtcatctggatcagcgaaactcccaactccaacacaaagagccgctgcagactggagtaattagaacacatacaaatagttgagtcaaccctaaaggaataata

SEQ ID NO: 31568 - DNA, 122 bp, Homo sapiens
ggataccttgtctcccaaaatgaacagcgccccacccttcactaatgtcccatctccttccgcatctcctttaatgtcctatccacaaggctcccagaggcaagcccagccccgttacctgg

SEQ ID NO: 31569 - DNA, 122 bp, Homo sapiens
cccaccggaaggaagaaactctgaacacatccgaacatcagaaggaacaaactccggacacgccgcctttaagaactgttaacactcaccgcaagggtccgcggcttcgttcttgaagtcag

SEQ ID NO: 31570 - DNA, 122 bp, Homo sapiens
ggggcgggctctgcctcacgaggcgcggggcgcggagtggcaagagcgcagcatgggctgcgcagaactgaggcagacacccagaggctgccaaattgtcatctgagccggaccgggtttcg

SEQ ID NO: 31571 - DNA, 122 bp, Homo sapiens
ctgtgacggaaaaccacactgatttactaggatagccttgagctctctcattagccctcacgtgttctgaacgttagagctaactttccagaccctcattatttgttgaaaggctggatggg

SEQ ID NO: 31572 - DNA, 122 bp, Homo sapiens
ggaagccactcccctgggcctcctctgtccatggggcctcaatactagagcccacaaggtcggccagagagtgtctgtgcctcgaccatgcaaagggtgccaggttgtggctagggatgccc

SEQ ID NO: 31573 - DNA, 122 bp, Homo sapiens
tggcatgacttgcccaaggtcacagctaagaagtagagaatgaagactggaacctgattccgattcccaatctggcattctttggggaactctcacccaagccctctagctaccccacctgt

SEQ ID NO: 31574 - DNA, 122 bp, Homo sapiens
gaaccacagccctgtggattttgcgagtcgcggggctcccggagccgctgggagggcagccgtgtgagatgcggggctgcgagcgtggaaacactcgcagtcgccagtgctgaggcatgttt

SEQ ID NO: 31575 - DNA, 122 bp, Homo sapiens
ccctaatgggaggccgactcgctgggactagatatggctgcagtcaccacacgaacacaccgggtgacgtgactttctagtactaggaatactttgcagggagccagaaactcgactttaac

SEQ ID NO: 31576 - DNA, 122 bp, Homo sapiens
ccccaccctgctgtggctgctcctcagcgtcgatctgattttggggctaagcattcctctcggcgctttgatactcacgctacacacaagcctacaccaaagccggccgctgtctttgcagg

SEQ ID NO: 31577 - DNA, 122 bp, Homo sapiens
tggagggcagcagctcagggcatggccgtggtcacatttacatccactcaactacatgcacgttaaggggtggggcattcagaaatctctagaaaaggggtggtaacttccgggttatggcc

SEQ ID NO: 31578 - DNA, 122 bp, Homo sapiens
gtcacccccgcttgtgccagcttccccggctcggcggagactggcttggggatgcctggccgcccggcccccttctcggacgcggcgtggggagcgagctggagttaaggatgaaggtggga

SEQ ID NO: 31579 - DNA, 122 bp, Homo sapiens
caccaacagcctctgtaccgtgctttcggcccgaagtgggggcgagggtgacgggaagagcggaggtggtggctacaagtttaacttcccggcctctagaaaggaagagacccgggtgggag

SEQ ID NO: 31580 - DNA, 122 bp, Homo sapiens
cgaccgtaagaagcacatgcatgtgcatacctcggacaagccctatatctgcaaagtgtgcgacaagtcctacacgcacccgagctccctgcgcaaacacatgaaggtaattacctctttat

SEQ ID NO: 31581 - DNA, 122 bp, Homo sapiens
ctggggaaggcggctggaagcaaaatccctgctctcaggggagtctggctcccagacacccgggggcttttagctgacagcccagacaaagcatcttcccatagagaccagtcttctataaa

SEQ ID NO: 31582 - DNA, 122 bp, Homo sapiens
agcggccgatggctgaggccccgccatgcgggcgaccttcgaatggcccgccgcagcctccgggctgcagctgccactgacgctgccatcgtagctccgggcagtgactttacgtggtcaaa

SEQ ID NO: 31583 - DNA, 122 bp, Homo sapiens
gtagggcagagggagctgcaaggagagatgaggggcgggaggtcttcctacctctctggtcgcttgcaggttgtaagagcatcccaggctttggctcccgctgctgatctctgaggaatttg

SEQ ID NO: 31584 - DNA, 122 bp, Homo sapiens
cgcggcggaggaagtcggtgaagaacgggcaggcggaggcagaggaggccacggagcagacgcacatctcccccaacgccatcttcaaggcgctgcaggccgactcgccacactcctcctcc

SEQ ID NO: 31585 - DNA, 122 bp, Homo sapiens
cgtccctgagcaccctaggcgttggggggacgccctgtgagtgtgagagacctccaagagcggctggagtctgaggcgctggccgggcttcgtgaattagacctttatcctaagctccttcc

SEQ ID NO: 31586 - DNA, 122 bp, Homo sapiens
agatcagttctagtcgctgctgcttgtacccgtcctcggcccttgcgtgtccgtccgttacgactcagaggacggagagaaagtctaagtcaccttcctcagtatccaggccggaaggagac

SEQ ID NO: 31587 - DNA, 122 bp, Homo sapiens
ttgggaggtccggcttggcgacggtgggtccatggttgggggggggggtctcctgggggacgagagagtgacagtagtgcccagtgtctgtccacatactgccctcatctcggccccctccc

SEQ ID NO: 31588 - DNA, 122 bp, Homo sapiens
atttcatagaaaattttaatctcagttattactggggcatgtcccctccccagagtcagacggaagtccagtgtcaggtagaggtgcatgacgcagagcatgcaaagagactttgtctacct

SEQ ID NO: 31589 - DNA, 122 bp, Homo sapiens
aaccggtggcctcttgtcctgtgttttggtgtttcttcagctaagagtacactcctccttcgaactctacataagtcatgctctttgaaaactggctctttacccaggattttttttttttc

SEQ ID NO: 31590 - DNA, 122 bp, Homo sapiens
gacctgcctggttcctggccctcacagccctctccccaataactagggcaacatgacttccgcttgttgactcaatgctagacccaagccccaggactaatcctgttcccagtctggagaga

SEQ ID NO: 31591 - DNA, 122 bp, Homo sapiens
atccgaaatttcctccatgcgaagaatattcgcaaaatagctacatccctgaacacagtccggaatattacggccggaccagggaatcgggattccagcatcaccaccaggagctgtaccca

SEQ ID NO: 31592 - DNA, 122 bp, Homo sapiens
tgatgttgttcccctaacaaatattgcttcaaaattggtgcagcacctggacaaggcgggcgagtgtgctgccggccaacatctgctccttgcccagtcgcaaaagaggtaccttggccttg

SEQ ID NO: 31593 - DNA, 122 bp, Homo sapiens
cttgcctcagtgagggggccgctcttgccaggactgggctgcccagggctgtgtcttggccgccgggagcagccagggtgctgggagcacagcccccaatgcatcgcttcccgggcccccgg

SEQ ID NO: 31594 - DNA, 122 bp, Homo sapiens
tcttcaaagtcatttgaaagctgtcaaaaagtgtgaagcaatacgaataaaaagtattaacggaagatgactgcaaggattaaatgaaggagaatgaaataggaatggacaggttacacaat

SEQ ID NO: 31595 - DNA, 122 bp, Homo sapiens
cctgagaggcctaacatgggtggggtgtgatggaggaggaggtgggagccccacaggccgcggttccccacctcacagtgccatcttaggtgtgacagcccacagtgctgcctgaccctgcc

SEQ ID NO: 31596 - DNA, 122 bp, Homo sapiens
ttcagtgttttccaaaatatttacccacagaaccctttctttaaagaatacgtgctactccggaaagcactgttagaaaaagtggacatgacaatgacattatttacatatcaaaatgcaat

SEQ ID NO: 31597 - DNA, 122 bp, Homo sapiens
caccctcgtccgggcgcgcacgcgcacgcgcacgcgcgcacaccccctcgcgctccctcacgccgccgacgttccatttttgaacctgcgcaacgttttcctcggcgccagcgagcgagcgc

SEQ ID NO: 31598 - DNA, 122 bp, Homo sapiens
tgccctactctccaaccatgattaatgggtgttgtcctggcctctgactacagcaggggccgttactatgccctcttgaagacatgaggttgtcctgtctgcctcctgaaacaggctgtttt

SEQ ID NO: 31599 - DNA, 122 bp, Homo sapiens
cccatctcctccaaggctgcagtacaaagatgatgcccttattcaggagcggttggagtacgaaaccactttataaagcaaaaggagttgcaggacccacaacatccagatgaaggggtgac

SEQ ID NO: 31600 - DNA, 122 bp, Homo sapiens
cgtgtccttgtgaggtggcgctcccggaacaggagacagggtgggtctcattccagtccccgcttcagcagctgcaacagtcgggggtggataaaagacacctgcacctccatcttccaggc

SEQ ID NO: 31601 - DNA, 122 bp, Homo sapiens
cagcggctgcagccccatgggtcgcccatggggaccctggccttgggcacctgtggagtacgtggcgctgggtcgctgggtcgctggcgccagtgtgcaagatgctccgcaaggaggcagcg

SEQ ID NO: 31602 - DNA, 122 bp, Homo sapiens
aaaattgtgttaaggagtttttatgaccaagcctgtgatctattctggagaatatttgtgcgtatgacaatgtatattcttcaacatcgtagattccattttggatgctcccactgggactg

SEQ ID NO: 31603 - DNA, 122 bp, Homo sapiens
cagaggagggggggtctgaggggagtcgggcgtggaagctgttagtcccgggctgggggccggctcacttccgagctggctctgcatgacaaaggggaaggagcaagtgtcttctttgatct

SEQ ID NO: 31604 - DNA, 122 bp, Homo sapiens
gcgttacctctctagctttttgtgcggcaagctcagcttgtctctgtcgctcgagttcttcgagcaactgcttttccatgatgcgtttggcttcctccacccttcggagaacttctcgttca

SEQ ID NO: 31605 - DNA, 122 bp, Homo sapiens
aggcgcggctctctggtcgcaagccgcctgttctcagaatacagctggctgtgttgtaatcgcacgctgatctcacaataaataacgtgtgcatggaacgtgccttcagatgagcgtgaatt

SEQ ID NO: 31606 - DNA, 122 bp, Homo sapiens
agaggagagagtgtcgcataaatacgctgccccacccgaagcgctccaggcacagcaccccggacacaaagcaggtgggcactagcaccccctgcccagtactctgccaccagcttccctcc

SEQ ID NO: 31607 - DNA, 122 bp, Homo sapiens
ggctagacccccacacgggctgcctcgtgacagttctcatggcccgccgggcctccctggcgcaaggtttcctgctcccaagcagcctccaatgacctgacctctcaccttagatgccccta

SEQ ID NO: 31608 - DNA, 122 bp, Homo sapiens
ctccggcgcccactgcttccccaggacacatctgtcttctgcgcaggccagaggctgagccgaatggggctgggggtgggtcaccacccctgcatcttccaagggcctggtgaggacaccaa

SEQ ID NO: 31609 - DNA, 122 bp, Homo sapiens
cccggatgctccggcggagacgtggccgtgagaggggcggggcgagcggtgcatcggcctcgggtccccggaaacagcctgcacgcgctactttcgttccggaacagagaacgtcctcctct

SEQ ID NO: 31610 - DNA, 122 bp, Homo sapiens
atctgtagattacacttccctgagtcccttgcagcttgctatggctatgtaactaaattccggctaatgagatgtttactgaggtcatgcatacaccttcctgcatacctcaaacagaagct

SEQ ID NO: 31611 - DNA, 122 bp, Homo sapiens
ggacaggcccggggtaggggctggtgcaggcagcgggaggcgcccggactcacccgatgacgtagaccaggaccaccagctggatcagtcggaagataacgcccaccttcttattacgcacc

SEQ ID NO: 31612 - DNA, 122 bp, Homo sapiens
aatgagatggtagaagaccagctgggaggtgaagtctcagtaggctaggggcttaatgttcgatgcaacaccagacttctgagactcaggaggtgggtgtggatctgtctgcccagtgcctc

SEQ ID NO: 31613 - DNA, 122 bp, Homo sapiens
tccctgccccccatatcctggctgtctgaagctatcacaggcagtggggtgtggggagaacgagcccctcttgctgccctcgtcgctgctggggacaggcaggcagcctatgctaggcactt

SEQ ID NO: 31614 - DNA, 122 bp, Homo sapiens
gtgccagcatcaggagacagcagtcaggagctcacagagcggggcctccaccgggtacagcgctagcacagagttggtgctcagtaggcagggactaaagcccccacccaccactgctccca

SEQ ID NO: 31615 - DNA, 122 bp, Homo sapiens
gacccgaggcgaggccggaacaggccgatttctagccgccaagtggagaacaggttggagcggtgcgccgggcttagcggcggttgctggaggaacgggcggagtcgcccagggtcctgccc

SEQ ID NO: 31616 - DNA, 122 bp, Homo sapiens
acgagctgggatgggatttaagagacctggctctagtctcagccccacctcagacctgctcggttatctctgacaactcacagtgccactggaactgttttcttatcagttaaataaggaag

SEQ ID NO: 31617 - DNA, 122 bp, Homo sapiens
ccaaaagcacagaggaagatgggggaaagtgtaaaccttgtggcagctcgccggcgcatgcgcgctccaggaagacccagcagccccacctcgagttccaattggctgcgcgtggcggtcgg

SEQ ID NO: 31618 - DNA, 122 bp, Homo sapiens
gcgcgcttctcagccctctctgccagcatttctgtcctggagctgcagctgctttgcctgcgttgagcagggcgcctgcggagcgcaggtgacatcagccacagccgtgcctgcacccgcca

SEQ ID NO: 31619 - DNA, 122 bp, Homo sapiens
atgactcagaggtattactcgcttgctgcaggatggcatatacagtaaaaataataataacgtatgtgaggtcatttgggtcaggaccatgttcatggttgtttgttttctcaagaaaaaat

SEQ ID NO: 31620 - DNA, 122 bp, Homo sapiens
agagccaggaggcaaggtgcagggccctgcccagcccagcccaggagtgggaggtcagggcggtataacaggaaaggaagggggtagtattgtagagggtgggaaggaatgagaagtgaaat

SEQ ID NO: 31621 - DNA, 122 bp, Homo sapiens
tctacagttctgcacaagaaggttcctcacagaacgtgcttacgcttctgggcaagaaaacgctgtgtgctgtcactcttccttcccccttgtaagcacaattgtcccagcaagcgagcgcc

SEQ ID NO: 31622 - DNA, 122 bp, Homo sapiens
agagaacctgatgctgcagctgatctaacaggagatggagctcaggtggtcatgctcagtcgctcgccactcacctcctgccatgcagtccagttcctaacaggcctcagaccagtaccggt

SEQ ID NO: 31623 - DNA, 122 bp, Homo sapiens
ggagtgaggaaaacagtcagctgtcctggccaaaggggtttggaaggacaccaagacccccgttggtgactgaagatgacactgagctttaatggctgaagacccagatcagggcagtgaca

SEQ ID NO: 31624 - DNA, 122 bp, Homo sapiens
ccatctgcgtcccggaaggagcgagcttgcggagcgtgaaccagtgagtgaaagcggcgccgcccgccggccgcaggtgcggcaaagccagtgtcatctgccggttctcttagggctcccgg

SEQ ID NO: 31625 - DNA, 122 bp, Homo sapiens
ttcacaataacaaagaggtggaagcaacccacatgtccactgatggaaggataaatgtggcgtgtacatacaatggaatattattcagccttatgaaggaagaaagtgctgtcacatactac

SEQ ID NO: 31626 - DNA, 122 bp, Homo sapiens
ccctggaatgaggcgaccccggaatgaggcggcccccgcgagcgccaggcccccgcccagcgctcacttacttgtctgggacgccgggtgctcctggcttctctggaaggggtacctgaaca

SEQ ID NO: 31627 - DNA, 122 bp, Homo sapiens
cgccaagacatcccattgtctgttcagctggaccccgctcccggttccccacggtgagctcgcagcctccctgtcgttttaagttgtaccagctctaagataaattctgggcagtagccctt

SEQ ID NO: 31628 - DNA, 122 bp, Homo sapiens
gtggcgctggcgcgggaaccgcccaatcaggcgcggagttggagaggagggcgtggcctccggcatttggcgggccctttgtctcgctcctgccagagttttagttgcctgtctctgctatt

SEQ ID NO: 31629 - DNA, 122 bp, Homo sapiens
aatgaccagtacacaacggaataatttttggagggttcaaagtaagaactgaaggaagaacggtggaatcaggtatctgaacctgaaagagcccatcctgccaggtgcatcccaaggggctc

SEQ ID NO: 31630 - DNA, 122 bp, Homo sapiens
gctgtcccagacccccagacttttctcagcctcccatgagaagaactcagaggccaggagcggtggctcactcctgtaatcccagcactttgggaggctgaagagggtggatcactgagccc

SEQ ID NO: 31631 - DNA, 122 bp, Homo sapiens
ccctacaccacacgtctcgtttcaggaggtggcagatagtgacattttatggagagcttgcgcagggaacgtgtgggaaatgaaaaggcaacccagctaatcgcacccataatttctaagct

SEQ ID NO: 31632 - DNA, 122 bp, Homo sapiens
ggcctggccgtaggggtgcggctcagtcgtgaagaggagtgaggcattgacacgggctgccgcatggatgactctggagaacattgtgctcagtgagaaggagccagtcacagagggccgca

SEQ ID NO: 31633 - DNA, 122 bp, Homo sapiens
tcctgacagccaggcctctggagcttcgtctgcacgcgagcttggcatgcaccagctgtgcggcccaggccaggtgacacggcctctgaagtctggtctcctcatcagcaaagccagtgccc

SEQ ID NO: 31634 - DNA, 122 bp, Homo sapiens
ggcccaggacacagaagagctggacagcttggttcctatggagtggcagtggctacttcacgccagttcattgctaccacacaaaataccagatttgtagctttaaaacatctcacgatttt

SEQ ID NO: 31635 - DNA, 122 bp, Homo sapiens
tgccaggcaacgagagctcgcgcctcaggagccagtgtaggcgccgcaaagcggaaggggcgcgcggataggtgagcagagggcacgcggtgggcagcgaagggggaacgcgcagcagagag

SEQ ID NO: 31636 - DNA, 122 bp, Homo sapiens
tatgctgtgtgcatccccacagggcgccaggagcaaacacccaaacacccatcctattcccgattcagggcaatggtccaaaagacgccatcgctgctacatgagacagaacgtcacagcga

SEQ ID NO: 31637 - DNA, 122 bp, Homo sapiens
ttgcaggatggcgccgatggcagacggatgaaattggagctctcagagagtgctactcaccggcgcggaaagatggcggaaagaggacgggaggggagagcgcacggagttatgggaagcgg

SEQ ID NO: 31638 - DNA, 122 bp, Homo sapiens
gagaaagcagctctgtccagattcatttgattaactagacaggcacatcaactatacacccgttcattgcattgcagtatcctgaaactcaggggcacttgaaggggaagaggaagtagctc

SEQ ID NO: 31639 - DNA, 122 bp, Homo sapiens
cgacttcgcatcgtctacattgcaggctcacgttcacatgccctatccaaccctctcctgcgagcagcgggtgccatcacaagcccacccgttaccacagcttcacatcgtctacaccgcgg

SEQ ID NO: 31640 - DNA, 122 bp, Homo sapiens
gagacagacacatatgcccagggacagtctgagagagacagggccagggacagccacaagcgcgggagcagaggctgagagcggagagaaaacgcctccggggagcttagacacgagggctg

SEQ ID NO: 31641 - DNA, 122 bp, Homo sapiens
ctgtccgacccagaggtactactgggcctgcggttgtctccagtgccccgggggcggggccggcggctgcgggtcaggggcatgtccagctccagccagtccccggccaggcactcctcctc

SEQ ID NO: 31642 - DNA, 122 bp, Homo sapiens
cgcttcgcactccttcctcccaccgggtccgcaggcccggcttcacgattcccgggccctcgggcatgtgagggacttgagtgaatgcagctccctcaactcactcccgcaaaaccacagcc

SEQ ID NO: 31643 - DNA, 122 bp, Homo sapiens
tccttctctatccactgagccctgacacgtaggaccagcgctactaacagacttgttttccggttcagctccccttagggctcctgttggaaaccgaccctatctggggagcctgtctgggc

SEQ ID NO: 31644 - DNA, 122 bp, Homo sapiens
aacgttgatacattataacttttttttcttgttactttcacccccagatcctccgagcggcggcgacggctgttgctaagggaggggacgcgcgaggaagcgcgacccgggcggcagacggc

SEQ ID NO: 31645 - DNA, 122 bp, Homo sapiens
cctttcggctcagtcacccaccctcggctcccaggagatcgggtccggggtgggggtgggcgtaggccggggcgggccgccccttcctcctgccccgccgtggttgtgctcagtctcccacg

SEQ ID NO: 31646 - DNA, 122 bp, Homo sapiens
ttttggagagaaatctcaacagtatgggcatagctggctccttttattcctgcttttcatcgtctttggctaaactgccatggagacctggccccttctaccttatttcagacacttcaaag

SEQ ID NO: 31647 - DNA, 122 bp, Homo sapiens
gtgtgagactcggtgtgcctggttgtgcacgtgactgcgtgcatatgaaacacagacaggcgtcggtccagcggaatttctgtggcacacttgagctgcgtgtagccccctgcttctgactg

SEQ ID NO: 31648 - DNA, 122 bp, Homo sapiens
tcacgggacagaacagcgaagcagtgcccggcaagcggagcgcagcacccattgcgcctgcgcataacaggctctagtctccgggctgtgggaagccagcaacacctctcacgcatgcgcat

SEQ ID NO: 31649 - DNA, 122 bp, Homo sapiens
cagctcaaactcagcagagcttggtagatagatgatcaacttgggctctggtgcaaatcacgtttagtaactggtcaaacaatcagtccctgaatctcattgtttctttttaaattgcaaaa

SEQ ID NO: 31650 - DNA, 122 bp, Homo sapiens
tgttacaatttaactactttctctttctctttctctctctctctctctctctggtaaaaacgttaacctctgctagtgatgaccaaacctggtaaagattgtaaagtgggaaaaattggatt

SEQ ID NO: 31651 - DNA, 122 bp, Homo sapiens
ccatccgccaaggccccagtatctgtggatggcccagggggccgggctggtggctgcctgcgatggccattctggatcaaagggatgacgagttccttgggggcctcctggggcttcacact

SEQ ID NO: 31652 - DNA, 122 bp, Homo sapiens
cggctccgcccccgtcgggtgtttgtggtggggctgcggagtcgccgatcccgccggaagcgccaggacaatggggacccgggacgacgagtacgactacctattcaaaggtgcggccggtg

SEQ ID NO: 31653 - DNA, 122 bp, Homo sapiens
gatgggaggattttccatagactttcccacagccactgtaggggcacttgtgcctcttttcggaggcgtgtttccccttcgcagccactccaggatggaggagggagagcgggctgggcgcg

SEQ ID NO: 31654 - DNA, 122 bp, Homo sapiens
gattgcagacggagcctcgctcactcaatgctcaatgttgcccaggctggagtgcagtggcgtgatctcggctggctgcagcctccacctcccagccgcctgctttggcctcccaaagtgct

SEQ ID NO: 31655 - DNA, 122 bp, Homo sapiens
ggaagcctgcaaggtacgtctgcgagagccgggtgcgggcgcggcaggggaaaaggggggcgctgactctcttaccgccaggtccggattgcggctgtccctgtgtgacacggctcggatga

SEQ ID NO: 31656 - DNA, 122 bp, Homo sapiens
tgtctgttgatgattcattttttcattcaacaaacatttaatgaggcctacaatgtgcaccggattaggcactgtgaatacaaagatgagtaaggcactgtccttgcccttaaggaatttaa

SEQ ID NO: 31657 - DNA, 122 bp, Homo sapiens
ttgttctctttgatatagcaaacccgcgcttagagccgtacgtttatcttggtggagcttcggtgggatggtggatattttgattcatggtaaatttgtgtactcttaacgctatttcatgt

SEQ ID NO: 31658 - DNA, 122 bp, Homo sapiens
ggcaggattagatgccagtttctgctctgtggcctggtaagatctggcccagagatggtacgtgagggtacaaagagggaacaaagtcacccagggggcctgctaaggatgatggtagggtg

SEQ ID NO: 31659 - DNA, 122 bp, Homo sapiens
tagtgcattgttgaactagacttcaacaattttaacaaggcaggttcaacaatttgaacacgactgacttcaacaatttagtgaaaagggcagaaatgtgtctcccctcacacagcaggtag

SEQ ID NO: 31660 - DNA, 122 bp, Homo sapiens
cgccgcccagcggcctcgcggtccggtcggtccggcagccactccctgccgcggcccgcccggcctgattcacgcgcccgcccccgccccgcccgtcgctcctgcctcctgcctgcccgggc

SEQ ID NO: 31661 - DNA, 122 bp, Homo sapiens
gcctgggctgggctgcaggatgagaggccatgggtcaggagaggcttctgtcgtcccagccggtccccagctgcctaaagatgggtggacaagcccagcgaggcccccagagaaccggccca

SEQ ID NO: 31662 - DNA, 122 bp, Homo sapiens
gaagaaactgaggaatagatgaaataactggcccaaggtcacacagctagttgagggcagcgcctgaagaaaagtccgtgctcctaaccaccacattctaccgccttttcacacacacaagc

SEQ ID NO: 31663 - DNA, 122 bp, Homo sapiens
ctcacgtgcgcctagaattataatacaatataacacatcgtaatatcggatattataccacgtttacctcccattaggatgtgtatattgtgttaggctgtgcttatgtgtttgttacgacg

SEQ ID NO: 31664 - DNA, 122 bp, Homo sapiens
ctgtttacatgcgcaaggatcaagccgactacctgtgctgtctactgggacagcagtctccgagctactccgtacctccctctgccaggtcgtggagttaggccccagtccctacttgtcac

SEQ ID NO: 31665 - DNA, 122 bp, Homo sapiens
tcctacccggaaccactgacccctcagtcagacacagcttccgggtcatttaggcagctgcggagatcatagagatgaaggactccagaggatcgctccggtccgcctggcgtcacctcgcg

SEQ ID NO: 31666 - DNA, 122 bp, Homo sapiens
aggctgaagcagaaggaccgcttgagcccaggagatcgaggttgctgtgagctacgaatgcgccactgcactctagcctgggcaacagaccaagaccctgtctcgttcagttaatagagttg

SEQ ID NO: 31667 - DNA, 122 bp, Homo sapiens
accatgaaggaatcaaatccaagctttctggtaagaagcatgcagcatctggagaccctacgaagagggagcccatcctgggaaaggtgaacaagacagtgcctgagatgttcctgggcaag

SEQ ID NO: 31668 - DNA, 122 bp, Homo sapiens
ttagtgaattgcttcatctgccactcatgtcctgcgccctggaagctgcagagagagcctcggctccccgtgcaagcgctgggctgacaactgacagcggcgacgcttggaatgagacgtcc

SEQ ID NO: 31669 - DNA, 122 bp, Homo sapiens
ggaggttgggagggagccgccgccgcgcgcgtgcggccggcgccgccgccgttgccgctccgctcactccagcctgtttgggggcactttgtttgtgtcccacaatgctctgcgccggcggc

SEQ ID NO: 31670 - DNA, 122 bp, Homo sapiens
gttaaggttaagctttgtagagaacagcggcgtttgtttaacgtccggggatgctgaactcgaaatccccgttctgagccggctacctaaacaaccttcccgaccacctctcctgacctcgg

SEQ ID NO: 31671 - DNA, 122 bp, Homo sapiens
aaatttaagcttagtttaatttgaccattttagctcagtccccgtctcacgcttctcttgcgaccagcactgaacttcaaatgacgtccttttcctaacaggacaagcttgtgttagcagga

SEQ ID NO: 31672 - DNA, 122 bp, Homo sapiens
catgggagcctgggaaatatagtctagttacaggcccaggacaaagaagaaatagcacagcgaggctacagtttcatttggtaattatgagaagactgtaatgaagttaataaccctacctt

SEQ ID NO: 31673 - DNA, 122 bp, Homo sapiens
ttaccccccttcggccggaacgcgcatgtcccggcaattctgctcatcagccgagcagggcgatttatcaagagtcctgacggctgattggcctggagccaagaccccaggagtcccgcgga

SEQ ID NO: 31674 - DNA, 122 bp, Homo sapiens
catctgtgttgtgctcattcagcatcaagcaagaggatgaccttgactcttcagatgagccgagtctctcaacaaatgtctactcactagggagggccagggtcaggttgggggacaagtag

SEQ ID NO: 31675 - DNA, 122 bp, Homo sapiens
cagccaatccctgcacggatagcgcccggaagaggctagaagctggattcagcgtgtccgcgacctcacctttaggtcctgtgaggtcggtggaatcctggggtcctccaaatctaccaggc

SEQ ID NO: 31676 - DNA, 122 bp, Homo sapiens
tggctctctctctgattctggctgttgttctttgattgcagaggccgtacgaaatccactcggtcacgcccatcgatgaaatcctcaacatgttcaaggtggagcgtgtccactactcctcc

SEQ ID NO: 31677 - DNA, 122 bp, Homo sapiens
aaccagaagagaggaggggagggccttactttctggtttaacagacgggaaagataggaacgagggtatcagaggccaccactgtcacttgcacaggaagagaaaggctgccggcagaggag

SEQ ID NO: 31678 - DNA, 122 bp, Homo sapiens
aaaaaatcacagattgcctctgtgacccagcctactgcaggttgtttctcccagcaggctcgaacccaagccaaggccttcaacacgcccaggcactgactgaggttgatacacacaataag

SEQ ID NO: 31679 - DNA, 122 bp, Homo sapiens
gctgcagcagccccattgtgaggccggcgagacaatgggcggcccgaggaggcacctgctcgcctgaaaggcccataaatcgccgccgcgtccagctgccttcccgcccctccccgcggacc

SEQ ID NO: 31680 - DNA, 122 bp, Homo sapiens
tcagcccactccatccagcttgaattcttgattttccaggccaggatttcccaaatctgccggatttcgaatttagggagctttctaaatgatgtaacttaactgcccggccccgcctggac

SEQ ID NO: 31681 - DNA, 122 bp, Homo sapiens
tggaggctgttgctaagtgaagcgcgttttaggaaactacccaaccgacgcgcggcctggcgtccagtagcttcacagatgtcaggtttctttccaagttttaggacccaagtaaacgttgc

SEQ ID NO: 31682 - DNA, 122 bp, Homo sapiens
ggctccaggacccagtcaggcagccctggacttgaccctaaaagggagtaaagacaaatgcgaagttcaatcaggggttcagagctcccaaagctcatagcctggagcttcttaacctttag

SEQ ID NO: 31683 - DNA, 122 bp, Homo sapiens
cttgcagagtaagctggagagcttgaatacctcggagaagttcatggccgccgcctgccgcgggcgccaccctgcgcccgaaaacccgcgggacccctgggcgcgcagcaggctgcaacagc

SEQ ID NO: 31684 - DNA, 122 bp, Homo sapiens
actagcagaatcacctccatatagtcaaggtgaatctcccattctgggcagtcagcctcacgtgtaaacgactgccccttggtattttaaaagacgcaaagttcagagctgtgtaaggcaat

SEQ ID NO: 31685 - DNA, 122 bp, Homo sapiens
ggaacgggcggctttgctgggcttggggctcttggacaaactgcaacacattcccccgcccggagcccgaggcctccctctcggcactgcagaaccggacaccggagctactgcagcctcga

SEQ ID NO: 31686 - DNA, 122 bp, Homo sapiens
agacagtttgtcagtttggccctgcaccttgcgtttcacattctacattttttagttaaacgttgaagcctttccctatgtcagatgggatgtcattgcattacagtttttgagacaacttt

SEQ ID NO: 31687 - DNA, 122 bp, Homo sapiens
agactcttctgggagagatgatgatgaaccgaacgccaaggacttagcaggggcgaacgacgtcaacagatgtccctccagactccggcaccagccggccgagcccaaacgagttctcgccc

SEQ ID NO: 31688 - DNA, 122 bp, Homo sapiens
ccgggtgagataagcagtttagacaaacactgggcgacggtggctccagcatgtatcagccgaggtggagctgcggggccctggcatgaaaggtgagcgcgccgcacccggccggggacggg

SEQ ID NO: 31689 - DNA, 122 bp, Homo sapiens
ggcccaggaccgcgacccgggtcaacctgccgcccgccgggggcccggccccaacttccccggcacctttcaagtccccgagagcgagtgcctcatctgttgctctgtttactccgcggagc

SEQ ID NO: 31690 - DNA, 122 bp, Homo sapiens
gcccccaacacccacatccagagtcttccagtagggatctggagaagtttggcccctaggcggtcctgggttgatgacctcagtttcttggattgactcaggggtggtgggggtgcctgcaa

SEQ ID NO: 31691 - DNA, 122 bp, Homo sapiens
ctgccctccaaggccagggtcactgggaagcacgtggaagccaccaaggccaccctgggccgtggtgagccacagcgggccacggcggcgcggcccatcctgcaggtcacatggtgcccgac

SEQ ID NO: 31692 - DNA, 122 bp, Homo sapiens
cacacacacacaccaggcaaaaatgcacaagcatttttctggataagactcattactgcacgctgggagggagggtgagcagagccgaggaaaggaaagagagatgcaagccaccctagcta

SEQ ID NO: 31693 - DNA, 122 bp, Homo sapiens
tccgcctcctgggaacccgtggaatccgcctcctgggaacccgtggaatcgggttggatgcgcatgtgcgtgtctctttttccgggggaggctccgcccacggccccgccccgctcccaagt

SEQ ID NO: 31694 - DNA, 122 bp, Homo sapiens
tgaacaagcacccagcaggggggctagacaagccaattcatttcccatcgctgagtgggtcgggggaggcagcgccgaccttaatcacatggtgttaaaaaaaaaaaaataactaggggcac

SEQ ID NO: 31695 - DNA, 122 bp, Homo sapiens
gaggatgtcagtgtggagggccccctccttccatgtttggggaggacaaaggttgagttgcggatgagaaataaatcggagctgcttgtgaggccgccaaacagggttagatttgtacagta

SEQ ID NO: 31696 - DNA, 122 bp, Homo sapiens
acgaaaactgcgtctgcctgcctggccgcattgggaggcccagcgcgccccctggtggcgcgaggagatccgcccaaggcgactcaatgattccttcaagctgcgcaagaacttgacaaaat

SEQ ID NO: 31697 - DNA, 122 bp, Homo sapiens
ggggtcggggatagtcttggctttttgccctctcctgccgcctgctgctccagtttctttcgctttgcggcgaggtgggcagggtgagctctcgggacgaatggcagttttggaagaggcct

SEQ ID NO: 31698 - DNA, 122 bp, Homo sapiens
tgcagtgctttgctggagaagggactccctggtccccagggtggacggagccgctgtcaccgcccagagctgggccggggaagcacggtgtgttctgcttttcttttcagattgttgaaatt

SEQ ID NO: 31699 - DNA, 122 bp, Homo sapiens
acctcgctgttccaccagcccatccgtgcacacttagtttcccctaaagcagtgagtggccgggatagaactcaaaaccggcggggcttctggagcgcaggttgtccccggtctgcctgtcc

SEQ ID NO: 31700 - DNA, 122 bp, Homo sapiens
gaaaactatttatttgaagcttataattcactcttttctagctgctgctggattgtctgacgggtctttcctggagttatggaatacttctcaatttcaatagttgaataaaggtgtttttt

SEQ ID NO: 31701 - DNA, 122 bp, Homo sapiens
cgccagcctctgcactgctccccacgggaaggccgttctcccttggtttaccgttccctgcgcttggctcggccatgtgcacatagtaggtgcttaccacactcgtgcaatgaacacacaga

SEQ ID NO: 31702 - DNA, 122 bp, Homo sapiens
gcgctcctcctccgggcggtgtgttgggagggcccaggtcaaggcgcgcgtgggcggaagcggcggcggcggcgaaggcggcggctgtcagagctggagggccgggcaccgcggccatggag

SEQ ID NO: 31703 - DNA, 122 bp, Homo sapiens
tggatgagcgtcagcatctcagccggatatttataagcgacgttcttcccgatggcctggcgtatggggaaggtccgtgtggcacaccgtgcccctgttgcctcttaatttgaaactgtggg

SEQ ID NO: 31704 - DNA, 122 bp, Homo sapiens
aaaacttggaatcagattctttattttgtttttcattttttatttttagagacaaagtctcgctctgttgcccaagctagagggcagtggtgctatcatagttcagtgcaacctcaaactcc

SEQ ID NO: 31705 - DNA, 122 bp, Homo sapiens
gaaaacataccaaaaaaagggctgtgactgcccgggcgctgacggcggtggcggggggtgcggtgtggacgcccgcggtgccggctggggcatcaccgtgggcctcgaacccgaaatggctc

SEQ ID NO: 31706 - DNA, 122 bp, Homo sapiens
catcacccctagcaagccctgtctcagtgccactggctggaaacatcctccagaatgggccgccggcatggctttcacccgcaagctgtcagatcacgccatctcgggccctgcagccaagg

SEQ ID NO: 31707 - DNA, 122 bp, Homo sapiens
gcccaggccttaagacagtttgatattcagttttgttatttaggtctgggttagggataccgccagagagcatccaaacatttctgtggttgggaaggctagttatctgtgagcattccaga

SEQ ID NO: 31708 - DNA, 122 bp, Homo sapiens
gattaagttaaaatgaggttatagggtggaccctaatccaatatgactagtgtcctgatacgaagaggggacagttacagagggaagaccacatgggcacacagggagaagacggccgtctg

SEQ ID NO: 31709 - DNA, 122 bp, Homo sapiens
agggctacgtcagggtgagaccccagcaagggctacgtcagggtgagaccccagcgagggcgacatcaggaagagaccccagcgagggcgacgtcagggagagaccccagcgagggcgacgt

SEQ ID NO: 31710 - DNA, 122 bp, Homo sapiens
tgggaactggcctggggattctctgaggaatgttttttgagggggaagcaggatggaagtcgtgggtcctgagagtggggatctcggcccagccctacctgaccaggtgacagatctgcagc

SEQ ID NO: 31711 - DNA, 122 bp, Homo sapiens
cccgggaaggtcacgggagcctctgtcccggctccgccatccgggccgcttccccggctgcggccctgctgcgggactgatcccctcagcactgcccacacctctcatccgctgtctgcgcg

SEQ ID NO: 31712 - DNA, 122 bp, Homo sapiens
gtgtgtgtgtgtgtgtgtgtgtgtgtgtgtgtgtatgagacagagagagaaactgcgtgtcgtccagaggctgggtctgtgaatgaatgtgaatgtgtccatgtatgtccgtgtgggtcatg

SEQ ID NO: 31713 - DNA, 122 bp, Homo sapiens
ggggccccgcgtggaccaaggtgggagccgggcatggcgtcctcagggcagtctgggtgccgggcaggcctcctaccaagcgccagctctgccggggccactgctctgtctccctccctctc

SEQ ID NO: 31714 - DNA, 122 bp, Homo sapiens
gtgggtagctctgcggggtgagacacccaatgtcactgcctgaggctttatggggctatccgcagtcgttccagcagcggggtacacttttgctgtgtggagcgctatgttgagtgtcgctg

SEQ ID NO: 31715 - DNA, 122 bp, Homo sapiens
cacacacaaaagatatggcgcgtctcattcattcacaagttcctcttcaaaggtttggctcgttcagcgccctcgttcttcgtttcctacttccaaggccaacctgacttcctcaccctctg

SEQ ID NO: 31716 - DNA, 122 bp, Homo sapiens
gggctcagccgagaaggcggacaggcacaggaggctgctcgagcgccggggccaggcgtccgggaaccccgacaccctgcgccagacccggccgaagcagcccgccccactgcgcagggcca

SEQ ID NO: 31717 - DNA, 122 bp, Homo sapiens
tctccctgtttctgagggcaggggtctcctgggctcccaccaacacaggctgtgctccttcggagccactgtgactccagaggaccacctccaagcctgctcagacccctcagctgtgtcca

SEQ ID NO: 31718 - DNA, 122 bp, Homo sapiens
gcaagcgacctggcggctgtgtcctgccgcctcctccgcgaagcccctgattgcccagcccgctcagacccaggcccagactctcactcactcgccccgggcgtgcgcagcgcgtgggggtg

SEQ ID NO: 31719 - DNA, 122 bp, Homo sapiens
tggggggaggtcaaagggcacgaagttgtgcctgcagctgttaccatagtaaccgaggaccggatgtggcgatcttacggtgcgacagtcctcttctcaggccctctggcccgagagcctgt

SEQ ID NO: 31720 - DNA, 122 bp, Homo sapiens
taggtaggaatcatttgggttcctctgaagcccaagcatgagcccaaattcagtgactagcggtttgtggagagttttgagaaaaccagataggtgaagctaaaatgacacaggaaagggaa

SEQ ID NO: 31721 - DNA, 122 bp, Homo sapiens
cacgacgacaggaatgtcaagcatttaaacaaagacagacatccttcaccctccacccaccgccgcccctgccccccgcaaccatccaaagtctgagctcccaaaaaaggatctttctccag

SEQ ID NO: 31722 - DNA, 122 bp, Homo sapiens
tcttgttgcccaggcagtgagcttagattgccacactgcactccagcctaggcaacagagcgagactccatcgcaaaaacaaacagccctatgcagtgcggggccccaggcgaggctcagac

SEQ ID NO: 31723 - DNA, 122 bp, Homo sapiens
tatgaaataaaagtaattggtggttatcactatgttaaaaaaaagagagatgaaaagcttcgtgaaaagggtgttgatggccttttcagtactcaccattaaaaatgcaaaataaagattca

SEQ ID NO: 31724 - DNA, 122 bp, Homo sapiens
gtcggccagggagacctctggcagctcgcgcctgcgatctgagcttaattaaacttctcccgaggcattggctgactgattgacccagtgatccaaaaaaatcagagaggcccaaatctccc

SEQ ID NO: 31725 - DNA, 122 bp, Homo sapiens
tttcttagtcagatcccgtacttttgtggagggtagaggaggctttgaccgccgcggccccgggggctggtgggaaatggagttccaaatgagaaaatagaattccccacttctctttccca

SEQ ID NO: 31726 - DNA, 122 bp, Homo sapiens
cctgcgtgcgtacttgagtgagtgtcagggaaaaggtaaaggattttgcacttattcattcgtccactgcacactacttggcaccatgctgagcctggggaccagcaggggacaactagaca

SEQ ID NO: 31727 - DNA, 122 bp, Homo sapiens
ttaatgtgaggaagcatggccaacatgcagaatatagagacttattttaacatcatcacacgtacctcagtattttgtgtccttctcctaggatgaatgaacatttcattcattcatgctga

SEQ ID NO: 31728 - DNA, 122 bp, Homo sapiens
attcagaacaagcccacatgttcctcaaagcggggttttacctcccggtagggagctccccgccgtggcgcagcgtaggtgagccggccgtggtcgctttcgctcttggtgccgcctgggtt

SEQ ID NO: 31729 - DNA, 122 bp, Homo sapiens
gaccagagaaaccatcctaacagtcggtcctccctcctggaactcgtaggaaagtttccccgttttaaagagcgcgattctcgaatgaatcaaaaacaccctccagctcctcggtcctcccg

SEQ ID NO: 31730 - DNA, 122 bp, Homo sapiens
taaactgcatgggcagggcgccaaataacatcctgtgcgctgctgagctgagctggggcgcggcctcctgtctgcaccggcagcaccatgtcgctcacggtcgtcagcatggcgtgcgttgg

SEQ ID NO: 31731 - DNA, 122 bp, Homo sapiens
gttgggcacacccagacatcatagagatgagattagcttcccaggtctaattcagctcaacgtgaatgaaagtccattcactttcctaagagctccattaattatgaatgtgtcctcccttc

SEQ ID NO: 31732 - DNA, 122 bp, Homo sapiens
gattcgaatctcagctccaccatttaccagctgtgtgaccttgggctagtttcttaatctcgcagtgcctctattttcccctatctgtaaactggaggtcacatgatctactgcagggtagg

SEQ ID NO: 31733 - DNA, 122 bp, Homo sapiens
aaaacaaaaattaggcacagtggaagggatctatggtcccagttattccagaggctgaggcgggaggaacatctgagcccagggacatcggggctgcagtgagccgtgatcgcactactgca

SEQ ID NO: 31734 - DNA, 122 bp, Homo sapiens
gagtcctcctcggactacctactgcccaaggacatcaaactggcggtgctgggcgccggccgcgtgggcaagagcggtgagtgcggcggggacccccgggcggcttcgctccccggctccgg

SEQ ID NO: 31735 - DNA, 122 bp, Homo sapiens
gcctgagcctcccaccccctccgagggctcctgtgcggccggagcctctccgatgagtgccgccccttattgcacggtgcgcagtcccatggaccaccgaagggctgaggggtgcaggccca

SEQ ID NO: 31736 - DNA, 122 bp, Homo sapiens
caagggccagaagtgaaccagagtgcagagtgaggcagaatcagtgagtcagagtgatgacgtggggcctccatgctaaggcagaaagaaaaacaagcagacagacatccaaaggaaaagcc

SEQ ID NO: 31737 - DNA, 122 bp, Homo sapiens
tggaggtttcactggggacctgcccccatttggctgggcatttggctgcctgcctcctgtcgctatcactcctttactagtgaggactaaactgatctttttctctcttgctcaagttctta

SEQ ID NO: 31738 - DNA, 122 bp, Homo sapiens
gggctagaatttagcagacagctgttccacgcgggccagggcggcatgaagaagtcccgccgctacgtgcccggcacagtggccctgcgcgacgttcggcgctaccagaactccgagctgct

SEQ ID NO: 31739 - DNA, 122 bp, Homo sapiens
gccgtgccgctggaagcggacagacccgagttagaggtgggggcgggggtccatcgcccgcggccgggccggcgctcccctcctaccctccccgcgacccccgtctggcccccacggctaac

SEQ ID NO: 31740 - DNA, 122 bp, Homo sapiens
tgagaagtccaaggccctgttcagaaaccctggggtctacacactgcggagtgctcctggcgtgtgacaagtggcttccctcttcttatttctaaaccttgtgcgtgtggattcaggaccac

SEQ ID NO: 31741 - DNA, 122 bp, Homo sapiens
gcttccgccgacagtgcagctggttgagaagctgcagctcggtgcgcgacagcgtgcccacgttcatgtagggcagcatctggtgcggtaccggggacaccagcaccgaaccggggccctcg

SEQ ID NO: 31742 - DNA, 122 bp, Homo sapiens
ttctgctgttcctgccaccgctgctgctgctgctggacgtccccacggcggcggtgcaggcgtcccctctgcaagcgttagacttctttgggaatgggccaccagttaactacaaggtaggg

SEQ ID NO: 31743 - DNA, 122 bp, Homo sapiens
acctcaggtgatccgcccaccttggccacccaaagtgttgggattacagcagtgagcaaccgcgcccggcctcaaatgtcactttctcagcaaaccctttcctggcgtgttccctgccttct

SEQ ID NO: 31744 - DNA, 122 bp, Homo sapiens
gcagctgcacccccagctgctgctgcctgatgactacctggactgcctgggcaagcaggccgaggcgctgcggcccttcggggaggccccgagagagctgcgcctgcgggccacccgtgcct

SEQ ID NO: 31745 - DNA, 122 bp, Homo sapiens
cctcggccttccaggggcgcccccggttatcgaccgcacccttctctagagacgcgcttccgcccgctgagccctctcccgaccagagccccttcgcccggcagatggagctgcggatcccg

SEQ ID NO: 31746 - DNA, 122 bp, Homo sapiens
agctcttcctgttcccacctggcagccatctctgaattctttgacataggggctagtctccgggctcagctcatcctcattggccccacggagtctcaggggaccgtcacgggctgctccag

SEQ ID NO: 31747 - DNA, 122 bp, Homo sapiens
tcctagacggcttcgaggagctggaagcgcaagatggcttcctgcacagcacgtgcggaccggcaccggcggagccctgctccctccgggggctgctggccggccttttccagaagaagctg

SEQ ID NO: 31748 - DNA, 122 bp, Homo sapiens
ctctactgggtggtgagtgggggtgggggggagtgggggtggggtggcgggggtggtggtcggcaaccaggtcaattaccctctagtggagtttactcaagatgtttgtcatttaatctata

SEQ ID NO: 31749 - DNA, 122 bp, Homo sapiens
cccctctcggcttttccgagctgggatcaccctccccgagagaggagcgggccattgccgcgtgtgggtgttgcagaaatgaaaaatcagtgcagttacatcgtaaaatttggattaagaag

SEQ ID NO: 31750 - DNA, 122 bp, Homo sapiens
caatcttaatcccattaaattggatgctgtgtctatacacacgcaggacctaggaggacacgtcaaactgtaaactgcttgtgattgtggataactttgttctttgcttcttgtgtttttca

SEQ ID NO: 31751 - DNA, 122 bp, Homo sapiens
gttgctactctgtgaagccttccgtgcctcccataggcacttgtactatgtacctatatccgtcatatatatctcagttactgattcaatttacagttgttgaatgccagttttatgccatg

SEQ ID NO: 31752 - DNA, 122 bp, Homo sapiens
cgtaagtgcagtctgggctggaggctgcctggcatgcccccttgtactcctgaatcgactcgtagaggctgtacagttggcagagcaaggacatgtccagctggcggagaccaaccttgagg

SEQ ID NO: 31753 - DNA, 122 bp, Homo sapiens
agccggcgccgagtccgcccggcgtgcgtgcgtgtgtgggagcgcgcgagtcccctgacgcggggaccagttatgaatcgggggtgtgtgtttgcctccagagacctggcaaggtgcggagc

SEQ ID NO: 31754 - DNA, 122 bp, Homo sapiens
ggccgggccgccgcgagtacagcgtgcaaccgccacacaataaataacaatagattcctccgctccggactagcttcccggagcccagccagcgccggtggcggcggcggcggcggcagagg

SEQ ID NO: 31755 - DNA, 122 bp, Homo sapiens
tttttttaatttgtcatttggaatccttaagcatgcaaaagctttgaacagaagggttcacgaaggaaccagggttgtcttatggcatccagttaagccagaactgggaatgcctctgggtc

SEQ ID NO: 31756 - DNA, 122 bp, Homo sapiens
agaggtactatataaatgtcagatgttacataaatgtcagaaatgattattgtttattaacgagggctaaactgtttctaagcaaagctccatctcccagccaatgtgttcttagcagaggt

SEQ ID NO: 31757 - DNA, 122 bp, Homo sapiens
cccgggccgctcacttagggaaggcgtcgaagcagtaggtcttcttggtgtcggggaaggcgacgcgcatgcccgaggtgagcggcgagtgcagcaccaccgcggcacactcgtagcgcgag

SEQ ID NO: 31758 - DNA, 122 bp, Homo sapiens
caacttcctaaacacactgcgcatgctcacttccgaagtgtaaggagggcactgtgcattcgggcagcctatcctaaggggagaataatgagaaaggggcacaagatggccgcctatgaagt

SEQ ID NO: 31759 - DNA, 122 bp, Homo sapiens
atcactcccagttgagaaacagtgatctaaacgagaagcctaaagttcagagaggctaagcgattttcccaaggtcacaagcctggcaggcagcagagatagaatctgaaccaagctttgcc

SEQ ID NO: 31760 - DNA, 122 bp, Homo sapiens
acagcctgaaatctgttcttgagagccagattttccactttcatgatgagatcctcttgtcgttttgccctgtcctgggtctcttggagcttgcctttcatgttgtcaatctgcttctgaat

SEQ ID NO: 31761 - DNA, 122 bp, Homo sapiens
ggaaaagccctctgaaaaaggcaactagcttccaagtagaaggttcaaagggcaaaagtccgttggggggcccagcatctgactgttccacctcattagccacaagtacatgagatcagtca

SEQ ID NO: 31762 - DNA, 122 bp, Homo sapiens
cccctgcgcacggtgcccgggctctgccaggattactgcctggacatgtggcataagtgccgggggctgttccgtcacctgtcaactgaccaggagctctgggcgctggagggcaaccttgc

SEQ ID NO: 31763 - DNA, 122 bp, Homo sapiens
ggttgggagctgggactcctggggccgagggaggcctttggggctcccactcagttttgacggtctaaggcctgggggcctggattcttggtagggttggagatctcaggagtgtctttcca

SEQ ID NO: 31764 - DNA, 122 bp, Homo sapiens
tccgggctgttcgctcctgcttggcaatgtcgcgagaaaggttttcgcctcctgtttcagcggtgacggcttttgggttttcctcggggtggctttttaattttagtcttggcgcgaggcgg

SEQ ID NO: 31765 - DNA, 122 bp, Homo sapiens
ggttggaagccacctggcccgactccccggccccagtagcctctcgggcagcgccctttccggtcagtcccgccacgtccacctgtagcttccgcccccgtccctgggactccgcccctccc

SEQ ID NO: 31766 - DNA, 122 bp, Homo sapiens
ctcccctcctgcgttaggccctgacatccacctggagctctgagggcttgaggagcacagcgtgcagaccttaagcctgagaaatcttaagtaaggaaacaataatccaatgtaccaggaag

SEQ ID NO: 31767 - DNA, 122 bp, Homo sapiens
actgaaagccaaggtgacagctattaagcaattgtgcgccgaacaaaatggcaaagcggccgggtaatcaattcaatttcgatgggcaacccgagcaaccgcagcggctgtcgcagctgatt

SEQ ID NO: 31768 - DNA, 122 bp, Homo sapiens
cggaactttgtcagcgcaccagggcagtagcgggatgggtgtcaaggccgtgcacacccacgaggccgtaggaagcctggtcaggctgtcggggcctcagacggcagaaacctatcccgaga

SEQ ID NO: 31769 - DNA, 122 bp, Homo sapiens
gtttgtcccggccataattgctccaagtgcttacaggtcaatttcatacatggaacacctcgaaagtgggtgacctgatctccaagcccaaccggcttgtgccgcttgccgaattgtaaatc

SEQ ID NO: 31770 - DNA, 122 bp, Homo sapiens
tactgacactttgaaaaattgctgctcacatataaacttagaacaagcacaaactacactcgcaaaagctgatgaaagttgctgaaaaaaatcaagtgtaccatcaggtacatagttatctc

SEQ ID NO: 31771 - DNA, 122 bp, Homo sapiens
gggaggcagcagctaaagtggcaatgcttagactctttcgttttgttacaaaggggcgaccgcgtggagttcatcagtgtagctgcggcaaccaagatctgctttgcatgacccagaagaga

SEQ ID NO: 31772 - DNA, 122 bp, Homo sapiens
caggctgatgtgggtgttgatggcagcctcacagctggggtggtggtaccgttgcacctgcgacagcgggcccagggcgggcagcgcgggcgctgggaggaggggaaaagcagtgggtttgc

SEQ ID NO: 31773 - DNA, 122 bp, Homo sapiens
tgagatcactggtcctcatggaaatgccattacagggaccggtgagcgtgaagacccaggcgagggaggtgctggcatgtaagtggatttaaagcatgggatgggaccaggtcatctaggga

SEQ ID NO: 31774 - DNA, 122 bp, Homo sapiens
tcctggaatggaatcgtggcgctgctgtggagatctgagttgatgtagcacctgcttcctcggatgtagtccgcaccccggaccagatgccgctcggtcgtgggtctggagaaccggtatgg

SEQ ID NO: 31775 - DNA, 122 bp, Homo sapiens
cccaaagaaatttagtgagacgagtgacatagttatacatttttgcaaatatctttgttgcgggcttaaaagaagactactggctctcatacctgcttctacattcaatgtgttacatcaca

SEQ ID NO: 31776 - DNA, 122 bp, Homo sapiens
tgcggcatttcagattccgagccttatttggactttttactaaagaaagagcacccgccccgtctttttatttgtcaggcaaagttcagtcagccaatattcagttagccaaagttaccaaa

SEQ ID NO: 31777 - DNA, 122 bp, Homo sapiens
ggtgatgggctgagagagagggcggaagagagaagaagtaagggaggctttagtctgagtcgtctttgaaaccatgaaggtgtacgctcttctatagtgagcgtgttgcttcctgttttctc

SEQ ID NO: 31778 - DNA, 122 bp, Homo sapiens
tttacctggacattcaaatacacacagaaatttgccaaactagaagaaaggcattgtaggcgtagggaagttcatggaggcatgaaaaggtgaggtgttctaaggaaatgaggaatagtcca

SEQ ID NO: 31779 - DNA, 122 bp, Homo sapiens
cacacgcgccaaagctcagctttcacgaagggcaaaacggtcacccaagcgccaggcgtgcgctacagtgcagcaactgggttgacccagggccctgggctcccggtgtgccccgggtcccg

SEQ ID NO: 31780 - DNA, 122 bp, Homo sapiens
cctctgggactaaacacagtggtcacctgccaaatcaaaatgaccacaggggtctgcaagcgaagccatgaggcccagaatcagggaggaagggtggggtttacataagtgttgacaaagaa

SEQ ID NO: 31781 - DNA, 122 bp, Homo sapiens
gctcaaaccagcctgttgtatccaaaaccctgtccctgtggaattgcaagaataaaacaccggctggaacatacagctgccaagtgcatgcttaggaagtgggaatatagctcctgatcttg

SEQ ID NO: 31782 - DNA, 122 bp, Homo sapiens
cgtcaaggctgtgctatgagggcttctttgttgagtccgggttgaaaaacctaccgcggtcgtctctgcagtcgactgagtagaagaccgctagagatcttcgattctgaattagacacctt

SEQ ID NO: 31783 - DNA, 122 bp, Homo sapiens
gcaggcggagccccactccgggagcgctcacggcctttgccccagttctgctgctccttgcgccgacccagcccggcccttcaggcgtccctggttcctgcacagacccctaccccccgatt

SEQ ID NO: 31784 - DNA, 122 bp, Homo sapiens
cagggggagagaggggctggctcttactccccgtatcgcaggaggtgggtacaacccctgcgatattgggagtaatgtcatcctctccgcatgaatataagaaacagtatcacaggaggatg

SEQ ID NO: 31785 - DNA, 122 bp, Homo sapiens
gataggacgaacgtgggaaccagcccctccgcgggcgcccgcactaccttccctgatggacggggatgacccagcccacctgagtcaggacccagggtacccaggtgtggagcaggggcctc

SEQ ID NO: 31786 - DNA, 122 bp, Homo sapiens
tgcctgttttcttcttgaaagtctcatttcttcttatacctgttttcttcttgaaagtctcgttagtatctgcataacttggtgaccagtaagtggattagcggtgcctttcaaagtggatt

SEQ ID NO: 31787 - DNA, 122 bp, Homo sapiens
ttaggctcgaggcgtctgccgcacctcagcccacgacctgccccgctgggaggtgcgggccgctggccaggccctgaccgcaacctggcccagaggccccagccctcaggcaaggttctccg

SEQ ID NO: 31788 - DNA, 122 bp, Homo sapiens
gggcggcggcggcgggcggggagccaggcccgagctgcgttctgcgcagccattggtgggcgccgcgctctgcactgagcatgttcgcgccccgccggcccctagccgcagccgcagccgca

SEQ ID NO: 31789 - DNA, 122 bp, Homo sapiens
aaatgggcttaaatatgtttgtaaatacataacttaatattgaattcatcttccctattccgcgcattttgagaactgtgcttagttttcactttggacgaatagcaacccttctgatggcc

SEQ ID NO: 31790 - DNA, 122 bp, Homo sapiens
cggtcgcctggaggtgtgggcagcgcgccgatgggtccgggggagcggggctgggcggctcggtcctctagcggagccggtttgctgccatccgcccaacttcagcacccagcgggcgagga

SEQ ID NO: 31791 - DNA, 122 bp, Homo sapiens
caacatctacaaccacatttttgtgcacttacacacatggtcagatacactgagtggggacgctgagctgtcatcactcctacagtggtcatggtctgatggtcccatggtctgatggtccc

SEQ ID NO: 31792 - DNA, 122 bp, Homo sapiens
cctgggctgccctggcaccatagcctgggtacccagtgtaccatggagtgtgggcagaaacgctgtttcttcctcttgttcctggccgaccttcttctcttggctgggacttgtgattccag

SEQ ID NO: 31793 - DNA, 122 bp, Homo sapiens
gataaaggttctgtcaggcccagccctgggccctctcattgctcttccaaggcttcttaccgacccaaagcagtggcaggcatctttgtgccttttttgtaacctcacactcaggggccccg

SEQ ID NO: 31794 - DNA, 122 bp, Homo sapiens
ctttccaggccgcgggggacggtggcgggtgtcggggcgcggtggcaacgctggagttcccgggtccaccggcgcggtcagccctggtgacccaagccaggggctggggagcaatctgagac

SEQ ID NO: 31795 - DNA, 122 bp, Homo sapiens
aaaaaattggaggaacagaataaacaagttcccaaacacaggtgcagttcccacttcagccggggaagacactgtgcctagaaaagctcagaatcatgccctaaaatacccatatcttttcg

SEQ ID NO: 31796 - DNA, 122 bp, Homo sapiens
tatacacaccagccacatgcacgggacatggcgtgatactgtggacatgggccccgggagcgccacacccccgccctgtgcacggtgtgtcacgcgagtgcatgttcgcttggctttgcaaa

SEQ ID NO: 31797 - DNA, 122 bp, Homo sapiens
ccggatctgtgttgctggtgggaatgtccccatccattaattgagtgctcctagaattagcggggatgggagggcctcccctagctggtttggaaaccagcaccttcatgtttataccaatt

SEQ ID NO: 31798 - DNA, 122 bp, Homo sapiens
actcagaggcccgaggacttgctttcaggttcagggacagataataagcaggcggccgaacgcctgcttgcgaacgcctgcttctgcacgcagtgtgcaccacgggaagttcactgagaaaa

SEQ ID NO: 31799 - DNA, 122 bp, Homo sapiens
gtgtccggggtctgactgcaggacaaagggccgggagcgcgggagggcggcgcccgggagcggccacacatgccccgccaaccggtctcctcaggcagcactcccgggaaaaaggggtagac

SEQ ID NO: 31800 - DNA, 122 bp, Homo sapiens
tgggcgccctggagcagggggcggcgctcgtctgggaggctcgggctgcacaggaaccaacggaggcaggggaaggctcaggcatggcgggctgcagtcccgaggcctgccccgcgggaagg

SEQ ID NO: 31801 - DNA, 122 bp, Homo sapiens
tccctgtcttcagaaagttcattcaaacatgatgcgacaagtagacataacagataactgcgattcagtgtggtaagagctgtagtagagagaagcagaggaaacacagaggtggccactct

SEQ ID NO: 31802 - DNA, 122 bp, Homo sapiens
ttaattggtctttctacttttttttttttttttgagacggattttcgctcttgttgcccacgctgcagtacaatggcgcgatcatggcttcccgcaacctctgccttctgggttcaagcgat

SEQ ID NO: 31803 - DNA, 122 bp, Homo sapiens
aagacagtcctgctgacccgcagtgcccacctcgaaggccacggcaggggagaaacttaacgtaagccaaacgctggcccactgaacaaagggaggcagaggaacactgggaaacgtattct

SEQ ID NO: 31804 - DNA, 122 bp, Homo sapiens
gtcttgtctgagctggccaccactcggacaaaaacctccccggcttcagggtgattctggcgccgcaaaaatttgttcactcggtcttccaagtggtttcccagtcttgtggtctgcagccc

SEQ ID NO: 31805 - DNA, 122 bp, Homo sapiens
attcttctaagtgaagtttaggaaacgctgctattgactttgatgctggttcttcacagtcgattctgtttcttaattttaccttgttcatagctctttgccatctgagatttcttttcttt

SEQ ID NO: 31806 - DNA, 122 bp, Homo sapiens
caaagatcacatggtgggaaattttggggtaacatctgaaagctcctatctatcttggcacgcatcccttccctgctacagagggatactcaagaataatgccttgataaagaaaatacctt

SEQ ID NO: 31807 - DNA, 122 bp, Homo sapiens
gaactcctggatatctgctaatgatgatgcattctgagagtctggaattatctgaagactcgtgacaccatgaggccagtgctgctctcagtctgccctgctcaagactcgcgacaccgtga

SEQ ID NO: 31808 - DNA, 122 bp, Homo sapiens
ggtttggcaaaggttatcaccaagtagaagtccaaatgtgtgtaacatacccctggcaaacgttatagaagaaggaagctggggccgggcacggtggctcacgcctgtaatcccagcacttt

SEQ ID NO: 31809 - DNA, 122 bp, Homo sapiens
ttctgaagcagcagcagctgctgcctgtagcctagctttgtgtctgattgctgaagatgtcgcctttctgcagcctggagtaactgagtcatattcttcctgattattatacagcttacaga

SEQ ID NO: 31810 - DNA, 122 bp, Homo sapiens
cctgggcagggcgggtccttaccctccctcttcatgccagtggccaggcacttctgatagcggcagtactgacagcggttccgctggcgcttgtccactgtgcagtctttgttgtcccggca

SEQ ID NO: 31811 - DNA, 122 bp, Homo sapiens
ctaactctgagagagtccgaccttctgcactcactgcaggctcagtacactgtaggaacccggcagtttatacatcggatgtaatagcttccaccaggagcagggctcaccaggtttttggg

SEQ ID NO: 31812 - DNA, 122 bp, Homo sapiens
ggcttagctccaaaggttgtattgagattagggtgtaccttcgcctctcaatcagcctcccgtcctcagccttgccatctcgctagtccgggacaaatccctagagcgtcttcctctgcggg

SEQ ID NO: 31813 - DNA, 122 bp, Homo sapiens
aatcagcagcagactgcgcccgccccagagaacttccccacgtattctccactgaggccccgtccgaccttatcgcgggttaacagcccaggatgttgacttgagctggcttggtcggctac

SEQ ID NO: 31814 - DNA, 122 bp, Homo sapiens
taatccctcggcaaaccccaaacctgccaatgaagtgcactatttctctgccacaaaggccggcccgcgcctcgtgcacgccggcctccgcacacatgtgcctggctgacaactgcggagcg

SEQ ID NO: 31815 - DNA, 122 bp, Homo sapiens
tggctccgttgcctctgcattgcgccctgtcctgtcatgtgtcctcaccggggtatcggccgtcactcagctctcctgtgcccctgcgtctcaccctaggcgggctgggcggggcaggcctc

SEQ ID NO: 31816 - DNA, 122 bp, Homo sapiens
ccgagggactctggagcccagctgcccctagttcagtactgggtagagtccgaggaggggcggggccccggctaccacagagacggcgtttgatagagaggaaggtgcgggagacgcggact

SEQ ID NO: 31817 - DNA, 122 bp, Homo sapiens
caggaaaacaggtaccagaaagaatgaagacttttacatcaggtgtttttagaagggattcgtggttatctgagtagagttatgataccagagtggtgtgttcatccaaggctgataaggaa

SEQ ID NO: 31818 - DNA, 122 bp, Homo sapiens
aagttgatggagtaaggaggacaatgatcatgtgtgcatcatctgctctatactaaccaccgtcttgtctaatttcattctcattatggcctctgagagaaacatgattatcttcatggaga

SEQ ID NO: 31819 - DNA, 122 bp, Homo sapiens
agcattcccggaatgtgcttcctgctggcgcggggcggggggcgggcggggaggcccgggcggggcggggagggcgcggggcggcgcggccggagcccggggcgcgcactcggctcggcccg

SEQ ID NO: 31820 - DNA, 122 bp, Homo sapiens
acgaaagagcagagattaagaaatggccgtaagaacttactgcaacaacagagctctcttcggttccaacgtgcgcgtaaatcctgcagacaggagcccaataagacattaggtcaactcag

SEQ ID NO: 31821 - DNA, 122 bp, Homo sapiens
gagggccgagcggggcgggcagagggcccgtgtcagccccactccgacctagtcctcggccgtctggccaggacacttcggccccccaggtgcccaccccaggacccaaagctggtggctgc

SEQ ID NO: 31822 - DNA, 122 bp, Homo sapiens
agaaagcgctggtgacaggtgctctcctcccacccacgtgcttcgggatcgttcattccgcggtcttctgactaccaccccctcacgtgcatgtttgctgaatgactttttaaaaaatacat

SEQ ID NO: 31823 - DNA, 122 bp, Homo sapiens
aagacattaaagatggaaacaataaaaatagtcaggaagagcagaaaaaaaaaagattgccgtgatattctgtctcgttttgccaaaaaggtattaaagtaccaatgatataaaaataggct

SEQ ID NO: 31824 - DNA, 122 bp, Homo sapiens
tgaaaagtagactgggctccgggaaatgtgggtaatgggactggacctgcgcctggggtccgcccacccgtcatctcccgggagccccccgacgtgtgccattaagcataaggcgcgttaag

SEQ ID NO: 31825 - DNA, 122 bp, Homo sapiens
tcccgatagaggcggaaagtctgcaacacagggcggcgagggtgagtagggttctccagccggccacggagagggctggggtatgtggaggcagaggctgcggctgatgctttatagaggaa

SEQ ID NO: 31826 - DNA, 122 bp, Homo sapiens
ctgaaaatttgctagctcctagaatatttaaattatagcctgacaaagcattcagtccagcgccatctgtctccatcataataacacaagattatatatatgtataatcaagtcctcggcat

SEQ ID NO: 31827 - DNA, 122 bp, Homo sapiens
ggccggtgtctctgggtccaggtcaaagaggtgcgccacacccagcaggcggcccagggccggctccagccccagcgcctgctcccgtacaccggcaaaaacgcctgacagccgctgggccg

SEQ ID NO: 31828 - DNA, 122 bp, Homo sapiens
tttcaagtaatttattgctttcagttgttttcagatctgtttaaatgtgcttattttttccgcggttgctaagttattgtagttggacttgatcgtctctctgggaatgatttcttcttgag

SEQ ID NO: 31829 - DNA, 122 bp, Homo sapiens
cccacccctcgggggtctaaggacggggccacgggaggtgctccccacgccttagctagacgcaaggccctcccgcaggctcccgcaagcccatcagggctgggcgtttcccaccccttccc

SEQ ID NO: 31830 - DNA, 122 bp, Homo sapiens
acaactgagagcgtagtcttcgagtacccagttgcctactgacagccgtctcctctaaggcgcttcttttagccaagaaagcgttctttgcgtgctgtgacgtaaaaagcagcgccggaagg

SEQ ID NO: 31831 - DNA, 122 bp, Homo sapiens
ggctgttgacctacctgtcacttgcaacaggtgcctccagagatcgagaagtcccagtgccggtttcaagggagggtctccggctccgggaagatcgcaacccagctccggcagccggccct

SEQ ID NO: 31832 - DNA, 122 bp, Homo sapiens
gcaacacacccactggaaacgcacgtgaacaaagctctcgcccccgggagccgctgcctgcggtttcctagtcgatcccagcttctctagggagtgtcaggcgcacacagggttaagttagt

SEQ ID NO: 31833 - DNA, 122 bp, Homo sapiens
ctagtgttgcagtgaagctgtgacaggttgactccttccactcgggaagcccaagatggccgggccaggaacccgggaggctgctgaagtctcaattcccctcgccctaggcctgcccaagg

SEQ ID NO: 31834 - DNA, 122 bp, Homo sapiens
agtttaggagtcagcaaagcccctccacgtccttaagagccccggaactgcatttcttaacgctcctccaggagcctccagcttttttccgtaaggtccgcgcgcccagcattgtgaggcga

SEQ ID NO: 31835 - DNA, 122 bp, Homo sapiens
gctacattacctaccaagagcttccaacaatctccactcctttgggaagcagcattttaacgaaccagctacatgcatcccagaggctcaacccacatttcctgatttctatgacaaagatt

SEQ ID NO: 31836 - DNA, 122 bp, Homo sapiens
cagggcctcttccaggacgcttgtcctgtccagccatgccctcggtgcccggagctcagccgtggatggcagggcaggcactgggcaggaaaactgggttgtccactctagccattgcctag

SEQ ID NO: 31837 - DNA, 122 bp, Homo sapiens
caggtgagctttgaaggtgtggcagcagaagagattcctgggcagaaagtgtggagggggcggttgaggtcagaaccttaggaaatcaggacagggaggagtcaaagccacaatctgaggaa

SEQ ID NO: 31838 - DNA, 122 bp, Homo sapiens
tcaggggtggggctcgagtctcgtcccagggctccgggacaagcttcctggaggaggcagcgtgagctctgggaggtagaggtcaagacctcaaaaaatggggggacatgggcggagggggc

SEQ ID NO: 31839 - DNA, 122 bp, Homo sapiens
cgccgacaccgaaaaggctgggacctgcgtctctggtctgtgggttccggacgaaccgcgcgtgggctcccgcgcggaacgtagaggcgaacgctgggctgccggcgcctggacagtaaaag

SEQ ID NO: 31840 - DNA, 122 bp, Homo sapiens
gggacaatatctaccttttgggttgttgtgaagataaaaaaacacacccatagcacaggtcgtggcacacagtaagtgtgccaatacatgtcagctagtggtatggtggtgcaatagtaggt

SEQ ID NO: 31841 - DNA, 122 bp, Homo sapiens
actttgcacgccgcccagggctacaccactcaccgaaaattgggaggcaggtctgggaggcggggttgagcgcccaccgccttgggcgcgcccgcgccccccgccatcgcggcccccgcgcc

SEQ ID NO: 31842 - DNA, 122 bp, Homo sapiens
tgccgctgcttcgagaatactcatggcctaccctgctggtcccaagagcctcctacataccgtggcgggcgatgagcgggaggtgtgggccagggagtgtctggtgctgtccatccccccgt

SEQ ID NO: 31843 - DNA, 122 bp, Homo sapiens
cctgtgaagaggcagcgtcatgcggggcgatgggaacacagagactgcagcatggacagacgtttgtgttgcaagcagacacacacctccagggtaaatgtttattccagaggcaccaccat

SEQ ID NO: 31844 - DNA, 122 bp, Homo sapiens
caccgtcagactgagggcgggtgcacgtggctgcagacagcagctgctgagaatgacacgcgactctgatgaaagcgatacagcttagccggtctggctgttcaccgtcctgctgcactcta

SEQ ID NO: 31845 - DNA, 122 bp, Homo sapiens
gtggccgggccgttccctggagagtggacggctggggctggtgcagggaacaggggcctgcgggggctgcgcaggcgggcctccaggtcatgcggggcccctctgctcacagggaccagcca

SEQ ID NO: 31846 - DNA, 122 bp, Homo sapiens
gcagtcgccgggtgggtctctccccagcgacgatttgggtggtgagcgactgcgccttggcgtggggaaaccggcttacctgggggagttctgttcctttccctcccggcaccttggatgcg

SEQ ID NO: 31847 - DNA, 122 bp, Homo sapiens
gggcagtgtccgagcccgaggtggggagagcggcgcagggagccagggaaaaccaaagtccgttccctgcttcaggatcgttttctagatgtgcgcaaaatacagtcccctccccccacccc

SEQ ID NO: 31848 - DNA, 122 bp, Homo sapiens
gtgcggaacgagggacagacgggtttcctcaaagctgcattgtgcctcctcgtggcccagcgcctcccgagcctccctcaagtccactcctttcattattggggccctagaggttgctctgt

SEQ ID NO: 31849 - DNA, 122 bp, Homo sapiens
agggaaaagaaaaaggcagtatttatgcaagaaatctggaaggatgcaaactgctcatcccggttccctaggaagcccccaccctgcttctgagttggaccttctctgtgggccaactccac

SEQ ID NO: 31850 - DNA, 122 bp, Homo sapiens
agttttgtggggagcgcagggccgtgctctcgtgaccaccgctcagccgagtggattcagcgagagttttcagtgtttgcgcctctgtccccgtgtgcctgtttcctggtgaggctggactc

SEQ ID NO: 31851 - DNA, 122 bp, Homo sapiens
gtacccctcctacggttccgattctaccctggcaggacaaccctagctcctcgtacctggcgtggcccgaccaatcgtctgccactcagttgacctctgacctgttagtacccgcccctgga

SEQ ID NO: 31852 - DNA, 122 bp, Homo sapiens
cgggagagaggtttcctgcagccgaaggactcacagctaatctgggtcaggagcggctgccggctcccccactcctggagatgagcgactctgtgacgtcacgggaggcgcgggcggagcgc

SEQ ID NO: 31853 - DNA, 122 bp, Homo sapiens
caacccctccagggacacacactcacttgctctcttccttaattcactcctcactcccttcgacacgaaagggaagggaggtttgggtgccctgggcatccaccctctacctctcagcccac

SEQ ID NO: 31854 - DNA, 122 bp, Homo sapiens
cgcagagccgggagggcgcgggcgcggcgggaggtgtgcggggctggggtgcgcggagagcgcgagggaggagattctgagcgagggaggggagcgcgcccgggcagcagtgcgtgcgctcc

SEQ ID NO: 31855 - DNA, 122 bp, Homo sapiens
gtgggcggggaaagcctcaagcgagtggcgccgccgtgacgtcacatgggtgcgacgcggcgctctaccacgatccggacttctctgtggtgagttggacgactgactagccgggcgataac

SEQ ID NO: 31856 - DNA, 122 bp, Homo sapiens
ggcagcgcctgcctaagtaaaaggcctgctttaatgaggaggctgtggctctgccgtgggcgcaggcgctgggctgagcccggcgcgggctggagctgaggggtcacgtggccaccagggcc

SEQ ID NO: 31857 - DNA, 122 bp, Homo sapiens
gccccactcttatagatcccttccttaggctttgtcagtgttctcacagttttactggggcgtctccttcaggcgacattgatcaagcctcataggtacctgtttacagcggaactcccaga

SEQ ID NO: 31858 - DNA, 122 bp, Homo sapiens
tggcccccggggacgccagtagccataaaggctccttgcgtggtgtgtggtggggcctgacgcctgcgtggcccccaggcaagtcgtacaccatgatcgggaaggacagctcaccccagagc

SEQ ID NO: 31859 - DNA, 122 bp, Homo sapiens
tcacttccctgtggctccaacgcctcaaagtataaccacgcccagccaacgcccggggcacgcctgccagcgccccagggcactcacagacactccttaacacctgcacgtgccccgcccct

SEQ ID NO: 31860 - DNA, 122 bp, Homo sapiens
ttgatcacagctacatccaaactgttcagccatgccaatctcctcagtgtcctggtatagcgagaaaggcgtgagcctctcaggtaggtggagaatctgggcactcactacattctcatgtt

SEQ ID NO: 31861 - DNA, 122 bp, Homo sapiens
tgggagtggagtggagactggcgagtttcgactcccccagccaccccgctgtgggtccgtcggtcaccaccttggcctttggtgagggttgttggggccctgcagtccctggggttcacctc

SEQ ID NO: 31862 - DNA, 122 bp, Homo sapiens
acgcccacgtgtgagcagagaagcaactctcagaagccttctgtgtgttcaggaaatgtgcgcgggcggcttgttcccttttgctctgtctagggtgagcctagatgctgcatctcaaagca

SEQ ID NO: 31863 - DNA, 122 bp, Homo sapiens
agacccaggaggaagggcctgctggcaagatgctggcagggaaccagtaatcagtccttccgggaatttctgagctaagacttttagacctaggtttggaaaatcatcagaaaaagctgcat

SEQ ID NO: 31864 - DNA, 122 bp, Homo sapiens
tccctcacctatcctggagacactacttctgccctggtggatggtctgcagcctggggaacgctatcttttcaaaatccgggccacaaacaggagaggcctgggacctcactccaaagcctt

SEQ ID NO: 31865 - DNA, 122 bp, Homo sapiens
ccgcgcggtgggctgccgggcgcaccttgcgcttgcgggcctcagccgtgccgctccacacgaagcactggtagatggcccgcaggttctgcttccagttgtccaccttgaagctgcccagg

SEQ ID NO: 31866 - DNA, 122 bp, Homo sapiens
cgtcctccctgtgtccgggccgggcgagggcttaatgctatggccagcggggaggcctggcggggcccggcgggggctgcgggctcagtggggcgggtggcgccgctcggccaggcccccgc

SEQ ID NO: 31867 - DNA, 122 bp, Homo sapiens
cgtagtgaaaaggtcagaagccgagggcccagaatgcagcaagcctggcagcagaagaagcgtgggctggggcggaacgggtcccgcggcgccctcaccggtgctggcgtggcgcggtggcg

SEQ ID NO: 31868 - DNA, 122 bp, Homo sapiens
ttccttagaaagggatttcccatcacttaaatcaccctctaggagtgtatgctagaggctcgtggagggcagtgcagccccgtctcccaggttaccaggagacggcccaggctgcagggccc

SEQ ID NO: 31869 - DNA, 122 bp, Homo sapiens
ctgggcacacgctgacgccgctgtcgctttacagaaattgagcgcagccgaggcgggacccgggcgcagagagcgataaaggaaaagcatggtcgtgctctaatcattacagtctaagggac

SEQ ID NO: 31870 - DNA, 122 bp, Homo sapiens
gaaaagggaagacaccatggcttgtgtttaaatacattgccttgggatcacacatctctacgttcattcgtgtcgcataatctgaagactgattgacaaggtcccatgcttgcacagaggtg

SEQ ID NO: 31871 - DNA, 122 bp, Homo sapiens
gcggttaccgtggaaaccgcggccatggcggcaccgcggcaaatccccagccacatagtgcgcctcaagcccagctgctctacagactcgtcgttcacccggacgccggtgcccaccgtgtc

SEQ ID NO: 31872 - DNA, 122 bp, Homo sapiens
agacctttggaccccagttcccctctacaggctagctcatccctctgggtggtcattccccgggtcacgttgagagcgaggctgactgcaccacctccctagctcaagggctcctttgggag

SEQ ID NO: 31873 - DNA, 122 bp, Homo sapiens
cagcggggaaaacacgggcagcaggaagttcagcaggggctgcaggctccagtagaagaccgagggcaggccacagaagaagagcaggagcagcgcgcccaggacgatgccgtagagcctgg

SEQ ID NO: 31874 - DNA, 122 bp, Homo sapiens
cagagaagcaggcagggccagcccaccaaggagaaagccttcaaggggtggggcgggtggcgtggacactaggacctcgccacgtggctgcctcgagccagagcactgtggggaggaccctc

SEQ ID NO: 31875 - DNA, 122 bp, Homo sapiens
gccctggaaggtttgtagtgaacttgtagaaaacggaaaacgtgaccctgcctggcccagcggttttggtcctgtggacccagcagcctggcgtctgacttagcaattctgtgtcactgctg

SEQ ID NO: 31876 - DNA, 122 bp, Homo sapiens
ccgtaggggcccgacaagaagagggaatccctgcagaccaacagcgggctatattgacgacggtgtctgagatcggggaccgtcttttgaagagtcagtccctccttagttgcccgcctcag

SEQ ID NO: 31877 - DNA, 122 bp, Homo sapiens
taggaagagaagacattaaaaagcccagccctgaaagacaggcagccgagctgaaaaagacgcctgcgaacccccaccccgccgcccctcgcctactgcgcccagacggcccctccttgtcc

SEQ ID NO: 31878 - DNA, 122 bp, Homo sapiens
gcgcggtgatatgacagcatgtgaagtgagtgggtgagcacggactcctgagagcgagggcgcacccaatacctggttatctggtactgcagagagacacctagtcagccagcgttgcaaag

SEQ ID NO: 31879 - DNA, 122 bp, Homo sapiens
ggtaaatcaaccatctcaaaccataaggggcattttggagccggccaccagcttccaactcgacccggggccagcaggggcgcctgtctcggtgctttccatgcccgacagccagcaagcag

SEQ ID NO: 31880 - DNA, 122 bp, Homo sapiens
cgtccaggctctcggagccgcggccacccacaccgactttggattagtgatgaggaagggcgggggagaggatcacacaggtcctccacctgctttctgaacagagcttgtttccggggcac

SEQ ID NO: 31881 - DNA, 122 bp, Homo sapiens
atctcggctcactgcaacctccgcctcccgggtttaagtgattctccagcctcagcctcccgagtacctgggactacaggagcgagccaccacgcccagctaatttttgtatttttagtaga

SEQ ID NO: 31882 - DNA, 122 bp, Homo sapiens
tgccctggggctcggtcagcagccccgggaaggtgggcgcgggcgccgggagtgagagtgcggaccacgcctcctcccagcccaggcgccacgacccggacaaggggttcgacaggctccgc

SEQ ID NO: 31883 - DNA, 122 bp, Homo sapiens
aaccagggatagctttaacaactcacctgctttttattgatatgtgtagcttctggtaagcgtctacatatttgagaatgcactctctaatgcttttttattgttgtcaccaaccttcacta

SEQ ID NO: 31884 - DNA, 122 bp, Homo sapiens
tcactaaatgtcctacctcacccctcctccactcattttaacttctaaataaataatgaacggttgcaattggaaaaatggattgctaggtggcctgagatgtggaagagacctgctatctt

SEQ ID NO: 31885 - DNA, 122 bp, Homo sapiens
tataaaaaccccgagaccctagcagggaggaatacaccagcagaaggacacagtggcagacgctggcaggccatcaacggcaggacgagaatgacgcagacgcgaggagaatttatttggtc

SEQ ID NO: 31886 - DNA, 122 bp, Homo sapiens
gaagcagcagcttctgagcaccgggcgcgtgcaagggtacgagggatattacgtgcttcccgtggagcaatacccagagcttgcagacagtagcagcaacatccagtttttaagacagaatg

SEQ ID NO: 31887 - DNA, 122 bp, Homo sapiens
aaactaggccctgaagccagagcctcaggactggctcccgggaatgtttgaagatcatcgcgtatcttggaattgccaggcttcctgctccacagattccagcgctgggcaaatggacacaa

SEQ ID NO: 31888 - DNA, 122 bp, Homo sapiens
taagtttgctccaagctgaaccatttccagtctctctcagcagcacaagcatgaaggaggcggcctgaaggagtgacaggtgccctgtggcatgcagcctccattaaggggccacggggttt

SEQ ID NO: 31889 - DNA, 122 bp, Homo sapiens
accggagctggggagaacaatcactgctgcagaggttggagggggagccgcttcgcggaacggggtgaagctttagtttcagtccggttgtatcttgatagccaagaaatgaaatgcggcat

SEQ ID NO: 31890 - DNA, 122 bp, Homo sapiens
ccacttcggcctctggcggatttgtaccaagcgcatccccatggacgacagcaagacctgcgggcccatcaccctgcccgggggtaacgtacccaccctccgtcccgatccccacctcctgc

SEQ ID NO: 31891 - DNA, 122 bp, Homo sapiens
atagtggtgacttggtgggttctcttaagttatttgcatttggaagtaaatttaccaccacgcctactcacaggccgatctgggtaaagaatgtcttgttccaagttaatgcttacaaacta

SEQ ID NO: 31892 - DNA, 122 bp, Homo sapiens
gtgcctgtggtgccagctactcagaaggctgccgtgggaggaccacttgagtccatgaggcggaagctgcagtgagccatggtggcaccactacactccagccagggcaacagagagaggcg

SEQ ID NO: 31893 - DNA, 122 bp, Homo sapiens
gcgtccccttcagttggcgagcccttgtggggcgagggctgccccgagttaatttcaccacgagcccctcaaactcttgggccactgggaagtttccaggttcttcttatcccaaggcgtga

SEQ ID NO: 31894 - DNA, 122 bp, Homo sapiens
aaatggtgaatgtgccaggtcgggggtccccagaagagggagaggggcggtcggaagcggcgggaaccctctttgaggttagcttcggggtctgggccctgagtccccgcggacgcaactcg

SEQ ID NO: 31895 - DNA, 122 bp, Homo sapiens
cccgtgtggtagcaaagaccctgactttggctcctcgctgggtcagtgtgccaagcgggccgtctgccctgctggggtccaggagggcctgcagtgaagcagtggtgagcgtactgggagca

SEQ ID NO: 31896 - DNA, 122 bp, Homo sapiens
ctgctgttgctggagccgccgaccccgcgaccgccgccccatagcccacgcggccgcgcacgcagcacgcagaaaccggcccgccacggccagaactctagccctacacctcccgggacttc

SEQ ID NO: 31897 - DNA, 122 bp, Homo sapiens
tggacgccggagctgtgcgcagtcatcctgagccagcccgcggggcccgatcggaagggacgcctctcctaagagctggcctggagtcctggagcctccaagcgggcaagtaggggccgcaa

SEQ ID NO: 31898 - DNA, 122 bp, Homo sapiens
gatcccccagtggccagtttgaatacatgtgcacttctaggaaatgccaccctacaggttcgacagctcgagctcccccgccctctttcggaaatcctcagatttgaactttagtaaaatga

SEQ ID NO: 31899 - DNA, 122 bp, Homo sapiens
aggtctgcagcttcactcctgagccagcgagaccacgaacccaccagaaggaagaaactccgaacacatctgaatatcagaaggggcaaactccggacacgccgcctttaagaactgtaaca

SEQ ID NO: 31900 - DNA, 122 bp, Homo sapiens
acaaacatcccacacccttccccatcccaatcaagataatgacatcacaaatgcagatgacgacagatctaatttcaatagaattttgaatttaatgccatataaataatttagttctcatt

SEQ ID NO: 31901 - DNA, 122 bp, Homo sapiens
tggctcgaacccctttcctcagccgttctacttttacgttccttttctcagtctaaaagtcgagttccgctcttcggaggcactttggaaagttcataaaagtatgaagaagtagaaaaaaa

SEQ ID NO: 31902 - DNA, 122 bp, Homo sapiens
gactcagtgacttgtgtttattctcagaaaccagagtccacagcgggtgaggggtcaccccgccctcctatagctcggctcctctgtggtgccatcagattcggatgtggaaggtgctgtgt

SEQ ID NO: 31903 - DNA, 122 bp, Homo sapiens
cggtcgattttatggctgcaaaggagccgcagacacctgccgtctccacgccctccacgccggtccgcccccagcactctgcaccctacacctggctccccaggcaaagcggccccgccagg

SEQ ID NO: 31904 - DNA, 122 bp, Homo sapiens
tggctgtggttgccactcgggttacatctggcacagaagtcggcagtgccagggccggcacgggctcctttccagcaccgcggcagaatttgatcgcgcttgcccggcccagggctgcttcc

SEQ ID NO: 31905 - DNA, 122 bp, Homo sapiens
atggcctcacctgatcgagggcttcacctgggcctgggatgacggccacacagctaaccccggcaccccaattctcgctgagatgcaggacgtgaggaaggagggggaagggatatcagcac

SEQ ID NO: 31906 - DNA, 122 bp, Homo sapiens
tacataattctcactctcccttcctcctcagttgaagattaaagtggccggcgataaggacgtgaaattgccgttaggctcatcctgggctaaaagggattgttaaaaagactttggatttg

SEQ ID NO: 31907 - DNA, 122 bp, Homo sapiens
ggtcgcggcgatgtatcctctctgggtccctggtgctggccccgtttcccttgtcaacaccgaggctcatgtttcatgataaggttttgaaacctaacctttgcaaaaaccccacagatgcc

SEQ ID NO: 31908 - DNA, 122 bp, Homo sapiens
ctgcaatcccagcgtggcccacatctccaatcccagcgtggcccacgtctccgatcccagcgtggctcaagcctgcaatcccagcgtggctcaagcctgcaatcccagcgtggcccacgcct

SEQ ID NO: 31909 - DNA, 122 bp, Homo sapiens
ggaaggaggccccagctgtgtaggagtgccgggttatactgaagggaagtgacgacacagcggaaagccaacagaggagccagtagctctgactcctgtcccaggttatgctgagtcccagc

SEQ ID NO: 31910 - DNA, 122 bp, Homo sapiens
cttttgatctgcttgaaagaatcctccttaattgcccagtcaggcactccagcggctgggcgaaagttttatgacccaggattcccacagcccgtaatacacacgctcccagaagccctctt

SEQ ID NO: 31911 - DNA, 122 bp, Homo sapiens
gtaaggacccggtggcggggacagggtgagcacacagtccaggtccccgctgtaaggacccggtggcggggacagggtaagcgcacagcccacgtccccgctgtaaggaccaggtggcgggg

SEQ ID NO: 31912 - DNA, 122 bp, Homo sapiens
gtctagtagtgcctgtgcccctgggcagattggagagaagagggacgactggagaatcgtcgagaaccagcggagaaaagaaaaagcaacgtttaattctagaaggtaggaaacggagggga

SEQ ID NO: 31913 - DNA, 122 bp, Homo sapiens
cgcagctctacagaagcacgcgcagaaggcactgtcacctccagcagggcctggccctgacgacctcggctcagccaccccatgggagctacattgtccttgtcctcaccttcattcccctc

SEQ ID NO: 31914 - DNA, 122 bp, Homo sapiens
tgttgtcactatttagtacgtttatccaatagtgttaagatgagcgtgtctacccaaattcggtgcagagctcttaggcaatgtaaataaactactttgaagattcatgtgttcatatgaag

SEQ ID NO: 31915 - DNA, 122 bp, Homo sapiens
gggaaaaaggcaaaatgagagtctgattcccaggcatgtgcagcgcccattgggacataacggcagtgcggcgcgagccagaggaatgggctggaaccggatctgtttccagacgcagaatg

SEQ ID NO: 31916 - DNA, 122 bp, Homo sapiens
gagcgcctcgcgcacatcgctggagcgccaggccccgcaccgcggcaacacaatggtgcacgtgtgctggcaccgcaacaccagcgtctccatggtggacttcagcatcgcagtggaggtat

SEQ ID NO: 31917 - DNA, 122 bp, Homo sapiens
aggtcggcagcttcaaaaactaaggcaccgggacggcgggggcgggcgagatgggcgggacggctgcggccaaacaaaaccagccggagagttcccgggcaggcggccagccgagggatgct

SEQ ID NO: 31918 - DNA, 122 bp, Homo sapiens
cggggaggggcggcctgccgaccggcccaccccagggcgttcctgaagggcgtcctcggccgcccccaccgcctcccagatgtactatgcggtttcccaggcgcgcgtgaacgcggtccccg

SEQ ID NO: 31919 - DNA, 122 bp, Homo sapiens
agtaaatatgtttattacgcattcatttgctaagaatcatcaagaacccaaagttagagacgtttcgtggttgaactttctccctactgtctagtagaattatatggggattctggatctgt

SEQ ID NO: 31920 - DNA, 122 bp, Homo sapiens
cgagtcacgctgactcagcacattgcctctgcctccccgccgcgcccgcactccctggcccgccagccaacagcgccccacgagagccgcagcccccagcctggccaatagcaggtgagggc

SEQ ID NO: 31921 - DNA, 122 bp, Homo sapiens
atacaaaagggcgaagagaatgtcaatccagaatgatgcaaatcccttcattattactctcggtatacgtcgttactttaagatgttaaaaaagagtaaaccaaaaagcttcacgttcattt

SEQ ID NO: 31922 - DNA, 122 bp, Homo sapiens
ggacacagtcccgtgtgtcccagcaccggtgccaccctcctaagccccgggcaggcagtacgtacatgcggaccccgcctctcaaagcacgtttatggaaatgaacagggtggggtggcccg

SEQ ID NO: 31923 - DNA, 122 bp, Homo sapiens
aaagtcacaccattggtgagaatctcattaggccagcatgtaaaattacagtgagtaaaacgacaagataagatgcagtataagaagttgacaaggttccactttcaacagtatagctcaac

SEQ ID NO: 31924 - DNA, 122 bp, Homo sapiens
ttgggtcccctgaggcatctctccaggcctctgcctggggggtctgcattagtctgatctcgtagttcatgataatttcctttattagggattattattttctccattgtctcttttctttc

SEQ ID NO: 31925 - DNA, 122 bp, Homo sapiens
aaagtgagggtgaagatcagcacttaccaggagacacaggtgacggtcccagggttcagtcggcctgccctcttcccttgattgtaacaactaaatggggcattggccaccaatcccgggac

SEQ ID NO: 31926 - DNA, 122 bp, Homo sapiens
gaacgctgctgtcatcactgcacgtggacacatcatcaacctctcagcgtgacgtgccctcgtgctttcaggtaaaacactacagagaaacttcctgttggcaggtggaccccgcactccct

SEQ ID NO: 31927 - DNA, 122 bp, Homo sapiens
gttcgggagggtgagaatggtataaatttcaaaaacaacgaaaccttcttttgccccctccgcagcagtcgcctccgggctttattgcaagtttacggtaacgagttcatctatttaattcg

SEQ ID NO: 31928 - DNA, 122 bp, Homo sapiens
aaaccccgagggtggctcgagttgccgcatgcgctctgagaatgcaatttagctcgtcgccggcctgccctgcgggaggataaagggaaaggttccgcgcgtgcgtatgctcgtctcttggc

SEQ ID NO: 31929 - DNA, 122 bp, Homo sapiens
acttccacagacagacagacagactgccagggaccctcctcagccagcctcttcacatgccgaggccacagcactcagtgtggttgggtccagttgagaccctgctgctcatgacttaaggc

SEQ ID NO: 31930 - DNA, 122 bp, Homo sapiens
atccgtaacagcccactggctttgaccagaaccgactgagtgctcaggaccagaaccgaccgagtcctcagttacatcactcagctgagtgcctgtgtcgtggacagaaaacccagtggtct

SEQ ID NO: 31931 - DNA, 122 bp, Homo sapiens
cagccactgctctaggccaggtgtccacatggggaataggtccaggccctctatggctctcgcaggagtcagggaggcagataaataacatatcacaaagacagaatataagaaatgcctgg

SEQ ID NO: 31932 - DNA, 122 bp, Homo sapiens
gcatccccgaagtcctgaccgagttgggcagtctgaagccttcggtcgacccgaacgattcgagccttacactctatctcgtggtggcagtggctgccatctcctgtgtcttcctcgccttt

SEQ ID NO: 31933 - DNA, 122 bp, Homo sapiens
ccgggcccggcggctgcgttgggtcgccccaaacccggtgagcgtacgagactgttgcttcgctgtatgtctcatgtgcaccccctactcaccggtcccgagctccgggccgcgaatcccgg

SEQ ID NO: 31934 - DNA, 122 bp, Homo sapiens
atcaagttcctgataaatgttagagttagcctgactcagcatgagcctggcttctcctgccggccggcacaggggtgggtaccatgcacatggtctccccgccctgcctaccatctgctgcc

SEQ ID NO: 31935 - DNA, 122 bp, Homo sapiens
ccctgggaggcgcccgggccgccgcgcccctgccccgccctccacagccacccctggagccggagggtcccaccgggtcacacatcccgggctgtggactcccgatcccaggttctttcggg

SEQ ID NO: 31936 - DNA, 122 bp, Homo sapiens
atttctaacaggttacacccaactccaagtgagaagtcatttgaaagagtcccagctggacgtcacaggcccctaatgagagaacacaatgaagccagtatatccacatgaaaaagttgaat

SEQ ID NO: 31937 - DNA, 122 bp, Homo sapiens
aaaagatcagaaaaccaaagttgaaaaatattttaccttttcaaagtaattccaggtttccggcttagagggacattaatatatgattaatttgtttgatagctcagtttcaagcaaccaag

SEQ ID NO: 31938 - DNA, 122 bp, Homo sapiens
cactgttcagggcaggagtttgcatttataagacagttttgctgatgcaggcactgttcacggctctggagaactgtcatgtaagaaaaacccagcccagcaatatcataatagagtttagt

SEQ ID NO: 31939 - DNA, 122 bp, Homo sapiens
ggcatttttaggtaaagtttcttccactagttgaattttcatgcagatatttttccttaacgttggtgccagtcaagcaaagagtattatgatggaaaagaccagtccaagccccatcgctc

SEQ ID NO: 31940 - DNA, 122 bp, Homo sapiens
cataagactgcaaatggccattgcaactgccatttcaaatttctgaagatgtattagaaacgaagaacccactgccgtcgggggaaagaggacctgggcagatagaaggaaagaatggaaga

SEQ ID NO: 31941 - DNA, 122 bp, Homo sapiens
gcgacggaagctggagaaggcgcggccgggccagttctcttgagaagtgaggcccggccccggacaggtactgccccctcagccccaaccccagctgccgcgtcccctctgctgcctgcaga

SEQ ID NO: 31942 - DNA, 122 bp, Homo sapiens
tccaaaaggtaaacaccatttcccccaagcgaccccaatgtttgctgaagcaaaacctctcgtgtgagccggcgggcggcttcacgacaggcgtgagaaggccatggccctgtgtgggtgag

SEQ ID NO: 31943 - DNA, 122 bp, Homo sapiens
gccccagcatccggatcagggctcgaggcagtcgacaaactacacccgagctcgagcaggcgcgcccctgaacccccgggactggggctgggggcgggggcggcgccggcgcggagggccca

SEQ ID NO: 31944 - DNA, 122 bp, Homo sapiens
tactaacacgtgtgcgggaggattcctgttctcggcatggttcacgccgggctccggcagcgccctagtacgtaaggggctgcactggagtgtggactgcccggtatccttagagaaagttt

SEQ ID NO: 31945 - DNA, 122 bp, Homo sapiens
tataagattacccgggggcatattaaaacaccgattgttgggctgtccacccacagtttccggttcagtatgtctgggatgaggtctgagattctcatttctaacaagttcccatgagatat

SEQ ID NO: 31946 - DNA, 122 bp, Homo sapiens
atagttctgtttgggacagaaggcatcaacctcgtaagacccagcgatcagcagagctcccggagagtgtttcttaatctaaaggtcatgagtcgggcttcaaagttgtcttgtcgtgcgta

SEQ ID NO: 31947 - DNA, 122 bp, Homo sapiens
aggctgcagtgagccgagactgggccactgcactcctgcctaggcgacagagcgacattccgtctcaagaatcagtcaatcaaccagacctgagcctaccagtgagtagtactttttacacg

SEQ ID NO: 31948 - DNA, 122 bp, Homo sapiens
tcgccttcttcattggcggaagctgggagccgagagagtgagccgtgcgcagatgtgcggcggtggaggtggcttttgtttctcctccgcgccccctccccccccgccccgcacattgcctg

SEQ ID NO: 31949 - DNA, 122 bp, Homo sapiens
ggcatacccctgcctgcttcagcccgaggcttggtaccactgctgggggaaggtggcatgcgtgcatcccacgggcagcatggagggagccacgactccccaaaaatcctgtcgctaagaga

SEQ ID NO: 31950 - DNA, 122 bp, Homo sapiens
tcaggaagcctccggaagttgcacagcgtcctgacgctgtgggcagaggggatggtacggcgcccacctcccatccctttccctctacactcgccttaagaatcatttcactttggcagttc

SEQ ID NO: 31951 - DNA, 122 bp, Homo sapiens
tttgcattgtttgtgtgcggcatcttcagtataaaaggccagcgcccacggtcccaggagcgcctccctccttctctccctcctccctcgggccattctctccctccctccctccctccctc

SEQ ID NO: 31952 - DNA, 122 bp, Homo sapiens
gcccccacatcctgaggggaccggctgctcttggcctctcgcctcgcccatcgctggccccggccgcgtcccagggcctggatgcgaacttggggcagccctcacccttctgggcagtttgg

SEQ ID NO: 31953 - DNA, 122 bp, Homo sapiens
caacaggtgagcgtttcctggagcttttctgagtggctcctgacccttgaggtccagcggcgcgggagtccgttgtgaacgttgcgaacgttcggagtggcggtcacgaggcgcgctcagac

SEQ ID NO: 31954 - DNA, 122 bp, Homo sapiens
gtggggacgtagggaccagcgacactagaacagtgacgtcccgtagcgtcctgcctctgccgtcagccctcagaggccctgggctgccggatgtggctcatcctcatttcccttttgaaggc

SEQ ID NO: 31955 - DNA, 122 bp, Homo sapiens
gttccctgtgatgaacttcaagagggaacttactgggggaactcaccaccaatatttcaacgtaagttctttctattttccacaagtgtcagccagctgagaaacatagagggacagtacaa

SEQ ID NO: 31956 - DNA, 122 bp, Homo sapiens
ttgcatttcagaaattcaaagaagaattggtaccaatcctattgaaactattccaaaagacggagaaagagggaatcctccctaagtcattctatgaagccatataactttgagaatcagca

SEQ ID NO: 31957 - DNA, 122 bp, Homo sapiens
ttcccttttcccagaccactatcatggccgtgcagtttgacgggggcgtggttctgggggcggactccagaacaaccactgggtgagctcaggacagatttgtgaaaggtcttcccatcttc

SEQ ID NO: 31958 - DNA, 122 bp, Homo sapiens
gcagagcccctcggcccgcatctgccaagtgactgaggatcgagcgacagcgtagtggggcggaggggctggaggcacggccggaaagggtgagcggcgccgtggctcccccgctatttatt

SEQ ID NO: 31959 - DNA, 122 bp, Homo sapiens
gctggttggaactgactgaaagtggctgtagcaggacccaaacttcctcgcagtcagctccggagtctgaggacccaaatcctccttgtcccagctcggctcttagtcccctcgagcgttaa

SEQ ID NO: 31960 - DNA, 122 bp, Homo sapiens
ccctcttttgctcattgacattcattcattaattcattccaggtacacttgatgaatgcccgctacttataaagcaatctaaataataaggatataaagatgaataaggcatagtctgtact

SEQ ID NO: 31961 - DNA, 122 bp, Homo sapiens
ggtgctcggtcccaagccccggaggcccgggaaggccgcctccggaggagcccccgcagacgccatactaaaagccaaaatggctgccccgaggaggcccgcaccgcgtagccagtgaaggt

SEQ ID NO: 31962 - DNA, 122 bp, Homo sapiens
catgggatctggaaacagagcggaggaaggagctcgggaatggtcttgctcaatccttcccggcctctgctcatcggaatcacccagagggcttttaagcttagacaaaacactctgatgtt

SEQ ID NO: 31963 - DNA, 122 bp, Homo sapiens
tcgcgggtcgggtttcccgccagctcaggtgggtttttgcccgggcccctcctctgcctccgtcacaggtgagtttagttccaggccctacgagcagtgcccacaccctcccagttccgcct

SEQ ID NO: 31964 - DNA, 122 bp, Homo sapiens
tggtctcaggaacaaagaggagggcggagaggggctgtcctgaaggctctgagactcctacgaccccaggaaacttacctcggctcggggcgccccccccgacttggcgcagagcctgcgtc

SEQ ID NO: 31965 - DNA, 122 bp, Homo sapiens
aagatcggtctcactgtaagtctgctatctgtattttcccattcttcgtctgatagccaccgacattaatgaccagctcattacatgttgaggtgtggggagatgggggtagaaccccgtca

SEQ ID NO: 31966 - DNA, 122 bp, Homo sapiens
gcctggacccaggagccaggggtatcccacaagtcctggaggctctgaacgcggcgctgacgccgaatacctgtgaaaaagactcggggaggagacccgcagaccgccgagcttctgccgcg

SEQ ID NO: 31967 - DNA, 122 bp, Homo sapiens
atgtgcacgcaccctctccctcatccaccgctgtcacctcctgctgctcttcctgctgctcgtgtactcgttaggtgcggacccgccacctcttttgtgaagcagcagctgaggagactccg

SEQ ID NO: 31968 - DNA, 122 bp, Homo sapiens
ttgaaaggatgtggtttcggcctttgacatcagaggagaagctcagctatgttggctgaacgttgatagaaagataacgttgaaggcaagttgcccttgagcagctctctgaagatcaactg

SEQ ID NO: 31969 - DNA, 122 bp, Homo sapiens
cctctgctctgtctcggggaagccgggggtggcagatccagctggaagtgaactgacagccgcgccctcctgcacacatgcatgcacgcgtgtgggaacgagcccagccgccatctgcactt

SEQ ID NO: 31970 - DNA, 122 bp, Homo sapiens
atctcattaaagaggtaactcgatgtcttgagactgcacctaatcacatcctatcagtcacggtttcagatatgaaactagagcatgtgagtgggagtgaaatgaaacttccctcctttgtg

SEQ ID NO: 31971 - DNA, 122 bp, Homo sapiens
gacctcaaacgcgcttgttcatgacacccgagttaaatggagactttgcagtcgcttgcacgcgtggagcctcctcttctcgcgtgggccagggttggaaataaccgttgtggtaggttcca

SEQ ID NO: 31972 - DNA, 122 bp, Homo sapiens
tgattaccactccagctgctgggaacgggcgagaaagaggaggaggcgagaaactcccaccgacccacagaggtgagtcccgggcagagcatcctccatccctgcctgcctccctccctccc

SEQ ID NO: 31973 - DNA, 122 bp, Homo sapiens
ggcagggccacacgctgacctgcctcagcgtgagagaggccagtgtgaggcagggccacacgctgacctgcctcagcgtgagagaggccagtgtgaggcaggggctcacgctgacctccctc

SEQ ID NO: 31974 - DNA, 122 bp, Homo sapiens
ccacccctgcccccatcccccaccaccgcctggatcccccgcacttcgcccgaccaaggccggggccgtagtttgcatccggactggatttggatgcagccaatcctcctttggctgatgga

SEQ ID NO: 31975 - DNA, 122 bp, Homo sapiens
tattgtgcaacaatgatatctgttgaaccaataaaatcaaaagctactgtcagcaagctgcgtttatatacctcttaaatcagtaaatcttttttcttcttttaaaaccaagatatgcccac

SEQ ID NO: 31976 - DNA, 122 bp, Homo sapiens
agcctgacaagaagagtttcttgggggaaagaagtaggtttaaccctgaaaaactttctccgatcaaatgagaagaggtccccagaagcggcaagtcaacatcacagtcacaaatgtttatt

SEQ ID NO: 31977 - DNA, 122 bp, Homo sapiens
ctcagccacgggctgctgggaggaataggggagctggccaggaaccaggcccagaagggtcgagttatcccaaaaatgcagctctgggagagccctctcagggctggacaagaggggacact

SEQ ID NO: 31978 - DNA, 122 bp, Homo sapiens
taaaggggcccatgataatgtacatttttaaatatgcattttcagcttcctttgaaataccgaaaatccagcagcattgactcgtggctgacaccctataacagtgtgcactcttggttgtc

SEQ ID NO: 31979 - DNA, 122 bp, Homo sapiens
ggaatcgtatgggttcttctgcccaccgttgtgactaagaatgcacagggacttggttctcgttgcacctttttttagtaacatgtttcatggggacccactgtacagcccttcattctgct

SEQ ID NO: 31980 - DNA, 122 bp, Homo sapiens
tatctgaactcttgagagttgaacagaacactccaaaatttgaccagtgttgagaatgggcgtttcctactggtttcatttgtgtgctcaactctgttcttatttttttaatgatgacataa

SEQ ID NO: 31981 - DNA, 122 bp, Homo sapiens
gagtggtggacggactctgttctccccgcaaaagccctttccagggtggcacatccacgccgttagtgcccggctgcagggagaagctcaaatgacaaatgaggcttgaggtttgccgcgtt

SEQ ID NO: 31982 - DNA, 122 bp, Homo sapiens
cccacctcgcagggcgcgcgtggagcccgagtgcaccgctttgcgatggcgcggagtcggcgaagtcgggggccccaacacccaccccggcccagggacgccaggagaccgtggccgctgcc

SEQ ID NO: 31983 - DNA, 122 bp, Homo sapiens
gcggctgcgggggcggagggagctgaggccccgtgaggacacgcgcggtggtggcggtggcggcgggcgcgcggccgcagccggaggaggacggcgggagcgtgcgaggagctggctcggtt

SEQ ID NO: 31984 - DNA, 122 bp, Homo sapiens
gcgggcagaggcggcggagtgcgggcggtggcggcggcggcgcggggaggtgtgcgcggacgccctgcccgctgccgctgccacccccggcccggccccgcccgccccccgagccccggcct

SEQ ID NO: 31985 - DNA, 122 bp, Homo sapiens
gccatccacaaggtgctgcagctcatgctgcggcgcggcgagatccagcatcgcatgcagcgcaaggttctctaccgcctcaagtgagtcgcgccgcctcactggactcatggactcgccca

SEQ ID NO: 31986 - DNA, 122 bp, Homo sapiens
tgcctgggaaacatgacctataataatgttaatagctatcacatactgaccacttactatcgactaggccatatactgtgctgagtgagtcacaagtagtggctcatctgatccttcaaata

SEQ ID NO: 31987 - DNA, 122 bp, Homo sapiens
catatggaaaacataagacaccactaacaaaatgaagaattttaattcccacggaacctacggctgagagttcttctcttgatcccaactaaagatcacctaccaaccagcattctttttga

SEQ ID NO: 31988 - DNA, 122 bp, Homo sapiens
agggggcccaggtgaccgccttccgcgcgcacacagccggccagggcgcacccggaagcccgttacccaaaggcaaggcttgttccagcctaaagcaaactcatccacacaacgtcgctagc

SEQ ID NO: 31989 - DNA, 122 bp, Homo sapiens
cccgccgctccacaggcgagttttaagagatttctcacaattgtcaagtccgcaagtctccgtgcgtttgcttttatttgggccgtgcgttcaaatgcgctcataattctttctgaccctca

SEQ ID NO: 31990 - DNA, 122 bp, Homo sapiens
cgccgaccctctaaagcaaacctgcacaccctggggcagctgaagctctcaaggcggtgccgagaacctcggctggggcgggctggccagcagcgtctacaccccagaacccgcccgcgccg

SEQ ID NO: 31991 - DNA, 122 bp, Homo sapiens
gaaatagcggctgcttcttttccagggatttatttaatggggatgtgttcaaggcaagagcgaattcagaaggatatcgacgtcgtgatccagaagtccagagctgagaaggactgcctgtt

SEQ ID NO: 31992 - DNA, 122 bp, Homo sapiens
gaagggcccactgggcgctcacttcgctccagagcctcgcctggtttccgcttcgggatccggtcacccaacccagctctccagttgctgctgtttctcgtgagactgtcagagtgaagggg

SEQ ID NO: 31993 - DNA, 122 bp, Homo sapiens
tgtggagggtctatcacgcatgcgtgcgcccgccaagattccttccgccgtcttctggaccggcctcctgcaagtcctaatctcagcccaaattcagcgctggcttccatctggagatcttt

SEQ ID NO: 31994 - DNA, 122 bp, Homo sapiens
gggccaagcccagtgccgcagctaatggcttcaaagcagccagccagccctgggcacctgcgttttcgctcttggagccaaccgttgccctgaggaccccgcaggcccccagccagagcacg

SEQ ID NO: 31995 - DNA, 122 bp, Homo sapiens
cagttagttcgacctgttcacgacccagtgggttcagactgcagtccttttccagggagccgtccacatggtattgggaacgcatgacgaggagggtgtgccctgtggccttggctctgcag

SEQ ID NO: 31996 - DNA, 122 bp, Homo sapiens
tgtcaaagactgaaatagcagaagcctaagctaggaagaagcacaaaggaatgaaggctgcgtctcccctgaccccacaccccaggtggctggtgaattgccactgttgggtcttcctggtg

SEQ ID NO: 31997 - DNA, 122 bp, Homo sapiens
tctgcattggtgcagccaggccttctcttatagggatttatggaagattaattgagattccgacacctttaaaagtctgagacaaatatttaccatctattctctttgagagctgctacctg

SEQ ID NO: 31998 - DNA, 122 bp, Homo sapiens
tattgctatacaacaaattactccagcacttcgtttattatctctaattgtttctattggcggggaatttagacagggcacatcttgtctctgcacatgatgtctagggcctcagcttaaaa

SEQ ID NO: 31999 - DNA, 122 bp, Homo sapiens
acaggtcaagggtggcgaggagtcggcgggacagcagggacaactggaggcgatgcacggcggcgtggcccgcagggtggtgggaccggacccttccgtcaacacctgcgtgagtcagagcc

SEQ ID NO: 32000 - DNA, 122 bp, Homo sapiens
aaggcctggcagctcatttccttttactgctgaataatattccacggccacgtcccaccgcgtatttatccactcggtgctgaaggacatctgggttgcttccgggttttgaaaattagaat

SEQ ID NO: 32001 - DNA, 122 bp, Homo sapiens
gctggcaattcagttcaggatccttcctgcaggaagggctacaagtgtgctgacactacccgccatgtcccagccatgggaggagatgactcaggcgttcccccattaacttcagagggtcc

SEQ ID NO: 32002 - DNA, 122 bp, Homo sapiens
ctgagtcggcggaatgcgccctgactccccctggccgagagccggctcagaatgaaagagcgcggagtgggaggtctgggaaatggcagtatttgtattagggagagaaggaaacaggagtg

SEQ ID NO: 32003 - DNA, 122 bp, Homo sapiens
tttttttttctagactgtgtcttccactgacacccaggctggagtccagtggtgtgatctcggctcactgcaacctccacctcccgggctcaagtgattctcctgcatcggcctcccgagta

SEQ ID NO: 32004 - DNA, 122 bp, Homo sapiens
gaaggagcaagtcctcctggatcttagttaagggacacttgagggtttcagagcaagacccggggcctagggagagccagggtggggtgcctgcccgccagagcctggtcttctacggccag

SEQ ID NO: 32005 - DNA, 122 bp, Homo sapiens
ctgtacttgagttccatgtgttggatgcacccactggaatttttctttaacaaacagacccgcggaacttgttagagagcccggcgaagagttggctgctctccccgtccacacatacgata

SEQ ID NO: 32006 - DNA, 122 bp, Homo sapiens
ccccgagcctagggggcggccggggcccatcggggtcctcctgatgaaaagcagagcgaacgaaggtaggcatgcttgatgtgggaagaaaagcactgttgtgatatgaataacctttgttt

SEQ ID NO: 32007 - DNA, 122 bp, Homo sapiens
acctcaagtgatccaaccgccttggcctcccaaagtgctgtgattacaggcatgagccaccgtgccccctggtttcatattttaatagggcacttgaagaaggcttttgtgcttgaacagag

SEQ ID NO: 32008 - DNA, 122 bp, Homo sapiens
ccgtggccaaacgctgagatgaaaatgcagttcagaaccgattttgtggatttcttaagtcgaataccagttgagctcacagctcaagcagatttctttgatgaacatcaaagttgcagatt

SEQ ID NO: 32009 - DNA, 122 bp, Homo sapiens
cgcggcgggccgacaaccgaacctcagacccccagcaccctcccaggaaccgcggtgggccgacaaccgaacctcagacccccagcaccctcccaggaaccgccgcggccgacgaccgaacc

SEQ ID NO: 32010 - DNA, 122 bp, Homo sapiens
gggtttgcaacaggcagtcccatctgggcaaagtagacactccaggacatcagatctcgccggtggcaagtgggatttatttcatgcaatgggtccatgtaagtcttttcccacatcagtgt

SEQ ID NO: 32011 - DNA, 122 bp, Homo sapiens
cgcagagcctccagcagcagggcgtgcaggtgagatctccgcgggggaggaaataagagccggaagacacaaaagggttggcagatggtcgggccccacaggcccccctagcgggaagggag

SEQ ID NO: 32012 - DNA, 122 bp, Homo sapiens
ctggtggggtggcccagatggcagcagggtaggggccctgtggtagtctcagcttccccccgcccacctgcatccacacactcacgcatcgaagtccctacacctggcaaagttctgcccct

SEQ ID NO: 32013 - DNA, 122 bp, Homo sapiens
ccatgacggagccagggtcttccgcctggcctctccttccagtgggtgccccagctgggccgggaagctgagaaacaggtttcaggggagtttcctgtgtcagcccgtcaactccctcccct

SEQ ID NO: 32014 - DNA, 122 bp, Homo sapiens
cctctgctgtccatgctaagcacaggttcaaccagcttcataggcactgaacatcctctgcgtcatgcttttcattcctgacacacagttcaaggaaaaacaaacccaaagtggcttttcct

SEQ ID NO: 32015 - DNA, 122 bp, Homo sapiens
gtgaaaacttgcaggtcacattgggcaggctcccaaattcaccacctgtggaaggtctttcgattggcttacatcctgtccctgagtaaagagtctgattgtgagttcatgagtgcttcaaa

SEQ ID NO: 32016 - DNA, 122 bp, Homo sapiens
caccgcttgcaatgataggaaccctagcgatcctgctccagagatgaatataagctatagcgccagctgtacagaagtgcagtttcttagatgaacagacagataagcacttactggctttg

SEQ ID NO: 32017 - DNA, 122 bp, Homo sapiens
tgtaatacactcggcccaaagcggtcagaggatggcctggtgggcccggggcaccctccacggaactccctgaatggccagggctgatcccagcctccataggcagacagaaaatgtgaatg

SEQ ID NO: 32018 - DNA, 122 bp, Homo sapiens
tgaatgcctcagggatcaagaggagctaggatgggagaggctcaaggagtgcgtgggactcggtggcttgactggagtcttctgaaggatgcattattttgttttaaacactttcataaaat

SEQ ID NO: 32019 - DNA, 122 bp, Homo sapiens
tctttacagcgcttgctggcctgagcacagacaaagagaggcagcggacgcggttcctgccgcccctggagcccaaggctgcaggagaggcccctggagcacacttccttgccacctgaggc

SEQ ID NO: 32020 - DNA, 122 bp, Homo sapiens
gcttggtggcccagggtcccggggcccggggtcccgtctggcggcccgggattaccgtgacgtcacattgagcctctggccaccttggactgggacacctccggagcctcacagccccgcgc

SEQ ID NO: 32021 - DNA, 122 bp, Homo sapiens
aggtctttgttcctgagtcatgccatgatttctgctgtgctgtgtttcaatttttatcatcgtttaaactaaatttattgtcatccactttaaaaatgcacatcaacaactccattccaaac

SEQ ID NO: 32022 - DNA, 122 bp, Homo sapiens
ctcctgagacaggtcagtgtggggaggcccagctggccgcaggcctgtaccgttgctgggcggggccggaaccttctggccggaggtggagtggctggcctgagatgggggagggctcgggc

SEQ ID NO: 32023 - DNA, 122 bp, Homo sapiens
ccaacctgggcaagatagcgagaccccatgtctacaaatattaaataagtattaaaaagtcgaggctgagcgtagtggttcatgcctgtaatcccagcactttgggaggccaaggcgggggt

SEQ ID NO: 32024 - DNA, 122 bp, Homo sapiens
ggacgagcggctccggctgaaggtttccgtgcttggaaaccgcgcctccgcggaggtagccgttccctgacctagccatggcacagaacactgaaaaccacgaccctgtcggatccatctta

SEQ ID NO: 32025 - DNA, 122 bp, Homo sapiens
tcacgtgccgccttccaggccacagtgaagacttttcatgttattctaggtgtgatggggcgccttggagtgtttcaacccggagagtgacatgatctgatttatgtttataaagtgcctgg

SEQ ID NO: 32026 - DNA, 122 bp, Homo sapiens
aactgggggacaaatggaggtggggcgcagccaggtggtgggctctttggagggggacaccgaactgcttctaagaggtgacacgggaagaatcttcaacaaaagcatcggacctgatcctg

SEQ ID NO: 32027 - DNA, 122 bp, Homo sapiens
aaagctggggtaagtctctgactttgagtcatttgttgcatccactacaccagctgttctcgaagtgtgatccatagacccctgagggttcctgccattcttctgaggtattcctgaaatca

SEQ ID NO: 32028 - DNA, 122 bp, Homo sapiens
taactttgcaagtccatgtcagtagacccatccaagaaaaaaatgggatgcctgaagaggcgatgaactcccaactgtaggaggttattaagcaggggctaaatagccacctagcagagata

SEQ ID NO: 32029 - DNA, 122 bp, Homo sapiens
ccatgtgaggggggcttttggttccagagagacagcccgagagccccagtgggaaccatccggagacccagaagatcgaattcgcgggacggcgcgttaccttccaacaccgctgggccacc

SEQ ID NO: 32030 - DNA, 122 bp, Homo sapiens
agttcgcagggcttgggagttttttgcggcggaagaagctgaatctaggggctgagtccccgggaagggatggccgcctcttagctttcgccaggagattatcttggagcccagcggccgag

SEQ ID NO: 32031 - DNA, 122 bp, Homo sapiens
cctggtggatatcaccaggaacgggaaggtccccttcttcgtgaagtctgagagacacggcgtgcagtccctcaggtaactactctgtgatcggggctctgtgaaacggttttcctgtttat

SEQ ID NO: 32032 - DNA, 122 bp, Homo sapiens
ctggaacctgccttgcacatggaagcggttagctacttcgcttcagcaaaagttcactttcggacccaagttgggaattactaatgtagacagtgattccttatcatcacacacgtttttta

SEQ ID NO: 32033 - DNA, 122 bp, Homo sapiens
ctggttcatgttttagcggtcattttcagacagcttgatacttaccagctataaaatgtgcggaattagatgggcttgtttctcaggaatgtgagacccctgactccatcccaatctacttt

SEQ ID NO: 32034 - DNA, 122 bp, Homo sapiens
ttcagatcatgctgcagcgcagaaagcgctacaagaacagaaccatcctgggctacaagacgctggccgcgggctccatcagcatggctgaggtgagtgctccgtctggcgtggcctgcgtc

SEQ ID NO: 32035 - DNA, 122 bp, Homo sapiens
aaaacgtaggaaaaataagtcgaagccaagcgagataagatttaggactaaaaggaatggcgtaagatctgtgcacctggtagagaagggccacagatttgactctgaacttgttggcagcc

SEQ ID NO: 32036 - DNA, 122 bp, Homo sapiens
tgaggcgtcgcatccaacccccgcccaggtttccgccccgggccagcagtagccagtccccgagggcccatcttccagccctgaagcggtaaacgcctcacctctagtggcgagtgcgagga

SEQ ID NO: 32037 - DNA, 122 bp, Homo sapiens
cataaacagttgttacaaattcagaagctatttggttttgtgttttaatttcttaatacacgcatggcagatttaaaaaaatcattgttttgtggagctggtgaatacaacagccagatagt

SEQ ID NO: 32038 - DNA, 122 bp, Homo sapiens
ccacaaagactgtatttccaaatcaggtcccattcataggctctgaggttaggatgtggacgtatgttttggggtgccataatttattcagcttaggaggacagtggtttgatacaccgtgt

SEQ ID NO: 32039 - DNA, 122 bp, Homo sapiens
ggtcactctgggtggccacctaccattggtaatgttgagggggcagttgcagggagtgggcgggggaggagggagtggccagaaaggacagttaagcctctgtccccgggcttttaatctgg

SEQ ID NO: 32040 - DNA, 122 bp, Homo sapiens
tggtaacatatcttcggccttcctgagccgctgggctctcagcggccctccaaggcagcccgcaggcccctgtgtgcctcagggatccgacctcccacagccccggggagaccttgcctcta

SEQ ID NO: 32041 - DNA, 122 bp, Homo sapiens
ttacaaaatgtaatcattgttgaaatattccctttgaactgccgtgtccacgggggtctccggctcccagagtcgtgcttcattagaaccccgtcataagcggctccagaagggcaggtacg

SEQ ID NO: 32042 - DNA, 122 bp, Homo sapiens
cagtacacctcgaaaactggcaagcggcccccgtcctcagggactccattgctacttgcacgctcagtcttgccagaatctcacgggatatgtgcaaaaggcaaagaaataagctgtcgcca

SEQ ID NO: 32043 - DNA, 122 bp, Homo sapiens
tccctcggctcccctcgcccaccggcggccttgttcccatctccctcactcccaacccggcggctctcacctcggtcccagactcagccctatggaaggcactacacatcgccccgaaggct

SEQ ID NO: 32044 - DNA, 122 bp, Homo sapiens
cagcgggggctgctgcctaaacagactccgcgggccccatgatggcaaaccccctcgccccgttcatgacttaatgcctcctagaagaaaaggctaaaaacaagacacacagaacaagaaat

SEQ ID NO: 32045 - DNA, 122 bp, Homo sapiens
actgatccagtgaggcatttagcttgccataggccaggctggggccagtaccacggcatccgcaagggtgccaaccttgtttgcctggatgcctccagcagattcgcgcaaactgcaactgg

SEQ ID NO: 32046 - DNA, 122 bp, Homo sapiens
aaaacacagcactggctgcttctttgcgttttccagaatatttcagtggagcagctgttacgggaggaatataaaaatctaaagtaaggctgggagcagtggctcactactgtaatctcaac

SEQ ID NO: 32047 - DNA, 122 bp, Homo sapiens
ccagcacttctcagaagagagctagtgggaggggaagatgactgctttaagtgcagttggcggaaacttggggatcagcccccttggccctggcttggttcttccatgaagaagcatcttca

SEQ ID NO: 32048 - DNA, 122 bp, Homo sapiens
tcaagggtgtggaaattcagtttgggaggattaaaaagttctggagatggacggtggtgacggatgcacagcagtgtgaacggaggcgatgccactgaaccatacaattacaaacggttaaa

SEQ ID NO: 32049 - DNA, 122 bp, Homo sapiens
atcaataccctcagagttgagctggggttaccactctgcagagctatgccaaggagaccgcgaagtggtccaccagcccttctcagcaatttgccccgctccagttaagcggggaaaacctc

SEQ ID NO: 32050 - DNA, 122 bp, Homo sapiens
ctgctgccttcagtggtcccaactgcctgccaaccgtcccaggtggagccttgctgctggcggctcttgtggttgggtgctctcgaaggttactgattcggaaagaacaggctggacaaggc

SEQ ID NO: 32051 - DNA, 122 bp, Homo sapiens
tgaatattcagcgagaggccgggtcgtggacatcctcgagggctcgctccacctatattacgagaccattggctaacctgcccgtcaatccgctagggcagagccaatcgggatactgcgcg

SEQ ID NO: 32052 - DNA, 122 bp, Homo sapiens
acctaagggtgcagtggcttctcaagcaacatcctggggctgccccagagaggccctgggcgggggagggcagtgcccagatttatccaccaatcgcacaggctgctggcactgagcacgtt

SEQ ID NO: 32053 - DNA, 122 bp, Homo sapiens
ggtcctgagtttccccaagtgctcaagagggggaacttcagcctgggagcttactagggccggagaatctgtggttaagctaaaatagctgtcaccccatgcactcttactgaagcctcaag

SEQ ID NO: 32054 - DNA, 122 bp, Homo sapiens
ggaaagctgttcttaagccccggactgagtcagatgcccctctgggtatccctgtcatagcgttgtgtggttgttgatagtctgatttttcaaccttctccatgccctcttgagggtaggga

SEQ ID NO: 32055 - DNA, 122 bp, Homo sapiens
acccctgggaaactagtcatttggacacaagtttaggaagctcccagctccccatagggccgagagacccccacatgaggacccccaatccagagggggctgattttttttggccagcccga

SEQ ID NO: 32056 - DNA, 122 bp, Homo sapiens
agccttccctggagccactgacctgggtgggcaccgaaggtgagattccacctgggcacccgtggtggggaacttgaaggtcagtctctcatgtctccaccctcctcccttccgtgggaccc

SEQ ID NO: 32057 - DNA, 122 bp, Homo sapiens
acttaaacagaattgcccccactctttgttaccactgtgttgtgtgtctgtatgttcaagcgtgagtaaagctacttgattattgttgtctttacgacaccttctctcctgccagagtgttt

SEQ ID NO: 32058 - DNA, 122 bp, Homo sapiens
cacactagcactccggccacacagcagtccctacacagactcttacagacatagagatcacgctggggactcactgctacaaaccaggggagaaggaaggagccagagggagtggctaatct

SEQ ID NO: 32059 - DNA, 122 bp, Homo sapiens
cagcatagtgttttgtatggcagcgtttaaaaattcatttcttgaccgggcatggtggctcgtgcctgtaaccccagcactttgggaggccgagtaggccagtcacctgaggtcgggagttc

SEQ ID NO: 32060 - DNA, 122 bp, Homo sapiens
cgcagtcgctgcaaggtatcagaaatggggtcgggacaggaggcgcagcttgcagtgagccgagatagcgccactgcactccagcctgggcgaaaaagcgagactccatttcaaaaaaaaga

SEQ ID NO: 32061 - DNA, 122 bp, Homo sapiens
ctttgggctccgtgctgttgatgaattccagcagctcatccacatctcggtggtccacggcgggctccccagggatcccgcccagggtgccccccttcatgggcagctcctctttccgcctg

SEQ ID NO: 32062 - DNA, 122 bp, Homo sapiens
gcatgtttgtaacatacttgtgcatgaactcccttataagggttgactgactcctgcctccgttcatcctgctagccagtctggctgggttcagccaggagccctccttccccgccaaggct

SEQ ID NO: 32063 - DNA, 122 bp, Homo sapiens
aggaaaaaaccagccaggaggccccgcacttcggtgttttctactagctctgcctacctccgtctgcgccgtctccctgactagtttgacccttcgagggccgccgtagtgcgtcgcctccg

SEQ ID NO: 32064 - DNA, 122 bp, Homo sapiens
ctttggtggactgtgctcctctgcttttattgctaagccatccttcagacagagagggagcggctgcaagaggtaatgaggtatgtttgtgaaccttgtattcttttacggttacagatgtg

SEQ ID NO: 32065 - DNA, 122 bp, Homo sapiens
ggtggacggcagaacccaacccggtccacctcctctggggcacagacatcaacccagccccgacccagtccacctcctccgggggacagcagggcccgacccggtccacctcctctggggca

SEQ ID NO: 32066 - DNA, 122 bp, Homo sapiens
ttctctttccgaaaaggactttatcttgattaatagcaacatcattttttttgacccagtcggccaagccataactaaccatgaacaattgtaaacatgtcccagcaggtaacgctcctatt

SEQ ID NO: 32067 - DNA, 122 bp, Homo sapiens
cagccgcaaagagccgaggctgccaggcccatttatgtccctcatgtctctagattttctcgtcacccagcctcaaaaatatatgtgtctgcaaccctcagtctctctgccgtttcttgatt

SEQ ID NO: 32068 - DNA, 122 bp, Homo sapiens
ctgcgtggctgggtttggccacaaaaagcggagggcactcacccgagcggaccttggctccggataatccgtttccgggtcaacaaaaaacgtcgcgcgaggggcggggcgcgtacgtgcag

SEQ ID NO: 32069 - DNA, 122 bp, Homo sapiens
aaagatctccacatcagaaaccaagacctggaagctgtaagaagcctggatccacacaaacgactgcttagcattcaaatactcccctcccagaacacttgatgtgtttcttgcatatctga

SEQ ID NO: 32070 - DNA, 122 bp, Homo sapiens
ttttctacttcagccctggtaactccatctcaatatagtaattgtcctcgggggcaaatgcgagtccctgtcacgcttttgacgccacagctttggagttgtcatggaaacagttgaacaaa

SEQ ID NO: 32071 - DNA, 122 bp, Homo sapiens
tccgccctctccctgcccaattctctcagcctggccagggaccaaggccgggttttggggcggacaggggactgccccacacagcggcaaggaggaggagaggccgcgtgggtcaggctgga

SEQ ID NO: 32072 - DNA, 122 bp, Homo sapiens
ggggaggcagacgaggggcgggggcggacggcgggggagatcctagctggcggagaccgacggatggggccgccctaacctcaatgaggctcacgggtgagtcactgggaacattcctcgcc

SEQ ID NO: 32073 - DNA, 122 bp, Homo sapiens
gcattcttgaggatgacgccctcatgacttaagattttcccacaagatcccacctcttaacgctatcacatggaaattaagtttgaatatatgagatgggggaacaacattctgaacacagc

SEQ ID NO: 32074 - DNA, 122 bp, Homo sapiens
tccgggaggcgccatcggtaatgcctgcggcaggggcggaactgctaggtggtctgagcccggctttgggctggggtcgggctgtcacacaatggctagaagtcgtgacttcgtctccttcg

SEQ ID NO: 32075 - DNA, 122 bp, Homo sapiens
cacaggctcacccaggctttcacttcatgggccgactgcactgcctgtgtttcctaaagacggggacagtggggcagtcaattgttgaaatgctaatgactccaaaacttttcataacctcc

SEQ ID NO: 32076 - DNA, 122 bp, Homo sapiens
ttggggcgcgccgtggctagaacacggagagcggcgggcagtgcagccaatgggaggcggcgctgcctagcggctggtaggcggtgcctgcgcgggtgttaggttagcgcgaggcgtgacct

SEQ ID NO: 32077 - DNA, 122 bp, Homo sapiens
cttctggcattttgccgtggtcgtaatgcaggcttggggttggagagccagctggagggacgggtcccgccgccagctccctgccacgcatgaactcggatacatctgttgacaccccggtc

SEQ ID NO: 32078 - DNA, 122 bp, Homo sapiens
ctgttcctgtgggatctcctgggagtagcaatgtccctctcctgaagttccctgctctctcgaggcagccctgtctacccagtcctcccctttcagcttctggtaatgggtcccttgccagg

SEQ ID NO: 32079 - DNA, 122 bp, Homo sapiens
tggtgaaggtggtgagcccttctgaggccctgatagaactttccaggagttcatggtccgcggctccagcttctcactgtaaagttgtcatcctggcagaggcagccaatgcttttcattct

SEQ ID NO: 32080 - DNA, 122 bp, Homo sapiens
tatgttgattacattattgcaatacatgagaatagtctgatgtagtaagtcagttggattcgtcatgtgttgggttaagatataagcatatataagattaatttcaccagtttctttttaca

SEQ ID NO: 32081 - DNA, 122 bp, Homo sapiens
ggatatctcaccctcgatgacatccaaccaggtccctcatcctccaccatcacctggtgacgtctgatcaccctgcctgcctagagcaaggaccctgtgaggtgggtttagccagacccctc

SEQ ID NO: 32082 - DNA, 122 bp, Homo sapiens
aagccgggccacctgtcactcgctcaagccaagcttcccacgtggccagggacacttctgcgatcccatcagaggggaaaacttgatgtgtttcaagaatgccctggtgccaagcttctgca

SEQ ID NO: 32083 - DNA, 122 bp, Homo sapiens
ataaactgcagataagtcagggaggggacagagcggccctaggcgcgccacagagaggagcgaggcgccagaggcaccatggactggcaagaccacaggtaaaatcagggctaggaagggct

SEQ ID NO: 32084 - DNA, 122 bp, Homo sapiens
cagaggaggcctgcggagtgaagtcttcatacacaagtaatcgcagccgtgtcaacagaccgtccccagccatctgctgccagagcagccgtactttatcaaatctcaatatttacagacgc

SEQ ID NO: 32085 - DNA, 122 bp, Homo sapiens
agtcgggggtgcggggctccagtgagagaccagtgttgttagaacagtcagtcgggggtgcgggggtccggcgagagaccggcgttgttagaacagtcagtcgggggtgcggggctccggcg

SEQ ID NO: 32086 - DNA, 122 bp, Homo sapiens
ttcgtcgccgccgattcgtcaaggtcccgggccgcagcatctagatcgtcgtggcgaagccgactctccgggggatgcggccaatctccaagctccctgggccgcaacttccgagcctccca

SEQ ID NO: 32087 - DNA, 122 bp, Homo sapiens
ttgtggtagagtttcttgtgaagccgtgaaactctaccacactaccacactaccacaccacgtgaaagtagaaaggtttaggcagagcatgaggaaaatccttcaggcagatgccattcgga

SEQ ID NO: 32088 - DNA, 122 bp, Homo sapiens
cccgagtcccaaacaggaggagtcactggaacttggaaacgcgtcctgaactccaggtcgcgccaatcagatcagagaaagaactatgggctccgcccctccagccgcggtcatcacagaat

SEQ ID NO: 32089 - DNA, 122 bp, Homo sapiens
ctccctcgtgcacatatcctgggaacacactggacgccgagcagcttcagttttcacacccgtcctgctcaagccttccaaagccggaatgtctagaaccaagatttacccctcgcaaaggc

SEQ ID NO: 32090 - DNA, 122 bp, Homo sapiens
cgtcacaatggaacagggttggaggacgcccagcgggtgtccgcggagactggatggaaccgggttggaggacgcccagcgggtgtccgcggagactggatggaacagggttggaggacacc

SEQ ID NO: 32091 - DNA, 122 bp, Homo sapiens
tttttgtgccctgatctaggaacccgggcttcaacgatagagctaaatgaattcagagtgcgctacccttccccccagccgcactttaaaaattttggctgaacgtctgaagaagatacgag

SEQ ID NO: 32092 - DNA, 122 bp, Homo sapiens
ctgcccgcgggccgcagccaccgcatttccgcgtttttcgcggtaggcgggaggtgggggcggggactgcggctcggcgcccccctccgacccgcccacacctgtagtctcggggggggcgg

SEQ ID NO: 32093 - DNA, 122 bp, Homo sapiens
ctcaggtggtctgcctgccttggcctcccaaagtgctgggtttacaggtttgagccaccacgccctgcctgaactggcaactttgaaagggttggggcagttctactgtgtgacattaatct

SEQ ID NO: 32094 - DNA, 122 bp, Homo sapiens
attcttttacagaattcatagagtctgactctgttgcccaggactgcaatgatgtgatcacggtttcctgcagccttgaccacccgggctcaagcaatcttcccattttagcatcccaaata

SEQ ID NO: 32095 - DNA, 122 bp, Homo sapiens
aaagaagccattgattgagtaatgtgtcactacaggccaattctaagagcggcttgacatcgtagaagaagtgattgagtttctgagagccacaaaaactcaggtgtgcagtcatgacagaa

SEQ ID NO: 32096 - DNA, 122 bp, Homo sapiens
ggcacctgagcccccaaatccgggcgcgtcgctgagtctcagccccaggtgccctcttcgcggagttgatcagcaattctttttcagtggccaattagaaagcttttcttgacatcagaaat

SEQ ID NO: 32097 - DNA, 122 bp, Homo sapiens
ccatggccttgggccgcaggaaccgtgggcgcacgagcttgggaaggacatgtcggaggccggcgcctgtgcgggcagaagctgtgtcctccagcccttccaccaccagcatgttctcattt

SEQ ID NO: 32098 - DNA, 122 bp, Homo sapiens
tgtacatgcgcgcgcacacacacacacacacacagctgacagcctcacgcgctggaggggcgcacgcgcgggtacacacgcattcagaaacacacacaggaggaggctgtgggaggtggaat

SEQ ID NO: 32099 - DNA, 122 bp, Homo sapiens
cagtaggcgagggtggtagggacttatagtttttaaactgtaacggtggagagattgcagcgtagagcgttgtaacctagaatattagaacatatgggccaggggcagtcgctcacgcctgt

SEQ ID NO: 32100 - DNA, 122 bp, Homo sapiens
caggtttgtcctcagaatacaatagggatggggaggtctgaatgacagggtatggagagccgcagatctgggtgtgaccctaagcaaggactggaaacttctctgggcctcaatgtccttgt

SEQ ID NO: 32101 - DNA, 122 bp, Homo sapiens
tggctgtgtcaggcctgtgggccgagggcaattggctatgtcaggcctgtgggccgagtgcgattggctgtgtcaggcctgtgggtggagggccattggctgtgtcaggcttgtgggcggag

SEQ ID NO: 32102 - DNA, 122 bp, Homo sapiens
aagtttttctatttccagtgttctagtgtttttctcgtggcagtagggtgggacgtgaaacgacacagggaaagcagctgaaacctatcagtgtttaataagtatatattgaaagtgataat

SEQ ID NO: 32103 - DNA, 122 bp, Homo sapiens
gtcctctgaagggttctcatgtggatgagtgggcactggacatgaaagggagatctgcttcgtgtacagggaacacatccagatgatcaacagttaggatcaccaacagtgtacagagaaag

SEQ ID NO: 32104 - DNA, 122 bp, Homo sapiens
cgcatgtctatcttctgagtcacggcggcagtctggaccagctgctcgctattgctaggccggagcacagctgtcctcccaggagctcccttgtcctccgccggcttcaggatccctgtatc

SEQ ID NO: 32105 - DNA, 122 bp, Homo sapiens
tggaagctcagagaggtcaagcccatgtcagggccacacagcaggtaacagatgcaggcccgcagccctggttatctaaggatatgggaatgggagagagaacaggtggcaaggggaggtct

SEQ ID NO: 32106 - DNA, 122 bp, Homo sapiens
gtggtgtgatctcggctcactgcaacttctgcctcctgggttcaagcgattctcctgcctcggcctcctgagtaactgggactagaggtgcggacaaccacgcctggctaatcagccacctg

SEQ ID NO: 32107 - DNA, 122 bp, Homo sapiens
tagcgaacccaggggcagcgcgctgggcggaggccctccctggggagcccccggggtccccggccaacagctgtgcctgctgccacacctcccagctggacacagctctcctgtagcgaaaa

SEQ ID NO: 32108 - DNA, 122 bp, Homo sapiens
tagctaggattacaggcacgtaccaccaacgcctggctaatttttttttcattttagtagcgacggggtttcaccatgttggtcaggctggtctcgaactcccgagctcatgatccgcccac

SEQ ID NO: 32109 - DNA, 122 bp, Homo sapiens
gaccggaaggtggcccgtggggggggcggggggagcggaagaaggaccgggctgtgaccgcgggacggtcctgtcctcctggccctgcgtctctcgagctgctggcttctctccgccgacga

SEQ ID NO: 32110 - DNA, 122 bp, Homo sapiens
ccaggcgtcagaggctgggttgtcctgttggcattggtggcatgtcccatgtgcatgccccgtgctgtcctcgtccccagggccctgcagaagtggtgtgcatgccaacgtgcacatcagca

SEQ ID NO: 32111 - DNA, 122 bp, Homo sapiens
atggtctatgttgctgaccttgtcctgtcctcctgctgtcttaaactatgatccctgctgcggtcactgaagcctttccctgtaagtattcagccataaccctcccctcacgccctgcatag

SEQ ID NO: 32112 - DNA, 122 bp, Homo sapiens
aacaaacgagattaggcgtgggcctgcgatcaccaagaaaaaagtttggcgaggtagaggcgggagcccacgtctgtcccgggttccctcaactacgctgtgcagctcaaacgcggccgtgg

SEQ ID NO: 32113 - DNA, 122 bp, Homo sapiens
gctgcttcctgcctccctcctccagagaagttcatggttaagacctgtggggggcagtgacgaggggggactgctttaaggccccttccacgtccccatccctcccagaaagtcacaaagcc

SEQ ID NO: 32114 - DNA, 122 bp, Homo sapiens
gccgcccctttggcatcgtttgaatgagggtctgcgtgggaggaaccccgcgccgggagacgcgcgctcaggccccgagtcgccggggtttcgaggttccacaagccccgccccgatggagc

SEQ ID NO: 32115 - DNA, 122 bp, Homo sapiens
accacagcagcctgctccccaccgcgcttgcagagcccggacgcgcgtgagtcgggggcccgcagaggcctcacccttggaggtcgccgcttgtcaggcctgactgctgttggcgcccaccc

SEQ ID NO: 32116 - DNA, 122 bp, Homo sapiens
atgacctacgctatggtctaaatgtgtccctcaaaatgcacattttgaaatcctaactcccgaactgacggttttagcaagtggcatcttgggaagtgaggaatgggattaaggtccttata

SEQ ID NO: 32117 - DNA, 122 bp, Homo sapiens
tcaagtgatctgcccgccttggcctcccaaggtgctgggattacaggtgtgagccaccggcgcctggcctgtaatcctgtagataattttgtcctgggggctgtcctgtgccctgtaggatt

SEQ ID NO: 32118 - DNA, 122 bp, Homo sapiens
tcagacccagggttcggaggaggagttccagcgcgccggcatgacgtcactccccgggggcgggctcagtaagtggagctccaccgtcattggtccggggccccgcagtaaccaggggaact

SEQ ID NO: 32119 - DNA, 122 bp, Homo sapiens
attgacctgttgggggtaagtggagaagggagattcttttttttgaagatctatgggtgtcggtgattttgctgtgaaaaaccactagaaatgtttttagatagtatttttcctaacaattg

SEQ ID NO: 32120 - DNA, 122 bp, Homo sapiens
ggagcctttgcacatagttgatcttcacttgtttgctaatccaatcccctattttacagacggggaaacagaggcactgaaagtcctgcgtgccttgtgtaagtagatgtgggccctatcac

SEQ ID NO: 32121 - DNA, 122 bp, Homo sapiens
acatggcgcccctcacagccacccacgctggccccaacaacaatggcaacctccagagctcgcccgacaggcacagccagcaccgcttccaaagagccgctgaccacgagcctggcgccaac

SEQ ID NO: 32122 - DNA, 122 bp, Homo sapiens
gttgagacaggaagacaccaccaccaccaccatcatacggttactcaggcaacaaagccccgcccactgtcgcacgaggcgtgggacgccaccgccccacctcttcgtccttagtggctggg

SEQ ID NO: 32123 - DNA, 122 bp, Homo sapiens
aataaaaaatccatggaggggatctaagagctgaatggatatgattaagagaaaagtaagcgagtgagtttatgagtttgggtgtgggggaaccagcctcagagacctgtcagataacaaat

SEQ ID NO: 32124 - DNA, 122 bp, Homo sapiens
tttcataaagacttttcaaatacaccaaccgagactaagattagtaattttagtgaccaacgcaagtagcaaattgacctctaatcaatttaaaacttattatatgcctcatctgagtcatg

SEQ ID NO: 32125 - DNA, 122 bp, Homo sapiens
gtgaaggctttgtatgggtccctggaccacacctgaggaggcgctgtcttagtcccgtggcgggcggtggggcaggctccctgcactggaggaagcaccagcaggcttttgtgcgtgaacag

SEQ ID NO: 32126 - DNA, 122 bp, Homo sapiens
agatgactgtctggggtcacaggtgttgtttgtggtcatggaaaaagaaaagctaattggcgtgtgttttgaaatggacctggggcacccataaatagacccagtgtccttcagctggagaa

SEQ ID NO: 32127 - DNA, 122 bp, Homo sapiens
ctattgcactgtcaatcaagtatttgtttccaattcttaagacatcatgtaggccaggcacggtggctcacacctgtaatcccagcactttgggaggccaaggcaggcggatcacctgagtt

SEQ ID NO: 32128 - DNA, 122 bp, Homo sapiens
tcgattttccaaaccaaagtggatgttgtgcaatgacaagggtttcctgggaaagttctgcggacaccccctccactgttctccagcttttctctagagttctgagtgtattttcctgttgt

SEQ ID NO: 32129 - DNA, 122 bp, Homo sapiens
aactcgcaggaccttcgcccccgcggagacccagggaagaacgcttttttcctctctattcgccctcaacctgacccgctgggccaccagggcttggggagagacctcagaggcctagagcc

SEQ ID NO: 32130 - DNA, 122 bp, Homo sapiens
acacctagctgattctagcctcagcaaagacctcacctgctgtatgtaggccggctctgccgtttccagaatgggttaagtatgctctcttgtgtgtccatatctacctgtgctttcctata

SEQ ID NO: 32131 - DNA, 122 bp, Homo sapiens
ccgggtgtagggcggggagccaaggatctgaccgcgaggggcgggcgcggcggggaggggcggggcggggcgggcggcgcggggcctattaaaggcgcggccgggcagcggggccggagcgg

SEQ ID NO: 32132 - DNA, 122 bp, Homo sapiens
tgggtgagggggtcctatgcccaccaatccactcatcccaccacccacccctccacccaccgataggcatcataaacactttgctttggcagacaggtgtcagtgtgctcttccaggtggtt

SEQ ID NO: 32133 - DNA, 122 bp, Homo sapiens
ttctgagctgcactccactctggaagttcttcctatccgacctctaccccactcccactccgtcaccgcagggctttggcatactaccattcaggtactcacgctgtttcggtgagtcaggg

SEQ ID NO: 32134 - DNA, 122 bp, Homo sapiens
agtgagttctcacgagatctgatggttttacaagtgacggtttccccggctccctcctgccgccatgtgaagaaggtcgttgcttccccttcaccttccaccaccatgattgtaagttcctt

SEQ ID NO: 32135 - DNA, 122 bp, Homo sapiens
ccggtgctggtatgtacaggtcagcacggctagtttccactgcctgtaacccaggcctcccgtccccggggctggtacacacaggtcagcacggccagtttcctccgcccggaaccctggcc

SEQ ID NO: 32136 - DNA, 122 bp, Homo sapiens
gtcgagatagcgagggaacgaaggccgcacatgaaccaggaagcggagtggcggggcttccggcgccgaggagattcaactacggcggccgcggaggcccgtccgattgctgctccgcgctc

SEQ ID NO: 32137 - DNA, 122 bp, Homo sapiens
catttttcttggcaggcacattttggagaaactagtaaaagggctcttcgggtttgggggcgggaagaccgaggacttataagatgttacttaaaagggcttctaacggtccgagaaccggg

SEQ ID NO: 32138 - DNA, 122 bp, Homo sapiens
tacttgaataacctggaattgtcagcagggaagaagatgtctagaagaatattgtgtgtgcggtggctaaaatctgtgtggagaatggagagaagcattcagaaaaaaattgaacacttctt

SEQ ID NO: 32139 - DNA, 122 bp, Homo sapiens
aaaatccagaataaatatgcatggtatgacccatttatttaaaaaaaaaaagagggaatgcgaagcagtggttttggtgcgaacacaaaaattctggcttcaacagcatttaaattcccaaa

SEQ ID NO: 32140 - DNA, 122 bp, Homo sapiens
ggggtggagcgggtgctgggctcaggcctgggggtcctgcagcagccccagcagggactccgcgatgcccaggaagtagaccacctgtgcgatgccgaaaaggggcgcgatgaccagcgcgc

SEQ ID NO: 32141 - DNA, 122 bp, Homo sapiens
acgtggtcagtcataaaatcttgacgctctttttcacttcctctgctcgttcgtgttccacggacagttaacagctacgtcctgccaattctcctccaagcctctctgggaaccagttcttt

SEQ ID NO: 32142 - DNA, 122 bp, Homo sapiens
gaccggtggtgacccgacaggatccatccttatgatgctcaaagaatgaatttttaccaccgtgaaagaaccaccagcaggcaaaccgctcctcccctcggggccactgttcggatttcttt

SEQ ID NO: 32143 - DNA, 122 bp, Homo sapiens
tctctgtggcgtgcccgggcccgggcgtcgaggagggcagcattgtgacccgggccgcggcgcgctgacctcacagagcacgttcctcccactggagaacccccaacggtgccccctgccgc

SEQ ID NO: 32144 - DNA, 122 bp, Homo sapiens
actggagcgggcacatgggtagcctgttgaacctgggagggcagcgcgatgaccgaggctcgtcctccggcgcggagggtgttaacgcgcccgtgccccgcccctttccttgcgcgggcgca

SEQ ID NO: 32145 - DNA, 122 bp, Homo sapiens
gggagaaggcgcatgcgtggtcttgagggcggtgcttccggtcaaagcaccgcttgggggcggggcctgcgacacgcggtgggcgggtcctgagtcgcgaccctggtccggacctgacctga

SEQ ID NO: 32146 - DNA, 122 bp, Homo sapiens
tgggcatggtgttagaagtggaggggtgctgactctacctcccagctccagtgggcccaacgcaggtggataaatatttacagaacatctgcattaacctttcacaggcagggtggcccctc

SEQ ID NO: 32147 - DNA, 122 bp, Homo sapiens
gcaatatcaccgggtggctgtacattgatcgctatgttggcagtcatgtcatactctacccgctgggtattaggatgggtgtcacagggtgagtgtacacctactgcgatatgaaaactaat

SEQ ID NO: 32148 - DNA, 122 bp, Homo sapiens
cgggtagacaaaagcacctcctaaaaatatctgggtgccaaggcctttccttcctcacctcgaagcccaaccaacccgataaatccacaaccctggctctcgggtatatacccggctcctac

SEQ ID NO: 32149 - DNA, 122 bp, Homo sapiens
gcagggattcttgtccactttgttcactgctacctccccaacacctagaaccatgcttggcgcacagttggctcattgaggacgtcctgaatgaatgaatgaacagggcatgtagagggcct

SEQ ID NO: 32150 - DNA, 122 bp, Homo sapiens
ttaggtccccgtcactgtctccacgccgtgatggcagcgctgccgaggacataggaaccacgactggaaagataatttatcgtgttaggagaagaacgatgatacctacttaacacctcagc

SEQ ID NO: 32151 - DNA, 122 bp, Homo sapiens
tcagtgtcttccacaaagaagacttccctgtccatcagggagaaacctcgtggcggtccgcgtcatgattgtttccctctccacacctctttctggatgattgggcagctgtggtgatcctg

SEQ ID NO: 32152 - DNA, 122 bp, Homo sapiens
tccccattggatactctcagccaagtccctgcctcctctcgctcgctaaagcgtctcctccgcctgcgaccctcacagatccttcctggcccccactagccacaggtttgcactcccagtac

SEQ ID NO: 32153 - DNA, 122 bp, Homo sapiens
acattggaatcatggcactcctgatactttcccaaatcaacactctcaatgccccaccctcgtcctcaccatagtggggagactaaagtggccagggatttgccttaggtgtgcagtgcgtt

SEQ ID NO: 32154 - DNA, 122 bp, Homo sapiens
gccgttccggggtgcagactcgccgcggggcgttggaggactgcgaggtgctccgggaatcgcgggcggcgccggcgggcggcgcggtcctcacaggagaccccggggactggggcttgacc

SEQ ID NO: 32155 - DNA, 122 bp, Homo sapiens
cacgctcaggggaggggccgggcttgccaggagcagcgggtcctcgctgagcagatcctccgggggcccctgggaggcggcctcagggggcccaaggaggcagctgagcaggtcggtgttgc

SEQ ID NO: 32156 - DNA, 122 bp, Homo sapiens
gggaatctgactctaggagcatgcatttcctgaagctctgcagggtgatggtggtccaggcgggaaagggttccttcagcccaacataatgcagttcccagctgaaactcggtggcagatca

SEQ ID NO: 32157 - DNA, 122 bp, Homo sapiens
ctagtggttggggagcaaaaggatacgtcattggagcaggagtggggctcctctgaaatgcgtataatgtgttgttcctacctgtgtagttatactcttatggattatgaagttattcaggg

SEQ ID NO: 32158 - DNA, 122 bp, Homo sapiens
cgcggggctgcagcgagcggcgggtgcagagaaccgtggtgcgcgctcccgcctcgcgcccgcagcccattgtgcttactgtgaatgaggcgcgcgcaccaatcagcggtcgcttcgctccc

SEQ ID NO: 32159 - DNA, 122 bp, Homo sapiens
ccagccgcatctgcaaactcaggagtgcgaacccctctttggaggcttttcagggtctttcgcgccggggcggggccagagcagcggcgagcgcggcggggggcttgcatctttgtcgcggg

SEQ ID NO: 32160 - DNA, 122 bp, Homo sapiens
tctagggctggggactggagtctaggctgacccggtgggggtgctgggtcctccaggctgcgaaagccagggggcctgggtctgcacattgagggggtggctgggctaaggaaggggaggaa

SEQ ID NO: 32161 - DNA, 122 bp, Homo sapiens
acaaacattcagtccataacactccctttcccccaaccctaggcaatcactaatctacatcgtatctctacagatgacctattctggacatgtcatataaatggaatcatacaatgtgtgat

SEQ ID NO: 32162 - DNA, 122 bp, Homo sapiens
tctgcagcttggggcttggagaggatctggaagtctgggctccatcgagccctttggagacggcaatggtttcttccaaccaccaccacctgacaaccctgcatggcggctgccccctccgc

SEQ ID NO: 32163 - DNA, 122 bp, Homo sapiens
tgcagactgtgtgacccagaggtgcttatataactatatgtgggtgtctgggtgtaaatacgggtttatgatttttatagtatatatgtctgtgggttgcatctaactcctgtgtgtgcaat

SEQ ID NO: 32164 - DNA, 122 bp, Homo sapiens
accaatcgccggggccggccagagcgcgcttccttagtaggtggatggtggtcggagcgccgactcccttctcgtcgtcgccattttgagctggtgactgtggccggctgggagtaggcggc

SEQ ID NO: 32165 - DNA, 122 bp, Homo sapiens
ctcgacctcctgacctcgtgatccacctgcctcggcctcccaaagtgctaggattacaggcgtgagccactatgcccagccataatttgcactaatttcatgtgttggagagccacatgtgg

SEQ ID NO: 32166 - DNA, 122 bp, Homo sapiens
tgggaaaggggaagttgtaggcataaagtcaggggttcccttttttggctgctgaaggctcgagcatgcctggatggggctgcaccggctggcctggcccctcagggtccctggtggcagct

SEQ ID NO: 32167 - DNA, 122 bp, Homo sapiens
acaaaggcagatacccaacgcttggcttttcctcttggacagagacagggagagggcgcgcgggcagagttaatttctaagatgaaggctctgtttgcaggaaaagcaggtctgaggatggc

SEQ ID NO: 32168 - DNA, 122 bp, Homo sapiens
ctcgcactcctccaggagaaacacatcttcgtcctccagaaccttgtccagcaagcctatcgcctcctcttcctcctccatggcagccggagcccgcggagggcagacaggaagcggggtcc

SEQ ID NO: 32169 - DNA, 122 bp, Homo sapiens
ggggcgcgcggccggcagggcagcatctaggtctatgggtctgtccgcctgtctggcggtcggagccccgcagtcctcagccgcccgcgccctcggcccggggcgcccggctgcgggcccga

SEQ ID NO: 32170 - DNA, 122 bp, Homo sapiens
cttatttattgatcaatgacactcacatcattttaggtataaggcagacaaccttgacaacgccaatgctggaaaaaggacgttttacatactaagatggggtgtcccaaactcactccaaa

SEQ ID NO: 32171 - DNA, 122 bp, Homo sapiens
gagagccagatcacgctggagaagacgcccagctactttgtcactcaagaggctcctcgacgcatcttcaacatgtcccgagacaccaagctgatcgtggttgtgcggaaccctgtgacccg

SEQ ID NO: 32172 - DNA, 122 bp, Homo sapiens
tagctacctgtgggaacccacgtagcaagggtgactcaaagggttaacaagcagtggcgccgcagagtggcggggagtgcagccaatagggtgtctaggcaggcagtacgtctggtgtgggc

SEQ ID NO: 32173 - DNA, 122 bp, Homo sapiens
ggacttgtgtgtgcaactgtgcgtcctgcgagagtgaggaggtctcggactgaggaactgcgttcagtgctcagtggtgagttcccacgcaagagcctggggagtcaaccagaaagacccgc

SEQ ID NO: 32174 - DNA, 122 bp, Homo sapiens
gaaggatgtgggtctgtcctcagtcccagatgtgggtgtggcgttccagtggttagttcccgttgcctcacatctgtgcttttcctccacggggacttgtagaagtagaagaacttcttggg

SEQ ID NO: 32175 - DNA, 122 bp, Homo sapiens
catgctcactgtccaccgaacgctccagctgacaatgcgcatgctctagtcctccaagcgcgacttcggctggtgttttgcgcatgtttctgccagcgcctggatcctgccgatagttctgc

SEQ ID NO: 32176 - DNA, 122 bp, Homo sapiens
tggccaacatggtgaaaacccccctctactaaaaatatcaaaactagccaggtgtggtggcgggtgcctgtaatcccagctactcgggaggctgaggcaggagaatcgcttgaacctgggag

SEQ ID NO: 32177 - DNA, 122 bp, Homo sapiens
agtgacttcaggttcccaaggggcagcccttgggtgtgaagagccagcttcagaggcagccggaatgcttctccaggctgctgtgaattcaccagctcagagctctctgtttcccctcagtt

SEQ ID NO: 32178 - DNA, 122 bp, Homo sapiens
cccaaaatgctttattgtccctctgctatttctacatatggtcaaaatcatctcaccttccgggttgctgacatcggcaaattcagtttggcaaactgggctctgctcccagtaaccctttg

SEQ ID NO: 32179 - DNA, 122 bp, Homo sapiens
cagttcctggcatcagtgagtgctccgtcaatgtttgacaaacggttgactccactgccccgcgctgtgggcgcactagacttcgggggcggcgtccaggtcccgcctaatcttctaggctc

SEQ ID NO: 32180 - DNA, 122 bp, Homo sapiens
agcagtggggtgaatgggggcacccagctctccatcctgagcaagagcagctcccaaatccgcatgtctggcctccctgctgacaatctggccacctgagccatgctcccctcctcctcctc

SEQ ID NO: 32181 - DNA, 122 bp, Homo sapiens
gcacccgcgcgggaacttggcagagactcgcgggacgtggcgggggcgcctcaggaaacgcgccgcggggctgcggggtcgaggggaggggactagtgtgcaggggccaccctctccccagc

SEQ ID NO: 32182 - DNA, 122 bp, Homo sapiens
caatgtttcatatgatcaacttgtagcatcacatctcactgtttatattaacctgaccaccggaggttgccatctcccatccaagtgttctgtgaaggtggtattccaccatcagatgtggt

SEQ ID NO: 32183 - DNA, 122 bp, Homo sapiens
aactgcaaatcagtaaactaagagcaaataacccaatataaagacattaaagggtagccacggacatctcagacgacgaaaaacaaaagacagtaacgtataataaaacatgtaattgcaag

SEQ ID NO: 32184 - DNA, 122 bp, Homo sapiens
cacttctgcggtgggaaatgacacaggcctgggcgctgtgggctgaggccactcccctgccgtccctggtccctggtgcctggtgcctggccggctggtgccaggctcagtgagggagaagc

SEQ ID NO: 32185 - DNA, 122 bp, Homo sapiens
ccgccccttcctcgccgccacgtgctggcggctcccggcgaccaccgatgacctcacggccgccccagtctttagaaaaagggactgcatctcccagcatgccttgggggcttgggaaggct

SEQ ID NO: 32186 - DNA, 122 bp, Homo sapiens
actgttgggaatttggaggtaaagaaaacaaaatcagcaaaagcattttgccccagaggccgggagactcctgcaataagtgtaagtgcaataagctcatcccgggcattccagcttaattc

SEQ ID NO: 32187 - DNA, 122 bp, Homo sapiens
tatttctgtgagcaccgcagatgtaactgggattcatttttactggatgtctcagaagaccgggccgactgccagctctcctggacacaggaagttacagggtgcggtcacttctgctcacc

SEQ ID NO: 32188 - DNA, 122 bp, Homo sapiens
ccccgcgccgctgtctgcgccgcgcctgacccgaggctggggtctctcctttgaaaacgacgcgtttgcatcactttcctgagccagaatctgcgtcttatttaatttgcaagaaattcaga

SEQ ID NO: 32189 - DNA, 122 bp, Homo sapiens
gctttggtttagtgaatagattacaaaatgagacttattcaagatcaaatggcaaggaggcgagtattcaagtctgtgattacaagacaaaagcctatcttgatgcaggtatgcgatttcct

SEQ ID NO: 32190 - DNA, 122 bp, Homo sapiens
acaatgaaagttcctgttttttcctttaggaataaaaatattacaaataggtcaggacttcggtttatttttgttattacaaataaagaggaagaagtttggctcctgtaaacgtgtgcctt

SEQ ID NO: 32191 - DNA, 122 bp, Homo sapiens
gcctgcgcccgcgcccgcccggacttcgggacattccctccagccgcgcagcccccgggacgtaaccggcgcagcagactcgaagcccggtcttaccccgcccacccgcctgccaggcagcc

SEQ ID NO: 32192 - DNA, 122 bp, Homo sapiens
gaggttcaggcctccacgctgcagcacggctgtgcctctgagcccgtcgcggctgcccagcgggtagggcaggtgctccgagccacatgggaagctcttgctggagccctgcggaccacagc

SEQ ID NO: 32193 - DNA, 122 bp, Homo sapiens
ctggggagcagcgggaataaatgatccgcccctggccagtgctcacccgactgaccagagcgcagcccggtgaccgaagcgcacggggcgatcgcgaggcgccccctccctctccccgcgcc

SEQ ID NO: 32194 - DNA, 122 bp, Homo sapiens
ttgtactttataaatgtaaacccagactcagaaaatcaaaaagctacttcttatggtatacgaatagtaaccatagccctttgaatatttgtatttatttctttacatcgccttttacttct

SEQ ID NO: 32195 - DNA, 122 bp, Homo sapiens
gggatctcataggccccgcccctatttcccaatctagactccgcccactactcggagccccgcccagcggcacatcacagagaggctttaatgtcagacattaaaatgagtttggggggtgt

SEQ ID NO: 32196 - DNA, 122 bp, Homo sapiens
ggagtgatggccctcaggaaaccttctggcggcgggtgcagtgtgagtttacccacatcccgcattcatgataaacagtttgctgtttgatcatatagcctccagtgaaatgctgagttggt

SEQ ID NO: 32197 - DNA, 122 bp, Homo sapiens
gcacctgggtgcaatttctctcctgtctttacctcaagggcagtgtctcacacattcaggcgtggtttctgcggaggatgtggccacctcttaaagaaagatcagagtgtctctctgacatg

SEQ ID NO: 32198 - DNA, 122 bp, Homo sapiens
ggcttgttagggtgattcgaattcagtgaatcgccacctccggctccacgggtgtttttccggtatccttaaaagccatggctgctgcgtggcttcctgaccgactttttcctcagcgagag

SEQ ID NO: 32199 - DNA, 122 bp, Homo sapiens
gaccgcaggggccctgccggcccgcgccgaaaggatgcgctgtcctctggctcagttgcgcgccggctgcccggacacagacagctcgaagagatcccgctctgcagctctgcagccgcggg

SEQ ID NO: 32200 - DNA, 122 bp, Homo sapiens
atgacctggaaaattacatcaagaaaaatgaagacaaggccagagaccgtctcctggcagcgtttcctgtgagcaaggatgatgtgccagacaggctgcacgcagagagcacccctgagctg

SEQ ID NO: 32201 - DNA, 122 bp, Homo sapiens
tcgactggggacgccaggtgggactggggtgggaactaggtccccaggcagcagccataacgacaggcagggatacagccaagctcctgccctcgccaccctccctgccccggtctcctgcc

SEQ ID NO: 32202 - DNA, 122 bp, Homo sapiens
ccccaccctcccttcgcgccgctcccctccacccccccgcattcgcatcccggcatagcccgcaggggctttgcagggagaccgggaattaggctggacctaaccagactgacagttcgcac

SEQ ID NO: 32203 - DNA, 122 bp, Homo sapiens
agctgtgaccaatactccactctgtgtaaaacatgtattacattttaaagagtcactgttcgtagatggtaaacgactagtcttgaaatgtgaaaacaaggaataaaatggatgaacttaaa

SEQ ID NO: 32204 - DNA, 122 bp, Homo sapiens
tttccacctctgccccttctccctcccggcaaactctgcgctagaggctagctttagtcccgccgtctggttcagcaccccctcctgcagcccggccccgcgaacttccacgtccgcctgcg

SEQ ID NO: 32205 - DNA, 122 bp, Homo sapiens
aggctgtaactggtggtcattgaaggagccgttttccccagccttcctccccgcctcctgcgtctgtgccaggtagcctccctgccagggaaatctgacccaagccacctattttattacaa

SEQ ID NO: 32206 - DNA, 122 bp, Homo sapiens
gggatcggtgggcgaggggtgggatacacccaggtgtttcgggacccccttccagggccacgtgcccctcccccggggtggccagagagcgctgcagcgctcccactccccggcccgagatc

SEQ ID NO: 32207 - DNA, 122 bp, Homo sapiens
tcaaacggggagtgcctatttaatgggctgcgagggtggcgcagattactctcccaaagccgctcgctggtggtggtccttgagacgcgcttcccggggctggagttttgcggtttcgtcgg

SEQ ID NO: 32208 - DNA, 122 bp, Homo sapiens
acgcgcccgaggccgtctggctgttgagaagaccagaggagagcctgaggaggccaggttcgagctcgtgtgtctcagcccagagcctgcagaattttgtgtctgtcgcgacggggtctgaa

SEQ ID NO: 32209 - DNA, 122 bp, Homo sapiens
tggccagcgtgagtcacggacgcccaatcgcgcggtagcgtccgccgtgccgctgggcgacggcggcgcgcatgcccactcagggacccaccctgcgccccagccctctacagcgcgggcga

SEQ ID NO: 32210 - DNA, 122 bp, Homo sapiens
acaccctgcagcttgcgcttttaactgcttgtggttgagtggcagcatgagcgagctctgcgtattccaacccggcgttaagaatccttcactagcttttcttcccgacgctgcttatttat

SEQ ID NO: 32211 - DNA, 122 bp, Homo sapiens
tgggtcttggctttgggataggtgaagtgaggacagacactggagaggagggaaaggggacgttttcaataggaggcaaaactcgagggtgggatccactgaggagtacataggctgctgga

SEQ ID NO: 32212 - DNA, 122 bp, Homo sapiens
agacaggggcgggcttaatgacggaaggagcatggcgtggagacacctgaaagtgagtcccgcgagtgagcagtgtggatgggggaccagggaccggggagggcgagaacggagagtcaggc

SEQ ID NO: 32213 - DNA, 122 bp, Homo sapiens
cacctcccctttgaaaaaggctgttcatactgggtataactctttcttttatatgctgtacgaagtagctggatgtctccaaagccataggctgagcacatcaaatggggaaatgagccaca

SEQ ID NO: 32214 - DNA, 122 bp, Homo sapiens
gtctgtccggtcgtggaatccagggttgcaggtgtccgttcctggtgcgcaaaatgcgggcgacgccccacgacctattctaaacacccgcaacccgctttccccacccagtcccctgcccg

SEQ ID NO: 32215 - DNA, 122 bp, Homo sapiens
caccgaccctctcgccccgcggagggatacggctcgtcacttccgccctcccctttttcacggcctcccaattggtcggagcgcgctgcacgtcatgggctcatccaaacccctgcccgggc

SEQ ID NO: 32216 - DNA, 122 bp, Homo sapiens
gcttcctcatccccgggctccagcaggtccccttcttctttgctgggcttgtggtccctccgcagtgagcggatcttctccccggtcatcgccgccgccaggggcaagggggggaatcggga

SEQ ID NO: 32217 - DNA, 122 bp, Homo sapiens
agtgtttctgtctcaagactggaaaacaatagcatttgtcttgagtgaggaagtgaagcccgctgtgttcatagcaggagagggctcccagacacaggcccgtcctcggaagagccttgaga

SEQ ID NO: 32218 - DNA, 122 bp, Homo sapiens
tcttacttctacagttgggccccgggcagaaaaagccaaaaccctccgggacaaatgaggcggctgagagcagagggtcttcctcacacatccacacgcgtactcttagctcagaatcattt

SEQ ID NO: 32219 - DNA, 122 bp, Homo sapiens
tcggttttccgaaagtttccagcgaatccttcttggtgaagatcggcctctgggaggcagcgtgtgtgcttcccgagagggggccccctgcgccgtccctcttcccctggcacagaagggtt

SEQ ID NO: 32220 - DNA, 122 bp, Homo sapiens
tcagtggcgccttcgtggtctccctgttgaagaccaatagagagctgcataatagctattcgctgcacatggctctgcctcccttcccttctctcttcccagctttcttgctctctgtgcac

SEQ ID NO: 32221 - DNA, 122 bp, Homo sapiens
cgtgtgtaagagtgtgaccgcgcacgccttcgtgtgtgtcccgggtgtgtggggtcggggcggtgacgaggtgagggggacgccggccgagccccgccctccgctgcaggtgggccggcccc

SEQ ID NO: 32222 - DNA, 122 bp, Homo sapiens
acatgcaaggatctttaaaaacgcagacggcgtgaaagctcaaagcagacacatcccctacgcagcccagggaggcagggggacctcctggtttgctcacagcagtggccgggcctgtgaac

SEQ ID NO: 32223 - DNA, 122 bp, Homo sapiens
acagttgagatgcgtgggcaactaattagactaaaaactcaggggaaaatgtggaaaagccgagtgggaaagtgattcagaggcaaacaactgagttgtaatgcaccaatgaaagaataaca

SEQ ID NO: 32224 - DNA, 122 bp, Homo sapiens
ggcgctcctcttgtcctaatgtggaactccccaagctacgggaaaggggtgcatatggaccgctgctcactcacggctcagatacttccacggtaatgggttggcgacagtgactcagcttc

SEQ ID NO: 32225 - DNA, 122 bp, Homo sapiens
cttacttcgttatccgcacgccttcctcgttggcatcagagccggacaaatcccaacccgcgccaggcaaagataaatgactcctggctcccccggcagctcagggggtctgggcgggggcg

SEQ ID NO: 32226 - DNA, 122 bp, Homo sapiens
tccttagagcagagggaagtgtttgaagggctgtagtggggcagtatgtgatatggctgccgtttcctgaaactcactctggctgtctgatggagcaggagttggagggggccattgtggat

SEQ ID NO: 32227 - DNA, 122 bp, Homo sapiens
aactgcacttggctgtttgctttacagccaagtgtatgatttacctaagtttcaaaacaacgccatgaagcaggcattaacaccctcattttcaggcgagaaacctcttacccggttcccgc

SEQ ID NO: 32228 - DNA, 122 bp, Homo sapiens
gggaactttgaatgatgaagacagttgactttaaagcagcaagagtggctttctgggtaacgtggaaaattctggataatgtgggaaataggtaaaggataaagatgcatgcttatgactgt

SEQ ID NO: 32229 - DNA, 122 bp, Homo sapiens
ggacaccggacttcccctggaagttgctcgagactgcgcgcccccagcaaaaaatcaggtcggttctccgagcccagtctagcgcttcccgacccgcaaaccaaggcccagtgaccgtcccc

SEQ ID NO: 32230 - DNA, 122 bp, Homo sapiens
caaaaagcgagaacaggtacaaggccaaactttctacattcacagacacctaccaaaccccgaacatggaacaccaaattagaacgctgaccagttcctggtaatgtagaaaacacccaagt

SEQ ID NO: 32231 - DNA, 122 bp, Homo sapiens
gcaaggtagtcacgtggggggtgcctgggccaatggggggccctgggagggctcagcacccgcctcgccccaatacggggcttgcctcttcagctcatataaggtaaaaggcagagtggcct

SEQ ID NO: 32232 - DNA, 122 bp, Homo sapiens
tagaagcttatatgagaatgtcagaataaatctggaagtgcaagcaaggcctggagccaacgttttatcctgtacatacatgacaggtatgtattttgaacatatcactcaatgtctacccc

SEQ ID NO: 32233 - DNA, 122 bp, Homo sapiens
agcaacccaaacagaaggtactgctgtgggtcccccacttggcacgcgacggcgctgggtcggcctggcgcgccctcccgcgcccacgggcgctaggctaggtctgtgcgcagccgctgtct

SEQ ID NO: 32234 - DNA, 122 bp, Homo sapiens
gggcaagtagtagagaatgacaacatggcaggcagcggtgggcgcacctcgcgggctccgcgaaaggaagggttccatttgatttatcacagttatttacctttgatgtcagagcatgggaa

SEQ ID NO: 32235 - DNA, 122 bp, Homo sapiens
ggttggagaggacaacgccaagacggctgggaagccccaggccagcagcggaagtccactcggcccgccctgcgactttgaaaccggtgccccggaccactccttggagacggtggcgcctc

SEQ ID NO: 32236 - DNA, 122 bp, Homo sapiens
aggtttttcttttatattttttttctgcacaaaggaggaggatttttcacttactcatatcgaggccagatttttaaagccagctaaggcagcatcagctgtgcgggatttaaagcctatag

SEQ ID NO: 32237 - DNA, 122 bp, Homo sapiens
gggatggagtggtgctgtcgccaaacccctggaatgccgcgtctcccagaccctcttctacgcctttttctacgcccacctcactgccaggggccggggacctgggacctgacgcctgatgc

SEQ ID NO: 32238 - DNA, 122 bp, Homo sapiens
agggagctaggggtgccacgtccatctggccgggcttcaaggcgccatgcagccttcacgcggtcccaggtgtccttccagcgcttagcgggtcggctcagctctgtctccaacctctgcag

SEQ ID NO: 32239 - DNA, 122 bp, Homo sapiens
atcaggatttgttggagggcaggccttggcgggcaggccttggcaggcagtcctgagccccggaaagatgggctctttctcctgaacctataggtttggggctcaggactgcctgcaggtgg

SEQ ID NO: 32240 - DNA, 122 bp, Homo sapiens
gtaattgtgccggttcttggacccttggttgccttgatcatctgctacaactggctacatcgaagactagcaggtgcagtggctgggcagcaggcaagaccaccaaatagtgggggaccaag

SEQ ID NO: 32241 - DNA, 122 bp, Homo sapiens
gtagtcggagctcctcctccttctacggccagctaccgactgaaggctgctggccctggccgttgcctagtaaccacaaaacctcctatgtcacctggttgccaggaaacaaccaagtcagg

SEQ ID NO: 32242 - DNA, 122 bp, Homo sapiens
caacggcgtgggtcaatgccagaaaccctgggatcccggaggtcgaggcctccacacagacgggaacccgggctggttacgttccccggcgcaggccgagggtccccgcgttcccgccgcgc

SEQ ID NO: 32243 - DNA, 122 bp, Homo sapiens
tccagctgatacagtttgactgtgtccccatctaaattgcatctggtattgtaatcctttcgatttaggctattgcgccacagagcctgcttgcaggaattgtaatcctatttgtaatcccc

SEQ ID NO: 32244 - DNA, 122 bp, Homo sapiens
gtctctaactaccctaaaaatgtcagcatcgccgagacaaaacccggtttggagacccctcgagaaacctacctggccctcagtccttgatgtatcatttgctatcactaggtgtttcatta

SEQ ID NO: 32245 - DNA, 122 bp, Homo sapiens
aaatcagcatttgcacacttgccaggggctgattacaggcctctcagccagggcagcctacgcaatttcggagcaatttctccgattacacagctggtggaccgccctgggcgctcgctgcc

SEQ ID NO: 32246 - DNA, 122 bp, Homo sapiens
aggaattagggggccagataacaagtctagacagctcagaagtttgaaatggattattctcgccggggaggaggatggctagcaacgagctctagggactcaaatgccaaatccctggactg

SEQ ID NO: 32247 - DNA, 122 bp, Homo sapiens
caaaagcatgcaaattgtattgttaggagccacagatttaaaacaaagtagaaaaggaaacgaatggtagtcaagagaaaggtgactttcttcaaagtatctgaaagaatcaatagactacg

SEQ ID NO: 32248 - DNA, 122 bp, Homo sapiens
tgcaagtgacagaaacccaacttgaataatcttaagaggaaaattgagtttattggttaacgtaactgggaagaatagggcagatctcagaaccaactagatcgagggactcaaatggtatc

SEQ ID NO: 32249 - DNA, 122 bp, Homo sapiens
gtggcaatctggagccaccactgcttttatggatgagggatggggacagagctggccagccgagcaccttgggcctgtatcctctgcacaaatattgactgagcatcttccacaggcctggc

SEQ ID NO: 32250 - DNA, 122 bp, Homo sapiens
ggcacctctgtctccaacccagccccatgtgtcaaatgccttctgggtgtctccagagagcgagctgtctcttggcttcctcacctctcgcctcccacgtgcctcatatcactccatgatca

SEQ ID NO: 32251 - DNA, 122 bp, Homo sapiens
gtgcttgaccctggcaggggaccccatggaaaagatggggaagagcaaaatacatggagacgacgcaccctccaggatgctcgctgggattcccacgcccaccactgtcccccaccccatgg

SEQ ID NO: 32252 - DNA, 122 bp, Homo sapiens
gaacacggtggcggctgtccctggagaaggtgcaagtggggtctgtgggtttcacttccccgggaaccacctcccctcctgcggcagcatctgaggagcccccagcggccccctgccccatc

SEQ ID NO: 32253 - DNA, 122 bp, Homo sapiens
ggacttgctggagtagaggcagcctgaccatcgggacagcagagaaagtggaaatcgaggcgacagactttcagaagtcagtgatattaacaattaatataatacagccacttcctcttgct

SEQ ID NO: 32254 - DNA, 122 bp, Homo sapiens
gaagtggctgggttctgatttgctcggtatttgattaaaaggtcttaacgtgggtaaaagcgggaatttctctgttgcgcatgtgcgcgctctccgcctgataggagttgtagttctgcggg

SEQ ID NO: 32255 - DNA, 122 bp, Homo sapiens
tctgcttcttggtctccctaggaacctctacatggacaccagaatgctggtgctgtcttacgaaatattaaccacatttatgggccaaaatatcacaatttctagacatgcttcttcatttt

SEQ ID NO: 32256 - DNA, 122 bp, Homo sapiens
cacaggtataagtggtacagcctacacaggcctgcctgattccaaagcacacgcatttcccggtatgctttgtgaaaacaaaggtaaagaaggtcaggaagaatatagatgcagggttcagt

SEQ ID NO: 32257 - DNA, 122 bp, Homo sapiens
ctccggctcccttgcaggctactgcacgggctggggcgacccgcactatgtcaccttcgacggactctactacagctaccagggcaactgcacctacgtgctggtggaggagatcagcccct

SEQ ID NO: 32258 - DNA, 122 bp, Homo sapiens
acccaccccacgagcccctgtttgcagggaccgaccgcaacccctacctgctgtcgcccacggaggccttcgcccgcgaggcccgcttccccgggcagaacaccctgccaggagatggcctc

SEQ ID NO: 32259 - DNA, 122 bp, Homo sapiens
tccctgtctgttggacacgtgggtgatcttgacacaaacacccaattctaggcctctgaacgtccaaattctttcttgtaatttcagccaactgaagggccttaccctcccctgatgccctc

SEQ ID NO: 32260 - DNA, 122 bp, Homo sapiens
gcggaccaggctggctgcgcagggccgccgccccgcgccgtcggctcggctcccgcccggcgcaagggcaaacgagccacacggtaagtgcctgcggctcgcctctcctactgcgacccgag

SEQ ID NO: 32261 - DNA, 122 bp, Homo sapiens
tcccagatgctgtcgtcgcccattcctgctgctgtaggaaaacacccacgaccgggtcttcgcaaacaacagaatttcattcctcagttctggaggccgggaagtccaaggtcaaggtgcca

SEQ ID NO: 32262 - DNA, 122 bp, Homo sapiens
ctatttctaaagttacacgtcgacgaactaacctatgctttaaattcctctttccagccccgtgagtccgcggcgacattgggccgtggggtggctgggaacggtcccctcctccggaaaaa

SEQ ID NO: 32263 - DNA, 122 bp, Homo sapiens
ggatactcactcgcactgtcctggctggggctcggaaactgagtgtttttgcatggctctcgtctccgtgtcggtattgctgtttcagtgccagagcagatgctcctcgggccaaaaaatgc

SEQ ID NO: 32264 - DNA, 122 bp, Homo sapiens
cacctgcactccctcacctgttgagctggcgctggagggcatccagcctgctctccacgtcgccccggggccgccgacccgggctggagagggggatgttgaggaggctgggggtgggggcg

SEQ ID NO: 32265 - DNA, 122 bp, Homo sapiens
tccttcctttgttctcctctgcctttgcctctttcggaaagttctaaatgactagccaatcgggacaagtatagaatgtgaggtacccttccagccaacggaaactggacacagcagtaggg

SEQ ID NO: 32266 - DNA, 122 bp, Homo sapiens
tgcttggcgtgggagtagctcttcacagggcccggcaggctggccagccccaggcctgtccgcctgctgatgagcagggacctcttcccagcgctgggggtgggtgtgctgggaggggcgct

SEQ ID NO: 32267 - DNA, 122 bp, Homo sapiens
ggctccaccccctgcgtcacagaagtcatctaataggtggctgcagggataggctgtaaccgcagccaatagcaggcccagcttcctccaggcaaccaaatcaggctccgctggaggcatca

SEQ ID NO: 32268 - DNA, 122 bp, Homo sapiens
cacttcaacacgagtcatctaccaaacctcacctccagcattggggagcacacttcaacacgagtcatcttctaccaaacctcacctccagcattggggagcacacttcaacacgagtcatc

SEQ ID NO: 32269 - DNA, 122 bp, Homo sapiens
atgacatcggtgatggtaccgtccagcatccgtacgcctgcagagccagggcgggagggccgctgccaccggccctgcccttccccacaccccagcccgccccgcgccactccacaccactc

SEQ ID NO: 32270 - DNA, 122 bp, Homo sapiens
tcgctacccccgccgcagtctgacgtcacgctgccgggccccaccagactggagggcgagcgccaaggggacctcatgcaggcaccgggcctcccaggctcccctgccccacagagtgtaag

SEQ ID NO: 32271 - DNA, 122 bp, Homo sapiens
gagttggtttttatttttaaaaagataatgttaatgatctgataccactacaaatatttacgtgagaagattcatggacttgtcttttggttggactgtcactcatttctgaaagtttcttc

SEQ ID NO: 32272 - DNA, 122 bp, Homo sapiens
ggtggatggtgtagtagagcagtgcagcgcgccacaggaacggctgcttgcggaacagcacgctgtgcaggctggccaggccctcctccgtggggttcgccggccgcagcccgtaccgcagc

SEQ ID NO: 32273 - DNA, 122 bp, Homo sapiens
cacatgtttaatgatcaccagaccgtggagcttcaaaaaggggctcagctttgcctcctgcgtgaaggcttccggccggaggggtggcggccggcctgggtggcgtcaacttgtatcaaggg

SEQ ID NO: 32274 - DNA, 122 bp, Homo sapiens
cggggagggagggtcatctgtctgtctgctgcccggcccacctgtagtagtcctgggccccgtccgagtcgcagaagtggcagaagtagtggtcgcggcgcaggtgcttaagcagctcatca

SEQ ID NO: 32275 - DNA, 122 bp, Homo sapiens
aaccgggggtagaaggcggcgggcacgccggggccctgttcaggctttgggaagggccggcggagatgctggtgggcttggacgccctccccggcccgacgccccggccgcagtgccgggat

SEQ ID NO: 32276 - DNA, 122 bp, Homo sapiens
ctggggtgtcagtggtggcagtgcccagggcgagcccagaacatgaaccagcactcggcccgtcaggggagatcggggcctgtcagtgcccctaagcctgaaggtgcaggtctccgagcccc

SEQ ID NO: 32277 - DNA, 122 bp, Homo sapiens
ctctgtttgagagcctgggtaccaccataaacaaaaagaaccctttttctaaaaatggagcgtagatctttaaacagtctcaattcctcaatgtcacaaaacatcctgggtccttaatcatt

SEQ ID NO: 32278 - DNA, 122 bp, Homo sapiens
cattggatagttctcaccttcggacttctcattggttcttagggctcattgttccaagggcgcgtccaattagcgcgcagcgttagcgggagagcggaagaccccgcctcctcgcggctcta

SEQ ID NO: 32279 - DNA, 122 bp, Homo sapiens
tctctctctctaagcgtttgcgttcagtgatgcacacggtcaggagcacactgggtaaaacgccggagccctcccagccttccacgactttcagaaagtccccatgagttttgcccggtggg

SEQ ID NO: 32280 - DNA, 122 bp, Homo sapiens
aagggagctacaaagagggtaaagggagcactgaatgtatgcgaataaagcctcacactccggtggtaccactgaaacatgcacatttaaacatcaagggaaaaacgcaaaaaagaaaagaa

SEQ ID NO: 32281 - DNA, 122 bp, Homo sapiens
aggtagatgacgtaggaatcaaaagataccatcccattcatgtgcttgagaatattcagtcggtcagaaggcatgaaaggaaaaacaaatatcaaagagattgtaaggcagtgtgtactaag

SEQ ID NO: 32282 - DNA, 122 bp, Homo sapiens
ccctcttctcttgcatttcctccagcccgtcaccaagtactcttccaggcacgccaggcccgagtgtcctaggataggaaacctgagcaacaaagggaagtggggtgtaagctcaacccctg

SEQ ID NO: 32283 - DNA, 122 bp, Homo sapiens
aattaggcaaggtgcagtcaggaatagcatgtccctaaagctggaacccagcacagaattcggggtgtttctttgcatggatagctggttatgcaacacagaagacaagctggtgggggaaa

SEQ ID NO: 32284 - DNA, 122 bp, Homo sapiens
tcagggtatgcaccctcccgcaggggctcccaaggccgggcgtgcgtgaggccaggtccacgggcacaccactgtgaacactgattaaacgtggcctccacggcttccaacccccaggacag

SEQ ID NO: 32285 - DNA, 122 bp, Homo sapiens
cagttttttcacagagtcaaccacgaccagaaatccgctcgcctcgctgggctcctcctccgctcaagaatctgcaggggttccccgctgcctgaggaacacgccaaggtgcaggccccgcc

SEQ ID NO: 32286 - DNA, 122 bp, Homo sapiens
cccaggaaaaccccctcaagtaggtgtcatcgtcctctttgtgcagatatgcaaaaggggcggggcggggggggggcgctctgagaagcccagtggctttcccagagagacacggcaggggc

SEQ ID NO: 32287 - DNA, 122 bp, Homo sapiens
ccaatgccttgcccacccctgccgggcccgtcggactcggcgggtgagtgcgtggttccccgctccgcaccgccgcctgcctctctgcagaccaccccggacccaacccctcagccacttcc

SEQ ID NO: 32288 - DNA, 122 bp, Homo sapiens
acgtcactccccaccccttatccacctcgggacctggagggaggggcagccccacccacccggtccacccggatatggacccgcccggcctgacaggctcacacgcacactccctctctcgg

SEQ ID NO: 32289 - DNA, 122 bp, Homo sapiens
ccagataggagggcaaagccagtcaccctgatgctctgagtggtgtttcagatcatcacacgaagtctccagataggagggcaaagcctgtcaccctgatactctgagtggtcagagacccc

SEQ ID NO: 32290 - DNA, 122 bp, Homo sapiens
ggttttagccagagagaagcggatggaggcggaacgctggcagaggacgttggtgggctgcgtcccagcttcgtcagccccacctggcctgaccccaccacacaggggtcggcttccatgca

SEQ ID NO: 32291 - DNA, 122 bp, Homo sapiens
ggctgggggttccactagcatccgcaggcgggcgggactgggccccatccctcacagtgccgatgacacgatggatctcgcctgtcactgtcattacagtcagcttcactccaccgccgata

SEQ ID NO: 32292 - DNA, 122 bp, Homo sapiens
tctaaaaagggaggtgggtggattaaagctgaggatagagagaaggattagagaacaatgcgtgctatttttgcattgcaggagtgttctctgctgcttctgggtcctgacagtcttgaaaa

SEQ ID NO: 32293 - DNA, 122 bp, Homo sapiens
ggtttctccccttcctgggaagctgtaataacccacaaccagcctacgaagcccatcccgcgtcatacactcaatgtaaacaaaagcaaagaaaacattgaagagctcggggtagtcttacc

SEQ ID NO: 32294 - DNA, 122 bp, Homo sapiens
ctggctcacaggccccatccccggctggggagtcccctctggacctcacgggctggggcgcgagtccgggtcctgtcctggggcctcaatgggctagagagcgccagccctaaatggggttg

SEQ ID NO: 32295 - DNA, 122 bp, Homo sapiens
cctcactccccatgttcatcttttactgagtcctgtgcattctaccgcctacacatccggcggtcgtgcccggatctctatccccacttaccaccactgccccccacccacccgtagatcac

SEQ ID NO: 32296 - DNA, 122 bp, Homo sapiens
agttcatgtgtcaggaatcgttctagatgcaggggactttgagcagccaagacttttgagcgagatctgttgacagccaagatccctgtcttggcacaagtcatgttgatggggagacagac

SEQ ID NO: 32297 - DNA, 122 bp, Homo sapiens
ggagccaacgggactgggttttggccgggtgcaggggaggttgcgtcaggggtacctagccggcggcgggctgggggtggggtgtactttgtccaaacctctcggctcctctggcgggcctc

SEQ ID NO: 32298 - DNA, 122 bp, Homo sapiens
gcttacattattatttctgcttatcagagacttttcactaatttgctactgctaactaaacggcagagccaggtgtacaggatggaacgtgaaggcagactaggagcgtgaccactgaagca

SEQ ID NO: 32299 - DNA, 122 bp, Homo sapiens
gcggcctcagacacttccgcccccgctcatggcagcaaccccggccggggatgccactgccgcagcctccgcagaagactccgcggttccccatcccagggccccttcctctctcggctgtc

SEQ ID NO: 32300 - DNA, 122 bp, Homo sapiens
ggcaggcagcggattctgacggcgtcagcagcgcgagaggcacccgacctctcactaaaacgtttggcctgctcccaggaagaggcttccatggaaagccagaagaccctttaatcagagaa

SEQ ID NO: 32301 - DNA, 122 bp, Homo sapiens
caagaaaatattccagcatggagaacagcctcggtcttatcttagacagatgaccttcaccgtatctttgcttctgagaatcaaaacttcttatcgagatgccacctatgtaaggaaaatga

SEQ ID NO: 32302 - DNA, 122 bp, Homo sapiens
tcctgcatagcatgctcagcatgtagctgtgctccgcgtctgccggatgaacacacgagccggtcatgggccacgtcagcaatgttctcgacctttgtaagcttcgagaatgtgctgtgtgt

SEQ ID NO: 32303 - DNA, 122 bp, Homo sapiens
cttggccgtggcattcgaataaattctgtacaagaggtgtcttgaggaggacagattcgacggtcctcttcaccagaggaaatctttctgctggcatgggggagccctgcgcctgcaagacc

SEQ ID NO: 32304 - DNA, 122 bp, Homo sapiens
gtctcagagcgcactgcgtaattaccacgtgtagaaagcaaaacgttgacaagacacggccgttagcaaaaagccgaacggttactacgctcaacgagaaaaggaaactgggagggttgaaa

SEQ ID NO: 32305 - DNA, 122 bp, Homo sapiens
ttgagggaatgaaatggaaacgcttccggggaaggtcgcgggtgtgggcgcctaggtcggcgcagccttgggagccgccgtgggtcgcggactggcgtggccagtgtggaaacttgggactg

SEQ ID NO: 32306 - DNA, 122 bp, Homo sapiens
agttccggtctctatggcggccggcggaggcaggaacggttgtaggtcgactgaattagccgccaaaggtccaatgagaatggaggactgataaaatattagccaatagaagctagggattg

SEQ ID NO: 32307 - DNA, 122 bp, Homo sapiens
acgaggtcattcactctcatcgtggggccacggccacgctgccctgcgtcctgggcaccacgcctcccagctacaaggtgcgctggagcaaggtggagcctggggagctccgggaaacgctg

SEQ ID NO: 32308 - DNA, 122 bp, Homo sapiens
gtgtgggtgtgtttctgattagtgacctcccctcggaattcatttggtgggcaggtggcgcgggaggacaggtggaccaggttctggtaatttgttgggattcttaaacagtccccatctgc

SEQ ID NO: 32309 - DNA, 122 bp, Homo sapiens
aggatgtccccagtttttccctctcttgaaaatcagcaaagtaatattctctagtgtcttcgatctaaataataattttaaaaaaggacaaagaaagcccttcccttgaccacacctccgtt

SEQ ID NO: 32310 - DNA, 122 bp, Homo sapiens
tggttttcagtggccattgagaaaggctagagaccaacaaacttacttgtgagagccacacgtgtctggcaaagaacttgaaaaataatcttcaaaattctcagcctaacaagtaacgcttt

SEQ ID NO: 32311 - DNA, 122 bp, Homo sapiens
cctcactcttggatcaccataagagttgagacagctgggtctgcaggacattggaaaagtcgggtgtgccttcctctgtagggccacctgggaaggatacagctgtctgcaaaccatgatgt

SEQ ID NO: 32312 - DNA, 122 bp, Homo sapiens
tcatggacatctccgacatggtgaaaaacctcacaggccgcctgacgcccaagtcctccacgccctccacagtttcagagaagtccgatgctgatggcagcagctttgaggaggcgttggac

SEQ ID NO: 32313 - DNA, 122 bp, Homo sapiens
cctcacccacccgccgcttcacacctcacccacccgccgcttcacacctcacccacccgccgcttcacacctcacctgccgtttcacacctcacctgctaggaaggcgtggagagtctgtgt

SEQ ID NO: 32314 - DNA, 122 bp, Homo sapiens
ccttttttaattgaagcatcctccattctttggtggtgtaaccccacctagtggtagtggcgtattttatcttttgtctttcacactttctcctaaacctcatacagtatttcacaagcaaa

SEQ ID NO: 32315 - DNA, 122 bp, Homo sapiens
aagaggtgaggaggcactggagatcgccaccaggtttacaagggggcctgaccagcgtttcgcatacaagaagcgctcagaaaaggcttgccaatcacttgccggaacttcattactgcctc

SEQ ID NO: 32316 - DNA, 122 bp, Homo sapiens
aacacgcccaccgtggacgctcacactggccctcactcacacggccgtctggccggccctcgaggcgctgtgcagccttcacccggtcccaggtgtccttccagcgctcagcgggttggccc

SEQ ID NO: 32317 - DNA, 122 bp, Homo sapiens
gtgccctcccccacctgttgcggtacccacgatgctccccacaacgggagtttcagtgaccgcctcattcctcttcctgcctcccacagcctccgagctcacggggccagcactgtgggcac

SEQ ID NO: 32318 - DNA, 122 bp, Homo sapiens
tccagggggcgcccctgtcctccttcgtctctatcaactccaacactggcgtcctatacgcgctgagatccttcgactacgagcaatttagagacttaaagctactggtgacagccagcgac

SEQ ID NO: 32319 - DNA, 122 bp, Homo sapiens
atatagggcggctgttcactaaaatctggggctcccattccagaaaggctcgtgtcaagtcgacatcttaggaacttcacaagggtcgcggaggcgggagatggcggcgcggaagcctcttg

SEQ ID NO: 32320 - DNA, 122 bp, Homo sapiens
aaatactacagtgaggagatcgcgggttggaagtcccagcacctgagaacacggtgctggcgctgggctcaagatttggctttcccatctggaaaaggggaatgactgccccgccactcagg

SEQ ID NO: 32321 - DNA, 122 bp, Homo sapiens
cagcccacatagctctcggttttggtgacacgtgccagcctgcacggggagtgaaacgtacgtcccatcttacgcatttaggtaatcatacgccgatgcctggcgaaaagcactttcttcaa

SEQ ID NO: 32322 - DNA, 122 bp, Homo sapiens
cggctacctggagccggaagcgcggctgcagcagggcgaggctccaggtggggtcggttccgcatccagcctagcgtgtccacgatgcggctgggctccgggactttcgctacctgttgcgt

SEQ ID NO: 32323 - DNA, 122 bp, Homo sapiens
cggaggcggcgagggggcacctggttcgtctccccgagcccaggggcagtgagggggtgccgggcaggcgggcgggcgacaggtagggcgccgcggaggtggcggggagaggatggatggag

SEQ ID NO: 32324 - DNA, 122 bp, Homo sapiens
ttcaagcgattctcctgcctcagcctcccgagtagccggaattacaggcgtgagccagctcgcctggcctataattcttacatgataagaaagtagaactggccgggcgtggtggctcacgc

SEQ ID NO: 32325 - DNA, 122 bp, Homo sapiens
gccaggtgagcagcgctgtcggccaacttgaagatggctgcggggccgggagaggtactgcgacttcagatgggtctgctgccccccttcactttccctagccacccaggagtaatgacggg

SEQ ID NO: 32326 - DNA, 122 bp, Homo sapiens
ctcgctttgggacttggagaactgtggttccagtaactgggtggcgggatctcccccaggcggggcttaagcgggaagggcgagcagttccagagcgggccgcgcggggcgcggggacaggc

SEQ ID NO: 32327 - DNA, 122 bp, Homo sapiens
ctcaccctttcagggaaaccctgccatgctttcctccttaggagttacttttggcaggcccgggtcccaaagtctaagggcctgtgtatttacttcccctgaagagacaagggcctgtagcc

SEQ ID NO: 32328 - DNA, 122 bp, Homo sapiens
cactgtcagagtggtcttgttggatgctaatgcttgctgaaattgtgtacgttcatcaggcggacaccagttcctagtccaggctagctccaggtgtcagaggccacttttcccttctactc

SEQ ID NO: 32329 - DNA, 122 bp, Homo sapiens
attacttgtttttaaaattgcagctaacattaagcatttattttgcgttcatcaacagtgcggactttgtcatgtgctttttccatttaatttctgtaatccatgagatgtaggagatggtt

SEQ ID NO: 32330 - DNA, 122 bp, Homo sapiens
ttagactgtgttaacaaaccattacgtgttccaattagagcggcagcggacctggctggccgggcgtgtaagaacgctctcctcttcccgctaacaggctgaggggcgccgccccaggaggg

SEQ ID NO: 32331 - DNA, 122 bp, Homo sapiens
tggctaagtgacttctggtcggggcagctctacagaatccatgcaagagaggtttaggggcggcagtctcaggggcaggaagcttgggggcttcactcaaagctggacatgctaagtgcacc

SEQ ID NO: 32332 - DNA, 122 bp, Homo sapiens
aaacagcccccgccaggccccctctgagaaggctgcaggtactggagaagtttctggagacgaggaacgacactcagctcctgccatcacctcccaccgctgggagcctctggggtgagtca

SEQ ID NO: 32333 - DNA, 122 bp, Homo sapiens
gaaatatcttcgtataataaccagacagaatcattctcagaaagtgctttgtgatgtgtgcgttcaactcacagagtttaacctttcttttcatagaggagtttggaaacacactgtttgta

SEQ ID NO: 32334 - DNA, 122 bp, Homo sapiens
acgctcacgggtcctctggcggtgtcctttgagctgccgggacggcgcaaggtggctgagcgaagctttttgctcggtgcttacagggagtacctgagatggtttgggaaaggaaacagggg

SEQ ID NO: 32335 - DNA, 122 bp, Homo sapiens
cctgatcaaaccatttagcctcaattctgaacatgtgattttcccaaaatcagttacattcgaaaggatatcatttaaaaaaaaaaaaatcctgatttgacaactctatgtctttgaattta

SEQ ID NO: 32336 - DNA, 122 bp, Homo sapiens
gtgtgagagctgccggcacggccagcagtggcaacagtaacgccttggagtgcagtccctcgccgggtggagcagtgtctggaacggcgctcagccgctcgcagcctttgaggagagcagtg

SEQ ID NO: 32337 - DNA, 122 bp, Homo sapiens
gcccacagaccacggcggcgtggggagacctggagccgagctttgcgctggtctggggaacggcggtagcgtggaccggttcctgggatctctttgccctgctcggagtgacagggtgaaaa

SEQ ID NO: 32338 - DNA, 122 bp, Homo sapiens
ccaggcatgtgctaggggaagctgccatttgagaagcttttgtttccctgacacctttgtcgggacatgaaaaatggaagggaatgagcagcagctggctgcttctgcattgaagcctggct

SEQ ID NO: 32339 - DNA, 122 bp, Homo sapiens
ggcggtggtggcggccaccgtaggagtcactcttcagcaggaacatggtgacgtggccctcggcactcatgatgaccacataggggtcggccacggcgcactgcacgatgggggcgcccagg

SEQ ID NO: 32340 - DNA, 122 bp, Homo sapiens
cgagcttctccctgcgttcccctccacccccagcctccgaacgcaccttccctgcgctggcgaccagctgtcacccccattttgcagctactgagacttgagatgttgggagcctaaaggac

SEQ ID NO: 32341 - DNA, 122 bp, Homo sapiens
tgctaagctaataaatgtaatgcagatattacaaaattcaaaaacatccaaaatctgaaacgcttctggtcccaagcattttggataaaggatactcagcctgtatgtaaaatgtttctcct

SEQ ID NO: 32342 - DNA, 122 bp, Homo sapiens
tcgatgcttctttggtaaaagcagctgtcaccacggccgcggcctagagaagaggccagacgcacaatgaaacctgctgcacgttctcgaagtcaggggcccagatctgcccgtccccagga

SEQ ID NO: 32343 - DNA, 122 bp, Homo sapiens
tccctggctcctgcctgcgcggctgcagctgcatctggaagggcaaattctgcctgttcccggctcccccaggagcagagaggctcggatccacagctgcagtttgggtggctgtagccctg

SEQ ID NO: 32344 - DNA, 122 bp, Homo sapiens
ggacacgtaggggaaaccagctactcacttcggtcttgtccgcaagggatccctttctgacgggaaagaaaggcggcgagtccggtcctgttgagtaagcggaagagagatcaaggggaaga

SEQ ID NO: 32345 - DNA, 122 bp, Homo sapiens
ggtcggcccggccccgccgcatccccgcgcggtcacctgctcgcagcgcctcgcaggcggcggccagggcctcccggtagcgcccctggtgcagtagctccccgagcctgccggccgcccgg

SEQ ID NO: 32346 - DNA, 122 bp, Homo sapiens
cgccacgtcgggggcacccagtacagccctcagcgatgtagggttgagctccaggagtcccgcggggcccgcgccccgcgccagcagctcctgcaagtggctcacgatgcagcgctcggccg

SEQ ID NO: 32347 - DNA, 122 bp, Homo sapiens
ttggtgaattactggaaaatctgattggatgaatcacttcatttttgaatcctctcttctcggttagtctgcgatccaagaacgttaacttcttaaagttctaattctgcgcttctcaagct

SEQ ID NO: 32348 - DNA, 122 bp, Homo sapiens
ttttattgagcctacctatagttcatgtgtgttagtataaaggagtgattatgcgaaaggcggatagggtgaattggtagatattttgctccaatagttgtggctcgctccatttcaatgca

SEQ ID NO: 32349 - DNA, 122 bp, Homo sapiens
attaaataattaaaataatacaccaaggaggtaaccccttaactctcgcatatttcattgcgccacgggctaatcttcctctagctataaatacaaagaaggcacactctagcccaccccca

SEQ ID NO: 32350 - DNA, 122 bp, Homo sapiens
aaaatgatttgtgaagcttgtatgtatgggtagtatattttaaggctgttgaaattgagccgcacctaggactgatattcttggcagtcatcacaaaaggaaagtgccatctgtattagtcc

SEQ ID NO: 32351 - DNA, 122 bp, Homo sapiens
gattagttatcaattctgataatcttgcctctcttgccagtggtagtttagagatagtcacgtgccctggttctggccaatgagaaaagatctgagggatctttggtataatttctccactc

SEQ ID NO: 32352 - DNA, 122 bp, Homo sapiens
tgagtgttacagctcttaaggtggcgtgtctgggtctggagtttgtttcttctgatgttccgatgcgttcggagtttcttccttctggtgggttcgtggtctccctggctcaggagtgaagc

SEQ ID NO: 32353 - DNA, 122 bp, Homo sapiens
cctcgtgaaatatttcttgaccacttaccctgggccggaactgttttaggcagacgatgtcgctgcccacagggagtttacatctatagagtggggagaccgatgagaagcaaaaggtaact

SEQ ID NO: 32354 - DNA, 122 bp, Homo sapiens
tcatgtggtgctttatagcttatcttgttaatagcggccccatttcacaggcggggaaatcgagattcagcggccccatttcacaggcagggaaattgagatttgaagagaccgagtgatat

SEQ ID NO: 32355 - DNA, 122 bp, Homo sapiens
taggcggggctggggagatgccaggatccccagggctcccgaggctaggctgagaattggcggggtgtcggagctttgccttagggcaaagggaaatgcaaattttaatgacaggttaaaaa

SEQ ID NO: 32356 - DNA, 122 bp, Homo sapiens
atgataaaaacccaccttgcttgctgttgggaggattaaaggagtggccagcatggtaaacggtacatacctggcacacagtggtggctactgtcatcttgaagcaggcccaatgctaacag

SEQ ID NO: 32357 - DNA, 122 bp, Homo sapiens
tggcagcctcagtctcccagagcctgtgggaactcggcagccgagaggcagaaggctgggcgacgtccggagaagaagaaacgggggaagaacttttctcttacgatctggctttactctca

SEQ ID NO: 32358 - DNA, 122 bp, Homo sapiens
gtccctacttacttgctgttttagggcattttcagcgacttcactctcttctacctcaaacgccatccacttttggagacaggtaccactgcccctaggcagggacttgggagaggacctta

SEQ ID NO: 32359 - DNA, 122 bp, Homo sapiens
agttcgcaggcggcggaaacctttgccaagagcactagctggctccctcagcaaacaggacgggataaggttagctcgtttatccaacaaatatttgcagagcccctactttgtacctgaaa

SEQ ID NO: 32360 - DNA, 122 bp, Homo sapiens
cctgcggcggccgctgtcgcccgagacccggcggcgccggagcagctggcgccgccacaccgtggtggtgcagagcccgctgactgacctcaacttcaacgagtggaaggagctgggcggag

SEQ ID NO: 32361 - DNA, 122 bp, Homo sapiens
gggcatacacagctgagccaaggacacggaagctatcccgggaaggttgcggagtccgcgcggtggccgctccttaccctcgttcagtggctcttggtgaccccaaggctccgcccgccccc

SEQ ID NO: 32362 - DNA, 122 bp, Homo sapiens
acccactggggggctgtgcgtgtgcatatgcgtgagatacacaggtgaattctaacaggccgtgtgtgtgagcgagcacgtgttgggacctcagatcctgagggtactgacgctgcttctgt

SEQ ID NO: 32363 - DNA, 122 bp, Homo sapiens
caggagctgggagcatctcccagcccagctgctggtatgggtgtggcattcacaataacacgttactcctggacatggggctgagcatatggggcccagagctgcagctcctcctgaacctt

SEQ ID NO: 32364 - DNA, 122 bp, Homo sapiens
gggctcttatcactgtacctgcgagcccccactggtgctggatggctcgcagcgccgctgcgtctccaacgagagccagagcctcggtaaccccgcccacgccatccaggccctccttccct

SEQ ID NO: 32365 - DNA, 122 bp, Homo sapiens
gccaacagtcctgtggacagcccggaaaggcctgcctgcctggcccgcccagcctctcagcggaaaacaaaggcgcttcagacccggctggcttctgtcctgcctgggaggcactgtgaggg

SEQ ID NO: 32366 - DNA, 122 bp, Homo sapiens
gggcagggtctgctttggagagcaaaatagaaactccggcaacactggtcctgagtgacacgctcccacgcacccctaccccacccctggcctcctccctggctcccagcttggtgcccatc

SEQ ID NO: 32367 - DNA, 122 bp, Homo sapiens
gaggaaactggcacagccatcagcccacttcatatagacagatagatgcagaaatgatgacggggaccaggtggcctgagtcttcgccctctaccttttccaccatgccacactgccttcca

SEQ ID NO: 32368 - DNA, 122 bp, Homo sapiens
ctagcaccggggccagggctggtgccagtgctggcactcaccttagcctgtggaggttcccgctcttctttccccggcagagtctcccagctttcgccactggaggacagggtttgctctcg

SEQ ID NO: 32369 - DNA, 122 bp, Homo sapiens
cgtgcccttcatgttagactacatcataataggaagctttactctacagacctttgaaggcgtaagagacgacagctctgtggtgatctgagcttggagtcagagaggtctccctgagcaaa

SEQ ID NO: 32370 - DNA, 122 bp, Homo sapiens
ctttctgcaagggaagaaggcttaaccctgtgtgtttagaacaacaatccaggaatccaacgctactgctctaagtgcaggcaggcgtctcgtgggcacttacgatctttatcaaacttggg

SEQ ID NO: 32371 - DNA, 122 bp, Homo sapiens
tatatactgtgttcactttatgttttgtcagacactgaaattgaggaagagagattttggcgttctgttggtttatggagagagttgatcagagattgctccttggctgagttgctgtctgc

SEQ ID NO: 32372 - DNA, 122 bp, Homo sapiens
agccgggcgcccgttcctctagggctgggggaccccaaagtcagaagttggggcggagggcgctctagtcccagagcactccggggagtggcagccggtgaagcggcgcgggcgtccgacaa

SEQ ID NO: 32373 - DNA, 122 bp, Homo sapiens
ctgaggtataatttttgagtcaactgtgtcaggtaggtgagaagaaataaagcattgctgcggccagagatttgaagagctgcaaaccaccactttggaggggtaggattaggaaagaaaat

SEQ ID NO: 32374 - DNA, 122 bp, Homo sapiens
tctccccacttgcgccagctctaagaccctgcccttaccggtaggtgatgctaagcacagcgtacaaggccccaaagaggaggaattccttgtagaggagcttgtagatgcttcccctccag

SEQ ID NO: 32375 - DNA, 122 bp, Homo sapiens
atcagtagcacgatgtcgcgcgtgccgaatttcacaccagtagcacgatgtcgcgcgtgccgaatttcacatcagtagcacgttgttgcgcgtgttaaatttcatatcagtagcaacaatat

SEQ ID NO: 32376 - DNA, 122 bp, Homo sapiens
agcgcggaaggctgggcctcaggtagcttcaatcattcacctgctggttacgggtcgcggcgccggggaccctactccggacctcggccatgcaacccgcagcatacggagaacgctgggcg

SEQ ID NO: 32377 - DNA, 122 bp, Homo sapiens
gcgtgttctgggttttcctgttgctcagcttagggtgcagtctttgttgctaggggctcccgccctagctcagtccctggcccccaggagaccccgagcacaattctcacttatcccagatg

SEQ ID NO: 32378 - DNA, 122 bp, Homo sapiens
aggaagaggaaggagagacggagccagggacagacaggaggtccgggctgccgctgctgccgccaccaccactgccgccgccccggggcctgccccccgacatcggctctctgagccctcct

SEQ ID NO: 32379 - DNA, 122 bp, Homo sapiens
gtgcagagctgggcgccagggcaggtgggctgggcatggcgcagcgaggagcagacccagcggatggaggacaggtccccccgggtgagggtgctcacaaaggcatgtgccgtcggctcctc

SEQ ID NO: 32380 - DNA, 122 bp, Homo sapiens
atttcgcaaattgcaacacatacattatctagtccacgcaaaggacaggccttggggacacggcacggggaacgtgttccacctggacgactgaatcagaagtctctcccccatcaattgaa

SEQ ID NO: 32381 - DNA, 122 bp, Homo sapiens
ctgctcctcgatctgtttgttcagctcttctagcatcttctgttgctccaccagggagggcgtcgcagccccggccaccggctcggcaggcctctccacggagttccttctcacgtcggcac

SEQ ID NO: 32382 - DNA, 122 bp, Homo sapiens
ttctgcggggtccgcagggcgctggaggaagggccggcgggggctcgcggccctagcgcccgctcacctccgctcccgcccccgacgcagccatctagccccgtggaggatcctcgggcgcg

SEQ ID NO: 32383 - DNA, 122 bp, Homo sapiens
actgcctcgctcctcacagcttcagaggcctcgacagttcccagcctcactgcagacccacgcccacttctcatcaagctcccgaaatgtcggagctgccttcactgcgcacggcaggggag

SEQ ID NO: 32384 - DNA, 122 bp, Homo sapiens
tggtagccgcgcaggtagacgccgaaggcgcccaggccggcggggtaggcgggcgccaggcggccccgcaccacggccatatcctccagcagccgcgcccgcagcgcctccagctgcccggc

SEQ ID NO: 32385 - DNA, 122 bp, Homo sapiens
gcggcagcgacagccccagcaactgcctctgccggcgcctcccgcaggccctcgccaactcgccccgcgcaccatgctgactcccggcctgcggaactcgtagtgcagcccctgtcgcctcc

SEQ ID NO: 32386 - DNA, 122 bp, Homo sapiens
acgtgttggccaggtgggtggtgaagacatatacgaactgcgagggaggctttccggggacgcccccgcccccgcccccgcccccaggggcatcaggccgaaggccaggaggagggccgtgc

SEQ ID NO: 32387 - DNA, 122 bp, Homo sapiens
actatcaaaaatagtactattgtcttccccactggatatgtaaaacaacaccacaagcggcgtcaaatgacctgctaaatttgagggaatgttatcctctcccccactcccccggccccaga

SEQ ID NO: 32388 - DNA, 122 bp, Homo sapiens
tctccccactgcctgccccagaaagtgggccttgagacccgggaaccccaggtcaaaatgcgacggatgctcggatcgggcggcactcggttcctggctggatttgtggctccgcagacccc

SEQ ID NO: 32389 - DNA, 122 bp, Homo sapiens
cagtcccggcgttcagcactgctgttccagcctctggctggacttcccgccctccctggccggcaccaaggctactgtcacctgagtggtttccccagcccctggggaagggagtgagggtg

SEQ ID NO: 32390 - DNA, 122 bp, Homo sapiens
ccacagcacgttgctgagcacacagagacactggctgtgaggtggggccagctcctctggcggagacagctggggttctattgatacgcagggcagatttgcctgctctggccggccaggca

SEQ ID NO: 32391 - DNA, 122 bp, Homo sapiens
ttgcactgagaagtttctgaacaatagaatgacatcacatgagttttagccaatggcctgcggagaaccagattggaggaaaaagcctggttgtgaagtccatttgggcagcgtcagtgggg

SEQ ID NO: 32392 - DNA, 122 bp, Homo sapiens
aataattttgatctgtggttggatgaatccaagcacgcagaatgcaaggatacggagggccgactgtatcagggtttaatgggtgactgcagaggtaaggctgtctacagtgacttcatcct

SEQ ID NO: 32393 - DNA, 122 bp, Homo sapiens
gggttctgtcagagccccagaggttgtgggttagacttgatgacataacagcaaatgcagcgtgtggttacagaaagcaagagccgcggaagacgtttgaaaacaattgggaaaatttgtat

SEQ ID NO: 32394 - DNA, 122 bp, Homo sapiens
caactgaagaggagccattatttattttttttcctagcatttgctgcgactacacactgccggagcgtttggaaatgttgtttgctgttaccctgtatttgtctataaaattcttactgtag

SEQ ID NO: 32395 - DNA, 122 bp, Homo sapiens
atccttagaagatgagttgagtggtcattccccaagacctcggcatcggtatcgccaaggcggctttgcagtaaatgttaggggaagaatggagggccatttgtgttgtgcagaggaagaca

SEQ ID NO: 32396 - DNA, 122 bp, Homo sapiens
gggggaaatggggagaccgtaccagcctttttgcccgggatctgaaaggtctcagggccacggagcaacactagcctgacaccagactctgctgggccctctcactgctggaaaggaggagg

SEQ ID NO: 32397 - DNA, 122 bp, Homo sapiens
ctcctccaatcggctgcgcttggcagggcctggtcctcctggctgctgtccccaccagggcgcaaggcaggcgctggggctgcagggccggctgcccatcacctcgacggcgctgcggacgg

SEQ ID NO: 32398 - DNA, 122 bp, Homo sapiens
aggagactttttgcttggaaaagtcctgctattaaaacaaaaacaaaaaccaatcaattccggagggaagaaaatgcctccagtgtgtgtctgcgcttcccccgggccgaggacggtggtcg

SEQ ID NO: 32399 - DNA, 122 bp, Homo sapiens
cgccgcggggggacgtctgcggcccgcgtcggcgctggggacaaaggtgcgtgtcgttgtcgggtccgggctctctcgttagccttgccctagttttgcacttttgaaaaagttgtgacaac

SEQ ID NO: 32400 - DNA, 122 bp, Homo sapiens
aacggctccattctcccctaaggctgacatttttgttgaaggctgagcacgcatgtcttccgtgcttgtggcaaaaggccctttcctggctggctccagaatcctcaccagttaattgggaa

SEQ ID NO: 32401 - DNA, 122 bp, Homo sapiens
gtacgacaggctgcggcgccctgcttcctgcgccctccttcctgcttccggtcttaggcccgcctcttggttgcttaacttccgcgggccagaaggctgaggacttgaagaaccggtgaacc

SEQ ID NO: 32402 - DNA, 122 bp, Homo sapiens
ggagcccctcccaaaggagctggctcacagcctctccttccctgggggagcctccaggcacgcactccccgcttcccctgtcctatctccacttccccatcaaataacagggacagggagct

SEQ ID NO: 32403 - DNA, 122 bp, Homo sapiens
tctgttgactaaaagcagcagcttgtccatagtagagctggataaacagtgcaggttctccgtcagggctctcctcctcttccctctactcactctccaaccaggagtctaggacaaccaca

SEQ ID NO: 32404 - DNA, 122 bp, Homo sapiens
actgggggctggccgaggcagcccgggagtgggcagcatggtagtggagcaatcagggtgcggggtgggagggaccgtatgctaggctgagcagaggcgagtgtacccatcgtgaccgcggt

SEQ ID NO: 32405 - DNA, 122 bp, Homo sapiens
gagtaatctggcgatcacgcggtgtaattgctggctgtcagggcagatggatgctccgcgcgccgactttgcagccgtctgcccttccttcacgctgagcctccgcccccagcccgcagcct

SEQ ID NO: 32406 - DNA, 122 bp, Homo sapiens
ggttgctgtctctaagcccccttcccttccactatgagctgctggcagtgggtttgtattcggttcccaggggttgagagcatgcctgtgggagtcatggacatgaagggatgctgcaatgt

SEQ ID NO: 32407 - DNA, 122 bp, Homo sapiens
tgctgacaagacttgagggaggggtgaggccccagtgcctgccaattctgatcaacaatgcggccaatctgggaaaatccactttattgagtccactttgtttagtctggctctcctggctg

SEQ ID NO: 32408 - DNA, 122 bp, Homo sapiens
aagcatgtactgggcacctactgtgtaccagcctctgttgggggtggtgagaactggacacgaacagacggaaaagaaggagatgttctcaggatgggagagagaaagtcgtcagtaaatgt

SEQ ID NO: 32409 - DNA, 122 bp, Homo sapiens
ggtggcttagagtccctgttctgcctgtgactgttgtgccacattggggacgtcatttagcgtctccgaggctcagttttctcatctgtaaaatggggacaatatcagcgccttcttcagag

SEQ ID NO: 32410 - DNA, 122 bp, Homo sapiens
ctgtccactactcagtgggaatcagaatggaagaaggttaggaataaaggaaaaagcagacggtataaaagtgcacagagcagatggacttcagattcagacaaaccaggtttgactcctga

SEQ ID NO: 32411 - DNA, 122 bp, Homo sapiens
gtgaggtacccagcacctcctcaaaggcctttatgtaaatcaagtcctaattaggccatccggcgtttgtgtagaatatcatttttttaattaccagccctgggcaggttccccggctgcct

SEQ ID NO: 32412 - DNA, 122 bp, Homo sapiens
cttgacccatgggaagatgtgaggcctggaggacactccacttcccaccacctcaccaggcgccccagtacctgccctcccccaggccccacccaccatttcagcctctgggctcagactcc

SEQ ID NO: 32413 - DNA, 122 bp, Homo sapiens
gccccggggggaagcagctgtgggcggcagtgcgtgggttgggcaggggtcccttccctccgtgagactctgctctgctgttcagcctcccagaaagcctccaccctccccgcggcgaagcc

SEQ ID NO: 32414 - DNA, 122 bp, Homo sapiens
aggccccgacgaactgagcattgatcactgtggtggctaagcaaggaggggaggcgacgccgggcttaagcgaaccacagaggagaactggcaacgctgaatacagaccttgtctgcaggcg

SEQ ID NO: 32415 - DNA, 122 bp, Homo sapiens
ggccagaaaggacgttgctatggtttccacgcacgttgtctccctcggcctgtttctttgcgcggcgctggcgattccgtaatttccgcttccggtagtgagaacccttccggtgggctagg

SEQ ID NO: 32416 - DNA, 122 bp, Homo sapiens
tcctcagcccccgaggtgggaggtggtgggggggcggggaggagaagaagaaggctctcccgacacggtgactcaggcctccttgacccgctcctgggtgggcacgttcctgcgccccggtc

SEQ ID NO: 32417 - DNA, 122 bp, Homo sapiens
gtatgtgtatctcacaaagtctttatccatttatctgttcgggcacattgaggttatttccgtatcttggttattctgtataatgctccaaaaaacatgggaattcaagatatattttgggg

SEQ ID NO: 32418 - DNA, 122 bp, Homo sapiens
tagcaggaattcctcatgaagtttgtactctatgtgagaggtctggatatgtttatgaatcgagaacagtaaagtacagggtatgtaacggagccaaacgcgaatccagttggaatcctaag

SEQ ID NO: 32419 - DNA, 122 bp, Homo sapiens
aagggtgttattaaatagaatgaggcaaaaataggtacattagctttcccttactgccatcgcaccccttatccacccccactctccagccaaaaggaaaagggagcttccagaatgccttt

SEQ ID NO: 32420 - DNA, 122 bp, Homo sapiens
tttggggccgaatgtgaacgcctcctggatcatgcttgaggcgagccgagtaccgaaccccgcatctccagcccaaggcttttcttggaacgctggggagagtgctgtttggggacacccag

SEQ ID NO: 32421 - DNA, 122 bp, Homo sapiens
atgcctgcgacaacatgggggcgttgccacaggatgaaagatgttaccaatttagcctgacgaccacttcaaagtcaagaggaagaacagatgggttggcattggaaaattctcctacttgc

SEQ ID NO: 32422 - DNA, 122 bp, Homo sapiens
tgccaccaaagtcatgagtcctttcagagctgcaggcccgtgtgtgtgcatgtatgtgtccgtgtgtatgtgtgtgcacatgcataggccttttgtgtgtgtgtcccggtgtgtagtgtgta

SEQ ID NO: 32423 - DNA, 122 bp, Homo sapiens
tgatcttatctttcctttccggtgatgtcttctataatctaatgagcccatagaatcagccggtgaccaggagaggtggggggacagaagaggtctgagcctaaggctaacactgagttagc

SEQ ID NO: 32424 - DNA, 122 bp, Homo sapiens
aaccacagctttcatcttccaggactcacaagcaaattttaaagtcaactcaggaaaggacgcactccaggaatgctttttacaagcagcagactttctgacttggtatcaacaaggatgtt

SEQ ID NO: 32425 - DNA, 122 bp, Homo sapiens
tggtctgggtcctgtgtgagcactggaatagcctacatcaaatcttaagtctctcagagtcgcataaaacaaccgaattctttaattcaaagccacgttttcaattctgagcagcccagaga

SEQ ID NO: 32426 - DNA, 122 bp, Homo sapiens
cggtgtacccgagcccagtgctttgcttggcattcggggtgtgaagtggacagaccctcgcgcgtcctggggaggacagccaaatgcctggcgcagctaagggccaaagcaaggcatggtga

SEQ ID NO: 32427 - DNA, 122 bp, Homo sapiens
gggggggagagctgggaatggttcactccattagaagggggcggaggaagtacagcctcacgcccacgagcaggcctgacgtgggggatgacacggaatgattttttttttaatatagacac

SEQ ID NO: 32428 - DNA, 122 bp, Homo sapiens
acacatggatacatggtgggtaacaacatacactggagcctgtgggggtctggggaagggcgtcaggaagaatggatgctgggcttaatacataggtgatgtgttgatctgtgcagcaaacc

SEQ ID NO: 32429 - DNA, 122 bp, Homo sapiens
gaaactcaccgcgcgcaggagttggtgcgggcgtcccgggcaggttagacttctgtgagccgcagccccgaaactgaggttggtgcagacccgtcctgggagccaggaggtgggacctgtcc

SEQ ID NO: 32430 - DNA, 122 bp, Homo sapiens
gaaggaggcgtaggctgaggaggaagagggaggaggggtagggaagtcctggcggagaagcgccctaagactccaaaggagacaacaggagtttgtgctggagctcccccgctgcccatcgg

SEQ ID NO: 32431 - DNA, 122 bp, Homo sapiens
cccagctccaaggttgtccccagggcagcacagcaccggcctctgaggcccacgggtgcacgcgaaacacatgccgagcgtcagcgcccctgagcacccagcctcggcgcctcctccaggaa

SEQ ID NO: 32432 - DNA, 122 bp, Homo sapiens
gcgtgcggggcagagccccgggagggcgcgtctgtccacgcctaccggacgcgccgaggtcgcgctgcctgtgttctccgagggccttcatttaaagaaaataagggtgttttgggtttttc

SEQ ID NO: 32433 - DNA, 122 bp, Homo sapiens
accatgtaaatgtattgcctgtccccctaaaatggattaattgagaagagagcgagaccacgccgagcctcgggccatcacagcctgaatgggaagcagcgaaccccgctgtgacggcttca

SEQ ID NO: 32434 - DNA, 122 bp, Homo sapiens
gtgctcagctgagtcgaaagaagagtaggatgtcactaagcagagacttggaggtggaggcggccctcccggcacagtcagcagtgcaagcagaatcacagaggcctgcaagtgtgggctgg

SEQ ID NO: 32435 - DNA, 122 bp, Homo sapiens
ccctcccccgcctctccgcgcactccgcgtcccggcctccagttcccctttcccttgaaccgctcacttcacagcccttcgcccccgggaagaagaaacatttcccgaagcgcactcctcag

SEQ ID NO: 32436 - DNA, 122 bp, Homo sapiens
ttatcagcccccacggacagcaccaggaaaggaaccacttgcaggatgaccagggaggagcggatacccaagtaggagaagaagcccatggcagccatgactgctcccaggaccacggccac

SEQ ID NO: 32437 - DNA, 122 bp, Homo sapiens
tcaatatagatctactactaaacaagtaagaccaattacacaattaatgtcctaaaaccccgagtggagaagtaaaatctacttgttttctgttgacttgaatgccttctcttctttgttga

SEQ ID NO: 32438 - DNA, 122 bp, Homo sapiens
ggctggcaccacgagtagcccccgcacacattaggccgatctggaacatgtgggctcacccgagctgggagcaccaagaccctgcctacatgcttggaagcgagtcaggccacagcgagacc

SEQ ID NO: 32439 - DNA, 122 bp, Homo sapiens
cgcgcttcaacttcggttggtgtgtgtcgaagaaacctgactgcgccctgaggagaacagcggagaaggtccaccgagcctggcgaaaggtccgctgagcgggctgtcgtccggagccactc

SEQ ID NO: 32440 - DNA, 122 bp, Homo sapiens
cctgcccccaggggagcccgtggtgttgaagctgggcattacctgggcagtggaccctgccgaggctgaggcctagttactggccctgcagcttgtctccatggtgggctgctatgatacca

SEQ ID NO: 32441 - DNA, 122 bp, Homo sapiens
atgaaggattggccatgctgcttcagaaggacgacagcgggccggggtcctgcaccctctcggacacctgtgtgacaggcattatcactgcacgttgagggagggcttgctccggcaaccta

SEQ ID NO: 32442 - DNA, 122 bp, Homo sapiens
ctcaagttttcacttatcatctattccaccgtgttctgggtgagtgaccccagtagggcccggggatgggggtggggacccacaatccggccgccccctcactggcccggggttgggtccac

SEQ ID NO: 32443 - DNA, 122 bp, Homo sapiens
ttgaatacttacaacgtttacaccttcaatattaattaaattccatttagttttagaggacggaagtgcacaaaacaagtggctgttggaaacatcttcaaagagggaacgaccacagatga

SEQ ID NO: 32444 - DNA, 122 bp, Homo sapiens
ggttcctagggatgacacaggagagcagtataagcacctcggccatccagacccagagctcgaacgtccctctctgccagggatgcccaaatctagatctccagtcctaacctccctggaag

SEQ ID NO: 32445 - DNA, 122 bp, Homo sapiens
ccagaaatgaagatggcaggggcggtaacactgctagtttgggactaagaaaggcaacctcgggaggaggcgagcccctgctatgatgaaacttctaggacagcctcccttcgcccccccca

SEQ ID NO: 32446 - DNA, 122 bp, Homo sapiens
tcctgggaaggggttgtagggccgagattttggcgtcctgtatggagaggagcagcctgccggagaagatagtgagctccctgagaaagcaggtgtgcaagcaaaggtcagatggacatgtg

SEQ ID NO: 32447 - DNA, 122 bp, Homo sapiens
cgtgataagaaatcagtaagaagaataaaagacatgtttgagagccaacataaacttgtccgaaccccttacaatcgatgaccgcagggagccgctgaagagctccgaggcggtcgatagcc

SEQ ID NO: 32448 - DNA, 122 bp, Homo sapiens
ctcgccctttcatcaggtgagacggggaggctgcaacccaagtccagtggcctcagtgtgcgtgtgtgcgtgtgtgtatgcatgcatttgtgtgtgcatgtgtgcacgtgtgtgcgtgtgtg

SEQ ID NO: 32449 - DNA, 122 bp, Homo sapiens
acgtgccgccgagcagcggaggtccagacgggcgcgtggcatctggggcaatgaccagtgcgtcgctgagactgccggcgccaggcctcgaccctgctgtgtctgcggcgacccggcccact

SEQ ID NO: 32450 - DNA, 122 bp, Homo sapiens
gcttcaaccatgggccagggtcgtgcaggggccaggatccaggaacgctaactgcgcgtgcgctagcctggaagctgccgcgagccgcccccccgcccccgcccgcgtccttgtgccaggtg

SEQ ID NO: 32451 - DNA, 122 bp, Homo sapiens
atattctagtctctaggccacaagacaatgttgcacccagtgccagtcgatccgtcacggcgccgcaaactttccctgaacggagggtttgtggctgacatctctagtttctcagagcctgg

SEQ ID NO: 32452 - DNA, 122 bp, Homo sapiens
catgcacatgactatacacccaagtcccccttgtaagggagagcccatgtgtttatgacacgcatacctgaatgtctgtgtgtgcacagccatgcgggcaagttatccatctgtctgcacac

SEQ ID NO: 32453 - DNA, 122 bp, Homo sapiens
aggagggggtcttggaaagccggtgcccagaccaggggtccgctccacctcccgtttgcacggaccctgggtgccagcctccgtgtggacagggcccagtgcagggtccagggtgacccgca

SEQ ID NO: 32454 - DNA, 122 bp, Homo sapiens
ctcgtcactctgcctcctcattgtcactcgggtctgaataaatggcttgagctgcttgaccgaggatacatattgttactttttgattatatgctaaataagggatagattacttgtgagtt

SEQ ID NO: 32455 - DNA, 122 bp, Homo sapiens
gccaccaccgcccgctccttcctccggggacatggggagctggctgaaggcgtaaaggagcgagcagaagcctcaggccagacacagcgccaccacgcgcggtagcgccgcatggccccagc

SEQ ID NO: 32456 - DNA, 122 bp, Homo sapiens
acagggtctgagcacattgtgcatgacctgggctcccgggagcggcctgggcctcctacccggccaccctgcctcacgccaggacagcgcagcccagccccggttctctcttccaaggaaga

SEQ ID NO: 32457 - DNA, 122 bp, Homo sapiens
gactggcctgagtccggggggtgggggtttcgaggcgggaagccgggctgtcccgaatctcggagggtgcaaggccaggaaagagtccgggttcccactccgcattcactgcctggtgtgac

SEQ ID NO: 32458 - DNA, 122 bp, Homo sapiens
ctgagtggtgcctctgtcaacctagcaagagattaagccaagcaggcctgggtttggcttcgctgctagctagttggtggagttaggaccttggtggagttatttcatctttctaagcctct

SEQ ID NO: 32459 - DNA, 122 bp, Homo sapiens
cggggtcagcaggtgcccttcaacataaaagcctacctgcctaccccttgaagggtggcacggggctggaccccaccctggaggcagggggccctcctccagcagccagggcccctcttgca

SEQ ID NO: 32460 - DNA, 122 bp, Homo sapiens
gtgtcccaggtagggacggcacaggagggtgcatggggcgtgggggagctgagcaagggtcgctcacttagaaatgtctttggaatggtgtttaactaatgctgctggcggacatcctaaaa

SEQ ID NO: 32461 - DNA, 122 bp, Homo sapiens
aagattcaagtttctttttgccctaaagatcattatgggatgggctcctaataggcccaacgtggagaaaattctgagttatttttggtcaaagaggtttacacagaagccagctctgaatt

SEQ ID NO: 32462 - DNA, 122 bp, Homo sapiens
ggaggccacaggagccccttccccaacctgaagccctggagatggcctggctggaggggacgacggcccgcagcggggacccgactcacttcttcgtccccacctgccctggggtccgaagg

SEQ ID NO: 32463 - DNA, 122 bp, Homo sapiens
cactggcaccggcaggggggccgactgttcattcacctgattttcaaagcctgaggtttccgacgtgctgcaccggctgagagaagaaatcccactgctgtagctgcccgacaagacagggg

SEQ ID NO: 32464 - DNA, 122 bp, Homo sapiens
tgcggtggagctaacgctaccaggctgccccgcctcagacggtcttcaactgggctttcccgcccggagccagatcctgcccctggcaagacgcctgcacgtctcttcctaccattttctga

SEQ ID NO: 32465 - DNA, 122 bp, Homo sapiens
gcggggctcgggttcttggggctgttcgcggctgaggtgagccaaaggcgaaccaggcttcggcctggggcgggggcggctcgagtctttctggacgctccgtcttcggtttctacaggtga

SEQ ID NO: 32466 - DNA, 122 bp, Homo sapiens
ggcgggaagggctctgacatgtcagcccgcataccccacagccccacagagggacccatccgaggccacacacctgcccccagcagcaggatgtccccaggtgttagagagtcctgctgggc

SEQ ID NO: 32467 - DNA, 122 bp, Homo sapiens
gaggcgcgtcagccccgtcctccccgccctccggcttctcttcccttctggcccccagtccgcacctcacgtcgggaaattgttgccgcaggccagccacctccaggcccagcagcgcgggg

SEQ ID NO: 32468 - DNA, 122 bp, Homo sapiens
gtaacaaactcgaatttttacacatccaattgtttaaaaaataacccaaacagggctgggcgcagtggctcatgcctgtaatcccagcactttgggaggccaaggcaggcggatcatgaggt

SEQ ID NO: 32469 - DNA, 122 bp, Homo sapiens
aaactcttggagggagaccagagctgggggccggggggcatgatccttcccccctacccccgcaaccagcccatgagcctgggactaccacactcctttcagagacagctggagcatcagca

SEQ ID NO: 32470 - DNA, 122 bp, Homo sapiens
caggagagctgactggggcagagcagccctggaagctcacctggaggtagcaagcatcctcgctgggactagggtgaggaccacaggtaagggacagagtaggcactggctgaaaacctggg

SEQ ID NO: 32471 - DNA, 122 bp, Homo sapiens
cgagggcggacgcaaagaacgcggaggacctctgggtgcctgcaggggagctgctccagccgggccgccgggagcggtggggagagcatcgcggagccgcccctccacgcgcccgcccagcc

SEQ ID NO: 32472 - DNA, 122 bp, Homo sapiens
ttcacagacggggacctaatagcttccattagcagcctccacgtttgctgaacacgactacggggccagacccacaggaactccaatgtggttcagccgctcaactccagggaccaaaaaga

SEQ ID NO: 32473 - DNA, 122 bp, Homo sapiens
cgccggggaagcggcaggcggctgccgaggcctgattccctcatcttctaccgccagaagcgggactgcaaggcttcggtgaacaaagagaacgccaagggccagggtctggtgcggcgcct

SEQ ID NO: 32474 - DNA, 122 bp, Homo sapiens
cccaacccctttccccacaggaggcattcagctgaggccaccacacattacatacattcacgcacttcataaaaaacacctgagggagagaccctggctttgattagcaaataaggtatgaa

SEQ ID NO: 32475 - DNA, 122 bp, Homo sapiens
ggttctgagtcagtgtcttaccctcatggcttcaagatggctctaacagctcaagacactcggtcctaatcccatgttcaatgacaggaaacggggtggaaaaggtcagagtatttttcctc

SEQ ID NO: 32476 - DNA, 122 bp, Homo sapiens
cgcggcattctggggccggaagtggggcgccagctgcgggctggtgtcatggcaggtgggcggcgccgcaggaggcgcctggcggagctgacggtggacgagttcctagcttcgggctttga

SEQ ID NO: 32477 - DNA, 122 bp, Homo sapiens
cctacgcttttgccttctcatctgggtctgtaggtccagcctctgaagtcctttgttttgcggggtcgagggcagccgccaggctgtggggggctttgtggatgggcggcaggagaggcgct

SEQ ID NO: 32478 - DNA, 122 bp, Homo sapiens
ggggaggcagctgctcacacagcagagggtgtttctcaaagtgggatcccccaccagcagcgccagtcagaatcacctgagaacttattagaaattttggccgggcgcggtggttcatgcct

SEQ ID NO: 32479 - DNA, 122 bp, Homo sapiens
agctcccgcccaggggtggtcaccgcgtccttaaccaccccaggagccccgtctccctgccgaactccttggcttctgcaaccctgtcaagacagcaaggaaagggggtcttccctggtcct

SEQ ID NO: 32480 - DNA, 122 bp, Homo sapiens
tcatttccatgcatagcaggtgaaggtaggtgcaacatacagctcaacctcatgatgctacggccagaaactgaaatgtgtttttgcccctgtgtggcatgttctgatggcaaaggtgtagg

SEQ ID NO: 32481 - DNA, 122 bp, Homo sapiens
gcggtcttggagaggggaggagacaggagcgagtcccgggactggcagctgaaaggggttcgcgtgtggttgcctgttgcagcgcttatttatccggcgctttagagtttccgaagagctgt

SEQ ID NO: 32482 - DNA, 122 bp, Homo sapiens
ccgtctgatgtccccgggagacagcaggtgttcccagttgtgtgagggtgctgaggcccccgatgagcaccgggggaggagcactgaggccccagatgagcagtgggcctggaggaacgctg

SEQ ID NO: 32483 - DNA, 122 bp, Homo sapiens
ctgactagggaagcggcggccacttagggtactgcctcctccccgtctgcgccccatgcgcgagctgcctcacctttcagtaactcttgcctgttttttggctgcggagtctccagagtgac

SEQ ID NO: 32484 - DNA, 122 bp, Homo sapiens
tcatgtaatcagtcgagggccgcccgggagggtgggagttaattctttagcgactgaggccggcttgggctctttggctccacctgtgtctgcgcgaggctgttccctattggagtccgcat

SEQ ID NO: 32485 - DNA, 122 bp, Homo sapiens
ctcaagtgctccccgattatggagcagttcaacttcaagtggcccgactccctggactgccggaaactccccaacaagaacgaccccaactacctgtgcatggaggcgcccaacaacggctc

SEQ ID NO: 32486 - DNA, 122 bp, Homo sapiens
gccccggtgcgcgcggcactgactgagctggtccgggaggcgcggaggatgctcacccagcgcttggagtgaattactgacctgtctgcccttcgattaccggctggccagggaaggggaag

SEQ ID NO: 32487 - DNA, 122 bp, Homo sapiens
ccagaagaccgagcgggactatgtgggcacgctggagttcctggtgtcggtgagtgtccccggcagacgcagggggacgtccgggcggcgcggggcgcgggtcccggagtggctgcgggaag

SEQ ID NO: 32488 - DNA, 122 bp, Homo sapiens
ggggcttaaagtgccaggagagcgcgaggctcagccaaggagtaatgaacagggccggggcggggctgtggctttaccggaccagcctcaaacaaagatgctttgagcagagcttcagaggt

SEQ ID NO: 32489 - DNA, 122 bp, Homo sapiens
agcttacagcagagccactcaggttcagagaggttgtcacctgtctcgctgcacaggccacgcggggcagagccagcacttgaacccggcgggactcatggaagtgcgctgaacacctggat

SEQ ID NO: 32490 - DNA, 122 bp, Homo sapiens
agtggtaatgagcagattagggttattacagccgaatggctcagagcgcacttgctcacccgagcaaccatcggcgaacggctgatcgcccacgactgccacggccgtcatgccaggcccgc

SEQ ID NO: 32491 - DNA, 122 bp, Homo sapiens
agatgagctcatgggtttctccaccaaggaagttttccgctggttgaatgattctttccccgccctcctctcgccccagggacatataaaggcagttgttggcacacccagccagcagacgc

SEQ ID NO: 32492 - DNA, 122 bp, Homo sapiens
agctgcggaccgaggcgagatggcggccaccgagggggtcggggaggctgcgcaagggggcgagcccgggcagccggcgcaacccccgccccagccgcacccaccgccgccccagcagcagc

SEQ ID NO: 32493 - DNA, 122 bp, Homo sapiens
gtctccattggctgctttcctggaccttgcctgccttctttttcctttcctttctctacacgagccccttcactcaaaaggtagaactgcaagggattgggccacaattcttcgttgattat

SEQ ID NO: 32494 - DNA, 122 bp, Homo sapiens
gacgtgcgcgaccctctagacccaaaacagttttagtcagcaacgggtcatcagcaggaccgagaagactgggtgggaggtctggccggtccgaaatagggaagaggtgcgggctcatcacc

SEQ ID NO: 32495 - DNA, 122 bp, Homo sapiens
gggaggaacctggtgggaggtaattaaaacacggggggtgggtctttcccgtgctgttctcgtgctagtggataagtctcacgagatctgacggttttaaacacgggagtttccctacacaa

SEQ ID NO: 32496 - DNA, 122 bp, Homo sapiens
tactcctgaatcgactcgtagaggctgtacagttggcagagcaaggacatgtccagctggcggagaccaaccttgagggaaggggtggggaggtaaaaaacgagaagtcagcacttgagttt

SEQ ID NO: 32497 - DNA, 122 bp, Homo sapiens
ccaacacgcacctagtaaaattccgccaactgaatctcacgcacgctaacacgtggggagcgttgcttgcaccgcgagtccccatttggctcaaccgcctatgccaagtgtgtggttccggt

SEQ ID NO: 32498 - DNA, 122 bp, Homo sapiens
ttcctccctgaagagactgagaattatcaatgcagacacacacacagcatgtaatacgcgcgttcgtgactcagtggttggtctgcgtgttcagagctgcatcttgtggtggcgctgaagca

SEQ ID NO: 32499 - DNA, 122 bp, Homo sapiens
gcacacgcagcggccatccacgcagcgcccgcgcccgcgacagtcgccaggacaggcgcgcgtgccgcagtcccggcctgtgtaccccggccaacacatgcagcggccactctcacagcggc

SEQ ID NO: 32500 - DNA, 122 bp, Homo sapiens
tgtattttcaggcaggggtctgaatactattagccaaccattggcttcttgtcacagcctcgaactgctgggcaggtgggtggtggttgtgcagcacagagaggggcaactagaaatgagtt

SEQ ID NO: 32501 - DNA, 122 bp, Homo sapiens
cgcggggctgcgtgggcaacaccaacatctggaagaccgggccgctcttcaagaggtgggcggggcctccccggagctgggcggggctgctcttggggaggtgggcggggtcactccagaga

SEQ ID NO: 32502 - DNA, 122 bp, Homo sapiens
gcatccacaagtgtgtgtgtgatgtgtttgcgtggtttacagaataacataaaaaccatccgaaacacaccactgtccacaagctgagtctgaggccaggctcccaggcaaggaggtggtcc

SEQ ID NO: 32503 - DNA, 122 bp, Homo sapiens
catggcacggggtccacagaccctggtgcaggtgtgggtgggcggccagctcttccaagccgaccgcgccctgctggtggagcactgtggcttcttccgaggcctcttccgctccggcatgc

SEQ ID NO: 32504 - DNA, 122 bp, Homo sapiens
gggaaaggtgaaagctgcggctgagggcagcggtccggacccgaggtccttccagaaggacggacccacgcagccggatgaagacagtcgggtgccccgcggcctctagtgtggccggtctg

SEQ ID NO: 32505 - DNA, 122 bp, Homo sapiens
gcacatttccttttgcttccagataccacagtgactcagggcatagcttctagatctaagcgattaagagaggtaggtttaaagcccagctccattacaacctttgacaaagtacttagctc

SEQ ID NO: 32506 - DNA, 122 bp, Homo sapiens
caaatcctataactctgccttttcctttgtttggtgagataccccatggctcccctgggacgcagtctgtctcattgcaatggatcaataaacctaattttattacactacaggtatattcc

SEQ ID NO: 32507 - DNA, 122 bp, Homo sapiens
actttggaaccggtgcctaagtggtgcagattgcaaaccccagctgggcagaggacagcgcgggaggggagtggaaggatgtctatctgggaaggccttgaacttgctctctccttacctag

SEQ ID NO: 32508 - DNA, 122 bp, Homo sapiens
gagtcccagagagtcaaaagaatatgcccggagtcacatggctcactggtaatgagtacacgagtagtgagtaagtggctgagatggaattccacccaggcactctggtcccagagctcact

SEQ ID NO: 32509 - DNA, 122 bp, Homo sapiens
ccgtgttttgggtctcaggaccctttacactcttacagagtcctgaggactccctgagagcgtctctttatgtgggttacttgtgtctattgatatttaccatattagaaattaaaaccaag

SEQ ID NO: 32510 - DNA, 122 bp, Homo sapiens
cttctgtgcaaggacatctcattcctcttctactttcaagtatggtccatgcaggtgtatcgtcgtgtcagcaatgaaggaatgatggagtcactaagctccataccgcatggatctcagac

SEQ ID NO: 32511 - DNA, 122 bp, Homo sapiens
tttccctggcgggggatttggctagaaggctgggccggcagcggttgtgaggagttagctcgcggcattgcaggctctgagaggaggggacccggttcccgggtgagtgtccaggcatgcca

SEQ ID NO: 32512 - DNA, 122 bp, Homo sapiens
gagaaagtttcaagggacgcaacattctcgggacagccaggtctctgtcccaggaaggagcggagaagtttagagacaagctgatctaaacacgagaacctctgaggaagaccggcttgaag

SEQ ID NO: 32513 - DNA, 122 bp, Homo sapiens
gccacgcaggcgcgtggagagggcaccccatgtggggcagactcccgctcagaggggcctcgctgtggccaccacctacagaccagaacccggggccggggtctcatggacctcctgactga

SEQ ID NO: 32514 - DNA, 122 bp, Homo sapiens
ccatggcagcggtccagtgcgagctgaatttgagcagagcgatctgcccgggcgcaggtccggggctgggcagcagccgcgcctcctgcaggccgggacccagcggctgcagcgcgggcagc

SEQ ID NO: 32515 - DNA, 122 bp, Homo sapiens
ctccccttcccctaatttctacacgctggtggctacctcgggtctgggaaggactgcccccgagccggtgataggcctctccccgcggctctccctttcactggcgcatgctaagggtgtgt

SEQ ID NO: 32516 - DNA, 122 bp, Homo sapiens
ccttagtttagcaggtaggctctatcttttgccatttctgtattttatgtgctgtgttcccgtttcactgggtatgaactgtgaaatcgactgaatcctggccactttatgagtttgtttgg

SEQ ID NO: 32517 - DNA, 122 bp, Homo sapiens
cccgagtctgggtcaagccatggcgggcggcaggcagcggacggcggcgcccaggcagtgcgccctctgctggccactcgtgtacacgctggctccagccagtgctgcactcctggcagaca

SEQ ID NO: 32518 - DNA, 122 bp, Homo sapiens
tgccccaagcttcagcgagtcgggaaggaccaaacagacctggatgtccgggctctattgcggctggcgtgttactgaattcagtggaatgactccgtgtagaatgcggcaggtgccacatt

SEQ ID NO: 32519 - DNA, 122 bp, Homo sapiens
tccaatccgctcctccctggcctccgattggccagttcagtacccgccacccacactctccgcaacctgggctcctagggccgcctccaccccgccccgccccccgttgtcctggccccgac

SEQ ID NO: 32520 - DNA, 122 bp, Homo sapiens
gggtgtgtctgtggccagtcattgtctccctaagcaatggggcaaggtctgagggcccaccgatgagagagatggtggcagccgccaggcgagcaggctgctttccctgcccagtcatgcac

SEQ ID NO: 32521 - DNA, 122 bp, Homo sapiens
ttggtttgcgcttcaggaactgctgatactgtagcttctgagggaactgcagggatttcccgatttcctgcgtgcctgtgttaaaagttagaagcgggatctgctggcagcttcgagactga

SEQ ID NO: 32522 - DNA, 122 bp, Homo sapiens
tcgaggtcagctggtccgcagggaagcctttggcttccccaccggcaatggagcggttgacgttgcctctcggcggcgcggcggcggtggacgagtacctggagtaccggaggtgaggctgt

SEQ ID NO: 32523 - DNA, 122 bp, Homo sapiens
gacctgcccaggccaccctagcacctaggagcgtgaattcctgatgcgggttgtgggtggcgcgccctcccggttcccgctctcgtttttgtttttggtcgggtaaggcgatgctgtagagg

SEQ ID NO: 32524 - DNA, 122 bp, Homo sapiens
cgcacggtcgctagaggttctgggaagtgtagttgcctgaagctcgtgttctttgtctttcgatgatgtgcgcttggcctcaaagcaccctgggagttgcagtggggcggggaaagccatat

SEQ ID NO: 32525 - DNA, 122 bp, Homo sapiens
ctcgccgtggcgggaggcactcctcgggcagcgccgaagaagcggcgaaagaagaaggtgcgggccagccccgcagggcagctgcccagccgcttccaccagtaccagcagcaccggccgag

SEQ ID NO: 32526 - DNA, 122 bp, Homo sapiens
ccgacgagtcttgggaggctccgagcggagactggacgtccgacgagtcttgggaggctgcgagtggagactggacctccgacgtgtcttgggatgttccgggtggggatgggacacctgag

SEQ ID NO: 32527 - DNA, 122 bp, Homo sapiens
ggaggagggttggagagcagggccgtgttgcaaggctctctgggtggccacagcagcttgcgctgcgcccacattgcttctgcgtgtttacagttgggcacgagaaggctcagcacgcacgc

SEQ ID NO: 32528 - DNA, 122 bp, Homo sapiens
caaaaggttctccccttgtctatacaatgaggacatctctctagatcagtggctttccaacgtttctggccccagttcactttaataaatacattttatactctgacccagtaagtgcatct

SEQ ID NO: 32529 - DNA, 122 bp, Homo sapiens
ctcccctgcgcccactatctctgaccgcagctcccgcctccctgtgccccaccagccacccgggtctcctcaagggtcacaaaacacaccagggtccctgcctcaggtacagtcccaccttc

SEQ ID NO: 32530 - DNA, 122 bp, Homo sapiens
ggtaatttttcatctcggccggctaatctttgttcccggcgaagataatgaatagccagtcgttatctgcccggctcccggaggctgcccgagaatggggttgtacagggctgggaattgtt

SEQ ID NO: 32531 - DNA, 122 bp, Homo sapiens
ctgccctgggctgggcagggcttggctgggactcccgggggccctgccggccacgaccctcgcccgcctcgtgcccgccttcctgctgctcctggcgcaccctctcgcgcacctccaggacg

SEQ ID NO: 32532 - DNA, 122 bp, Homo sapiens
gctacgtctaacgtgatccctaatgagtgagggtcctcagctcacacctcctatggcccccgtcctccttccctgcccagcttagagcagaagccagcggcaagtcccctgttcctcagatg

SEQ ID NO: 32533 - DNA, 122 bp, Homo sapiens
tacagtaacaagctcagggttgctaggggtttgcgggggggaggggtgacaggcggagcacgggatttttagggccacgaaattccttgataatggtgcatccatgtcattacacgcctgtc

SEQ ID NO: 32534 - DNA, 122 bp, Homo sapiens
gggagggagaggctgcttcccaggccgtcatcccagcacggcttcctcactgggaggacgcggcttgttcccatttctggagtcaggctgtatgggcccctccacaatcttcagcgccgcgt

SEQ ID NO: 32535 - DNA, 122 bp, Homo sapiens
ggagaggagtgggcaacgctgactgagggaaggcggcggggcagaagggccgggagctagcgacaaagatccccggcgtcgccgcggcagcagctccagtcccgactccacactcgcgacga

SEQ ID NO: 32536 - DNA, 122 bp, Homo sapiens
atgggcagctgctgaccagtgtgtaccagcccactgagatggccctgatgcacaaagttccggtaagtgggttccccaggtccccgtgacacgtctgggctacagagaccagcctcagcagg

SEQ ID NO: 32537 - DNA, 122 bp, Homo sapiens
acttatgcacgctcatacggatgtatacatttagatgctgctaacacaaaaaggaacccacgcgaatgccctctgctatgaagagaattaattattaagcaaatgctgattggtcatcatgg

SEQ ID NO: 32538 - DNA, 122 bp, Homo sapiens
cgaactcctgacctcaggtgatctgcccgcctcggcctcccaaaatgctgggattacaggcgtgagccaccgcgccccgccccttagcagaattgttaatatcatttttcagacttgagaaa

SEQ ID NO: 32539 - DNA, 122 bp, Homo sapiens
ggcgcggaagcgcgtgtggagcgtcggactacaaatcccagcatgcaacgctctgggctgcggcggtgtattctggggccactgtgtctgccatctgcaggtttgtctggatttgtctttat

SEQ ID NO: 32540 - DNA, 122 bp, Homo sapiens
gtgtcttcagcaagagtcacagtcccgaagatcacataggaaagattcccctgtgctgtccgtcacccccaggttggatcagctttgccgggtcagaagccagaagccccattaacttgtgg

SEQ ID NO: 32541 - DNA, 122 bp, Homo sapiens
gtcctgtcatgtccgtggggggctcggagcgactgagctgtgggggccggagactgggagcgggagctgagggagggagggaggagggagggagggaggcagcgcttgcctggccctcatga

SEQ ID NO: 32542 - DNA, 122 bp, Homo sapiens
tgccctgagctgaggccacacgtagagccacgtccactcccaagcttctgtccaccacggcgtcttgaccagtgtccagagtcaccactgcagcgatgtccacctcctgctccacgtccacg

SEQ ID NO: 32543 - DNA, 122 bp, Homo sapiens
tcctgacctcgtgatccacccggcctctcaaagtgctgggattacaggcgtgagccaccgcgcccggccgctagtttttgtattgtttgtagagatggggtttcaccatgttggccaggatg

SEQ ID NO: 32544 - DNA, 122 bp, Homo sapiens
ccgcatcggccagccgggcgcggcggcgcccccggacttcctgcaggtgccctacgaccccgcgctgggctcaccctccaggctcttccacccgtggaccgccgacatgccggcgcactcgc

SEQ ID NO: 32545 - DNA, 122 bp, Homo sapiens
aagacaacagagatccccagagggtgagccccatctgtgttctgcactgtgatcccaaggcgcactggcccaagccgaaggagttctgtcctgcaccaggagagccctggaggctctaagct

SEQ ID NO: 32546 - DNA, 122 bp, Homo sapiens
tgcttttgcgaacgtgctttcacctccttccagttcattgctttcatacaaaattccagacgcacagcgcaggcagacagaagcctcattcatagccagaggtccctcaggctggggtttcc

SEQ ID NO: 32547 - DNA, 122 bp, Homo sapiens
atgcaaacacaggcacatgcatacctttgtgtcttagaattatttccaggctatttcagtcggatctagatgttgagtgcccaatcctgatgctcacctgcaggctcctgcagtcttggttc

SEQ ID NO: 32548 - DNA, 122 bp, Homo sapiens
atgagcatggactgtgctggtcacagtgattttctcttcctcagacccctccctgccattcgtgtctatgcccagactgcccagaccaacgagaacaaagagctctgtccttgcacacaccc

SEQ ID NO: 32549 - DNA, 122 bp, Homo sapiens
ccagtgacacaaataatagtgatggtgacaataaaataacagtaagaaacacagaaggagcgtttccttggacaaagcactccagaaacaacaacaaaaaggggctgcctttccatctattc

SEQ ID NO: 32550 - DNA, 122 bp, Homo sapiens
cgcccagggtccggctgtgggagctgcagtagggatggctctgcctaggtgggccgaggccgtgcggggctttaggtgagggctgggatctaactcagcgcaggcttcaggtgggagaacgg

SEQ ID NO: 32551 - DNA, 122 bp, Homo sapiens
caccagcctgcgaaagaaaaggcctctgtctcccgggtgacggggctctattcggggatgcgcattatgcagccctggtcctcacaaagaaagtcgcgactgttcggggcacgtcatctggc

SEQ ID NO: 32552 - DNA, 122 bp, Homo sapiens
ttccacggctgaggcaccaagacaaacaccacccaagaatcgacctatcccagtcagtgccgtgatggtgccaaaccgagaggagagcccgagaagggggtgggtgatttcccggctgctcc

SEQ ID NO: 32553 - DNA, 122 bp, Homo sapiens
ccatagattgccttaagaacatttggcctctgcagcaataaatgtgctgaggtttagggccgaagagacaataaagacagagtcagagggcagtcaatgtgtgtaaatcagtgaccaatgca

SEQ ID NO: 32554 - DNA, 122 bp, Homo sapiens
tttgtccagcttctgtgggagaggagtaacgccctgactgacagctccatctaaatgctacgagctgaaggaagggctgttcccaaaggaaaggttgcaaggaggttgaatgagtaccatag

SEQ ID NO: 32555 - DNA, 122 bp, Homo sapiens
agccagtcacctcacctgcctgagcccgaggtttctcacctgcaaaatgagggatgaaagcggatctcatgtgggaaaggagccactccaaggagagactcaaacatgactgcccttgagct

SEQ ID NO: 32556 - DNA, 122 bp, Homo sapiens
ataattccttcctggcccagtcataatttgtttagagatgttgttctacttctttcaaagcgctattcgcactataattaaatgatactcaagcttttaactttgatttatttcatttcttg

SEQ ID NO: 32557 - DNA, 122 bp, Homo sapiens
tcacctgaatggggcctcacctgaacgggtccgtggggtctttggcatcgcaggcatccgcgtggccgtggcagacacagcggcctccgatgctgatatccttgatgctgtaataatactgc

SEQ ID NO: 32558 - DNA, 122 bp, Homo sapiens
ttgttctgagcaggcattgatttgaagatgggcagcactcgccgaacaattccctcgcagcggtcaatgtaagtgagcattcaccaccggcctagaaagggcctgtgaacaaaccgtatgga

SEQ ID NO: 32559 - DNA, 122 bp, Homo sapiens
gaccctccaagccgactcctcagccttctactgaatctcctccaggctagctcccaggggcgcctgtccaggcccgggacttacattcccagtcctcatgcagagccccgtccccgcaccga

SEQ ID NO: 32560 - DNA, 122 bp, Homo sapiens
tagccagttcgcaaagggacgagaaccttgcctccgccgccgccgcgcaactctcggtggcgcatgaattatgagatgtaaacattagctaagcacaaaaggaggaagggtcattctgaggc

SEQ ID NO: 32561 - DNA, 122 bp, Homo sapiens
ccatcctggagcaggagaaggtcgtcgcgcagcagatccggcagctcttccccaagttcgcggacacccccatttacaacgacgaggcggacccgctggtgggctggtccctgccacagccg

SEQ ID NO: 32562 - DNA, 122 bp, Homo sapiens
ctggggtgagcttgaaatcctgcagcacgcggtccaggcagtggttctcacacaggtcggcgcgcaccagctcgtccttgagctccagcacgcggcccgccacgccgtccagcaggcgtcgc

SEQ ID NO: 32563 - DNA, 122 bp, Homo sapiens
aagcagcgccgcagcaggcccgagtgctccactgtccccacagaaggcatccattgagaccgcgggaccagccttggctttcacatttcgctgcagccttgtcccgcgccgcactgtttcct

SEQ ID NO: 32564 - DNA, 122 bp, Homo sapiens
gagagagggaggggttcacccggaacagaggctgagggcagggggcaagcagcgtggggtcgcccggcagctcctccccacagagggtgagccaccagtgcagaggccactccacgaagagg

SEQ ID NO: 32565 - DNA, 122 bp, Homo sapiens
tggtataattaagggtgaaaataaggcccctctgtatttctattcccctttgcttttctgcggagcttttacctcagaggaaagttgttttagtaatctgggaaagagaaaccatgtgctga

SEQ ID NO: 32566 - DNA, 122 bp, Homo sapiens
cggtggacaggaaatgccacagtcaagaagatgcccctgggatgctgagctcttacaactcgaaatcaacagcttttacaaataaaaccgctgcaaaagcaatagctcttacaaataaaact

SEQ ID NO: 32567 - DNA, 122 bp, Homo sapiens
ccccaggtgtgccacgtgggttctggtgcacactgctgtttccaccgtcgtggcaccacacggaggggcgtcaccaccctcagcacccctgccgcgcccccagctctccttctcccgacctt

SEQ ID NO: 32568 - DNA, 122 bp, Homo sapiens
cctgtgggtctggaactcattccagctggacagcgtcaggattgattgaactacaggacccggggcccctcctgacgctgcccctttcggaggtggggacgcgcttgtctgggtgagcacct

SEQ ID NO: 32569 - DNA, 122 bp, Homo sapiens
agcaacccagttccaggagagaaaatagcttgacacctcctgcggcccatggagtcctcccgttgggacaaggaccccccaggagagagaagaccccagcagagtcaacactggaggtcctg

SEQ ID NO: 32570 - DNA, 122 bp, Homo sapiens
gactctgtctcaaaaaaatatagatagatagaatctggattctacccctcactaactaaccgtatattttacaagtggaaagttcttagagatcatctaatccaatcttctcatttaatgag

SEQ ID NO: 32571 - DNA, 122 bp, Homo sapiens
gacttgcttgtgttattgcttccaggtcaggggtcaccacattgcaaaacttgatcctctcggaattagttgtgtaaattttgatgatgctccagtaactgtttcttcaaacgtgggtgaga

SEQ ID NO: 32572 - DNA, 122 bp, Homo sapiens
aaagggcttggagttgttaaatcaaagcgccattgaattgctcgggaccaccccctcccccgcctcttgcccttcccccacctccatctttttcccttcatccctcctcccccatcaccgcc

SEQ ID NO: 32573 - DNA, 122 bp, Homo sapiens
gtccgtgacgtcaggtggcgagactgtgacgtaacacacggcggcagggcggtgccaggacgaccagccacgcgtcgccatggcaacagcgggcggggaggggcgggcggcggaaggcccgc

SEQ ID NO: 32574 - DNA, 122 bp, Homo sapiens
aattttgcccaggctggtctcaaactcctggcctcaagctattctcctgccccagcctcccgaagtgctaggattacaggcatgtgccaccacacttggctttccatatgttataagtacat

SEQ ID NO: 32575 - DNA, 122 bp, Homo sapiens
gctggtctccagctctctgtggcctgagtacctggagggcggtaagaagaccttggacagcgtccctggtactggagctgaggtctgggcttaaggctgccgcaaaagcggcagccgcatct

SEQ ID NO: 32576 - DNA, 122 bp, Homo sapiens
gccacatgcacatgtgagaaggggcttttcccactgcctcaaaactggcaaccagccgggcgcagtggctcacacctataattgcagcactttgggaggccaaggtggggggatcgcttgag

SEQ ID NO: 32577 - DNA, 122 bp, Homo sapiens
gcttttgttttttaataaagacagtgtctcgttctgtagccaggctggagttcagtggcgcgatcatggctccttgcagcctcaaactccggggctcaagcaatcctcccgcctcagcctcc

SEQ ID NO: 32578 - DNA, 122 bp, Homo sapiens
gaggggcaactttctttttaaagtagagactagaagaaagcttcgtaacttctcctttcccgttcaaccatttgcctaccttagtgccaattatgacggtcagggaatggtgatgtctgtct

SEQ ID NO: 32579 - DNA, 122 bp, Homo sapiens
gcctgttctcccgtttgctctccctgtctgcctctgccgctctctaccttggtagcttaccgaaaacagccaccgtagggcgtttttatatttgtgaaaactacttccaaggagataattga

SEQ ID NO: 32580 - DNA, 122 bp, Homo sapiens
ttcacaaatatttgctgcccctgcctggggaagacatacatcccagccccactgacagcccgcttggctctctgacttgctttggccaatgcagtacgtgtcccttccaggcggaagcttta

SEQ ID NO: 32581 - DNA, 122 bp, Homo sapiens
cccactgccagcacggccagcgtggcccagggctcgcagcacttccggcctctctggccccgctccccaggagagtagagcatagagcagggcgatctctgtacaactctctatggttctgg

SEQ ID NO: 32582 - DNA, 122 bp, Homo sapiens
ccaagagcctcacttttccctggtggctctgccactgaactgactcttagaaaccggaaacggatgagctttctagccagaaaaccggagggaatcttgacaggcacacagcatccaaacca

SEQ ID NO: 32583 - DNA, 122 bp, Homo sapiens
tgagatttagcctcccatacacacagagtcccaccccggacaggctgtatcaaccccccacggccatatgcccactgctgtttgcgtacaatgaggcgggacctatagactgtatccactga

SEQ ID NO: 32584 - DNA, 122 bp, Homo sapiens
gccaatcaccgcagcggagcttttagcccattacaggctgcaaaaaatattgtctataaacgcggcttgcccactgttaggggctggagctctctgaacctttactggctcaggatactaca

SEQ ID NO: 32585 - DNA, 122 bp, Homo sapiens
cggaatgtggggagggccgggcggatcatagccccgcgagagcgtaggggacttgtagtccgttgccttccgcaactaggaagggggagggaccgcccctcctagaatttccgtaacttgaa

SEQ ID NO: 32586 - DNA, 122 bp, Homo sapiens
ccggactccccccttctctgctttaaccatccaattacttaacttctctgcctaggggttcgcttcccacccatcccctcctccaaggcatcttagcgctgtccgtggtgctgaccgccaat

SEQ ID NO: 32587 - DNA, 122 bp, Homo sapiens
tcccacgatccccaggtttctgaagcgggcgcaccaggactcctggctcacccagagagacgccttgcccgcggcggggctcgctcggggaaatccccgcccaccttgttattcctgcaggg

SEQ ID NO: 32588 - DNA, 122 bp, Homo sapiens
ggctcagcgagtcaggggaggatcctgtcactgttagctcccccaggagcggctcctcagcgggctccggggcctccatgctgggttctgtggggctgggggtctcttcctctgcagctgag

SEQ ID NO: 32589 - DNA, 122 bp, Homo sapiens
cacagtaactggcggtctgagtagtcccaagaaactccatcctccctcatgagccccactcgggcaaaactcagctcaaggagccaaaggcatcaccaggaaaggtgaaagtgcttctcttg

SEQ ID NO: 32590 - DNA, 122 bp, Homo sapiens
tcgcggctcctacccttttttggaacggatcattttaaaagttctcgttagaaaccaattcggcgccggcaccctttgggtgaaacctaatcagcccgcgacgctgcctttctcactggtca

SEQ ID NO: 32591 - DNA, 122 bp, Homo sapiens
tccgccttttagggtgctcgcgcaggaggctgcagcgggggatgggtgctccgaggctcccgaggcccgcgcaggtcacgggtgcctccggctgtgcattctacctgcaggtcctttgacac

SEQ ID NO: 32592 - DNA, 122 bp, Homo sapiens
gtgcgggcgcgcgggcctaccgggttcgtagtagtcgtacacggagactggcagcgccgacgtcctgcccaccacgcactcccggagagcacggaaccgcacgcacgtcaggcaccggctgg

SEQ ID NO: 32593 - DNA, 122 bp, Homo sapiens
gccaagttgacctggcaaagaaggctattttaaattttagggggaaggagcgacatctgtcggacacagtgcaaactacagtttgaagtagttgcctgtttcatgagattcctgtagttctt

SEQ ID NO: 32594 - DNA, 122 bp, Homo sapiens
aaacaaagggcgcccccggcacctccctctatcccgagcgaagggtcccaacggcgactccgggggtctttggtgcccagctgaggaggcagccacgcctccgatcctacctgggaagctgc

SEQ ID NO: 32595 - DNA, 122 bp, Homo sapiens
ctctgccaccaaaacactcatcgcggggtcagagggagtgccaaaaaaggtaaaaagaaacgcaagaaagaggctactggggatgaggggacacccagaagccccttcctggaggaaaagcc

SEQ ID NO: 32596 - DNA, 122 bp, Homo sapiens
agccgcacaatagtaatgcaagacgccgtgaaaaggaggaagagctcgacgtcgccgcgtcgacgtcatcacgcacggactcttccgcgccacacctaacaaatacgccgacgagagctccc

SEQ ID NO: 32597 - DNA, 122 bp, Homo sapiens
tgttttcttgtcctttgggctatcctttttccctttggcaataagctggtttctaaacttcggattagtccaaagtgaaacatctcttgaaagaatgttcccttaatattctggaacctgag

SEQ ID NO: 32598 - DNA, 122 bp, Homo sapiens
cccttgcaggaagacggggccggcctggcgggctggggtgcctgggtgaggcctcttcagcgggccccggccctgcagccaggcagctcctggtggctgtcccgaacaggcctcaccgcttc

SEQ ID NO: 32599 - DNA, 122 bp, Homo sapiens
ggcttgccccgcactgaccgcggtgtcggaaccgccaagctcccgggcgggggaggggcccggccgcagagcgaaccagccctctccggccccgctctccaacgtcagtacctggcattctg

SEQ ID NO: 32600 - DNA, 122 bp, Homo sapiens
tcctggaaaaagcagggctgaactggacaaaaagaaggtagagggggccaattgttctgtcgagctgtaaggcacaaaaaaacaggtggaccccagaagtaaaacagagaccaacaaaggaa

SEQ ID NO: 32601 - DNA, 122 bp, Homo sapiens
aacccaccaatggaaagggcggtgcgggggcggggcctggcggttgcctagcagcggcagcgccgggcgggggcgggtggtcgggggcggtgatgcgggcgcaacgggggcgggacgcaggg

SEQ ID NO: 32602 - DNA, 122 bp, Homo sapiens
gtctgaagagtgcttctgccctcatttgcctctccctgtgaccccggccccctcagactccgctgcgtcgtctctcggccccgtccagccgttcctgactgctcttcgccggagtccgcttc

SEQ ID NO: 32603 - DNA, 122 bp, Homo sapiens
gtggggcggggcggggtggggtggggtgtggtggcgcccagggtgggggctcccaagaggcgtctccctggaggacagccagttgctcagcctgcctggccccacaggtgacattccttgga

SEQ ID NO: 32604 - DNA, 122 bp, Homo sapiens
gtgttcttacccaataccacattctctgactccccactttaaatctcctaccccaagagacgtttcctaaaagagtctcctgcacatttcacccctttggagcccgtgctccagctcactgc

SEQ ID NO: 32605 - DNA, 122 bp, Homo sapiens
caggaccccacacaccatgaaggcgttggatgccgagcgcttgtcgtaacccgtctcccacgtgccctcaaagcgcagtgtgtaggggttcagctggctcaccaccagccgcccgttgttgc

SEQ ID NO: 32606 - DNA, 122 bp, Homo sapiens
tatttaactgtcagttttctacgtttaacttagttgtaacaaagctaaaaattctgcagacgttttctgggttatttctgcttgcttccactgtccagccactctttgctcagggaagatca

SEQ ID NO: 32607 - DNA, 122 bp, Homo sapiens
acaggacgctctcccagcacaagctcaacctggtcgtcccctaatgctggagaagcatgccggcagtctgcaggttagcacccctcacttgtctgatgcttactgttaacaggggattgcaa

SEQ ID NO: 32608 - DNA, 122 bp, Homo sapiens
caactgtctctttctctaatagaccaagctccttctcacctccatggttcaagcagttctcgtccctcagcctcccaagtagctgggagtacaggtgctggctaatttttgtatttttagta

SEQ ID NO: 32609 - DNA, 122 bp, Homo sapiens
ctatttgccccgacagcatcagcctgtaacatttcttctctttcctttgtgccactgagtcgttccctggccagaggacataaatggtgctggtaggaggttatcagagtaaggaaggtagc

SEQ ID NO: 32610 - DNA, 122 bp, Homo sapiens
ttgatgggggacgcgggtccctgagctgatttagtcaggttggtgggggatgcgggtccccgggcttcccagagaggacagccccagcacacgggcggacatcagggcagagccccacggct

SEQ ID NO: 32611 - DNA, 122 bp, Homo sapiens
tcgcagacctgaggaatgtagttctccttgaagtagttcttcagcctcgggttggcattgcgtagcgaggccatggcccaaggcctgacggagaagctgcgatagtaccctccccgcgctgg

SEQ ID NO: 32612 - DNA, 122 bp, Homo sapiens
agaggccagcagagctttctaaatctcgggtacagtgactgaagcactgggctgggagtccgagtgcctgagctgtggtctggttctgctgcctactaagctgaatgacccaaaagcctctc

SEQ ID NO: 32613 - DNA, 122 bp, Homo sapiens
gctgggcggggccggaggaggaggccccgcccacgtacaccccgcgcctgcgcacgagggcgtcctgctcgggggcctgtgtgcagactcccgctggtccaccccgctggtgcacgggatgc

SEQ ID NO: 32614 - DNA, 122 bp, Homo sapiens
cacaccggctgctttgccaccatctggtaagggcggggcccgttggcgcgcgatggcggacgctgcccgggatcccagcctgacagctccccctccatccccattctcccaccttccccacc

SEQ ID NO: 32615 - DNA, 122 bp, Homo sapiens
ccctacgggacggacgactcccaaagaggaatcgttggtggaagtcccatgtttcgttgccgttggaagggggaactggtcaaggcaggttcggtttcaggatctcacctcacctgggagcg

SEQ ID NO: 32616 - DNA, 122 bp, Homo sapiens
tctgtcaaagagcgcattctccttgtttggcaggtagtcccaaagggcggttgtcaccagcgtctcagcgcagggagacattttcagcttggctgctgcctcgcaggcactggaaccgacgg

SEQ ID NO: 32617 - DNA, 122 bp, Homo sapiens
cccacagccccaggggagcctctctgccacctgcgaggttcagccaccccgtccccactccggaacacattgaagctgagcaaggagaaaagactgaaaaaaaagaaaaaagaaaaaaagta

SEQ ID NO: 32618 - DNA, 122 bp, Homo sapiens
tggagctatttctgtttcttccacacgccaagggaattattattaaactactcagcgtcacgcagaagctgggggtgaagatcaaaggtgaaaaattgctgtctgaagattggagttcagac

SEQ ID NO: 32619 - DNA, 122 bp, Homo sapiens
aagattcctaaacgctgtggaaatataaatcacaataaaaaaaaaaaactctcaaaagatcgtcttagctggggaaaaaaaaatagtttggtctaaaactatagaaatctccaaagtcacgc

SEQ ID NO: 32620 - DNA, 122 bp, Homo sapiens
tggaaatgcaaccgcctgttccccgaggagccgctgcccccgggaccccctggcactgtgcgcaccctggtcagcagcccccggagaagacggcgcccccaacgcccgacccgcgtggccgt

SEQ ID NO: 32621 - DNA, 122 bp, Homo sapiens
cggagtgcgcagtttcggcttccccaggccccaacaggcagcctatgggacctactgctacgccgagaattaggcgcccaccgtgtcccctccagcgcgcgcgaagaagcttgggagtcgtg

SEQ ID NO: 32622 - DNA, 122 bp, Homo sapiens
ggggaggtgggggcggggaatgcggggggccgctataaatagagggcgatcgcgggcaggcggggggtggggagaggatggccaacagggactctggggtcaatgcctcaaggggcgcgggg

SEQ ID NO: 32623 - DNA, 122 bp, Homo sapiens
cataacagtgactacagcatgggataggcactatacatatatggaaatcataaacagtatcgaatgccctggacttcaactactgactcggtatgtgcctcatttggctcagtaataaattc

SEQ ID NO: 32624 - DNA, 122 bp, Homo sapiens
gagaagcttggggcagagggacggcgggggcggcccctggtgccgggctgtgcctggaagcgcgcccccgccccggcccccgctcccgcctccccacccgcgaaggcgggaccgcgcacggt

SEQ ID NO: 32625 - DNA, 122 bp, Homo sapiens
aggggtgttctgaggtccaaacgtactagcttagtaaggcattagacttgagtgtggaaccgggcatcctttgtgattggagccttctcagctacctggaagcttttacggtggggagcggc

SEQ ID NO: 32626 - DNA, 122 bp, Homo sapiens
gaaaggaaaaggacagatttgttagggattttacataatatagtgtgtagactaatactgcgaacataagtaattgatcttttttaaataatgaagttcatgagattgagaagaaaaaagga

SEQ ID NO: 32627 - DNA, 122 bp, Homo sapiens
cgccacgccccacctgtacttgtgtatctctgttcaaatgttactgaggagcttttacagcgtaacctgtggtctatcctggaaaatgtttgtgtgtgagacaatgtacattcttcaacatc

SEQ ID NO: 32628 - DNA, 122 bp, Homo sapiens
ttgagcagacatttcacgaaagaagatctgcagtcaatacagacatgaagagatgcttcacgtcgtccgtcatcaggaaatgcaattacaaccacggcgagatacaactacacccatcagaa

SEQ ID NO: 32629 - DNA, 122 bp, Homo sapiens
tcgcggggaacaaggccgcgcggccccggctctcccggagtgcacggtcccgcgctcatgcggctagagggaggcacccgcaggactgcccagccgcctctgctcctcaggtccagctcggg

SEQ ID NO: 32630 - DNA, 122 bp, Homo sapiens
agtcttgttctgtcgcccaggctggagtgcagtggtgcgatcttggctcactgcagcctccgcctcccgggttcaagcaattgttgtgcctcagactcccgagtagctgggattacaggtgc

SEQ ID NO: 32631 - DNA, 122 bp, Homo sapiens
actggcagcatggtagagctgagagaaacaggctctcagggtacctgacttgaggggaatcgtttcatgaagctgaacttcaagcatatttccagtacattctttcagagtctgtttttcca

SEQ ID NO: 32632 - DNA, 122 bp, Homo sapiens
catactactgttttttgtttttgttctttatgagagacggtcttactgtctctcccaggccggagtgctgtgacaccatcagaactctgtgcagccttggctcaagtcatcatcctggctca

SEQ ID NO: 32633 - DNA, 122 bp, Homo sapiens
ccggtagtgccgccaacccctgtcaggcacagaagacacagcgagaaccgtgagccgttacgaaagcctaaaacactgagctcgcgtcctgccaagcagcaggcgcacaaacctacacctcc

SEQ ID NO: 32634 - DNA, 122 bp, Homo sapiens
ggagggggaggggctggccgggtcccctcgggtgtggcggagtcctggcctgcggaccatcgcaactcccagcacacctgcgggggccgggctgcaaagtctgcaaacagactttgatcctc

SEQ ID NO: 32635 - DNA, 122 bp, Homo sapiens
ttaaaccactgaaagcaaatggagtgagttgcgccttccttcagtgtgtctatctgtggtcgctaaggtgacatattacatgacatccttgggcactggttttgcaataagccatttaaaga

SEQ ID NO: 32636 - DNA, 122 bp, Homo sapiens
acagagctcacagcccctgtccagctccacgccttcccgatggagcagacggggaccccacgccatgccatgccctgatgccatcacatgccctgatgccagcctggcatcaggaagctggc

SEQ ID NO: 32637 - DNA, 122 bp, Homo sapiens
ttccagctcgaaggcactggccctgaggcaccgtcgccagggggcactcggccccgcccacgtgtgcgacccagaggcctccgccaggaccccgaagctcccggctccaggcaggggcgctg

SEQ ID NO: 32638 - DNA, 122 bp, Homo sapiens
caaattggcacatctgaggttcgggaagatggtttggagccattccattactctgcctatcgaattctgggatttctgcttcctgccctgtcctgtcttctgtccccagctcacccggcccc

SEQ ID NO: 32639 - DNA, 122 bp, Homo sapiens
ggggctgtgccggtgcgtaggcggcgccactttacccgtgggtgggaaggcggggtgtaccggtggtagcctctctagggcttggctgctttcagtattccaagagcctcattgccatagca

SEQ ID NO: 32640 - DNA, 122 bp, Homo sapiens
gagacccattttgggtagatgatttccatctcagtgggtgccctgggacctgggtggaagcgggggtcatgtatctctctatgaggtcaaagaggatggaacacacatgctgagaactccca

SEQ ID NO: 32641 - DNA, 122 bp, Homo sapiens
gtgctgaaggagctgcgggagccggagaagaatgaaactgcgtggagtcagcctggctgccggcttgttcttactggccctgagtctttgggggcagcctgcagaggctgcggtaagtcctt

SEQ ID NO: 32642 - DNA, 122 bp, Homo sapiens
tatactacctaggggcacaaaaatagttcccagctcctcctctctttttcctcctaggttcggttaaacgagcgaacatagaaaacacgtacacacactccctttcggccctggtccctagg

SEQ ID NO: 32643 - DNA, 122 bp, Homo sapiens
caaaaaagtaaaaaagcaaatgaaacgtttttggttgtttttatgggcctctacagcccccgcggctccccccgctcctgcggcagacacataagtatgagttcagaccctgcacgacacat

SEQ ID NO: 32644 - DNA, 122 bp, Homo sapiens
tttttttaatgcatactgtcaaatttatttccaaacatcttatttcacctctcaatcatccgcagtttgtgcggtctttgaggattgtgaaaaacacgtttaatctactctctcaaagtctg

SEQ ID NO: 32645 - DNA, 122 bp, Homo sapiens
catcaagacaactttccttgcactcccttcaaggaggtagagtgagtttttcgcccttctcgtgacatcacagccctttgtggtcccagaattagcctcttagcctacattgaatgagccct

SEQ ID NO: 32646 - DNA, 122 bp, Homo sapiens
aagcctgtttggagcctttgcccattattattattattgttattattttttttttttagacggagtaccactttgatgcccaggctgcagtgcagtgtagtgcagtggcgccacctcggctc

SEQ ID NO: 32647 - DNA, 122 bp, Homo sapiens
atgcataggaggaaaatctaagctacattctatgaaaaagagctaattttgaccaaatatcgagcagctacgtcatgagtggagttagcatcgctgatgggtctctacactagggatagtta

SEQ ID NO: 32648 - DNA, 122 bp, Homo sapiens
ccaagtagccctggagactctgagcagcctacccccttaaccacaaaaacaccggacaggcggagggaaaaagagaagacaggatccaggaatggtgcacacacccagccaaaggccacctt

SEQ ID NO: 32649 - DNA, 122 bp, Homo sapiens
tagggacggggccatgcggtgggcgggtggaacacggcgccggtagtgagtggccgagtccgcgctgagagcaaaggggaggagcgggccgggggtgagcagggaaggcgggttgggcgcga

SEQ ID NO: 32650 - DNA, 122 bp, Homo sapiens
cgagccctgccccgcgggaaggcagctaaggctgggtgagaaatcgagcacagcgccggtcggctggcactgctgggggacccagtacaccctccgcagccgctggcccgggtgctaagccc

SEQ ID NO: 32651 - DNA, 122 bp, Homo sapiens
caatgcattactccaaagacaagtcttaaaggaacattgccttcccattaattttgtgaacgggtgtattctgaaggcctttcctctaatattactgggatttcaaccactgtgagaatctt

SEQ ID NO: 32652 - DNA, 122 bp, Homo sapiens
ctggagaacaacttagaagataagaaaagcagtgttttccgacttgtccatcatggaagacgggagcccatcgtataatttaaggccatacaagacatcttccatccagccttaaaaatgta

SEQ ID NO: 32653 - DNA, 122 bp, Homo sapiens
gattgggaaggtgggatgaaatccactcaaggagcctttaacttggtgaaaggttttttccgtcctaattcacacaaagccactatttgcccagagggcaagtggcctctttttttctaatg

SEQ ID NO: 32654 - DNA, 122 bp, Homo sapiens
gagggccgcggacccaccctgccctgcaggtgtggcgggcgccaggtccctccagggactcggacagcacgcgatttttccaggatttccgactaccaaatgtgacaagacagtctcgccgc

SEQ ID NO: 32655 - DNA, 122 bp, Homo sapiens
aatgtcttcagtactttttttataccgggcttctctgcgcttccggggcccagagcggcacgttcgccacaccctcctcatctgcatagggcgccgccccctctgccctcccccgcccgcag

SEQ ID NO: 32656 - DNA, 122 bp, Homo sapiens
aggctttgaatcctttggtttctttttcttgcctttgtttttcaccttggtagaactaaacggtgcttcgccactgtcttgtttccttaacacagtacagcggctgtccattatatcaaaga

SEQ ID NO: 32657 - DNA, 122 bp, Homo sapiens
ctcccctcccctgcgtgttgattttcaggcccaccgagccgcccgagaaagttttcaattcgatggggctgcagcgtctcaggggctgagctccttagaaagcttcgggggcccccgagggc

SEQ ID NO: 32658 - DNA, 122 bp, Homo sapiens
gaacaagtcagacatgatctgcaggacccggttacccagggcttctgctgtcactcagcacggaggaggcggggcctggcgccccatccaatcaggggtgctggggcggggccctgtcaact

SEQ ID NO: 32659 - DNA, 122 bp, Homo sapiens
ctaaaaggcaaaaaaaaaaatctgaagagagagagtgagcatcagaaccagactcaggtacggcagagattttagaattaccacacggagaaattaaaattactggttagtttggggacagt

SEQ ID NO: 32660 - DNA, 122 bp, Homo sapiens
acggcccggccccgctccgtggtcctgccccagggccttcgcacgggcctgccccgcacacggttctctgggggtcgctggctccccgctcaaacggcccctcctgccgaccaggcgggtcc

SEQ ID NO: 32661 - DNA, 122 bp, Homo sapiens
tttttctgcaggactgagttcacgaaaggggaaggcggtgggcgggggagtagaaggaagcgggggccgttaatagactttggaataaaatcctgacagactcaaattgattctgcagcctg

SEQ ID NO: 32662 - DNA, 122 bp, Homo sapiens
gcctcaaaagggggctcgtgactcagacttacctgtgttccttttcttcaacagtgacaacgacaaataaaccatttggtcatttggtgcccttggttccaagttgtgggcactggttttgg

SEQ ID NO: 32663 - DNA, 122 bp, Homo sapiens
ttgtccatgtccctgtatgaaagtgcatgggaagtgcctggggcagaagtgaaagagacacggccccaggtcgtgagagaagacattgaggtgcactcccggcctgctgtgggaacagtggg

SEQ ID NO: 32664 - DNA, 122 bp, Homo sapiens
actgctgtttcagacagctgtgaacagttacagccttgccacatggagaaagcatccacccggcagagggagagggagaggggaagagagaaaaactcaggagctgaagcaggaagtgataa

SEQ ID NO: 32665 - DNA, 122 bp, Homo sapiens
gggcgtggcttgctgggacctacaggtaggggagtcccttcctggcccaggcgcagtccccgcttctcggaagggattttgtgtaggaatgaaagtgattcagggtgtttttcatgcctctg

SEQ ID NO: 32666 - DNA, 122 bp, Homo sapiens
cggggctcattcagcctgcggggaccgagggactgagccgggcactgggcgcccctcccacgccccctcccgggcgctgggcgggctgtcatctgctgcctcccagggtcccaaggtggcct

SEQ ID NO: 32667 - DNA, 122 bp, Homo sapiens
gcggatgcaggtcagcgcccctcggggacggtcacctctggccatccgcggccttcccctcggccttggcacctccagcccccagtaccgagggggtctcccgctgccctccccggccccag

SEQ ID NO: 32668 - DNA, 122 bp, Homo sapiens
tacgggccggcccacacccagcagcatgccgggagttgtaggcggtaactgctgcaaagccgaagccggcgcgcaaaccggctcccgaggcggcagctctgctgcaaccttttaatggggga

SEQ ID NO: 32669 - DNA, 122 bp, Homo sapiens
ggcatggcaaacagcagtagagttctttaggaaaaaattagggacgttttcagcagctcccgccacctactatgtccgggttactgcgggatccacagaatggaagttgcccgccaacagga

SEQ ID NO: 32670 - DNA, 122 bp, Homo sapiens
aggccgcgcggggaggttttctcgagcgtccccggttattgggaagggtgcgctcggcctcgctcccgcggaaagccgtgtggccgcctgcgtcccgggctctgctcacagaaaactcaagg

SEQ ID NO: 32671 - DNA, 122 bp, Homo sapiens
cgtcccatgcccgcccgcccgcccgcccgcccgggcccagcttagcaacagcgatgggcacgcgtgtgtcctgtgactacaaaacagcactggggttgctggaagccgaagtgacccggtga

SEQ ID NO: 32672 - DNA, 122 bp, Homo sapiens
atcctggacgaccatgattcagacctagacctttggccttggtggggagagcccatttaccggaatgggcagtatgttggcaagaccaccagcagtgcctacagctacagcctggagcgcca

SEQ ID NO: 32673 - DNA, 122 bp, Homo sapiens
cagggaggagaaggccgagctgctgctagactcccaggccgaggtgcagggtttggaggccgaaataagaaggctccgccaggaggtgcgctcacatgctccccgccaccgcggcattccct

SEQ ID NO: 32674 - DNA, 122 bp, Homo sapiens
gcctggagagtgctgcagtgacccaagtggcaaaggaccagcgaggccctgggcaccagccgggggttctccaggcgacaccgcaggactcagccctggggttccctagcaaggggacgagg

SEQ ID NO: 32675 - DNA, 122 bp, Homo sapiens
ggcctggaaaagaagagaattccggagacacaaacggccctacgcgtcgccgcctcggcccggctgctaagttattaaactcctgcacagggaaaagcgataaagtaaacatccacctctcc

SEQ ID NO: 32676 - DNA, 122 bp, Homo sapiens
cctgctgcactgcggttgccaggtaggggcagggctccctggaacctccacaccattccccgggttcccggcagctctgggaaagcagagctggggccgctcaactctctcccctggatccg

SEQ ID NO: 32677 - DNA, 122 bp, Homo sapiens
aaggtacctggctccccggtggctgcagctccgggctcctcctcctgcgtcctcgcgtcgcgtactgcttgctgggattcgtagtctcgccttggccatcagttcgcccttcccagagagct

SEQ ID NO: 32678 - DNA, 122 bp, Homo sapiens
tcaggggctacgtgggcattgatggctgtgcacacgcaaggggtagaagtgggagtgcagcgcaaagcatgttgccaggtagaaaaggagagaaagcagaaaaggccaaagccaaggcctga

SEQ ID NO: 32679 - DNA, 122 bp, Homo sapiens
ggtagggggtctgtctctccggtgcacatcctatgcctaggcggaggcgcccagttacagcgctctcctccctacacccctttgcgtcggccaaattcagcctcccccccctccctctccct

SEQ ID NO: 32680 - DNA, 122 bp, Homo sapiens
cgtcagtgaccggctgtgtttacctggctggctgcacaaaccttagttctcagcttaccccgggcttttccaatgccctgcctctcgggggcctgtatccttacctgaaagaggaaacatca

SEQ ID NO: 32681 - DNA, 122 bp, Homo sapiens
acagaggacaggggctctgcagtccttcacccccaccctaactatctaatcacgggccaccggtgtgggcatggtccagaagacctcaccgccctcccaggtaggcagggagctggcgggtg

SEQ ID NO: 32682 - DNA, 122 bp, Homo sapiens
caatcgctgccctgccctagctgcctcaacacgcctcggggacaactctgcttcgcctcgcgcctctcctggcctggtcaagggcattgctgggctttgcagaggcaccagttccccgcacc

SEQ ID NO: 32683 - DNA, 122 bp, Homo sapiens
gcacagaccttgatctttctactgtctcatgttgccttctcggagtgaagtttctatttgcgacctaatcaccctccccacccatttcacactccttctcccagatccttccgtagagggaa

SEQ ID NO: 32684 - DNA, 122 bp, Homo sapiens
gctgcgtctgagctccgcagggctacccagccgtcggatcccctaggcccgcgggccctgcgccttacaccccgcccagacacgagcctttccggcccgtcgtcttcctcctccgcacctgc

SEQ ID NO: 32685 - DNA, 122 bp, Homo sapiens
gcgatgggcaaatagcaccctctcagtccccccacctttttccccaaggacaccctacgacgcaggcccccaaaaaagcagagggaaggagacagggaataaaggaagtgctggtccattac

SEQ ID NO: 32686 - DNA, 122 bp, Homo sapiens
tacagcccccgacaggctcccagccccactggcgcagaacccatcaccgcttgcccttcacgcgcttcattgggagtgcagcccccaccccgagcgcacagctccacgcagcctctccacac

SEQ ID NO: 32687 - DNA, 122 bp, Homo sapiens
ctctgttaggagatcctccccctcgtctctgcgcgcccccaccccgccatcccccgctagcgcacacatgcaggagaaccctttttaggctaaaccggaaagtttaggtcttctcccctctt

SEQ ID NO: 32688 - DNA, 122 bp, Homo sapiens
ttatcaaatttggcttctatcttatcgcatcgcttctgcagctttttgagggccaggactcggcatttcaccgaattaggcaggctctcgataaagtcatttttcggctttggggcattctc

SEQ ID NO: 32689 - DNA, 122 bp, Homo sapiens
ttcccacttcccaacggggcggaatggacaggacactaggcaaacgccagaaagaaaccacgtgcagttggcagctggggcgccccactacccgcgacaattgtaaacctacgaacagaacc

SEQ ID NO: 32690 - DNA, 122 bp, Homo sapiens
tcagcatgtcgccacctggtcaggcagccggcgcccctgccccagctggcctccccgcaccggcgagacccctcatccatcaagcaggatcatcccttggcatccatcactccggagaagag

SEQ ID NO: 32691 - DNA, 122 bp, Homo sapiens
tttcaggacgcggttgtccggcaacccaaaagctttgggttggggatctgtccaggaactcggctgggcctccacaaacctagccctcatcgcatctcagtcaacaagcgcaaccctcttct

SEQ ID NO: 32692 - DNA, 122 bp, Homo sapiens
aattgccaggctctcaaagttgctaaatataaccactaagaaaacagacttcccaaaagccgatatatgccaagtgtcttgtaggttgagactcttccgtgctataacacatgatgaatcac

SEQ ID NO: 32693 - DNA, 122 bp, Homo sapiens
ctgttcaaatggggagtgagcagtaaaattaaaaaggttggccaagaccctgggaaaatgcgaacagtgcgtgtcttttttgcatctgaactgaaatctgagaggttcctaggttctgcaca

SEQ ID NO: 32694 - DNA, 122 bp, Homo sapiens
aaggctgggactgcagataggaaccgttagccatgcagcctgggattagggaaggggtgacgccagcactccctgagctgcccagactggtgtctcagtaggtcctgtgccccccgcagtct

SEQ ID NO: 32695 - DNA, 122 bp, Homo sapiens
cctccccgcctcttgactgagcctctgcagccagacgactccggagggggacgagggaggcgcaacgtcacaggcgggagctgacaccacaatgctactgacactatcgctgggggaggcga

SEQ ID NO: 32696 - DNA, 122 bp, Homo sapiens
gatgacgtaattttcctgcgcctcggggcgagcagcggcgcgcaaggaaagatcgggttccgtttttcccgcggattctggtgcctgtggggccggtgacccaacaccatgaaggaaacgcc

SEQ ID NO: 32697 - DNA, 122 bp, Homo sapiens
aacttagaaacatgtttatatttcttagctactagggtagatctaccagctcaatttacacgttaagcctaggaagtggaaattcttaaccctggatatggatctgcccaaacgtctgtctt

SEQ ID NO: 32698 - DNA, 122 bp, Homo sapiens
atgtgtctgaggttgcttcccttccattagcgccatgccgctcgactcccatcatcggggcggttgcagaagacaggtggtcatttatattttattgtcaggggccttgtctttgcctactg

SEQ ID NO: 32699 - DNA, 122 bp, Homo sapiens
gccccaaacttaccgtccacttcctggtttcagaagcttccgttttgcctgactcgcgatcgatctcttcttgcaaggcctttcgcctcacctgagcaagaaggatgacagaagagggccgt

SEQ ID NO: 32700 - DNA, 122 bp, Homo sapiens
ctagacggggccagcccagcagcctgaagtccgcatttagaacttgatcccctcttataacgattaaattttagtaagtaaaataaaaatgcttcagaaagaaaaaaaagaaaggaagaaag

SEQ ID NO: 32701 - DNA, 122 bp, Homo sapiens
tctgcaggagctgaaatgcctctctgggcagctggatggctacagaggtgagcagggggccggggacgcccctccccgggcctggacgtgcctgaggcccgtctccctcgcaggccggccct

SEQ ID NO: 32702 - DNA, 122 bp, Homo sapiens
agtaccagcaggtgcacggacagagcccagggaaaaaattcagtgcaagaacaatggcgccgttataacgccaagggacaaggcccgagactagccactacttcactacatttgatgatggg

SEQ ID NO: 32703 - DNA, 122 bp, Homo sapiens
aaggagaagcgtccatcggaaaaatggcatattacaaattttgctttgggaagcaaagctcggttcagaccattgtcaaaggaggagagggggaggcggctcttaaagcagccgcggcccct

SEQ ID NO: 32704 - DNA, 122 bp, Homo sapiens
cttggggcgggacttccggcatttggatgggacgtaatttgggagcgacggttccgtccacgccggctctagggagggggcggtgttccgtggccgcctccctggcggcgctggggaaatga

SEQ ID NO: 32705 - DNA, 122 bp, Homo sapiens
tgaactctattacttaactgccttgtacctcagattcttcatctgcaaatttgggatactcgtaataatatttcacagaactgttctagggattaaatgaatacatacatgtaaagtgcttg

SEQ ID NO: 32706 - DNA, 122 bp, Homo sapiens
acgagggaaggaaggaaaggcgcggggagcacaaacttttacaggaaccaccagcccttccgaggagcacagcccggtgaatagaacacagttgcctgtgctgaaggctgaagctctctcca

SEQ ID NO: 32707 - DNA, 122 bp, Homo sapiens
gtgtcaaagggcagaggttggaggtcatgacccaccaacacacgccggttgaaacttgagcgcaagggacggttgagattcccggaggacacgcccctatcggccccgccccgtgcaccgcc

SEQ ID NO: 32708 - DNA, 122 bp, Homo sapiens
gtggcccggaatacagccagaggagtaaggcgactgggtgggaactgtgtgggaacccctcgcagcccagctctctgctaggcctgtgtatcacaatctgagctcgccttgtattcctacgt

SEQ ID NO: 32709 - DNA, 122 bp, Homo sapiens
gagacaaacgaggcgtgtgcgcgcgagtcgggggaacggggcactggggtggagtaggggcggaagggatcatacacaggggaggcactcgcacgccctagcctgtgccagtctcgggggac

SEQ ID NO: 32710 - DNA, 122 bp, Homo sapiens
cctccctcccgggtggggcagctggccgggtgggggctgccccccacctcctggacggggcggctgccgggcggagacgctcctcacttcccagacagggcagctgctgggcggaggggctc

SEQ ID NO: 32711 - DNA, 122 bp, Homo sapiens
aggaaagggaactccctgaccccttgctcttcctgagtgaggcaatgcctcaccctgcttcggctcgctgcacccactgtcctgcgccctctgtctggcactccctagtgagatgaacccgg

SEQ ID NO: 32712 - DNA, 122 bp, Homo sapiens
gctcgctccgaaggatcggcagcgagagggcggaaccggatccgtgagagtcgcggcccacgctccgagcgtcaccctgtcaccgcccagctgcgcatgagcgctgcaactcctgctgactg

SEQ ID NO: 32713 - DNA, 122 bp, Homo sapiens
tcaggtgattcggcctcctcggcctcccctcaaagtgctgggattacaggagtgagccaccgtgcccagccgaaataacttttatgaacattcatgaagttcagaggggaccaatttcctgc

SEQ ID NO: 32714 - DNA, 122 bp, Homo sapiens
ctcgaccatgccacggcgcctgaacttttatctccatttctcaggtgaggacctgaggctcgggtggccccgtcactttcctaggggcattgggcaagaggcagggactgtgcacagcccag

SEQ ID NO: 32715 - DNA, 122 bp, Homo sapiens
tcccgccgcacggagtcctgcgccttgaggctcaagcggcggcgtgcaaggcgtgtgaggcgcgtagagagccgcgcgcgccgtctgcgatgccccgggacggcgttcctgccgggaatacc

SEQ ID NO: 32716 - DNA, 122 bp, Homo sapiens
cgcagcatccaagaagttgcaataacgtggaaggatggggaacggcgcctccctggctagcgtgaaactcagccacagcacaaaattgaggctgttggccgtgagcggctctcaaagctgaa

SEQ ID NO: 32717 - DNA, 122 bp, Homo sapiens
cggccagccggtccttgcccaggccccccgggaacatgaccacgagctccaggccgtcgccgccaggataggcacaagcctggcacagcgctgacaagtagcccagcatggcgttccattgg
